United States Patent Application Publication US 2018/0305689 A1 - sequence listing, part 169

SEQ ID NO: 2495819 - RNA, 19 nt, Artificial Sequence
  Description of Artificial Sequence: Synthetic oligonucleotide
  Antisense strand to SEQ ID NO: 2495818
aauucgaauacauagucac

SEQ ID NO: 2495820 - RNA, 19 nt, Artificial Sequence
  Description of Artificial Sequence: Synthetic oligonucleotide
  Sense strand starting at position 2967 of SEQ ID NO: 1887776
gacuauguauucgaauuug

SEQ ID NO: 2495821 - RNA, 19 nt, Artificial Sequence
  Description of Artificial Sequence: Synthetic oligonucleotide
  Antisense strand to SEQ ID NO: 2495820
caaauucgaauacauaguc

SEQ ID NO: 2495822 - RNA, 19 nt, Artificial Sequence
  Description of Artificial Sequence: Synthetic oligonucleotide
  Sense strand starting at position 2977 of SEQ ID NO: 1887776
ucgaauuuguuuccuccau

SEQ ID NO: 2495823 - RNA, 19 nt, Artificial Sequence
  Description of Artificial Sequence: Synthetic oligonucleotide
  Antisense strand to SEQ ID NO: 2495822
auggaggaaacaaauucga

SEQ ID NO: 2495824 - RNA, 19 nt, Artificial Sequence
  Description of Artificial Sequence: Synthetic oligonucleotide
  Sense strand starting at position 2983 of SEQ ID NO: 1887776
uuguuuccuccauagagug

SEQ ID NO: 2495825 - RNA, 19 nt, Artificial Sequence
  Description of Artificial Sequence: Synthetic oligonucleotide
  Antisense strand to SEQ ID NO: 2495824
cacucuauggaggaaacaa

SEQ ID NO: 2495826 - RNA, 19 nt, Artificial Sequence
  Description of Artificial Sequence: Synthetic oligonucleotide
  Sense strand starting at position 3007 of SEQ ID NO: 1887776
aggauuggaucugacuaau

SEQ ID NO: 2495827 - RNA, 19 nt, Artificial Sequence
  Description of Artificial Sequence: Synthetic oligonucleotide
  Antisense strand to SEQ ID NO: 2495826
auuagucagauccaauccu

SEQ ID NO: 2495828 - RNA, 19 nt, Artificial Sequence
  Description of Artificial Sequence: Synthetic oligonucleotide
  Sense strand starting at position 3013 of SEQ ID NO: 1887776
ggaucugacuaaucucugu

SEQ ID NO: 2495829 - RNA, 19 nt, Artificial Sequence
  Description of Artificial Sequence: Synthetic oligonucleotide
  Antisense strand to SEQ ID NO: 2495828
acagagauuagucagaucc

SEQ ID NO: 2495830 - RNA, 19 nt, Artificial Sequence
  Description of Artificial Sequence: Synthetic oligonucleotide
  Sense strand starting at position 3164 of SEQ ID NO: 1887776
gagcuagcacucugacaga

SEQ ID NO: 2495831 - RNA, 19 nt, Artificial Sequence
  Description of Artificial Sequence: Synthetic oligonucleotide
  Antisense strand to SEQ ID NO: 2495830
ucugucagagugcuagcuc

SEQ ID NO: 2495832 - RNA, 19 nt, Artificial Sequence
  Description of Artificial Sequence: Synthetic oligonucleotide
  Sense strand starting at position 3284 of SEQ ID NO: 1887776
gcccgaucucggcauacua

SEQ ID NO: 2495833 - RNA, 19 nt, Artificial Sequence
  Description of Artificial Sequence: Synthetic oligonucleotide
  Antisense strand to SEQ ID NO: 2495832
uaguaugccgagaucgggc

SEQ ID NO: 2495834 - RNA, 19 nt, Artificial Sequence
  Description of Artificial Sequence: Synthetic oligonucleotide
  Sense strand starting at position 3723 of SEQ ID NO: 1887776
ggcugucuuuggucucgaa

SEQ ID NO: 2495835 - RNA, 19 nt, Artificial Sequence
  Description of Artificial Sequence: Synthetic oligonucleotide
  Antisense strand to SEQ ID NO: 2495834
uucgagaccaaagacagcc

SEQ ID NO: 2495836 - RNA, 19 nt, Artificial Sequence
  Description of Artificial Sequence: Synthetic oligonucleotide
  Sense strand starting at position 3853 of SEQ ID NO: 1887776
uuaggaaacugcugcucau

SEQ ID NO: 2495837 - RNA, 19 nt, Artificial Sequence
  Description of Artificial Sequence: Synthetic oligonucleotide
  Antisense strand to SEQ ID NO: 2495836
augagcagcaguuuccuaa

SEQ ID NO: 2495838 - RNA, 19 nt, Artificial Sequence
  Description of Artificial Sequence: Synthetic oligonucleotide
  Sense strand starting at position 3856 of SEQ ID NO: 1887776
ggaaacugcugcucauaaa

SEQ ID NO: 2495839 - RNA, 19 nt, Artificial Sequence
  Description of Artificial Sequence: Synthetic oligonucleotide
  Antisense strand to SEQ ID NO: 2495838
uuuaugagcagcaguuucc

SEQ ID NO: 2495840 - RNA, 19 nt, Artificial Sequence
  Description of Artificial Sequence: Synthetic oligonucleotide
  Sense strand starting at position 330 of SEQ ID NO: 1887777
auagauuauucuuaaggac

SEQ ID NO: 2495841 - RNA, 19 nt, Artificial Sequence
  Description of Artificial Sequence: Synthetic oligonucleotide
  Antisense strand to SEQ ID NO: 2495840
guccuuaagaauaaucuau

SEQ ID NO: 2495842 - RNA, 19 nt, Artificial Sequence
  Description of Artificial Sequence: Synthetic oligonucleotide
  Sense strand starting at position 373 of SEQ ID NO: 1887777
ggaucagacccguguaguu

SEQ ID NO: 2495843 - RNA, 19 nt, Artificial Sequence
  Description of Artificial Sequence: Synthetic oligonucleotide
  Antisense strand to SEQ ID NO: 2495842
aacuacacgggucugaucc

SEQ ID NO: 2495844 - RNA, 19 nt, Artificial Sequence
  Description of Artificial Sequence: Synthetic oligonucleotide
  Sense strand starting at position 375 of SEQ ID NO: 1887777
aucagacccguguaguuua

SEQ ID NO: 2495845 - RNA, 19 nt, Artificial Sequence
  Description of Artificial Sequence: Synthetic oligonucleotide
  Antisense strand to SEQ ID NO: 2495844
uaaacuacacgggucugau

SEQ ID NO: 2495846 - RNA, 19 nt, Artificial Sequence
  Description of Artificial Sequence: Synthetic oligonucleotide
  Sense strand starting at position 398 of SEQ ID NO: 1887777
gaugcacuguugucuaaua

SEQ ID NO: 2495847 - RNA, 19 nt, Artificial Sequence
  Description of Artificial Sequence: Synthetic oligonucleotide
  Antisense strand to SEQ ID NO: 2495846
uauuagacaacagugcauc

SEQ ID NO: 2495848 - RNA, 19 nt, Artificial Sequence
  Description of Artificial Sequence: Synthetic oligonucleotide
  Sense strand starting at position 517 of SEQ ID NO: 1887777
cugcguugucuuuaugaaa

SEQ ID NO: 2495849 - RNA, 19 nt, Artificial Sequence
  Description of Artificial Sequence: Synthetic oligonucleotide
  Antisense strand to SEQ ID NO: 2495848
uuucauaaagacaacgcag

SEQ ID NO: 2495850 - RNA, 19 nt, Artificial Sequence
  Description of Artificial Sequence: Synthetic oligonucleotide
  Sense strand starting at position 654 of SEQ ID NO: 1887777
aagguuaaguaucuccgua

SEQ ID NO: 2495851 - RNA, 19 nt, Artificial Sequence
  Description of Artificial Sequence: Synthetic oligonucleotide
  Antisense strand to SEQ ID NO: 2495850
uacggagauacuuaaccuu

SEQ ID NO: 2495852 - RNA, 19 nt, Artificial Sequence
  Description of Artificial Sequence: Synthetic oligonucleotide
  Sense strand starting at position 659 of SEQ ID NO: 1887777
uaaguaucuccguagguag

SEQ ID NO: 2495853 - RNA, 19 nt, Artificial Sequence
  Description of Artificial Sequence: Synthetic oligonucleotide
  Antisense strand to SEQ ID NO: 2495852
cuaccuacggagauacuua

SEQ ID NO: 2495854 - RNA, 19 nt, Artificial Sequence
  Description of Artificial Sequence: Synthetic oligonucleotide
  Sense strand starting at position 739 of SEQ ID NO: 1887777
agaguaucauacuuugucu

SEQ ID NO: 2495855 - RNA, 19 nt, Artificial Sequence
  Description of Artificial Sequence: Synthetic oligonucleotide
  Antisense strand to SEQ ID NO: 2495854
agacaaaguaugauacucu

SEQ ID NO: 2495856 - RNA, 19 nt, Artificial Sequence
  Description of Artificial Sequence: Synthetic oligonucleotide
  Sense strand starting at position 941 of SEQ ID NO: 1887777
aguuccugggcucaugaga

SEQ ID NO: 2495857 - RNA, 19 nt, Artificial Sequence
  Description of Artificial Sequence: Synthetic oligonucleotide
  Antisense strand to SEQ ID NO: 2495856
ucucaugagcccaggaacu

SEQ ID NO: 2495858 - RNA, 19 nt, Artificial Sequence
  Description of Artificial Sequence: Synthetic oligonucleotide
  Sense strand starting at position 1058 of SEQ ID NO: 1887777
gcgugagaugaauacguga

SEQ ID NO: 2495859 - RNA, 19 nt, Artificial Sequence
  Description of Artificial Sequence: Synthetic oligonucleotide
  Antisense strand to SEQ ID NO: 2495858
ucacguauucaucucacgc

SEQ ID NO: 2495860 - RNA, 19 nt, Artificial Sequence
  Description of Artificial Sequence: Synthetic oligonucleotide
  Sense strand starting at position 1060 of SEQ ID NO: 1887777
gugagaugaauacgugauu

SEQ ID NO: 2495861 - RNA, 19 nt, Artificial Sequence
  Description of Artificial Sequence: Synthetic oligonucleotide
  Antisense strand to SEQ ID NO: 2495860
aaucacguauucaucucac

SEQ ID NO: 2495862 - RNA, 19 nt, Artificial Sequence
  Description of Artificial Sequence: Synthetic oligonucleotide
  Sense strand starting at position 1065 of SEQ ID NO: 1887777
augaauacgugauugauua

SEQ ID NO: 2495863 - RNA, 19 nt, Artificial Sequence
  Description of Artificial Sequence: Synthetic oligonucleotide
  Antisense strand to SEQ ID NO: 2495862
uaaucaaucacguauucau

SEQ ID NO: 2495864 - RNA, 19 nt, Artificial Sequence
  Description of Artificial Sequence: Synthetic oligonucleotide
  Sense strand starting at position 1066 of SEQ ID NO: 1887777
ugaauacgugauugauuau

SEQ ID NO: 2495865 - RNA, 19 nt, Artificial Sequence
  Description of Artificial Sequence: Synthetic oligonucleotide
  Antisense strand to SEQ ID NO: 2495864
auaaucaaucacguauuca

SEQ ID NO: 2495866 - RNA, 19 nt, Artificial Sequence
  Description of Artificial Sequence: Synthetic oligonucleotide
  Sense strand starting at position 1379 of SEQ ID NO: 1887777
cuuuaaugucauugaaagc

SEQ ID NO: 2495867 - RNA, 19 nt, Artificial Sequence
  Description of Artificial Sequence: Synthetic oligonucleotide
  Antisense strand to SEQ ID NO: 2495866
gcuuucaaugacauuaaag

SEQ ID NO: 2495868 - RNA, 19 nt, Artificial Sequence
  Description of Artificial Sequence: Synthetic oligonucleotide
  Sense strand starting at position 1418 of SEQ ID NO: 1887777
uuuguaaagucuuccacca

SEQ ID NO: 2495869 - RNA, 19 nt, Artificial Sequence
  Description of Artificial Sequence: Synthetic oligonucleotide
  Antisense strand to SEQ ID NO: 2495868
ugguggaagacuuuacaaa

SEQ ID NO: 2495870 - RNA, 19 nt, Artificial Sequence
  Description of Artificial Sequence: Synthetic oligonucleotide
  Sense strand starting at position 1450 of SEQ ID NO: 1887777
gacucagacuaugauuaga

SEQ ID NO: 2495871 - RNA, 19 nt, Artificial Sequence
  Description of Artificial Sequence: Synthetic oligonucleotide
  Antisense strand to SEQ ID NO: 2495870
ucuaaucauagucugaguc

SEQ ID NO: 2495872 - RNA, 19 nt, Artificial Sequence
  Description of Artificial Sequence: Synthetic oligonucleotide
  Sense strand starting at position 1452 of SEQ ID NO: 1887777
cucagacuaugauuagagu

SEQ ID NO: 2495873 - RNA, 19 nt, Artificial Sequence
  Description of Artificial Sequence: Synthetic oligonucleotide
  Antisense strand to SEQ ID NO: 2495872
acucuaaucauagucugag

SEQ ID NO: 2495874 - RNA, 19 nt, Artificial Sequence
  Description of Artificial Sequence: Synthetic oligonucleotide
  Sense strand starting at position 1486 of SEQ ID NO: 1887777
uggcaauauucuucuagcu

SEQ ID NO: 2495875 - RNA, 19 nt, Artificial Sequence
  Description of Artificial Sequence: Synthetic oligonucleotide
  Antisense strand to SEQ ID NO: 2495874
agcuagaagaauauugcca

SEQ ID NO: 2495876 - RNA, 19 nt, Artificial Sequence
  Description of Artificial Sequence: Synthetic oligonucleotide
  Sense strand starting at position 1505 of SEQ ID NO: 1887777
gggugucgugugucacauu

SEQ ID NO: 2495877 - RNA, 19 nt, Artificial Sequence
  Description of Artificial Sequence: Synthetic oligonucleotide
  Antisense strand to SEQ ID NO: 2495876
aaugugacacacgacaccc

SEQ ID NO: 2495878 - RNA, 19 nt, Artificial Sequence
  Description of Artificial Sequence: Synthetic oligonucleotide
  Sense strand starting at position 2054 of SEQ ID NO: 1887777
ugcaguuuacaggacuuua

SEQ ID NO: 2495879 - RNA, 19 nt, Artificial Sequence
  Description of Artificial Sequence: Synthetic oligonucleotide
  Antisense strand to SEQ ID NO: 2495878
uaaaguccuguaaacugca

SEQ ID NO: 2495880 - RNA, 19 nt, Artificial Sequence
  Description of Artificial Sequence: Synthetic oligonucleotide
  Sense strand starting at position 2059 of SEQ ID NO: 1887777
uuuacaggacuuuauguua

SEQ ID NO: 2495881 - RNA, 19 nt, Artificial Sequence
  Description of Artificial Sequence: Synthetic oligonucleotide
  Antisense strand to SEQ ID NO: 2495880
uaacauaaaguccuguaaa

SEQ ID NO: 2495882 - RNA, 19 nt, Artificial Sequence
  Description of Artificial Sequence: Synthetic oligonucleotide
  Sense strand starting at position 2062 of SEQ ID NO: 1887777
acaggacuuuauguuauaa

SEQ ID NO: 2495883 - RNA, 19 nt, Artificial Sequence
  Description of Artificial Sequence: Synthetic oligonucleotide
  Antisense strand to SEQ ID NO: 2495882
uuauaacauaaaguccugu

SEQ ID NO: 2495884 - RNA, 19 nt, Artificial Sequence
  Description of Artificial Sequence: Synthetic oligonucleotide
  Sense strand starting at position 2486 of SEQ ID NO: 1887777
acaacaugaggcugacauu

SEQ ID NO: 2495885 - RNA, 19 nt, Artificial Sequence
  Description of Artificial Sequence: Synthetic oligonucleotide
  Antisense strand to SEQ ID NO: 2495884
aaugucagccucauguugu

SEQ ID NO: 2495886 - RNA, 19 nt, Artificial Sequence
  Description of Artificial Sequence: Synthetic oligonucleotide
  Sense strand starting at position 2512 of SEQ ID NO: 1887777
gccuauauccuugagugcu

SEQ ID NO: 2495887 - RNA, 19 nt, Artificial Sequence
  Description of Artificial Sequence: Synthetic oligonucleotide
  Antisense strand to SEQ ID NO: 2495886
agcacucaaggauauaggc

SEQ ID NO: 2495888 - RNA, 19 nt, Artificial Sequence
  Description of Artificial Sequence: Synthetic oligonucleotide
  Sense strand starting at position 2560 of SEQ ID NO: 1887777
ggaagcuaauuugacacua

SEQ ID NO: 2495889 - RNA, 19 nt, Artificial Sequence
  Description of Artificial Sequence: Synthetic oligonucleotide
  Antisense strand to SEQ ID NO: 2495888
uagugucaaauuagcuucc

SEQ ID NO: 2495890 - RNA, 19 nt, Artificial Sequence
  Description of Artificial Sequence: Synthetic oligonucleotide
  Sense strand starting at position 2588 of SEQ ID NO: 1887777
aguccuuugaccuggaguu

SEQ ID NO: 2495891 - RNA, 19 nt, Artificial Sequence
  Description of Artificial Sequence: Synthetic oligonucleotide
  Antisense strand to SEQ ID NO: 2495890
aacuccaggucaaaggacu

SEQ ID NO: 2495892 - RNA, 19 nt, Artificial Sequence
  Description of Artificial Sequence: Synthetic oligonucleotide
  Sense strand starting at position 2589 of SEQ ID NO: 1887777
guccuuugaccuggaguuu

SEQ ID NO: 2495893 - RNA, 19 nt, Artificial Sequence
  Description of Artificial Sequence: Synthetic oligonucleotide
  Antisense strand to SEQ ID NO: 2495892
aaacuccaggucaaaggac

SEQ ID NO: 2495894 - RNA, 19 nt, Artificial Sequence
  Description of Artificial Sequence: Synthetic oligonucleotide
  Sense strand starting at position 2667 of SEQ ID NO: 1887777
aaaggaaguugugauauuu

SEQ ID NO: 2495895 - RNA, 19 nt, Artificial Sequence
  Description of Artificial Sequence: Synthetic oligonucleotide
  Antisense strand to SEQ ID NO: 2495894
aaauaucacaacuuccuuu

SEQ ID NO: 2495896 - RNA, 19 nt, Artificial Sequence
  Description of Artificial Sequence: Synthetic oligonucleotide
  Sense strand starting at position 2675 of SEQ ID NO: 1887777
uugugauauuuggaaauug

SEQ ID NO: 2495897 - RNA, 19 nt, Artificial Sequence
  Description of Artificial Sequence: Synthetic oligonucleotide
  Antisense strand to SEQ ID NO: 2495896
caauuuccaaauaucacaa

SEQ ID NO: 2495898 - RNA, 19 nt, Artificial Sequence
  Description of Artificial Sequence: Synthetic oligonucleotide
  Sense strand starting at position 2685 of SEQ ID NO: 1887777
uggaaauugugggcuuuga

SEQ ID NO: 2495899 - RNA, 19 nt, Artificial Sequence
  Description of Artificial Sequence: Synthetic oligonucleotide
  Antisense strand to SEQ ID NO: 2495898
ucaaagcccacaauuucca

SEQ ID NO: 2495900 - RNA, 19 nt, Artificial Sequence
  Description of Artificial Sequence: Synthetic oligonucleotide
  Sense strand starting at position 2702 of SEQ ID NO: 1887777
gaguaaagaggcugauauu

SEQ ID NO: 2495901 - RNA, 19 nt, Artificial Sequence
  Description of Artificial Sequence: Synthetic oligonucleotide
  Antisense strand to SEQ ID NO: 2495900
aauaucagccucuuuacuc

SEQ ID NO: 2495902 - RNA, 19 nt, Artificial Sequence
  Description of Artificial Sequence: Synthetic oligonucleotide
  Sense strand starting at position 3054 of SEQ ID NO: 1887777
gaaugaucucuugagccug

SEQ ID NO: 2495903 - RNA, 19 nt, Artificial Sequence
  Description of Artificial Sequence: Synthetic oligonucleotide
  Antisense strand to SEQ ID NO: 2495902
caggcucaagagaucauuc

SEQ ID NO: 2495904 - RNA, 19 nt, Artificial Sequence
  Description of Artificial Sequence: Synthetic oligonucleotide
  Sense strand starting at position 3189 of SEQ ID NO: 1887777
agcagugcuguggaacuaa

SEQ ID NO: 2495905 - RNA, 19 nt, Artificial Sequence
  Description of Artificial Sequence: Synthetic oligonucleotide
  Antisense strand to SEQ ID NO: 2495904
uuaguuccacagcacugcu

SEQ ID NO: 2495906 - RNA, 19 nt, Artificial Sequence
  Description of Artificial Sequence: Synthetic oligonucleotide
  Sense strand starting at position 3207 of SEQ ID NO: 1887777
acaucuuaggauuggugaa

SEQ ID NO: 2495907 - RNA, 19 nt, Artificial Sequence
  Description of Artificial Sequence: Synthetic oligonucleotide
  Antisense strand to SEQ ID NO: 2495906
uucaccaauccuaagaugu

SEQ ID NO: 2495908 - RNA, 19 nt, Artificial Sequence
  Description of Artificial Sequence: Synthetic oligonucleotide
  Sense strand starting at position 3232 of SEQ ID NO: 1887777
ggacauagcacuuguggaa

SEQ ID NO: 2495909 - RNA, 19 nt, Artificial Sequence
  Description of Artificial Sequence: Synthetic oligonucleotide
  Antisense strand to SEQ ID NO: 2495908
uuccacaagugcuaugucc

SEQ ID NO: 2495910 - RNA, 19 nt, Artificial Sequence
  Description of Artificial Sequence: Synthetic oligonucleotide
  Sense strand starting at position 3413 of SEQ ID NO: 1887777
ggaauugacgaguggcaug

SEQ ID NO: 2495911 - RNA, 19 nt, Artificial Sequence
  Description of Artificial Sequence: Synthetic oligonucleotide
  Antisense strand to SEQ ID NO: 2495910
caugccacucgucaauucc

SEQ ID NO: 2495912 - RNA, 19 nt, Artificial Sequence
  Description of Artificial Sequence: Synthetic oligonucleotide
  Sense strand starting at position 3458 of SEQ ID NO: 1887777
ccagauugcuuuccauagu

SEQ ID NO: 2495913 - RNA, 19 nt, Artificial Sequence
  Description of Artificial Sequence: Synthetic oligonucleotide
  Antisense strand to SEQ ID NO: 2495912
acuauggaaagcaaucugg

SEQ ID NO: 2495914 - RNA, 19 nt, Artificial Sequence
  Description of Artificial Sequence: Synthetic oligonucleotide
  Sense strand starting at position 3461 of SEQ ID NO: 1887777
gauugcuuuccauaguggu

SEQ ID NO: 2495915 - RNA, 19 nt, Artificial Sequence
  Description of Artificial Sequence: Synthetic oligonucleotide
  Antisense strand to SEQ ID NO: 2495914
accacuauggaaagcaauc

SEQ ID NO: 2495916 - RNA, 19 nt, Artificial Sequence
  Description of Artificial Sequence: Synthetic oligonucleotide
  Sense strand starting at position 3840 of SEQ ID NO: 1887777
uggcacagucuuggcuaaa

SEQ ID NO: 2495917 - RNA, 19 nt, Artificial Sequence
  Description of Artificial Sequence: Synthetic oligonucleotide
  Antisense strand to SEQ ID NO: 2495916
uuuagccaagacugugcca

SEQ ID NO: 2495918 - RNA, 19 nt, Artificial Sequence
  Description of Artificial Sequence: Synthetic oligonucleotide
  Sense strand starting at position 3841 of SEQ ID NO: 1887777
ggcacagucuuggcuaaau

SEQ ID NO: 2495919 - RNA, 19 nt, Artificial Sequence
  Description of Artificial Sequence: Synthetic oligonucleotide
  Antisense strand to SEQ ID NO: 2495918
auuuagccaagacugugcc

SEQ ID NO: 2495920 - RNA, 19 nt, Artificial Sequence
  Description of Artificial Sequence: Synthetic oligonucleotide
  Sense strand starting at position 352 of SEQ ID NO: 1887778
ggccaccucugggaaaguu

SEQ ID NO: 2495921 - RNA, 19 nt, Artificial Sequence
  Description of Artificial Sequence: Synthetic oligonucleotide
  Antisense strand to SEQ ID NO: 2495920
aacuuucccagagguggcc

SEQ ID NO: 2495922 - RNA, 19 nt, Artificial Sequence
  Description of Artificial Sequence: Synthetic oligonucleotide
  Sense strand starting at position 417 of SEQ ID NO: 1887778
gugggaagucauuacagug

SEQ ID NO: 2495923 - RNA, 19 nt, Artificial Sequence
  Description of Artificial Sequence: Synthetic oligonucleotide
  Antisense strand to SEQ ID NO: 2495922
cacuguaaugacuucccac

SEQ ID NO: 2495924 - RNA, 19 nt, Artificial Sequence
  Description of Artificial Sequence: Synthetic oligonucleotide
  Sense strand starting at position 482 of SEQ ID NO: 1887778
cagccaaugccauagguaa

SEQ ID NO: 2495925 - RNA, 19 nt, Artificial Sequence
  Description of Artificial Sequence: Synthetic oligonucleotide
  Antisense strand to SEQ ID NO: 2495924
uuaccuauggcauuggcug

SEQ ID NO: 2495926 - RNA, 19 nt, Artificial Sequence
  Description of Artificial Sequence: Synthetic oligonucleotide
  Sense strand starting at position 529 of SEQ ID NO: 1887778
uuacaucucuuccagaugu

SEQ ID NO: 2495927 - RNA, 19 nt, Artificial Sequence
  Description of Artificial Sequence: Synthetic oligonucleotide
  Antisense strand to SEQ ID NO: 2495926
acaucuggaagagauguaa

SEQ ID NO: 2495928 - RNA, 19 nt, Artificial Sequence
  Description of Artificial Sequence: Synthetic oligonucleotide
  Sense strand starting at position 531 of SEQ ID NO: 1887778
acaucucuuccagauguga

SEQ ID NO: 2495929 - RNA, 19 nt, Artificial Sequence
  Description of Artificial Sequence: Synthetic oligonucleotide
  Antisense strand to SEQ ID NO: 2495928
ucacaucuggaagagaugu

SEQ ID NO: 2495930 - RNA, 19 nt, Artificial Sequence
  Description of Artificial Sequence: Synthetic oligonucleotide
  Sense strand starting at position 640 of SEQ ID NO: 1887778
ggaugccuauaagaagaaa

SEQ ID NO: 2495931 - RNA, 19 nt, Artificial Sequence
  Description of Artificial Sequence: Synthetic oligonucleotide
  Antisense strand to SEQ ID NO: 2495930
uuucuucuuauaggcaucc

SEQ ID NO: 2495932 - RNA, 19 nt, Artificial Sequence
  Description of Artificial Sequence: Synthetic oligonucleotide
  Sense strand starting at position 680 of SEQ ID NO: 1887778
ucgggccuauuucucaaua

SEQ ID NO: 2495933 - RNA, 19 nt, Artificial Sequence
  Description of Artificial Sequence: Synthetic oligonucleotide
  Antisense strand to SEQ ID NO: 2495932
uauugagaaauaggcccga

SEQ ID NO: 2495934 - RNA, 19 nt, Artificial Sequence
  Description of Artificial Sequence: Synthetic oligonucleotide
  Sense strand starting at position 918 of SEQ ID NO: 1887778
ggguaaagcucucagccua

SEQ ID NO: 2495935 - RNA, 19 nt, Artificial Sequence
  Description of Artificial Sequence: Synthetic oligonucleotide
  Antisense strand to SEQ ID NO: 2495934
uaggcugagagcuuuaccc

SEQ ID NO: 2495936 - RNA, 19 nt, Artificial Sequence
  Description of Artificial Sequence: Synthetic oligonucleotide
  Sense strand starting at position 1077 of SEQ ID NO: 1887778
gugcacggcgccuauuaau

SEQ ID NO: 2495937 - RNA, 19 nt, Artificial Sequence
  Description of Artificial Sequence: Synthetic oligonucleotide
  Antisense strand to SEQ ID NO: 2495936
auuaauaggcgccgugcac

SEQ ID NO: 2495938 - RNA, 19 nt, Artificial Sequence
  Description of Artificial Sequence: Synthetic oligonucleotide
  Sense strand starting at position 1083 of SEQ ID NO: 1887778
ggcgccuauuaaugggaaa

SEQ ID NO: 2495939 - RNA, 19 nt, Artificial Sequence
  Description of Artificial Sequence: Synthetic oligonucleotide
  Antisense strand to SEQ ID NO: 2495938
uuucccauuaauaggcgcc

SEQ ID NO: 2495940 - RNA, 19 nt, Artificial Sequence
  Description of Artificial Sequence: Synthetic oligonucleotide
  Sense strand starting at position 2005 of SEQ ID NO: 1887778
ggcggcccgucugagaaua

SEQ ID NO: 2495941 - RNA, 19 nt, Artificial Sequence
  Description of Artificial Sequence: Synthetic oligonucleotide
  Antisense strand to SEQ ID NO: 2495940
uauucucagacgggccgcc

SEQ ID NO: 2495942 - RNA, 19 nt, Artificial Sequence
  Description of Artificial Sequence: Synthetic oligonucleotide
  Sense strand starting at position 2017 of SEQ ID NO: 1887778
gagaauaccgucuaguaau

SEQ ID NO: 2495943 - RNA, 19 nt, Artificial Sequence
  Description of Artificial Sequence: Synthetic oligonucleotide
  Antisense strand to SEQ ID NO: 2495942
auuacuagacgguauucuc

SEQ ID NO: 2495944 - RNA, 19 nt, Artificial Sequence
  Description of Artificial Sequence: Synthetic oligonucleotide
  Sense strand starting at position 2025 of SEQ ID NO: 1887778
cgucuaguaauuggcuaga

SEQ ID NO: 2495945 - RNA, 19 nt, Artificial Sequence
  Description of Artificial Sequence: Synthetic oligonucleotide
  Antisense strand to SEQ ID NO: 2495944
ucuagccaauuacuagacg

SEQ ID NO: 2495946 - RNA, 19 nt, Artificial Sequence
  Description of Artificial Sequence: Synthetic oligonucleotide
  Sense strand starting at position 2027 of SEQ ID NO: 1887778
ucuaguaauuggcuagaga

SEQ ID NO: 2495947 - RNA, 19 nt, Artificial Sequence
  Description of Artificial Sequence: Synthetic oligonucleotide
  Antisense strand to SEQ ID NO: 2495946
ucucuagccaauuacuaga

SEQ ID NO: 2495948 - RNA, 19 nt, Artificial Sequence
  Description of Artificial Sequence: Synthetic oligonucleotide
  Sense strand starting at position 2279 of SEQ ID NO: 1887778
ccuccuaaucgcugccauu

SEQ ID NO: 2495949 - RNA, 19 nt, Artificial Sequence
  Description of Artificial Sequence: Synthetic oligonucleotide
  Antisense strand to SEQ ID NO: 2495948
aauggcagcgauuaggagg

SEQ ID NO: 2495950 - RNA, 19 nt, Artificial Sequence
  Description of Artificial Sequence: Synthetic oligonucleotide
  Sense strand starting at position 2292 of SEQ ID NO: 1887778
gccauugguuuauccggaa

SEQ ID NO: 2495951 - RNA, 19 nt, Artificial Sequence
  Description of Artificial Sequence: Synthetic oligonucleotide
  Antisense strand to SEQ ID NO: 2495950
uuccggauaaaccaauggc

SEQ ID NO: 2495952 - RNA, 19 nt, Artificial Sequence
  Description of Artificial Sequence: Synthetic oligonucleotide
  Sense strand starting at position 2296 of SEQ ID NO: 1887778
uugguuuauccggaagcga

SEQ ID NO: 2495953 - RNA, 19 nt, Artificial Sequence
  Description of Artificial Sequence: Synthetic oligonucleotide
  Antisense strand to SEQ ID NO: 2495952
ucgcuuccggauaaaccaa

SEQ ID NO: 2495954 - RNA, 19 nt, Artificial Sequence
  Description of Artificial Sequence: Synthetic oligonucleotide
  Sense strand starting at position 2490 of SEQ ID NO: 1887778
aagggagcuugugcucauu

SEQ ID NO: 2495955 - RNA, 19 nt, Artificial Sequence
  Description of Artificial Sequence: Synthetic oligonucleotide
  Antisense strand to SEQ ID NO: 2495954
aaugagcacaagcucccuu

SEQ ID NO: 2495956 - RNA, 19 nt, Artificial Sequence
  Description of Artificial Sequence: Synthetic oligonucleotide
  Sense strand starting at position 2585 of SEQ ID NO: 1887778
auaggaguccgucgucaac

SEQ ID NO: 2495957 - RNA, 19 nt, Artificial Sequence
  Description of Artificial Sequence: Synthetic oligonucleotide
  Antisense strand to SEQ ID NO: 2495956
guugacgacggacuccuau

SEQ ID NO: 2495958 - RNA, 19 nt, Artificial Sequence
  Description of Artificial Sequence: Synthetic oligonucleotide
  Sense strand starting at position 2591 of SEQ ID NO: 1887778
guccgucgucaacacauua

SEQ ID NO: 2495959 - RNA, 19 nt, Artificial Sequence
  Description of Artificial Sequence: Synthetic oligonucleotide
  Antisense strand to SEQ ID NO: 2495958
uaauguguugacgacggac

SEQ ID NO: 2495960 - RNA, 19 nt, Artificial Sequence
  Description of Artificial Sequence: Synthetic oligonucleotide
  Sense strand starting at position 2737 of SEQ ID NO: 1887778
aaacgugaaucagagcaca

SEQ ID NO: 2495961 - RNA, 19 nt, Artificial Sequence
  Description of Artificial Sequence: Synthetic oligonucleotide
  Antisense strand to SEQ ID NO: 2495960
ugugcucugauucacguuu

SEQ ID NO: 2495962 - RNA, 19 nt, Artificial Sequence
  Description of Artificial Sequence: Synthetic oligonucleotide
  Sense strand starting at position 2774 of SEQ ID NO: 1887778
ccgggaagcuuuccuugau

SEQ ID NO: 2495963 - RNA, 19 nt, Artificial Sequence
  Description of Artificial Sequence: Synthetic oligonucleotide
  Antisense strand to SEQ ID NO: 2495962
aucaaggaaagcuucccgg

SEQ ID NO: 2495964 - RNA, 19 nt, Artificial Sequence
  Description of Artificial Sequence: Synthetic oligonucleotide
  Sense strand starting at position 2775 of SEQ ID NO: 1887778
cgggaagcuuuccuugauu

SEQ ID NO: 2495965 - RNA, 19 nt, Artificial Sequence
  Description of Artificial Sequence: Synthetic oligonucleotide
  Antisense strand to SEQ ID NO: 2495964
aaucaaggaaagcuucccg

SEQ ID NO: 2495966 - RNA, 19 nt, Artificial Sequence
  Description of Artificial Sequence: Synthetic oligonucleotide
  Sense strand starting at position 2907 of SEQ ID NO: 1887778
ccggaaugagcucgcucuu

SEQ ID NO: 2495967 - RNA, 19 nt, Artificial Sequence
  Description of Artificial Sequence: Synthetic oligonucleotide
  Antisense strand to SEQ ID NO: 2495966
aagagcgagcucauuccgg

SEQ ID NO: 2495968 - RNA, 19 nt, Artificial Sequence
  Description of Artificial Sequence: Synthetic oligonucleotide
  Sense strand starting at position 2970 of SEQ ID NO: 1887778
uggcaaacgccugagacuu

SEQ ID NO: 2495969 - RNA, 19 nt, Artificial Sequence
  Description of Artificial Sequence: Synthetic oligonucleotide
  Antisense strand to SEQ ID NO: 2495968
aagucucaggcguuugcca

SEQ ID NO: 2495970 - RNA, 19 nt, Artificial Sequence
  Description of Artificial Sequence: Synthetic oligonucleotide
  Sense strand starting at position 3015 of SEQ ID NO: 1887778
auggcucacggguguaauu

SEQ ID NO: 2495971 - RNA, 19 nt, Artificial Sequence
  Description of Artificial Sequence: Synthetic oligonucleotide
  Antisense strand to SEQ ID NO: 2495970
aauuacacccgugagccau

SEQ ID NO: 2495972 - RNA, 19 nt, Artificial Sequence
  Description of Artificial Sequence: Synthetic oligonucleotide
  Sense strand starting at position 3830 of SEQ ID NO: 1887778
ugcagugagccaggaugaa

SEQ ID NO: 2495973 - RNA, 19 nt, Artificial Sequence
  Description of Artificial Sequence: Synthetic oligonucleotide
  Antisense strand to SEQ ID NO: 2495972
uucauccuggcucacugca

SEQ ID NO: 2495974 - RNA, 19 nt, Artificial Sequence
  Description of Artificial Sequence: Synthetic oligonucleotide
  Sense strand starting at position 3877 of SEQ ID NO: 1887778
ccgagacucuaacuuuaaa

SEQ ID NO: 2495975 - RNA, 19 nt, Artificial Sequence
  Description of Artificial Sequence: Synthetic oligonucleotide
  Antisense strand to SEQ ID NO: 2495974
uuuaaaguuagagucucgg

SEQ ID NO: 2495976 - RNA, 19 nt, Artificial Sequence
  Description of Artificial Sequence: Synthetic oligonucleotide
  Sense strand starting at position 3943 of SEQ ID NO: 1887778
ggacauuuguuuccagugu

SEQ ID NO: 2495977 - RNA, 19 nt, Artificial Sequence
  Description of Artificial Sequence: Synthetic oligonucleotide
  Antisense strand to SEQ ID NO: 2495976
acacuggaaacaaaugucc

SEQ ID NO: 2495978 - RNA, 19 nt, Artificial Sequence
  Description of Artificial Sequence: Synthetic oligonucleotide
  Sense strand starting at position 3944 of SEQ ID NO: 1887778
gacauuuguuuccaguguu

SEQ ID NO: 2495979 - RNA, 19 nt, Artificial Sequence
  Description of Artificial Sequence: Synthetic oligonucleotide
  Antisense strand to SEQ ID NO: 2495978
aacacuggaaacaaauguc

SEQ ID NO: 2495980 - RNA, 19 nt, Artificial Sequence
  Description of Artificial Sequence: Synthetic oligonucleotide
  Sense strand starting at position 3947 of SEQ ID NO: 1887778
auuuguuuccaguguuuga

SEQ ID NO: 2495981 - RNA, 19 nt, Artificial Sequence
  Description of Artificial Sequence: Synthetic oligonucleotide
  Antisense strand to SEQ ID NO: 2495980
ucaaacacuggaaacaaau

SEQ ID NO: 2495982 - RNA, 19 nt, Artificial Sequence
  Description of Artificial Sequence: Synthetic oligonucleotide
  Sense strand starting at position 3954 of SEQ ID NO: 1887778
uccaguguuugagcugaag

SEQ ID NO: 2495983 - RNA, 19 nt, Artificial Sequence
  Description of Artificial Sequence: Synthetic oligonucleotide
  Antisense strand to SEQ ID NO: 2495982
cuucagcucaaacacugga

SEQ ID NO: 2495984 - RNA, 19 nt, Artificial Sequence
  Description of Artificial Sequence: Synthetic oligonucleotide
  Sense strand starting at position 3956 of SEQ ID NO: 1887778
caguguuugagcugaagca

SEQ ID NO: 2495985 - RNA, 19 nt, Artificial Sequence
  Description of Artificial Sequence: Synthetic oligonucleotide
  Antisense strand to SEQ ID NO: 2495984
ugcuucagcucaaacacug

SEQ ID NO: 2495986 - RNA, 19 nt, Artificial Sequence
  Description of Artificial Sequence: Synthetic oligonucleotide
  Sense strand starting at position 3957 of SEQ ID NO: 1887778
aguguuugagcugaagcaa

SEQ ID NO: 2495987 - RNA, 19 nt, Artificial Sequence
  Description of Artificial Sequence: Synthetic oligonucleotide
  Antisense strand to SEQ ID NO: 2495986
uugcuucagcucaaacacu

SEQ ID NO: 2495988 - RNA, 19 nt, Artificial Sequence
  Description of Artificial Sequence: Synthetic oligonucleotide
  Sense strand starting at position 305 of SEQ ID NO: 1887779
cccggaagugucuggagaa

SEQ ID NO: 2495989 - RNA, 19 nt, Artificial Sequence
  Description of Artificial Sequence: Synthetic oligonucleotide
  Antisense strand to SEQ ID NO: 2495988
uucuccagacacuuccggg

SEQ ID NO: 2495990 - RNA, 19 nt, Artificial Sequence
  Description of Artificial Sequence: Synthetic oligonucleotide
  Sense strand starting at position 306 of SEQ ID NO: 1887779
ccggaagugucuggagaaa

SEQ ID NO: 2495991 - RNA, 19 nt, Artificial Sequence
  Description of Artificial Sequence: Synthetic oligonucleotide
  Antisense strand to SEQ ID NO: 2495990
uuucuccagacacuuccgg

SEQ ID NO: 2495992 - RNA, 19 nt, Artificial Sequence
  Description of Artificial Sequence: Synthetic oligonucleotide
  Sense strand starting at position 470 of SEQ ID NO: 1887779
acaguuuccuccgcugaga

SEQ ID NO: 2495993 - RNA, 19 nt, Artificial Sequence
  Description of Artificial Sequence: Synthetic oligonucleotide
  Antisense strand to SEQ ID NO: 2495992
ucucagcggaggaaacugu

SEQ ID NO: 2495994 - RNA, 19 nt, Artificial Sequence
  Description of Artificial Sequence: Synthetic oligonucleotide
  Sense strand starting at position 472 of SEQ ID NO: 1887779
aguuuccuccgcugagauc

SEQ ID NO: 2495995 - RNA, 19 nt, Artificial Sequence
  Description of Artificial Sequence: Synthetic oligonucleotide
  Antisense strand to SEQ ID NO: 2495994
gaucucagcggaggaaacu

SEQ ID NO: 2495996 - RNA, 19 nt, Artificial Sequence
  Description of Artificial Sequence: Synthetic oligonucleotide
  Sense strand starting at position 636 of SEQ ID NO: 1887779
cccaauuugugcccaguga

SEQ ID NO: 2495997 - RNA, 19 nt, Artificial Sequence
  Description of Artificial Sequence: Synthetic oligonucleotide
  Antisense strand to SEQ ID NO: 2495996
ucacugggcacaaauuggg

SEQ ID NO: 2495998 - RNA, 19 nt, Artificial Sequence
  Description of Artificial Sequence: Synthetic oligonucleotide
  Sense strand starting at position 800 of SEQ ID NO: 1887779
gcugguguucuuggcagga

SEQ ID NO: 2495999 - RNA, 19 nt, Artificial Sequence
  Description of Artificial Sequence: Synthetic oligonucleotide
  Antisense strand to SEQ ID NO: 2495998
uccugccaagaacaccagc

SEQ ID NO: 2496000 - RNA, 19 nt, Artificial Sequence
  Description of Artificial Sequence: Synthetic oligonucleotide
  Sense strand starting at position 987 of SEQ ID NO: 1887779
gggaacuugucccagcacu

SEQ ID NO: 2496001 - RNA, 19 nt, Artificial Sequence
  Description of Artificial Sequence: Synthetic oligonucleotide
  Antisense strand to SEQ ID NO: 2496000
agugcugggacaaguuccc

SEQ ID NO: 2496002 - RNA, 19 nt, Artificial Sequence
  Description of Artificial Sequence: Synthetic oligonucleotide
  Sense strand starting at position 1024 of SEQ ID NO: 1887779
gggagcagacucgggaaua

SEQ ID NO: 2496003 - RNA, 19 nt, Artificial Sequence
  Description of Artificial Sequence: Synthetic oligonucleotide
  Antisense strand to SEQ ID NO: 2496002
uauucccgagucugcuccc

SEQ ID NO: 2496004 - RNA, 19 nt, Artificial Sequence
  Description of Artificial Sequence: Synthetic oligonucleotide
  Sense strand starting at position 2366 of SEQ ID NO: 1887779
aguccuucgcgucugcgaa

SEQ ID NO: 2496005 - RNA, 19 nt, Artificial Sequence
  Description of Artificial Sequence: Synthetic oligonucleotide
  Antisense strand to SEQ ID NO: 2496004
uucgcagacgcgaaggacu

SEQ ID NO: 2496006 - RNA, 19 nt, Artificial Sequence
  Description of Artificial Sequence: Synthetic oligonucleotide
  Sense strand starting at position 2367 of SEQ ID NO: 1887779
guccuucgcgucugcgaaa

SEQ ID NO: 2496007 - RNA, 19 nt, Artificial Sequence
  Description of Artificial Sequence: Synthetic oligonucleotide
  Antisense strand to SEQ ID NO: 2496006
uuucgcagacgcgaaggac

SEQ ID NO: 2496008 - RNA, 19 nt, Artificial Sequence
  Description of Artificial Sequence: Synthetic oligonucleotide
  Sense strand starting at position 2499 of SEQ ID NO: 1887779
gaaugcugcccugggaauu

SEQ ID NO: 2496009 - RNA, 19 nt, Artificial Sequence
  Description of Artificial Sequence: Synthetic oligonucleotide
  Antisense strand to SEQ ID NO: 2496008
aauucccagggcagcauuc

SEQ ID NO: 2496010 - RNA, 19 nt, Artificial Sequence
  Description of Artificial Sequence: Synthetic oligonucleotide
  Sense strand starting at position 2588 of SEQ ID NO: 1887779
cacaguauauucugugaga

SEQ ID NO: 2496011 - RNA, 19 nt, Artificial Sequence
  Description of Artificial Sequence: Synthetic oligonucleotide
  Antisense strand to SEQ ID NO: 2496010
ucucacagaauauacugug

SEQ ID NO: 2496012 - RNA, 19 nt, Artificial Sequence
  Description of Artificial Sequence: Synthetic oligonucleotide
  Sense strand starting at position 2589 of SEQ ID NO: 1887779
acaguauauucugugagag

SEQ ID NO: 2496013 - RNA, 19 nt, Artificial Sequence
  Description of Artificial Sequence: Synthetic oligonucleotide
  Antisense strand to SEQ ID NO: 2496012
cucucacagaauauacugu

SEQ ID NO: 2496014 - RNA, 19 nt, Artificial Sequence
  Description of Artificial Sequence: Synthetic oligonucleotide
  Sense strand starting at position 2590 of SEQ ID NO: 1887779
caguauauucugugagagg

SEQ ID NO: 2496015 - RNA, 19 nt, Artificial Sequence
  Description of Artificial Sequence: Synthetic oligonucleotide
  Antisense strand to SEQ ID NO: 2496014
ccucucacagaauauacug

SEQ ID NO: 2496016 - RNA, 19 nt, Artificial Sequence
  Description of Artificial Sequence: Synthetic oligonucleotide
  Sense strand starting at position 2591 of SEQ ID NO: 1887779
aguauauucugugagaggu

SEQ ID NO: 2496017 - RNA, 19 nt, Artificial Sequence
  Description of Artificial Sequence: Synthetic oligonucleotide
  Antisense strand to SEQ ID NO: 2496016
accucucacagaauauacu

SEQ ID NO: 2496018 - RNA, 19 nt, Artificial Sequence
  Description of Artificial Sequence: Synthetic oligonucleotide
  Sense strand starting at position 2593 of SEQ ID NO: 1887779
uauauucugugagagguga

SEQ ID NO: 2496019 - RNA, 19 nt, Artificial Sequence
  Description of Artificial Sequence: Synthetic oligonucleotide
  Antisense strand to SEQ ID NO: 2496018
ucaccucucacagaauaua

SEQ ID NO: 2496020 - RNA, 19 nt, Artificial Sequence
  Description of Artificial Sequence: Synthetic oligonucleotide
  Sense strand starting at position 2726 of SEQ ID NO: 1887779
cgaccuagcaggugucaaa

SEQ ID NO: 2496021 - RNA, 19 nt, Artificial Sequence
  Description of Artificial Sequence: Synthetic oligonucleotide
  Antisense strand to SEQ ID NO: 2496020
uuugacaccugcuaggucg

SEQ ID NO: 2496022 - RNA, 19 nt, Artificial Sequence
  Description of Artificial Sequence: Synthetic oligonucleotide
  Sense strand starting at position 3086 of SEQ ID NO: 1887779
cgcagaagauccuuuacaa

SEQ ID NO: 2496023 - RNA, 19 nt, Artificial Sequence
  Description of Artificial Sequence: Synthetic oligonucleotide
  Antisense strand to SEQ ID NO: 2496022
uuguaaaggaucuucugcg

SEQ ID NO: 2496024 - RNA, 19 nt, Artificial Sequence
  Description of Artificial Sequence: Synthetic oligonucleotide
  Sense strand starting at position 3451 of SEQ ID NO: 1887779
cugaguauggccugaguau

SEQ ID NO: 2496025 - RNA, 19 nt, Artificial Sequence
  Description of Artificial Sequence: Synthetic oligonucleotide
  Antisense strand to SEQ ID NO: 2496024
auacucaggccauacucag

SEQ ID NO: 2496026 - RNA, 19 nt, Artificial Sequence
  Description of Artificial Sequence: Synthetic oligonucleotide
  Sense strand starting at position 3452 of SEQ ID NO: 1887779
ugaguauggccugaguaug

SEQ ID NO: 2496027 - RNA, 19 nt, Artificial Sequence
  Description of Artificial Sequence: Synthetic oligonucleotide
  Antisense strand to SEQ ID NO: 2496026
cauacucaggccauacuca

SEQ ID NO: 2496028 - RNA, 19 nt, Artificial Sequence
  Description of Artificial Sequence: Synthetic oligonucleotide
  Sense strand starting at position 3460 of SEQ ID NO: 1887779
gccugaguauggcugagaa

SEQ ID NO: 2496029 - RNA, 19 nt, Artificial Sequence
  Description of Artificial Sequence: Synthetic oligonucleotide
  Antisense strand to SEQ ID NO: 2496028
uucucagccauacucaggc

SEQ ID NO: 2496030 - RNA, 19 nt, Artificial Sequence
  Description of Artificial Sequence: Synthetic oligonucleotide
  Sense strand starting at position 3462 of SEQ ID NO: 1887779
cugaguauggcugagaaug

SEQ ID NO: 2496031 - RNA, 19 nt, Artificial Sequence
  Description of Artificial Sequence: Synthetic oligonucleotide
  Antisense strand to SEQ ID NO: 2496030
cauucucagccauacucag

SEQ ID NO: 2496032 - RNA, 19 nt, Artificial Sequence
  Description of Artificial Sequence: Synthetic oligonucleotide
  Sense strand starting at position 3635 of SEQ ID NO: 1887779
gagcuuuccgccuggaugu

SEQ ID NO: 2496033 - RNA, 19 nt, Artificial Sequence
  Description of Artificial Sequence: Synthetic oligonucleotide
  Antisense strand to SEQ ID NO: 2496032
acauccaggcggaaagcuc

SEQ ID NO: 2496034 - RNA, 19 nt, Artificial Sequence
  Description of Artificial Sequence: Synthetic oligonucleotide
  Sense strand starting at position 3652 of SEQ ID NO: 1887779
gucgcaucccuccagacuu

SEQ ID NO: 2496035 - RNA, 19 nt, Artificial Sequence
  Description of Artificial Sequence: Synthetic oligonucleotide
  Antisense strand to SEQ ID NO: 2496034
aagucuggagggaugcgac

SEQ ID NO: 2496036 - RNA, 19 nt, Artificial Sequence
  Description of Artificial Sequence: Synthetic oligonucleotide
  Sense strand starting at position 3838 of SEQ ID NO: 1887779
ggacguugcgcccauuuga

SEQ ID NO: 2496037 - RNA, 19 nt, Artificial Sequence
  Description of Artificial Sequence: Synthetic oligonucleotide
  Antisense strand to SEQ ID NO: 2496036
ucaaaugggcgcaacgucc

SEQ ID NO: 2496038 - RNA, 19 nt, Artificial Sequence
  Description of Artificial Sequence: Synthetic oligonucleotide
  Sense strand starting at position 3920 of SEQ ID NO: 1887779
uggaucauccuaggccuua

SEQ ID NO: 2496039 - RNA, 19 nt, Artificial Sequence
  Description of Artificial Sequence: Synthetic oligonucleotide
  Antisense strand to SEQ ID NO: 2496038
uaaggccuaggaugaucca

SEQ ID NO: 2496040 - RNA, 19 nt, Artificial Sequence
  Description of Artificial Sequence: Synthetic oligonucleotide
  Sense strand starting at position 3921 of SEQ ID NO: 1887779
ggaucauccuaggccuuau

SEQ ID NO: 2496041 - RNA, 19 nt, Artificial Sequence
  Description of Artificial Sequence: Synthetic oligonucleotide
  Antisense strand to SEQ ID NO: 2496040
auaaggccuaggaugaucc

SEQ ID NO: 2496042 - RNA, 19 nt, Artificial Sequence
  Description of Artificial Sequence: Synthetic oligonucleotide
  Sense strand starting at position 3945 of SEQ ID NO: 1887779
cccucagucuagcaaugau

SEQ ID NO: 2496043 - RNA, 19 nt, Artificial Sequence
  Description of Artificial Sequence: Synthetic oligonucleotide
  Antisense strand to SEQ ID NO: 2496042
aucauugcuagacugaggg

SEQ ID NO: 2496044 - RNA, 19 nt, Artificial Sequence
  Description of Artificial Sequence: Synthetic oligonucleotide
  Sense strand starting at position 3958 of SEQ ID NO: 1887779
aaugaucacccgugugaac

SEQ ID NO: 2496045 - RNA, 19 nt, Artificial Sequence
  Description of Artificial Sequence: Synthetic oligonucleotide
  Antisense strand to SEQ ID NO: 2496044
guucacacgggugaucauu

SEQ ID NO: 2496046 - RNA, 19 nt, Artificial Sequence
  Description of Artificial Sequence: Synthetic oligonucleotide
  Sense strand starting at position 272 of SEQ ID NO: 1887780
ccaucaccucgcuguauga

SEQ ID NO: 2496047 - RNA, 19 nt, Artificial Sequence
  Description of Artificial Sequence: Synthetic oligonucleotide
  Antisense strand to SEQ ID NO: 2496046
ucauacagcgaggugaugg

SEQ ID NO: 2496048 - RNA, 19 nt, Artificial Sequence
  Description of Artificial Sequence: Synthetic oligonucleotide
  Sense strand starting at position 279 of SEQ ID NO: 1887780
cucgcuguaugauguguaa

SEQ ID NO: 2496049 - RNA, 19 nt, Artificial Sequence
  Description of Artificial Sequence: Synthetic oligonucleotide
  Antisense strand to SEQ ID NO: 2496048
uuacacaucauacagcgag

SEQ ID NO: 2496050 - RNA, 19 nt, Artificial Sequence
  Description of Artificial Sequence: Synthetic oligonucleotide
  Sense strand starting at position 282 of SEQ ID NO: 1887780
gcuguaugauguguaaggu

SEQ ID NO: 2496051 - RNA, 19 nt, Artificial Sequence
  Description of Artificial Sequence: Synthetic oligonucleotide
  Antisense strand to SEQ ID NO: 2496050
accuuacacaucauacagc

SEQ ID NO: 2496052 - RNA, 19 nt, Artificial Sequence
  Description of Artificial Sequence: Synthetic oligonucleotide
  Sense strand starting at position 285 of SEQ ID NO: 1887780
guaugauguguaaggugua

SEQ ID NO: 2496053 - RNA, 19 nt, Artificial Sequence
  Description of Artificial Sequence: Synthetic oligonucleotide
  Antisense strand to SEQ ID NO: 2496052
uacaccuuacacaucauac

SEQ ID NO: 2496054 - RNA, 19 nt, Artificial Sequence
  Description of Artificial Sequence: Synthetic oligonucleotide
  Sense strand starting at position 290 of SEQ ID NO: 1887780
auguguaagguguaggaua

SEQ ID NO: 2496055 - RNA, 19 nt, Artificial Sequence
  Description of Artificial Sequence: Synthetic oligonucleotide
  Antisense strand to SEQ ID NO: 2496054
uauccuacaccuuacacau

SEQ ID NO: 2496056 - RNA, 19 nt, Artificial Sequence
  Description of Artificial Sequence: Synthetic oligonucleotide
  Sense strand starting at position 292 of SEQ ID NO: 1887780
guguaagguguaggauacu

SEQ ID NO: 2496057 - RNA, 19 nt, Artificial Sequence
  Description of Artificial Sequence: Synthetic oligonucleotide
  Antisense strand to SEQ ID NO: 2496056
aguauccuacaccuuacac

SEQ ID NO: 2496058 - RNA, 19 nt, Artificial Sequence
  Description of Artificial Sequence: Synthetic oligonucleotide
  Sense strand starting at position 377 of SEQ ID NO: 1887780
uaugcaggcccauauguaa

SEQ ID NO: 2496059 - RNA, 19 nt, Artificial Sequence
  Description of Artificial Sequence: Synthetic oligonucleotide
  Antisense strand to SEQ ID NO: 2496058
uuacauaugggccugcaua

SEQ ID NO: 2496060 - RNA, 19 nt, Artificial Sequence
  Description of Artificial Sequence: Synthetic oligonucleotide
  Sense strand starting at position 389 of SEQ ID NO: 1887780
uauguaauucuuugaccgu

SEQ ID NO: 2496061 - RNA, 19 nt, Artificial Sequence
  Description of Artificial Sequence: Synthetic oligonucleotide
  Antisense strand to SEQ ID NO: 2496060
acggucaaagaauuacaua

SEQ ID NO: 2496062 - RNA, 19 nt, Artificial Sequence
  Description of Artificial Sequence: Synthetic oligonucleotide
  Sense strand starting at position 392 of SEQ ID NO: 1887780
guaauucuuugaccgucua

SEQ ID NO: 2496063 - RNA, 19 nt, Artificial Sequence
  Description of Artificial Sequence: Synthetic oligonucleotide
  Antisense strand to SEQ ID NO: 2496062
uagacggucaaagaauuac

SEQ ID NO: 2496064 - RNA, 19 nt, Artificial Sequence
  Description of Artificial Sequence: Synthetic oligonucleotide
  Sense strand starting at position 540 of SEQ ID NO: 1887780
gggcuucagucgugacuug

SEQ ID NO: 2496065 - RNA, 19 nt, Artificial Sequence
  Description of Artificial Sequence: Synthetic oligonucleotide
  Antisense strand to SEQ ID NO: 2496064
caagucacgacugaagccc

SEQ ID NO: 2496066 - RNA, 19 nt, Artificial Sequence
  Description of Artificial Sequence: Synthetic oligonucleotide
  Sense strand starting at position 545 of SEQ ID NO: 1887780
ucagucgugacuugggcaa

SEQ ID NO: 2496067 - RNA, 19 nt, Artificial Sequence
  Description of Artificial Sequence: Synthetic oligonucleotide
  Antisense strand to SEQ ID NO: 2496066
uugcccaagucacgacuga

SEQ ID NO: 2496068 - RNA, 19 nt, Artificial Sequence
  Description of Artificial Sequence: Synthetic oligonucleotide
  Sense strand starting at position 566 of SEQ ID NO: 1887780
guagguggguuccagaagu

SEQ ID NO: 2496069 - RNA, 19 nt, Artificial Sequence
  Description of Artificial Sequence: Synthetic oligonucleotide
  Antisense strand to SEQ ID NO: 2496068
acuucuggaacccaccuac

SEQ ID NO: 2496070 - RNA, 19 nt, Artificial Sequence
  Description of Artificial Sequence: Synthetic oligonucleotide
  Sense strand starting at position 631 of SEQ ID NO: 1887780
accuguguauuggugugaa

SEQ ID NO: 2496071 - RNA, 19 nt, Artificial Sequence
  Description of Artificial Sequence: Synthetic oligonucleotide
  Antisense strand to SEQ ID NO: 2496070
uucacaccaauacacaggu

SEQ ID NO: 2496072 - RNA, 19 nt, Artificial Sequence
  Description of Artificial Sequence: Synthetic oligonucleotide
  Sense strand starting at position 1305 of SEQ ID NO: 1887780
ugugcuggccucugaugau

SEQ ID NO: 2496073 - RNA, 19 nt, Artificial Sequence
  Description of Artificial Sequence: Synthetic oligonucleotide
  Antisense strand to SEQ ID NO: 2496072
aucaucagaggccagcaca

SEQ ID NO: 2496074 - RNA, 19 nt, Artificial Sequence
  Description of Artificial Sequence: Synthetic oligonucleotide
  Sense strand starting at position 1308 of SEQ ID NO: 1887780
gcuggccucugaugauuaa

SEQ ID NO: 2496075 - RNA, 19 nt, Artificial Sequence
  Description of Artificial Sequence: Synthetic oligonucleotide
  Antisense strand to SEQ ID NO: 2496074
uuaaucaucagaggccagc

SEQ ID NO: 2496076 - RNA, 19 nt, Artificial Sequence
  Description of Artificial Sequence: Synthetic oligonucleotide
  Sense strand starting at position 1309 of SEQ ID NO: 1887780
cuggccucugaugauuaau

SEQ ID NO: 2496077 - RNA, 19 nt, Artificial Sequence
  Description of Artificial Sequence: Synthetic oligonucleotide
  Antisense strand to SEQ ID NO: 2496076
auuaaucaucagaggccag

SEQ ID NO: 2496078 - RNA, 19 nt, Artificial Sequence
  Description of Artificial Sequence: Synthetic oligonucleotide
  Sense strand starting at position 1311 of SEQ ID NO: 1887780
ggccucugaugauuaauca

SEQ ID NO: 2496079 - RNA, 19 nt, Artificial Sequence
  Description of Artificial Sequence: Synthetic oligonucleotide
  Antisense strand to SEQ ID NO: 2496078
ugauuaaucaucagaggcc

SEQ ID NO: 2496080 - RNA, 19 nt, Artificial Sequence
  Description of Artificial Sequence: Synthetic oligonucleotide
  Sense strand starting at position 1493 of SEQ ID NO: 1887780
gacggauucucguacuguc

SEQ ID NO: 2496081 - RNA, 19 nt, Artificial Sequence
  Description of Artificial Sequence: Synthetic oligonucleotide
  Antisense strand to SEQ ID NO: 2496080
gacaguacgagaauccguc

SEQ ID NO: 2496082 - RNA, 19 nt, Artificial Sequence
  Description of Artificial Sequence: Synthetic oligonucleotide
  Sense strand starting at position 2201 of SEQ ID NO: 1887780
acacuuugugcagacacaa

SEQ ID NO: 2496083 - RNA, 19 nt, Artificial Sequence
  Description of Artificial Sequence: Synthetic oligonucleotide
  Antisense strand to SEQ ID NO: 2496082
uugugucugcacaaagugu

SEQ ID NO: 2496084 - RNA, 19 nt, Artificial Sequence
  Description of Artificial Sequence: Synthetic oligonucleotide
  Sense strand starting at position 2481 of SEQ ID NO: 1887780
uguguugccuggugagaag

SEQ ID NO: 2496085 - RNA, 19 nt, Artificial Sequence
  Description of Artificial Sequence: Synthetic oligonucleotide
  Antisense strand to SEQ ID NO: 2496084
cuucucaccaggcaacaca

SEQ ID NO: 2496086 - RNA, 19 nt, Artificial Sequence
  Description of Artificial Sequence: Synthetic oligonucleotide
  Sense strand starting at position 2565 of SEQ ID NO: 1887780
gggugucacagaggaaagu

SEQ ID NO: 2496087 - RNA, 19 nt, Artificial Sequence
  Description of Artificial Sequence: Synthetic oligonucleotide
  Antisense strand to SEQ ID NO: 2496086
acuuuccucugugacaccc

SEQ ID NO: 2496088 - RNA, 19 nt, Artificial Sequence
  Description of Artificial Sequence: Synthetic oligonucleotide
  Sense strand starting at position 2659 of SEQ ID NO: 1887780
ggcugugauucccauaguc

SEQ ID NO: 2496089 - RNA, 19 nt, Artificial Sequence
  Description of Artificial Sequence: Synthetic oligonucleotide
  Antisense strand to SEQ ID NO: 2496088
gacuaugggaaucacagcc

SEQ ID NO: 2496090 - RNA, 19 nt, Artificial Sequence
  Description of Artificial Sequence: Synthetic oligonucleotide
  Sense strand starting at position 2661 of SEQ ID NO: 1887780
cugugauucccauagucaa

SEQ ID NO: 2496091 - RNA, 19 nt, Artificial Sequence
  Description of Artificial Sequence: Synthetic oligonucleotide
  Antisense strand to SEQ ID NO: 2496090
uugacuaugggaaucacag

SEQ ID NO: 2496092 - RNA, 19 nt, Artificial Sequence
  Description of Artificial Sequence: Synthetic oligonucleotide
  Sense strand starting at position 2681 of SEQ ID NO: 1887780
gggacaguucuuggucagu

SEQ ID NO: 2496093 - RNA, 19 nt, Artificial Sequence
  Description of Artificial Sequence: Synthetic oligonucleotide
  Antisense strand to SEQ ID NO: 2496092
acugaccaagaacuguccc

SEQ ID NO: 2496094 - RNA, 19 nt, Artificial Sequence
  Description of Artificial Sequence: Synthetic oligonucleotide
  Sense strand starting at position 2683 of SEQ ID NO: 1887780
gacaguucuuggucagucu

SEQ ID NO: 2496095 - RNA, 19 nt, Artificial Sequence
  Description of Artificial Sequence: Synthetic oligonucleotide
  Antisense strand to SEQ ID NO: 2496094
agacugaccaagaacuguc

SEQ ID NO: 2496096 - RNA, 19 nt, Artificial Sequence
  Description of Artificial Sequence: Synthetic oligonucleotide
  Sense strand starting at position 2725 of SEQ ID NO: 1887780
ugagcugaagcucaggauu

SEQ ID NO: 2496097 - RNA, 19 nt, Artificial Sequence
  Description of Artificial Sequence: Synthetic oligonucleotide
  Antisense strand to SEQ ID NO: 2496096
aauccugagcuucagcuca

SEQ ID NO: 2496098 - RNA, 19 nt, Artificial Sequence
  Description of Artificial Sequence: Synthetic oligonucleotide
  Sense strand starting at position 3109 of SEQ ID NO: 1887780
ugaguuguguucugggauc

SEQ ID NO: 2496099 - RNA, 19 nt, Artificial Sequence
  Description of Artificial Sequence: Synthetic oligonucleotide
  Antisense strand to SEQ ID NO: 2496098
gaucccagaacacaacuca

SEQ ID NO: 2496100 - RNA, 19 nt, Artificial Sequence
  Description of Artificial Sequence: Synthetic oligonucleotide
  Sense strand starting at position 3111 of SEQ ID NO: 1887780
aguuguguucugggaucaa

SEQ ID NO: 2496101 - RNA, 19 nt, Artificial Sequence
  Description of Artificial Sequence: Synthetic oligonucleotide
  Antisense strand to SEQ ID NO: 2496100
uugaucccagaacacaacu

SEQ ID NO: 2496102 - RNA, 19 nt, Artificial Sequence
  Description of Artificial Sequence: Synthetic oligonucleotide
  Sense strand starting at position 3487 of SEQ ID NO: 1887780
cagugcugcccugggagau

SEQ ID NO: 2496103 - RNA, 19 nt, Artificial Sequence
  Description of Artificial Sequence: Synthetic oligonucleotide
  Antisense strand to SEQ ID NO: 2496102
aucucccagggcagcacug

SEQ ID NO: 2496104 - RNA, 19 nt, Artificial Sequence
  Description of Artificial Sequence: Synthetic oligonucleotide
  Sense strand starting at position 3964 of SEQ ID NO: 1887780
cuuucugugaguucguguu

SEQ ID NO: 2496105 - RNA, 19 nt, Artificial Sequence
  Description of Artificial Sequence: Synthetic oligonucleotide
  Antisense strand to SEQ ID NO: 2496104
aacacgaacucacagaaag

SEQ ID NO: 2496106 - RNA, 19 nt, Artificial Sequence
  Description of Artificial Sequence: Synthetic oligonucleotide
  Sense strand starting at position 3968 of SEQ ID NO: 1887780
cugugaguucguguuugua

SEQ ID NO: 2496107 - RNA, 19 nt, Artificial Sequence
  Description of Artificial Sequence: Synthetic oligonucleotide
  Antisense strand to SEQ ID NO: 2496106
uacaaacacgaacucacag

SEQ ID NO: 2496108 - RNA, 19 nt, Artificial Sequence
  Description of Artificial Sequence: Synthetic oligonucleotide
  Sense strand starting at position 3970 of SEQ ID NO: 1887780
gugaguucguguuuguaug

SEQ ID NO: 2496109 - RNA, 19 nt, Artificial Sequence
  Description of Artificial Sequence: Synthetic oligonucleotide
  Antisense strand to SEQ ID NO: 2496108
cauacaaacacgaacucac

SEQ ID NO: 2496110 - RNA, 19 nt, Artificial Sequence
  Description of Artificial Sequence: Synthetic oligonucleotide
  Sense strand starting at position 3974 of SEQ ID NO: 1887780
guucguguuuguaugcagu

SEQ ID NO: 2496111 - RNA, 19 nt, Artificial Sequence
  Description of Artificial Sequence: Synthetic oligonucleotide
  Antisense strand to SEQ ID NO: 2496110
acugcauacaaacacgaac

SEQ ID NO: 2496112 - RNA, 19 nt, Artificial Sequence
  Description of Artificial Sequence: Synthetic oligonucleotide
  Sense strand starting at position 97 of SEQ ID NO: 1887781
acggguucuucugccauuu

SEQ ID NO: 2496113 - RNA, 19 nt, Artificial Sequence
  Description of Artificial Sequence: Synthetic oligonucleotide
  Antisense strand to SEQ ID NO: 2496112
aaauggcagaagaacccgu

SEQ ID NO: 2496114 - RNA, 19 nt, Artificial Sequence
  Description of Artificial Sequence: Synthetic oligonucleotide
  Sense strand starting at position 154 of SEQ ID NO: 1887781
cauugucgugacugcuaaa

SEQ ID NO: 2496115 - RNA, 19 nt, Artificial Sequence
  Description of Artificial Sequence: Synthetic oligonucleotide
  Antisense strand to SEQ ID NO: 2496114
uuuagcagucacgacaaug

SEQ ID NO: 2496116 - RNA, 19 nt, Artificial Sequence
  Description of Artificial Sequence: Synthetic oligonucleotide
  Sense strand starting at position 188 of SEQ ID NO: 1887781
gucucuuugugagcucauc

SEQ ID NO: 2496117 - RNA, 19 nt, Artificial Sequence
  Description of Artificial Sequence: Synthetic oligonucleotide
  Antisense strand to SEQ ID NO: 2496116
gaugagcucacaaagagac

SEQ ID NO: 2496118 - RNA, 19 nt, Artificial Sequence
  Description of Artificial Sequence: Synthetic oligonucleotide
  Sense strand starting at position 223 of SEQ ID NO: 1887781
acugaugacucccgaauuu

SEQ ID NO: 2496119 - RNA, 19 nt, Artificial Sequence
  Description of Artificial Sequence: Synthetic oligonucleotide
  Antisense strand to SEQ ID NO: 2496118
aaauucgggagucaucagu

SEQ ID NO: 2496120 - RNA, 19 nt, Artificial Sequence
  Description of Artificial Sequence: Synthetic oligonucleotide
  Sense strand starting at position 270 of SEQ ID NO: 1887781
aucuacauuguuuagucaa

SEQ ID NO: 2496121 - RNA, 19 nt, Artificial Sequence
  Description of Artificial Sequence: Synthetic oligonucleotide
  Antisense strand to SEQ ID NO: 2496120
uugacuaaacaauguagau

SEQ ID NO: 2496122 - RNA, 19 nt, Artificial Sequence
  Description of Artificial Sequence: Synthetic oligonucleotide
  Sense strand starting at position 272 of SEQ ID NO: 1887781
cuacauuguuuagucaaca

SEQ ID NO: 2496123 - RNA, 19 nt, Artificial Sequence
  Description of Artificial Sequence: Synthetic oligonucleotide
  Antisense strand to SEQ ID NO: 2496122
uguugacuaaacaauguag

SEQ ID NO: 2496124 - RNA, 19 nt, Artificial Sequence
  Description of Artificial Sequence: Synthetic oligonucleotide
  Sense strand starting at position 277 of SEQ ID NO: 1887781
uuguuuagucaacauccga

SEQ ID NO: 2496125 - RNA, 19 nt, Artificial Sequence
  Description of Artificial Sequence: Synthetic oligonucleotide
  Antisense strand to SEQ ID NO: 2496124
ucggauguugacuaaacaa

SEQ ID NO: 2496126 - RNA, 19 nt, Artificial Sequence
  Description of Artificial Sequence: Synthetic oligonucleotide
  Sense strand starting at position 323 of SEQ ID NO: 1887781
cuccuacagcugugucuau

SEQ ID NO: 2496127 - RNA, 19 nt, Artificial Sequence
  Description of Artificial Sequence: Synthetic oligonucleotide
  Antisense strand to SEQ ID NO: 2496126
auagacacagcuguaggag

SEQ ID NO: 2496128 - RNA, 19 nt, Artificial Sequence
  Description of Artificial Sequence: Synthetic oligonucleotide
  Sense strand starting at position 403 of SEQ ID NO: 1887781
caggauuugucuuugcugu

SEQ ID NO: 2496129 - RNA, 19 nt, Artificial Sequence
  Description of Artificial Sequence: Synthetic oligonucleotide
  Antisense strand to SEQ ID NO: 2496128
acagcaaagacaaauccug

SEQ ID NO: 2496130 - RNA, 19 nt, Artificial Sequence
  Description of Artificial Sequence: Synthetic oligonucleotide
  Sense strand starting at position 404 of SEQ ID NO: 1887781
aggauuugucuuugcuguu

SEQ ID NO: 2496131 - RNA, 19 nt, Artificial Sequence
  Description of Artificial Sequence: Synthetic oligonucleotide
  Antisense strand to SEQ ID NO: 2496130
aacagcaaagacaaauccu

SEQ ID NO: 2496132 - RNA, 19 nt, Artificial Sequence
  Description of Artificial Sequence: Synthetic oligonucleotide
  Sense strand starting at position 537 of SEQ ID NO: 1887781
uguggaugugcgcuaguua

SEQ ID NO: 2496133 - RNA, 19 nt, Artificial Sequence
  Description of Artificial Sequence: Synthetic oligonucleotide
  Antisense strand to SEQ ID NO: 2496132
uaacuagcgcacauccaca

SEQ ID NO: 2496134 - RNA, 19 nt, Artificial Sequence
  Description of Artificial Sequence: Synthetic oligonucleotide
  Sense strand starting at position 538 of SEQ ID NO: 1887781
guggaugugcgcuaguuaa

SEQ ID NO: 2496135 - RNA, 19 nt, Artificial Sequence
  Description of Artificial Sequence: Synthetic oligonucleotide
  Antisense strand to SEQ ID NO: 2496134
uuaacuagcgcacauccac

SEQ ID NO: 2496136 - RNA, 19 nt, Artificial Sequence
  Description of Artificial Sequence: Synthetic oligonucleotide
  Sense strand starting at position 561 of SEQ ID NO: 1887781
uagcacagccugugauuau

SEQ ID NO: 2496137 - RNA, 19 nt, Artificial Sequence
  Description of Artificial Sequence: Synthetic oligonucleotide
  Antisense strand to SEQ ID NO: 2496136
auaaucacaggcugugcua

SEQ ID NO: 2496138 - RNA, 19 nt, Artificial Sequence
  Description of Artificial Sequence: Synthetic oligonucleotide
  Sense strand starting at position 608 of SEQ ID NO: 1887781
ugagggacguggucugauu

SEQ ID NO: 2496139 - RNA, 19 nt, Artificial Sequence
  Description of Artificial Sequence: Synthetic oligonucleotide
  Antisense strand to SEQ ID NO: 2496138
aaucagaccacgucccuca

SEQ ID NO: 2496140 - RNA, 19 nt, Artificial Sequence
  Description of Artificial Sequence: Synthetic oligonucleotide
  Sense strand starting at position 655 of SEQ ID NO: 1887781
ggguacucauaacagauuu

SEQ ID NO: 2496141 - RNA, 19 nt, Artificial Sequence
  Description of Artificial Sequence: Synthetic oligonucleotide
  Antisense strand to SEQ ID NO: 2496140
aaaucuguuaugaguaccc

SEQ ID NO: 2496142 - RNA, 19 nt, Artificial Sequence
  Description of Artificial Sequence: Synthetic oligonucleotide
  Sense strand starting at position 694 of SEQ ID NO: 1887781
aagcuaacauuugaguagu

SEQ ID NO: 2496143 - RNA, 19 nt, Artificial Sequence
  Description of Artificial Sequence: Synthetic oligonucleotide
  Antisense strand to SEQ ID NO: 2496142
acuacucaaauguuagcuu

SEQ ID NO: 2496144 - RNA, 19 nt, Artificial Sequence
  Description of Artificial Sequence: Synthetic oligonucleotide
  Sense strand starting at position 774 of SEQ ID NO: 1887781
agguauuacccacguuuaa

SEQ ID NO: 2496145 - RNA, 19 nt, Artificial Sequence
  Description of Artificial Sequence: Synthetic oligonucleotide
  Antisense strand to SEQ ID NO: 2496144
uuaaacguggguaauaccu

SEQ ID NO: 2496146 - RNA, 19 nt, Artificial Sequence
  Description of Artificial Sequence: Synthetic oligonucleotide
  Sense strand starting at position 2543 of SEQ ID NO: 1887781
cggguccgcuucuuaaaua

SEQ ID NO: 2496147 - RNA, 19 nt, Artificial Sequence
  Description of Artificial Sequence: Synthetic oligonucleotide
  Antisense strand to SEQ ID NO: 2496146
uauuuaagaagcggacccg

SEQ ID NO: 2496148 - RNA, 19 nt, Artificial Sequence
  Description of Artificial Sequence: Synthetic oligonucleotide
  Sense strand starting at position 2714 of SEQ ID NO: 1887781
gcagcauucgcaucuaguu

SEQ ID NO: 2496149 - RNA, 19 nt, Artificial Sequence
  Description of Artificial Sequence: Synthetic oligonucleotide
  Antisense strand to SEQ ID NO: 2496148
aacuagaugcgaaugcugc

SEQ ID NO: 2496150 - RNA, 19 nt, Artificial Sequence
  Description of Artificial Sequence: Synthetic oligonucleotide
  Sense strand starting at position 2776 of SEQ ID NO: 1887781
uuuaaaccucagugcaagu

SEQ ID NO: 2496151 - RNA, 19 nt, Artificial Sequence
  Description of Artificial Sequence: Synthetic oligonucleotide
  Antisense strand to SEQ ID NO: 2496150
acuugcacugagguuuaaa

SEQ ID NO: 2496152 - RNA, 19 nt, Artificial Sequence
  Description of Artificial Sequence: Synthetic oligonucleotide
  Sense strand starting at position 2801 of SEQ ID NO: 1887781
ugggcuucccugugcaaua

SEQ ID NO: 2496153 - RNA, 19 nt, Artificial Sequence
  Description of Artificial Sequence: Synthetic oligonucleotide
  Antisense strand to SEQ ID NO: 2496152
uauugcacagggaagccca

SEQ ID NO: 2496154 - RNA, 19 nt, Artificial Sequence
  Description of Artificial Sequence: Synthetic oligonucleotide
  Sense strand starting at position 2845 of SEQ ID NO: 1887781
cacgauugccaagauguga

SEQ ID NO: 2496155 - RNA, 19 nt, Artificial Sequence
  Description of Artificial Sequence: Synthetic oligonucleotide
  Antisense strand to SEQ ID NO: 2496154
ucacaucuuggcaaucgug

SEQ ID NO: 2496156 - RNA, 19 nt, Artificial Sequence
  Description of Artificial Sequence: Synthetic oligonucleotide
  Sense strand starting at position 2849 of SEQ ID NO: 1887781
auugccaagaugugagauu

SEQ ID NO: 2496157 - RNA, 19 nt, Artificial Sequence
  Description of Artificial Sequence: Synthetic oligonucleotide
  Antisense strand to SEQ ID NO: 2496156
aaucucacaucuuggcaau

SEQ ID NO: 2496158 - RNA, 19 nt, Artificial Sequence
  Description of Artificial Sequence: Synthetic oligonucleotide
  Sense strand starting at position 2850 of SEQ ID NO: 1887781
uugccaagaugugagauuu

SEQ ID NO: 2496159 - RNA, 19 nt, Artificial Sequence
  Description of Artificial Sequence: Synthetic oligonucleotide
  Antisense strand to SEQ ID NO: 2496158
aaaucucacaucuuggcaa

SEQ ID NO: 2496160 - RNA, 19 nt, Artificial Sequence
  Description of Artificial Sequence: Synthetic oligonucleotide
  Sense strand starting at position 2960 of SEQ ID NO: 1887781
gcaagcauauguguucuuu

SEQ ID NO: 2496161 - RNA, 19 nt, Artificial Sequence
  Description of Artificial Sequence: Synthetic oligonucleotide
  Antisense strand to SEQ ID NO: 2496160
aaagaacacauaugcuugc

SEQ ID NO: 2496162 - RNA, 19 nt, Artificial Sequence
  Description of Artificial Sequence: Synthetic oligonucleotide
  Sense strand starting at position 2964 of SEQ ID NO: 1887781
gcauauguguucuuuacua

SEQ ID NO: 2496163 - RNA, 19 nt, Artificial Sequence
  Description of Artificial Sequence: Synthetic oligonucleotide
  Antisense strand to SEQ ID NO: 2496162
uaguaaagaacacauaugc

SEQ ID NO: 2496164 - RNA, 19 nt, Artificial Sequence
  Description of Artificial Sequence: Synthetic oligonucleotide
  Sense strand starting at position 2966 of SEQ ID NO: 1887781
auauguguucuuuacuaug

SEQ ID NO: 2496165 - RNA, 19 nt, Artificial Sequence
  Description of Artificial Sequence: Synthetic oligonucleotide
  Antisense strand to SEQ ID NO: 2496164
cauaguaaagaacacauau

SEQ ID NO: 2496166 - RNA, 19 nt, Artificial Sequence
  Description of Artificial Sequence: Synthetic oligonucleotide
  Sense strand starting at position 3053 of SEQ ID NO: 1887781
gucgcuugggcucuuaagu

SEQ ID NO: 2496167 - RNA, 19 nt, Artificial Sequence
  Description of Artificial Sequence: Synthetic oligonucleotide
  Antisense strand to SEQ ID NO: 2496166
acuuaagagcccaagcgac

SEQ ID NO: 2496168 - RNA, 19 nt, Artificial Sequence
  Description of Artificial Sequence: Synthetic oligonucleotide
  Sense strand starting at position 3102 of SEQ ID NO: 1887781
gcaguaaaugcauacgugu

SEQ ID NO: 2496169 - RNA, 19 nt, Artificial Sequence
  Description of Artificial Sequence: Synthetic oligonucleotide
  Antisense strand to SEQ ID NO: 2496168
acacguaugcauuuacugc

SEQ ID NO: 2496170 - RNA, 19 nt, Artificial Sequence
  Description of Artificial Sequence: Synthetic oligonucleotide
  Sense strand starting at position 3122 of SEQ ID NO: 1887781
acuguauaugcggacuaga

SEQ ID NO: 2496171 - RNA, 19 nt, Artificial Sequence
  Description of Artificial Sequence: Synthetic oligonucleotide
  Antisense strand to SEQ ID NO: 2496170
ucuaguccgcauauacagu

SEQ ID NO: 2496172 - RNA, 19 nt, Artificial Sequence
  Description of Artificial Sequence: Synthetic oligonucleotide
  Sense strand starting at position 3181 of SEQ ID NO: 1887781
aguguacccucaucucgaa

SEQ ID NO: 2496173 - RNA, 19 nt, Artificial Sequence
  Description of Artificial Sequence: Synthetic oligonucleotide
  Antisense strand to SEQ ID NO: 2496172
uucgagaugaggguacacu

SEQ ID NO: 2496174 - RNA, 19 nt, Artificial Sequence
  Description of Artificial Sequence: Synthetic oligonucleotide
  Sense strand starting at position 3295 of SEQ ID NO: 1887781
ucauucuaacgccaagaua

SEQ ID NO: 2496175 - RNA, 19 nt, Artificial Sequence
  Description of Artificial Sequence: Synthetic oligonucleotide
  Antisense strand to SEQ ID NO: 2496174
uaucuuggcguuagaauga

SEQ ID NO: 2496176 - RNA, 19 nt, Artificial Sequence
  Description of Artificial Sequence: Synthetic oligonucleotide
  Sense strand starting at position 3304 of SEQ ID NO: 1887781
cgccaagauacucagguuu

SEQ ID NO: 2496177 - RNA, 19 nt, Artificial Sequence
  Description of Artificial Sequence: Synthetic oligonucleotide
  Antisense strand to SEQ ID NO: 2496176
aaaccugaguaucuuggcg

SEQ ID NO: 2496178 - RNA, 19 nt, Artificial Sequence
  Description of Artificial Sequence: Synthetic oligonucleotide
  Sense strand starting at position 3416 of SEQ ID NO: 1887781
agagcaaguuuguucaggu

SEQ ID NO: 2496179 - RNA, 19 nt, Artificial Sequence
  Description of Artificial Sequence: Synthetic oligonucleotide
  Antisense strand to SEQ ID NO: 2496178
accugaacaaacuugcucu

SEQ ID NO: 2496180 - RNA, 19 nt, Artificial Sequence
  Description of Artificial Sequence: Synthetic oligonucleotide
  Sense strand starting at position 3474 of SEQ ID NO: 1887781
guuugcuaguauucuggaa

SEQ ID NO: 2496181 - RNA, 19 nt, Artificial Sequence
  Description of Artificial Sequence: Synthetic oligonucleotide
  Antisense strand to SEQ ID NO: 2496180
uuccagaauacuagcaaac

SEQ ID NO: 2496182 - RNA, 19 nt, Artificial Sequence
  Description of Artificial Sequence: Synthetic oligonucleotide
  Sense strand starting at position 3494 of SEQ ID NO: 1887781
gaaagaucuccuugugcuu

SEQ ID NO: 2496183 - RNA, 19 nt, Artificial Sequence
  Description of Artificial Sequence: Synthetic oligonucleotide
  Antisense strand to SEQ ID NO: 2496182
aagcacaaggagaucuuuc

SEQ ID NO: 2496184 - RNA, 19 nt, Artificial Sequence
  Description of Artificial Sequence: Synthetic oligonucleotide
  Sense strand starting at position 3650 of SEQ ID NO: 1887781
ucccuuguuugcuuugaga

SEQ ID NO: 2496185 - RNA, 19 nt, Artificial Sequence
  Description of Artificial Sequence: Synthetic oligonucleotide
  Antisense strand to SEQ ID NO: 2496184
ucucaaagcaaacaaggga

SEQ ID NO: 2496186 - RNA, 19 nt, Artificial Sequence
  Description of Artificial Sequence: Synthetic oligonucleotide
  Sense strand starting at position 3652 of SEQ ID NO: 1887781
ccuuguuugcuuugagaug

SEQ ID NO: 2496187 - RNA, 19 nt, Artificial Sequence
  Description of Artificial Sequence: Synthetic oligonucleotide
  Antisense strand to SEQ ID NO: 2496186
caucucaaagcaaacaagg

SEQ ID NO: 2496188 - RNA, 19 nt, Artificial Sequence
  Description of Artificial Sequence: Synthetic oligonucleotide
  Sense strand starting at position 3708 of SEQ ID NO: 1887781
gguggcccucgucuguaau

SEQ ID NO: 2496189 - RNA, 19 nt, Artificial Sequence
  Description of Artificial Sequence: Synthetic oligonucleotide
  Antisense strand to SEQ ID NO: 2496188
auuacagacgagggccacc

SEQ ID NO: 2496190 - RNA, 19 nt, Artificial Sequence
  Description of Artificial Sequence: Synthetic oligonucleotide
  Sense strand starting at position 3906 of SEQ ID NO: 1887781
acuccagucugggaaauga

SEQ ID NO: 2496191 - RNA, 19 nt, Artificial Sequence
  Description of Artificial Sequence: Synthetic oligonucleotide
  Antisense strand to SEQ ID NO: 2496190
ucauuucccagacuggagu

SEQ ID NO: 2496192 - RNA, 19 nt, Artificial Sequence
  Description of Artificial Sequence: Synthetic oligonucleotide
  Sense strand starting at position 1112 of SEQ ID NO: 1887782
cugguugagcgguggagau

SEQ ID NO: 2496193 - RNA, 19 nt, Artificial Sequence
  Description of Artificial Sequence: Synthetic oligonucleotide
  Antisense strand to SEQ ID NO: 2496192
aucuccaccgcucaaccag

SEQ ID NO: 2496194 - RNA, 19 nt, Artificial Sequence
  Description of Artificial Sequence: Synthetic oligonucleotide
  Sense strand starting at position 1128 of SEQ ID NO: 1887782
gaugacguuuccugaggua

SEQ ID NO: 2496195 - RNA, 19 nt, Artificial Sequence
  Description of Artificial Sequence: Synthetic oligonucleotide
  Antisense strand to SEQ ID NO: 2496194
uaccucaggaaacgucauc

SEQ ID NO: 2496196 - RNA, 19 nt, Artificial Sequence
  Description of Artificial Sequence: Synthetic oligonucleotide
  Sense strand starting at position 1352 of SEQ ID NO: 1887782
ggacaauggcuucgugagu

SEQ ID NO: 2496197 - RNA, 19 nt, Artificial Sequence
  Description of Artificial Sequence: Synthetic oligonucleotide
  Antisense strand to SEQ ID NO: 2496196
acucacgaagccauugucc

SEQ ID NO: 2496198 - RNA, 19 nt, Artificial Sequence
  Description of Artificial Sequence: Synthetic oligonucleotide
  Sense strand starting at position 1653 of SEQ ID NO: 1887782
ccugguuucccgggagcuu

SEQ ID NO: 2496199 - RNA, 19 nt, Artificial Sequence
  Description of Artificial Sequence: Synthetic oligonucleotide
  Antisense strand to SEQ ID NO: 2496198
aagcucccgggaaaccagg

SEQ ID NO: 2496200 - RNA, 19 nt, Artificial Sequence
  Description of Artificial Sequence: Synthetic oligonucleotide
  Sense strand starting at position 1720 of SEQ ID NO: 1887782
ccagcaaggucccagaaua

SEQ ID NO: 2496201 - RNA, 19 nt, Artificial Sequence
  Description of Artificial Sequence: Synthetic oligonucleotide
  Antisense strand to SEQ ID NO: 2496200
uauucugggaccuugcugg

SEQ ID NO: 2496202 - RNA, 19 nt, Artificial Sequence
  Description of Artificial Sequence: Synthetic oligonucleotide
  Sense strand starting at position 1730 of SEQ ID NO: 1887782
cccagaauauuuggcgauu

SEQ ID NO: 2496203 - RNA, 19 nt, Artificial Sequence
  Description of Artificial Sequence: Synthetic oligonucleotide
  Antisense strand to SEQ ID NO: 2496202
aaucgccaaauauucuggg

SEQ ID NO: 2496204 - RNA, 19 nt, Artificial Sequence
  Description of Artificial Sequence: Synthetic oligonucleotide
  Sense strand starting at position 1732 of SEQ ID NO: 1887782
cagaauauuuggcgauugu

SEQ ID NO: 2496205 - RNA, 19 nt, Artificial Sequence
  Description of Artificial Sequence: Synthetic oligonucleotide
  Antisense strand to SEQ ID NO: 2496204
acaaucgccaaauauucug

SEQ ID NO: 2496206 - RNA, 19 nt, Artificial Sequence
  Description of Artificial Sequence: Synthetic oligonucleotide
  Sense strand starting at position 1736 of SEQ ID NO: 1887782
auauuuggcgauugucuua

SEQ ID NO: 2496207 - RNA, 19 nt, Artificial Sequence
  Description of Artificial Sequence: Synthetic oligonucleotide
  Antisense strand to SEQ ID NO: 2496206
uaagacaaucgccaaauau

SEQ ID NO: 2496208 - RNA, 19 nt, Artificial Sequence
  Description of Artificial Sequence: Synthetic oligonucleotide
  Sense strand starting at position 1875 of SEQ ID NO: 1887782
gggccauacuuggguaaua

SEQ ID NO: 2496209 - RNA, 19 nt, Artificial Sequence
  Description of Artificial Sequence: Synthetic oligonucleotide
  Antisense strand to SEQ ID NO: 2496208
uauuacccaaguauggccc

SEQ ID NO: 2496210 - RNA, 19 nt, Artificial Sequence
  Description of Artificial Sequence: Synthetic oligonucleotide
  Sense strand starting at position 1876 of SEQ ID NO: 1887782
ggccauacuuggguaauau

SEQ ID NO: 2496211 - RNA, 19 nt, Artificial Sequence
  Description of Artificial Sequence: Synthetic oligonucleotide
  Antisense strand to SEQ ID NO: 2496210
auauuacccaaguauggcc

SEQ ID NO: 2496212 - RNA, 19 nt, Artificial Sequence
  Description of Artificial Sequence: Synthetic oligonucleotide
  Sense strand starting at position 1877 of SEQ ID NO: 1887782
gccauacuuggguaauauc

SEQ ID NO: 2496213 - RNA, 19 nt, Artificial Sequence
  Description of Artificial Sequence: Synthetic oligonucleotide
  Antisense strand to SEQ ID NO: 2496212
gauauuacccaaguauggc

SEQ ID NO: 2496214 - RNA, 19 nt, Artificial Sequence
  Description of Artificial Sequence: Synthetic oligonucleotide
  Sense strand starting at position 1885 of SEQ ID NO: 1887782
uggguaauaucccgaaacu

SEQ ID NO: 2496215 - RNA, 19 nt, Artificial Sequence
  Description of Artificial Sequence: Synthetic oligonucleotide
  Antisense strand to SEQ ID NO: 2496214
aguuucgggauauuaccca

SEQ ID NO: 2496216 - RNA, 19 nt, Artificial Sequence
  Description of Artificial Sequence: Synthetic oligonucleotide
  Sense strand starting at position 1918 of SEQ ID NO: 1887782
uucgacucagucugaguaa

SEQ ID NO: 2496217 - RNA, 19 nt, Artificial Sequence
  Description of Artificial Sequence: Synthetic oligonucleotide
  Antisense strand to SEQ ID NO: 2496216
uuacucagacugagucgaa

SEQ ID NO: 2496218 - RNA, 19 nt, Artificial Sequence
  Description of Artificial Sequence: Synthetic oligonucleotide
  Sense strand starting at position 1919 of SEQ ID NO: 1887782
ucgacucagucugaguaaa

SEQ ID NO: 2496219 - RNA, 19 nt, Artificial Sequence
  Description of Artificial Sequence: Synthetic oligonucleotide
  Antisense strand to SEQ ID NO: 2496218
uuuacucagacugagucga

SEQ ID NO: 2496220 - RNA, 19 nt, Artificial Sequence
  Description of Artificial Sequence: Synthetic oligonucleotide
  Sense strand starting at position 1921 of SEQ ID NO: 1887782
gacucagucugaguaaacu

SEQ ID NO: 2496221 - RNA, 19 nt, Artificial Sequence
  Description of Artificial Sequence: Synthetic oligonucleotide
  Antisense strand to SEQ ID NO: 2496220
aguuuacucagacugaguc

SEQ ID NO: 2496222 - RNA, 19 nt, Artificial Sequence
  Description of Artificial Sequence: Synthetic oligonucleotide
  Sense strand starting at position 1930 of SEQ ID NO: 1887782
ugaguaaacuguccacgaa

SEQ ID NO: 2496223 - RNA, 19 nt, Artificial Sequence
  Description of Artificial Sequence: Synthetic oligonucleotide
  Antisense strand to SEQ ID NO: 2496222
uucguggacaguuuacuca

SEQ ID NO: 2496224 - RNA, 19 nt, Artificial Sequence
  Description of Artificial Sequence: Synthetic oligonucleotide
  Sense strand starting at position 1931 of SEQ ID NO: 1887782
gaguaaacuguccacgaag

SEQ ID NO: 2496225 - RNA, 19 nt, Artificial Sequence
  Description of Artificial Sequence: Synthetic oligonucleotide
  Antisense strand to SEQ ID NO: 2496224
cuucguggacaguuuacuc

SEQ ID NO: 2496226 - RNA, 19 nt, Artificial Sequence
  Description of Artificial Sequence: Synthetic oligonucleotide
  Sense strand starting at position 2528 of SEQ ID NO: 1887782
gccaccgugucaucccaau

SEQ ID NO: 2496227 - RNA, 19 nt, Artificial Sequence
  Description of Artificial Sequence: Synthetic oligonucleotide
  Antisense strand to SEQ ID NO: 2496226
auugggaugacacgguggc

SEQ ID NO: 2496228 - RNA, 19 nt, Artificial Sequence
  Description of Artificial Sequence: Synthetic oligonucleotide
  Sense strand starting at position 2624 of SEQ ID NO: 1887782
gcaugaugccgugguugga

SEQ ID NO: 2496229 - RNA, 19 nt, Artificial Sequence
  Description of Artificial Sequence: Synthetic oligonucleotide
  Antisense strand to SEQ ID NO: 2496228
uccaaccacggcaucaugc

SEQ ID NO: 2496230 - RNA, 19 nt, Artificial Sequence
  Description of Artificial Sequence: Synthetic oligonucleotide
  Sense strand starting at position 2961 of SEQ ID NO: 1887782
ucugauuucucgccguaga

SEQ ID NO: 2496231 - RNA, 19 nt, Artificial Sequence
  Description of Artificial Sequence: Synthetic oligonucleotide
  Antisense strand to SEQ ID NO: 2496230
ucuacggcgagaaaucaga

SEQ ID NO: 2496232 - RNA, 19 nt, Artificial Sequence
  Description of Artificial Sequence: Synthetic oligonucleotide
  Sense strand starting at position 2962 of SEQ ID NO: 1887782
cugauuucucgccguagau

SEQ ID NO: 2496233 - RNA, 19 nt, Artificial Sequence
  Description of Artificial Sequence: Synthetic oligonucleotide
  Antisense strand to SEQ ID NO: 2496232
aucuacggcgagaaaucag

SEQ ID NO: 2496234 - RNA, 19 nt, Artificial Sequence
  Description of Artificial Sequence: Synthetic oligonucleotide
  Sense strand starting at position 3752 of SEQ ID NO: 1887782
gucuaaagugcucaugcca

SEQ ID NO: 2496235 - RNA, 19 nt, Artificial Sequence
  Description of Artificial Sequence: Synthetic oligonucleotide
  Antisense strand to SEQ ID NO: 2496234
uggcaugagcacuuuagac

SEQ ID NO: 2496236 - RNA, 19 nt, Artificial Sequence
  Description of Artificial Sequence: Synthetic oligonucleotide
  Sense strand starting at position 3955 of SEQ ID NO: 1887782
gggcucagcccucggagaa

SEQ ID NO: 2496237 - RNA, 19 nt, Artificial Sequence
  Description of Artificial Sequence: Synthetic oligonucleotide
  Antisense strand to SEQ ID NO: 2496236
uucuccgagggcugagccc

SEQ ID NO: 2496238 - RNA, 19 nt, Artificial Sequence
  Description of Artificial Sequence: Synthetic oligonucleotide
  Sense strand starting at position 105 of SEQ ID NO: 1887783
aacguauacuuuguguuaa

SEQ ID NO: 2496239 - RNA, 19 nt, Artificial Sequence
  Description of Artificial Sequence: Synthetic oligonucleotide
  Antisense strand to SEQ ID NO: 2496238
uuaacacaaaguauacguu

SEQ ID NO: 2496240 - RNA, 19 nt, Artificial Sequence
  Description of Artificial Sequence: Synthetic oligonucleotide
  Sense strand starting at position 107 of SEQ ID NO: 1887783
cguauacuuuguguuaaua

SEQ ID NO: 2496241 - RNA, 19 nt, Artificial Sequence
  Description of Artificial Sequence: Synthetic oligonucleotide
  Antisense strand to SEQ ID NO: 2496240
uauuaacacaaaguauacg

SEQ ID NO: 2496242 - RNA, 19 nt, Artificial Sequence
  Description of Artificial Sequence: Synthetic oligonucleotide
  Sense strand starting at position 209 of SEQ ID NO: 1887783
uggauagguuaauugcuua

SEQ ID NO: 2496243 - RNA, 19 nt, Artificial Sequence
  Description of Artificial Sequence: Synthetic oligonucleotide
  Antisense strand to SEQ ID NO: 2496242
uaagcaauuaaccuaucca

SEQ ID NO: 2496244 - RNA, 19 nt, Artificial Sequence
  Description of Artificial Sequence: Synthetic oligonucleotide
  Sense strand starting at position 212 of SEQ ID NO: 1887783
auagguuaauugcuuaacu

SEQ ID NO: 2496245 - RNA, 19 nt, Artificial Sequence
  Description of Artificial Sequence: Synthetic oligonucleotide
  Antisense strand to SEQ ID NO: 2496244
aguuaagcaauuaaccuau

SEQ ID NO: 2496246 - RNA, 19 nt, Artificial Sequence
  Description of Artificial Sequence: Synthetic oligonucleotide
  Sense strand starting at position 214 of SEQ ID NO: 1887783
agguuaauugcuuaacucu

SEQ ID NO: 2496247 - RNA, 19 nt, Artificial Sequence
  Description of Artificial Sequence: Synthetic oligonucleotide
  Antisense strand to SEQ ID NO: 2496246
agaguuaagcaauuaaccu

SEQ ID NO: 2496248 - RNA, 19 nt, Artificial Sequence
  Description of Artificial Sequence: Synthetic oligonucleotide
  Sense strand starting at position 561 of SEQ ID NO: 1887783
cuggguacauguguaucaa

SEQ ID NO: 2496249 - RNA, 19 nt, Artificial Sequence
  Description of Artificial Sequence: Synthetic oligonucleotide
  Antisense strand to SEQ ID NO: 2496248
uugauacacauguacccag

SEQ ID NO: 2496250 - RNA, 19 nt, Artificial Sequence
  Description of Artificial Sequence: Synthetic oligonucleotide
  Sense strand starting at position 562 of SEQ ID NO: 1887783
uggguacauguguaucaaa

SEQ ID NO: 2496251 - RNA, 19 nt, Artificial Sequence
  Description of Artificial Sequence: Synthetic oligonucleotide
  Antisense strand to SEQ ID NO: 2496250
uuugauacacauguaccca

SEQ ID NO: 2496252 - RNA, 19 nt, Artificial Sequence
  Description of Artificial Sequence: Synthetic oligonucleotide
  Sense strand starting at position 586 of SEQ ID NO: 1887783
cgcuguacacccuaaauau

SEQ ID NO: 2496253 - RNA, 19 nt, Artificial Sequence
  Description of Artificial Sequence: Synthetic oligonucleotide
  Antisense strand to SEQ ID NO: 2496252
auauuuaggguguacagcg

SEQ ID NO: 2496254 - RNA, 19 nt, Artificial Sequence
  Description of Artificial Sequence: Synthetic oligonucleotide
  Sense strand starting at position 617 of SEQ ID NO: 1887783
cauacuguauugucaggua

SEQ ID NO: 2496255 - RNA, 19 nt, Artificial Sequence
  Description of Artificial Sequence: Synthetic oligonucleotide
  Antisense strand to SEQ ID NO: 2496254
uaccugacaauacaguaug

SEQ ID NO: 2496256 - RNA, 19 nt, Artificial Sequence
  Description of Artificial Sequence: Synthetic oligonucleotide
  Sense strand starting at position 626 of SEQ ID NO: 1887783
uugucagguagugauaaau

SEQ ID NO: 2496257 - RNA, 19 nt, Artificial Sequence
  Description of Artificial Sequence: Synthetic oligonucleotide
  Antisense strand to SEQ ID NO: 2496256
auuuaucacuaccugacaa

SEQ ID NO: 2496258 - RNA, 19 nt, Artificial Sequence
  Description of Artificial Sequence: Synthetic oligonucleotide
  Sense strand starting at position 754 of SEQ ID NO: 1887783
gguccuguuggagagcauu

SEQ ID NO: 2496259 - RNA, 19 nt, Artificial Sequence
  Description of Artificial Sequence: Synthetic oligonucleotide
  Antisense strand to SEQ ID NO: 2496258
aaugcucuccaacaggacc

SEQ ID NO: 2496260 - RNA, 19 nt, Artificial Sequence
  Description of Artificial Sequence: Synthetic oligonucleotide
  Sense strand starting at position 760 of SEQ ID NO: 1887783
guuggagagcauugguauc

SEQ ID NO: 2496261 - RNA, 19 nt, Artificial Sequence
  Description of Artificial Sequence: Synthetic oligonucleotide
  Antisense strand to SEQ ID NO: 2496260
gauaccaaugcucuccaac

SEQ ID NO: 2496262 - RNA, 19 nt, Artificial Sequence
  Description of Artificial Sequence: Synthetic oligonucleotide
  Sense strand starting at position 766 of SEQ ID NO: 1887783
gagcauugguauccaguaa

SEQ ID NO: 2496263 - RNA, 19 nt, Artificial Sequence
  Description of Artificial Sequence: Synthetic oligonucleotide
  Antisense strand to SEQ ID NO: 2496262
uuacuggauaccaaugcuc

SEQ ID NO: 2496264 - RNA, 19 nt, Artificial Sequence
  Description of Artificial Sequence: Synthetic oligonucleotide
  Sense strand starting at position 767 of SEQ ID NO: 1887783
agcauugguauccaguaag

SEQ ID NO: 2496265 - RNA, 19 nt, Artificial Sequence
  Description of Artificial Sequence: Synthetic oligonucleotide
  Antisense strand to SEQ ID NO: 2496264
cuuacuggauaccaaugcu

SEQ ID NO: 2496266 - RNA, 19 nt, Artificial Sequence
  Description of Artificial Sequence: Synthetic oligonucleotide
  Sense strand starting at position 773 of SEQ ID NO: 1887783
gguauccaguaaggauuua

SEQ ID NO: 2496267 - RNA, 19 nt, Artificial Sequence
  Description of Artificial Sequence: Synthetic oligonucleotide
  Antisense strand to SEQ ID NO: 2496266
uaaauccuuacuggauacc

SEQ ID NO: 2496268 - RNA, 19 nt, Artificial Sequence
  Description of Artificial Sequence: Synthetic oligonucleotide
  Sense strand starting at position 1187 of SEQ ID NO: 1887783
ggagacugcaaccgagaaa

SEQ ID NO: 2496269 - RNA, 19 nt, Artificial Sequence
  Description of Artificial Sequence: Synthetic oligonucleotide
  Antisense strand to SEQ ID NO: 2496268
uuucucgguugcagucucc

SEQ ID NO: 2496270 - RNA, 19 nt, Artificial Sequence
  Description of Artificial Sequence: Synthetic oligonucleotide
  Sense strand starting at position 1283 of SEQ ID NO: 1887783
ugacgucaucgggacguua

SEQ ID NO: 2496271 - RNA, 19 nt, Artificial Sequence
  Description of Artificial Sequence: Synthetic oligonucleotide
  Antisense strand to SEQ ID NO: 2496270
uaacgucccgaugacguca

SEQ ID NO: 2496272 - RNA, 19 nt, Artificial Sequence
  Description of Artificial Sequence: Synthetic oligonucleotide
  Sense strand starting at position 1296 of SEQ ID NO: 1887783
acguuaagcaucguagcau

SEQ ID NO: 2496273 - RNA, 19 nt, Artificial Sequence
  Description of Artificial Sequence: Synthetic oligonucleotide
  Antisense strand to SEQ ID NO: 2496272
augcuacgaugcuuaacgu

SEQ ID NO: 2496274 - RNA, 19 nt, Artificial Sequence
  Description of Artificial Sequence: Synthetic oligonucleotide
  Sense strand starting at position 1308 of SEQ ID NO: 1887783
guagcauuaccuggacgua

SEQ ID NO: 2496275 - RNA, 19 nt, Artificial Sequence
  Description of Artificial Sequence: Synthetic oligonucleotide
  Antisense strand to SEQ ID NO: 2496274
uacguccagguaaugcuac

SEQ ID NO: 2496276 - RNA, 19 nt, Artificial Sequence
  Description of Artificial Sequence: Synthetic oligonucleotide
  Sense strand starting at position 1342 of SEQ ID NO: 1887783
ccggacagguccucugaua

SEQ ID NO: 2496277 - RNA, 19 nt, Artificial Sequence
  Description of Artificial Sequence: Synthetic oligonucleotide
  Antisense strand to SEQ ID NO: 2496276
uaucagaggaccuguccgg

SEQ ID NO: 2496278 - RNA, 19 nt, Artificial Sequence
  Description of Artificial Sequence: Synthetic oligonucleotide
  Sense strand starting at position 1362 of SEQ ID NO: 1887783
ucggguagguucucaauca

SEQ ID NO: 2496279 - RNA, 19 nt, Artificial Sequence
  Description of Artificial Sequence: Synthetic oligonucleotide
  Antisense strand to SEQ ID NO: 2496278
ugauugagaaccuacccga

SEQ ID NO: 2496280 - RNA, 19 nt, Artificial Sequence
  Description of Artificial Sequence: Synthetic oligonucleotide
  Sense strand starting at position 1390 of SEQ ID NO: 1887783
uuaguuauuuggucuguca

SEQ ID NO: 2496281 - RNA, 19 nt, Artificial Sequence
  Description of Artificial Sequence: Synthetic oligonucleotide
  Antisense strand to SEQ ID NO: 2496280
ugacagaccaaauaacuaa

SEQ ID NO: 2496282 - RNA, 19 nt, Artificial Sequence
  Description of Artificial Sequence: Synthetic oligonucleotide
  Sense strand starting at position 1392 of SEQ ID NO: 1887783
aguuauuuggucugucaau

SEQ ID NO: 2496283 - RNA, 19 nt, Artificial Sequence
  Description of Artificial Sequence: Synthetic oligonucleotide
  Antisense strand to SEQ ID NO: 2496282
auugacagaccaaauaacu

SEQ ID NO: 2496284 - RNA, 19 nt, Artificial Sequence
  Description of Artificial Sequence: Synthetic oligonucleotide
  Sense strand starting at position 1393 of SEQ ID NO: 1887783
guuauuuggucugucaauc

SEQ ID NO: 2496285 - RNA, 19 nt, Artificial Sequence
  Description of Artificial Sequence: Synthetic oligonucleotide
  Antisense strand to SEQ ID NO: 2496284
gauugacagaccaaauaac

SEQ ID NO: 2496286 - RNA, 19 nt, Artificial Sequence
  Description of Artificial Sequence: Synthetic oligonucleotide
  Sense strand starting at position 2071 of SEQ ID NO: 1887783
gguggagcuuucccaagau

SEQ ID NO: 2496287 - RNA, 19 nt, Artificial Sequence
  Description of Artificial Sequence: Synthetic oligonucleotide
  Antisense strand to SEQ ID NO: 2496286
aucuugggaaagcuccacc

SEQ ID NO: 2496288 - RNA, 19 nt, Artificial Sequence
  Description of Artificial Sequence: Synthetic oligonucleotide
  Sense strand starting at position 2159 of SEQ ID NO: 1887783
cgugaugggcgugaccaau

SEQ ID NO: 2496289 - RNA, 19 nt, Artificial Sequence
  Description of Artificial Sequence: Synthetic oligonucleotide
  Antisense strand to SEQ ID NO: 2496288
auuggucacgcccaucacg

SEQ ID NO: 2496290 - RNA, 19 nt, Artificial Sequence
  Description of Artificial Sequence: Synthetic oligonucleotide
  Sense strand starting at position 2214 of SEQ ID NO: 1887783
ucacgaggcuuguccugau

SEQ ID NO: 2496291 - RNA, 19 nt, Artificial Sequence
  Description of Artificial Sequence: Synthetic oligonucleotide
  Antisense strand to SEQ ID NO: 2496290
aucaggacaagccucguga

SEQ ID NO: 2496292 - RNA, 19 nt, Artificial Sequence
  Description of Artificial Sequence: Synthetic oligonucleotide
  Sense strand starting at position 2448 of SEQ ID NO: 1887783
ugagcacuuuacccgaauu

SEQ ID NO: 2496293 - RNA, 19 nt, Artificial Sequence
  Description of Artificial Sequence: Synthetic oligonucleotide
  Antisense strand to SEQ ID NO: 2496292
aauucggguaaagugcuca

SEQ ID NO: 2496294 - RNA, 19 nt, Artificial Sequence
  Description of Artificial Sequence: Synthetic oligonucleotide
  Sense strand starting at position 2450 of SEQ ID NO: 1887783
agcacuuuacccgaauuaa

SEQ ID NO: 2496295 - RNA, 19 nt, Artificial Sequence
  Description of Artificial Sequence: Synthetic oligonucleotide
  Antisense strand to SEQ ID NO: 2496294
uuaauucggguaaagugcu

SEQ ID NO: 2496296 - RNA, 19 nt, Artificial Sequence
  Description of Artificial Sequence: Synthetic oligonucleotide
  Sense strand starting at position 2486 of SEQ ID NO: 1887783
gcccuuugagguugauacu

SEQ ID NO: 2496297 - RNA, 19 nt, Artificial Sequence
  Description of Artificial Sequence: Synthetic oligonucleotide
  Antisense strand to SEQ ID NO: 2496296
aguaucaaccucaaagggc

SEQ ID NO: 2496298 - RNA, 19 nt, Artificial Sequence
  Description of Artificial Sequence: Synthetic oligonucleotide
  Sense strand starting at position 2558 of SEQ ID NO: 1887783
acaguuuauaaguguugga

SEQ ID NO: 2496299 - RNA, 19 nt, Artificial Sequence
  Description of Artificial Sequence: Synthetic oligonucleotide
  Antisense strand to SEQ ID NO: 2496298
uccaacacuuauaaacugu

SEQ ID NO: 2496300 - RNA, 19 nt, Artificial Sequence
  Description of Artificial Sequence: Synthetic oligonucleotide
  Sense strand starting at position 2652 of SEQ ID NO: 1887783
gggacuuuggguuguugga

SEQ ID NO: 2496301 - RNA, 19 nt, Artificial Sequence
  Description of Artificial Sequence: Synthetic oligonucleotide
  Antisense strand to SEQ ID NO: 2496300
uccaacaacccaaaguccc

SEQ ID NO: 2496302 - RNA, 19 nt, Artificial Sequence
  Description of Artificial Sequence: Synthetic oligonucleotide
  Sense strand starting at position 2770 of SEQ ID NO: 1887783
acauaaggccuagguagau

SEQ ID NO: 2496303 - RNA, 19 nt, Artificial Sequence
  Description of Artificial Sequence: Synthetic oligonucleotide
  Antisense strand to SEQ ID NO: 2496302
aucuaccuaggccuuaugu

SEQ ID NO: 2496304 - RNA, 19 nt, Artificial Sequence
  Description of Artificial Sequence: Synthetic oligonucleotide
  Sense strand starting at position 3232 of SEQ ID NO: 1887783
cugcacacagguugauaau

SEQ ID NO: 2496305 - RNA, 19 nt, Artificial Sequence
  Description of Artificial Sequence: Synthetic oligonucleotide
  Antisense strand to SEQ ID NO: 2496304
auuaucaaccugugugcag

SEQ ID NO: 2496306 - RNA, 19 nt, Artificial Sequence
  Description of Artificial Sequence: Synthetic oligonucleotide
  Sense strand starting at position 3335 of SEQ ID NO: 1887783
uuuggagacugggauucua

SEQ ID NO: 2496307 - RNA, 19 nt, Artificial Sequence
  Description of Artificial Sequence: Synthetic oligonucleotide
  Antisense strand to SEQ ID NO: 2496306
uagaaucccagucuccaaa

SEQ ID NO: 2496308 - RNA, 19 nt, Artificial Sequence
  Description of Artificial Sequence: Synthetic oligonucleotide
  Sense strand starting at position 3628 of SEQ ID NO: 1887783
gugcguucccagcagaaca

SEQ ID NO: 2496309 - RNA, 19 nt, Artificial Sequence
  Description of Artificial Sequence: Synthetic oligonucleotide
  Antisense strand to SEQ ID NO: 2496308
uguucugcugggaacgcac

SEQ ID NO: 2496310 - RNA, 19 nt, Artificial Sequence
  Description of Artificial Sequence: Synthetic oligonucleotide
  Sense strand starting at position 3686 of SEQ ID NO: 1887783
cgggacuugucugcagaga

SEQ ID NO: 2496311 - RNA, 19 nt, Artificial Sequence
  Description of Artificial Sequence: Synthetic oligonucleotide
  Antisense strand to SEQ ID NO: 2496310
ucucugcagacaagucccg

SEQ ID NO: 2496312 - RNA, 19 nt, Artificial Sequence
  Description of Artificial Sequence: Synthetic oligonucleotide
  Sense strand starting at position 3687 of SEQ ID NO: 1887783
gggacuugucugcagagac

SEQ ID NO: 2496313 - RNA, 19 nt, Artificial Sequence
  Description of Artificial Sequence: Synthetic oligonucleotide
  Antisense strand to SEQ ID NO: 2496312
gucucugcagacaaguccc

SEQ ID NO: 2496314 - RNA, 19 nt, Artificial Sequence
  Description of Artificial Sequence: Synthetic oligonucleotide
  Sense strand starting at position 3723 of SEQ ID NO: 1887783
gauuuagcuucugcggcau

SEQ ID NO: 2496315 - RNA, 19 nt, Artificial Sequence
  Description of Artificial Sequence: Synthetic oligonucleotide
  Antisense strand to SEQ ID NO: 2496314
augccgcagaagcuaaauc

SEQ ID NO: 2496316 - RNA, 19 nt, Artificial Sequence
  Description of Artificial Sequence: Synthetic oligonucleotide
  Sense strand starting at position 3928 of SEQ ID NO: 1887783
acagcugugccucaucaga

SEQ ID NO: 2496317 - RNA, 19 nt, Artificial Sequence
  Description of Artificial Sequence: Synthetic oligonucleotide
  Antisense strand to SEQ ID NO: 2496316
ucugaugaggcacagcugu

SEQ ID NO: 2496318 - RNA, 19 nt, Artificial Sequence
  Description of Artificial Sequence: Synthetic oligonucleotide
  Sense strand starting at position 108 of SEQ ID NO: 1887784
gcgggaaacucacacuuau

SEQ ID NO: 2496319 - RNA, 19 nt, Artificial Sequence
  Description of Artificial Sequence: Synthetic oligonucleotide
  Antisense strand to SEQ ID NO: 2496318
auaagugugaguuucccgc

SEQ ID NO: 2496320 - RNA, 19 nt, Artificial Sequence
  Description of Artificial Sequence: Synthetic oligonucleotide
  Sense strand starting at position 352 of SEQ ID NO: 1887784
acagauaacucuuauguag

SEQ ID NO: 2496321 - RNA, 19 nt, Artificial Sequence
  Description of Artificial Sequence: Synthetic oligonucleotide
  Antisense strand to SEQ ID NO: 2496320
cuacauaagaguuaucugu

SEQ ID NO: 2496322 - RNA, 19 nt, Artificial Sequence
  Description of Artificial Sequence: Synthetic oligonucleotide
  Sense strand starting at position 354 of SEQ ID NO: 1887784
agauaacucuuauguagua

SEQ ID NO: 2496323 - RNA, 19 nt, Artificial Sequence
  Description of Artificial Sequence: Synthetic oligonucleotide
  Antisense strand to SEQ ID NO: 2496322
uacuacauaagaguuaucu

SEQ ID NO: 2496324 - RNA, 19 nt, Artificial Sequence
  Description of Artificial Sequence: Synthetic oligonucleotide
  Sense strand starting at position 781 of SEQ ID NO: 1887784
gggucaauuguguguuguu

SEQ ID NO: 2496325 - RNA, 19 nt, Artificial Sequence
  Description of Artificial Sequence: Synthetic oligonucleotide
  Antisense strand to SEQ ID NO: 2496324
aacaacacacaauugaccc

SEQ ID NO: 2496326 - RNA, 19 nt, Artificial Sequence
  Description of Artificial Sequence: Synthetic oligonucleotide
  Sense strand starting at position 782 of SEQ ID NO: 1887784
ggucaauuguguguuguug

SEQ ID NO: 2496327 - RNA, 19 nt, Artificial Sequence
  Description of Artificial Sequence: Synthetic oligonucleotide
  Antisense strand to SEQ ID NO: 2496326
caacaacacacaauugacc

SEQ ID NO: 2496328 - RNA, 19 nt, Artificial Sequence
  Description of Artificial Sequence: Synthetic oligonucleotide
  Sense strand starting at position 806 of SEQ ID NO: 1887784
caggaacaguucuaaaggu

SEQ ID NO: 2496329 - RNA, 19 nt, Artificial Sequence
  Description of Artificial Sequence: Synthetic oligonucleotide
  Antisense strand to SEQ ID NO: 2496328
accuuuagaacuguuccug

SEQ ID NO: 2496330 - RNA, 19 nt, Artificial Sequence
  Description of Artificial Sequence: Synthetic oligonucleotide
  Sense strand starting at position 991 of SEQ ID NO: 1887784
uccagagucccagaucuua

SEQ ID NO: 2496331 - RNA, 19 nt, Artificial Sequence
  Description of Artificial Sequence: Synthetic oligonucleotide
  Antisense strand to SEQ ID NO: 2496330
uaagaucugggacucugga

SEQ ID NO: 2496332 - RNA, 19 nt, Artificial Sequence
  Description of Artificial Sequence: Synthetic oligonucleotide
  Sense strand starting at position 996 of SEQ ID NO: 1887784
agucccagaucuuagcuau

SEQ ID NO: 2496333 - RNA, 19 nt, Artificial Sequence
  Description of Artificial Sequence: Synthetic oligonucleotide
  Antisense strand to SEQ ID NO: 2496332
auagcuaagaucugggacu

SEQ ID NO: 2496334 - RNA, 19 nt, Artificial Sequence
  Description of Artificial Sequence: Synthetic oligonucleotide
  Sense strand starting at position 1019 of SEQ ID NO: 1887784
ucgcuaaagucucuugaaa

SEQ ID NO: 2496335 - RNA, 19 nt, Artificial Sequence
  Description of Artificial Sequence: Synthetic oligonucleotide
  Antisense strand to SEQ ID NO: 2496334
uuucaagagacuuuagcga

SEQ ID NO: 2496336 - RNA, 19 nt, Artificial Sequence
  Description of Artificial Sequence: Synthetic oligonucleotide
  Sense strand starting at position 1195 of SEQ ID NO: 1887784
uucuauauuuguugaguga

SEQ ID NO: 2496337 - RNA, 19 nt, Artificial Sequence
  Description of Artificial Sequence: Synthetic oligonucleotide
  Antisense strand to SEQ ID NO: 2496336
ucacucaacaaauauagaa

SEQ ID NO: 2496338 - RNA, 19 nt, Artificial Sequence
  Description of Artificial Sequence: Synthetic oligonucleotide
  Sense strand starting at position 2082 of SEQ ID NO: 1887784
ggauugguggcgugagaag

SEQ ID NO: 2496339 - RNA, 19 nt, Artificial Sequence
  Description of Artificial Sequence: Synthetic oligonucleotide
  Antisense strand to SEQ ID NO: 2496338
cuucucacgccaccaaucc

SEQ ID NO: 2496340 - RNA, 19 nt, Artificial Sequence
  Description of Artificial Sequence: Synthetic oligonucleotide
  Sense strand starting at position 2131 of SEQ ID NO: 1887784
agcgauuggcugagcaagu

SEQ ID NO: 2496341 - RNA, 19 nt, Artificial Sequence
  Description of Artificial Sequence: Synthetic oligonucleotide
  Antisense strand to SEQ ID NO: 2496340
acuugcucagccaaucgcu

SEQ ID NO: 2496342 - RNA, 19 nt, Artificial Sequence
  Description of Artificial Sequence: Synthetic oligonucleotide
  Sense strand starting at position 2189 of SEQ ID NO: 1887784
cggauuuagucuggaguac

SEQ ID NO: 2496343 - RNA, 19 nt, Artificial Sequence
  Description of Artificial Sequence: Synthetic oligonucleotide
  Antisense strand to SEQ ID NO: 2496342
guacuccagacuaaauccg

SEQ ID NO: 2496344 - RNA, 19 nt, Artificial Sequence
  Description of Artificial Sequence: Synthetic oligonucleotide
  Sense strand starting at position 2215 of SEQ ID NO: 1887784
agagucgagucuccggauu

SEQ ID NO: 2496345 - RNA, 19 nt, Artificial Sequence
  Description of Artificial Sequence: Synthetic oligonucleotide
  Antisense strand to SEQ ID NO: 2496344
aauccggagacucgacucu

SEQ ID NO: 2496346 - RNA, 19 nt, Artificial Sequence
  Description of Artificial Sequence: Synthetic oligonucleotide
  Sense strand starting at position 2218 of SEQ ID NO: 1887784
gucgagucuccggauugga

SEQ ID NO: 2496347 - RNA, 19 nt, Artificial Sequence
  Description of Artificial Sequence: Synthetic oligonucleotide
  Antisense strand to SEQ ID NO: 2496346
uccaauccggagacucgac

SEQ ID NO: 2496348 - RNA, 19 nt, Artificial Sequence
  Description of Artificial Sequence: Synthetic oligonucleotide
  Sense strand starting at position 2337 of SEQ ID NO: 1887784
agcgauuacuguucucaaa

SEQ ID NO: 2496349 - RNA, 19 nt, Artificial Sequence
  Description of Artificial Sequence: Synthetic oligonucleotide
  Antisense strand to SEQ ID NO: 2496348
uuugagaacaguaaucgcu

SEQ ID NO: 2496350 - RNA, 19 nt, Artificial Sequence
  Description of Artificial Sequence: Synthetic oligonucleotide
  Sense strand starting at position 2339 of SEQ ID NO: 1887784
cgauuacuguucucaaagg

SEQ ID NO: 2496351 - RNA, 19 nt, Artificial Sequence
  Description of Artificial Sequence: Synthetic oligonucleotide
  Antisense strand to SEQ ID NO: 2496350
ccuuugagaacaguaaucg

SEQ ID NO: 2496352 - RNA, 19 nt, Artificial Sequence
  Description of Artificial Sequence: Synthetic oligonucleotide
  Sense strand starting at position 2344 of SEQ ID NO: 1887784
acuguucucaaaggcgaaa

SEQ ID NO: 2496353 - RNA, 19 nt, Artificial Sequence
  Description of Artificial Sequence: Synthetic oligonucleotide
  Antisense strand to SEQ ID NO: 2496352
uuucgccuuugagaacagu

SEQ ID NO: 2496354 - RNA, 19 nt, Artificial Sequence
  Description of Artificial Sequence: Synthetic oligonucleotide
  Sense strand starting at position 2429 of SEQ ID NO: 1887784
aaaccuuuacugugcgauu

SEQ ID NO: 2496355 - RNA, 19 nt, Artificial Sequence
  Description of Artificial Sequence: Synthetic oligonucleotide
  Antisense strand to SEQ ID NO: 2496354
aaucgcacaguaaagguuu

SEQ ID NO: 2496356 - RNA, 19 nt, Artificial Sequence
  Description of Artificial Sequence: Synthetic oligonucleotide
  Sense strand starting at position 2430 of SEQ ID NO: 1887784
aaccuuuacugugcgauuu

SEQ ID NO: 2496357 - RNA, 19 nt, Artificial Sequence
  Description of Artificial Sequence: Synthetic oligonucleotide
  Antisense strand to SEQ ID NO: 2496356
aaaucgcacaguaaagguu

SEQ ID NO: 2496358 - RNA, 19 nt, Artificial Sequence
  Description of Artificial Sequence: Synthetic oligonucleotide
  Sense strand starting at position 2431 of SEQ ID NO: 1887784
accuuuacugugcgauuua

SEQ ID NO: 2496359 - RNA, 19 nt, Artificial Sequence
  Description of Artificial Sequence: Synthetic oligonucleotide
  Antisense strand to SEQ ID NO: 2496358
uaaaucgcacaguaaaggu

SEQ ID NO: 2496360 - RNA, 19 nt, Artificial Sequence
  Description of Artificial Sequence: Synthetic oligonucleotide
  Sense strand starting at position 2432 of SEQ ID NO: 1887784
ccuuuacugugcgauuuau

SEQ ID NO: 2496361 - RNA, 19 nt, Artificial Sequence
  Description of Artificial Sequence: Synthetic oligonucleotide
  Antisense strand to SEQ ID NO: 2496360
auaaaucgcacaguaaagg

SEQ ID NO: 2496362 - RNA, 19 nt, Artificial Sequence
  Description of Artificial Sequence: Synthetic oligonucleotide
  Sense strand starting at position 2443 of SEQ ID NO: 1887784
cgauuuauauccuccgcgu

SEQ ID NO: 2496363 - RNA, 19 nt, Artificial Sequence
  Description of Artificial Sequence: Synthetic oligonucleotide
  Antisense strand to SEQ ID NO: 2496362
acgcggaggauauaaaucg

SEQ ID NO: 2496364 - RNA, 19 nt, Artificial Sequence
  Description of Artificial Sequence: Synthetic oligonucleotide
  Sense strand starting at position 2446 of SEQ ID NO: 1887784
uuuauauccuccgcguagu

SEQ ID NO: 2496365 - RNA, 19 nt, Artificial Sequence
  Description of Artificial Sequence: Synthetic oligonucleotide
  Antisense strand to SEQ ID NO: 2496364
acuacgcggaggauauaaa

SEQ ID NO: 2496366 - RNA, 19 nt, Artificial Sequence
  Description of Artificial Sequence: Synthetic oligonucleotide
  Sense strand starting at position 2592 of SEQ ID NO: 1887784
gugaaacucugccuagcaa

SEQ ID NO: 2496367 - RNA, 19 nt, Artificial Sequence
  Description of Artificial Sequence: Synthetic oligonucleotide
  Antisense strand to SEQ ID NO: 2496366
uugcuaggcagaguuucac

SEQ ID NO: 2496368 - RNA, 19 nt, Artificial Sequence
  Description of Artificial Sequence: Synthetic oligonucleotide
  Sense strand starting at position 2632 of SEQ ID NO: 1887784
gcggguuaauugguuagau

SEQ ID NO: 2496369 - RNA, 19 nt, Artificial Sequence
  Description of Artificial Sequence: Synthetic oligonucleotide
  Antisense strand to SEQ ID NO: 2496368
aucuaaccaauuaacccgc

SEQ ID NO: 2496370 - RNA, 19 nt, Artificial Sequence
  Description of Artificial Sequence: Synthetic oligonucleotide
  Sense strand starting at position 2633 of SEQ ID NO: 1887784
cggguuaauugguuagauu

SEQ ID NO: 2496371 - RNA, 19 nt, Artificial Sequence
  Description of Artificial Sequence: Synthetic oligonucleotide
  Antisense strand to SEQ ID NO: 2496370
aaucuaaccaauuaacccg

SEQ ID NO: 2496372 - RNA, 19 nt, Artificial Sequence
  Description of Artificial Sequence: Synthetic oligonucleotide
  Sense strand starting at position 2634 of SEQ ID NO: 1887784
ggguuaauugguuagauuc

SEQ ID NO: 2496373 - RNA, 19 nt, Artificial Sequence
  Description of Artificial Sequence: Synthetic oligonucleotide
  Antisense strand to SEQ ID NO: 2496372
gaaucuaaccaauuaaccc

SEQ ID NO: 2496374 - RNA, 19 nt, Artificial Sequence
  Description of Artificial Sequence: Synthetic oligonucleotide
  Sense strand starting at position 2928 of SEQ ID NO: 1887784
acacaagugcuaugcaaau

SEQ ID NO: 2496375 - RNA, 19 nt, Artificial Sequence
  Description of Artificial Sequence: Synthetic oligonucleotide
  Antisense strand to SEQ ID NO: 2496374
auuugcauagcacuugugu

SEQ ID NO: 2496376 - RNA, 19 nt, Artificial Sequence
  Description of Artificial Sequence: Synthetic oligonucleotide
  Sense strand starting at position 3292 of SEQ ID NO: 1887784
caagcuugugccugcugaa

SEQ ID NO: 2496377 - RNA, 19 nt, Artificial Sequence
  Description of Artificial Sequence: Synthetic oligonucleotide
  Antisense strand to SEQ ID NO: 2496376
uucagcaggcacaagcuug

SEQ ID NO: 2496378 - RNA, 19 nt, Artificial Sequence
  Description of Artificial Sequence: Synthetic oligonucleotide
  Sense strand starting at position 3349 of SEQ ID NO: 1887784
cugcuccauccuugucaua

SEQ ID NO: 2496379 - RNA, 19 nt, Artificial Sequence
  Description of Artificial Sequence: Synthetic oligonucleotide
  Antisense strand to SEQ ID NO: 2496378
uaugacaaggauggagcag

SEQ ID NO: 2496380 - RNA, 19 nt, Artificial Sequence
  Description of Artificial Sequence: Synthetic oligonucleotide
  Sense strand starting at position 3351 of SEQ ID NO: 1887784
gcuccauccuugucauaug

SEQ ID NO: 2496381 - RNA, 19 nt, Artificial Sequence
  Description of Artificial Sequence: Synthetic oligonucleotide
  Antisense strand to SEQ ID NO: 2496380
cauaugacaaggauggagc

SEQ ID NO: 2496382 - RNA, 19 nt, Artificial Sequence
  Description of Artificial Sequence: Synthetic oligonucleotide
  Sense strand starting at position 3352 of SEQ ID NO: 1887784
cuccauccuugucauauga

SEQ ID NO: 2496383 - RNA, 19 nt, Artificial Sequence
  Description of Artificial Sequence: Synthetic oligonucleotide
  Antisense strand to SEQ ID NO: 2496382
ucauaugacaaggauggag

SEQ ID NO: 2496384 - RNA, 19 nt, Artificial Sequence
  Description of Artificial Sequence: Synthetic oligonucleotide
  Sense strand starting at position 3415 of SEQ ID NO: 1887784
ccaaguaagucucuguuaa

SEQ ID NO: 2496385 - RNA, 19 nt, Artificial Sequence
  Description of Artificial Sequence: Synthetic oligonucleotide
  Antisense strand to SEQ ID NO: 2496384
uuaacagagacuuacuugg

SEQ ID NO: 2496386 - RNA, 19 nt, Artificial Sequence
  Description of Artificial Sequence: Synthetic oligonucleotide
  Sense strand starting at position 3715 of SEQ ID NO: 1887784
ggccuuacuugggauuaca

SEQ ID NO: 2496387 - RNA, 19 nt, Artificial Sequence
  Description of Artificial Sequence: Synthetic oligonucleotide
  Antisense strand to SEQ ID NO: 2496386
uguaaucccaaguaaggcc

SEQ ID NO: 2496388 - RNA, 19 nt, Artificial Sequence
  Description of Artificial Sequence: Synthetic oligonucleotide
  Sense strand starting at position 3810 of SEQ ID NO: 1887784
aggaucauuuguuguugua

SEQ ID NO: 2496389 - RNA, 19 nt, Artificial Sequence
  Description of Artificial Sequence: Synthetic oligonucleotide
  Antisense strand to SEQ ID NO: 2496388
uacaacaacaaaugauccu

SEQ ID NO: 2496390 - RNA, 19 nt, Artificial Sequence
  Description of Artificial Sequence: Synthetic oligonucleotide
  Sense strand starting at position 3812 of SEQ ID NO: 1887784
gaucauuuguuguuguauc

SEQ ID NO: 2496391 - RNA, 19 nt, Artificial Sequence
  Description of Artificial Sequence: Synthetic oligonucleotide
  Antisense strand to SEQ ID NO: 2496390
gauacaacaacaaaugauc

SEQ ID NO: 2496392 - RNA, 19 nt, Artificial Sequence
  Description of Artificial Sequence: Synthetic oligonucleotide
  Sense strand starting at position 3822 of SEQ ID NO: 1887784
uguuguaucuuggugucua

SEQ ID NO: 2496393 - RNA, 19 nt, Artificial Sequence
  Description of Artificial Sequence: Synthetic oligonucleotide
  Antisense strand to SEQ ID NO: 2496392
uagacaccaagauacaaca

SEQ ID NO: 2496394 - RNA, 19 nt, Artificial Sequence
  Description of Artificial Sequence: Synthetic oligonucleotide
  Sense strand starting at position 3826 of SEQ ID NO: 1887784
guaucuuggugucuagaac

SEQ ID NO: 2496395 - RNA, 19 nt, Artificial Sequence
  Description of Artificial Sequence: Synthetic oligonucleotide
  Antisense strand to SEQ ID NO: 2496394
guucuagacaccaagauac

SEQ ID NO: 2496396 - RNA, 19 nt, Artificial Sequence
  Description of Artificial Sequence: Synthetic oligonucleotide
  Sense strand starting at position 3827 of SEQ ID NO: 1887784
uaucuuggugucuagaaca

SEQ ID NO: 2496397 - RNA, 19 nt, Artificial Sequence
  Description of Artificial Sequence: Synthetic oligonucleotide
  Antisense strand to SEQ ID NO: 2496396
uguucuagacaccaagaua

SEQ ID NO: 2496398 - RNA, 19 nt, Artificial Sequence
  Description of Artificial Sequence: Synthetic oligonucleotide
  Sense strand starting at position 95 of SEQ ID NO: 1887785
gcaucuaaagcaugcuaga

SEQ ID NO: 2496399 - RNA, 19 nt, Artificial Sequence
  Description of Artificial Sequence: Synthetic oligonucleotide
  Antisense strand to SEQ ID NO: 2496398
ucuagcaugcuuuagaugc

SEQ ID NO: 2496400 - RNA, 19 nt, Artificial Sequence
  Description of Artificial Sequence: Synthetic oligonucleotide
  Sense strand starting at position 98 of SEQ ID NO: 1887785
ucuaaagcaugcuagauuu

SEQ ID NO: 2496401 - RNA, 19 nt, Artificial Sequence
  Description of Artificial Sequence: Synthetic oligonucleotide
  Antisense strand to SEQ ID NO: 2496400
aaaucuagcaugcuuuaga

SEQ ID NO: 2496402 - RNA, 19 nt, Artificial Sequence
  Description of Artificial Sequence: Synthetic oligonucleotide
  Sense strand starting at position 232 of SEQ ID NO: 1887785
guaagucccugcucucaau

SEQ ID NO: 2496403 - RNA, 19 nt, Artificial Sequence
  Description of Artificial Sequence: Synthetic oligonucleotide
  Antisense strand to SEQ ID NO: 2496402
auugagagcagggacuuac

SEQ ID NO: 2496404 - RNA, 19 nt, Artificial Sequence
  Description of Artificial Sequence: Synthetic oligonucleotide
  Sense strand starting at position 238 of SEQ ID NO: 1887785
cccugcucucaaugagaga

SEQ ID NO: 2496405 - RNA, 19 nt, Artificial Sequence
  Description of Artificial Sequence: Synthetic oligonucleotide
  Antisense strand to SEQ ID NO: 2496404
ucucucauugagagcaggg

SEQ ID NO: 2496406 - RNA, 19 nt, Artificial Sequence
  Description of Artificial Sequence: Synthetic oligonucleotide
  Sense strand starting at position 252 of SEQ ID NO: 1887785
agagaacacuaaugugaag

SEQ ID NO: 2496407 - RNA, 19 nt, Artificial Sequence
  Description of Artificial Sequence: Synthetic oligonucleotide
  Antisense strand to SEQ ID NO: 2496406
cuucacauuaguguucucu

SEQ ID NO: 2496408 - RNA, 19 nt, Artificial Sequence
  Description of Artificial Sequence: Synthetic oligonucleotide
  Sense strand starting at position 422 of SEQ ID NO: 1887785
auugauguggcacgaucau

SEQ ID NO: 2496409 - RNA, 19 nt, Artificial Sequence
  Description of Artificial Sequence: Synthetic oligonucleotide
  Antisense strand to SEQ ID NO: 2496408
augaucgugccacaucaau

SEQ ID NO: 2496410 - RNA, 19 nt, Artificial Sequence
  Description of Artificial Sequence: Synthetic oligonucleotide
  Sense strand starting at position 494 of SEQ ID NO: 1887785
gggaguagcuaggacuaaa

SEQ ID NO: 2496411 - RNA, 19 nt, Artificial Sequence
  Description of Artificial Sequence: Synthetic oligonucleotide
  Antisense strand to SEQ ID NO: 2496410
uuuaguccuagcuacuccc

SEQ ID NO: 2496412 - RNA, 19 nt, Artificial Sequence
  Description of Artificial Sequence: Synthetic oligonucleotide
  Sense strand starting at position 564 of SEQ ID NO: 1887785
agagucucccuauguuaga

SEQ ID NO: 2496413 - RNA, 19 nt, Artificial Sequence
  Description of Artificial Sequence: Synthetic oligonucleotide
  Antisense strand to SEQ ID NO: 2496412
ucuaacauagggagacucu

SEQ ID NO: 2496414 - RNA, 19 nt, Artificial Sequence
  Description of Artificial Sequence: Synthetic oligonucleotide
  Sense strand starting at position 579 of SEQ ID NO: 1887785
uagacuggcuggucucaaa

SEQ ID NO: 2496415 - RNA, 19 nt, Artificial Sequence
  Description of Artificial Sequence: Synthetic oligonucleotide
  Antisense strand to SEQ ID NO: 2496414
uuugagaccagccagucua

SEQ ID NO: 2496416 - RNA, 19 nt, Artificial Sequence
  Description of Artificial Sequence: Synthetic oligonucleotide
  Sense strand starting at position 632 of SEQ ID NO: 1887785
cccaaaucaucaggauuag

SEQ ID NO: 2496417 - RNA, 19 nt, Artificial Sequence
  Description of Artificial Sequence: Synthetic oligonucleotide
  Antisense strand to SEQ ID NO: 2496416
cuaauccugaugauuuggg

SEQ ID NO: 2496418 - RNA, 19 nt, Artificial Sequence
  Description of Artificial Sequence: Synthetic oligonucleotide
  Sense strand starting at position 686 of SEQ ID NO: 1887785
uguaaauguauauguguca

SEQ ID NO: 2496419 - RNA, 19 nt, Artificial Sequence
  Description of Artificial Sequence: Synthetic oligonucleotide
  Antisense strand to SEQ ID NO: 2496418
ugacacauauacauuuaca

SEQ ID NO: 2496420 - RNA, 19 nt, Artificial Sequence
  Description of Artificial Sequence: Synthetic oligonucleotide
  Sense strand starting at position 687 of SEQ ID NO: 1887785
guaaauguauaugugucau

SEQ ID NO: 2496421 - RNA, 19 nt, Artificial Sequence
  Description of Artificial Sequence: Synthetic oligonucleotide
  Antisense strand to SEQ ID NO: 2496420
augacacauauacauuuac

SEQ ID NO: 2496422 - RNA, 19 nt, Artificial Sequence
  Description of Artificial Sequence: Synthetic oligonucleotide
  Sense strand starting at position 728 of SEQ ID NO: 1887785
uacguuuaauuggucucau

SEQ ID NO: 2496423 - RNA, 19 nt, Artificial Sequence
  Description of Artificial Sequence: Synthetic oligonucleotide
  Antisense strand to SEQ ID NO: 2496422
augagaccaauuaaacgua

SEQ ID NO: 2496424 - RNA, 19 nt, Artificial Sequence
  Description of Artificial Sequence: Synthetic oligonucleotide
  Sense strand starting at position 729 of SEQ ID NO: 1887785
acguuuaauuggucucauu

SEQ ID NO: 2496425 - RNA, 19 nt, Artificial Sequence
  Description of Artificial Sequence: Synthetic oligonucleotide
  Antisense strand to SEQ ID NO: 2496424
aaugagaccaauuaaacgu

SEQ ID NO: 2496426 - RNA, 19 nt, Artificial Sequence
  Description of Artificial Sequence: Synthetic oligonucleotide
  Sense strand starting at position 795 of SEQ ID NO: 1887785
cuguguugccaggaugauc

SEQ ID NO: 2496427 - RNA, 19 nt, Artificial Sequence
  Description of Artificial Sequence: Synthetic oligonucleotide
  Antisense strand to SEQ ID NO: 2496426
gaucauccuggcaacacag

SEQ ID NO: 2496428 - RNA, 19 nt, Artificial Sequence
  Description of Artificial Sequence: Synthetic oligonucleotide
  Sense strand starting at position 888 of SEQ ID NO: 1887785
gcgaccgguucauuugaua

SEQ ID NO: 2496429 - RNA, 19 nt, Artificial Sequence
  Description of Artificial Sequence: Synthetic oligonucleotide
  Antisense strand to SEQ ID NO: 2496428
uaucaaaugaaccggucgc

SEQ ID NO: 2496430 - RNA, 19 nt, Artificial Sequence
  Description of Artificial Sequence: Synthetic oligonucleotide
  Sense strand starting at position 1108 of SEQ ID NO: 1887785
gcauaauauuuauaucgug

SEQ ID NO: 2496431 - RNA, 19 nt, Artificial Sequence
  Description of Artificial Sequence: Synthetic oligonucleotide
  Antisense strand to SEQ ID NO: 2496430
cacgauauaaauauuaugc

SEQ ID NO: 2496432 - RNA, 19 nt, Artificial Sequence
  Description of Artificial Sequence: Synthetic oligonucleotide
  Sense strand starting at position 1114 of SEQ ID NO: 1887785
uauuuauaucguggacgcu

SEQ ID NO: 2496433 - RNA, 19 nt, Artificial Sequence
  Description of Artificial Sequence: Synthetic oligonucleotide
  Antisense strand to SEQ ID NO: 2496432
agcguccacgauauaaaua

SEQ ID NO: 2496434 - RNA, 19 nt, Artificial Sequence
  Description of Artificial Sequence: Synthetic oligonucleotide
  Sense strand starting at position 1188 of SEQ ID NO: 1887785
guggcaaaguuccucaauc

SEQ ID NO: 2496435 - RNA, 19 nt, Artificial Sequence
  Description of Artificial Sequence: Synthetic oligonucleotide
  Antisense strand to SEQ ID NO: 2496434
gauugaggaacuuugccac

SEQ ID NO: 2496436 - RNA, 19 nt, Artificial Sequence
  Description of Artificial Sequence: Synthetic oligonucleotide
  Sense strand starting at position 1285 of SEQ ID NO: 1887785
aacacucggugacugauaa

SEQ ID NO: 2496437 - RNA, 19 nt, Artificial Sequence
  Description of Artificial Sequence: Synthetic oligonucleotide
  Antisense strand to SEQ ID NO: 2496436
uuaucagucaccgaguguu

SEQ ID NO: 2496438 - RNA, 19 nt, Artificial Sequence
  Description of Artificial Sequence: Synthetic oligonucleotide
  Sense strand starting at position 1286 of SEQ ID NO: 1887785
acacucggugacugauaaa

SEQ ID NO: 2496439 - RNA, 19 nt, Artificial Sequence
  Description of Artificial Sequence: Synthetic oligonucleotide
  Antisense strand to SEQ ID NO: 2496438
uuuaucagucaccgagugu

SEQ ID NO: 2496440 - RNA, 19 nt, Artificial Sequence
  Description of Artificial Sequence: Synthetic oligonucleotide
  Sense strand starting at position 1347 of SEQ ID NO: 1887785
cugagacccguuuauuauc

SEQ ID NO: 2496441 - RNA, 19 nt, Artificial Sequence
  Description of Artificial Sequence: Synthetic oligonucleotide
  Antisense strand to SEQ ID NO: 2496440
gauaauaaacgggucucag

SEQ ID NO: 2496442 - RNA, 19 nt, Artificial Sequence
  Description of Artificial Sequence: Synthetic oligonucleotide
  Sense strand starting at position 1364 of SEQ ID NO: 1887785
ucauuaacaucguuguugu

SEQ ID NO: 2496443 - RNA, 19 nt, Artificial Sequence
  Description of Artificial Sequence: Synthetic oligonucleotide
  Antisense strand to SEQ ID NO: 2496442
acaacaacgauguuaauga

SEQ ID NO: 2496444 - RNA, 19 nt, Artificial Sequence
  Description of Artificial Sequence: Synthetic oligonucleotide
  Sense strand starting at position 1380 of SEQ ID NO: 1887785
ugucgucacuacucaguau

SEQ ID NO: 2496445 - RNA, 19 nt, Artificial Sequence
  Description of Artificial Sequence: Synthetic oligonucleotide
  Antisense strand to SEQ ID NO: 2496444
auacugaguagugacgaca

SEQ ID NO: 2496446 - RNA, 19 nt, Artificial Sequence
  Description of Artificial Sequence: Synthetic oligonucleotide
  Sense strand starting at position 1392 of SEQ ID NO: 1887785
ucaguaucuccuggucauu

SEQ ID NO: 2496447 - RNA, 19 nt, Artificial Sequence
  Description of Artificial Sequence: Synthetic oligonucleotide
  Antisense strand to SEQ ID NO: 2496446
aaugaccaggagauacuga

SEQ ID NO: 2496448 - RNA, 19 nt, Artificial Sequence
  Description of Artificial Sequence: Synthetic oligonucleotide
  Sense strand starting at position 1395 of SEQ ID NO: 1887785
guaucuccuggucauuacu

SEQ ID NO: 2496449 - RNA, 19 nt, Artificial Sequence
  Description of Artificial Sequence: Synthetic oligonucleotide
  Antisense strand to SEQ ID NO: 2496448
aguaaugaccaggagauac

SEQ ID NO: 2496450 - RNA, 19 nt, Artificial Sequence
  Description of Artificial Sequence: Synthetic oligonucleotide
  Sense strand starting at position 1401 of SEQ ID NO: 1887785
ccuggucauuacuccuaga

SEQ ID NO: 2496451 - RNA, 19 nt, Artificial Sequence
  Description of Artificial Sequence: Synthetic oligonucleotide
  Antisense strand to SEQ ID NO: 2496450
ucuaggaguaaugaccagg

SEQ ID NO: 2496452 - RNA, 19 nt, Artificial Sequence
  Description of Artificial Sequence: Synthetic oligonucleotide
  Sense strand starting at position 1406 of SEQ ID NO: 1887785
ucauuacuccuagauucga

SEQ ID NO: 2496453 - RNA, 19 nt, Artificial Sequence
  Description of Artificial Sequence: Synthetic oligonucleotide
  Antisense strand to SEQ ID NO: 2496452
ucgaaucuaggaguaauga

SEQ ID NO: 2496454 - RNA, 19 nt, Artificial Sequence
  Description of Artificial Sequence: Synthetic oligonucleotide
  Sense strand starting at position 1414 of SEQ ID NO: 1887785
ccuagauucgaccaccagu

SEQ ID NO: 2496455 - RNA, 19 nt, Artificial Sequence
  Description of Artificial Sequence: Synthetic oligonucleotide
  Antisense strand to SEQ ID NO: 2496454
acugguggucgaaucuagg

SEQ ID NO: 2496456 - RNA, 19 nt, Artificial Sequence
  Description of Artificial Sequence: Synthetic oligonucleotide
  Sense strand starting at position 2592 of SEQ ID NO: 1887785
uuuauucuggucuggguau

SEQ ID NO: 2496457 - RNA, 19 nt, Artificial Sequence
  Description of Artificial Sequence: Synthetic oligonucleotide
  Antisense strand to SEQ ID NO: 2496456
auacccagaccagaauaaa

SEQ ID NO: 2496458 - RNA, 19 nt, Artificial Sequence
  Description of Artificial Sequence: Synthetic oligonucleotide
  Sense strand starting at position 2631 of SEQ ID NO: 1887785
agcagucaaagugaaaguu

SEQ ID NO: 2496459 - RNA, 19 nt, Artificial Sequence
  Description of Artificial Sequence: Synthetic oligonucleotide
  Antisense strand to SEQ ID NO: 2496458
aacuuucacuuugacugcu

SEQ ID NO: 2496460 - RNA, 19 nt, Artificial Sequence
  Description of Artificial Sequence: Synthetic oligonucleotide
  Sense strand starting at position 2745 of SEQ ID NO: 1887785
ucuuuagggaucuggaguu

SEQ ID NO: 2496461 - RNA, 19 nt, Artificial Sequence
  Description of Artificial Sequence: Synthetic oligonucleotide
  Antisense strand to SEQ ID NO: 2496460
aacuccagaucccuaaaga

SEQ ID NO: 2496462 - RNA, 19 nt, Artificial Sequence
  Description of Artificial Sequence: Synthetic oligonucleotide
  Sense strand starting at position 2802 of SEQ ID NO: 1887785
gcaggaguacuuuguugua

SEQ ID NO: 2496463 - RNA, 19 nt, Artificial Sequence
  Description of Artificial Sequence: Synthetic oligonucleotide
  Antisense strand to SEQ ID NO: 2496462
uacaacaaaguacuccugc

SEQ ID NO: 2496464 - RNA, 19 nt, Artificial Sequence
  Description of Artificial Sequence: Synthetic oligonucleotide
  Sense strand starting at position 2804 of SEQ ID NO: 1887785
aggaguacuuuguuguacu

SEQ ID NO: 2496465 - RNA, 19 nt, Artificial Sequence
  Description of Artificial Sequence: Synthetic oligonucleotide
  Antisense strand to SEQ ID NO: 2496464
aguacaacaaaguacuccu

SEQ ID NO: 2496466 - RNA, 19 nt, Artificial Sequence
  Description of Artificial Sequence: Synthetic oligonucleotide
  Sense strand starting at position 2812 of SEQ ID NO: 1887785
uuuguuguacuauaccuaa

SEQ ID NO: 2496467 - RNA, 19 nt, Artificial Sequence
  Description of Artificial Sequence: Synthetic oligonucleotide
  Antisense strand to SEQ ID NO: 2496466
uuagguauaguacaacaaa

SEQ ID NO: 2496468 - RNA, 19 nt, Artificial Sequence
  Description of Artificial Sequence: Synthetic oligonucleotide
  Sense strand starting at position 2886 of SEQ ID NO: 1887785
acagaauucucccuuggau

SEQ ID NO: 2496469 - RNA, 19 nt, Artificial Sequence
  Description of Artificial Sequence: Synthetic oligonucleotide
  Antisense strand to SEQ ID NO: 2496468
auccaagggagaauucugu

SEQ ID NO: 2496470 - RNA, 19 nt, Artificial Sequence
  Description of Artificial Sequence: Synthetic oligonucleotide
  Sense strand starting at position 2888 of SEQ ID NO: 1887785
agaauucucccuuggaucu

SEQ ID NO: 2496471 - RNA, 19 nt, Artificial Sequence
  Description of Artificial Sequence: Synthetic oligonucleotide
  Antisense strand to SEQ ID NO: 2496470
agauccaagggagaauucu

SEQ ID NO: 2496472 - RNA, 19 nt, Artificial Sequence
  Description of Artificial Sequence: Synthetic oligonucleotide
  Sense strand starting at position 2905 of SEQ ID NO: 1887785
cuaccaguccuggaggcau

SEQ ID NO: 2496473 - RNA, 19 nt, Artificial Sequence
  Description of Artificial Sequence: Synthetic oligonucleotide
  Antisense strand to SEQ ID NO: 2496472
augccuccaggacugguag

SEQ ID NO: 2496474 - RNA, 19 nt, Artificial Sequence
  Description of Artificial Sequence: Synthetic oligonucleotide
  Sense strand starting at position 3107 of SEQ ID NO: 1887785
guaaguuaguauguggagu

SEQ ID NO: 2496475 - RNA, 19 nt, Artificial Sequence
  Description of Artificial Sequence: Synthetic oligonucleotide
  Antisense strand to SEQ ID NO: 2496474
acuccacauacuaacuuac

SEQ ID NO: 2496476 - RNA, 19 nt, Artificial Sequence
  Description of Artificial Sequence: Synthetic oligonucleotide
  Sense strand starting at position 3108 of SEQ ID NO: 1887785
uaaguuaguauguggagua

SEQ ID NO: 2496477 - RNA, 19 nt, Artificial Sequence
  Description of Artificial Sequence: Synthetic oligonucleotide
  Antisense strand to SEQ ID NO: 2496476
uacuccacauacuaacuua

SEQ ID NO: 2496478 - RNA, 19 nt, Artificial Sequence
  Description of Artificial Sequence: Synthetic oligonucleotide
  Sense strand starting at position 934 of SEQ ID NO: 1887786
gcgagaaccucugacacgu

SEQ ID NO: 2496479 - RNA, 19 nt, Artificial Sequence
  Description of Artificial Sequence: Synthetic oligonucleotide
  Antisense strand to SEQ ID NO: 2496478
acgugucagagguucucgc

SEQ ID NO: 2496480 - RNA, 19 nt, Artificial Sequence
  Description of Artificial Sequence: Synthetic oligonucleotide
  Sense strand starting at position 940 of SEQ ID NO: 1887786
accucugacacgugaggua

SEQ ID NO: 2496481 - RNA, 19 nt, Artificial Sequence
  Description of Artificial Sequence: Synthetic oligonucleotide
  Antisense strand to SEQ ID NO: 2496480
uaccucacgugucagaggu

SEQ ID NO: 2496482 - RNA, 19 nt, Artificial Sequence
  Description of Artificial Sequence: Synthetic oligonucleotide
  Sense strand starting at position 953 of SEQ ID NO: 1887786
gagguaaugucgucacacc

SEQ ID NO: 2496483 - RNA, 19 nt, Artificial Sequence
  Description of Artificial Sequence: Synthetic oligonucleotide
  Antisense strand to SEQ ID NO: 2496482
ggugugacgacauuaccuc

SEQ ID NO: 2496484 - RNA, 19 nt, Artificial Sequence
  Description of Artificial Sequence: Synthetic oligonucleotide
  Sense strand starting at position 954 of SEQ ID NO: 1887786
agguaaugucgucacaccu

SEQ ID NO: 2496485 - RNA, 19 nt, Artificial Sequence
  Description of Artificial Sequence: Synthetic oligonucleotide
  Antisense strand to SEQ ID NO: 2496484
aggugugacgacauuaccu

SEQ ID NO: 2496486 - RNA, 19 nt, Artificial Sequence
  Description of Artificial Sequence: Synthetic oligonucleotide
  Sense strand starting at position 964 of SEQ ID NO: 1887786
gucacaccuuccgaggauu

SEQ ID NO: 2496487 - RNA, 19 nt, Artificial Sequence
  Description of Artificial Sequence: Synthetic oligonucleotide
  Antisense strand to SEQ ID NO: 2496486
aauccucggaaggugugac

SEQ ID NO: 2496488 - RNA, 19 nt, Artificial Sequence
  Description of Artificial Sequence: Synthetic oligonucleotide
  Sense strand starting at position 1055 of SEQ ID NO: 1887786
acaagauaguguccagcaa

SEQ ID NO: 2496489 - RNA, 19 nt, Artificial Sequence
  Description of Artificial Sequence: Synthetic oligonucleotide
  Antisense strand to SEQ ID NO: 2496488
uugcuggacacuaucuugu

SEQ ID NO: 2496490 - RNA, 19 nt, Artificial Sequence
  Description of Artificial Sequence: Synthetic oligonucleotide
  Sense strand starting at position 1446 of SEQ ID NO: 1887786
gagccagauucugccuuua

SEQ ID NO: 2496491 - RNA, 19 nt, Artificial Sequence
  Description of Artificial Sequence: Synthetic oligonucleotide
  Antisense strand to SEQ ID NO: 2496490
uaaaggcagaaucuggcuc

SEQ ID NO: 2496492 - RNA, 19 nt, Artificial Sequence
  Description of Artificial Sequence: Synthetic oligonucleotide
  Sense strand starting at position 1448 of SEQ ID NO: 1887786
gccagauucugccuuuaaa

SEQ ID NO: 2496493 - RNA, 19 nt, Artificial Sequence
  Description of Artificial Sequence: Synthetic oligonucleotide
  Antisense strand to SEQ ID NO: 2496492
uuuaaaggcagaaucuggc

SEQ ID NO: 2496494 - RNA, 19 nt, Artificial Sequence
  Description of Artificial Sequence: Synthetic oligonucleotide
  Sense strand starting at position 1735 of SEQ ID NO: 1887786
gcuagaauguacucacuug

SEQ ID NO: 2496495 - RNA, 19 nt, Artificial Sequence
  Description of Artificial Sequence: Synthetic oligonucleotide
  Antisense strand to SEQ ID NO: 2496494
caagugaguacauucuagc

SEQ ID NO: 2496496 - RNA, 19 nt, Artificial Sequence
  Description of Artificial Sequence: Synthetic oligonucleotide
  Sense strand starting at position 2025 of SEQ ID NO: 1887786
gguccugagcgcugucaca

SEQ ID NO: 2496497 - RNA, 19 nt, Artificial Sequence
  Description of Artificial Sequence: Synthetic oligonucleotide
  Antisense strand to SEQ ID NO: 2496496
ugugacagcgcucaggacc

SEQ ID NO: 2496498 - RNA, 19 nt, Artificial Sequence
  Description of Artificial Sequence: Synthetic oligonucleotide
  Sense strand starting at position 2034 of SEQ ID NO: 1887786
cgcugucacagcugggauu

SEQ ID NO: 2496499 - RNA, 19 nt, Artificial Sequence
  Description of Artificial Sequence: Synthetic oligonucleotide
  Antisense strand to SEQ ID NO: 2496498
aaucccagcugugacagcg

SEQ ID NO: 2496500 - RNA, 19 nt, Artificial Sequence
  Description of Artificial Sequence: Synthetic oligonucleotide
  Sense strand starting at position 2094 of SEQ ID NO: 1887786
gggccuaugguuuguucga

SEQ ID NO: 2496501 - RNA, 19 nt, Artificial Sequence
  Description of Artificial Sequence: Synthetic oligonucleotide
  Antisense strand to SEQ ID NO: 2496500
ucgaacaaaccauaggccc

SEQ ID NO: 2496502 - RNA, 19 nt, Artificial Sequence
  Description of Artificial Sequence: Synthetic oligonucleotide
  Sense strand starting at position 2095 of SEQ ID NO: 1887786
ggccuaugguuuguucgaa

SEQ ID NO: 2496503 - RNA, 19 nt, Artificial Sequence
  Description of Artificial Sequence: Synthetic oligonucleotide
  Antisense strand to SEQ ID NO: 2496502
uucgaacaaaccauaggcc

SEQ ID NO: 2496504 - RNA, 19 nt, Artificial Sequence
  Description of Artificial Sequence: Synthetic oligonucleotide
  Sense strand starting at position 2096 of SEQ ID NO: 1887786
gccuaugguuuguucgaau

SEQ ID NO: 2496505 - RNA, 19 nt, Artificial Sequence
  Description of Artificial Sequence: Synthetic oligonucleotide
  Antisense strand to SEQ ID NO: 2496504
auucgaacaaaccauaggc

SEQ ID NO: 2496506 - RNA, 19 nt, Artificial Sequence
  Description of Artificial Sequence: Synthetic oligonucleotide
  Sense strand starting at position 2099 of SEQ ID NO: 1887786
uaugguuuguucgaaugac

SEQ ID NO: 2496507 - RNA, 19 nt, Artificial Sequence
  Description of Artificial Sequence: Synthetic oligonucleotide
  Antisense strand to SEQ ID NO: 2496506
gucauucgaacaaaccaua

SEQ ID NO: 2496508 - RNA, 19 nt, Artificial Sequence
  Description of Artificial Sequence: Synthetic oligonucleotide
  Sense strand starting at position 2103 of SEQ ID NO: 1887786
guuuguucgaaugacguca

SEQ ID NO: 2496509 - RNA, 19 nt, Artificial Sequence
  Description of Artificial Sequence: Synthetic oligonucleotide
  Antisense strand to SEQ ID NO: 2496508
ugacgucauucgaacaaac

SEQ ID NO: 2496510 - RNA, 19 nt, Artificial Sequence
  Description of Artificial Sequence: Synthetic oligonucleotide
  Sense strand starting at position 2145 of SEQ ID NO: 1887786
cuacgcaguucuggaguga

SEQ ID NO: 2496511 - RNA, 19 nt, Artificial Sequence
  Description of Artificial Sequence: Synthetic oligonucleotide
  Antisense strand to SEQ ID NO: 2496510
ucacuccagaacugcguag

SEQ ID NO: 2496512 - RNA, 19 nt, Artificial Sequence
  Description of Artificial Sequence: Synthetic oligonucleotide
  Sense strand starting at position 2146 of SEQ ID NO: 1887786
uacgcaguucuggagugaa

SEQ ID NO: 2496513 - RNA, 19 nt, Artificial Sequence
  Description of Artificial Sequence: Synthetic oligonucleotide
  Antisense strand to SEQ ID NO: 2496512
uucacuccagaacugcgua

SEQ ID NO: 2496514 - RNA, 19 nt, Artificial Sequence
  Description of Artificial Sequence: Synthetic oligonucleotide
  Sense strand starting at position 2149 of SEQ ID NO: 1887786
gcaguucuggagugaaaua

SEQ ID NO: 2496515 - RNA, 19 nt, Artificial Sequence
  Description of Artificial Sequence: Synthetic oligonucleotide
  Antisense strand to SEQ ID NO: 2496514
uauuucacuccagaacugc

SEQ ID NO: 2496516 - RNA, 19 nt, Artificial Sequence
  Description of Artificial Sequence: Synthetic oligonucleotide
  Sense strand starting at position 2244 of SEQ ID NO: 1887786
ucuggaaauguguguuuac

SEQ ID NO: 2496517 - RNA, 19 nt, Artificial Sequence
  Description of Artificial Sequence: Synthetic oligonucleotide
  Antisense strand to SEQ ID NO: 2496516
guaaacacacauuuccaga

SEQ ID NO: 2496518 - RNA, 19 nt, Artificial Sequence
  Description of Artificial Sequence: Synthetic oligonucleotide
  Sense strand starting at position 2247 of SEQ ID NO: 1887786
ggaaauguguguuuaccuu

SEQ ID NO: 2496519 - RNA, 19 nt, Artificial Sequence
  Description of Artificial Sequence: Synthetic oligonucleotide
  Antisense strand to SEQ ID NO: 2496518
aagguaaacacacauuucc

SEQ ID NO: 2496520 - RNA, 19 nt, Artificial Sequence
  Description of Artificial Sequence: Synthetic oligonucleotide
  Sense strand starting at position 2587 of SEQ ID NO: 1887786
ccugaacucugccugaacu

SEQ ID NO: 2496521 - RNA, 19 nt, Artificial Sequence
  Description of Artificial Sequence: Synthetic oligonucleotide
  Antisense strand to SEQ ID NO: 2496520
aguucaggcagaguucagg

SEQ ID NO: 2496522 - RNA, 19 nt, Artificial Sequence
  Description of Artificial Sequence: Synthetic oligonucleotide
  Sense strand starting at position 2588 of SEQ ID NO: 1887786
cugaacucugccugaacua

SEQ ID NO: 2496523 - RNA, 19 nt, Artificial Sequence
  Description of Artificial Sequence: Synthetic oligonucleotide
  Antisense strand to SEQ ID NO: 2496522
uaguucaggcagaguucag

SEQ ID NO: 2496524 - RNA, 19 nt, Artificial Sequence
  Description of Artificial Sequence: Synthetic oligonucleotide
  Sense strand starting at position 2604 of SEQ ID NO: 1887786
cuaccuuucuuagauugag

SEQ ID NO: 2496525 - RNA, 19 nt, Artificial Sequence
  Description of Artificial Sequence: Synthetic oligonucleotide
  Antisense strand to SEQ ID NO: 2496524
cucaaucuaagaaagguag

SEQ ID NO: 2496526 - RNA, 19 nt, Artificial Sequence
  Description of Artificial Sequence: Synthetic oligonucleotide
  Sense strand starting at position 2607 of SEQ ID NO: 1887786
ccuuucuuagauugaguau

SEQ ID NO: 2496527 - RNA, 19 nt, Artificial Sequence
  Description of Artificial Sequence: Synthetic oligonucleotide
  Antisense strand to SEQ ID NO: 2496526
auacucaaucuaagaaagg

SEQ ID NO: 2496528 - RNA, 19 nt, Artificial Sequence
  Description of Artificial Sequence: Synthetic oligonucleotide
  Sense strand starting at position 2639 of SEQ ID NO: 1887786
gcacuuaccuguccauguu

SEQ ID NO: 2496529 - RNA, 19 nt, Artificial Sequence
  Description of Artificial Sequence: Synthetic oligonucleotide
  Antisense strand to SEQ ID NO: 2496528
aacauggacagguaagugc

SEQ ID NO: 2496530 - RNA, 19 nt, Artificial Sequence
  Description of Artificial Sequence: Synthetic oligonucleotide
  Sense strand starting at position 2717 of SEQ ID NO: 1887786
cagcgaguguaucugauca

SEQ ID NO: 2496531 - RNA, 19 nt, Artificial Sequence
  Description of Artificial Sequence: Synthetic oligonucleotide
  Antisense strand to SEQ ID NO: 2496530
ugaucagauacacucgcug

SEQ ID NO: 2496532 - RNA, 19 nt, Artificial Sequence
  Description of Artificial Sequence: Synthetic oligonucleotide
  Sense strand starting at position 2721 of SEQ ID NO: 1887786
gaguguaucugaucaccac

SEQ ID NO: 2496533 - RNA, 19 nt, Artificial Sequence
  Description of Artificial Sequence: Synthetic oligonucleotide
  Antisense strand to SEQ ID NO: 2496532
guggugaucagauacacuc

SEQ ID NO: 2496534 - RNA, 19 nt, Artificial Sequence
  Description of Artificial Sequence: Synthetic oligonucleotide
  Sense strand starting at position 2810 of SEQ ID NO: 1887786
ucuaacuaggaguaaguuu

SEQ ID NO: 2496535 - RNA, 19 nt, Artificial Sequence
  Description of Artificial Sequence: Synthetic oligonucleotide
  Antisense strand to SEQ ID NO: 2496534
aaacuuacuccuaguuaga

SEQ ID NO: 2496536 - RNA, 19 nt, Artificial Sequence
  Description of Artificial Sequence: Synthetic oligonucleotide
  Sense strand starting at position 2846 of SEQ ID NO: 1887786
acugucaucuucuuauaug

SEQ ID NO: 2496537 - RNA, 19 nt, Artificial Sequence
  Description of Artificial Sequence: Synthetic oligonucleotide
  Antisense strand to SEQ ID NO: 2496536
cauauaagaagaugacagu

SEQ ID NO: 2496538 - RNA, 19 nt, Artificial Sequence
  Description of Artificial Sequence: Synthetic oligonucleotide
  Sense strand starting at position 2858 of SEQ ID NO: 1887786
uuauaugagcccugccaua

SEQ ID NO: 2496539 - RNA, 19 nt, Artificial Sequence
  Description of Artificial Sequence: Synthetic oligonucleotide
  Antisense strand to SEQ ID NO: 2496538
uauggcagggcucauauaa

SEQ ID NO: 2496540 - RNA, 19 nt, Artificial Sequence
  Description of Artificial Sequence: Synthetic oligonucleotide
  Sense strand starting at position 3353 of SEQ ID NO: 1887786
agaugagauugggaaguca

SEQ ID NO: 2496541 - RNA, 19 nt, Artificial Sequence
  Description of Artificial Sequence: Synthetic oligonucleotide
  Antisense strand to SEQ ID NO: 2496540
ugacuucccaaucucaucu

SEQ ID NO: 2496542 - RNA, 19 nt, Artificial Sequence
  Description of Artificial Sequence: Synthetic oligonucleotide
  Sense strand starting at position 3931 of SEQ ID NO: 1887786
ggccaaaguggagaauagu

SEQ ID NO: 2496543 - RNA, 19 nt, Artificial Sequence
  Description of Artificial Sequence: Synthetic oligonucleotide
  Antisense strand to SEQ ID NO: 2496542
acuauucuccacuuuggcc

SEQ ID NO: 2496544 - RNA, 19 nt, Artificial Sequence
  Description of Artificial Sequence: Synthetic oligonucleotide
  Sense strand starting at position 392 of SEQ ID NO: 1887787
gccugaccuuguuuggaua

SEQ ID NO: 2496545 - RNA, 19 nt, Artificial Sequence
  Description of Artificial Sequence: Synthetic oligonucleotide
  Antisense strand to SEQ ID NO: 2496544
uauccaaacaaggucaggc

SEQ ID NO: 2496546 - RNA, 19 nt, Artificial Sequence
  Description of Artificial Sequence: Synthetic oligonucleotide
  Sense strand starting at position 393 of SEQ ID NO: 1887787
ccugaccuuguuuggauaa

SEQ ID NO: 2496547 - RNA, 19 nt, Artificial Sequence
  Description of Artificial Sequence: Synthetic oligonucleotide
  Antisense strand to SEQ ID NO: 2496546
uuauccaaacaaggucagg

SEQ ID NO: 2496548 - RNA, 19 nt, Artificial Sequence
  Description of Artificial Sequence: Synthetic oligonucleotide
  Sense strand starting at position 395 of SEQ ID NO: 1887787
ugaccuuguuuggauaacu

SEQ ID NO: 2496549 - RNA, 19 nt, Artificial Sequence
  Description of Artificial Sequence: Synthetic oligonucleotide
  Antisense strand to SEQ ID NO: 2496548
aguuauccaaacaagguca

SEQ ID NO: 2496550 - RNA, 19 nt, Artificial Sequence
  Description of Artificial Sequence: Synthetic oligonucleotide
  Sense strand starting at position 400 of SEQ ID NO: 1887787
uuguuuggauaacuugaga

SEQ ID NO: 2496551 - RNA, 19 nt, Artificial Sequence
  Description of Artificial Sequence: Synthetic oligonucleotide
  Antisense strand to SEQ ID NO: 2496550
ucucaaguuauccaaacaa

SEQ ID NO: 2496552 - RNA, 19 nt, Artificial Sequence
  Description of Artificial Sequence: Synthetic oligonucleotide
  Sense strand starting at position 405 of SEQ ID NO: 1887787
uggauaacuugagaugugu

SEQ ID NO: 2496553 - RNA, 19 nt, Artificial Sequence
  Description of Artificial Sequence: Synthetic oligonucleotide
  Antisense strand to SEQ ID NO: 2496552
acacaucucaaguuaucca

SEQ ID NO: 2496554 - RNA, 19 nt, Artificial Sequence
  Description of Artificial Sequence: Synthetic oligonucleotide
  Sense strand starting at position 505 of SEQ ID NO: 1887787
guuauuugcuuaucuuucu

SEQ ID NO: 2496555 - RNA, 19 nt, Artificial Sequence
  Description of Artificial Sequence: Synthetic oligonucleotide
  Antisense strand to SEQ ID NO: 2496554
agaaagauaagcaaauaac

SEQ ID NO: 2496556 - RNA, 19 nt, Artificial Sequence
  Description of Artificial Sequence: Synthetic oligonucleotide
  Sense strand starting at position 511 of SEQ ID NO: 1887787
ugcuuaucuuucucuugga

SEQ ID NO: 2496557 - RNA, 19 nt, Artificial Sequence
  Description of Artificial Sequence: Synthetic oligonucleotide
  Antisense strand to SEQ ID NO: 2496556
uccaagagaaagauaagca

SEQ ID NO: 2496558 - RNA, 19 nt, Artificial Sequence
  Description of Artificial Sequence: Synthetic oligonucleotide
  Sense strand starting at position 512 of SEQ ID NO: 1887787
gcuuaucuuucucuuggaa

SEQ ID NO: 2496559 - RNA, 19 nt, Artificial Sequence
  Description of Artificial Sequence: Synthetic oligonucleotide
  Antisense strand to SEQ ID NO: 2496558
uuccaagagaaagauaagc

SEQ ID NO: 2496560 - RNA, 19 nt, Artificial Sequence
  Description of Artificial Sequence: Synthetic oligonucleotide
  Sense strand starting at position 524 of SEQ ID NO: 1887787
cuuggaaagcuguguucuu

SEQ ID NO: 2496561 - RNA, 19 nt, Artificial Sequence
  Description of Artificial Sequence: Synthetic oligonucleotide
  Antisense strand to SEQ ID NO: 2496560
aagaacacagcuuuccaag

SEQ ID NO: 2496562 - RNA, 19 nt, Artificial Sequence
  Description of Artificial Sequence: Synthetic oligonucleotide
  Sense strand starting at position 652 of SEQ ID NO: 1887787
ucuaucaaacguggaaauu

SEQ ID NO: 2496563 - RNA, 19 nt, Artificial Sequence
  Description of Artificial Sequence: Synthetic oligonucleotide
  Antisense strand to SEQ ID NO: 2496562
aauuuccacguuugauaga

SEQ ID NO: 2496564 - RNA, 19 nt, Artificial Sequence
  Description of Artificial Sequence: Synthetic oligonucleotide
  Sense strand starting at position 975 of SEQ ID NO: 1887787
gcaccaacguccucaguua

SEQ ID NO: 2496565 - RNA, 19 nt, Artificial Sequence
  Description of Artificial Sequence: Synthetic oligonucleotide
  Antisense strand to SEQ ID NO: 2496564
uaacugaggacguuggugc

SEQ ID NO: 2496566 - RNA, 19 nt, Artificial Sequence
  Description of Artificial Sequence: Synthetic oligonucleotide
  Sense strand starting at position 1749 of SEQ ID NO: 1887787
uagagacugccagauuguu

SEQ ID NO: 2496567 - RNA, 19 nt, Artificial Sequence
  Description of Artificial Sequence: Synthetic oligonucleotide
  Antisense strand to SEQ ID NO: 2496566
aacaaucuggcagucucua

SEQ ID NO: 2496568 - RNA, 19 nt, Artificial Sequence
  Description of Artificial Sequence: Synthetic oligonucleotide
  Sense strand starting at position 1804 of SEQ ID NO: 1887787
acgggaagacuaugacguu

SEQ ID NO: 2496569 - RNA, 19 nt, Artificial Sequence
  Description of Artificial Sequence: Synthetic oligonucleotide
  Antisense strand to SEQ ID NO: 2496568
aacgucauagucuucccgu

SEQ ID NO: 2496570 - RNA, 19 nt, Artificial Sequence
  Description of Artificial Sequence: Synthetic oligonucleotide
  Sense strand starting at position 1805 of SEQ ID NO: 1887787
cgggaagacuaugacguua

SEQ ID NO: 2496571 - RNA, 19 nt, Artificial Sequence
  Description of Artificial Sequence: Synthetic oligonucleotide
  Antisense strand to SEQ ID NO: 2496570
uaacgucauagucuucccg

SEQ ID NO: 2496572 - RNA, 19 nt, Artificial Sequence
  Description of Artificial Sequence: Synthetic oligonucleotide
  Sense strand starting at position 1843 of SEQ ID NO: 1887787
gcaggauccgggcaagaga

SEQ ID NO: 2496573 - RNA, 19 nt, Artificial Sequence
  Description of Artificial Sequence: Synthetic oligonucleotide
  Antisense strand to SEQ ID NO: 2496572
ucucuugcccggauccugc

SEQ ID NO: 2496574 - RNA, 19 nt, Artificial Sequence
  Description of Artificial Sequence: Synthetic oligonucleotide
  Sense strand starting at position 1872 of SEQ ID NO: 1887787
ggugacgagcuguagacua

SEQ ID NO: 2496575 - RNA, 19 nt, Artificial Sequence
  Description of Artificial Sequence: Synthetic oligonucleotide
  Antisense strand to SEQ ID NO: 2496574
uagucuacagcucgucacc

SEQ ID NO: 2496576 - RNA, 19 nt, Artificial Sequence
  Description of Artificial Sequence: Synthetic oligonucleotide
  Sense strand starting at position 1998 of SEQ ID NO: 1887787
gcacgacucaaggguuacu

SEQ ID NO: 2496577 - RNA, 19 nt, Artificial Sequence
  Description of Artificial Sequence: Synthetic oligonucleotide
  Antisense strand to SEQ ID NO: 2496576
aguaacccuugagucgugc

SEQ ID NO: 2496578 - RNA, 19 nt, Artificial Sequence
  Description of Artificial Sequence: Synthetic oligonucleotide
  Sense strand starting at position 2062 of SEQ ID NO: 1887787
gauaacuuauggucgguuu

SEQ ID NO: 2496579 - RNA, 19 nt, Artificial Sequence
  Description of Artificial Sequence: Synthetic oligonucleotide
  Antisense strand to SEQ ID NO: 2496578
aaaccgaccauaaguuauc

SEQ ID NO: 2496580 - RNA, 19 nt, Artificial Sequence
  Description of Artificial Sequence: Synthetic oligonucleotide
  Sense strand starting at position 2088 of SEQ ID NO: 1887787
agcauaauuuccuacagug

SEQ ID NO: 2496581 - RNA, 19 nt, Artificial Sequence
  Description of Artificial Sequence: Synthetic oligonucleotide
  Antisense strand to SEQ ID NO: 2496580
cacuguaggaaauuaugcu

SEQ ID NO: 2496582 - RNA, 19 nt, Artificial Sequence
  Description of Artificial Sequence: Synthetic oligonucleotide
  Sense strand starting at position 2105 of SEQ ID NO: 1887787
ugguauguugcagaacaac

SEQ ID NO: 2496583 - RNA, 19 nt, Artificial Sequence
  Description of Artificial Sequence: Synthetic oligonucleotide
  Antisense strand to SEQ ID NO: 2496582
guuguucugcaacauacca

SEQ ID NO: 2496584 - RNA, 19 nt, Artificial Sequence
  Description of Artificial Sequence: Synthetic oligonucleotide
  Sense strand starting at position 2116 of SEQ ID NO: 1887787
agaacaacuuucgugcuua

SEQ ID NO: 2496585 - RNA, 19 nt, Artificial Sequence
  Description of Artificial Sequence: Synthetic oligonucleotide
  Antisense strand to SEQ ID NO: 2496584
uaagcacgaaaguuguucu

SEQ ID NO: 2496586 - RNA, 19 nt, Artificial Sequence
  Description of Artificial Sequence: Synthetic oligonucleotide
  Sense strand starting at position 2129 of SEQ ID NO: 1887787
ugcuuacgcuuacuuugau

SEQ ID NO: 2496587 - RNA, 19 nt, Artificial Sequence
  Description of Artificial Sequence: Synthetic oligonucleotide
  Antisense strand to SEQ ID NO: 2496586
aucaaaguaagcguaagca

SEQ ID NO: 2496588 - RNA, 19 nt, Artificial Sequence
  Description of Artificial Sequence: Synthetic oligonucleotide
  Sense strand starting at position 2138 of SEQ ID NO: 1887787
uuacuuugaugucuucgau

SEQ ID NO: 2496589 - RNA, 19 nt, Artificial Sequence
  Description of Artificial Sequence: Synthetic oligonucleotide
  Antisense strand to SEQ ID NO: 2496588
aucgaagacaucaaaguaa

SEQ ID NO: 2496590 - RNA, 19 nt, Artificial Sequence
  Description of Artificial Sequence: Synthetic oligonucleotide
  Sense strand starting at position 2141 of SEQ ID NO: 1887787
cuuugaugucuucgaucac

SEQ ID NO: 2496591 - RNA, 19 nt, Artificial Sequence
  Description of Artificial Sequence: Synthetic oligonucleotide
  Antisense strand to SEQ ID NO: 2496590
gugaucgaagacaucaaag

SEQ ID NO: 2496592 - RNA, 19 nt, Artificial Sequence
  Description of Artificial Sequence: Synthetic oligonucleotide
  Sense strand starting at position 2145 of SEQ ID NO: 1887787
gaugucuucgaucacguaa

SEQ ID NO: 2496593 - RNA, 19 nt, Artificial Sequence
  Description of Artificial Sequence: Synthetic oligonucleotide
  Antisense strand to SEQ ID NO: 2496592
uuacgugaucgaagacauc

SEQ ID NO: 2496594 - RNA, 19 nt, Artificial Sequence
  Description of Artificial Sequence: Synthetic oligonucleotide
  Sense strand starting at position 2191 of SEQ ID NO: 1887787
gccuuauacuggccucaua

SEQ ID NO: 2496595 - RNA, 19 nt, Artificial Sequence
  Description of Artificial Sequence: Synthetic oligonucleotide
  Antisense strand to SEQ ID NO: 2496594
uaugaggccaguauaaggc

SEQ ID NO: 2496596 - RNA, 19 nt, Artificial Sequence
  Description of Artificial Sequence: Synthetic oligonucleotide
  Sense strand starting at position 2215 of SEQ ID NO: 1887787
gguggauugugggugccaa

SEQ ID NO: 2496597 - RNA, 19 nt, Artificial Sequence
  Description of Artificial Sequence: Synthetic oligonucleotide
  Antisense strand to SEQ ID NO: 2496596
uuggcacccacaauccacc

SEQ ID NO: 2496598 - RNA, 19 nt, Artificial Sequence
  Description of Artificial Sequence: Synthetic oligonucleotide
  Sense strand starting at position 2216 of SEQ ID NO: 1887787
guggauugugggugccaau

SEQ ID NO: 2496599 - RNA, 19 nt, Artificial Sequence
  Description of Artificial Sequence: Synthetic oligonucleotide
  Antisense strand to SEQ ID NO: 2496598
auuggcacccacaauccac

SEQ ID NO: 2496600 - RNA, 19 nt, Artificial Sequence
  Description of Artificial Sequence: Synthetic oligonucleotide
  Sense strand starting at position 2663 of SEQ ID NO: 1887787
acgcgcuguucuucaagau

SEQ ID NO: 2496601 - RNA, 19 nt, Artificial Sequence
  Description of Artificial Sequence: Synthetic oligonucleotide
  Antisense strand to SEQ ID NO: 2496600
aucuugaagaacagcgcgu

SEQ ID NO: 2496602 - RNA, 19 nt, Artificial Sequence
  Description of Artificial Sequence: Synthetic oligonucleotide
  Sense strand starting at position 2664 of SEQ ID NO: 1887787
cgcgcuguucuucaagaug

SEQ ID NO: 2496603 - RNA, 19 nt, Artificial Sequence
  Description of Artificial Sequence: Synthetic oligonucleotide
  Antisense strand to SEQ ID NO: 2496602
caucuugaagaacagcgcg

SEQ ID NO: 2496604 - RNA, 19 nt, Artificial Sequence
  Description of Artificial Sequence: Synthetic oligonucleotide
  Sense strand starting at position 2723 of SEQ ID NO: 1887787
gucucuucgaguucuucgu

SEQ ID NO: 2496605 - RNA, 19 nt, Artificial Sequence
  Description of Artificial Sequence: Synthetic oligonucleotide
  Antisense strand to SEQ ID NO: 2496604
acgaagaacucgaagagac

SEQ ID NO: 2496606 - RNA, 19 nt, Artificial Sequence
  Description of Artificial Sequence: Synthetic oligonucleotide
  Sense strand starting at position 2731 of SEQ ID NO: 1887787
gaguucuucgugcugcuca

SEQ ID NO: 2496607 - RNA, 19 nt, Artificial Sequence
  Description of Artificial Sequence: Synthetic oligonucleotide
  Antisense strand to SEQ ID NO: 2496606
ugagcagcacgaagaacuc

SEQ ID NO: 2496608 - RNA, 19 nt, Artificial Sequence
  Description of Artificial Sequence: Synthetic oligonucleotide
  Sense strand starting at position 2911 of SEQ ID NO: 1887787
gaccucugacccugggauu

SEQ ID NO: 2496609 - RNA, 19 nt, Artificial Sequence
  Description of Artificial Sequence: Synthetic oligonucleotide
  Antisense strand to SEQ ID NO: 2496608
aaucccagggucagagguc

SEQ ID NO: 2496610 - RNA, 19 nt, Artificial Sequence
  Description of Artificial Sequence: Synthetic oligonucleotide
  Sense strand starting at position 3010 of SEQ ID NO: 1887787
gcuguucucuacucuggaa

SEQ ID NO: 2496611 - RNA, 19 nt, Artificial Sequence
  Description of Artificial Sequence: Synthetic oligonucleotide
  Antisense strand to SEQ ID NO: 2496610
uuccagaguagagaacagc

SEQ ID NO: 2496612 - RNA, 19 nt, Artificial Sequence
  Description of Artificial Sequence: Synthetic oligonucleotide
  Sense strand starting at position 3012 of SEQ ID NO: 1887787
uguucucuacucuggaaac

SEQ ID NO: 2496613 - RNA, 19 nt, Artificial Sequence
  Description of Artificial Sequence: Synthetic oligonucleotide
  Antisense strand to SEQ ID NO: 2496612
guuuccagaguagagaaca

SEQ ID NO: 2496614 - RNA, 19 nt, Artificial Sequence
  Description of Artificial Sequence: Synthetic oligonucleotide
  Sense strand starting at position 3333 of SEQ ID NO: 1887787
gggaaugugacuuagcuga

SEQ ID NO: 2496615 - RNA, 19 nt, Artificial Sequence
  Description of Artificial Sequence: Synthetic oligonucleotide
  Antisense strand to SEQ ID NO: 2496614
ucagcuaagucacauuccc

SEQ ID NO: 2496616 - RNA, 19 nt, Artificial Sequence
  Description of Artificial Sequence: Synthetic oligonucleotide
  Sense strand starting at position 3593 of SEQ ID NO: 1887787
gaaggagucuugcuugggu

SEQ ID NO: 2496617 - RNA, 19 nt, Artificial Sequence
  Description of Artificial Sequence: Synthetic oligonucleotide
  Antisense strand to SEQ ID NO: 2496616
acccaagcaagacuccuuc

SEQ ID NO: 2496618 - RNA, 19 nt, Artificial Sequence
  Description of Artificial Sequence: Synthetic oligonucleotide
  Sense strand starting at position 3595 of SEQ ID NO: 1887787
aggagucuugcuuggguga

SEQ ID NO: 2496619 - RNA, 19 nt, Artificial Sequence
  Description of Artificial Sequence: Synthetic oligonucleotide
  Antisense strand to SEQ ID NO: 2496618
ucacccaagcaagacuccu

SEQ ID NO: 2496620 - RNA, 19 nt, Artificial Sequence
  Description of Artificial Sequence: Synthetic oligonucleotide
  Sense strand starting at position 3598 of SEQ ID NO: 1887787
agucuugcuugggugacaa

SEQ ID NO: 2496621 - RNA, 19 nt, Artificial Sequence
  Description of Artificial Sequence: Synthetic oligonucleotide
  Antisense strand to SEQ ID NO: 2496620
uugucacccaagcaagacu

SEQ ID NO: 2496622 - RNA, 19 nt, Artificial Sequence
  Description of Artificial Sequence: Synthetic oligonucleotide
  Sense strand starting at position 3702 of SEQ ID NO: 1887787
uucguucugcaucagaaca

SEQ ID NO: 2496623 - RNA, 19 nt, Artificial Sequence
  Description of Artificial Sequence: Synthetic oligonucleotide
  Antisense strand to SEQ ID NO: 2496622
uguucugaugcagaacgaa

SEQ ID NO: 2496624 - RNA, 19 nt, Artificial Sequence
  Description of Artificial Sequence: Synthetic oligonucleotide
  Sense strand starting at position 17 of SEQ ID NO: 1887788
guguguuaugucuugucuu

SEQ ID NO: 2496625 - RNA, 19 nt, Artificial Sequence
  Description of Artificial Sequence: Synthetic oligonucleotide
  Antisense strand to SEQ ID NO: 2496624
aagacaagacauaacacac

SEQ ID NO: 2496626 - RNA, 19 nt, Artificial Sequence
  Description of Artificial Sequence: Synthetic oligonucleotide
  Sense strand starting at position 20 of SEQ ID NO: 1887788
uguuaugucuugucuugac

SEQ ID NO: 2496627 - RNA, 19 nt, Artificial Sequence
  Description of Artificial Sequence: Synthetic oligonucleotide
  Antisense strand to SEQ ID NO: 2496626
gucaagacaagacauaaca

SEQ ID NO: 2496628 - RNA, 19 nt, Artificial Sequence
  Description of Artificial Sequence: Synthetic oligonucleotide
  Sense strand starting at position 53 of SEQ ID NO: 1887788
acgugucugugcccaaaua

SEQ ID NO: 2496629 - RNA, 19 nt, Artificial Sequence
  Description of Artificial Sequence: Synthetic oligonucleotide
  Antisense strand to SEQ ID NO: 2496628
uauuugggcacagacacgu

SEQ ID NO: 2496630 - RNA, 19 nt, Artificial Sequence
  Description of Artificial Sequence: Synthetic oligonucleotide
  Sense strand starting at position 54 of SEQ ID NO: 1887788
cgugucugugcccaaauau

SEQ ID NO: 2496631 - RNA, 19 nt, Artificial Sequence
  Description of Artificial Sequence: Synthetic oligonucleotide
  Antisense strand to SEQ ID NO: 2496630
auauuugggcacagacacg

SEQ ID NO: 2496632 - RNA, 19 nt, Artificial Sequence
  Description of Artificial Sequence: Synthetic oligonucleotide
  Sense strand starting at position 77 of SEQ ID NO: 1887788
cucuaugaugcccgucauu

SEQ ID NO: 2496633 - RNA, 19 nt, Artificial Sequence
  Description of Artificial Sequence: Synthetic oligonucleotide
  Antisense strand to SEQ ID NO: 2496632
aaugacgggcaucauagag

SEQ ID NO: 2496634 - RNA, 19 nt, Artificial Sequence
  Description of Artificial Sequence: Synthetic oligonucleotide
  Sense strand starting at position 96 of SEQ ID NO: 1887788
agguuaggcccaugcuaau

SEQ ID NO: 2496635 - RNA, 19 nt, Artificial Sequence
  Description of Artificial Sequence: Synthetic oligonucleotide
  Antisense strand to SEQ ID NO: 2496634
auuagcaugggccuaaccu

SEQ ID NO: 2496636 - RNA, 19 nt, Artificial Sequence
  Description of Artificial Sequence: Synthetic oligonucleotide
  Sense strand starting at position 832 of SEQ ID NO: 1887788
ggccgcuaagaacguuaaa

SEQ ID NO: 2496637 - RNA, 19 nt, Artificial Sequence
  Description of Artificial Sequence: Synthetic oligonucleotide
  Antisense strand to SEQ ID NO: 2496636
uuuaacguucuuagcggcc

SEQ ID NO: 2496638 - RNA, 19 nt, Artificial Sequence
  Description of Artificial Sequence: Synthetic oligonucleotide
  Sense strand starting at position 899 of SEQ ID NO: 1887788
ggcccucuuggagaacuga

SEQ ID NO: 2496639 - RNA, 19 nt, Artificial Sequence
  Description of Artificial Sequence: Synthetic oligonucleotide
  Antisense strand to SEQ ID NO: 2496638
ucaguucuccaagagggcc

SEQ ID NO: 2496640 - RNA, 19 nt, Artificial Sequence
  Description of Artificial Sequence: Synthetic oligonucleotide
  Sense strand starting at position 938 of SEQ ID NO: 1887788
cucugauauuugggccauu

SEQ ID NO: 2496641 - RNA, 19 nt, Artificial Sequence
  Description of Artificial Sequence: Synthetic oligonucleotide
  Antisense strand to SEQ ID NO: 2496640
aauggcccaaauaucagag

SEQ ID NO: 2496642 - RNA, 19 nt, Artificial Sequence
  Description of Artificial Sequence: Synthetic oligonucleotide
  Sense strand starting at position 950 of SEQ ID NO: 1887788
ggccauuguuaaccuguaa

SEQ ID NO: 2496643 - RNA, 19 nt, Artificial Sequence
  Description of Artificial Sequence: Synthetic oligonucleotide
  Antisense strand to SEQ ID NO: 2496642
uuacagguuaacaauggcc

SEQ ID NO: 2496644 - RNA, 19 nt, Artificial Sequence
  Description of Artificial Sequence: Synthetic oligonucleotide
  Sense strand starting at position 987 of SEQ ID NO: 1887788
uuugcagaauucuugcaaa

SEQ ID NO: 2496645 - RNA, 19 nt, Artificial Sequence
  Description of Artificial Sequence: Synthetic oligonucleotide
  Antisense strand to SEQ ID NO: 2496644
uuugcaagaauucugcaaa

SEQ ID NO: 2496646 - RNA, 19 nt, Artificial Sequence
  Description of Artificial Sequence: Synthetic oligonucleotide
  Sense strand starting at position 1075 of SEQ ID NO: 1887788
gggcuugaggccuggaguu

SEQ ID NO: 2496647 - RNA, 19 nt, Artificial Sequence
  Description of Artificial Sequence: Synthetic oligonucleotide
  Antisense strand to SEQ ID NO: 2496646
aacuccaggccucaagccc

SEQ ID NO: 2496648 - RNA, 19 nt, Artificial Sequence
  Description of Artificial Sequence: Synthetic oligonucleotide
  Sense strand starting at position 1276 of SEQ ID NO: 1887788
acaagaauuuguugggcau

SEQ ID NO: 2496649 - RNA, 19 nt, Artificial Sequence
  Description of Artificial Sequence: Synthetic oligonucleotide
  Antisense strand to SEQ ID NO: 2496648
augcccaacaaauucuugu

SEQ ID NO: 2496650 - RNA, 19 nt, Artificial Sequence
  Description of Artificial Sequence: Synthetic oligonucleotide
  Sense strand starting at position 1501 of SEQ ID NO: 1887788
ugggaauaggguuggaagu

SEQ ID NO: 2496651 - RNA, 19 nt, Artificial Sequence
  Description of Artificial Sequence: Synthetic oligonucleotide
  Antisense strand to SEQ ID NO: 2496650
acuuccaacccuauuccca

SEQ ID NO: 2496652 - RNA, 19 nt, Artificial Sequence
  Description of Artificial Sequence: Synthetic oligonucleotide
  Sense strand starting at position 1538 of SEQ ID NO: 1887788
cggugacuucgcuuacagu

SEQ ID NO: 2496653 - RNA, 19 nt, Artificial Sequence
  Description of Artificial Sequence: Synthetic oligonucleotide
  Antisense strand to SEQ ID NO: 2496652
acuguaagcgaagucaccg

SEQ ID NO: 2496654 - RNA, 19 nt, Artificial Sequence
  Description of Artificial Sequence: Synthetic oligonucleotide
  Sense strand starting at position 1539 of SEQ ID NO: 1887788
ggugacuucgcuuacaguu

SEQ ID NO: 2496655 - RNA, 19 nt, Artificial Sequence
  Description of Artificial Sequence: Synthetic oligonucleotide
  Antisense strand to SEQ ID NO: 2496654
aacuguaagcgaagucacc

SEQ ID NO: 2496656 - RNA, 19 nt, Artificial Sequence
  Description of Artificial Sequence: Synthetic oligonucleotide
  Sense strand starting at position 1853 of SEQ ID NO: 1887788
gagcaagauuccguuucug

SEQ ID NO: 2496657 - RNA, 19 nt, Artificial Sequence
  Description of Artificial Sequence: Synthetic oligonucleotide
  Antisense strand to SEQ ID NO: 2496656
cagaaacggaaucuugcuc

SEQ ID NO: 2496658 - RNA, 19 nt, Artificial Sequence
  Description of Artificial Sequence: Synthetic oligonucleotide
  Sense strand starting at position 1990 of SEQ ID NO: 1887788
cgaagcgagcacgaauauu

SEQ ID NO: 2496659 - RNA, 19 nt, Artificial Sequence
  Description of Artificial Sequence: Synthetic oligonucleotide
  Antisense strand to SEQ ID NO: 2496658
aauauucgugcucgcuucg

SEQ ID NO: 2496660 - RNA, 19 nt, Artificial Sequence
  Description of Artificial Sequence: Synthetic oligonucleotide
  Sense strand starting at position 2039 of SEQ ID NO: 1887788
ggaacaaaugucuguacac

SEQ ID NO: 2496661 - RNA, 19 nt, Artificial Sequence
  Description of Artificial Sequence: Synthetic oligonucleotide
  Antisense strand to SEQ ID NO: 2496660
guguacagacauuuguucc

SEQ ID NO: 2496662 - RNA, 19 nt, Artificial Sequence
  Description of Artificial Sequence: Synthetic oligonucleotide
  Sense strand starting at position 2103 of SEQ ID NO: 1887788
auauuagcccaauguguaa

SEQ ID NO: 2496663 - RNA, 19 nt, Artificial Sequence
  Description of Artificial Sequence: Synthetic oligonucleotide
  Antisense strand to SEQ ID NO: 2496662
uuacacauugggcuaauau

SEQ ID NO: 2496664 - RNA, 19 nt, Artificial Sequence
  Description of Artificial Sequence: Synthetic oligonucleotide
  Sense strand starting at position 2116 of SEQ ID NO: 1887788
guguaaugcaacuaacgua

SEQ ID NO: 2496665 - RNA, 19 nt, Artificial Sequence
  Description of Artificial Sequence: Synthetic oligonucleotide
  Antisense strand to SEQ ID NO: 2496664
uacguuaguugcauuacac

SEQ ID NO: 2496666 - RNA, 19 nt, Artificial Sequence
  Description of Artificial Sequence: Synthetic oligonucleotide
  Sense strand starting at position 2124 of SEQ ID NO: 1887788
caacuaacguaguuauuga

SEQ ID NO: 2496667 - RNA, 19 nt, Artificial Sequence
  Description of Artificial Sequence: Synthetic oligonucleotide
  Antisense strand to SEQ ID NO: 2496666
ucaauaacuacguuaguug

SEQ ID NO: 2496668 - RNA, 19 nt, Artificial Sequence
  Description of Artificial Sequence: Synthetic oligonucleotide
  Sense strand starting at position 2131 of SEQ ID NO: 1887788
cguaguuauugacuggagu

SEQ ID NO: 2496669 - RNA, 19 nt, Artificial Sequence
  Description of Artificial Sequence: Synthetic oligonucleotide
  Antisense strand to SEQ ID NO: 2496668
acuccagucaauaacuacg

SEQ ID NO: 2496670 - RNA, 19 nt, Artificial Sequence
  Description of Artificial Sequence: Synthetic oligonucleotide
  Sense strand starting at position 2132 of SEQ ID NO: 1887788
guaguuauugacuggaguu

SEQ ID NO: 2496671 - RNA, 19 nt, Artificial Sequence
  Description of Artificial Sequence: Synthetic oligonucleotide
  Antisense strand to SEQ ID NO: 2496670
aacuccagucaauaacuac

SEQ ID NO: 2496672 - RNA, 19 nt, Artificial Sequence
  Description of Artificial Sequence: Synthetic oligonucleotide
  Sense strand starting at position 2133 of SEQ ID NO: 1887788
uaguuauugacuggaguug

SEQ ID NO: 2496673 - RNA, 19 nt, Artificial Sequence
  Description of Artificial Sequence: Synthetic oligonucleotide
  Antisense strand to SEQ ID NO: 2496672
caacuccagucaauaacua

SEQ ID NO: 2496674 - RNA, 19 nt, Artificial Sequence
  Description of Artificial Sequence: Synthetic oligonucleotide
  Sense strand starting at position 2134 of SEQ ID NO: 1887788
aguuauugacuggaguuga

SEQ ID NO: 2496675 - RNA, 19 nt, Artificial Sequence
  Description of Artificial Sequence: Synthetic oligonucleotide
  Antisense strand to SEQ ID NO: 2496674
ucaacuccagucaauaacu

SEQ ID NO: 2496676 - RNA, 19 nt, Artificial Sequence
  Description of Artificial Sequence: Synthetic oligonucleotide
  Sense strand starting at position 2149 of SEQ ID NO: 1887788
uugagaaagugcucguugu

SEQ ID NO: 2496677 - RNA, 19 nt, Artificial Sequence
  Description of Artificial Sequence: Synthetic oligonucleotide
  Antisense strand to SEQ ID NO: 2496676
acaacgagcacuuucucaa

SEQ ID NO: 2496678 - RNA, 19 nt, Artificial Sequence
  Description of Artificial Sequence: Synthetic oligonucleotide
  Sense strand starting at position 2150 of SEQ ID NO: 1887788
ugagaaagugcucguuguu

SEQ ID NO: 2496679 - RNA, 19 nt, Artificial Sequence
  Description of Artificial Sequence: Synthetic oligonucleotide
  Antisense strand to SEQ ID NO: 2496678
aacaacgagcacuuucuca

SEQ ID NO: 2496680 - RNA, 19 nt, Artificial Sequence
  Description of Artificial Sequence: Synthetic oligonucleotide
  Sense strand starting at position 2304 of SEQ ID NO: 1887788
cugguuguuaccgaggaag

SEQ ID NO: 2496681 - RNA, 19 nt, Artificial Sequence
  Description of Artificial Sequence: Synthetic oligonucleotide
  Antisense strand to SEQ ID NO: 2496680
cuuccucgguaacaaccag

SEQ ID NO: 2496682 - RNA, 19 nt, Artificial Sequence
  Description of Artificial Sequence: Synthetic oligonucleotide
  Sense strand starting at position 2306 of SEQ ID NO: 1887788
gguuguuaccgaggaagau

SEQ ID NO: 2496683 - RNA, 19 nt, Artificial Sequence
  Description of Artificial Sequence: Synthetic oligonucleotide
  Antisense strand to SEQ ID NO: 2496682
aucuuccucgguaacaacc

SEQ ID NO: 2496684 - RNA, 19 nt, Artificial Sequence
  Description of Artificial Sequence: Synthetic oligonucleotide
  Sense strand starting at position 2307 of SEQ ID NO: 1887788
guuguuaccgaggaagaug

SEQ ID NO: 2496685 - RNA, 19 nt, Artificial Sequence
  Description of Artificial Sequence: Synthetic oligonucleotide
  Antisense strand to SEQ ID NO: 2496684
caucuuccucgguaacaac

SEQ ID NO: 2496686 - RNA, 19 nt, Artificial Sequence
  Description of Artificial Sequence: Synthetic oligonucleotide
  Sense strand starting at position 3115 of SEQ ID NO: 1887788
uacggugaagccugagaau

SEQ ID NO: 2496687 - RNA, 19 nt, Artificial Sequence
  Description of Artificial Sequence: Synthetic oligonucleotide
  Antisense strand to SEQ ID NO: 2496686
auucucaggcuucaccgua

SEQ ID NO: 2496688 - RNA, 19 nt, Artificial Sequence
  Description of Artificial Sequence: Synthetic oligonucleotide
  Sense strand starting at position 3118 of SEQ ID NO: 1887788
ggugaagccugagaauuua

SEQ ID NO: 2496689 - RNA, 19 nt, Artificial Sequence
  Description of Artificial Sequence: Synthetic oligonucleotide
  Antisense strand to SEQ ID NO: 2496688
uaaauucucaggcuucacc

SEQ ID NO: 2496690 - RNA, 19 nt, Artificial Sequence
  Description of Artificial Sequence: Synthetic oligonucleotide
  Sense strand starting at position 3159 of SEQ ID NO: 1887788
ggugaaaugaaguguggga

SEQ ID NO: 2496691 - RNA, 19 nt, Artificial Sequence
  Description of Artificial Sequence: Synthetic oligonucleotide
  Antisense strand to SEQ ID NO: 2496690
ucccacacuucauuucacc

SEQ ID NO: 2496692 - RNA, 19 nt, Artificial Sequence
  Description of Artificial Sequence: Synthetic oligonucleotide
  Sense strand starting at position 3272 of SEQ ID NO: 1887788
ggguuaggguuugaggaga

SEQ ID NO: 2496693 - RNA, 19 nt, Artificial Sequence
  Description of Artificial Sequence: Synthetic oligonucleotide
  Antisense strand to SEQ ID NO: 2496692
ucuccucaaacccuaaccc

SEQ ID NO: 2496694 - RNA, 19 nt, Artificial Sequence
  Description of Artificial Sequence: Synthetic oligonucleotide
  Sense strand starting at position 3391 of SEQ ID NO: 1887788
cccucuguucccugugaca

SEQ ID NO: 2496695 - RNA, 19 nt, Artificial Sequence
  Description of Artificial Sequence: Synthetic oligonucleotide
  Antisense strand to SEQ ID NO: 2496694
ugucacagggaacagaggg

SEQ ID NO: 2496696 - RNA, 19 nt, Artificial Sequence
  Description of Artificial Sequence: Synthetic oligonucleotide
  Sense strand starting at position 3393 of SEQ ID NO: 1887788
cucuguucccugugacacu

SEQ ID NO: 2496697 - RNA, 19 nt, Artificial Sequence
  Description of Artificial Sequence: Synthetic oligonucleotide
  Antisense strand to SEQ ID NO: 2496696
agugucacagggaacagag

SEQ ID NO: 2496698 - RNA, 19 nt, Artificial Sequence
  Description of Artificial Sequence: Synthetic oligonucleotide
  Sense strand starting at position 3728 of SEQ ID NO: 1887788
acagguguucccugucagu

SEQ ID NO: 2496699 - RNA, 19 nt, Artificial Sequence
  Description of Artificial Sequence: Synthetic oligonucleotide
  Antisense strand to SEQ ID NO: 2496698
acugacagggaacaccugu

SEQ ID NO: 2496700 - RNA, 19 nt, Artificial Sequence
  Description of Artificial Sequence: Synthetic oligonucleotide
  Sense strand starting at position 3838 of SEQ ID NO: 1887788
acagguguucccugucacu

SEQ ID NO: 2496701 - RNA, 19 nt, Artificial Sequence
  Description of Artificial Sequence: Synthetic oligonucleotide
  Antisense strand to SEQ ID NO: 2496700
agugacagggaacaccugu

SEQ ID NO: 2496702 - RNA, 19 nt, Artificial Sequence
  Description of Artificial Sequence: Synthetic oligonucleotide
  Sense strand starting at position 3940 of SEQ ID NO: 1887788
gggcucuuccuucgggaga

SEQ ID NO: 2496703 - RNA, 19 nt, Artificial Sequence
  Description of Artificial Sequence: Synthetic oligonucleotide
  Antisense strand to SEQ ID NO: 2496702
ucucccgaaggaagagccc

SEQ ID NO: 2496704 - RNA, 19 nt, Artificial Sequence
  Description of Artificial Sequence: Synthetic oligonucleotide
  Sense strand starting at position 392 of SEQ ID NO: 1887789
gccugaccuuguuuggaua

SEQ ID NO: 2496705 - RNA, 19 nt, Artificial Sequence
  Description of Artificial Sequence: Synthetic oligonucleotide
  Antisense strand to SEQ ID NO: 2496704
uauccaaacaaggucaggc

SEQ ID NO: 2496706 - RNA, 19 nt, Artificial Sequence
  Description of Artificial Sequence: Synthetic oligonucleotide
  Sense strand starting at position 393 of SEQ ID NO: 1887789
ccugaccuuguuuggauaa

SEQ ID NO: 2496707 - RNA, 19 nt, Artificial Sequence
  Description of Artificial Sequence: Synthetic oligonucleotide
  Antisense strand to SEQ ID NO: 2496706
uuauccaaacaaggucagg

SEQ ID NO: 2496708 - RNA, 19 nt, Artificial Sequence
  Description of Artificial Sequence: Synthetic oligonucleotide
  Sense strand starting at position 395 of SEQ ID NO: 1887789
ugaccuuguuuggauaacu

SEQ ID NO: 2496709 - RNA, 19 nt, Artificial Sequence
  Description of Artificial Sequence: Synthetic oligonucleotide
  Antisense strand to SEQ ID NO: 2496708
aguuauccaaacaagguca

SEQ ID NO: 2496710 - RNA, 19 nt, Artificial Sequence
  Description of Artificial Sequence: Synthetic oligonucleotide
  Sense strand starting at position 400 of SEQ ID NO: 1887789
uuguuuggauaacuugaga

SEQ ID NO: 2496711 - RNA, 19 nt, Artificial Sequence
  Description of Artificial Sequence: Synthetic oligonucleotide
  Antisense strand to SEQ ID NO: 2496710
ucucaaguuauccaaacaa

SEQ ID NO: 2496712 - RNA, 19 nt, Artificial Sequence
  Description of Artificial Sequence: Synthetic oligonucleotide
  Sense strand starting at position 405 of SEQ ID NO: 1887789
uggauaacuugagaugugu

SEQ ID NO: 2496713 - RNA, 19 nt, Artificial Sequence
  Description of Artificial Sequence: Synthetic oligonucleotide
  Antisense strand to SEQ ID NO: 2496712
acacaucucaaguuaucca

SEQ ID NO: 2496714 - RNA, 19 nt, Artificial Sequence
  Description of Artificial Sequence: Synthetic oligonucleotide
  Sense strand starting at position 505 of SEQ ID NO: 1887789
guuauuugcuuaucuuucu

SEQ ID NO: 2496715 - RNA, 19 nt, Artificial Sequence
  Description of Artificial Sequence: Synthetic oligonucleotide
  Antisense strand to SEQ ID NO: 2496714
agaaagauaagcaaauaac

SEQ ID NO: 2496716 - RNA, 19 nt, Artificial Sequence
  Description of Artificial Sequence: Synthetic oligonucleotide
  Sense strand starting at position 511 of SEQ ID NO: 1887789
ugcuuaucuuucucuugga

SEQ ID NO: 2496717 - RNA, 19 nt, Artificial Sequence
  Description of Artificial Sequence: Synthetic oligonucleotide
  Antisense strand to SEQ ID NO: 2496716
uccaagagaaagauaagca

SEQ ID NO: 2496718 - RNA, 19 nt, Artificial Sequence
  Description of Artificial Sequence: Synthetic oligonucleotide
  Sense strand starting at position 512 of SEQ ID NO: 1887789
gcuuaucuuucucuuggaa

SEQ ID NO: 2496719 - RNA, 19 nt, Artificial Sequence
  Description of Artificial Sequence: Synthetic oligonucleotide
  Antisense strand to SEQ ID NO: 2496718
uuccaagagaaagauaagc

SEQ ID NO: 2496720 - RNA, 19 nt, Artificial Sequence
  Description of Artificial Sequence: Synthetic oligonucleotide
  Sense strand starting at position 524 of SEQ ID NO: 1887789
cuuggaaagcuguguucuu

SEQ ID NO: 2496721 - RNA, 19 nt, Artificial Sequence
  Description of Artificial Sequence: Synthetic oligonucleotide
  Antisense strand to SEQ ID NO: 2496720
aagaacacagcuuuccaag

SEQ ID NO: 2496722 - RNA, 19 nt, Artificial Sequence
  Description of Artificial Sequence: Synthetic oligonucleotide
  Sense strand starting at position 652 of SEQ ID NO: 1887789
ucuaucaaacguggaaauu

SEQ ID NO: 2496723 - RNA, 19 nt, Artificial Sequence
  Description of Artificial Sequence: Synthetic oligonucleotide
  Antisense strand to SEQ ID NO: 2496722
aauuuccacguuugauaga

SEQ ID NO: 2496724 - RNA, 19 nt, Artificial Sequence
  Description of Artificial Sequence: Synthetic oligonucleotide
  Sense strand starting at position 975 of SEQ ID NO: 1887789
gcaccaacguccucaguua

SEQ ID NO: 2496725 - RNA, 19 nt, Artificial Sequence
  Description of Artificial Sequence: Synthetic oligonucleotide
  Antisense strand to SEQ ID NO: 2496724
uaacugaggacguuggugc

SEQ ID NO: 2496726 - RNA, 19 nt, Artificial Sequence
  Description of Artificial Sequence: Synthetic oligonucleotide
  Sense strand starting at position 1749 of SEQ ID NO: 1887789
uagagacugccagauuguu

SEQ ID NO: 2496727 - RNA, 19 nt, Artificial Sequence
  Description of Artificial Sequence: Synthetic oligonucleotide
  Antisense strand to SEQ ID NO: 2496726
aacaaucuggcagucucua

SEQ ID NO: 2496728 - RNA, 19 nt, Artificial Sequence
  Description of Artificial Sequence: Synthetic oligonucleotide
  Sense strand starting at position 1804 of SEQ ID NO: 1887789
acgggaagacuaugacguu

SEQ ID NO: 2496729 - RNA, 19 nt, Artificial Sequence
  Description of Artificial Sequence: Synthetic oligonucleotide
  Antisense strand to SEQ ID NO: 2496728
aacgucauagucuucccgu

SEQ ID NO: 2496730 - RNA, 19 nt, Artificial Sequence
  Description of Artificial Sequence: Synthetic oligonucleotide
  Sense strand starting at position 1805 of SEQ ID NO: 1887789
cgggaagacuaugacguua

SEQ ID NO: 2496731 - RNA, 19 nt, Artificial Sequence
  Description of Artificial Sequence: Synthetic oligonucleotide
  Antisense strand to SEQ ID NO: 2496730
uaacgucauagucuucccg

SEQ ID NO: 2496732 - RNA, 19 nt, Artificial Sequence
  Description of Artificial Sequence: Synthetic oligonucleotide
  Sense strand starting at position 1843 of SEQ ID NO: 1887789
gcaggauccgggcaagaga

SEQ ID NO: 2496733 - RNA, 19 nt, Artificial Sequence
  Description of Artificial Sequence: Synthetic oligonucleotide
  Antisense strand to SEQ ID NO: 2496732
ucucuugcccggauccugc

SEQ ID NO: 2496734 - RNA, 19 nt, Artificial Sequence
  Description of Artificial Sequence: Synthetic oligonucleotide
  Sense strand starting at position 1872 of SEQ ID NO: 1887789
ggugacgagcuguagacua

SEQ ID NO: 2496735 - RNA, 19 nt, Artificial Sequence
  Description of Artificial Sequence: Synthetic oligonucleotide
  Antisense strand to SEQ ID NO: 2496734
uagucuacagcucgucacc

SEQ ID NO: 2496736 - RNA, 19 nt, Artificial Sequence
  Description of Artificial Sequence: Synthetic oligonucleotide
  Sense strand starting at position 1998 of SEQ ID NO: 1887789
gcacgacucaaggguuacu

SEQ ID NO: 2496737 - RNA, 19 nt, Artificial Sequence
  Description of Artificial Sequence: Synthetic oligonucleotide
  Antisense strand to SEQ ID NO: 2496736
aguaacccuugagucgugc

SEQ ID NO: 2496738 - RNA, 19 nt, Artificial Sequence
  Description of Artificial Sequence: Synthetic oligonucleotide
  Sense strand starting at position 2062 of SEQ ID NO: 1887789
gauaacuuauggucgguuu

SEQ ID NO: 2496739 - RNA, 19 nt, Artificial Sequence
  Description of Artificial Sequence: Synthetic oligonucleotide
  Antisense strand to SEQ ID NO: 2496738
aaaccgaccauaaguuauc

SEQ ID NO: 2496740 - RNA, 19 nt, Artificial Sequence
  Description of Artificial Sequence: Synthetic oligonucleotide
  Sense strand starting at position 2088 of SEQ ID NO: 1887789
agcauaauuuccuacagug

SEQ ID NO: 2496741 - RNA, 19 nt, Artificial Sequence
  Description of Artificial Sequence: Synthetic oligonucleotide
  Antisense strand to SEQ ID NO: 2496740
cacuguaggaaauuaugcu

SEQ ID NO: 2496742 - RNA, 19 nt, Artificial Sequence
  Description of Artificial Sequence: Synthetic oligonucleotide
  Sense strand starting at position 2105 of SEQ ID NO: 1887789
ugguauguugcagaacaac

SEQ ID NO: 2496743 - RNA, 19 nt, Artificial Sequence
  Description of Artificial Sequence: Synthetic oligonucleotide
  Antisense strand to SEQ ID NO: 2496742
guuguucugcaacauacca

SEQ ID NO: 2496744 - RNA, 19 nt, Artificial Sequence
  Description of Artificial Sequence: Synthetic oligonucleotide
  Sense strand starting at position 2116 of SEQ ID NO: 1887789
agaacaacuuucgugcuua

SEQ ID NO: 2496745 - RNA, 19 nt, Artificial Sequence
  Description of Artificial Sequence: Synthetic oligonucleotide
  Antisense strand to SEQ ID NO: 2496744
uaagcacgaaaguuguucu

SEQ ID NO: 2496746 - RNA, 19 nt, Artificial Sequence
  Description of Artificial Sequence: Synthetic oligonucleotide
  Sense strand starting at position 2129 of SEQ ID NO: 1887789
ugcuuacgcuuacuuugau

SEQ ID NO: 2496747 - RNA, 19 nt, Artificial Sequence
  Description of Artificial Sequence: Synthetic oligonucleotide
  Antisense strand to SEQ ID NO: 2496746
aucaaaguaagcguaagca

SEQ ID NO: 2496748 - RNA, 19 nt, Artificial Sequence
  Description of Artificial Sequence: Synthetic oligonucleotide
  Sense strand starting at position 2138 of SEQ ID NO: 1887789
uuacuuugaugucuucgau

SEQ ID NO: 2496749 - RNA, 19 nt, Artificial Sequence
  Description of Artificial Sequence: Synthetic oligonucleotide
  Antisense strand to SEQ ID NO: 2496748
aucgaagacaucaaaguaa

SEQ ID NO: 2496750 - RNA, 19 nt, Artificial Sequence
  Description of Artificial Sequence: Synthetic oligonucleotide
  Sense strand starting at position 2141 of SEQ ID NO: 1887789
cuuugaugucuucgaucac

SEQ ID NO: 2496751 - RNA, 19 nt, Artificial Sequence
  Description of Artificial Sequence: Synthetic oligonucleotide
  Antisense strand to SEQ ID NO: 2496750
gugaucgaagacaucaaag

SEQ ID NO: 2496752 - RNA, 19 nt, Artificial Sequence
  Description of Artificial Sequence: Synthetic oligonucleotide
  Sense strand starting at position 2145 of SEQ ID NO: 1887789
gaugucuucgaucacguaa

SEQ ID NO: 2496753 - RNA, 19 nt, Artificial Sequence
  Description of Artificial Sequence: Synthetic oligonucleotide
  Antisense strand to SEQ ID NO: 2496752
uuacgugaucgaagacauc

SEQ ID NO: 2496754 - RNA, 19 nt, Artificial Sequence
  Description of Artificial Sequence: Synthetic oligonucleotide
  Sense strand starting at position 2191 of SEQ ID NO: 1887789
gccuuauacuggccucaua

SEQ ID NO: 2496755 - RNA, 19 nt, Artificial Sequence
  Description of Artificial Sequence: Synthetic oligonucleotide
  Antisense strand to SEQ ID NO: 2496754
uaugaggccaguauaaggc

SEQ ID NO: 2496756 - RNA, 19 nt, Artificial Sequence
  Description of Artificial Sequence: Synthetic oligonucleotide
  Sense strand starting at position 2215 of SEQ ID NO: 1887789
gguggauugugggugccaa

SEQ ID NO: 2496757 - RNA, 19 nt, Artificial Sequence
  Description of Artificial Sequence: Synthetic oligonucleotide
  Antisense strand to SEQ ID NO: 2496756
uuggcacccacaauccacc

SEQ ID NO: 2496758 - RNA, 19 nt, Artificial Sequence
  Description of Artificial Sequence: Synthetic oligonucleotide
  Sense strand starting at position 2216 of SEQ ID NO: 1887789
guggauugugggugccaau

SEQ ID NO: 2496759 - RNA, 19 nt, Artificial Sequence
  Description of Artificial Sequence: Synthetic oligonucleotide
  Antisense strand to SEQ ID NO: 2496758
auuggcacccacaauccac

SEQ ID NO: 2496760 - RNA, 19 nt, Artificial Sequence
  Description of Artificial Sequence: Synthetic oligonucleotide
  Sense strand starting at position 2663 of SEQ ID NO: 1887789
acgcgcuguucuucaagau

SEQ ID NO: 2496761 - RNA, 19 nt, Artificial Sequence
  Description of Artificial Sequence: Synthetic oligonucleotide
  Antisense strand to SEQ ID NO: 2496760
aucuugaagaacagcgcgu

SEQ ID NO: 2496762 - RNA, 19 nt, Artificial Sequence
  Description of Artificial Sequence: Synthetic oligonucleotide
  Sense strand starting at position 2664 of SEQ ID NO: 1887789
cgcgcuguucuucaagaug

SEQ ID NO: 2496763 - RNA, 19 nt, Artificial Sequence
  Description of Artificial Sequence: Synthetic oligonucleotide
  Antisense strand to SEQ ID NO: 2496762
caucuugaagaacagcgcg

SEQ ID NO: 2496764 - RNA, 19 nt, Artificial Sequence
  Description of Artificial Sequence: Synthetic oligonucleotide
  Sense strand starting at position 2723 of SEQ ID NO: 1887789
gucucuucgaguucuucgu

SEQ ID NO: 2496765 - RNA, 19 nt, Artificial Sequence
  Description of Artificial Sequence: Synthetic oligonucleotide
  Antisense strand to SEQ ID NO: 2496764
acgaagaacucgaagagac

SEQ ID NO: 2496766 - RNA, 19 nt, Artificial Sequence
  Description of Artificial Sequence: Synthetic oligonucleotide
  Sense strand starting at position 2731 of SEQ ID NO: 1887789
gaguucuucgugcugcuca

SEQ ID NO: 2496767 - RNA, 19 nt, Artificial Sequence
  Description of Artificial Sequence: Synthetic oligonucleotide
  Antisense strand to SEQ ID NO: 2496766
ugagcagcacgaagaacuc

SEQ ID NO: 2496768 - RNA, 19 nt, Artificial Sequence
  Description of Artificial Sequence: Synthetic oligonucleotide
  Sense strand starting at position 2911 of SEQ ID NO: 1887789
gaccucugacccugggauu

SEQ ID NO: 2496769 - RNA, 19 nt, Artificial Sequence
  Description of Artificial Sequence: Synthetic oligonucleotide
  Antisense strand to SEQ ID NO: 2496768
aaucccagggucagagguc

SEQ ID NO: 2496770 - RNA, 19 nt, Artificial Sequence
  Description of Artificial Sequence: Synthetic oligonucleotide
  Sense strand starting at position 3010 of SEQ ID NO: 1887789
gcuguucucuacucuggaa

SEQ ID NO: 2496771 - RNA, 19 nt, Artificial Sequence
  Description of Artificial Sequence: Synthetic oligonucleotide
  Antisense strand to SEQ ID NO: 2496770
uuccagaguagagaacagc

SEQ ID NO: 2496772 - RNA, 19 nt, Artificial Sequence
  Description of Artificial Sequence: Synthetic oligonucleotide
  Sense strand starting at position 3012 of SEQ ID NO: 1887789
uguucucuacucuggaaac

SEQ ID NO: 2496773 - RNA, 19 nt, Artificial Sequence
  Description of Artificial Sequence: Synthetic oligonucleotide
  Antisense strand to SEQ ID NO: 2496772
guuuccagaguagagaaca

SEQ ID NO: 2496774 - RNA, 19 nt, Artificial Sequence
  Description of Artificial Sequence: Synthetic oligonucleotide
  Sense strand starting at position 3333 of SEQ ID NO: 1887789
gggaaugugacuuagcuga

SEQ ID NO: 2496775 - RNA, 19 nt, Artificial Sequence
  Description of Artificial Sequence: Synthetic oligonucleotide
  Antisense strand to SEQ ID NO: 2496774
ucagcuaagucacauuccc

SEQ ID NO: 2496776 - RNA, 19 nt, Artificial Sequence
  Description of Artificial Sequence: Synthetic oligonucleotide
  Sense strand starting at position 3593 of SEQ ID NO: 1887789
gaaggagucuugcuugggu

SEQ ID NO: 2496777 - RNA, 19 nt, Artificial Sequence
  Description of Artificial Sequence: Synthetic oligonucleotide
  Antisense strand to SEQ ID NO: 2496776
acccaagcaagacuccuuc

SEQ ID NO: 2496778 - RNA, 19 nt, Artificial Sequence
  Description of Artificial Sequence: Synthetic oligonucleotide
  Sense strand starting at position 3595 of SEQ ID NO: 1887789
aggagucuugcuuggguga

SEQ ID NO: 2496779 - RNA, 19 nt, Artificial Sequence
  Description of Artificial Sequence: Synthetic oligonucleotide
  Antisense strand to SEQ ID NO: 2496778
ucacccaagcaagacuccu

SEQ ID NO: 2496780 - RNA, 19 nt, Artificial Sequence
  Description of Artificial Sequence: Synthetic oligonucleotide
  Sense strand starting at position 3598 of SEQ ID NO: 1887789
agucuugcuugggugacaa

SEQ ID NO: 2496781 - RNA, 19 nt, Artificial Sequence
  Description of Artificial Sequence: Synthetic oligonucleotide
  Antisense strand to SEQ ID NO: 2496780
uugucacccaagcaagacu

SEQ ID NO: 2496782 - RNA, 19 nt, Artificial Sequence
  Description of Artificial Sequence: Synthetic oligonucleotide
  Sense strand starting at position 3702 of SEQ ID NO: 1887789
uucguucugcaucagaaca

SEQ ID NO: 2496783 - RNA, 19 nt, Artificial Sequence
  Description of Artificial Sequence: Synthetic oligonucleotide
  Antisense strand to SEQ ID NO: 2496782
uguucugaugcagaacgaa

SEQ ID NO: 2496784 - RNA, 19 nt, Artificial Sequence
  Description of Artificial Sequence: Synthetic oligonucleotide
  Sense strand starting at position 17 of SEQ ID NO: 1887790
guguguuaugucuugucuu

SEQ ID NO: 2496785 - RNA, 19 nt, Artificial Sequence
  Description of Artificial Sequence: Synthetic oligonucleotide
  Antisense strand to SEQ ID NO: 2496784
aagacaagacauaacacac

SEQ ID NO: 2496786 - RNA, 19 nt, Artificial Sequence
  Description of Artificial Sequence: Synthetic oligonucleotide
  Sense strand starting at position 20 of SEQ ID NO: 1887790
uguuaugucuugucuugac

SEQ ID NO: 2496787 - RNA, 19 nt, Artificial Sequence
  Description of Artificial Sequence: Synthetic oligonucleotide
  Antisense strand to SEQ ID NO: 2496786
gucaagacaagacauaaca

SEQ ID NO: 2496788 - RNA, 19 nt, Artificial Sequence
  Description of Artificial Sequence: Synthetic oligonucleotide
  Sense strand starting at position 53 of SEQ ID NO: 1887790
acgugucugugcccaaaua

SEQ ID NO: 2496789 - RNA, 19 nt, Artificial Sequence
  Description of Artificial Sequence: Synthetic oligonucleotide
  Antisense strand to SEQ ID NO: 2496788
uauuugggcacagacacgu

SEQ ID NO: 2496790 - RNA, 19 nt, Artificial Sequence
  Description of Artificial Sequence: Synthetic oligonucleotide
  Sense strand starting at position 54 of SEQ ID NO: 1887790
cgugucugugcccaaauau

SEQ ID NO: 2496791 - RNA, 19 nt, Artificial Sequence
  Description of Artificial Sequence: Synthetic oligonucleotide
  Antisense strand to SEQ ID NO: 2496790
auauuugggcacagacacg

SEQ ID NO: 2496792 - RNA, 19 nt, Artificial Sequence
  Description of Artificial Sequence: Synthetic oligonucleotide
  Sense strand starting at position 77 of SEQ ID NO: 1887790
cucuaugaugcccgucauu

SEQ ID NO: 2496793 - RNA, 19 nt, Artificial Sequence
  Description of Artificial Sequence: Synthetic oligonucleotide
  Antisense strand to SEQ ID NO: 2496792
aaugacgggcaucauagag

SEQ ID NO: 2496794 - RNA, 19 nt, Artificial Sequence
  Description of Artificial Sequence: Synthetic oligonucleotide
  Sense strand starting at position 96 of SEQ ID NO: 1887790
agguuaggcccaugcuaau

SEQ ID NO: 2496795 - RNA, 19 nt, Artificial Sequence
  Description of Artificial Sequence: Synthetic oligonucleotide
  Antisense strand to SEQ ID NO: 2496794
auuagcaugggccuaaccu

SEQ ID NO: 2496796 - RNA, 19 nt, Artificial Sequence
  Description of Artificial Sequence: Synthetic oligonucleotide
  Sense strand starting at position 832 of SEQ ID NO: 1887790
ggccgcuaagaacguuaaa

SEQ ID NO: 2496797 - RNA, 19 nt, Artificial Sequence
  Description of Artificial Sequence: Synthetic oligonucleotide
  Antisense strand to SEQ ID NO: 2496796
uuuaacguucuuagcggcc

SEQ ID NO: 2496798 - RNA, 19 nt, Artificial Sequence
  Description of Artificial Sequence: Synthetic oligonucleotide
  Sense strand starting at position 899 of SEQ ID NO: 1887790
ggcccucuuggagaacuga

SEQ ID NO: 2496799 - RNA, 19 nt, Artificial Sequence
  Description of Artificial Sequence: Synthetic oligonucleotide
  Antisense strand to SEQ ID NO: 2496798
ucaguucuccaagagggcc

SEQ ID NO: 2496800 - RNA, 19 nt, Artificial Sequence
  Description of Artificial Sequence: Synthetic oligonucleotide
  Sense strand starting at position 938 of SEQ ID NO: 1887790
cucugauauuugggccauu

SEQ ID NO: 2496801 - RNA, 19 nt, Artificial Sequence
  Description of Artificial Sequence: Synthetic oligonucleotide
  Antisense strand to SEQ ID NO: 2496800
aauggcccaaauaucagag

SEQ ID NO: 2496802 - RNA, 19 nt, Artificial Sequence
  Description of Artificial Sequence: Synthetic oligonucleotide
  Sense strand starting at position 950 of SEQ ID NO: 1887790
ggccauuguuaaccuguaa

SEQ ID NO: 2496803 - RNA, 19 nt, Artificial Sequence
  Description of Artificial Sequence: Synthetic oligonucleotide
  Antisense strand to SEQ ID NO: 2496802
uuacagguuaacaauggcc

SEQ ID NO: 2496804 - RNA, 19 nt, Artificial Sequence
  Description of Artificial Sequence: Synthetic oligonucleotide
  Sense strand starting at position 987 of SEQ ID NO: 1887790
uuugcagaauucuugcaaa

SEQ ID NO: 2496805 - RNA, 19 nt, Artificial Sequence
  Description of Artificial Sequence: Synthetic oligonucleotide
  Antisense strand to SEQ ID NO: 2496804
uuugcaagaauucugcaaa

SEQ ID NO: 2496806 - RNA, 19 nt, Artificial Sequence
  Description of Artificial Sequence: Synthetic oligonucleotide
  Sense strand starting at position 1075 of SEQ ID NO: 1887790
gggcuugaggccuggaguu

SEQ ID NO: 2496807 - RNA, 19 nt, Artificial Sequence
  Description of Artificial Sequence: Synthetic oligonucleotide
  Antisense strand to SEQ ID NO: 2496806
aacuccaggccucaagccc

SEQ ID NO: 2496808 - RNA, 19 nt, Artificial Sequence
  Description of Artificial Sequence: Synthetic oligonucleotide
  Sense strand starting at position 1276 of SEQ ID NO: 1887790
acaagaauuuguugggcau

SEQ ID NO: 2496809 - RNA, 19 nt, Artificial Sequence
  Description of Artificial Sequence: Synthetic oligonucleotide
  Antisense strand to SEQ ID NO: 2496808
augcccaacaaauucuugu

SEQ ID NO: 2496810 - RNA, 19 nt, Artificial Sequence
  Description of Artificial Sequence: Synthetic oligonucleotide
  Sense strand starting at position 1501 of SEQ ID NO: 1887790
ugggaauaggguuggaagu

SEQ ID NO: 2496811 - RNA, 19 nt, Artificial Sequence
  Description of Artificial Sequence: Synthetic oligonucleotide
  Antisense strand to SEQ ID NO: 2496810
acuuccaacccuauuccca

SEQ ID NO: 2496812 - RNA, 19 nt, Artificial Sequence
  Description of Artificial Sequence: Synthetic oligonucleotide
  Sense strand starting at position 1538 of SEQ ID NO: 1887790
cggugacuucgcuuacagu

SEQ ID NO: 2496813 - RNA, 19 nt, Artificial Sequence
  Description of Artificial Sequence: Synthetic oligonucleotide
  Antisense strand to SEQ ID NO: 2496812
acuguaagcgaagucaccg

SEQ ID NO: 2496814 - RNA, 19 nt, Artificial Sequence
  Description of Artificial Sequence: Synthetic oligonucleotide
  Sense strand starting at position 1539 of SEQ ID NO: 1887790
ggugacuucgcuuacaguu

SEQ ID NO: 2496815 - RNA, 19 nt, Artificial Sequence
  Description of Artificial Sequence: Synthetic oligonucleotide
  Antisense strand to SEQ ID NO: 2496814
aacuguaagcgaagucacc

SEQ ID NO: 2496816 - RNA, 19 nt, Artificial Sequence
  Description of Artificial Sequence: Synthetic oligonucleotide
  Sense strand starting at position 1853 of SEQ ID NO: 1887790
gagcaagauuccguuucug

SEQ ID NO: 2496817 - RNA, 19 nt, Artificial Sequence
  Description of Artificial Sequence: Synthetic oligonucleotide
  Antisense strand to SEQ ID NO: 2496816
cagaaacggaaucuugcuc

SEQ ID NO: 2496818 - RNA, 19 nt, Artificial Sequence
  Description of Artificial Sequence: Synthetic oligonucleotide
  Sense strand starting at position 1990 of SEQ ID NO: 1887790
cgaagcgagcacgaauauu

SEQ ID NO: 2496819 - RNA, 19 nt, Artificial Sequence
  Description of Artificial Sequence: Synthetic oligonucleotide
  Antisense strand to SEQ ID NO: 2496818
aauauucgugcucgcuucg

SEQ ID NO: 2496820 - RNA, 19 nt, Artificial Sequence
  Description of Artificial Sequence: Synthetic oligonucleotide
  Sense strand starting at position 2039 of SEQ ID NO: 1887790
ggaacaaaugucuguacac

SEQ ID NO: 2496821 - RNA, 19 nt, Artificial Sequence
  Description of Artificial Sequence: Synthetic oligonucleotide
  Antisense strand to SEQ ID NO: 2496820
guguacagacauuuguucc

SEQ ID NO: 2496822 - RNA, 19 nt, Artificial Sequence
  Description of Artificial Sequence: Synthetic oligonucleotide
  Sense strand starting at position 2103 of SEQ ID NO: 1887790
auauuagcccaauguguaa

SEQ ID NO: 2496823 - RNA, 19 nt, Artificial Sequence
  Description of Artificial Sequence: Synthetic oligonucleotide
  Antisense strand to SEQ ID NO: 2496822
uuacacauugggcuaauau

SEQ ID NO: 2496824 - RNA, 19 nt, Artificial Sequence
  Description of Artificial Sequence: Synthetic oligonucleotide
  Sense strand starting at position 2116 of SEQ ID NO: 1887790
guguaaugcaacuaacgua

SEQ ID NO: 2496825 - RNA, 19 nt, Artificial Sequence
  Description of Artificial Sequence: Synthetic oligonucleotide
  Antisense strand to SEQ ID NO: 2496824
uacguuaguugcauuacac

SEQ ID NO: 2496826 - RNA, 19 nt, Artificial Sequence
  Description of Artificial Sequence: Synthetic oligonucleotide
  Sense strand starting at position 2124 of SEQ ID NO: 1887790
caacuaacguaguuauuga

SEQ ID NO: 2496827 - RNA, 19 nt, Artificial Sequence
  Description of Artificial Sequence: Synthetic oligonucleotide
  Antisense strand to SEQ ID NO: 2496826
ucaauaacuacguuaguug

SEQ ID NO: 2496828 - RNA, 19 nt, Artificial Sequence
  Description of Artificial Sequence: Synthetic oligonucleotide
  Sense strand starting at position 2131 of SEQ ID NO: 1887790
cguaguuauugacuggagu

SEQ ID NO: 2496829 - RNA, 19 nt, Artificial Sequence
  Description of Artificial Sequence: Synthetic oligonucleotide
  Antisense strand to SEQ ID NO: 2496828
acuccagucaauaacuacg

SEQ ID NO: 2496830 - RNA, 19 nt, Artificial Sequence
  Description of Artificial Sequence: Synthetic oligonucleotide
  Sense strand starting at position 2132 of SEQ ID NO: 1887790
guaguuauugacuggaguu

SEQ ID NO: 2496831 - RNA, 19 nt, Artificial Sequence
  Description of Artificial Sequence: Synthetic oligonucleotide
  Antisense strand to SEQ ID NO: 2496830
aacuccagucaauaacuac

SEQ ID NO: 2496832 - RNA, 19 nt, Artificial Sequence
  Description of Artificial Sequence: Synthetic oligonucleotide
  Sense strand starting at position 2133 of SEQ ID NO: 1887790
uaguuauugacuggaguug

SEQ ID NO: 2496833 - RNA, 19 nt, Artificial Sequence
  Description of Artificial Sequence: Synthetic oligonucleotide
  Antisense strand to SEQ ID NO: 2496832
caacuccagucaauaacua

SEQ ID NO: 2496834 - RNA, 19 nt, Artificial Sequence
  Description of Artificial Sequence: Synthetic oligonucleotide
  Sense strand starting at position 2134 of SEQ ID NO: 1887790
aguuauugacuggaguuga

SEQ ID NO: 2496835 - RNA, 19 nt, Artificial Sequence
  Description of Artificial Sequence: Synthetic oligonucleotide
  Antisense strand to SEQ ID NO: 2496834
ucaacuccagucaauaacu

SEQ ID NO: 2496836 - RNA, 19 nt, Artificial Sequence
  Description of Artificial Sequence: Synthetic oligonucleotide
  Sense strand starting at position 2149 of SEQ ID NO: 1887790
uugagaaagugcucguugu

SEQ ID NO: 2496837 - RNA, 19 nt, Artificial Sequence
  Description of Artificial Sequence: Synthetic oligonucleotide
  Antisense strand to SEQ ID NO: 2496836
acaacgagcacuuucucaa

SEQ ID NO: 2496838 - RNA, 19 nt, Artificial Sequence
  Description of Artificial Sequence: Synthetic oligonucleotide
  Sense strand starting at position 2150 of SEQ ID NO: 1887790
ugagaaagugcucguuguu

SEQ ID NO: 2496839 - RNA, 19 nt, Artificial Sequence
  Description of Artificial Sequence: Synthetic oligonucleotide
  Antisense strand to SEQ ID NO: 2496838
aacaacgagcacuuucuca

SEQ ID NO: 2496840 - RNA, 19 nt, Artificial Sequence
  Description of Artificial Sequence: Synthetic oligonucleotide
  Sense strand starting at position 2304 of SEQ ID NO: 1887790
cugguuguuaccgaggaag

SEQ ID NO: 2496841 - RNA, 19 nt, Artificial Sequence
  Description of Artificial Sequence: Synthetic oligonucleotide
  Antisense strand to SEQ ID NO: 2496840
cuuccucgguaacaaccag

SEQ ID NO: 2496842 - RNA, 19 nt, Artificial Sequence
  Description of Artificial Sequence: Synthetic oligonucleotide
  Sense strand starting at position 2306 of SEQ ID NO: 1887790
gguuguuaccgaggaagau

SEQ ID NO: 2496843 - RNA, 19 nt, Artificial Sequence
  Description of Artificial Sequence: Synthetic oligonucleotide
  Antisense strand to SEQ ID NO: 2496842
aucuuccucgguaacaacc

SEQ ID NO: 2496844 - RNA, 19 nt, Artificial Sequence
  Description of Artificial Sequence: Synthetic oligonucleotide
  Sense strand starting at position 2307 of SEQ ID NO: 1887790
guuguuaccgaggaagaug

SEQ ID NO: 2496845 - RNA, 19 nt, Artificial Sequence
  Description of Artificial Sequence: Synthetic oligonucleotide
  Antisense strand to SEQ ID NO: 2496844
caucuuccucgguaacaac

SEQ ID NO: 2496846 - RNA, 19 nt, Artificial Sequence
  Description of Artificial Sequence: Synthetic oligonucleotide
  Sense strand starting at position 3115 of SEQ ID NO: 1887790
uacggugaagccugagaau

SEQ ID NO: 2496847 - RNA, 19 nt, Artificial Sequence
  Description of Artificial Sequence: Synthetic oligonucleotide
  Antisense strand to SEQ ID NO: 2496846
auucucaggcuucaccgua

SEQ ID NO: 2496848 - RNA, 19 nt, Artificial Sequence
  Description of Artificial Sequence: Synthetic oligonucleotide
  Sense strand starting at position 3118 of SEQ ID NO: 1887790
ggugaagccugagaauuua

SEQ ID NO: 2496849 - RNA, 19 nt, Artificial Sequence
  Description of Artificial Sequence: Synthetic oligonucleotide
  Antisense strand to SEQ ID NO: 2496848
uaaauucucaggcuucacc

SEQ ID NO: 2496850 - RNA, 19 nt, Artificial Sequence
  Description of Artificial Sequence: Synthetic oligonucleotide
  Sense strand starting at position 3159 of SEQ ID NO: 1887790
ggugaaaugaaguguggga

SEQ ID NO: 2496851 - RNA, 19 nt, Artificial Sequence
  Description of Artificial Sequence: Synthetic oligonucleotide
  Antisense strand to SEQ ID NO: 2496850
ucccacacuucauuucacc

SEQ ID NO: 2496852 - RNA, 19 nt, Artificial Sequence
  Description of Artificial Sequence: Synthetic oligonucleotide
  Sense strand starting at position 3272 of SEQ ID NO: 1887790
ggguuaggguuugaggaga

SEQ ID NO: 2496853 - RNA, 19 nt, Artificial Sequence
  Description of Artificial Sequence: Synthetic oligonucleotide
  Antisense strand to SEQ ID NO: 2496852
ucuccucaaacccuaaccc

SEQ ID NO: 2496854 - RNA, 19 nt, Artificial Sequence
  Description of Artificial Sequence: Synthetic oligonucleotide
  Sense strand starting at position 3391 of SEQ ID NO: 1887790
cccucuguucccugugaca

SEQ ID NO: 2496855 - RNA, 19 nt, Artificial Sequence
  Description of Artificial Sequence: Synthetic oligonucleotide
  Antisense strand to SEQ ID NO: 2496854
ugucacagggaacagaggg

SEQ ID NO: 2496856 - RNA, 19 nt, Artificial Sequence
  Description of Artificial Sequence: Synthetic oligonucleotide
  Sense strand starting at position 3393 of SEQ ID NO: 1887790
cucuguucccugugacacu

SEQ ID NO: 2496857 - RNA, 19 nt, Artificial Sequence
  Description of Artificial Sequence: Synthetic oligonucleotide
  Antisense strand to SEQ ID NO: 2496856
agugucacagggaacagag

SEQ ID NO: 2496858 - RNA, 19 nt, Artificial Sequence
  Description of Artificial Sequence: Synthetic oligonucleotide
  Sense strand starting at position 3728 of SEQ ID NO: 1887790
acagguguucccugucagu

SEQ ID NO: 2496859 - RNA, 19 nt, Artificial Sequence
  Description of Artificial Sequence: Synthetic oligonucleotide
  Antisense strand to SEQ ID NO: 2496858
acugacagggaacaccugu

SEQ ID NO: 2496860 - RNA, 19 nt, Artificial Sequence
  Description of Artificial Sequence: Synthetic oligonucleotide
  Sense strand starting at position 3838 of SEQ ID NO: 1887790
acagguguucccugucacu

SEQ ID NO: 2496861 - RNA, 19 nt, Artificial Sequence
  Description of Artificial Sequence: Synthetic oligonucleotide
  Antisense strand to SEQ ID NO: 2496860
agugacagggaacaccugu

SEQ ID NO: 2496862 - RNA, 19 nt, Artificial Sequence
  Description of Artificial Sequence: Synthetic oligonucleotide
  Sense strand starting at position 3940 of SEQ ID NO: 1887790
gggcucuuccuucgggaga

SEQ ID NO: 2496863 - RNA, 19 nt, Artificial Sequence
  Description of Artificial Sequence: Synthetic oligonucleotide
  Antisense strand to SEQ ID NO: 2496862
ucucccgaaggaagagccc

SEQ ID NO: 2496864 - RNA, 19 nt, Artificial Sequence
  Description of Artificial Sequence: Synthetic oligonucleotide
  Sense strand starting at position 392 of SEQ ID NO: 1887791
gccugaccuuguuuggaua

SEQ ID NO: 2496865 - RNA, 19 nt, Artificial Sequence
  Description of Artificial Sequence: Synthetic oligonucleotide
  Antisense strand to SEQ ID NO: 2496864
uauccaaacaaggucaggc

SEQ ID NO: 2496866 - RNA, 19 nt, Artificial Sequence
  Description of Artificial Sequence: Synthetic oligonucleotide
  Sense strand starting at position 393 of SEQ ID NO: 1887791
ccugaccuuguuuggauaa

SEQ ID NO: 2496867 - RNA, 19 nt, Artificial Sequence
  Description of Artificial Sequence: Synthetic oligonucleotide
  Antisense strand to SEQ ID NO: 2496866
uuauccaaacaaggucagg

SEQ ID NO: 2496868 - RNA, 19 nt, Artificial Sequence
  Description of Artificial Sequence: Synthetic oligonucleotide
  Sense strand starting at position 395 of SEQ ID NO: 1887791
ugaccuuguuuggauaacu

SEQ ID NO: 2496869 - RNA, 19 nt, Artificial Sequence
  Description of Artificial Sequence: Synthetic oligonucleotide
  Antisense strand to SEQ ID NO: 2496868
aguuauccaaacaagguca

SEQ ID NO: 2496870 - RNA, 19 nt, Artificial Sequence
  Description of Artificial Sequence: Synthetic oligonucleotide
  Sense strand starting at position 400 of SEQ ID NO: 1887791
uuguuuggauaacuugaga

SEQ ID NO: 2496871 - RNA, 19 nt, Artificial Sequence
  Description of Artificial Sequence: Synthetic oligonucleotide
  Antisense strand to SEQ ID NO: 2496870
ucucaaguuauccaaacaa

SEQ ID NO: 2496872 - RNA, 19 nt, Artificial Sequence
  Description of Artificial Sequence: Synthetic oligonucleotide
  Sense strand starting at position 405 of SEQ ID NO: 1887791
uggauaacuugagaugugu

SEQ ID NO: 2496873 - RNA, 19 nt, Artificial Sequence
  Description of Artificial Sequence: Synthetic oligonucleotide
  Antisense strand to SEQ ID NO: 2496872
acacaucucaaguuaucca

SEQ ID NO: 2496874 - RNA, 19 nt, Artificial Sequence
  Description of Artificial Sequence: Synthetic oligonucleotide
  Sense strand starting at position 505 of SEQ ID NO: 1887791
guuauuugcuuaucuuucu

SEQ ID NO: 2496875 - RNA, 19 nt, Artificial Sequence
  Description of Artificial Sequence: Synthetic oligonucleotide
  Antisense strand to SEQ ID NO: 2496874
agaaagauaagcaaauaac

SEQ ID NO: 2496876 - RNA, 19 nt, Artificial Sequence
  Description of Artificial Sequence: Synthetic oligonucleotide
  Sense strand starting at position 511 of SEQ ID NO: 1887791
ugcuuaucuuucucuugga

SEQ ID NO: 2496877 - RNA, 19 nt, Artificial Sequence
  Description of Artificial Sequence: Synthetic oligonucleotide
  Antisense strand to SEQ ID NO: 2496876
uccaagagaaagauaagca

SEQ ID NO: 2496878 - RNA, 19 nt, Artificial Sequence
  Description of Artificial Sequence: Synthetic oligonucleotide
  Sense strand starting at position 512 of SEQ ID NO: 1887791
gcuuaucuuucucuuggaa

SEQ ID NO: 2496879 - RNA, 19 nt, Artificial Sequence
  Description of Artificial Sequence: Synthetic oligonucleotide
  Antisense strand to SEQ ID NO: 2496878
uuccaagagaaagauaagc

SEQ ID NO: 2496880 - RNA, 19 nt, Artificial Sequence
  Description of Artificial Sequence: Synthetic oligonucleotide
  Sense strand starting at position 524 of SEQ ID NO: 1887791
cuuggaaagcuguguucuu

SEQ ID NO: 2496881 - RNA, 19 nt, Artificial Sequence
  Description of Artificial Sequence: Synthetic oligonucleotide
  Antisense strand to SEQ ID NO: 2496880
aagaacacagcuuuccaag

SEQ ID NO: 2496882 - RNA, 19 nt, Artificial Sequence
  Description of Artificial Sequence: Synthetic oligonucleotide
  Sense strand starting at position 652 of SEQ ID NO: 1887791
ucuaucaaacguggaaauu

SEQ ID NO: 2496883 - RNA, 19 nt, Artificial Sequence
  Description of Artificial Sequence: Synthetic oligonucleotide
  Antisense strand to SEQ ID NO: 2496882
aauuuccacguuugauaga

SEQ ID NO: 2496884 - RNA, 19 nt, Artificial Sequence
  Description of Artificial Sequence: Synthetic oligonucleotide
  Sense strand starting at position 975 of SEQ ID NO: 1887791
gcaccaacguccucaguua

SEQ ID NO: 2496885 - RNA, 19 nt, Artificial Sequence
  Description of Artificial Sequence: Synthetic oligonucleotide
  Antisense strand to SEQ ID NO: 2496884
uaacugaggacguuggugc

SEQ ID NO: 2496886 - RNA, 19 nt, Artificial Sequence
  Description of Artificial Sequence: Synthetic oligonucleotide
  Sense strand starting at position 1749 of SEQ ID NO: 1887791
uagagacugccagauuguu

SEQ ID NO: 2496887 - RNA, 19 nt, Artificial Sequence
  Description of Artificial Sequence: Synthetic oligonucleotide
  Antisense strand to SEQ ID NO: 2496886
aacaaucuggcagucucua

SEQ ID NO: 2496888 - RNA, 19 nt, Artificial Sequence
  Description of Artificial Sequence: Synthetic oligonucleotide
  Sense strand starting at position 1804 of SEQ ID NO: 1887791
acgggaagacuaugacguu

SEQ ID NO: 2496889 - RNA, 19 nt, Artificial Sequence
  Description of Artificial Sequence: Synthetic oligonucleotide
  Antisense strand to SEQ ID NO: 2496888
aacgucauagucuucccgu

SEQ ID NO: 2496890 - RNA, 19 nt, Artificial Sequence
  Description of Artificial Sequence: Synthetic oligonucleotide
  Sense strand starting at position 1805 of SEQ ID NO: 1887791
cgggaagacuaugacguua

SEQ ID NO: 2496891 - RNA, 19 nt, Artificial Sequence
  Description of Artificial Sequence: Synthetic oligonucleotide
  Antisense strand to SEQ ID NO: 2496890
uaacgucauagucuucccg

SEQ ID NO: 2496892 - RNA, 19 nt, Artificial Sequence
  Description of Artificial Sequence: Synthetic oligonucleotide
  Sense strand starting at position 1843 of SEQ ID NO: 1887791
gcaggauccgggcaagaga

SEQ ID NO: 2496893 - RNA, 19 nt, Artificial Sequence
  Description of Artificial Sequence: Synthetic oligonucleotide
  Antisense strand to SEQ ID NO: 2496892
ucucuugcccggauccugc

SEQ ID NO: 2496894 - RNA, 19 nt, Artificial Sequence
  Description of Artificial Sequence: Synthetic oligonucleotide
  Sense strand starting at position 1872 of SEQ ID NO: 1887791
ggugacgagcuguagacua

SEQ ID NO: 2496895 - RNA, 19 nt, Artificial Sequence
  Description of Artificial Sequence: Synthetic oligonucleotide
  Antisense strand to SEQ ID NO: 2496894
uagucuacagcucgucacc

SEQ ID NO: 2496896 - RNA, 19 nt, Artificial Sequence
  Description of Artificial Sequence: Synthetic oligonucleotide
  Sense strand starting at position 1998 of SEQ ID NO: 1887791
gcacgacucaaggguuacu

SEQ ID NO: 2496897 - RNA, 19 nt, Artificial Sequence
  Description of Artificial Sequence: Synthetic oligonucleotide
  Antisense strand to SEQ ID NO: 2496896
aguaacccuugagucgugc

SEQ ID NO: 2496898 - RNA, 19 nt, Artificial Sequence
  Description of Artificial Sequence: Synthetic oligonucleotide
  Sense strand starting at position 2062 of SEQ ID NO: 1887791
gauaacuuauggucgguuu

SEQ ID NO: 2496899 - RNA, 19 nt, Artificial Sequence
  Description of Artificial Sequence: Synthetic oligonucleotide
  Antisense strand to SEQ ID NO: 2496898
aaaccgaccauaaguuauc

SEQ ID NO: 2496900 - RNA, 19 nt, Artificial Sequence
  Description of Artificial Sequence: Synthetic oligonucleotide
  Sense strand starting at position 2088 of SEQ ID NO: 1887791
agcauaauuuccuacagug

SEQ ID NO: 2496901 - RNA, 19 nt, Artificial Sequence
  Description of Artificial Sequence: Synthetic oligonucleotide
  Antisense strand to SEQ ID NO: 2496900
cacuguaggaaauuaugcu

SEQ ID NO: 2496902 - RNA, 19 nt, Artificial Sequence
  Description of Artificial Sequence: Synthetic oligonucleotide
  Sense strand starting at position 2105 of SEQ ID NO: 1887791
ugguauguugcagaacaac

SEQ ID NO: 2496903 - RNA, 19 nt, Artificial Sequence
  Description of Artificial Sequence: Synthetic oligonucleotide
  Antisense strand to SEQ ID NO: 2496902
guuguucugcaacauacca

SEQ ID NO: 2496904 - RNA, 19 nt, Artificial Sequence
  Description of Artificial Sequence: Synthetic oligonucleotide
  Sense strand starting at position 2116 of SEQ ID NO: 1887791
agaacaacuuucgugcuua

SEQ ID NO: 2496905 - RNA, 19 nt, Artificial Sequence
  Description of Artificial Sequence: Synthetic oligonucleotide
  Antisense strand to SEQ ID NO: 2496904
uaagcacgaaaguuguucu

SEQ ID NO: 2496906 - RNA, 19 nt, Artificial Sequence
  Description of Artificial Sequence: Synthetic oligonucleotide
  Sense strand starting at position 2129 of SEQ ID NO: 1887791
ugcuuacgcuuacuuugau

SEQ ID NO: 2496907 - RNA, 19 nt, Artificial Sequence
  Description of Artificial Sequence: Synthetic oligonucleotide
  Antisense strand to SEQ ID NO: 2496906
aucaaaguaagcguaagca

SEQ ID NO: 2496908 - RNA, 19 nt, Artificial Sequence
  Description of Artificial Sequence: Synthetic oligonucleotide
  Sense strand starting at position 2138 of SEQ ID NO: 1887791
uuacuuugaugucuucgau

SEQ ID NO: 2496909 - RNA, 19 nt, Artificial Sequence
  Description of Artificial Sequence: Synthetic oligonucleotide
  Antisense strand to SEQ ID NO: 2496908
aucgaagacaucaaaguaa

SEQ ID NO: 2496910 - RNA, 19 nt, Artificial Sequence
  Description of Artificial Sequence: Synthetic oligonucleotide
  Sense strand starting at position 2141 of SEQ ID NO: 1887791
cuuugaugucuucgaucac

SEQ ID NO: 2496911 - RNA, 19 nt, Artificial Sequence
  Description of Artificial Sequence: Synthetic oligonucleotide
  Antisense strand to SEQ ID NO: 2496910
gugaucgaagacaucaaag

SEQ ID NO: 2496912 - RNA, 19 nt, Artificial Sequence
  Description of Artificial Sequence: Synthetic oligonucleotide
  Sense strand starting at position 2145 of SEQ ID NO: 1887791
gaugucuucgaucacguaa

SEQ ID NO: 2496913 - RNA, 19 nt, Artificial Sequence
  Description of Artificial Sequence: Synthetic oligonucleotide
  Antisense strand to SEQ ID NO: 2496912
uuacgugaucgaagacauc

SEQ ID NO: 2496914 - RNA, 19 nt, Artificial Sequence
  Description of Artificial Sequence: Synthetic oligonucleotide
  Sense strand starting at position 2191 of SEQ ID NO: 1887791
gccuuauacuggccucaua

SEQ ID NO: 2496915 - RNA, 19 nt, Artificial Sequence
  Description of Artificial Sequence: Synthetic oligonucleotide
  Antisense strand to SEQ ID NO: 2496914
uaugaggccaguauaaggc

SEQ ID NO: 2496916 - RNA, 19 nt, Artificial Sequence
  Description of Artificial Sequence: Synthetic oligonucleotide
  Sense strand starting at position 2215 of SEQ ID NO: 1887791
gguggauugugggugccaa

SEQ ID NO: 2496917 - RNA, 19 nt, Artificial Sequence
  Description of Artificial Sequence: Synthetic oligonucleotide
  Antisense strand to SEQ ID NO: 2496916
uuggcacccacaauccacc

SEQ ID NO: 2496918 - RNA, 19 nt, Artificial Sequence
  Description of Artificial Sequence: Synthetic oligonucleotide
  Sense strand starting at position 2216 of SEQ ID NO: 1887791
guggauugugggugccaau

SEQ ID NO: 2496919 - RNA, 19 nt, Artificial Sequence
  Description of Artificial Sequence: Synthetic oligonucleotide
  Antisense strand to SEQ ID NO: 2496918
auuggcacccacaauccac

SEQ ID NO: 2496920 - RNA, 19 nt, Artificial Sequence
  Description of Artificial Sequence: Synthetic oligonucleotide
  Sense strand starting at position 2663 of SEQ ID NO: 1887791
acgcgcuguucuucaagau

SEQ ID NO: 2496921 - RNA, 19 nt, Artificial Sequence
  Description of Artificial Sequence: Synthetic oligonucleotide
  Antisense strand to SEQ ID NO: 2496920
aucuugaagaacagcgcgu

SEQ ID NO: 2496922 - RNA, 19 nt, Artificial Sequence
  Description of Artificial Sequence: Synthetic oligonucleotide
  Sense strand starting at position 2664 of SEQ ID NO: 1887791
cgcgcuguucuucaagaug

SEQ ID NO: 2496923 - RNA, 19 nt, Artificial Sequence
  Description of Artificial Sequence: Synthetic oligonucleotide
  Antisense strand to SEQ ID NO: 2496922
caucuugaagaacagcgcg

SEQ ID NO: 2496924 - RNA, 19 nt, Artificial Sequence
  Description of Artificial Sequence: Synthetic oligonucleotide
  Sense strand starting at position 2723 of SEQ ID NO: 1887791
gucucuucgaguucuucgu

SEQ ID NO: 2496925 - RNA, 19 nt, Artificial Sequence
  Description of Artificial Sequence: Synthetic oligonucleotide
  Antisense strand to SEQ ID NO: 2496924
acgaagaacucgaagagac

SEQ ID NO: 2496926 - RNA, 19 nt, Artificial Sequence
  Description of Artificial Sequence: Synthetic oligonucleotide
  Sense strand starting at position 2731 of SEQ ID NO: 1887791
gaguucuucgugcugcuca

SEQ ID NO: 2496927 - RNA, 19 nt, Artificial Sequence
  Description of Artificial Sequence: Synthetic oligonucleotide
  Antisense strand to SEQ ID NO: 2496926
ugagcagcacgaagaacuc

SEQ ID NO: 2496928 - RNA, 19 nt, Artificial Sequence
  Description of Artificial Sequence: Synthetic oligonucleotide
  Sense strand starting at position 2911 of SEQ ID NO: 1887791
gaccucugacccugggauu

SEQ ID NO: 2496929 - RNA, 19 nt, Artificial Sequence
  Description of Artificial Sequence: Synthetic oligonucleotide
  Antisense strand to SEQ ID NO: 2496928
aaucccagggucagagguc

SEQ ID NO: 2496930 - RNA, 19 nt, Artificial Sequence
  Description of Artificial Sequence: Synthetic oligonucleotide
  Sense strand starting at position 3010 of SEQ ID NO: 1887791
gcuguucucuacucuggaa

SEQ ID NO: 2496931 - RNA, 19 nt, Artificial Sequence
  Description of Artificial Sequence: Synthetic oligonucleotide
  Antisense strand to SEQ ID NO: 2496930
uuccagaguagagaacagc

SEQ ID NO: 2496932 - RNA, 19 nt, Artificial Sequence
  Description of Artificial Sequence: Synthetic oligonucleotide
  Sense strand starting at position 3012 of SEQ ID NO: 1887791
uguucucuacucuggaaac

SEQ ID NO: 2496933 - RNA, 19 nt, Artificial Sequence
  Description of Artificial Sequence: Synthetic oligonucleotide
  Antisense strand to SEQ ID NO: 2496932
guuuccagaguagagaaca

SEQ ID NO: 2496934 - RNA, 19 nt, Artificial Sequence
  Description of Artificial Sequence: Synthetic oligonucleotide
  Sense strand starting at position 3333 of SEQ ID NO: 1887791
gggaaugugacuuagcuga

SEQ ID NO: 2496935 - RNA, 19 nt, Artificial Sequence
  Description of Artificial Sequence: Synthetic oligonucleotide
  Antisense strand to SEQ ID NO: 2496934
ucagcuaagucacauuccc

SEQ ID NO: 2496936 - RNA, 19 nt, Artificial Sequence
  Description of Artificial Sequence: Synthetic oligonucleotide
  Sense strand starting at position 3593 of SEQ ID NO: 1887791
gaaggagucuugcuugggu

SEQ ID NO: 2496937 - RNA, 19 nt, Artificial Sequence
  Description of Artificial Sequence: Synthetic oligonucleotide
  Antisense strand to SEQ ID NO: 2496936
acccaagcaagacuccuuc

SEQ ID NO: 2496938 - RNA, 19 nt, Artificial Sequence
  Description of Artificial Sequence: Synthetic oligonucleotide
  Sense strand starting at position 3595 of SEQ ID NO: 1887791
aggagucuugcuuggguga

SEQ ID NO: 2496939 - RNA, 19 nt, Artificial Sequence
  Description of Artificial Sequence: Synthetic oligonucleotide
  Antisense strand to SEQ ID NO: 2496938
ucacccaagcaagacuccu

SEQ ID NO: 2496940 - RNA, 19 nt, Artificial Sequence
  Description of Artificial Sequence: Synthetic oligonucleotide
  Sense strand starting at position 3598 of SEQ ID NO: 1887791
agucuugcuugggugacaa

SEQ ID NO: 2496941 - RNA, 19 nt, Artificial Sequence
  Description of Artificial Sequence: Synthetic oligonucleotide
  Antisense strand to SEQ ID NO: 2496940
uugucacccaagcaagacu

SEQ ID NO: 2496942 - RNA, 19 nt, Artificial Sequence
  Description of Artificial Sequence: Synthetic oligonucleotide
  Sense strand starting at position 3702 of SEQ ID NO: 1887791
uucguucugcaucagaaca

SEQ ID NO: 2496943 - RNA, 19 nt, Artificial Sequence
  Description of Artificial Sequence: Synthetic oligonucleotide
  Antisense strand to SEQ ID NO: 2496942
uguucugaugcagaacgaa

SEQ ID NO: 2496944 - RNA, 19 nt, Artificial Sequence
  Description of Artificial Sequence: Synthetic oligonucleotide
  Sense strand starting at position 17 of SEQ ID NO: 1887792
guguguuaugucuugucuu

SEQ ID NO: 2496945 - RNA, 19 nt, Artificial Sequence
  Description of Artificial Sequence: Synthetic oligonucleotide
  Antisense strand to SEQ ID NO: 2496944
aagacaagacauaacacac

SEQ ID NO: 2496946 - RNA, 19 nt, Artificial Sequence
  Description of Artificial Sequence: Synthetic oligonucleotide
  Sense strand starting at position 20 of SEQ ID NO: 1887792
uguuaugucuugucuugac

SEQ ID NO: 2496947 - RNA, 19 nt, Artificial Sequence
  Description of Artificial Sequence: Synthetic oligonucleotide
  Antisense strand to SEQ ID NO: 2496946
gucaagacaagacauaaca

SEQ ID NO: 2496948 - RNA, 19 nt, Artificial Sequence
  Description of Artificial Sequence: Synthetic oligonucleotide
  Sense strand starting at position 53 of SEQ ID NO: 1887792
acgugucugugcccaaaua

SEQ ID NO: 2496949 - RNA, 19 nt, Artificial Sequence
  Description of Artificial Sequence: Synthetic oligonucleotide
  Antisense strand to SEQ ID NO: 2496948
uauuugggcacagacacgu

SEQ ID NO: 2496950 - RNA, 19 nt, Artificial Sequence
  Description of Artificial Sequence: Synthetic oligonucleotide
  Sense strand starting at position 54 of SEQ ID NO: 1887792
cgugucugugcccaaauau

SEQ ID NO: 2496951 - RNA, 19 nt, Artificial Sequence
  Description of Artificial Sequence: Synthetic oligonucleotide
  Antisense strand to SEQ ID NO: 2496950
auauuugggcacagacacg

SEQ ID NO: 2496952 - RNA, 19 nt, Artificial Sequence
  Description of Artificial Sequence: Synthetic oligonucleotide
  Sense strand starting at position 77 of SEQ ID NO: 1887792
cucuaugaugcccgucauu

SEQ ID NO: 2496953 - RNA, 19 nt, Artificial Sequence
  Description of Artificial Sequence: Synthetic oligonucleotide
  Antisense strand to SEQ ID NO: 2496952
aaugacgggcaucauagag

SEQ ID NO: 2496954 - RNA, 19 nt, Artificial Sequence
  Description of Artificial Sequence: Synthetic oligonucleotide
  Sense strand starting at position 96 of SEQ ID NO: 1887792
agguuaggcccaugcuaau

SEQ ID NO: 2496955 - RNA, 19 nt, Artificial Sequence
  Description of Artificial Sequence: Synthetic oligonucleotide
  Antisense strand to SEQ ID NO: 2496954
auuagcaugggccuaaccu

SEQ ID NO: 2496956 - RNA, 19 nt, Artificial Sequence
  Description of Artificial Sequence: Synthetic oligonucleotide
  Sense strand starting at position 832 of SEQ ID NO: 1887792
ggccgcuaagaacguuaaa

SEQ ID NO: 2496957 - RNA, 19 nt, Artificial Sequence
  Description of Artificial Sequence: Synthetic oligonucleotide
  Antisense strand to SEQ ID NO: 2496956
uuuaacguucuuagcggcc

SEQ ID NO: 2496958 - RNA, 19 nt, Artificial Sequence
  Description of Artificial Sequence: Synthetic oligonucleotide
  Sense strand starting at position 899 of SEQ ID NO: 1887792
ggcccucuuggagaacuga

SEQ ID NO: 2496959 - RNA, 19 nt, Artificial Sequence
  Description of Artificial Sequence: Synthetic oligonucleotide
  Antisense strand to SEQ ID NO: 2496958
ucaguucuccaagagggcc

SEQ ID NO: 2496960 - RNA, 19 nt, Artificial Sequence
  Description of Artificial Sequence: Synthetic oligonucleotide
  Sense strand starting at position 938 of SEQ ID NO: 1887792
cucugauauuugggccauu

SEQ ID NO: 2496961 - RNA, 19 nt, Artificial Sequence
  Description of Artificial Sequence: Synthetic oligonucleotide
  Antisense strand to SEQ ID NO: 2496960
aauggcccaaauaucagag

SEQ ID NO: 2496962 - RNA, 19 nt, Artificial Sequence
  Description of Artificial Sequence: Synthetic oligonucleotide
  Sense strand starting at position 950 of SEQ ID NO: 1887792
ggccauuguuaaccuguaa

SEQ ID NO: 2496963 - RNA, 19 nt, Artificial Sequence
  Description of Artificial Sequence: Synthetic oligonucleotide
  Antisense strand to SEQ ID NO: 2496962
uuacagguuaacaauggcc

SEQ ID NO: 2496964 - RNA, 19 nt, Artificial Sequence
  Description of Artificial Sequence: Synthetic oligonucleotide
  Sense strand starting at position 987 of SEQ ID NO: 1887792
uuugcagaauucuugcaaa

SEQ ID NO: 2496965 - RNA, 19 nt, Artificial Sequence
  Description of Artificial Sequence: Synthetic oligonucleotide
  Antisense strand to SEQ ID NO: 2496964
uuugcaagaauucugcaaa

SEQ ID NO: 2496966 - RNA, 19 nt, Artificial Sequence
  Description of Artificial Sequence: Synthetic oligonucleotide
  Sense strand starting at position 1075 of SEQ ID NO: 1887792
gggcuugaggccuggaguu

SEQ ID NO: 2496967 - RNA, 19 nt, Artificial Sequence
  Description of Artificial Sequence: Synthetic oligonucleotide
  Antisense strand to SEQ ID NO: 2496966
aacuccaggccucaagccc

SEQ ID NO: 2496968 - RNA, 19 nt, Artificial Sequence
  Description of Artificial Sequence: Synthetic oligonucleotide
  Sense strand starting at position 1276 of SEQ ID NO: 1887792
acaagaauuuguugggcau

SEQ ID NO: 2496969 - RNA, 19 nt, Artificial Sequence
  Description of Artificial Sequence: Synthetic oligonucleotide
  Antisense strand to SEQ ID NO: 2496968
augcccaacaaauucuugu

SEQ ID NO: 2496970 - RNA, 19 nt, Artificial Sequence
  Description of Artificial Sequence: Synthetic oligonucleotide
  Sense strand starting at position 1501 of SEQ ID NO: 1887792
ugggaauaggguuggaagu

SEQ ID NO: 2496971 - RNA, 19 nt, Artificial Sequence
  Description of Artificial Sequence: Synthetic oligonucleotide
  Antisense strand to SEQ ID NO: 2496970
acuuccaacccuauuccca

SEQ ID NO: 2496972 - RNA, 19 nt, Artificial Sequence
  Description of Artificial Sequence: Synthetic oligonucleotide
  Sense strand starting at position 1538 of SEQ ID NO: 1887792
cggugacuucgcuuacagu

SEQ ID NO: 2496973 - RNA, 19 nt, Artificial Sequence
  Description of Artificial Sequence: Synthetic oligonucleotide
  Antisense strand to SEQ ID NO: 2496972
acuguaagcgaagucaccg

SEQ ID NO: 2496974 - RNA, 19 nt, Artificial Sequence
  Description of Artificial Sequence: Synthetic oligonucleotide
  Sense strand starting at position 1539 of SEQ ID NO: 1887792
ggugacuucgcuuacaguu

SEQ ID NO: 2496975 - RNA, 19 nt, Artificial Sequence
  Description of Artificial Sequence: Synthetic oligonucleotide
  Antisense strand to SEQ ID NO: 2496974
aacuguaagcgaagucacc

SEQ ID NO: 2496976 - RNA, 19 nt, Artificial Sequence
  Description of Artificial Sequence: Synthetic oligonucleotide
  Sense strand starting at position 1853 of SEQ ID NO: 1887792
gagcaagauuccguuucug

SEQ ID NO: 2496977 - RNA, 19 nt, Artificial Sequence
  Description of Artificial Sequence: Synthetic oligonucleotide
  Antisense strand to SEQ ID NO: 2496976
cagaaacggaaucuugcuc

SEQ ID NO: 2496978 - RNA, 19 nt, Artificial Sequence
  Description of Artificial Sequence: Synthetic oligonucleotide
  Sense strand starting at position 1990 of SEQ ID NO: 1887792
cgaagcgagcacgaauauu

SEQ ID NO: 2496979 - RNA, 19 nt, Artificial Sequence
  Description of Artificial Sequence: Synthetic oligonucleotide
  Antisense strand to SEQ ID NO: 2496978
aauauucgugcucgcuucg

SEQ ID NO: 2496980 - RNA, 19 nt, Artificial Sequence
  Description of Artificial Sequence: Synthetic oligonucleotide
  Sense strand starting at position 2039 of SEQ ID NO: 1887792
ggaacaaaugucuguacac

SEQ ID NO: 2496981 - RNA, 19 nt, Artificial Sequence
  Description of Artificial Sequence: Synthetic oligonucleotide
  Antisense strand to SEQ ID NO: 2496980
guguacagacauuuguucc

SEQ ID NO: 2496982 - RNA, 19 nt, Artificial Sequence
  Description of Artificial Sequence: Synthetic oligonucleotide
  Sense strand starting at position 2103 of SEQ ID NO: 1887792
auauuagcccaauguguaa

SEQ ID NO: 2496983 - RNA, 19 nt, Artificial Sequence
  Description of Artificial Sequence: Synthetic oligonucleotide
  Antisense strand to SEQ ID NO: 2496982
uuacacauugggcuaauau

SEQ ID NO: 2496984 - RNA, 19 nt, Artificial Sequence
  Description of Artificial Sequence: Synthetic oligonucleotide
  Sense strand starting at position 2116 of SEQ ID NO: 1887792
guguaaugcaacuaacgua

SEQ ID NO: 2496985 - RNA, 19 nt, Artificial Sequence
  Description of Artificial Sequence: Synthetic oligonucleotide
  Antisense strand to SEQ ID NO: 2496984
uacguuaguugcauuacac

SEQ ID NO: 2496986 - RNA, 19 nt, Artificial Sequence
  Description of Artificial Sequence: Synthetic oligonucleotide
  Sense strand starting at position 2124 of SEQ ID NO: 1887792
caacuaacguaguuauuga

SEQ ID NO: 2496987 - RNA, 19 nt, Artificial Sequence
  Description of Artificial Sequence: Synthetic oligonucleotide
  Antisense strand to SEQ ID NO: 2496986
ucaauaacuacguuaguug

SEQ ID NO: 2496988 - RNA, 19 nt, Artificial Sequence
  Description of Artificial Sequence: Synthetic oligonucleotide
  Sense strand starting at position 2131 of SEQ ID NO: 1887792
cguaguuauugacuggagu

SEQ ID NO: 2496989 - RNA, 19 nt, Artificial Sequence
  Description of Artificial Sequence: Synthetic oligonucleotide
  Antisense strand to SEQ ID NO: 2496988
acuccagucaauaacuacg

SEQ ID NO: 2496990 - RNA, 19 nt, Artificial Sequence
  Description of Artificial Sequence: Synthetic oligonucleotide
  Sense strand starting at position 2132 of SEQ ID NO: 1887792
guaguuauugacuggaguu

SEQ ID NO: 2496991 - RNA, 19 nt, Artificial Sequence
  Description of Artificial Sequence: Synthetic oligonucleotide
  Antisense strand to SEQ ID NO: 2496990
aacuccagucaauaacuac

SEQ ID NO: 2496992 - RNA, 19 nt, Artificial Sequence
  Description of Artificial Sequence: Synthetic oligonucleotide
  Sense strand starting at position 2133 of SEQ ID NO: 1887792
uaguuauugacuggaguug

SEQ ID NO: 2496993 - RNA, 19 nt, Artificial Sequence
  Description of Artificial Sequence: Synthetic oligonucleotide
  Antisense strand to SEQ ID NO: 2496992
caacuccagucaauaacua

SEQ ID NO: 2496994 - RNA, 19 nt, Artificial Sequence
  Description of Artificial Sequence: Synthetic oligonucleotide
  Sense strand starting at position 2134 of SEQ ID NO: 1887792
aguuauugacuggaguuga

SEQ ID NO: 2496995 - RNA, 19 nt, Artificial Sequence
  Description of Artificial Sequence: Synthetic oligonucleotide
  Antisense strand to SEQ ID NO: 2496994
ucaacuccagucaauaacu

SEQ ID NO: 2496996 - RNA, 19 nt, Artificial Sequence
  Description of Artificial Sequence: Synthetic oligonucleotide
  Sense strand starting at position 2149 of SEQ ID NO: 1887792
uugagaaagugcucguugu

SEQ ID NO: 2496997 - RNA, 19 nt, Artificial Sequence
  Description of Artificial Sequence: Synthetic oligonucleotide
  Antisense strand to SEQ ID NO: 2496996
acaacgagcacuuucucaa

SEQ ID NO: 2496998 - RNA, 19 nt, Artificial Sequence
  Description of Artificial Sequence: Synthetic oligonucleotide
  Sense strand starting at position 2150 of SEQ ID NO: 1887792
ugagaaagugcucguuguu

SEQ ID NO: 2496999 - RNA, 19 nt, Artificial Sequence
  Description of Artificial Sequence: Synthetic oligonucleotide
  Antisense strand to SEQ ID NO: 2496998
aacaacgagcacuuucuca

SEQ ID NO: 2497000 - RNA, 19 nt, Artificial Sequence
  Description of Artificial Sequence: Synthetic oligonucleotide
  Sense strand starting at position 2304 of SEQ ID NO: 1887792
cugguuguuaccgaggaag

SEQ ID NO: 2497001 - RNA, 19 nt, Artificial Sequence
  Description of Artificial Sequence: Synthetic oligonucleotide
  Antisense strand to SEQ ID NO: 2497000
cuuccucgguaacaaccag

SEQ ID NO: 2497002 - RNA, 19 nt, Artificial Sequence
  Description of Artificial Sequence: Synthetic oligonucleotide
  Sense strand starting at position 2306 of SEQ ID NO: 1887792
gguuguuaccgaggaagau

SEQ ID NO: 2497003 - RNA, 19 nt, Artificial Sequence
  Description of Artificial Sequence: Synthetic oligonucleotide
  Antisense strand to SEQ ID NO: 2497002
aucuuccucgguaacaacc

SEQ ID NO: 2497004 - RNA, 19 nt, Artificial Sequence
  Description of Artificial Sequence: Synthetic oligonucleotide
  Sense strand starting at position 2307 of SEQ ID NO: 1887792
guuguuaccgaggaagaug

SEQ ID NO: 2497005 - RNA, 19 nt, Artificial Sequence
  Description of Artificial Sequence: Synthetic oligonucleotide
  Antisense strand to SEQ ID NO: 2497004
caucuuccucgguaacaac

SEQ ID NO: 2497006 - RNA, 19 nt, Artificial Sequence
  Description of Artificial Sequence: Synthetic oligonucleotide
  Sense strand starting at position 3115 of SEQ ID NO: 1887792
uacggugaagccugagaau

SEQ ID NO: 2497007 - RNA, 19 nt, Artificial Sequence
  Description of Artificial Sequence: Synthetic oligonucleotide
  Antisense strand to SEQ ID NO: 2497006
auucucaggcuucaccgua

SEQ ID NO: 2497008 - RNA, 19 nt, Artificial Sequence
  Description of Artificial Sequence: Synthetic oligonucleotide
  Sense strand starting at position 3118 of SEQ ID NO: 1887792
ggugaagccugagaauuua

SEQ ID NO: 2497009 - RNA, 19 nt, Artificial Sequence
  Description of Artificial Sequence: Synthetic oligonucleotide
  Antisense strand to SEQ ID NO: 2497008
uaaauucucaggcuucacc

SEQ ID NO: 2497010 - RNA, 19 nt, Artificial Sequence
  Description of Artificial Sequence: Synthetic oligonucleotide
  Sense strand starting at position 3159 of SEQ ID NO: 1887792
ggugaaaugaaguguggga

SEQ ID NO: 2497011 - RNA, 19 nt, Artificial Sequence
  Description of Artificial Sequence: Synthetic oligonucleotide
  Antisense strand to SEQ ID NO: 2497010
ucccacacuucauuucacc

SEQ ID NO: 2497012 - RNA, 19 nt, Artificial Sequence
  Description of Artificial Sequence: Synthetic oligonucleotide
  Sense strand starting at position 3272 of SEQ ID NO: 1887792
ggguuaggguuugaggaga

SEQ ID NO: 2497013 - RNA, 19 nt, Artificial Sequence
  Description of Artificial Sequence: Synthetic oligonucleotide
  Antisense strand to SEQ ID NO: 2497012
ucuccucaaacccuaaccc

SEQ ID NO: 2497014 - RNA, 19 nt, Artificial Sequence
  Description of Artificial Sequence: Synthetic oligonucleotide
  Sense strand starting at position 3391 of SEQ ID NO: 1887792
cccucuguucccugugaca

SEQ ID NO: 2497015 - RNA, 19 nt, Artificial Sequence
  Description of Artificial Sequence: Synthetic oligonucleotide
  Antisense strand to SEQ ID NO: 2497014
ugucacagggaacagaggg

SEQ ID NO: 2497016 - RNA, 19 nt, Artificial Sequence
  Description of Artificial Sequence: Synthetic oligonucleotide
  Sense strand starting at position 3393 of SEQ ID NO: 1887792
cucuguucccugugacacu

SEQ ID NO: 2497017 - RNA, 19 nt, Artificial Sequence
  Description of Artificial Sequence: Synthetic oligonucleotide
  Antisense strand to SEQ ID NO: 2497016
agugucacagggaacagag

SEQ ID NO: 2497018 - RNA, 19 nt, Artificial Sequence
  Description of Artificial Sequence: Synthetic oligonucleotide
  Sense strand starting at position 3728 of SEQ ID NO: 1887792
acagguguucccugucagu

SEQ ID NO: 2497019 - RNA, 19 nt, Artificial Sequence
  Description of Artificial Sequence: Synthetic oligonucleotide
  Antisense strand to SEQ ID NO: 2497018
acugacagggaacaccugu

SEQ ID NO: 2497020 - RNA, 19 nt, Artificial Sequence
  Description of Artificial Sequence: Synthetic oligonucleotide
  Sense strand starting at position 3838 of SEQ ID NO: 1887792
acagguguucccugucacu

SEQ ID NO: 2497021 - RNA, 19 nt, Artificial Sequence
  Description of Artificial Sequence: Synthetic oligonucleotide
  Antisense strand to SEQ ID NO: 2497020
agugacagggaacaccugu

SEQ ID NO: 2497022 - RNA, 19 nt, Artificial Sequence
  Description of Artificial Sequence: Synthetic oligonucleotide
  Sense strand starting at position 3940 of SEQ ID NO: 1887792
gggcucuuccuucgggaga

SEQ ID NO: 2497023 - RNA, 19 nt, Artificial Sequence
  Description of Artificial Sequence: Synthetic oligonucleotide
  Antisense strand to SEQ ID NO: 2497022
ucucccgaaggaagagccc

SEQ ID NO: 2497024 - RNA, 19 nt, Artificial Sequence
  Description of Artificial Sequence: Synthetic oligonucleotide
  Sense strand starting at position 392 of SEQ ID NO: 1887793
gccugaccuuguuuggaua

SEQ ID NO: 2497025 - RNA, 19 nt, Artificial Sequence
  Description of Artificial Sequence: Synthetic oligonucleotide
  Antisense strand to SEQ ID NO: 2497024
uauccaaacaaggucaggc

SEQ ID NO: 2497026 - RNA, 19 nt, Artificial Sequence
  Description of Artificial Sequence: Synthetic oligonucleotide
  Sense strand starting at position 393 of SEQ ID NO: 1887793
ccugaccuuguuuggauaa

SEQ ID NO: 2497027 - RNA, 19 nt, Artificial Sequence
  Description of Artificial Sequence: Synthetic oligonucleotide
  Antisense strand to SEQ ID NO: 2497026
uuauccaaacaaggucagg

SEQ ID NO: 2497028 - RNA, 19 nt, Artificial Sequence
  Description of Artificial Sequence: Synthetic oligonucleotide
  Sense strand starting at position 395 of SEQ ID NO: 1887793
ugaccuuguuuggauaacu

SEQ ID NO: 2497029 - RNA, 19 nt, Artificial Sequence
  Description of Artificial Sequence: Synthetic oligonucleotide
  Antisense strand to SEQ ID NO: 2497028
aguuauccaaacaagguca

SEQ ID NO: 2497030 - RNA, 19 nt, Artificial Sequence
  Description of Artificial Sequence: Synthetic oligonucleotide
  Sense strand starting at position 400 of SEQ ID NO: 1887793
uuguuuggauaacuugaga

SEQ ID NO: 2497031 - RNA, 19 nt, Artificial Sequence
  Description of Artificial Sequence: Synthetic oligonucleotide
  Antisense strand to SEQ ID NO: 2497030
ucucaaguuauccaaacaa

SEQ ID NO: 2497032 - RNA, 19 nt, Artificial Sequence
  Description of Artificial Sequence: Synthetic oligonucleotide
  Sense strand starting at position 405 of SEQ ID NO: 1887793
uggauaacuugagaugugu

SEQ ID NO: 2497033 - RNA, 19 nt, Artificial Sequence
  Description of Artificial Sequence: Synthetic oligonucleotide
  Antisense strand to SEQ ID NO: 2497032
acacaucucaaguuaucca

SEQ ID NO: 2497034 - RNA, 19 nt, Artificial Sequence
  Description of Artificial Sequence: Synthetic oligonucleotide
  Sense strand starting at position 505 of SEQ ID NO: 1887793
guuauuugcuuaucuuucu

SEQ ID NO: 2497035 - RNA, 19 nt, Artificial Sequence
  Description of Artificial Sequence: Synthetic oligonucleotide
  Antisense strand to SEQ ID NO: 2497034
agaaagauaagcaaauaac

SEQ ID NO: 2497036 - RNA, 19 nt, Artificial Sequence
  Description of Artificial Sequence: Synthetic oligonucleotide
  Sense strand starting at position 511 of SEQ ID NO: 1887793
ugcuuaucuuucucuugga

SEQ ID NO: 2497037 - RNA, 19 nt, Artificial Sequence
  Description of Artificial Sequence: Synthetic oligonucleotide
  Antisense strand to SEQ ID NO: 2497036
uccaagagaaagauaagca

SEQ ID NO: 2497038 - RNA, 19 nt, Artificial Sequence
  Description of Artificial Sequence: Synthetic oligonucleotide
  Sense strand starting at position 512 of SEQ ID NO: 1887793
gcuuaucuuucucuuggaa

SEQ ID NO: 2497039 - RNA, 19 nt, Artificial Sequence
  Description of Artificial Sequence: Synthetic oligonucleotide
  Antisense strand to SEQ ID NO: 2497038
uuccaagagaaagauaagc

SEQ ID NO: 2497040 - RNA, 19 nt, Artificial Sequence
  Description of Artificial Sequence: Synthetic oligonucleotide
  Sense strand starting at position 524 of SEQ ID NO: 1887793
cuuggaaagcuguguucuu

SEQ ID NO: 2497041 - RNA, 19 nt, Artificial Sequence
  Description of Artificial Sequence: Synthetic oligonucleotide
  Antisense strand to SEQ ID NO: 2497040
aagaacacagcuuuccaag

SEQ ID NO: 2497042 - RNA, 19 nt, Artificial Sequence
  Description of Artificial Sequence: Synthetic oligonucleotide
  Sense strand starting at position 652 of SEQ ID NO: 1887793
ucuaucaaacguggaaauu

SEQ ID NO: 2497043 - RNA, 19 nt, Artificial Sequence
  Description of Artificial Sequence: Synthetic oligonucleotide
  Antisense strand to SEQ ID NO: 2497042
aauuuccacguuugauaga

SEQ ID NO: 2497044 - RNA, 19 nt, Artificial Sequence
  Description of Artificial Sequence: Synthetic oligonucleotide
  Sense strand starting at position 975 of SEQ ID NO: 1887793
gcaccaacguccucaguua

SEQ ID NO: 2497045 - RNA, 19 nt, Artificial Sequence
  Description of Artificial Sequence: Synthetic oligonucleotide
  Antisense strand to SEQ ID NO: 2497044
uaacugaggacguuggugc

SEQ ID NO: 2497046 - RNA, 19 nt, Artificial Sequence
  Description of Artificial Sequence: Synthetic oligonucleotide
  Sense strand starting at position 1749 of SEQ ID NO: 1887793
uagagacugccagauuguu

SEQ ID NO: 2497047 - RNA, 19 nt, Artificial Sequence
  Description of Artificial Sequence: Synthetic oligonucleotide
  Antisense strand to SEQ ID NO: 2497046
aacaaucuggcagucucua

SEQ ID NO: 2497048 - RNA, 19 nt, Artificial Sequence
  Description of Artificial Sequence: Synthetic oligonucleotide
  Sense strand starting at position 1804 of SEQ ID NO: 1887793
acgggaagacuaugacguu

SEQ ID NO: 2497049 - RNA, 19 nt, Artificial Sequence
  Description of Artificial Sequence: Synthetic oligonucleotide
  Antisense strand to SEQ ID NO: 2497048
aacgucauagucuucccgu

SEQ ID NO: 2497050 - RNA, 19 nt, Artificial Sequence
  Description of Artificial Sequence: Synthetic oligonucleotide
  Sense strand starting at position 1805 of SEQ ID NO: 1887793
cgggaagacuaugacguua

SEQ ID NO: 2497051 - RNA, 19 nt, Artificial Sequence
  Description of Artificial Sequence: Synthetic oligonucleotide
  Antisense strand to SEQ ID NO: 2497050
uaacgucauagucuucccg

SEQ ID NO: 2497052 - RNA, 19 nt, Artificial Sequence
  Description of Artificial Sequence: Synthetic oligonucleotide
  Sense strand starting at position 1843 of SEQ ID NO: 1887793
gcaggauccgggcaagaga

SEQ ID NO: 2497053 - RNA, 19 nt, Artificial Sequence
  Description of Artificial Sequence: Synthetic oligonucleotide
  Antisense strand to SEQ ID NO: 2497052
ucucuugcccggauccugc

SEQ ID NO: 2497054 - RNA, 19 nt, Artificial Sequence
  Description of Artificial Sequence: Synthetic oligonucleotide
  Sense strand starting at position 1872 of SEQ ID NO: 1887793
ggugacgagcuguagacua

SEQ ID NO: 2497055 - RNA, 19 nt, Artificial Sequence
  Description of Artificial Sequence: Synthetic oligonucleotide
  Antisense strand to SEQ ID NO: 2497054
uagucuacagcucgucacc

SEQ ID NO: 2497056 - RNA, 19 nt, Artificial Sequence
  Description of Artificial Sequence: Synthetic oligonucleotide
  Sense strand starting at position 1998 of SEQ ID NO: 1887793
gcacgacucaaggguuacu

SEQ ID NO: 2497057 - RNA, 19 nt, Artificial Sequence
  Description of Artificial Sequence: Synthetic oligonucleotide
  Antisense strand to SEQ ID NO: 2497056
aguaacccuugagucgugc

SEQ ID NO: 2497058 - RNA, 19 nt, Artificial Sequence
  Description of Artificial Sequence: Synthetic oligonucleotide
  Sense strand starting at position 2062 of SEQ ID NO: 1887793
gauaacuuauggucgguuu

SEQ ID NO: 2497059 - RNA, 19 nt, Artificial Sequence
  Description of Artificial Sequence: Synthetic oligonucleotide
  Antisense strand to SEQ ID NO: 2497058
aaaccgaccauaaguuauc

SEQ ID NO: 2497060 - RNA, 19 nt, Artificial Sequence
  Description of Artificial Sequence: Synthetic oligonucleotide
  Sense strand starting at position 2088 of SEQ ID NO: 1887793
agcauaauuuccuacagug

SEQ ID NO: 2497061 - RNA, 19 nt, Artificial Sequence
  Description of Artificial Sequence: Synthetic oligonucleotide
  Antisense strand to SEQ ID NO: 2497060
cacuguaggaaauuaugcu

SEQ ID NO: 2497062 - RNA, 19 nt, Artificial Sequence
  Description of Artificial Sequence: Synthetic oligonucleotide
  Sense strand starting at position 2105 of SEQ ID NO: 1887793
ugguauguugcagaacaac

SEQ ID NO: 2497063 - RNA, 19 nt, Artificial Sequence
  Description of Artificial Sequence: Synthetic oligonucleotide
  Antisense strand to SEQ ID NO: 2497062
guuguucugcaacauacca

SEQ ID NO: 2497064 - RNA, 19 nt, Artificial Sequence
  Description of Artificial Sequence: Synthetic oligonucleotide
  Sense strand starting at position 2116 of SEQ ID NO: 1887793
agaacaacuuucgugcuua

SEQ ID NO: 2497065 - RNA, 19 nt, Artificial Sequence
  Description of Artificial Sequence: Synthetic oligonucleotide
  Antisense strand to SEQ ID NO: 2497064
uaagcacgaaaguuguucu

SEQ ID NO: 2497066 - RNA, 19 nt, Artificial Sequence
  Description of Artificial Sequence: Synthetic oligonucleotide
  Sense strand starting at position 2129 of SEQ ID NO: 1887793
ugcuuacgcuuacuuugau

SEQ ID NO: 2497067 - RNA, 19 nt, Artificial Sequence
  Description of Artificial Sequence: Synthetic oligonucleotide
  Antisense strand to SEQ ID NO: 2497066
aucaaaguaagcguaagca

SEQ ID NO: 2497068 - RNA, 19 nt, Artificial Sequence
  Description of Artificial Sequence: Synthetic oligonucleotide
  Sense strand starting at position 2138 of SEQ ID NO: 1887793
uuacuuugaugucuucgau

SEQ ID NO: 2497069 - RNA, 19 nt, Artificial Sequence
  Description of Artificial Sequence: Synthetic oligonucleotide
  Antisense strand to SEQ ID NO: 2497068
aucgaagacaucaaaguaa

SEQ ID NO: 2497070 - RNA, 19 nt, Artificial Sequence
  Description of Artificial Sequence: Synthetic oligonucleotide
  Sense strand starting at position 2141 of SEQ ID NO: 1887793
cuuugaugucuucgaucac

SEQ ID NO: 2497071 - RNA, 19 nt, Artificial Sequence
  Description of Artificial Sequence: Synthetic oligonucleotide
  Antisense strand to SEQ ID NO: 2497070
gugaucgaagacaucaaag

SEQ ID NO: 2497072 - RNA, 19 nt, Artificial Sequence
  Description of Artificial Sequence: Synthetic oligonucleotide
  Sense strand starting at position 2145 of SEQ ID NO: 1887793
gaugucuucgaucacguaa

SEQ ID NO: 2497073 - RNA, 19 nt, Artificial Sequence
  Description of Artificial Sequence: Synthetic oligonucleotide
  Antisense strand to SEQ ID NO: 2497072
uuacgugaucgaagacauc

SEQ ID NO: 2497074 - RNA, 19 nt, Artificial Sequence
  Description of Artificial Sequence: Synthetic oligonucleotide
  Sense strand starting at position 2191 of SEQ ID NO: 1887793
gccuuauacuggccucaua

SEQ ID NO: 2497075 - RNA, 19 nt, Artificial Sequence
  Description of Artificial Sequence: Synthetic oligonucleotide
  Antisense strand to SEQ ID NO: 2497074
uaugaggccaguauaaggc

SEQ ID NO: 2497076 - RNA, 19 nt, Artificial Sequence
  Description of Artificial Sequence: Synthetic oligonucleotide
  Sense strand starting at position 2215 of SEQ ID NO: 1887793
gguggauugugggugccaa

SEQ ID NO: 2497077 - RNA, 19 nt, Artificial Sequence
  Description of Artificial Sequence: Synthetic oligonucleotide
  Antisense strand to SEQ ID NO: 2497076
uuggcacccacaauccacc

SEQ ID NO: 2497078 - RNA, 19 nt, Artificial Sequence
  Description of Artificial Sequence: Synthetic oligonucleotide
  Sense strand starting at position 2216 of SEQ ID NO: 1887793
guggauugugggugccaau

SEQ ID NO: 2497079 - RNA, 19 nt, Artificial Sequence
  Description of Artificial Sequence: Synthetic oligonucleotide
  Antisense strand to SEQ ID NO: 2497078
auuggcacccacaauccac

SEQ ID NO: 2497080 - RNA, 19 nt, Artificial Sequence
  Description of Artificial Sequence: Synthetic oligonucleotide
  Sense strand starting at position 2663 of SEQ ID NO: 1887793
acgcgcuguucuucaagau

SEQ ID NO: 2497081 - RNA, 19 nt, Artificial Sequence
  Description of Artificial Sequence: Synthetic oligonucleotide
  Antisense strand to SEQ ID NO: 2497080
aucuugaagaacagcgcgu

SEQ ID NO: 2497082 - RNA, 19 nt, Artificial Sequence
  Description of Artificial Sequence: Synthetic oligonucleotide
  Sense strand starting at position 2664 of SEQ ID NO: 1887793
cgcgcuguucuucaagaug

SEQ ID NO: 2497083 - RNA, 19 nt, Artificial Sequence
  Description of Artificial Sequence: Synthetic oligonucleotide
  Antisense strand to SEQ ID NO: 2497082
caucuugaagaacagcgcg

SEQ ID NO: 2497084 - RNA, 19 nt, Artificial Sequence
  Description of Artificial Sequence: Synthetic oligonucleotide
  Sense strand starting at position 2723 of SEQ ID NO: 1887793
gucucuucgaguucuucgu

SEQ ID NO: 2497085 - RNA, 19 nt, Artificial Sequence
  Description of Artificial Sequence: Synthetic oligonucleotide
  Antisense strand to SEQ ID NO: 2497084
acgaagaacucgaagagac

SEQ ID NO: 2497086 - RNA, 19 nt, Artificial Sequence
  Description of Artificial Sequence: Synthetic oligonucleotide
  Sense strand starting at position 2731 of SEQ ID NO: 1887793
gaguucuucgugcugcuca

SEQ ID NO: 2497087 - RNA, 19 nt, Artificial Sequence
  Description of Artificial Sequence: Synthetic oligonucleotide
  Antisense strand to SEQ ID NO: 2497086
ugagcagcacgaagaacuc

SEQ ID NO: 2497088 - RNA, 19 nt, Artificial Sequence
  Description of Artificial Sequence: Synthetic oligonucleotide
  Sense strand starting at position 2911 of SEQ ID NO: 1887793
gaccucugacccugggauu

SEQ ID NO: 2497089 - RNA, 19 nt, Artificial Sequence
  Description of Artificial Sequence: Synthetic oligonucleotide
  Antisense strand to SEQ ID NO: 2497088
aaucccagggucagagguc

SEQ ID NO: 2497090 - RNA, 19 nt, Artificial Sequence
  Description of Artificial Sequence: Synthetic oligonucleotide
  Sense strand starting at position 3010 of SEQ ID NO: 1887793
gcuguucucuacucuggaa

SEQ ID NO: 2497091 - RNA, 19 nt, Artificial Sequence
  Description of Artificial Sequence: Synthetic oligonucleotide
  Antisense strand to SEQ ID NO: 2497090
uuccagaguagagaacagc

SEQ ID NO: 2497092 - RNA, 19 nt, Artificial Sequence
  Description of Artificial Sequence: Synthetic oligonucleotide
  Sense strand starting at position 3012 of SEQ ID NO: 1887793
uguucucuacucuggaaac

SEQ ID NO: 2497093 - RNA, 19 nt, Artificial Sequence
  Description of Artificial Sequence: Synthetic oligonucleotide
  Antisense strand to SEQ ID NO: 2497092
guuuccagaguagagaaca

SEQ ID NO: 2497094 - RNA, 19 nt, Artificial Sequence
  Description of Artificial Sequence: Synthetic oligonucleotide
  Sense strand starting at position 3333 of SEQ ID NO: 1887793
gggaaugugacuuagcuga

SEQ ID NO: 2497095 - RNA, 19 nt, Artificial Sequence
  Description of Artificial Sequence: Synthetic oligonucleotide
  Antisense strand to SEQ ID NO: 2497094
ucagcuaagucacauuccc

SEQ ID NO: 2497096 - RNA, 19 nt, Artificial Sequence
  Description of Artificial Sequence: Synthetic oligonucleotide
  Sense strand starting at position 3593 of SEQ ID NO: 1887793
gaaggagucuugcuugggu

SEQ ID NO: 2497097 - RNA, 19 nt, Artificial Sequence
  Description of Artificial Sequence: Synthetic oligonucleotide
  Antisense strand to SEQ ID NO: 2497096
acccaagcaagacuccuuc

SEQ ID NO: 2497098 - RNA, 19 nt, Artificial Sequence
  Description of Artificial Sequence: Synthetic oligonucleotide
  Sense strand starting at position 3595 of SEQ ID NO: 1887793
aggagucuugcuuggguga

SEQ ID NO: 2497099 - RNA, 19 nt, Artificial Sequence
  Description of Artificial Sequence: Synthetic oligonucleotide
  Antisense strand to SEQ ID NO: 2497098
ucacccaagcaagacuccu

SEQ ID NO: 2497100 - RNA, 19 nt, Artificial Sequence
  Description of Artificial Sequence: Synthetic oligonucleotide
  Sense strand starting at position 3598 of SEQ ID NO: 1887793
agucuugcuugggugacaa

SEQ ID NO: 2497101 - RNA, 19 nt, Artificial Sequence
  Description of Artificial Sequence: Synthetic oligonucleotide
  Antisense strand to SEQ ID NO: 2497100
uugucacccaagcaagacu

SEQ ID NO: 2497102 - RNA, 19 nt, Artificial Sequence
  Description of Artificial Sequence: Synthetic oligonucleotide
  Sense strand starting at position 3702 of SEQ ID NO: 1887793
uucguucugcaucagaaca

SEQ ID NO: 2497103 - RNA, 19 nt, Artificial Sequence
  Description of Artificial Sequence: Synthetic oligonucleotide
  Antisense strand to SEQ ID NO: 2497102
uguucugaugcagaacgaa

SEQ ID NO: 2497104 - RNA, 19 nt, Artificial Sequence
  Description of Artificial Sequence: Synthetic oligonucleotide
  Sense strand starting at position 17 of SEQ ID NO: 1887794
guguguuaugucuugucuu

SEQ ID NO: 2497105 - RNA, 19 nt, Artificial Sequence
  Description of Artificial Sequence: Synthetic oligonucleotide
  Antisense strand to SEQ ID NO: 2497104
aagacaagacauaacacac

SEQ ID NO: 2497106 - RNA, 19 nt, Artificial Sequence
  Description of Artificial Sequence: Synthetic oligonucleotide
  Sense strand starting at position 20 of SEQ ID NO: 1887794
uguuaugucuugucuugac

SEQ ID NO: 2497107 - RNA, 19 nt, Artificial Sequence
  Description of Artificial Sequence: Synthetic oligonucleotide
  Antisense strand to SEQ ID NO: 2497106
gucaagacaagacauaaca

SEQ ID NO: 2497108 - RNA, 19 nt, Artificial Sequence
  Description of Artificial Sequence: Synthetic oligonucleotide
  Sense strand starting at position 53 of SEQ ID NO: 1887794
acgugucugugcccaaaua

SEQ ID NO: 2497109 - RNA, 19 nt, Artificial Sequence
  Description of Artificial Sequence: Synthetic oligonucleotide
  Antisense strand to SEQ ID NO: 2497108
uauuugggcacagacacgu

SEQ ID NO: 2497110 - RNA, 19 nt, Artificial Sequence
  Description of Artificial Sequence: Synthetic oligonucleotide
  Sense strand starting at position 54 of SEQ ID NO: 1887794
cgugucugugcccaaauau

SEQ ID NO: 2497111 - RNA, 19 nt, Artificial Sequence
  Description of Artificial Sequence: Synthetic oligonucleotide
  Antisense strand to SEQ ID NO: 2497110
auauuugggcacagacacg

SEQ ID NO: 2497112 - RNA, 19 nt, Artificial Sequence
  Description of Artificial Sequence: Synthetic oligonucleotide
  Sense strand starting at position 77 of SEQ ID NO: 1887794
cucuaugaugcccgucauu

SEQ ID NO: 2497113 - RNA, 19 nt, Artificial Sequence
  Description of Artificial Sequence: Synthetic oligonucleotide
  Antisense strand to SEQ ID NO: 2497112
aaugacgggcaucauagag

SEQ ID NO: 2497114 - RNA, 19 nt, Artificial Sequence
  Description of Artificial Sequence: Synthetic oligonucleotide
  Sense strand starting at position 96 of SEQ ID NO: 1887794
agguuaggcccaugcuaau

SEQ ID NO: 2497115 - RNA, 19 nt, Artificial Sequence
  Description of Artificial Sequence: Synthetic oligonucleotide
  Antisense strand to SEQ ID NO: 2497114
auuagcaugggccuaaccu

SEQ ID NO: 2497116 - RNA, 19 nt, Artificial Sequence
  Description of Artificial Sequence: Synthetic oligonucleotide
  Sense strand starting at position 832 of SEQ ID NO: 1887794
ggccgcuaagaacguuaaa

SEQ ID NO: 2497117 - RNA, 19 nt, Artificial Sequence
  Description of Artificial Sequence: Synthetic oligonucleotide
  Antisense strand to SEQ ID NO: 2497116
uuuaacguucuuagcggcc

SEQ ID NO: 2497118 - RNA, 19 nt, Artificial Sequence
  Description of Artificial Sequence: Synthetic oligonucleotide
  Sense strand starting at position 899 of SEQ ID NO: 1887794
ggcccucuuggagaacuga

SEQ ID NO: 2497119 - RNA, 19 nt, Artificial Sequence
  Description of Artificial Sequence: Synthetic oligonucleotide
  Antisense strand to SEQ ID NO: 2497118
ucaguucuccaagagggcc

SEQ ID NO: 2497120 - RNA, 19 nt, Artificial Sequence
  Description of Artificial Sequence: Synthetic oligonucleotide
  Sense strand starting at position 938 of SEQ ID NO: 1887794
cucugauauuugggccauu

SEQ ID NO: 2497121 - RNA, 19 nt, Artificial Sequence
  Description of Artificial Sequence: Synthetic oligonucleotide
  Antisense strand to SEQ ID NO: 2497120
aauggcccaaauaucagag

SEQ ID NO: 2497122 - RNA, 19 nt, Artificial Sequence
  Description of Artificial Sequence: Synthetic oligonucleotide
  Sense strand starting at position 950 of SEQ ID NO: 1887794
ggccauuguuaaccuguaa

SEQ ID NO: 2497123 - RNA, 19 nt, Artificial Sequence
  Description of Artificial Sequence: Synthetic oligonucleotide
  Antisense strand to SEQ ID NO: 2497122
uuacagguuaacaauggcc

SEQ ID NO: 2497124 - RNA, 19 nt, Artificial Sequence
  Description of Artificial Sequence: Synthetic oligonucleotide
  Sense strand starting at position 987 of SEQ ID NO: 1887794
uuugcagaauucuugcaaa

SEQ ID NO: 2497125 - RNA, 19 nt, Artificial Sequence
  Description of Artificial Sequence: Synthetic oligonucleotide
  Antisense strand to SEQ ID NO: 2497124
uuugcaagaauucugcaaa

SEQ ID NO: 2497126 - RNA, 19 nt, Artificial Sequence
  Description of Artificial Sequence: Synthetic oligonucleotide
  Sense strand starting at position 1075 of SEQ ID NO: 1887794
gggcuugaggccuggaguu

SEQ ID NO: 2497127 - RNA, 19 nt, Artificial Sequence
  Description of Artificial Sequence: Synthetic oligonucleotide
  Antisense strand to SEQ ID NO: 2497126
aacuccaggccucaagccc

SEQ ID NO: 2497128 - RNA, 19 nt, Artificial Sequence
  Description of Artificial Sequence: Synthetic oligonucleotide
  Sense strand starting at position 1276 of SEQ ID NO: 1887794
acaagaauuuguugggcau

SEQ ID NO: 2497129 - RNA, 19 nt, Artificial Sequence
  Description of Artificial Sequence: Synthetic oligonucleotide
  Antisense strand to SEQ ID NO: 2497128
augcccaacaaauucuugu

SEQ ID NO: 2497130 - RNA, 19 nt, Artificial Sequence
  Description of Artificial Sequence: Synthetic oligonucleotide
  Sense strand starting at position 1501 of SEQ ID NO: 1887794
ugggaauaggguuggaagu

SEQ ID NO: 2497131 - RNA, 19 nt, Artificial Sequence
  Description of Artificial Sequence: Synthetic oligonucleotide
  Antisense strand to SEQ ID NO: 2497130
acuuccaacccuauuccca

SEQ ID NO: 2497132 - RNA, 19 nt, Artificial Sequence
  Description of Artificial Sequence: Synthetic oligonucleotide
  Sense strand starting at position 1538 of SEQ ID NO: 1887794
cggugacuucgcuuacagu

SEQ ID NO: 2497133 - RNA, 19 nt, Artificial Sequence
  Description of Artificial Sequence: Synthetic oligonucleotide
  Antisense strand to SEQ ID NO: 2497132
acuguaagcgaagucaccg

SEQ ID NO: 2497134 - RNA, 19 nt, Artificial Sequence
  Description of Artificial Sequence: Synthetic oligonucleotide
  Sense strand starting at position 1539 of SEQ ID NO: 1887794
ggugacuucgcuuacaguu

SEQ ID NO: 2497135 - RNA, 19 nt, Artificial Sequence
  Description of Artificial Sequence: Synthetic oligonucleotide
  Antisense strand to SEQ ID NO: 2497134
aacuguaagcgaagucacc

SEQ ID NO: 2497136 - RNA, 19 nt, Artificial Sequence
  Description of Artificial Sequence: Synthetic oligonucleotide
  Sense strand starting at position 1853 of SEQ ID NO: 1887794
gagcaagauuccguuucug

SEQ ID NO: 2497137 - RNA, 19 nt, Artificial Sequence
  Description of Artificial Sequence: Synthetic oligonucleotide
  Antisense strand to SEQ ID NO: 2497136
cagaaacggaaucuugcuc

SEQ ID NO: 2497138 - RNA, 19 nt, Artificial Sequence
  Description of Artificial Sequence: Synthetic oligonucleotide
  Sense strand starting at position 1990 of SEQ ID NO: 1887794
cgaagcgagcacgaauauu

SEQ ID NO: 2497139 - RNA, 19 nt, Artificial Sequence
  Description of Artificial Sequence: Synthetic oligonucleotide
  Antisense strand to SEQ ID NO: 2497138
aauauucgugcucgcuucg

SEQ ID NO: 2497140 - RNA, 19 nt, Artificial Sequence
  Description of Artificial Sequence: Synthetic oligonucleotide
  Sense strand starting at position 2039 of SEQ ID NO: 1887794
ggaacaaaugucuguacac

SEQ ID NO: 2497141 - RNA, 19 nt, Artificial Sequence
  Description of Artificial Sequence: Synthetic oligonucleotide
  Antisense strand to SEQ ID NO: 2497140
guguacagacauuuguucc

SEQ ID NO: 2497142 - RNA, 19 nt, Artificial Sequence
  Description of Artificial Sequence: Synthetic oligonucleotide
  Sense strand starting at position 2103 of SEQ ID NO: 1887794
auauuagcccaauguguaa

SEQ ID NO: 2497143 - RNA, 19 nt, Artificial Sequence
  Description of Artificial Sequence: Synthetic oligonucleotide
  Antisense strand to SEQ ID NO: 2497142
uuacacauugggcuaauau

SEQ ID NO: 2497144 - RNA, 19 nt, Artificial Sequence
  Description of Artificial Sequence: Synthetic oligonucleotide
  Sense strand starting at position 2116 of SEQ ID NO: 1887794
guguaaugcaacuaacgua

SEQ ID NO: 2497145 - RNA, 19 nt, Artificial Sequence
  Description of Artificial Sequence: Synthetic oligonucleotide
  Antisense strand to SEQ ID NO: 2497144
uacguuaguugcauuacac

SEQ ID NO: 2497146 - RNA, 19 nt, Artificial Sequence
  Description of Artificial Sequence: Synthetic oligonucleotide
  Sense strand starting at position 2124 of SEQ ID NO: 1887794
caacuaacguaguuauuga

SEQ ID NO: 2497147 - RNA, 19 nt, Artificial Sequence
  Description of Artificial Sequence: Synthetic oligonucleotide
  Antisense strand to SEQ ID NO: 2497146
ucaauaacuacguuaguug

SEQ ID NO: 2497148 - RNA, 19 nt, Artificial Sequence
  Description of Artificial Sequence: Synthetic oligonucleotide
  Sense strand starting at position 2131 of SEQ ID NO: 1887794
cguaguuauugacuggagu

SEQ ID NO: 2497149 - RNA, 19 nt, Artificial Sequence
  Description of Artificial Sequence: Synthetic oligonucleotide
  Antisense strand to SEQ ID NO: 2497148
acuccagucaauaacuacg

SEQ ID NO: 2497150 - RNA, 19 nt, Artificial Sequence
  Description of Artificial Sequence: Synthetic oligonucleotide
  Sense strand starting at position 2132 of SEQ ID NO: 1887794
guaguuauugacuggaguu

SEQ ID NO: 2497151 - RNA, 19 nt, Artificial Sequence
  Description of Artificial Sequence: Synthetic oligonucleotide
  Antisense strand to SEQ ID NO: 2497150
aacuccagucaauaacuac

SEQ ID NO: 2497152 - RNA, 19 nt, Artificial Sequence
  Description of Artificial Sequence: Synthetic oligonucleotide
  Sense strand starting at position 2133 of SEQ ID NO: 1887794
uaguuauugacuggaguug

SEQ ID NO: 2497153 - RNA, 19 nt, Artificial Sequence
  Description of Artificial Sequence: Synthetic oligonucleotide
  Antisense strand to SEQ ID NO: 2497152
caacuccagucaauaacua

SEQ ID NO: 2497154 - RNA, 19 nt, Artificial Sequence
  Description of Artificial Sequence: Synthetic oligonucleotide
  Sense strand starting at position 2134 of SEQ ID NO: 1887794
aguuauugacuggaguuga

SEQ ID NO: 2497155 - RNA, 19 nt, Artificial Sequence
  Description of Artificial Sequence: Synthetic oligonucleotide
  Antisense strand to SEQ ID NO: 2497154
ucaacuccagucaauaacu

SEQ ID NO: 2497156 - RNA, 19 nt, Artificial Sequence
  Description of Artificial Sequence: Synthetic oligonucleotide
  Sense strand starting at position 2149 of SEQ ID NO: 1887794
uugagaaagugcucguugu

SEQ ID NO: 2497157 - RNA, 19 nt, Artificial Sequence
  Description of Artificial Sequence: Synthetic oligonucleotide
  Antisense strand to SEQ ID NO: 2497156
acaacgagcacuuucucaa

SEQ ID NO: 2497158 - RNA, 19 nt, Artificial Sequence
  Description of Artificial Sequence: Synthetic oligonucleotide
  Sense strand starting at position 2150 of SEQ ID NO: 1887794
ugagaaagugcucguuguu

SEQ ID NO: 2497159 - RNA, 19 nt, Artificial Sequence
  Description of Artificial Sequence: Synthetic oligonucleotide
  Antisense strand to SEQ ID NO: 2497158
aacaacgagcacuuucuca

SEQ ID NO: 2497160 - RNA, 19 nt, Artificial Sequence
  Description of Artificial Sequence: Synthetic oligonucleotide
  Sense strand starting at position 2304 of SEQ ID NO: 1887794
cugguuguuaccgaggaag

SEQ ID NO: 2497161 - RNA, 19 nt, Artificial Sequence
  Description of Artificial Sequence: Synthetic oligonucleotide
  Antisense strand to SEQ ID NO: 2497160
cuuccucgguaacaaccag

SEQ ID NO: 2497162 - RNA, 19 nt, Artificial Sequence
  Description of Artificial Sequence: Synthetic oligonucleotide
  Sense strand starting at position 2306 of SEQ ID NO: 1887794
gguuguuaccgaggaagau

SEQ ID NO: 2497163 - RNA, 19 nt, Artificial Sequence
  Description of Artificial Sequence: Synthetic oligonucleotide
  Antisense strand to SEQ ID NO: 2497162
aucuuccucgguaacaacc

SEQ ID NO: 2497164 - RNA, 19 nt, Artificial Sequence
  Description of Artificial Sequence: Synthetic oligonucleotide
  Sense strand starting at position 2307 of SEQ ID NO: 1887794
guuguuaccgaggaagaug

SEQ ID NO: 2497165 - RNA, 19 nt, Artificial Sequence
  Description of Artificial Sequence: Synthetic oligonucleotide
  Antisense strand to SEQ ID NO: 2497164
caucuuccucgguaacaac

SEQ ID NO: 2497166 - RNA, 19 nt, Artificial Sequence
  Description of Artificial Sequence: Synthetic oligonucleotide
  Sense strand starting at position 3115 of SEQ ID NO: 1887794
uacggugaagccugagaau

SEQ ID NO: 2497167 - RNA, 19 nt, Artificial Sequence
  Description of Artificial Sequence: Synthetic oligonucleotide
  Antisense strand to SEQ ID NO: 2497166
auucucaggcuucaccgua

SEQ ID NO: 2497168 - RNA, 19 nt, Artificial Sequence
  Description of Artificial Sequence: Synthetic oligonucleotide
  Sense strand starting at position 3118 of SEQ ID NO: 1887794
ggugaagccugagaauuua

SEQ ID NO: 2497169 - RNA, 19 nt, Artificial Sequence
  Description of Artificial Sequence: Synthetic oligonucleotide
  Antisense strand to SEQ ID NO: 2497168
uaaauucucaggcuucacc

SEQ ID NO: 2497170 - RNA, 19 nt, Artificial Sequence
  Description of Artificial Sequence: Synthetic oligonucleotide
  Sense strand starting at position 3159 of SEQ ID NO: 1887794
ggugaaaugaaguguggga

SEQ ID NO: 2497171 - RNA, 19 nt, Artificial Sequence
  Description of Artificial Sequence: Synthetic oligonucleotide
  Antisense strand to SEQ ID NO: 2497170
ucccacacuucauuucacc

SEQ ID NO: 2497172 - RNA, 19 nt, Artificial Sequence
  Description of Artificial Sequence: Synthetic oligonucleotide
  Sense strand starting at position 3272 of SEQ ID NO: 1887794
ggguuaggguuugaggaga

SEQ ID NO: 2497173 - RNA, 19 nt, Artificial Sequence
  Description of Artificial Sequence: Synthetic oligonucleotide
  Antisense strand to SEQ ID NO: 2497172
ucuccucaaacccuaaccc

SEQ ID NO: 2497174 - RNA, 19 nt, Artificial Sequence
  Description of Artificial Sequence: Synthetic oligonucleotide
  Sense strand starting at position 3391 of SEQ ID NO: 1887794
cccucuguucccugugaca

SEQ ID NO: 2497175 - RNA, 19 nt, Artificial Sequence
  Description of Artificial Sequence: Synthetic oligonucleotide
  Antisense strand to SEQ ID NO: 2497174
ugucacagggaacagaggg

SEQ ID NO: 2497176 - RNA, 19 nt, Artificial Sequence
  Description of Artificial Sequence: Synthetic oligonucleotide
  Sense strand starting at position 3393 of SEQ ID NO: 1887794
cucuguucccugugacacu

SEQ ID NO: 2497177 - RNA, 19 nt, Artificial Sequence
  Description of Artificial Sequence: Synthetic oligonucleotide
  Antisense strand to SEQ ID NO: 2497176
agugucacagggaacagag

SEQ ID NO: 2497178 - RNA, 19 nt, Artificial Sequence
  Description of Artificial Sequence: Synthetic oligonucleotide
  Sense strand starting at position 3728 of SEQ ID NO: 1887794
acagguguucccugucagu

SEQ ID NO: 2497179 - RNA, 19 nt, Artificial Sequence
  Description of Artificial Sequence: Synthetic oligonucleotide
  Antisense strand to SEQ ID NO: 2497178
acugacagggaacaccugu

SEQ ID NO: 2497180 - RNA, 19 nt, Artificial Sequence
  Description of Artificial Sequence: Synthetic oligonucleotide
  Sense strand starting at position 3838 of SEQ ID NO: 1887794
acagguguucccugucacu

SEQ ID NO: 2497181 - RNA, 19 nt, Artificial Sequence
  Description of Artificial Sequence: Synthetic oligonucleotide
  Antisense strand to SEQ ID NO: 2497180
agugacagggaacaccugu

SEQ ID NO: 2497182 - RNA, 19 nt, Artificial Sequence
  Description of Artificial Sequence: Synthetic oligonucleotide
  Sense strand starting at position 3940 of SEQ ID NO: 1887794
gggcucuuccuucgggaga

SEQ ID NO: 2497183 - RNA, 19 nt, Artificial Sequence
  Description of Artificial Sequence: Synthetic oligonucleotide
  Antisense strand to SEQ ID NO: 2497182
ucucccgaaggaagagccc

SEQ ID NO: 2497184 - RNA, 19 nt, Artificial Sequence
  Description of Artificial Sequence: Synthetic oligonucleotide
  Sense strand starting at position 392 of SEQ ID NO: 1887795
gccugaccuuguuuggaua

SEQ ID NO: 2497185 - RNA, 19 nt, Artificial Sequence
  Description of Artificial Sequence: Synthetic oligonucleotide
  Antisense strand to SEQ ID NO: 2497184
uauccaaacaaggucaggc

SEQ ID NO: 2497186 - RNA, 19 nt, Artificial Sequence
  Description of Artificial Sequence: Synthetic oligonucleotide
  Sense strand starting at position 393 of SEQ ID NO: 1887795
ccugaccuuguuuggauaa

SEQ ID NO: 2497187 - RNA, 19 nt, Artificial Sequence
  Description of Artificial Sequence: Synthetic oligonucleotide
  Antisense strand to SEQ ID NO: 2497186
uuauccaaacaaggucagg

SEQ ID NO: 2497188 - RNA, 19 nt, Artificial Sequence
  Description of Artificial Sequence: Synthetic oligonucleotide
  Sense strand starting at position 395 of SEQ ID NO: 1887795
ugaccuuguuuggauaacu

SEQ ID NO: 2497189 - RNA, 19 nt, Artificial Sequence
  Description of Artificial Sequence: Synthetic oligonucleotide
  Antisense strand to SEQ ID NO: 2497188
aguuauccaaacaagguca

SEQ ID NO: 2497190 - RNA, 19 nt, Artificial Sequence
  Description of Artificial Sequence: Synthetic oligonucleotide
  Sense strand starting at position 400 of SEQ ID NO: 1887795
uuguuuggauaacuugaga

SEQ ID NO: 2497191 - RNA, 19 nt, Artificial Sequence
  Description of Artificial Sequence: Synthetic oligonucleotide
  Antisense strand to SEQ ID NO: 2497190
ucucaaguuauccaaacaa

SEQ ID NO: 2497192 - RNA, 19 nt, Artificial Sequence
  Description of Artificial Sequence: Synthetic oligonucleotide
  Sense strand starting at position 405 of SEQ ID NO: 1887795
uggauaacuugagaugugu

SEQ ID NO: 2497193 - RNA, 19 nt, Artificial Sequence
  Description of Artificial Sequence: Synthetic oligonucleotide
  Antisense strand to SEQ ID NO: 2497192
acacaucucaaguuaucca

SEQ ID NO: 2497194 - RNA, 19 nt, Artificial Sequence
  Description of Artificial Sequence: Synthetic oligonucleotide
  Sense strand starting at position 505 of SEQ ID NO: 1887795
guuauuugcuuaucuuucu

SEQ ID NO: 2497195 - RNA, 19 nt, Artificial Sequence
  Description of Artificial Sequence: Synthetic oligonucleotide
  Antisense strand to SEQ ID NO: 2497194
agaaagauaagcaaauaac

SEQ ID NO: 2497196 - RNA, 19 nt, Artificial Sequence
  Description of Artificial Sequence: Synthetic oligonucleotide
  Sense strand starting at position 511 of SEQ ID NO: 1887795
ugcuuaucuuucucuugga

SEQ ID NO: 2497197 - RNA, 19 nt, Artificial Sequence
  Description of Artificial Sequence: Synthetic oligonucleotide
  Antisense strand to SEQ ID NO: 2497196
uccaagagaaagauaagca

SEQ ID NO: 2497198 - RNA, 19 nt, Artificial Sequence
  Description of Artificial Sequence: Synthetic oligonucleotide
  Sense strand starting at position 512 of SEQ ID NO: 1887795
gcuuaucuuucucuuggaa

SEQ ID NO: 2497199 - RNA, 19 nt, Artificial Sequence
  Description of Artificial Sequence: Synthetic oligonucleotide
  Antisense strand to SEQ ID NO: 2497198
uuccaagagaaagauaagc

SEQ ID NO: 2497200 - RNA, 19 nt, Artificial Sequence
  Description of Artificial Sequence: Synthetic oligonucleotide
  Sense strand starting at position 524 of SEQ ID NO: 1887795
cuuggaaagcuguguucuu

SEQ ID NO: 2497201 - RNA, 19 nt, Artificial Sequence
  Description of Artificial Sequence: Synthetic oligonucleotide
  Antisense strand to SEQ ID NO: 2497200
aagaacacagcuuuccaag

SEQ ID NO: 2497202 - RNA, 19 nt, Artificial Sequence
  Description of Artificial Sequence: Synthetic oligonucleotide
  Sense strand starting at position 652 of SEQ ID NO: 1887795
ucuaucaaacguggaaauu

SEQ ID NO: 2497203 - RNA, 19 nt, Artificial Sequence
  Description of Artificial Sequence: Synthetic oligonucleotide
  Antisense strand to SEQ ID NO: 2497202
aauuuccacguuugauaga

SEQ ID NO: 2497204 - RNA, 19 nt, Artificial Sequence
  Description of Artificial Sequence: Synthetic oligonucleotide
  Sense strand starting at position 975 of SEQ ID NO: 1887795
gcaccaacguccucaguua

SEQ ID NO: 2497205 - RNA, 19 nt, Artificial Sequence
  Description of Artificial Sequence: Synthetic oligonucleotide
  Antisense strand to SEQ ID NO: 2497204
uaacugaggacguuggugc

SEQ ID NO: 2497206 - RNA, 19 nt, Artificial Sequence
  Description of Artificial Sequence: Synthetic oligonucleotide
  Sense strand starting at position 1749 of SEQ ID NO: 1887795
uagagacugccagauuguu

SEQ ID NO: 2497207 - RNA, 19 nt, Artificial Sequence
  Description of Artificial Sequence: Synthetic oligonucleotide
  Antisense strand to SEQ ID NO: 2497206
aacaaucuggcagucucua

SEQ ID NO: 2497208 - RNA, 19 nt, Artificial Sequence
  Description of Artificial Sequence: Synthetic oligonucleotide
  Sense strand starting at position 1804 of SEQ ID NO: 1887795
acgggaagacuaugacguu

SEQ ID NO: 2497209 - RNA, 19 nt, Artificial Sequence
  Description of Artificial Sequence: Synthetic oligonucleotide
  Antisense strand to SEQ ID NO: 2497208
aacgucauagucuucccgu

SEQ ID NO: 2497210 - RNA, 19 nt, Artificial Sequence
  Description of Artificial Sequence: Synthetic oligonucleotide
  Sense strand starting at position 1805 of SEQ ID NO: 1887795
cgggaagacuaugacguua

SEQ ID NO: 2497211 - RNA, 19 nt, Artificial Sequence
  Description of Artificial Sequence: Synthetic oligonucleotide
  Antisense strand to SEQ ID NO: 2497210
uaacgucauagucuucccg

SEQ ID NO: 2497212 - RNA, 19 nt, Artificial Sequence
  Description of Artificial Sequence: Synthetic oligonucleotide
  Sense strand starting at position 1843 of SEQ ID NO: 1887795
gcaggauccgggcaagaga

SEQ ID NO: 2497213 - RNA, 19 nt, Artificial Sequence
  Description of Artificial Sequence: Synthetic oligonucleotide
  Antisense strand to SEQ ID NO: 2497212
ucucuugcccggauccugc

SEQ ID NO: 2497214 - RNA, 19 nt, Artificial Sequence
  Description of Artificial Sequence: Synthetic oligonucleotide
  Sense strand starting at position 1872 of SEQ ID NO: 1887795
ggugacgagcuguagacua

SEQ ID NO: 2497215 - RNA, 19 nt, Artificial Sequence
  Description of Artificial Sequence: Synthetic oligonucleotide
  Antisense strand to SEQ ID NO: 2497214
uagucuacagcucgucacc

SEQ ID NO: 2497216 - RNA, 19 nt, Artificial Sequence
  Description of Artificial Sequence: Synthetic oligonucleotide
  Sense strand starting at position 1998 of SEQ ID NO: 1887795
gcacgacucaaggguuacu

SEQ ID NO: 2497217 - RNA, 19 nt, Artificial Sequence
  Description of Artificial Sequence: Synthetic oligonucleotide
  Antisense strand to SEQ ID NO: 2497216
aguaacccuugagucgugc

SEQ ID NO: 2497218 - RNA, 19 nt, Artificial Sequence
  Description of Artificial Sequence: Synthetic oligonucleotide
  Sense strand starting at position 2062 of SEQ ID NO: 1887795
gauaacuuauggucgguuu

SEQ ID NO: 2497219 - RNA, 19 nt, Artificial Sequence
  Description of Artificial Sequence: Synthetic oligonucleotide
  Antisense strand to SEQ ID NO: 2497218
aaaccgaccauaaguuauc

SEQ ID NO: 2497220 - RNA, 19 nt, Artificial Sequence
  Description of Artificial Sequence: Synthetic oligonucleotide
  Sense strand starting at position 2088 of SEQ ID NO: 1887795
agcauaauuuccuacagug

SEQ ID NO: 2497221 - RNA, 19 nt, Artificial Sequence
  Description of Artificial Sequence: Synthetic oligonucleotide
  Antisense strand to SEQ ID NO: 2497220
cacuguaggaaauuaugcu

SEQ ID NO: 2497222 - RNA, 19 nt, Artificial Sequence
  Description of Artificial Sequence: Synthetic oligonucleotide
  Sense strand starting at position 2105 of SEQ ID NO: 1887795
ugguauguugcagaacaac

SEQ ID NO: 2497223 - RNA, 19 nt, Artificial Sequence
  Description of Artificial Sequence: Synthetic oligonucleotide
  Antisense strand to SEQ ID NO: 2497222
guuguucugcaacauacca

SEQ ID NO: 2497224 - RNA, 19 nt, Artificial Sequence
  Description of Artificial Sequence: Synthetic oligonucleotide
  Sense strand starting at position 2116 of SEQ ID NO: 1887795
agaacaacuuucgugcuua

SEQ ID NO: 2497225 - RNA, 19 nt, Artificial Sequence
  Description of Artificial Sequence: Synthetic oligonucleotide
  Antisense strand to SEQ ID NO: 2497224
uaagcacgaaaguuguucu

SEQ ID NO: 2497226 - RNA, 19 nt, Artificial Sequence
  Description of Artificial Sequence: Synthetic oligonucleotide
  Sense strand starting at position 2129 of SEQ ID NO: 1887795
ugcuuacgcuuacuuugau

SEQ ID NO: 2497227 - RNA, 19 nt, Artificial Sequence
  Description of Artificial Sequence: Synthetic oligonucleotide
  Antisense strand to SEQ ID NO: 2497226
aucaaaguaagcguaagca

SEQ ID NO: 2497228 - RNA, 19 nt, Artificial Sequence
  Description of Artificial Sequence: Synthetic oligonucleotide
  Sense strand starting at position 2138 of SEQ ID NO: 1887795
uuacuuugaugucuucgau

SEQ ID NO: 2497229 - RNA, 19 nt, Artificial Sequence
  Description of Artificial Sequence: Synthetic oligonucleotide
  Antisense strand to SEQ ID NO: 2497228
aucgaagacaucaaaguaa

SEQ ID NO: 2497230 - RNA, 19 nt, Artificial Sequence
  Description of Artificial Sequence: Synthetic oligonucleotide
  Sense strand starting at position 2141 of SEQ ID NO: 1887795
cuuugaugucuucgaucac

SEQ ID NO: 2497231 - RNA, 19 nt, Artificial Sequence
  Description of Artificial Sequence: Synthetic oligonucleotide
  Antisense strand to SEQ ID NO: 2497230
gugaucgaagacaucaaag

SEQ ID NO: 2497232 - RNA, 19 nt, Artificial Sequence
  Description of Artificial Sequence: Synthetic oligonucleotide
  Sense strand starting at position 2145 of SEQ ID NO: 1887795
gaugucuucgaucacguaa

SEQ ID NO: 2497233 - RNA, 19 nt, Artificial Sequence
  Description of Artificial Sequence: Synthetic oligonucleotide
  Antisense strand to SEQ ID NO: 2497232
uuacgugaucgaagacauc

SEQ ID NO: 2497234 - RNA, 19 nt, Artificial Sequence
  Description of Artificial Sequence: Synthetic oligonucleotide
  Sense strand starting at position 2191 of SEQ ID NO: 1887795
gccuuauacuggccucaua

SEQ ID NO: 2497235 - RNA, 19 nt, Artificial Sequence
  Description of Artificial Sequence: Synthetic oligonucleotide
  Antisense strand to SEQ ID NO: 2497234
uaugaggccaguauaaggc

SEQ ID NO: 2497236 - RNA, 19 nt, Artificial Sequence
  Description of Artificial Sequence: Synthetic oligonucleotide
  Sense strand starting at position 2215 of SEQ ID NO: 1887795
gguggauugugggugccaa

SEQ ID NO: 2497237 - RNA, 19 nt, Artificial Sequence
  Description of Artificial Sequence: Synthetic oligonucleotide
  Antisense strand to SEQ ID NO: 2497236
uuggcacccacaauccacc

SEQ ID NO: 2497238 - RNA, 19 nt, Artificial Sequence
  Description of Artificial Sequence: Synthetic oligonucleotide
  Sense strand starting at position 2216 of SEQ ID NO: 1887795
guggauugugggugccaau

SEQ ID NO: 2497239 - RNA, 19 nt, Artificial Sequence
  Description of Artificial Sequence: Synthetic oligonucleotide
  Antisense strand to SEQ ID NO: 2497238
auuggcacccacaauccac

SEQ ID NO: 2497240 - RNA, 19 nt, Artificial Sequence
  Description of Artificial Sequence: Synthetic oligonucleotide
  Sense strand starting at position 2663 of SEQ ID NO: 1887795
acgcgcuguucuucaagau

SEQ ID NO: 2497241 - RNA, 19 nt, Artificial Sequence
  Description of Artificial Sequence: Synthetic oligonucleotide
  Antisense strand to SEQ ID NO: 2497240
aucuugaagaacagcgcgu

SEQ ID NO: 2497242 - RNA, 19 nt, Artificial Sequence
  Description of Artificial Sequence: Synthetic oligonucleotide
  Sense strand starting at position 2664 of SEQ ID NO: 1887795
cgcgcuguucuucaagaug

SEQ ID NO: 2497243 - RNA, 19 nt, Artificial Sequence
  Description of Artificial Sequence: Synthetic oligonucleotide
  Antisense strand to SEQ ID NO: 2497242
caucuugaagaacagcgcg

SEQ ID NO: 2497244 - RNA, 19 nt, Artificial Sequence
  Description of Artificial Sequence: Synthetic oligonucleotide
  Sense strand starting at position 2723 of SEQ ID NO: 1887795
gucucuucgaguucuucgu

SEQ ID NO: 2497245 - RNA, 19 nt, Artificial Sequence
  Description of Artificial Sequence: Synthetic oligonucleotide
  Antisense strand to SEQ ID NO: 2497244
acgaagaacucgaagagac

SEQ ID NO: 2497246 - RNA, 19 nt, Artificial Sequence
  Description of Artificial Sequence: Synthetic oligonucleotide
  Sense strand starting at position 2731 of SEQ ID NO: 1887795
gaguucuucgugcugcuca

SEQ ID NO: 2497247 - RNA, 19 nt, Artificial Sequence
  Description of Artificial Sequence: Synthetic oligonucleotide
  Antisense strand to SEQ ID NO: 2497246
ugagcagcacgaagaacuc

SEQ ID NO: 2497248 - RNA, 19 nt, Artificial Sequence
  Description of Artificial Sequence: Synthetic oligonucleotide
  Sense strand starting at position 2911 of SEQ ID NO: 1887795
gaccucugacccugggauu

SEQ ID NO: 2497249 - RNA, 19 nt, Artificial Sequence
  Description of Artificial Sequence: Synthetic oligonucleotide
  Antisense strand to SEQ ID NO: 2497248
aaucccagggucagagguc

SEQ ID NO: 2497250 - RNA, 19 nt, Artificial Sequence
  Description of Artificial Sequence: Synthetic oligonucleotide
  Sense strand starting at position 3010 of SEQ ID NO: 1887795
gcuguucucuacucuggaa

SEQ ID NO: 2497251 - RNA, 19 nt, Artificial Sequence
  Description of Artificial Sequence: Synthetic oligonucleotide
  Antisense strand to SEQ ID NO: 2497250
uuccagaguagagaacagc

SEQ ID NO: 2497252 - RNA, 19 nt, Artificial Sequence
  Description of Artificial Sequence: Synthetic oligonucleotide
  Sense strand starting at position 3012 of SEQ ID NO: 1887795
uguucucuacucuggaaac

SEQ ID NO: 2497253 - RNA, 19 nt, Artificial Sequence
  Description of Artificial Sequence: Synthetic oligonucleotide
  Antisense strand to SEQ ID NO: 2497252
guuuccagaguagagaaca

SEQ ID NO: 2497254 - RNA, 19 nt, Artificial Sequence
  Description of Artificial Sequence: Synthetic oligonucleotide
  Sense strand starting at position 3333 of SEQ ID NO: 1887795
gggaaugugacuuagcuga

SEQ ID NO: 2497255 - RNA, 19 nt, Artificial Sequence
  Description of Artificial Sequence: Synthetic oligonucleotide
  Antisense strand to SEQ ID NO: 2497254
ucagcuaagucacauuccc

SEQ ID NO: 2497256 - RNA, 19 nt, Artificial Sequence
  Description of Artificial Sequence: Synthetic oligonucleotide
  Sense strand starting at position 3593 of SEQ ID NO: 1887795
gaaggagucuugcuugggu

SEQ ID NO: 2497257 - RNA, 19 nt, Artificial Sequence
  Description of Artificial Sequence: Synthetic oligonucleotide
  Antisense strand to SEQ ID NO: 2497256
acccaagcaagacuccuuc

SEQ ID NO: 2497258 - RNA, 19 nt, Artificial Sequence
  Description of Artificial Sequence: Synthetic oligonucleotide
  Sense strand starting at position 3595 of SEQ ID NO: 1887795
aggagucuugcuuggguga

SEQ ID NO: 2497259 - RNA, 19 nt, Artificial Sequence
  Description of Artificial Sequence: Synthetic oligonucleotide
  Antisense strand to SEQ ID NO: 2497258
ucacccaagcaagacuccu

SEQ ID NO: 2497260 - RNA, 19 nt, Artificial Sequence
  Description of Artificial Sequence: Synthetic oligonucleotide
  Sense strand starting at position 3598 of SEQ ID NO: 1887795
agucuugcuugggugacaa

SEQ ID NO: 2497261 - RNA, 19 nt, Artificial Sequence
  Description of Artificial Sequence: Synthetic oligonucleotide
  Antisense strand to SEQ ID NO: 2497260
uugucacccaagcaagacu

SEQ ID NO: 2497262 - RNA, 19 nt, Artificial Sequence
  Description of Artificial Sequence: Synthetic oligonucleotide
  Sense strand starting at position 3702 of SEQ ID NO: 1887795
uucguucugcaucagaaca

SEQ ID NO: 2497263 - RNA, 19 nt, Artificial Sequence
  Description of Artificial Sequence: Synthetic oligonucleotide
  Antisense strand to SEQ ID NO: 2497262
uguucugaugcagaacgaa

SEQ ID NO: 2497264 - RNA, 19 nt, Artificial Sequence
  Description of Artificial Sequence: Synthetic oligonucleotide
  Sense strand starting at position 17 of SEQ ID NO: 1887796
guguguuaugucuugucuu

SEQ ID NO: 2497265 - RNA, 19 nt, Artificial Sequence
  Description of Artificial Sequence: Synthetic oligonucleotide
  Antisense strand to SEQ ID NO: 2497264
aagacaagacauaacacac

SEQ ID NO: 2497266 - RNA, 19 nt, Artificial Sequence
  Description of Artificial Sequence: Synthetic oligonucleotide
  Sense strand starting at position 20 of SEQ ID NO: 1887796
uguuaugucuugucuugac

SEQ ID NO: 2497267 - RNA, 19 nt, Artificial Sequence
  Description of Artificial Sequence: Synthetic oligonucleotide
  Antisense strand to SEQ ID NO: 2497266
gucaagacaagacauaaca

SEQ ID NO: 2497268 - RNA, 19 nt, Artificial Sequence
  Description of Artificial Sequence: Synthetic oligonucleotide
  Sense strand starting at position 53 of SEQ ID NO: 1887796
acgugucugugcccaaaua

SEQ ID NO: 2497269 - RNA, 19 nt, Artificial Sequence
  Description of Artificial Sequence: Synthetic oligonucleotide
  Antisense strand to SEQ ID NO: 2497268
uauuugggcacagacacgu

SEQ ID NO: 2497270 - RNA, 19 nt, Artificial Sequence
  Description of Artificial Sequence: Synthetic oligonucleotide
  Sense strand starting at position 54 of SEQ ID NO: 1887796
cgugucugugcccaaauau

SEQ ID NO: 2497271 - RNA, 19 nt, Artificial Sequence
  Description of Artificial Sequence: Synthetic oligonucleotide
  Antisense strand to SEQ ID NO: 2497270
auauuugggcacagacacg

SEQ ID NO: 2497272 - RNA, 19 nt, Artificial Sequence
  Description of Artificial Sequence: Synthetic oligonucleotide
  Sense strand starting at position 77 of SEQ ID NO: 1887796
cucuaugaugcccgucauu

SEQ ID NO: 2497273 - RNA, 19 nt, Artificial Sequence
  Description of Artificial Sequence: Synthetic oligonucleotide
  Antisense strand to SEQ ID NO: 2497272
aaugacgggcaucauagag

SEQ ID NO: 2497274 - RNA, 19 nt, Artificial Sequence
  Description of Artificial Sequence: Synthetic oligonucleotide
  Sense strand starting at position 96 of SEQ ID NO: 1887796
agguuaggcccaugcuaau

SEQ ID NO: 2497275 - RNA, 19 nt, Artificial Sequence
  Description of Artificial Sequence: Synthetic oligonucleotide
  Antisense strand to SEQ ID NO: 2497274
auuagcaugggccuaaccu

SEQ ID NO: 2497276 - RNA, 19 nt, Artificial Sequence
  Description of Artificial Sequence: Synthetic oligonucleotide
  Sense strand starting at position 832 of SEQ ID NO: 1887796
ggccgcuaagaacguuaaa

SEQ ID NO: 2497277 - RNA, 19 nt, Artificial Sequence
  Description of Artificial Sequence: Synthetic oligonucleotide
  Antisense strand to SEQ ID NO: 2497276
uuuaacguucuuagcggcc

SEQ ID NO: 2497278 - RNA, 19 nt, Artificial Sequence
  Description of Artificial Sequence: Synthetic oligonucleotide
  Sense strand starting at position 899 of SEQ ID NO: 1887796
ggcccucuuggagaacuga

SEQ ID NO: 2497279 - RNA, 19 nt, Artificial Sequence
  Description of Artificial Sequence: Synthetic oligonucleotide
  Antisense strand to SEQ ID NO: 2497278
ucaguucuccaagagggcc

SEQ ID NO: 2497280 - RNA, 19 nt, Artificial Sequence
  Description of Artificial Sequence: Synthetic oligonucleotide
  Sense strand starting at position 938 of SEQ ID NO: 1887796
cucugauauuugggccauu

SEQ ID NO: 2497281 - RNA, 19 nt, Artificial Sequence
  Description of Artificial Sequence: Synthetic oligonucleotide
  Antisense strand to SEQ ID NO: 2497280
aauggcccaaauaucagag

SEQ ID NO: 2497282 - RNA, 19 nt, Artificial Sequence
  Description of Artificial Sequence: Synthetic oligonucleotide
  Sense strand starting at position 950 of SEQ ID NO: 1887796
ggccauuguuaaccuguaa

SEQ ID NO: 2497283 - RNA, 19 nt, Artificial Sequence
  Description of Artificial Sequence: Synthetic oligonucleotide
  Antisense strand to SEQ ID NO: 2497282
uuacagguuaacaauggcc

SEQ ID NO: 2497284 - RNA, 19 nt, Artificial Sequence
  Description of Artificial Sequence: Synthetic oligonucleotide
  Sense strand starting at position 987 of SEQ ID NO: 1887796
uuugcagaauucuugcaaa

SEQ ID NO: 2497285 - RNA, 19 nt, Artificial Sequence
  Description of Artificial Sequence: Synthetic oligonucleotide
  Antisense strand to SEQ ID NO: 2497284
uuugcaagaauucugcaaa

SEQ ID NO: 2497286 - RNA, 19 nt, Artificial Sequence
  Description of Artificial Sequence: Synthetic oligonucleotide
  Sense strand starting at position 1075 of SEQ ID NO: 1887796
gggcuugaggccuggaguu

SEQ ID NO: 2497287 - RNA, 19 nt, Artificial Sequence
  Description of Artificial Sequence: Synthetic oligonucleotide
  Antisense strand to SEQ ID NO: 2497286
aacuccaggccucaagccc

SEQ ID NO: 2497288 - RNA, 19 nt, Artificial Sequence
  Description of Artificial Sequence: Synthetic oligonucleotide
  Sense strand starting at position 1276 of SEQ ID NO: 1887796
acaagaauuuguugggcau

SEQ ID NO: 2497289 - RNA, 19 nt, Artificial Sequence
  Description of Artificial Sequence: Synthetic oligonucleotide
  Antisense strand to SEQ ID NO: 2497288
augcccaacaaauucuugu

SEQ ID NO: 2497290 - RNA, 19 nt, Artificial Sequence
  Description of Artificial Sequence: Synthetic oligonucleotide
  Sense strand starting at position 1501 of SEQ ID NO: 1887796
ugggaauaggguuggaagu

SEQ ID NO: 2497291 - RNA, 19 nt, Artificial Sequence
  Description of Artificial Sequence: Synthetic oligonucleotide
  Antisense strand to SEQ ID NO: 2497290
acuuccaacccuauuccca

SEQ ID NO: 2497292 - RNA, 19 nt, Artificial Sequence
  Description of Artificial Sequence: Synthetic oligonucleotide
  Sense strand starting at position 1538 of SEQ ID NO: 1887796
cggugacuucgcuuacagu

SEQ ID NO: 2497293 - RNA, 19 nt, Artificial Sequence
  Description of Artificial Sequence: Synthetic oligonucleotide
  Antisense strand to SEQ ID NO: 2497292
acuguaagcgaagucaccg

SEQ ID NO: 2497294 - RNA, 19 nt, Artificial Sequence
  Description of Artificial Sequence: Synthetic oligonucleotide
  Sense strand starting at position 1539 of SEQ ID NO: 1887796
ggugacuucgcuuacaguu

SEQ ID NO: 2497295 - RNA, 19 nt, Artificial Sequence
  Description of Artificial Sequence: Synthetic oligonucleotide
  Antisense strand to SEQ ID NO: 2497294
aacuguaagcgaagucacc

SEQ ID NO: 2497296 - RNA, 19 nt, Artificial Sequence
  Description of Artificial Sequence: Synthetic oligonucleotide
  Sense strand starting at position 1853 of SEQ ID NO: 1887796
gagcaagauuccguuucug

SEQ ID NO: 2497297 - RNA, 19 nt, Artificial Sequence
  Description of Artificial Sequence: Synthetic oligonucleotide
  Antisense strand to SEQ ID NO: 2497296
cagaaacggaaucuugcuc

SEQ ID NO: 2497298 - RNA, 19 nt, Artificial Sequence
  Description of Artificial Sequence: Synthetic oligonucleotide
  Sense strand starting at position 1990 of SEQ ID NO: 1887796
cgaagcgagcacgaauauu

SEQ ID NO: 2497299 - RNA, 19 nt, Artificial Sequence
  Description of Artificial Sequence: Synthetic oligonucleotide
  Antisense strand to SEQ ID NO: 2497298
aauauucgugcucgcuucg

SEQ ID NO: 2497300 - RNA, 19 nt, Artificial Sequence
  Description of Artificial Sequence: Synthetic oligonucleotide
  Sense strand starting at position 2039 of SEQ ID NO: 1887796
ggaacaaaugucuguacac

SEQ ID NO: 2497301 - RNA, 19 nt, Artificial Sequence
  Description of Artificial Sequence: Synthetic oligonucleotide
  Antisense strand to SEQ ID NO: 2497300
guguacagacauuuguucc

SEQ ID NO: 2497302 - RNA, 19 nt, Artificial Sequence
  Description of Artificial Sequence: Synthetic oligonucleotide
  Sense strand starting at position 2103 of SEQ ID NO: 1887796
auauuagcccaauguguaa

SEQ ID NO: 2497303 - RNA, 19 nt, Artificial Sequence
  Description of Artificial Sequence: Synthetic oligonucleotide
  Antisense strand to SEQ ID NO: 2497302
uuacacauugggcuaauau

SEQ ID NO: 2497304 - RNA, 19 nt, Artificial Sequence
  Description of Artificial Sequence: Synthetic oligonucleotide
  Sense strand starting at position 2116 of SEQ ID NO: 1887796
guguaaugcaacuaacgua

SEQ ID NO: 2497305 - RNA, 19 nt, Artificial Sequence
  Description of Artificial Sequence: Synthetic oligonucleotide
  Antisense strand to SEQ ID NO: 2497304
uacguuaguugcauuacac

SEQ ID NO: 2497306 - RNA, 19 nt, Artificial Sequence
  Description of Artificial Sequence: Synthetic oligonucleotide
  Sense strand starting at position 2124 of SEQ ID NO: 1887796
caacuaacguaguuauuga

SEQ ID NO: 2497307 - RNA, 19 nt, Artificial Sequence
  Description of Artificial Sequence: Synthetic oligonucleotide
  Antisense strand to SEQ ID NO: 2497306
ucaauaacuacguuaguug

SEQ ID NO: 2497308 - RNA, 19 nt, Artificial Sequence
  Description of Artificial Sequence: Synthetic oligonucleotide
  Sense strand starting at position 2131 of SEQ ID NO: 1887796
cguaguuauugacuggagu

SEQ ID NO: 2497309 - RNA, 19 nt, Artificial Sequence
  Description of Artificial Sequence: Synthetic oligonucleotide
  Antisense strand to SEQ ID NO: 2497308
acuccagucaauaacuacg

SEQ ID NO: 2497310 - RNA, 19 nt, Artificial Sequence
  Description of Artificial Sequence: Synthetic oligonucleotide
  Sense strand starting at position 2132 of SEQ ID NO: 1887796
guaguuauugacuggaguu

SEQ ID NO: 2497311 - RNA, 19 nt, Artificial Sequence
  Description of Artificial Sequence: Synthetic oligonucleotide
  Antisense strand to SEQ ID NO: 2497310
aacuccagucaauaacuac

SEQ ID NO: 2497312 - RNA, 19 nt, Artificial Sequence
  Description of Artificial Sequence: Synthetic oligonucleotide
  Sense strand starting at position 2133 of SEQ ID NO: 1887796
uaguuauugacuggaguug

SEQ ID NO: 2497313 - RNA, 19 nt, Artificial Sequence
  Description of Artificial Sequence: Synthetic oligonucleotide
  Antisense strand to SEQ ID NO: 2497312
caacuccagucaauaacua

SEQ ID NO: 2497314 - RNA, 19 nt, Artificial Sequence
  Description of Artificial Sequence: Synthetic oligonucleotide
  Sense strand starting at position 2134 of SEQ ID NO: 1887796
aguuauugacuggaguuga

SEQ ID NO: 2497315 - RNA, 19 nt, Artificial Sequence
  Description of Artificial Sequence: Synthetic oligonucleotide
  Antisense strand to SEQ ID NO: 2497314
ucaacuccagucaauaacu

SEQ ID NO: 2497316 - RNA, 19 nt, Artificial Sequence
  Description of Artificial Sequence: Synthetic oligonucleotide
  Sense strand starting at position 2149 of SEQ ID NO: 1887796
uugagaaagugcucguugu

SEQ ID NO: 2497317 - RNA, 19 nt, Artificial Sequence
  Description of Artificial Sequence: Synthetic oligonucleotide
  Antisense strand to SEQ ID NO: 2497316
acaacgagcacuuucucaa

SEQ ID NO: 2497318 - RNA, 19 nt, Artificial Sequence
  Description of Artificial Sequence: Synthetic oligonucleotide
  Sense strand starting at position 2150 of SEQ ID NO: 1887796
ugagaaagugcucguuguu

SEQ ID NO: 2497319 - RNA, 19 nt, Artificial Sequence
  Description of Artificial Sequence: Synthetic oligonucleotide
  Antisense strand to SEQ ID NO: 2497318
aacaacgagcacuuucuca

SEQ ID NO: 2497320 - RNA, 19 nt, Artificial Sequence
  Description of Artificial Sequence: Synthetic oligonucleotide
  Sense strand starting at position 2304 of SEQ ID NO: 1887796
cugguuguuaccgaggaag

SEQ ID NO: 2497321 - RNA, 19 nt, Artificial Sequence
  Description of Artificial Sequence: Synthetic oligonucleotide
  Antisense strand to SEQ ID NO: 2497320
cuuccucgguaacaaccag

SEQ ID NO: 2497322 - RNA, 19 nt, Artificial Sequence
  Description of Artificial Sequence: Synthetic oligonucleotide
  Sense strand starting at position 2306 of SEQ ID NO: 1887796
gguuguuaccgaggaagau

SEQ ID NO: 2497323 - RNA, 19 nt, Artificial Sequence
  Description of Artificial Sequence: Synthetic oligonucleotide
  Antisense strand to SEQ ID NO: 2497322
aucuuccucgguaacaacc

SEQ ID NO: 2497324 - RNA, 19 nt, Artificial Sequence
  Description of Artificial Sequence: Synthetic oligonucleotide
  Sense strand starting at position 2307 of SEQ ID NO: 1887796
guuguuaccgaggaagaug

SEQ ID NO: 2497325 - RNA, 19 nt, Artificial Sequence
  Description of Artificial Sequence: Synthetic oligonucleotide
  Antisense strand to SEQ ID NO: 2497324
caucuuccucgguaacaac

SEQ ID NO: 2497326 - RNA, 19 nt, Artificial Sequence
  Description of Artificial Sequence: Synthetic oligonucleotide
  Sense strand starting at position 3115 of SEQ ID NO: 1887796
uacggugaagccugagaau

SEQ ID NO: 2497327 - RNA, 19 nt, Artificial Sequence
  Description of Artificial Sequence: Synthetic oligonucleotide
  Antisense strand to SEQ ID NO: 2497326
auucucaggcuucaccgua

SEQ ID NO: 2497328 - RNA, 19 nt, Artificial Sequence
  Description of Artificial Sequence: Synthetic oligonucleotide
  Sense strand starting at position 3118 of SEQ ID NO: 1887796
ggugaagccugagaauuua

SEQ ID NO: 2497329 - RNA, 19 nt, Artificial Sequence
  Description of Artificial Sequence: Synthetic oligonucleotide
  Antisense strand to SEQ ID NO: 2497328
uaaauucucaggcuucacc

SEQ ID NO: 2497330 - RNA, 19 nt, Artificial Sequence
  Description of Artificial Sequence: Synthetic oligonucleotide
  Sense strand starting at position 3159 of SEQ ID NO: 1887796
ggugaaaugaaguguggga

SEQ ID NO: 2497331 - RNA, 19 nt, Artificial Sequence
  Description of Artificial Sequence: Synthetic oligonucleotide
  Antisense strand to SEQ ID NO: 2497330
ucccacacuucauuucacc

SEQ ID NO: 2497332 - RNA, 19 nt, Artificial Sequence
  Description of Artificial Sequence: Synthetic oligonucleotide
  Sense strand starting at position 3272 of SEQ ID NO: 1887796
ggguuaggguuugaggaga

SEQ ID NO: 2497333 - RNA, 19 nt, Artificial Sequence
  Description of Artificial Sequence: Synthetic oligonucleotide
  Antisense strand to SEQ ID NO: 2497332
ucuccucaaacccuaaccc

SEQ ID NO: 2497334 - RNA, 19 nt, Artificial Sequence
  Description of Artificial Sequence: Synthetic oligonucleotide
  Sense strand starting at position 3391 of SEQ ID NO: 1887796
cccucuguucccugugaca

SEQ ID NO: 2497335 - RNA, 19 nt, Artificial Sequence
  Description of Artificial Sequence: Synthetic oligonucleotide
  Antisense strand to SEQ ID NO: 2497334
ugucacagggaacagaggg

SEQ ID NO: 2497336 - RNA, 19 nt, Artificial Sequence
  Description of Artificial Sequence: Synthetic oligonucleotide
  Sense strand starting at position 3393 of SEQ ID NO: 1887796
cucuguucccugugacacu

SEQ ID NO: 2497337 - RNA, 19 nt, Artificial Sequence
  Description of Artificial Sequence: Synthetic oligonucleotide
  Antisense strand to SEQ ID NO: 2497336
agugucacagggaacagag

SEQ ID NO: 2497338 - RNA, 19 nt, Artificial Sequence
  Description of Artificial Sequence: Synthetic oligonucleotide
  Sense strand starting at position 3728 of SEQ ID NO: 1887796
acagguguucccugucagu

SEQ ID NO: 2497339 - RNA, 19 nt, Artificial Sequence
  Description of Artificial Sequence: Synthetic oligonucleotide
  Antisense strand to SEQ ID NO: 2497338
acugacagggaacaccugu

SEQ ID NO: 2497340 - RNA, 19 nt, Artificial Sequence
  Description of Artificial Sequence: Synthetic oligonucleotide
  Sense strand starting at position 3838 of SEQ ID NO: 1887796
acagguguucccugucacu

SEQ ID NO: 2497341 - RNA, 19 nt, Artificial Sequence
  Description of Artificial Sequence: Synthetic oligonucleotide
  Antisense strand to SEQ ID NO: 2497340
agugacagggaacaccugu

SEQ ID NO: 2497342 - RNA, 19 nt, Artificial Sequence
  Description of Artificial Sequence: Synthetic oligonucleotide
  Sense strand starting at position 3940 of SEQ ID NO: 1887796
gggcucuuccuucgggaga

SEQ ID NO: 2497343 - RNA, 19 nt, Artificial Sequence
  Description of Artificial Sequence: Synthetic oligonucleotide
  Antisense strand to SEQ ID NO: 2497342
ucucccgaaggaagagccc

SEQ ID NO: 2497344 - RNA, 19 nt, Artificial Sequence
  Description of Artificial Sequence: Synthetic oligonucleotide
  Sense strand starting at position 37 of SEQ ID NO: 1887797
guuacaagaccuuguaacu

SEQ ID NO: 2497345 - RNA, 19 nt, Artificial Sequence
  Description of Artificial Sequence: Synthetic oligonucleotide
  Antisense strand to SEQ ID NO: 2497344
aguuacaaggucuuguaac

SEQ ID NO: 2497346 - RNA, 19 nt, Artificial Sequence
  Description of Artificial Sequence: Synthetic oligonucleotide
  Sense strand starting at position 333 of SEQ ID NO: 1887797
uggccaaucaauuguagga

SEQ ID NO: 2497347 - RNA, 19 nt, Artificial Sequence
  Description of Artificial Sequence: Synthetic oligonucleotide
  Antisense strand to SEQ ID NO: 2497346
uccuacaauugauuggcca

SEQ ID NO: 2497348 - RNA, 19 nt, Artificial Sequence
  Description of Artificial Sequence: Synthetic oligonucleotide
  Sense strand starting at position 337 of SEQ ID NO: 1887797
caaucaauuguaggauguu

SEQ ID NO: 2497349 - RNA, 19 nt, Artificial Sequence
  Description of Artificial Sequence: Synthetic oligonucleotide
  Antisense strand to SEQ ID NO: 2497348
aacauccuacaauugauug

SEQ ID NO: 2497350 - RNA, 19 nt, Artificial Sequence
  Description of Artificial Sequence: Synthetic oligonucleotide
  Sense strand starting at position 340 of SEQ ID NO: 1887797
ucaauuguaggauguuaac

SEQ ID NO: 2497351 - RNA, 19 nt, Artificial Sequence
  Description of Artificial Sequence: Synthetic oligonucleotide
  Antisense strand to SEQ ID NO: 2497350
guuaacauccuacaauuga

SEQ ID NO: 2497352 - RNA, 19 nt, Artificial Sequence
  Description of Artificial Sequence: Synthetic oligonucleotide
  Sense strand starting at position 434 of SEQ ID NO: 1887797
ggaugagauuaggcagagu

SEQ ID NO: 2497353 - RNA, 19 nt, Artificial Sequence
  Description of Artificial Sequence: Synthetic oligonucleotide
  Antisense strand to SEQ ID NO: 2497352
acucugccuaaucucaucc

SEQ ID NO: 2497354 - RNA, 19 nt, Artificial Sequence
  Description of Artificial Sequence: Synthetic oligonucleotide
  Sense strand starting at position 437 of SEQ ID NO: 1887797
ugagauuaggcagaguagu

SEQ ID NO: 2497355 - RNA, 19 nt, Artificial Sequence
  Description of Artificial Sequence: Synthetic oligonucleotide
  Antisense strand to SEQ ID NO: 2497354
acuacucugccuaaucuca

SEQ ID NO: 2497356 - RNA, 19 nt, Artificial Sequence
  Description of Artificial Sequence: Synthetic oligonucleotide
  Sense strand starting at position 463 of SEQ ID NO: 1887797
ccaugcuagcucugcuaua

SEQ ID NO: 2497357 - RNA, 19 nt, Artificial Sequence
  Description of Artificial Sequence: Synthetic oligonucleotide
  Antisense strand to SEQ ID NO: 2497356
uauagcagagcuagcaugg

SEQ ID NO: 2497358 - RNA, 19 nt, Artificial Sequence
  Description of Artificial Sequence: Synthetic oligonucleotide
  Sense strand starting at position 525 of SEQ ID NO: 1887797
cagcuuccuccggaguaga

SEQ ID NO: 2497359 - RNA, 19 nt, Artificial Sequence
  Description of Artificial Sequence: Synthetic oligonucleotide
  Antisense strand to SEQ ID NO: 2497358
ucuacuccggaggaagcug

SEQ ID NO: 2497360 - RNA, 19 nt, Artificial Sequence
  Description of Artificial Sequence: Synthetic oligonucleotide
  Sense strand starting at position 528 of SEQ ID NO: 1887797
cuuccuccggaguagaaau

SEQ ID NO: 2497361 - RNA, 19 nt, Artificial Sequence
  Description of Artificial Sequence: Synthetic oligonucleotide
  Antisense strand to SEQ ID NO: 2497360
auuucuacuccggaggaag

SEQ ID NO: 2497362 - RNA, 19 nt, Artificial Sequence
  Description of Artificial Sequence: Synthetic oligonucleotide
  Sense strand starting at position 847 of SEQ ID NO: 1887797
aguagaaauccucauuguu

SEQ ID NO: 2497363 - RNA, 19 nt, Artificial Sequence
  Description of Artificial Sequence: Synthetic oligonucleotide
  Antisense strand to SEQ ID NO: 2497362
aacaaugaggauuucuacu

SEQ ID NO: 2497364 - RNA, 19 nt, Artificial Sequence
  Description of Artificial Sequence: Synthetic oligonucleotide
  Sense strand starting at position 896 of SEQ ID NO: 1887797
uguuacacaugcuuuguaa

SEQ ID NO: 2497365 - RNA, 19 nt, Artificial Sequence
  Description of Artificial Sequence: Synthetic oligonucleotide
  Antisense strand to SEQ ID NO: 2497364
uuacaaagcauguguaaca

SEQ ID NO: 2497366 - RNA, 19 nt, Artificial Sequence
  Description of Artificial Sequence: Synthetic oligonucleotide
  Sense strand starting at position 905 of SEQ ID NO: 1887797
ugcuuuguaagcguuggua

SEQ ID NO: 2497367 - RNA, 19 nt, Artificial Sequence
  Description of Artificial Sequence: Synthetic oligonucleotide
  Antisense strand to SEQ ID NO: 2497366
uaccaacgcuuacaaagca

SEQ ID NO: 2497368 - RNA, 19 nt, Artificial Sequence
  Description of Artificial Sequence: Synthetic oligonucleotide
  Sense strand starting at position 909 of SEQ ID NO: 1887797
uuguaagcguugguacaaa

SEQ ID NO: 2497369 - RNA, 19 nt, Artificial Sequence
  Description of Artificial Sequence: Synthetic oligonucleotide
  Antisense strand to SEQ ID NO: 2497368
uuuguaccaacgcuuacaa

SEQ ID NO: 2497370 - RNA, 19 nt, Artificial Sequence
  Description of Artificial Sequence: Synthetic oligonucleotide
  Sense strand starting at position 940 of SEQ ID NO: 1887797
cagacagacuuccugaagu

SEQ ID NO: 2497371 - RNA, 19 nt, Artificial Sequence
  Description of Artificial Sequence: Synthetic oligonucleotide
  Antisense strand to SEQ ID NO: 2497370
acuucaggaagucugucug

SEQ ID NO: 2497372 - RNA, 19 nt, Artificial Sequence
  Description of Artificial Sequence: Synthetic oligonucleotide
  Sense strand starting at position 1021 of SEQ ID NO: 1887797
caguaacugccucaggaau

SEQ ID NO: 2497373 - RNA, 19 nt, Artificial Sequence
  Description of Artificial Sequence: Synthetic oligonucleotide
  Antisense strand to SEQ ID NO: 2497372
auuccugaggcaguuacug

SEQ ID NO: 2497374 - RNA, 19 nt, Artificial Sequence
  Description of Artificial Sequence: Synthetic oligonucleotide
  Sense strand starting at position 1029 of SEQ ID NO: 1887797
gccucaggaauaugguuaa

SEQ ID NO: 2497375 - RNA, 19 nt, Artificial Sequence
  Description of Artificial Sequence: Synthetic oligonucleotide
  Antisense strand to SEQ ID NO: 2497374
uuaaccauauuccugaggc

SEQ ID NO: 2497376 - RNA, 19 nt, Artificial Sequence
  Description of Artificial Sequence: Synthetic oligonucleotide
  Sense strand starting at position 1032 of SEQ ID NO: 1887797
ucaggaauaugguuaacug

SEQ ID NO: 2497377 - RNA, 19 nt, Artificial Sequence
  Description of Artificial Sequence: Synthetic oligonucleotide
  Antisense strand to SEQ ID NO: 2497376
caguuaaccauauuccuga

SEQ ID NO: 2497378 - RNA, 19 nt, Artificial Sequence
  Description of Artificial Sequence: Synthetic oligonucleotide
  Sense strand starting at position 1068 of SEQ ID NO: 1887797
cgaacugugcuaggcacaa

SEQ ID NO: 2497379 - RNA, 19 nt, Artificial Sequence
  Description of Artificial Sequence: Synthetic oligonucleotide
  Antisense strand to SEQ ID NO: 2497378
uugugccuagcacaguucg

SEQ ID NO: 2497380 - RNA, 19 nt, Artificial Sequence
  Description of Artificial Sequence: Synthetic oligonucleotide
  Sense strand starting at position 1088 of SEQ ID NO: 1887797
gacacaugcuuggugaaca

SEQ ID NO: 2497381 - RNA, 19 nt, Artificial Sequence
  Description of Artificial Sequence: Synthetic oligonucleotide
  Antisense strand to SEQ ID NO: 2497380
uguucaccaagcauguguc

SEQ ID NO: 2497382 - RNA, 19 nt, Artificial Sequence
  Description of Artificial Sequence: Synthetic oligonucleotide
  Sense strand starting at position 1258 of SEQ ID NO: 1887797
augucccauccuuguggaa

SEQ ID NO: 2497383 - RNA, 19 nt, Artificial Sequence
  Description of Artificial Sequence: Synthetic oligonucleotide
  Antisense strand to SEQ ID NO: 2497382
uuccacaaggaugggacau

SEQ ID NO: 2497384 - RNA, 19 nt, Artificial Sequence
  Description of Artificial Sequence: Synthetic oligonucleotide
  Sense strand starting at position 1394 of SEQ ID NO: 1887797
gcagaaaggcauugagaau

SEQ ID NO: 2497385 - RNA, 19 nt, Artificial Sequence
  Description of Artificial Sequence: Synthetic oligonucleotide
  Antisense strand to SEQ ID NO: 2497384
auucucaaugccuuucugc

SEQ ID NO: 2497386 - RNA, 19 nt, Artificial Sequence
  Description of Artificial Sequence: Synthetic oligonucleotide
  Sense strand starting at position 1443 of SEQ ID NO: 1887797
uuaacaccuccacgugaaa

SEQ ID NO: 2497387 - RNA, 19 nt, Artificial Sequence
  Description of Artificial Sequence: Synthetic oligonucleotide
  Antisense strand to SEQ ID NO: 2497386
uuucacguggagguguuaa

SEQ ID NO: 2497388 - RNA, 19 nt, Artificial Sequence
  Description of Artificial Sequence: Synthetic oligonucleotide
  Sense strand starting at position 1474 of SEQ ID NO: 1887797
gcgcacugagcgggauaaa

SEQ ID NO: 2497389 - RNA, 19 nt, Artificial Sequence
  Description of Artificial Sequence: Synthetic oligonucleotide
  Antisense strand to SEQ ID NO: 2497388
uuuaucccgcucagugcgc

SEQ ID NO: 2497390 - RNA, 19 nt, Artificial Sequence
  Description of Artificial Sequence: Synthetic oligonucleotide
  Sense strand starting at position 1588 of SEQ ID NO: 1887797
guccaauucggccaagacu

SEQ ID NO: 2497391 - RNA, 19 nt, Artificial Sequence
  Description of Artificial Sequence: Synthetic oligonucleotide
  Antisense strand to SEQ ID NO: 2497390
agucuuggccgaauuggac

SEQ ID NO: 2497392 - RNA, 19 nt, Artificial Sequence
  Description of Artificial Sequence: Synthetic oligonucleotide
  Sense strand starting at position 2102 of SEQ ID NO: 1887797
guccaauccggacauucuu

SEQ ID NO: 2497393 - RNA, 19 nt, Artificial Sequence
  Description of Artificial Sequence: Synthetic oligonucleotide
  Antisense strand to SEQ ID NO: 2497392
aagaauguccggauuggac

SEQ ID NO: 2497394 - RNA, 19 nt, Artificial Sequence
  Description of Artificial Sequence: Synthetic oligonucleotide
  Sense strand starting at position 2261 of SEQ ID NO: 1887797
ccauguuugugaguggaag

SEQ ID NO: 2497395 - RNA, 19 nt, Artificial Sequence
  Description of Artificial Sequence: Synthetic oligonucleotide
  Antisense strand to SEQ ID NO: 2497394
cuuccacucacaaacaugg

SEQ ID NO: 2497396 - RNA, 19 nt, Artificial Sequence
  Description of Artificial Sequence: Synthetic oligonucleotide
  Sense strand starting at position 2408 of SEQ ID NO: 1887797
cuguguuguccacaccaga

SEQ ID NO: 2497397 - RNA, 19 nt, Artificial Sequence
  Description of Artificial Sequence: Synthetic oligonucleotide
  Antisense strand to SEQ ID NO: 2497396
ucugguguggacaacacag

SEQ ID NO: 2497398 - RNA, 19 nt, Artificial Sequence
  Description of Artificial Sequence: Synthetic oligonucleotide
  Sense strand starting at position 2691 of SEQ ID NO: 1887797
ugcccauucuaggcuuaga

SEQ ID NO: 2497399 - RNA, 19 nt, Artificial Sequence
  Description of Artificial Sequence: Synthetic oligonucleotide
  Antisense strand to SEQ ID NO: 2497398
ucuaagccuagaaugggca

SEQ ID NO: 2497400 - RNA, 19 nt, Artificial Sequence
  Description of Artificial Sequence: Synthetic oligonucleotide
  Sense strand starting at position 2694 of SEQ ID NO: 1887797
ccauucuaggcuuagagau

SEQ ID NO: 2497401 - RNA, 19 nt, Artificial Sequence
  Description of Artificial Sequence: Synthetic oligonucleotide
  Antisense strand to SEQ ID NO: 2497400
aucucuaagccuagaaugg

SEQ ID NO: 2497402 - RNA, 19 nt, Artificial Sequence
  Description of Artificial Sequence: Synthetic oligonucleotide
  Sense strand starting at position 2696 of SEQ ID NO: 1887797
auucuaggcuuagagauuu

SEQ ID NO: 2497403 - RNA, 19 nt, Artificial Sequence
  Description of Artificial Sequence: Synthetic oligonucleotide
  Antisense strand to SEQ ID NO: 2497402
aaaucucuaagccuagaau

SEQ ID NO: 2497404 - RNA, 19 nt, Artificial Sequence
  Description of Artificial Sequence: Synthetic oligonucleotide
  Sense strand starting at position 2820 of SEQ ID NO: 1887797
gggcucuaagaguggauca

SEQ ID NO: 2497405 - RNA, 19 nt, Artificial Sequence
  Description of Artificial Sequence: Synthetic oligonucleotide
  Antisense strand to SEQ ID NO: 2497404
ugauccacucuuagagccc

SEQ ID NO: 2497406 - RNA, 19 nt, Artificial Sequence
  Description of Artificial Sequence: Synthetic oligonucleotide
  Sense strand starting at position 2821 of SEQ ID NO: 1887797
ggcucuaagaguggaucaa

SEQ ID NO: 2497407 - RNA, 19 nt, Artificial Sequence
  Description of Artificial Sequence: Synthetic oligonucleotide
  Antisense strand to SEQ ID NO: 2497406
uugauccacucuuagagcc

SEQ ID NO: 2497408 - RNA, 19 nt, Artificial Sequence
  Description of Artificial Sequence: Synthetic oligonucleotide
  Sense strand starting at position 2875 of SEQ ID NO: 1887797
cugagcguuccucagagga

SEQ ID NO: 2497409 - RNA, 19 nt, Artificial Sequence
  Description of Artificial Sequence: Synthetic oligonucleotide
  Antisense strand to SEQ ID NO: 2497408
uccucugaggaacgcucag

SEQ ID NO: 2497410 - RNA, 19 nt, Artificial Sequence
  Description of Artificial Sequence: Synthetic oligonucleotide
  Sense strand starting at position 2879 of SEQ ID NO: 1887797
gcguuccucagaggaacuu

SEQ ID NO: 2497411 - RNA, 19 nt, Artificial Sequence
  Description of Artificial Sequence: Synthetic oligonucleotide
  Antisense strand to SEQ ID NO: 2497410
aaguuccucugaggaacgc

SEQ ID NO: 2497412 - RNA, 19 nt, Artificial Sequence
  Description of Artificial Sequence: Synthetic oligonucleotide
  Sense strand starting at position 3224 of SEQ ID NO: 1887797
acacguauugaaugaaaca

SEQ ID NO: 2497413 - RNA, 19 nt, Artificial Sequence
  Description of Artificial Sequence: Synthetic oligonucleotide
  Antisense strand to SEQ ID NO: 2497412
uguuucauucaauacgugu

SEQ ID NO: 2497414 - RNA, 19 nt, Artificial Sequence
  Description of Artificial Sequence: Synthetic oligonucleotide
  Sense strand starting at position 3579 of SEQ ID NO: 1887797
guuuaaggcuccgcugaga

SEQ ID NO: 2497415 - RNA, 19 nt, Artificial Sequence
  Description of Artificial Sequence: Synthetic oligonucleotide
  Antisense strand to SEQ ID NO: 2497414
ucucagcggagccuuaaac

SEQ ID NO: 2497416 - RNA, 19 nt, Artificial Sequence
  Description of Artificial Sequence: Synthetic oligonucleotide
  Sense strand starting at position 3630 of SEQ ID NO: 1887797
gccacagauuuaugcccaa

SEQ ID NO: 2497417 - RNA, 19 nt, Artificial Sequence
  Description of Artificial Sequence: Synthetic oligonucleotide
  Antisense strand to SEQ ID NO: 2497416
uugggcauaaaucuguggc

SEQ ID NO: 2497418 - RNA, 19 nt, Artificial Sequence
  Description of Artificial Sequence: Synthetic oligonucleotide
  Sense strand starting at position 3686 of SEQ ID NO: 1887797
gggcauugcuguccaagag

SEQ ID NO: 2497419 - RNA, 19 nt, Artificial Sequence
  Description of Artificial Sequence: Synthetic oligonucleotide
  Antisense strand to SEQ ID NO: 2497418
cucuuggacagcaaugccc

SEQ ID NO: 2497420 - RNA, 19 nt, Artificial Sequence
  Description of Artificial Sequence: Synthetic oligonucleotide
  Sense strand starting at position 3701 of SEQ ID NO: 1887797
agagaacguggccaugaua

SEQ ID NO: 2497421 - RNA, 19 nt, Artificial Sequence
  Description of Artificial Sequence: Synthetic oligonucleotide
  Antisense strand to SEQ ID NO: 2497420
uaucauggccacguucucu

SEQ ID NO: 2497422 - RNA, 19 nt, Artificial Sequence
  Description of Artificial Sequence: Synthetic oligonucleotide
  Sense strand starting at position 3704 of SEQ ID NO: 1887797
gaacguggccaugauagaa

SEQ ID NO: 2497423 - RNA, 19 nt, Artificial Sequence
  Description of Artificial Sequence: Synthetic oligonucleotide
  Antisense strand to SEQ ID NO: 2497422
uucuaucauggccacguuc

SEQ ID NO: 2497424 - RNA, 19 nt, Artificial Sequence
  Description of Artificial Sequence: Synthetic oligonucleotide
  Sense strand starting at position 78 of SEQ ID NO: 1887798
acaugaugaucuggacuaa

SEQ ID NO: 2497425 - RNA, 19 nt, Artificial Sequence
  Description of Artificial Sequence: Synthetic oligonucleotide
  Antisense strand to SEQ ID NO: 2497424
uuaguccagaucaucaugu

SEQ ID NO: 2497426 - RNA, 19 nt, Artificial Sequence
  Description of Artificial Sequence: Synthetic oligonucleotide
  Sense strand starting at position 335 of SEQ ID NO: 1887798
gggugacccuucccaaaga

SEQ ID NO: 2497427 - RNA, 19 nt, Artificial Sequence
  Description of Artificial Sequence: Synthetic oligonucleotide
  Antisense strand to SEQ ID NO: 2497426
ucuuugggaagggucaccc

SEQ ID NO: 2497428 - RNA, 19 nt, Artificial Sequence
  Description of Artificial Sequence: Synthetic oligonucleotide
  Sense strand starting at position 670 of SEQ ID NO: 1887798
ccugaaacaucguaacaca

SEQ ID NO: 2497429 - RNA, 19 nt, Artificial Sequence
  Description of Artificial Sequence: Synthetic oligonucleotide
  Antisense strand to SEQ ID NO: 2497428
uguguuacgauguuucagg

SEQ ID NO: 2497430 - RNA, 19 nt, Artificial Sequence
  Description of Artificial Sequence: Synthetic oligonucleotide
  Sense strand starting at position 964 of SEQ ID NO: 1887798
ucuugaucuccugggcaag

SEQ ID NO: 2497431 - RNA, 19 nt, Artificial Sequence
  Description of Artificial Sequence: Synthetic oligonucleotide
  Antisense strand to SEQ ID NO: 2497430
cuugcccaggagaucaaga

SEQ ID NO: 2497432 - RNA, 19 nt, Artificial Sequence
  Description of Artificial Sequence: Synthetic oligonucleotide
  Sense strand starting at position 1058 of SEQ ID NO: 1887798
cugccuuucugagcaacuu

SEQ ID NO: 2497433 - RNA, 19 nt, Artificial Sequence
  Description of Artificial Sequence: Synthetic oligonucleotide
  Antisense strand to SEQ ID NO: 2497432
aaguugcucagaaaggcag

SEQ ID NO: 2497434 - RNA, 19 nt, Artificial Sequence
  Description of Artificial Sequence: Synthetic oligonucleotide
  Sense strand starting at position 1059 of SEQ ID NO: 1887798
ugccuuucugagcaacuua

SEQ ID NO: 2497435 - RNA, 19 nt, Artificial Sequence
  Description of Artificial Sequence: Synthetic oligonucleotide
  Antisense strand to SEQ ID NO: 2497434
uaaguugcucagaaaggca

SEQ ID NO: 2497436 - RNA, 19 nt, Artificial Sequence
  Description of Artificial Sequence: Synthetic oligonucleotide
  Sense strand starting at position 1084 of SEQ ID NO: 1887798
ucagacuguguugacaauu

SEQ ID NO: 2497437 - RNA, 19 nt, Artificial Sequence
  Description of Artificial Sequence: Synthetic oligonucleotide
  Antisense strand to SEQ ID NO: 2497436
aauugucaacacagucuga

SEQ ID NO: 2497438 - RNA, 19 nt, Artificial Sequence
  Description of Artificial Sequence: Synthetic oligonucleotide
  Sense strand starting at position 1160 of SEQ ID NO: 1887798
augagcaucuccugugaau

SEQ ID NO: 2497439 - RNA, 19 nt, Artificial Sequence
  Description of Artificial Sequence: Synthetic oligonucleotide
  Antisense strand to SEQ ID NO: 2497438
auucacaggagaugcucau

SEQ ID NO: 2497440 - RNA, 19 nt, Artificial Sequence
  Description of Artificial Sequence: Synthetic oligonucleotide
  Sense strand starting at position 1194 of SEQ ID NO: 1887798
ucacaaacuugucagauga

SEQ ID NO: 2497441 - RNA, 19 nt, Artificial Sequence
  Description of Artificial Sequence: Synthetic oligonucleotide
  Antisense strand to SEQ ID NO: 2497440
ucaucugacaaguuuguga

SEQ ID NO: 2497442 - RNA, 19 nt, Artificial Sequence
  Description of Artificial Sequence: Synthetic oligonucleotide
  Sense strand starting at position 1196 of SEQ ID NO: 1887798
acaaacuugucagaugaga

SEQ ID NO: 2497443 - RNA, 19 nt, Artificial Sequence
  Description of Artificial Sequence: Synthetic oligonucleotide
  Antisense strand to SEQ ID NO: 2497442
ucucaucugacaaguuugu

SEQ ID NO: 2497444 - RNA, 19 nt, Artificial Sequence
  Description of Artificial Sequence: Synthetic oligonucleotide
  Sense strand starting at position 1207 of SEQ ID NO: 1887798
agaugagauuacuguguac

SEQ ID NO: 2497445 - RNA, 19 nt, Artificial Sequence
  Description of Artificial Sequence: Synthetic oligonucleotide
  Antisense strand to SEQ ID NO: 2497444
guacacaguaaucucaucu

SEQ ID NO: 2497446 - RNA, 19 nt, Artificial Sequence
  Description of Artificial Sequence: Synthetic oligonucleotide
  Sense strand starting at position 1210 of SEQ ID NO: 1887798
ugagauuacuguguaccca

SEQ ID NO: 2497447 - RNA, 19 nt, Artificial Sequence
  Description of Artificial Sequence: Synthetic oligonucleotide
  Antisense strand to SEQ ID NO: 2497446
uggguacacaguaaucuca

SEQ ID NO: 2497448 - RNA, 19 nt, Artificial Sequence
  Description of Artificial Sequence: Synthetic oligonucleotide
  Sense strand starting at position 1211 of SEQ ID NO: 1887798
gagauuacuguguacccaa

SEQ ID NO: 2497449 - RNA, 19 nt, Artificial Sequence
  Description of Artificial Sequence: Synthetic oligonucleotide
  Antisense strand to SEQ ID NO: 2497448
uuggguacacaguaaucuc

SEQ ID NO: 2497450 - RNA, 19 nt, Artificial Sequence
  Description of Artificial Sequence: Synthetic oligonucleotide
  Sense strand starting at position 1517 of SEQ ID NO: 1887798
uccacuuggucaucuacua

SEQ ID NO: 2497451 - RNA, 19 nt, Artificial Sequence
  Description of Artificial Sequence: Synthetic oligonucleotide
  Antisense strand to SEQ ID NO: 2497450
uaguagaugaccaagugga

SEQ ID NO: 2497452 - RNA, 19 nt, Artificial Sequence
  Description of Artificial Sequence: Synthetic oligonucleotide
  Sense strand starting at position 1848 of SEQ ID NO: 1887798
ccggacuucucugugguga

SEQ ID NO: 2497453 - RNA, 19 nt, Artificial Sequence
  Description of Artificial Sequence: Synthetic oligonucleotide
  Antisense strand to SEQ ID NO: 2497452
ucaccacagagaaguccgg

SEQ ID NO: 2497454 - RNA, 19 nt, Artificial Sequence
  Description of Artificial Sequence: Synthetic oligonucleotide
  Sense strand starting at position 1850 of SEQ ID NO: 1887798
ggacuucucuguggugagu

SEQ ID NO: 2497455 - RNA, 19 nt, Artificial Sequence
  Description of Artificial Sequence: Synthetic oligonucleotide
  Antisense strand to SEQ ID NO: 2497454
acucaccacagagaagucc

SEQ ID NO: 2497456 - RNA, 19 nt, Artificial Sequence
  Description of Artificial Sequence: Synthetic oligonucleotide
  Sense strand starting at position 1861 of SEQ ID NO: 1887798
uggugaguuggacgacuga

SEQ ID NO: 2497457 - RNA, 19 nt, Artificial Sequence
  Description of Artificial Sequence: Synthetic oligonucleotide
  Antisense strand to SEQ ID NO: 2497456
ucagucguccaacucacca

SEQ ID NO: 2497458 - RNA, 19 nt, Artificial Sequence
  Description of Artificial Sequence: Synthetic oligonucleotide
  Sense strand starting at position 2259 of SEQ ID NO: 1887798
aguccuacuuaaggucuaa

SEQ ID NO: 2497459 - RNA, 19 nt, Artificial Sequence
  Description of Artificial Sequence: Synthetic oligonucleotide
  Antisense strand to SEQ ID NO: 2497458
uuagaccuuaaguaggacu

SEQ ID NO: 2497460 - RNA, 19 nt, Artificial Sequence
  Description of Artificial Sequence: Synthetic oligonucleotide
  Sense strand starting at position 2271 of SEQ ID NO: 1887798
ggucuaacccgagaugauc

SEQ ID NO: 2497461 - RNA, 19 nt, Artificial Sequence
  Description of Artificial Sequence: Synthetic oligonucleotide
  Antisense strand to SEQ ID NO: 2497460
gaucaucucggguuagacc

SEQ ID NO: 2497462 - RNA, 19 nt, Artificial Sequence
  Description of Artificial Sequence: Synthetic oligonucleotide
  Sense strand starting at position 2279 of SEQ ID NO: 1887798
ccgagaugaucuugcugca

SEQ ID NO: 2497463 - RNA, 19 nt, Artificial Sequence
  Description of Artificial Sequence: Synthetic oligonucleotide
  Antisense strand to SEQ ID NO: 2497462
ugcagcaagaucaucucgg

SEQ ID NO: 2497464 - RNA, 19 nt, Artificial Sequence
  Description of Artificial Sequence: Synthetic oligonucleotide
  Sense strand starting at position 2317 of SEQ ID NO: 1887798
guauucccauccuuugagu

SEQ ID NO: 2497465 - RNA, 19 nt, Artificial Sequence
  Description of Artificial Sequence: Synthetic oligonucleotide
  Antisense strand to SEQ ID NO: 2497464
acucaaaggaugggaauac

SEQ ID NO: 2497466 - RNA, 19 nt, Artificial Sequence
  Description of Artificial Sequence: Synthetic oligonucleotide
  Sense strand starting at position 2368 of SEQ ID NO: 1887798
gcccuucccugaccuagaa

SEQ ID NO: 2497467 - RNA, 19 nt, Artificial Sequence
  Description of Artificial Sequence: Synthetic oligonucleotide
  Antisense strand to SEQ ID NO: 2497466
uucuaggucagggaagggc

SEQ ID NO: 2497468 - RNA, 19 nt, Artificial Sequence
  Description of Artificial Sequence: Synthetic oligonucleotide
  Sense strand starting at position 2573 of SEQ ID NO: 1887798
uggcucugcuaguuacuaa

SEQ ID NO: 2497469 - RNA, 19 nt, Artificial Sequence
  Description of Artificial Sequence: Synthetic oligonucleotide
  Antisense strand to SEQ ID NO: 2497468
uuaguaacuagcagagcca

SEQ ID NO: 2497470 - RNA, 19 nt, Artificial Sequence
  Description of Artificial Sequence: Synthetic oligonucleotide
  Sense strand starting at position 2656 of SEQ ID NO: 1887798
gccuuacucuccuuaugga

SEQ ID NO: 2497471 - RNA, 19 nt, Artificial Sequence
  Description of Artificial Sequence: Synthetic oligonucleotide
  Antisense strand to SEQ ID NO: 2497470
uccauaaggagaguaaggc

SEQ ID NO: 2497472 - RNA, 19 nt, Artificial Sequence
  Description of Artificial Sequence: Synthetic oligonucleotide
  Sense strand starting at position 2739 of SEQ ID NO: 1887798
aacugcugaggucaauauu

SEQ ID NO: 2497473 - RNA, 19 nt, Artificial Sequence
  Description of Artificial Sequence: Synthetic oligonucleotide
  Antisense strand to SEQ ID NO: 2497472
aauauugaccucagcaguu

SEQ ID NO: 2497474 - RNA, 19 nt, Artificial Sequence
  Description of Artificial Sequence: Synthetic oligonucleotide
  Sense strand starting at position 2806 of SEQ ID NO: 1887798
gcauacauauugugugcaa

SEQ ID NO: 2497475 - RNA, 19 nt, Artificial Sequence
  Description of Artificial Sequence: Synthetic oligonucleotide
  Antisense strand to SEQ ID NO: 2497474
uugcacacaauauguaugc

SEQ ID NO: 2497476 - RNA, 19 nt, Artificial Sequence
  Description of Artificial Sequence: Synthetic oligonucleotide
  Sense strand starting at position 2936 of SEQ ID NO: 1887798
ccugcaguuggcugucaau

SEQ ID NO: 2497477 - RNA, 19 nt, Artificial Sequence
  Description of Artificial Sequence: Synthetic oligonucleotide
  Antisense strand to SEQ ID NO: 2497476
auugacagccaacugcagg

SEQ ID NO: 2497478 - RNA, 19 nt, Artificial Sequence
  Description of Artificial Sequence: Synthetic oligonucleotide
  Sense strand starting at position 3161 of SEQ ID NO: 1887798
uccucauacuguggaaaga

SEQ ID NO: 2497479 - RNA, 19 nt, Artificial Sequence
  Description of Artificial Sequence: Synthetic oligonucleotide
  Antisense strand to SEQ ID NO: 2497478
ucuuuccacaguaugagga

SEQ ID NO: 2497480 - RNA, 19 nt, Artificial Sequence
  Description of Artificial Sequence: Synthetic oligonucleotide
  Sense strand starting at position 100 of SEQ ID NO: 1887799
cuguaaaggcccuguaauu

SEQ ID NO: 2497481 - RNA, 19 nt, Artificial Sequence
  Description of Artificial Sequence: Synthetic oligonucleotide
  Antisense strand to SEQ ID NO: 2497480
aauuacagggccuuuacag

SEQ ID NO: 2497482 - RNA, 19 nt, Artificial Sequence
  Description of Artificial Sequence: Synthetic oligonucleotide
  Sense strand starting at position 219 of SEQ ID NO: 1887799
uggaguuccagaggauuau

SEQ ID NO: 2497483 - RNA, 19 nt, Artificial Sequence
  Description of Artificial Sequence: Synthetic oligonucleotide
  Antisense strand to SEQ ID NO: 2497482
auaauccucuggaacucca

SEQ ID NO: 2497484 - RNA, 19 nt, Artificial Sequence
  Description of Artificial Sequence: Synthetic oligonucleotide
  Sense strand starting at position 290 of SEQ ID NO: 1887799
gauaaaucaucugagguca

SEQ ID NO: 2497485 - RNA, 19 nt, Artificial Sequence
  Description of Artificial Sequence: Synthetic oligonucleotide
  Antisense strand to SEQ ID NO: 2497484
ugaccucagaugauuuauc

SEQ ID NO: 2497486 - RNA, 19 nt, Artificial Sequence
  Description of Artificial Sequence: Synthetic oligonucleotide
  Sense strand starting at position 601 of SEQ ID NO: 1887799
aaacacugugucugaaaug

SEQ ID NO: 2497487 - RNA, 19 nt, Artificial Sequence
  Description of Artificial Sequence: Synthetic oligonucleotide
  Antisense strand to SEQ ID NO: 2497486
cauuucagacacaguguuu

SEQ ID NO: 2497488 - RNA, 19 nt, Artificial Sequence
  Description of Artificial Sequence: Synthetic oligonucleotide
  Sense strand starting at position 661 of SEQ ID NO: 1887799
agaggaaguuguuuguccu

SEQ ID NO: 2497489 - RNA, 19 nt, Artificial Sequence
  Description of Artificial Sequence: Synthetic oligonucleotide
  Antisense strand to SEQ ID NO: 2497488
aggacaaacaacuuccucu

SEQ ID NO: 2497490 - RNA, 19 nt, Artificial Sequence
  Description of Artificial Sequence: Synthetic oligonucleotide
  Sense strand starting at position 664 of SEQ ID NO: 1887799
ggaaguuguuuguccucau

SEQ ID NO: 2497491 - RNA, 19 nt, Artificial Sequence
  Description of Artificial Sequence: Synthetic oligonucleotide
  Antisense strand to SEQ ID NO: 2497490
augaggacaaacaacuucc

SEQ ID NO: 2497492 - RNA, 19 nt, Artificial Sequence
  Description of Artificial Sequence: Synthetic oligonucleotide
  Sense strand starting at position 665 of SEQ ID NO: 1887799
gaaguuguuuguccucauu

SEQ ID NO: 2497493 - RNA, 19 nt, Artificial Sequence
  Description of Artificial Sequence: Synthetic oligonucleotide
  Antisense strand to SEQ ID NO: 2497492
aaugaggacaaacaacuuc

SEQ ID NO: 2497494 - RNA, 19 nt, Artificial Sequence
  Description of Artificial Sequence: Synthetic oligonucleotide
  Sense strand starting at position 667 of SEQ ID NO: 1887799
aguuguuuguccucauuuc

SEQ ID NO: 2497495 - RNA, 19 nt, Artificial Sequence
  Description of Artificial Sequence: Synthetic oligonucleotide
  Antisense strand to SEQ ID NO: 2497494
gaaaugaggacaaacaacu

SEQ ID NO: 2497496 - RNA, 19 nt, Artificial Sequence
  Description of Artificial Sequence: Synthetic oligonucleotide
  Sense strand starting at position 684 of SEQ ID NO: 1887799
uccuacauuugagaaugua

SEQ ID NO: 2497497 - RNA, 19 nt, Artificial Sequence
  Description of Artificial Sequence: Synthetic oligonucleotide
  Antisense strand to SEQ ID NO: 2497496
uacauucucaaauguagga

SEQ ID NO: 2497498 - RNA, 19 nt, Artificial Sequence
  Description of Artificial Sequence: Synthetic oligonucleotide
  Sense strand starting at position 692 of SEQ ID NO: 1887799
uugagaauguaggaaagaa

SEQ ID NO: 2497499 - RNA, 19 nt, Artificial Sequence
  Description of Artificial Sequence: Synthetic oligonucleotide
  Antisense strand to SEQ ID NO: 2497498
uucuuuccuacauucucaa

SEQ ID NO: 2497500 - RNA, 19 nt, Artificial Sequence
  Description of Artificial Sequence: Synthetic oligonucleotide
  Sense strand starting at position 775 of SEQ ID NO: 1887799
agaaguccugcuugccaua

SEQ ID NO: 2497501 - RNA, 19 nt, Artificial Sequence
  Description of Artificial Sequence: Synthetic oligonucleotide
  Antisense strand to SEQ ID NO: 2497500
uauggcaagcaggacuucu

SEQ ID NO: 2497502 - RNA, 19 nt, Artificial Sequence
  Description of Artificial Sequence: Synthetic oligonucleotide
  Sense strand starting at position 825 of SEQ ID NO: 1887799
ccuccuguggaguguuaaa

SEQ ID NO: 2497503 - RNA, 19 nt, Artificial Sequence
  Description of Artificial Sequence: Synthetic oligonucleotide
  Antisense strand to SEQ ID NO: 2497502
uuuaacacuccacaggagg

SEQ ID NO: 2497504 - RNA, 19 nt, Artificial Sequence
  Description of Artificial Sequence: Synthetic oligonucleotide
  Sense strand starting at position 920 of SEQ ID NO: 1887799
ucgaguuuauaucuuauag

SEQ ID NO: 2497505 - RNA, 19 nt, Artificial Sequence
  Description of Artificial Sequence: Synthetic oligonucleotide
  Antisense strand to SEQ ID NO: 2497504
cuauaagauauaaacucga

SEQ ID NO: 2497506 - RNA, 19 nt, Artificial Sequence
  Description of Artificial Sequence: Synthetic oligonucleotide
  Sense strand starting at position 1026 of SEQ ID NO: 1887799
ccaggaaauuuccaccugu

SEQ ID NO: 2497507 - RNA, 19 nt, Artificial Sequence
  Description of Artificial Sequence: Synthetic oligonucleotide
  Antisense strand to SEQ ID NO: 2497506
acagguggaaauuuccugg

SEQ ID NO: 2497508 - RNA, 19 nt, Artificial Sequence
  Description of Artificial Sequence: Synthetic oligonucleotide
  Sense strand starting at position 1180 of SEQ ID NO: 1887799
ccaaucacggcucaaauaa

SEQ ID NO: 2497509 - RNA, 19 nt, Artificial Sequence
  Description of Artificial Sequence: Synthetic oligonucleotide
  Antisense strand to SEQ ID NO: 2497508
uuauuugagccgugauugg

SEQ ID NO: 2497510 - RNA, 19 nt, Artificial Sequence
  Description of Artificial Sequence: Synthetic oligonucleotide
  Sense strand starting at position 1589 of SEQ ID NO: 1887799
ucgggauucugcucuuaug

SEQ ID NO: 2497511 - RNA, 19 nt, Artificial Sequence
  Description of Artificial Sequence: Synthetic oligonucleotide
  Antisense strand to SEQ ID NO: 2497510
cauaagagcagaaucccga

SEQ ID NO: 2497512 - RNA, 19 nt, Artificial Sequence
  Description of Artificial Sequence: Synthetic oligonucleotide
  Sense strand starting at position 1632 of SEQ ID NO: 1887799
cugggaaauacucgaggcu

SEQ ID NO: 2497513 - RNA, 19 nt, Artificial Sequence
  Description of Artificial Sequence: Synthetic oligonucleotide
  Antisense strand to SEQ ID NO: 2497512
agccucgaguauuucccag

SEQ ID NO: 2497514 - RNA, 19 nt, Artificial Sequence
  Description of Artificial Sequence: Synthetic oligonucleotide
  Sense strand starting at position 2192 of SEQ ID NO: 1887799
guaacaugcacagggaauu

SEQ ID NO: 2497515 - RNA, 19 nt, Artificial Sequence
  Description of Artificial Sequence: Synthetic oligonucleotide
  Antisense strand to SEQ ID NO: 2497514
aauucccugugcauguuac

SEQ ID NO: 2497516 - RNA, 19 nt, Artificial Sequence
  Description of Artificial Sequence: Synthetic oligonucleotide
  Sense strand starting at position 2223 of SEQ ID NO: 1887799
gaaguaagcugagacauga

SEQ ID NO: 2497517 - RNA, 19 nt, Artificial Sequence
  Description of Artificial Sequence: Synthetic oligonucleotide
  Antisense strand to SEQ ID NO: 2497516
ucaugucucagcuuacuuc

SEQ ID NO: 2497518 - RNA, 19 nt, Artificial Sequence
  Description of Artificial Sequence: Synthetic oligonucleotide
  Sense strand starting at position 2265 of SEQ ID NO: 1887799
cugggucuuguauaaugca

SEQ ID NO: 2497519 - RNA, 19 nt, Artificial Sequence
  Description of Artificial Sequence: Synthetic oligonucleotide
  Antisense strand to SEQ ID NO: 2497518
ugcauuauacaagacccag

SEQ ID NO: 2497520 - RNA, 19 nt, Artificial Sequence
  Description of Artificial Sequence: Synthetic oligonucleotide
  Sense strand starting at position 2763 of SEQ ID NO: 1887799
ccaggcugagaaugguuua

SEQ ID NO: 2497521 - RNA, 19 nt, Artificial Sequence
  Description of Artificial Sequence: Synthetic oligonucleotide
  Antisense strand to SEQ ID NO: 2497520
uaaaccauucucagccugg

SEQ ID NO: 2497522 - RNA, 19 nt, Artificial Sequence
  Description of Artificial Sequence: Synthetic oligonucleotide
  Sense strand starting at position 2766 of SEQ ID NO: 1887799
ggcugagaaugguuuagaa

SEQ ID NO: 2497523 - RNA, 19 nt, Artificial Sequence
  Description of Artificial Sequence: Synthetic oligonucleotide
  Antisense strand to SEQ ID NO: 2497522
uucuaaaccauucucagcc

SEQ ID NO: 2497524 - RNA, 19 nt, Artificial Sequence
  Description of Artificial Sequence: Synthetic oligonucleotide
  Sense strand starting at position 2770 of SEQ ID NO: 1887799
gagaaugguuuagaaagaa

SEQ ID NO: 2497525 - RNA, 19 nt, Artificial Sequence
  Description of Artificial Sequence: Synthetic oligonucleotide
  Antisense strand to SEQ ID NO: 2497524
uucuuucuaaaccauucuc

SEQ ID NO: 2497526 - RNA, 19 nt, Artificial Sequence
  Description of Artificial Sequence: Synthetic oligonucleotide
  Sense strand starting at position 3110 of SEQ ID NO: 1887799
agaauuacguuacccaaau

SEQ ID NO: 2497527 - RNA, 19 nt, Artificial Sequence
  Description of Artificial Sequence: Synthetic oligonucleotide
  Antisense strand to SEQ ID NO: 2497526
auuuggguaacguaauucu

SEQ ID NO: 2497528 - RNA, 19 nt, Artificial Sequence
  Description of Artificial Sequence: Synthetic oligonucleotide
  Sense strand starting at position 3139 of SEQ ID NO: 1887799
uagaaaggcuccucaguca

SEQ ID NO: 2497529 - RNA, 19 nt, Artificial Sequence
  Description of Artificial Sequence: Synthetic oligonucleotide
  Antisense strand to SEQ ID NO: 2497528
ugacugaggagccuuucua

SEQ ID NO: 2497530 - RNA, 19 nt, Artificial Sequence
  Description of Artificial Sequence: Synthetic oligonucleotide
  Sense strand starting at position 3151 of SEQ ID NO: 1887799
ucagucauuccaugugaag

SEQ ID NO: 2497531 - RNA, 19 nt, Artificial Sequence
  Description of Artificial Sequence: Synthetic oligonucleotide
  Antisense strand to SEQ ID NO: 2497530
cuucacauggaaugacuga

SEQ ID NO: 2497532 - RNA, 19 nt, Artificial Sequence
  Description of Artificial Sequence: Synthetic oligonucleotide
  Sense strand starting at position 3153 of SEQ ID NO: 1887799
agucauuccaugugaagug

SEQ ID NO: 2497533 - RNA, 19 nt, Artificial Sequence
  Description of Artificial Sequence: Synthetic oligonucleotide
  Antisense strand to SEQ ID NO: 2497532
cacuucacauggaaugacu

SEQ ID NO: 2497534 - RNA, 19 nt, Artificial Sequence
  Description of Artificial Sequence: Synthetic oligonucleotide
  Sense strand starting at position 3162 of SEQ ID NO: 1887799
augugaaguggcuauucca

SEQ ID NO: 2497535 - RNA, 19 nt, Artificial Sequence
  Description of Artificial Sequence: Synthetic oligonucleotide
  Antisense strand to SEQ ID NO: 2497534
uggaauagccacuucacau

SEQ ID NO: 2497536 - RNA, 19 nt, Artificial Sequence
  Description of Artificial Sequence: Synthetic oligonucleotide
  Sense strand starting at position 3170 of SEQ ID NO: 1887799
uggcuauuccaggguaauu

SEQ ID NO: 2497537 - RNA, 19 nt, Artificial Sequence
  Description of Artificial Sequence: Synthetic oligonucleotide
  Antisense strand to SEQ ID NO: 2497536
aauuacccuggaauagcca

SEQ ID NO: 2497538 - RNA, 19 nt, Artificial Sequence
  Description of Artificial Sequence: Synthetic oligonucleotide
  Sense strand starting at position 3172 of SEQ ID NO: 1887799
gcuauuccaggguaauugu

SEQ ID NO: 2497539 - RNA, 19 nt, Artificial Sequence
  Description of Artificial Sequence: Synthetic oligonucleotide
  Antisense strand to SEQ ID NO: 2497538
acaauuacccuggaauagc

SEQ ID NO: 2497540 - RNA, 19 nt, Artificial Sequence
  Description of Artificial Sequence: Synthetic oligonucleotide
  Sense strand starting at position 3287 of SEQ ID NO: 1887799
ccaacuguccuuuguggau

SEQ ID NO: 2497541 - RNA, 19 nt, Artificial Sequence
  Description of Artificial Sequence: Synthetic oligonucleotide
  Antisense strand to SEQ ID NO: 2497540
auccacaaaggacaguugg

SEQ ID NO: 2497542 - RNA, 19 nt, Artificial Sequence
  Description of Artificial Sequence: Synthetic oligonucleotide
  Sense strand starting at position 3296 of SEQ ID NO: 1887799
cuuuguggauguccugauu

SEQ ID NO: 2497543 - RNA, 19 nt, Artificial Sequence
  Description of Artificial Sequence: Synthetic oligonucleotide
  Antisense strand to SEQ ID NO: 2497542
aaucaggacauccacaaag

SEQ ID NO: 2497544 - RNA, 19 nt, Artificial Sequence
  Description of Artificial Sequence: Synthetic oligonucleotide
  Sense strand starting at position 3353 of SEQ ID NO: 1887799
aauauugggucacauuaga

SEQ ID NO: 2497545 - RNA, 19 nt, Artificial Sequence
  Description of Artificial Sequence: Synthetic oligonucleotide
  Antisense strand to SEQ ID NO: 2497544
ucuaaugugacccaauauu

SEQ ID NO: 2497546 - RNA, 19 nt, Artificial Sequence
  Description of Artificial Sequence: Synthetic oligonucleotide
  Sense strand starting at position 3454 of SEQ ID NO: 1887799
gauaguuuacagggcaaga

SEQ ID NO: 2497547 - RNA, 19 nt, Artificial Sequence
  Description of Artificial Sequence: Synthetic oligonucleotide
  Antisense strand to SEQ ID NO: 2497546
ucuugcccuguaaacuauc

SEQ ID NO: 2497548 - RNA, 19 nt, Artificial Sequence
  Description of Artificial Sequence: Synthetic oligonucleotide
  Sense strand starting at position 3503 of SEQ ID NO: 1887799
uuaauuuggucauaagugu

SEQ ID NO: 2497549 - RNA, 19 nt, Artificial Sequence
  Description of Artificial Sequence: Synthetic oligonucleotide
  Antisense strand to SEQ ID NO: 2497548
acacuuaugaccaaauuaa

SEQ ID NO: 2497550 - RNA, 19 nt, Artificial Sequence
  Description of Artificial Sequence: Synthetic oligonucleotide
  Sense strand starting at position 3595 of SEQ ID NO: 1887799
gcucauaauuugguuguaa

SEQ ID NO: 2497551 - RNA, 19 nt, Artificial Sequence
  Description of Artificial Sequence: Synthetic oligonucleotide
  Antisense strand to SEQ ID NO: 2497550
uuacaaccaaauuaugagc

SEQ ID NO: 2497552 - RNA, 19 nt, Artificial Sequence
  Description of Artificial Sequence: Synthetic oligonucleotide
  Sense strand starting at position 3599 of SEQ ID NO: 1887799
auaauuugguuguaacagu

SEQ ID NO: 2497553 - RNA, 19 nt, Artificial Sequence
  Description of Artificial Sequence: Synthetic oligonucleotide
  Antisense strand to SEQ ID NO: 2497552
acuguuacaaccaaauuau

SEQ ID NO: 2497554 - RNA, 19 nt, Artificial Sequence
  Description of Artificial Sequence: Synthetic oligonucleotide
  Sense strand starting at position 3629 of SEQ ID NO: 1887799
uauuguuggcuggguuuga

SEQ ID NO: 2497555 - RNA, 19 nt, Artificial Sequence
  Description of Artificial Sequence: Synthetic oligonucleotide
  Antisense strand to SEQ ID NO: 2497554
ucaaacccagccaacaaua

SEQ ID NO: 2497556 - RNA, 19 nt, Artificial Sequence
  Description of Artificial Sequence: Synthetic oligonucleotide
  Sense strand starting at position 3893 of SEQ ID NO: 1887799
gagugagaccucuaugugu

SEQ ID NO: 2497557 - RNA, 19 nt, Artificial Sequence
  Description of Artificial Sequence: Synthetic oligonucleotide
  Antisense strand to SEQ ID NO: 2497556
acacauagaggucucacuc

SEQ ID NO: 2497558 - RNA, 19 nt, Artificial Sequence
  Description of Artificial Sequence: Synthetic oligonucleotide
  Sense strand starting at position 3895 of SEQ ID NO: 1887799
gugagaccucuauguguac

SEQ ID NO: 2497559 - RNA, 19 nt, Artificial Sequence
  Description of Artificial Sequence: Synthetic oligonucleotide
  Antisense strand to SEQ ID NO: 2497558
guacacauagaggucucac

SEQ ID NO: 2497560 - RNA, 19 nt, Artificial Sequence
  Description of Artificial Sequence: Synthetic oligonucleotide
  Sense strand starting at position 66 of SEQ ID NO: 1887800
accucagucuccugacaag

SEQ ID NO: 2497561 - RNA, 19 nt, Artificial Sequence
  Description of Artificial Sequence: Synthetic oligonucleotide
  Antisense strand to SEQ ID NO: 2497560
cuugucaggagacugaggu

SEQ ID NO: 2497562 - RNA, 19 nt, Artificial Sequence
  Description of Artificial Sequence: Synthetic oligonucleotide
  Sense strand starting at position 438 of SEQ ID NO: 1887800
aaauuagucggaugaugug

SEQ ID NO: 2497563 - RNA, 19 nt, Artificial Sequence
  Description of Artificial Sequence: Synthetic oligonucleotide
  Antisense strand to SEQ ID NO: 2497562
cacaucauccgacuaauuu

SEQ ID NO: 2497564 - RNA, 19 nt, Artificial Sequence
  Description of Artificial Sequence: Synthetic oligonucleotide
  Sense strand starting at position 499 of SEQ ID NO: 1887800
gggaauaucccuugagccu

SEQ ID NO: 2497565 - RNA, 19 nt, Artificial Sequence
  Description of Artificial Sequence: Synthetic oligonucleotide
  Antisense strand to SEQ ID NO: 2497564
aggcucaagggauauuccc

SEQ ID NO: 2497566 - RNA, 19 nt, Artificial Sequence
  Description of Artificial Sequence: Synthetic oligonucleotide
  Sense strand starting at position 500 of SEQ ID NO: 1887800
ggaauaucccuugagccuu

SEQ ID NO: 2497567 - RNA, 19 nt, Artificial Sequence
  Description of Artificial Sequence: Synthetic oligonucleotide
  Antisense strand to SEQ ID NO: 2497566
aaggcucaagggauauucc

SEQ ID NO: 2497568 - RNA, 19 nt, Artificial Sequence
  Description of Artificial Sequence: Synthetic oligonucleotide
  Sense strand starting at position 1278 of SEQ ID NO: 1887800
cuccgagccucucaagauu

SEQ ID NO: 2497569 - RNA, 19 nt, Artificial Sequence
  Description of Artificial Sequence: Synthetic oligonucleotide
  Antisense strand to SEQ ID NO: 2497568
aaucuugagaggcucggag

SEQ ID NO: 2497570 - RNA, 19 nt, Artificial Sequence
  Description of Artificial Sequence: Synthetic oligonucleotide
  Sense strand starting at position 1292 of SEQ ID NO: 1887800
agauucccauuugagauaa

SEQ ID NO: 2497571 - RNA, 19 nt, Artificial Sequence
  Description of Artificial Sequence: Synthetic oligonucleotide
  Antisense strand to SEQ ID NO: 2497570
uuaucucaaaugggaaucu

SEQ ID NO: 2497572 - RNA, 19 nt, Artificial Sequence
  Description of Artificial Sequence: Synthetic oligonucleotide
  Sense strand starting at position 1303 of SEQ ID NO: 1887800
ugagauaacuugcuccaaa

SEQ ID NO: 2497573 - RNA, 19 nt, Artificial Sequence
  Description of Artificial Sequence: Synthetic oligonucleotide
  Antisense strand to SEQ ID NO: 2497572
uuuggagcaaguuaucuca

SEQ ID NO: 2497574 - RNA, 19 nt, Artificial Sequence
  Description of Artificial Sequence: Synthetic oligonucleotide
  Sense strand starting at position 1438 of SEQ ID NO: 1887800
gucccauacccucgaauga

SEQ ID NO: 2497575 - RNA, 19 nt, Artificial Sequence
  Description of Artificial Sequence: Synthetic oligonucleotide
  Antisense strand to SEQ ID NO: 2497574
ucauucgaggguaugggac

SEQ ID NO: 2497576 - RNA, 19 nt, Artificial Sequence
  Description of Artificial Sequence: Synthetic oligonucleotide
  Sense strand starting at position 2208 of SEQ ID NO: 1887800
ucacuuauguggcacuuaa

SEQ ID NO: 2497577 - RNA, 19 nt, Artificial Sequence
  Description of Artificial Sequence: Synthetic oligonucleotide
  Antisense strand to SEQ ID NO: 2497576
uuaagugccacauaaguga

SEQ ID NO: 2497578 - RNA, 19 nt, Artificial Sequence
  Description of Artificial Sequence: Synthetic oligonucleotide
  Sense strand starting at position 2263 of SEQ ID NO: 1887800
cagcaauagggauguugua

SEQ ID NO: 2497579 - RNA, 19 nt, Artificial Sequence
  Description of Artificial Sequence: Synthetic oligonucleotide
  Antisense strand to SEQ ID NO: 2497578
uacaacaucccuauugcug

SEQ ID NO: 2497580 - RNA, 19 nt, Artificial Sequence
  Description of Artificial Sequence: Synthetic oligonucleotide
  Sense strand starting at position 2286 of SEQ ID NO: 1887800
aacgguauugagugaaauc

SEQ ID NO: 2497581 - RNA, 19 nt, Artificial Sequence
  Description of Artificial Sequence: Synthetic oligonucleotide
  Antisense strand to SEQ ID NO: 2497580
gauuucacucaauaccguu

SEQ ID NO: 2497582 - RNA, 19 nt, Artificial Sequence
  Description of Artificial Sequence: Synthetic oligonucleotide
  Sense strand starting at position 2364 of SEQ ID NO: 1887800
auauaaacccagcgaugau

SEQ ID NO: 2497583 - RNA, 19 nt, Artificial Sequence
  Description of Artificial Sequence: Synthetic oligonucleotide
  Antisense strand to SEQ ID NO: 2497582
aucaucgcuggguuuauau

SEQ ID NO: 2497584 - RNA, 19 nt, Artificial Sequence
  Description of Artificial Sequence: Synthetic oligonucleotide
  Sense strand starting at position 2443 of SEQ ID NO: 1887800
gaaggcuuaucagagguga

SEQ ID NO: 2497585 - RNA, 19 nt, Artificial Sequence
  Description of Artificial Sequence: Synthetic oligonucleotide
  Antisense strand to SEQ ID NO: 2497584
ucaccucugauaagccuuc

SEQ ID NO: 2497586 - RNA, 19 nt, Artificial Sequence
  Description of Artificial Sequence: Synthetic oligonucleotide
  Sense strand starting at position 2445 of SEQ ID NO: 1887800
aggcuuaucagaggugaca

SEQ ID NO: 2497587 - RNA, 19 nt, Artificial Sequence
  Description of Artificial Sequence: Synthetic oligonucleotide
  Antisense strand to SEQ ID NO: 2497586
ugucaccucugauaagccu

SEQ ID NO: 2497588 - RNA, 19 nt, Artificial Sequence
  Description of Artificial Sequence: Synthetic oligonucleotide
  Sense strand starting at position 2447 of SEQ ID NO: 1887800
gcuuaucagaggugacauu

SEQ ID NO: 2497589 - RNA, 19 nt, Artificial Sequence
  Description of Artificial Sequence: Synthetic oligonucleotide
  Antisense strand to SEQ ID NO: 2497588
aaugucaccucugauaagc

SEQ ID NO: 2497590 - RNA, 19 nt, Artificial Sequence
  Description of Artificial Sequence: Synthetic oligonucleotide
  Sense strand starting at position 2620 of SEQ ID NO: 1887800
ccuacuauguguugcacuu

SEQ ID NO: 2497591 - RNA, 19 nt, Artificial Sequence
  Description of Artificial Sequence: Synthetic oligonucleotide
  Antisense strand to SEQ ID NO: 2497590
aagugcaacacauaguagg

SEQ ID NO: 2497592 - RNA, 19 nt, Artificial Sequence
  Description of Artificial Sequence: Synthetic oligonucleotide
  Sense strand starting at position 2794 of SEQ ID NO: 1887800
gcaggcagauuacuuuaaa

SEQ ID NO: 2497593 - RNA, 19 nt, Artificial Sequence
  Description of Artificial Sequence: Synthetic oligonucleotide
  Antisense strand to SEQ ID NO: 2497592
uuuaaaguaaucugccugc

SEQ ID NO: 2497594 - RNA, 19 nt, Artificial Sequence
  Description of Artificial Sequence: Synthetic oligonucleotide
  Sense strand starting at position 2929 of SEQ ID NO: 1887800
guaggauaauugcuugaau

SEQ ID NO: 2497595 - RNA, 19 nt, Artificial Sequence
  Description of Artificial Sequence: Synthetic oligonucleotide
  Antisense strand to SEQ ID NO: 2497594
auucaagcaauuauccuac

SEQ ID NO: 2497596 - RNA, 19 nt, Artificial Sequence
  Description of Artificial Sequence: Synthetic oligonucleotide
  Sense strand starting at position 3144 of SEQ ID NO: 1887800
gggaaacgcuaucucuauu

SEQ ID NO: 2497597 - RNA, 19 nt, Artificial Sequence
  Description of Artificial Sequence: Synthetic oligonucleotide
  Antisense strand to SEQ ID NO: 2497596
aauagagauagcguuuccc

SEQ ID NO: 2497598 - RNA, 19 nt, Artificial Sequence
  Description of Artificial Sequence: Synthetic oligonucleotide
  Sense strand starting at position 3234 of SEQ ID NO: 1887800
aaggauuucugauguuaga

SEQ ID NO: 2497599 - RNA, 19 nt, Artificial Sequence
  Description of Artificial Sequence: Synthetic oligonucleotide
  Antisense strand to SEQ ID NO: 2497598
ucuaacaucagaaauccuu

SEQ ID NO: 2497600 - RNA, 19 nt, Artificial Sequence
  Description of Artificial Sequence: Synthetic oligonucleotide
  Sense strand starting at position 3526 of SEQ ID NO: 1887800
gacagagacucccgucuaa

SEQ ID NO: 2497601 - RNA, 19 nt, Artificial Sequence
  Description of Artificial Sequence: Synthetic oligonucleotide
  Antisense strand to SEQ ID NO: 2497600
uuagacgggagucucuguc

SEQ ID NO: 2497602 - RNA, 19 nt, Artificial Sequence
  Description of Artificial Sequence: Synthetic oligonucleotide
  Sense strand starting at position 7 of SEQ ID NO: 1887801
ugggaagucucagucacca

SEQ ID NO: 2497603 - RNA, 19 nt, Artificial Sequence
  Description of Artificial Sequence: Synthetic oligonucleotide
  Antisense strand to SEQ ID NO: 2497602
uggugacugagacuuccca

SEQ ID NO: 2497604 - RNA, 19 nt, Artificial Sequence
  Description of Artificial Sequence: Synthetic oligonucleotide
  Sense strand starting at position 34 of SEQ ID NO: 1887801
ggaagaucacagcagcuuu

SEQ ID NO: 2497605 - RNA, 19 nt, Artificial Sequence
  Description of Artificial Sequence: Synthetic oligonucleotide
  Antisense strand to SEQ ID NO: 2497604
aaagcugcugugaucuucc

SEQ ID NO: 2497606 - RNA, 19 nt, Artificial Sequence
  Description of Artificial Sequence: Synthetic oligonucleotide
  Sense strand starting at position 183 of SEQ ID NO: 1887801
gguaaauauguagaucagu

SEQ ID NO: 2497607 - RNA, 19 nt, Artificial Sequence
  Description of Artificial Sequence: Synthetic oligonucleotide
  Antisense strand to SEQ ID NO: 2497606
acugaucuacauauuuacc

SEQ ID NO: 2497608 - RNA, 19 nt, Artificial Sequence
  Description of Artificial Sequence: Synthetic oligonucleotide
  Sense strand starting at position 203 of SEQ ID NO: 1887801
ggcuuccugccuuaucuga

SEQ ID NO: 2497609 - RNA, 19 nt, Artificial Sequence
  Description of Artificial Sequence: Synthetic oligonucleotide
  Antisense strand to SEQ ID NO: 2497608
ucagauaaggcaggaagcc

SEQ ID NO: 2497610 - RNA, 19 nt, Artificial Sequence
  Description of Artificial Sequence: Synthetic oligonucleotide
  Sense strand starting at position 210 of SEQ ID NO: 1887801
ugccuuaucugaguaaaga

SEQ ID NO: 2497611 - RNA, 19 nt, Artificial Sequence
  Description of Artificial Sequence: Synthetic oligonucleotide
  Antisense strand to SEQ ID NO: 2497610
ucuuuacucagauaaggca

SEQ ID NO: 2497612 - RNA, 19 nt, Artificial Sequence
  Description of Artificial Sequence: Synthetic oligonucleotide
  Sense strand starting at position 211 of SEQ ID NO: 1887801
gccuuaucugaguaaagag

SEQ ID NO: 2497613 - RNA, 19 nt, Artificial Sequence
  Description of Artificial Sequence: Synthetic oligonucleotide
  Antisense strand to SEQ ID NO: 2497612
cucuuuacucagauaaggc

SEQ ID NO: 2497614 - RNA, 19 nt, Artificial Sequence
  Description of Artificial Sequence: Synthetic oligonucleotide
  Sense strand starting at position 277 of SEQ ID NO: 1887801
gugacucuggccgagacaa

SEQ ID NO: 2497615 - RNA, 19 nt, Artificial Sequence
  Description of Artificial Sequence: Synthetic oligonucleotide
  Antisense strand to SEQ ID NO: 2497614
uugucucggccagagucac

SEQ ID NO: 2497616 - RNA, 19 nt, Artificial Sequence
  Description of Artificial Sequence: Synthetic oligonucleotide
  Sense strand starting at position 313 of SEQ ID NO: 1887801
caggguuucucaucaggaa

SEQ ID NO: 2497617 - RNA, 19 nt, Artificial Sequence
  Description of Artificial Sequence: Synthetic oligonucleotide
  Antisense strand to SEQ ID NO: 2497616
uuccugaugagaaacccug

SEQ ID NO: 2497618 - RNA, 19 nt, Artificial Sequence
  Description of Artificial Sequence: Synthetic oligonucleotide
  Sense strand starting at position 375 of SEQ ID NO: 1887801
auaauaaagcccugugauc

SEQ ID NO: 2497619 - RNA, 19 nt, Artificial Sequence
  Description of Artificial Sequence: Synthetic oligonucleotide
  Antisense strand to SEQ ID NO: 2497618
gaucacagggcuuuauuau

SEQ ID NO: 2497620 - RNA, 19 nt, Artificial Sequence
  Description of Artificial Sequence: Synthetic oligonucleotide
  Sense strand starting at position 844 of SEQ ID NO: 1887801
ggucuccuaugcccaagau

SEQ ID NO: 2497621 - RNA, 19 nt, Artificial Sequence
  Description of Artificial Sequence: Synthetic oligonucleotide
  Antisense strand to SEQ ID NO: 2497620
aucuugggcauaggagacc

SEQ ID NO: 2497622 - RNA, 19 nt, Artificial Sequence
  Description of Artificial Sequence: Synthetic oligonucleotide
  Sense strand starting at position 1105 of SEQ ID NO: 1887801
ucccuuugaguauguccua

SEQ ID NO: 2497623 - RNA, 19 nt, Artificial Sequence
  Description of Artificial Sequence: Synthetic oligonucleotide
  Antisense strand to SEQ ID NO: 2497622
uaggacauacucaaaggga

SEQ ID NO: 2497624 - RNA, 19 nt, Artificial Sequence
  Description of Artificial Sequence: Synthetic oligonucleotide
  Sense strand starting at position 1123 of SEQ ID NO: 1887801
acggguguuuccuuuguaa

SEQ ID NO: 2497625 - RNA, 19 nt, Artificial Sequence
  Description of Artificial Sequence: Synthetic oligonucleotide
  Antisense strand to SEQ ID NO: 2497624
uuacaaaggaaacacccgu

SEQ ID NO: 2497626 - RNA, 19 nt, Artificial Sequence
  Description of Artificial Sequence: Synthetic oligonucleotide
  Sense strand starting at position 1125 of SEQ ID NO: 1887801
ggguguuuccuuuguaaau

SEQ ID NO: 2497627 - RNA, 19 nt, Artificial Sequence
  Description of Artificial Sequence: Synthetic oligonucleotide
  Antisense strand to SEQ ID NO: 2497626
auuuacaaaggaaacaccc

SEQ ID NO: 2497628 - RNA, 19 nt, Artificial Sequence
  Description of Artificial Sequence: Synthetic oligonucleotide
  Sense strand starting at position 1126 of SEQ ID NO: 1887801
gguguuuccuuuguaaauc

SEQ ID NO: 2497629 - RNA, 19 nt, Artificial Sequence
  Description of Artificial Sequence: Synthetic oligonucleotide
  Antisense strand to SEQ ID NO: 2497628
gauuuacaaaggaaacacc

SEQ ID NO: 2497630 - RNA, 19 nt, Artificial Sequence
  Description of Artificial Sequence: Synthetic oligonucleotide
  Sense strand starting at position 1357 of SEQ ID NO: 1887801
ggagaacccuccucucagu

SEQ ID NO: 2497631 - RNA, 19 nt, Artificial Sequence
  Description of Artificial Sequence: Synthetic oligonucleotide
  Antisense strand to SEQ ID NO: 2497630
acugagaggaggguucucc

SEQ ID NO: 2497632 - RNA, 19 nt, Artificial Sequence
  Description of Artificial Sequence: Synthetic oligonucleotide
  Sense strand starting at position 2145 of SEQ ID NO: 1887801
gcguccuugcugcuaagua

SEQ ID NO: 2497633 - RNA, 19 nt, Artificial Sequence
  Description of Artificial Sequence: Synthetic oligonucleotide
  Antisense strand to SEQ ID NO: 2497632
uacuuagcagcaaggacgc

SEQ ID NO: 2497634 - RNA, 19 nt, Artificial Sequence
  Description of Artificial Sequence: Synthetic oligonucleotide
  Sense strand starting at position 2213 of SEQ ID NO: 1887801
ggaggaaacgagugcguuu

SEQ ID NO: 2497635 - RNA, 19 nt, Artificial Sequence
  Description of Artificial Sequence: Synthetic oligonucleotide
  Antisense strand to SEQ ID NO: 2497634
aaacgcacucguuuccucc

SEQ ID NO: 2497636 - RNA, 19 nt, Artificial Sequence
  Description of Artificial Sequence: Synthetic oligonucleotide
  Sense strand starting at position 2846 of SEQ ID NO: 1887801
aguuuccuccuccggagaa

SEQ ID NO: 2497637 - RNA, 19 nt, Artificial Sequence
  Description of Artificial Sequence: Synthetic oligonucleotide
  Antisense strand to SEQ ID NO: 2497636
uucuccggaggaggaaacu

SEQ ID NO: 2497638 - RNA, 19 nt, Artificial Sequence
  Description of Artificial Sequence: Synthetic oligonucleotide
  Sense strand starting at position 2998 of SEQ ID NO: 1887801
uugggucugccugagacau

SEQ ID NO: 2497639 - RNA, 19 nt, Artificial Sequence
  Description of Artificial Sequence: Synthetic oligonucleotide
  Antisense strand to SEQ ID NO: 2497638
augucucaggcagacccaa

SEQ ID NO: 2497640 - RNA, 19 nt, Artificial Sequence
  Description of Artificial Sequence: Synthetic oligonucleotide
  Sense strand starting at position 3130 of SEQ ID NO: 1887801
ggaauugucuguuuccgca

SEQ ID NO: 2497641 - RNA, 19 nt, Artificial Sequence
  Description of Artificial Sequence: Synthetic oligonucleotide
  Antisense strand to SEQ ID NO: 2497640
ugcggaaacagacaauucc

SEQ ID NO: 2497642 - RNA, 19 nt, Artificial Sequence
  Description of Artificial Sequence: Synthetic oligonucleotide
  Sense strand starting at position 3563 of SEQ ID NO: 1887801
ggagguuguuacuuguaag

SEQ ID NO: 2497643 - RNA, 19 nt, Artificial Sequence
  Description of Artificial Sequence: Synthetic oligonucleotide
  Antisense strand to SEQ ID NO: 2497642
cuuacaaguaacaaccucc

SEQ ID NO: 2497644 - RNA, 19 nt, Artificial Sequence
  Description of Artificial Sequence: Synthetic oligonucleotide
  Sense strand starting at position 3564 of SEQ ID NO: 1887801
gagguuguuacuuguaagg

SEQ ID NO: 2497645 - RNA, 19 nt, Artificial Sequence
  Description of Artificial Sequence: Synthetic oligonucleotide
  Antisense strand to SEQ ID NO: 2497644
ccuuacaaguaacaaccuc

SEQ ID NO: 2497646 - RNA, 19 nt, Artificial Sequence
  Description of Artificial Sequence: Synthetic oligonucleotide
  Sense strand starting at position 3570 of SEQ ID NO: 1887801
guuacuuguaaggaacagu

SEQ ID NO: 2497647 - RNA, 19 nt, Artificial Sequence
  Description of Artificial Sequence: Synthetic oligonucleotide
  Antisense strand to SEQ ID NO: 2497646
acuguuccuuacaaguaac

SEQ ID NO: 2497648 - RNA, 19 nt, Artificial Sequence
  Description of Artificial Sequence: Synthetic oligonucleotide
  Sense strand starting at position 3630 of SEQ ID NO: 1887801
ucccuaauaggcgguuaaa

SEQ ID NO: 2497649 - RNA, 19 nt, Artificial Sequence
  Description of Artificial Sequence: Synthetic oligonucleotide
  Antisense strand to SEQ ID NO: 2497648
uuuaaccgccuauuaggga

SEQ ID NO: 2497650 - RNA, 19 nt, Artificial Sequence
  Description of Artificial Sequence: Synthetic oligonucleotide
  Sense strand starting at position 3633 of SEQ ID NO: 1887801
cuaauaggcgguuaaagaa

SEQ ID NO: 2497651 - RNA, 19 nt, Artificial Sequence
  Description of Artificial Sequence: Synthetic oligonucleotide
  Antisense strand to SEQ ID NO: 2497650
uucuuuaaccgccuauuag

SEQ ID NO: 2497652 - RNA, 19 nt, Artificial Sequence
  Description of Artificial Sequence: Synthetic oligonucleotide
  Sense strand starting at position 3669 of SEQ ID NO: 1887801
ugaaauuggcaucgaguua

SEQ ID NO: 2497653 - RNA, 19 nt, Artificial Sequence
  Description of Artificial Sequence: Synthetic oligonucleotide
  Antisense strand to SEQ ID NO: 2497652
uaacucgaugccaauuuca

SEQ ID NO: 2497654 - RNA, 19 nt, Artificial Sequence
  Description of Artificial Sequence: Synthetic oligonucleotide
  Sense strand starting at position 3670 of SEQ ID NO: 1887801
gaaauuggcaucgaguuag

SEQ ID NO: 2497655 - RNA, 19 nt, Artificial Sequence
  Description of Artificial Sequence: Synthetic oligonucleotide
  Antisense strand to SEQ ID NO: 2497654
cuaacucgaugccaauuuc

SEQ ID NO: 2497656 - RNA, 19 nt, Artificial Sequence
  Description of Artificial Sequence: Synthetic oligonucleotide
  Sense strand starting at position 3702 of SEQ ID NO: 1887801
gaagucagccaagagaugu

SEQ ID NO: 2497657 - RNA, 19 nt, Artificial Sequence
  Description of Artificial Sequence: Synthetic oligonucleotide
  Antisense strand to SEQ ID NO: 2497656
acaucucuuggcugacuuc

SEQ ID NO: 2497658 - RNA, 19 nt, Artificial Sequence
  Description of Artificial Sequence: Synthetic oligonucleotide
  Sense strand starting at position 3706 of SEQ ID NO: 1887801
ucagccaagagauguguua

SEQ ID NO: 2497659 - RNA, 19 nt, Artificial Sequence
  Description of Artificial Sequence: Synthetic oligonucleotide
  Antisense strand to SEQ ID NO: 2497658
uaacacaucucuuggcuga

SEQ ID NO: 2497660 - RNA, 19 nt, Artificial Sequence
  Description of Artificial Sequence: Synthetic oligonucleotide
  Sense strand starting at position 3708 of SEQ ID NO: 1887801
agccaagagauguguuaaa

SEQ ID NO: 2497661 - RNA, 19 nt, Artificial Sequence
  Description of Artificial Sequence: Synthetic oligonucleotide
  Antisense strand to SEQ ID NO: 2497660
uuuaacacaucucuuggcu

SEQ ID NO: 2497662 - RNA, 19 nt, Artificial Sequence
  Description of Artificial Sequence: Synthetic oligonucleotide
  Sense strand starting at position 3717 of SEQ ID NO: 1887801
auguguuaaagguauugua

SEQ ID NO: 2497663 - RNA, 19 nt, Artificial Sequence
  Description of Artificial Sequence: Synthetic oligonucleotide
  Antisense strand to SEQ ID NO: 2497662
uacaauaccuuuaacacau

SEQ ID NO: 2497664 - RNA, 19 nt, Artificial Sequence
  Description of Artificial Sequence: Synthetic oligonucleotide
  Sense strand starting at position 3749 of SEQ ID NO: 1887801
gggcuugaguguucagaga

SEQ ID NO: 2497665 - RNA, 19 nt, Artificial Sequence
  Description of Artificial Sequence: Synthetic oligonucleotide
  Antisense strand to SEQ ID NO: 2497664
ucucugaacacucaagccc

SEQ ID NO: 2497666 - RNA, 19 nt, Artificial Sequence
  Description of Artificial Sequence: Synthetic oligonucleotide
  Sense strand starting at position 3772 of SEQ ID NO: 1887801
agagaaaugguguguagug

SEQ ID NO: 2497667 - RNA, 19 nt, Artificial Sequence
  Description of Artificial Sequence: Synthetic oligonucleotide
  Antisense strand to SEQ ID NO: 2497666
cacuacacaccauuucucu

SEQ ID NO: 2497668 - RNA, 19 nt, Artificial Sequence
  Description of Artificial Sequence: Synthetic oligonucleotide
  Sense strand starting at position 3773 of SEQ ID NO: 1887801
gagaaaugguguguagugu

SEQ ID NO: 2497669 - RNA, 19 nt, Artificial Sequence
  Description of Artificial Sequence: Synthetic oligonucleotide
  Antisense strand to SEQ ID NO: 2497668
acacuacacaccauuucuc

SEQ ID NO: 2497670 - RNA, 19 nt, Artificial Sequence
  Description of Artificial Sequence: Synthetic oligonucleotide
  Sense strand starting at position 3801 of SEQ ID NO: 1887801
gccuucuaggcugggagaa

SEQ ID NO: 2497671 - RNA, 19 nt, Artificial Sequence
  Description of Artificial Sequence: Synthetic oligonucleotide
  Antisense strand to SEQ ID NO: 2497670
uucucccagccuagaaggc

SEQ ID NO: 2497672 - RNA, 19 nt, Artificial Sequence
  Description of Artificial Sequence: Synthetic oligonucleotide
  Sense strand starting at position 3802 of SEQ ID NO: 1887801
ccuucuaggcugggagaau

SEQ ID NO: 2497673 - RNA, 19 nt, Artificial Sequence
  Description of Artificial Sequence: Synthetic oligonucleotide
  Antisense strand to SEQ ID NO: 2497672
auucucccagccuagaagg

SEQ ID NO: 2497674 - RNA, 19 nt, Artificial Sequence
  Description of Artificial Sequence: Synthetic oligonucleotide
  Sense strand starting at position 3815 of SEQ ID NO: 1887801
gagaauuucucugguacuc

SEQ ID NO: 2497675 - RNA, 19 nt, Artificial Sequence
  Description of Artificial Sequence: Synthetic oligonucleotide
  Antisense strand to SEQ ID NO: 2497674
gaguaccagagaaauucuc

SEQ ID NO: 2497676 - RNA, 19 nt, Artificial Sequence
  Description of Artificial Sequence: Synthetic oligonucleotide
  Sense strand starting at position 3835 of SEQ ID NO: 1887801
gugucccuccacuaagagu

SEQ ID NO: 2497677 - RNA, 19 nt, Artificial Sequence
  Description of Artificial Sequence: Synthetic oligonucleotide
  Antisense strand to SEQ ID NO: 2497676
acucuuaguggagggacac

SEQ ID NO: 2497678 - RNA, 19 nt, Artificial Sequence
  Description of Artificial Sequence: Synthetic oligonucleotide
  Sense strand starting at position 3959 of SEQ ID NO: 1887801
agcuucugccauugggauu

SEQ ID NO: 2497679 - RNA, 19 nt, Artificial Sequence
  Description of Artificial Sequence: Synthetic oligonucleotide
  Antisense strand to SEQ ID NO: 2497678
aaucccaauggcagaagcu

SEQ ID NO: 2497680 - RNA, 19 nt, Artificial Sequence
  Description of Artificial Sequence: Synthetic oligonucleotide
  Sense strand starting at position 3960 of SEQ ID NO: 1887801
gcuucugccauugggauua

SEQ ID NO: 2497681 - RNA, 19 nt, Artificial Sequence
  Description of Artificial Sequence: Synthetic oligonucleotide
  Antisense strand to SEQ ID NO: 2497680
uaaucccaauggcagaagc

SEQ ID NO: 2497682 - RNA, 19 nt, Artificial Sequence
  Description of Artificial Sequence: Synthetic oligonucleotide
  Sense strand starting at position 65 of SEQ ID NO: 1887802
caggaaagcccuugucuga

SEQ ID NO: 2497683 - RNA, 19 nt, Artificial Sequence
  Description of Artificial Sequence: Synthetic oligonucleotide
  Antisense strand to SEQ ID NO: 2497682
ucagacaagggcuuuccug

SEQ ID NO: 2497684 - RNA, 19 nt, Artificial Sequence
  Description of Artificial Sequence: Synthetic oligonucleotide
  Sense strand starting at position 360 of SEQ ID NO: 1887802
uucccagucuucccugauu

SEQ ID NO: 2497685 - RNA, 19 nt, Artificial Sequence
  Description of Artificial Sequence: Synthetic oligonucleotide
  Antisense strand to SEQ ID NO: 2497684
aaucagggaagacugggaa

SEQ ID NO: 2497686 - RNA, 19 nt, Artificial Sequence
  Description of Artificial Sequence: Synthetic oligonucleotide
  Sense strand starting at position 362 of SEQ ID NO: 1887802
cccagucuucccugauuuc

SEQ ID NO: 2497687 - RNA, 19 nt, Artificial Sequence
  Description of Artificial Sequence: Synthetic oligonucleotide
  Antisense strand to SEQ ID NO: 2497686
gaaaucagggaagacuggg

SEQ ID NO: 2497688 - RNA, 19 nt, Artificial Sequence
  Description of Artificial Sequence: Synthetic oligonucleotide
  Sense strand starting at position 369 of SEQ ID NO: 1887802
uucccugauuucucuuguu

SEQ ID NO: 2497689 - RNA, 19 nt, Artificial Sequence
  Description of Artificial Sequence: Synthetic oligonucleotide
  Antisense strand to SEQ ID NO: 2497688
aacaagagaaaucagggaa

SEQ ID NO: 2497690 - RNA, 19 nt, Artificial Sequence
  Description of Artificial Sequence: Synthetic oligonucleotide
  Sense strand starting at position 614 of SEQ ID NO: 1887802
gggcauggucaaugcugaa

SEQ ID NO: 2497691 - RNA, 19 nt, Artificial Sequence
  Description of Artificial Sequence: Synthetic oligonucleotide
  Antisense strand to SEQ ID NO: 2497690
uucagcauugaccaugccc

SEQ ID NO: 2497692 - RNA, 19 nt, Artificial Sequence
  Description of Artificial Sequence: Synthetic oligonucleotide
  Sense strand starting at position 717 of SEQ ID NO: 1887802
agcugaauuccagguugag

SEQ ID NO: 2497693 - RNA, 19 nt, Artificial Sequence
  Description of Artificial Sequence: Synthetic oligonucleotide
  Antisense strand to SEQ ID NO: 2497692
cucaaccuggaauucagcu

SEQ ID NO: 2497694 - RNA, 19 nt, Artificial Sequence
  Description of Artificial Sequence: Synthetic oligonucleotide
  Sense strand starting at position 740 of SEQ ID NO: 1887802
aggagguguggucgcagau

SEQ ID NO: 2497695 - RNA, 19 nt, Artificial Sequence
  Description of Artificial Sequence: Synthetic oligonucleotide
  Antisense strand to SEQ ID NO: 2497694
aucugcgaccacaccuccu

SEQ ID NO: 2497696 - RNA, 19 nt, Artificial Sequence
  Description of Artificial Sequence: Synthetic oligonucleotide
  Sense strand starting at position 804 of SEQ ID NO: 1887802
ggguguggcaguugacauu

SEQ ID NO: 2497697 - RNA, 19 nt, Artificial Sequence
  Description of Artificial Sequence: Synthetic oligonucleotide
  Antisense strand to SEQ ID NO: 2497696
aaugucaacugccacaccc

SEQ ID NO: 2497698 - RNA, 19 nt, Artificial Sequence
  Description of Artificial Sequence: Synthetic oligonucleotide
  Sense strand starting at position 810 of SEQ ID NO: 1887802
ggcaguugacauuggaguu

SEQ ID NO: 2497699 - RNA, 19 nt, Artificial Sequence
  Description of Artificial Sequence: Synthetic oligonucleotide
  Antisense strand to SEQ ID NO: 2497698
aacuccaaugucaacugcc

SEQ ID NO: 2497700 - RNA, 19 nt, Artificial Sequence
  Description of Artificial Sequence: Synthetic oligonucleotide
  Sense strand starting at position 955 of SEQ ID NO: 1887802
cugagagaugccugcccuu

SEQ ID NO: 2497701 - RNA, 19 nt, Artificial Sequence
  Description of Artificial Sequence: Synthetic oligonucleotide
  Antisense strand to SEQ ID NO: 2497700
aagggcaggcaucucucag

SEQ ID NO: 2497702 - RNA, 19 nt, Artificial Sequence
  Description of Artificial Sequence: Synthetic oligonucleotide
  Sense strand starting at position 1040 of SEQ ID NO: 1887802
gauggaugcaggugaguuu

SEQ ID NO: 2497703 - RNA, 19 nt, Artificial Sequence
  Description of Artificial Sequence: Synthetic oligonucleotide
  Antisense strand to SEQ ID NO: 2497702
aaacucaccugcauccauc

SEQ ID NO: 2497704 - RNA, 19 nt, Artificial Sequence
  Description of Artificial Sequence: Synthetic oligonucleotide
  Sense strand starting at position 1043 of SEQ ID NO: 1887802
ggaugcaggugaguuuauu

SEQ ID NO: 2497705 - RNA, 19 nt, Artificial Sequence
  Description of Artificial Sequence: Synthetic oligonucleotide
  Antisense strand to SEQ ID NO: 2497704
aauaaacucaccugcaucc

SEQ ID NO: 2497706 - RNA, 19 nt, Artificial Sequence
  Description of Artificial Sequence: Synthetic oligonucleotide
  Sense strand starting at position 1052 of SEQ ID NO: 1887802
ugaguuuauuaggcagcau

SEQ ID NO: 2497707 - RNA, 19 nt, Artificial Sequence
  Description of Artificial Sequence: Synthetic oligonucleotide
  Antisense strand to SEQ ID NO: 2497706
augcugccuaauaaacuca

SEQ ID NO: 2497708 - RNA, 19 nt, Artificial Sequence
  Description of Artificial Sequence: Synthetic oligonucleotide
  Sense strand starting at position 1204 of SEQ ID NO: 1887802
gauucucaugguugggaca

SEQ ID NO: 2497709 - RNA, 19 nt, Artificial Sequence
  Description of Artificial Sequence: Synthetic oligonucleotide
  Antisense strand to SEQ ID NO: 2497708
ugucccaaccaugagaauc

SEQ ID NO: 2497710 - RNA, 19 nt, Artificial Sequence
  Description of Artificial Sequence: Synthetic oligonucleotide
  Sense strand starting at position 1239 of SEQ ID NO: 1887802
acccgaggugccuauggau

SEQ ID NO: 2497711 - RNA, 19 nt, Artificial Sequence
  Description of Artificial Sequence: Synthetic oligonucleotide
  Antisense strand to SEQ ID NO: 2497710
auccauaggcaccucgggu

SEQ ID NO: 2497712 - RNA, 19 nt, Artificial Sequence
  Description of Artificial Sequence: Synthetic oligonucleotide
  Sense strand starting at position 1364 of SEQ ID NO: 1887802
gguugauugcggaggcuga

SEQ ID NO: 2497713 - RNA, 19 nt, Artificial Sequence
  Description of Artificial Sequence: Synthetic oligonucleotide
  Antisense strand to SEQ ID NO: 2497712
ucagccuccgcaaucaacc

SEQ ID NO: 2497714 - RNA, 19 nt, Artificial Sequence
  Description of Artificial Sequence: Synthetic oligonucleotide
  Sense strand starting at position 1444 of SEQ ID NO: 1887802
aggugguugcuuggugaga

SEQ ID NO: 2497715 - RNA, 19 nt, Artificial Sequence
  Description of Artificial Sequence: Synthetic oligonucleotide
  Antisense strand to SEQ ID NO: 2497714
ucucaccaagcaaccaccu

SEQ ID NO: 2497716 - RNA, 19 nt, Artificial Sequence
  Description of Artificial Sequence: Synthetic oligonucleotide
  Sense strand starting at position 1485 of SEQ ID NO: 1887802
gagagaggcucucagggaa

SEQ ID NO: 2497717 - RNA, 19 nt, Artificial Sequence
  Description of Artificial Sequence: Synthetic oligonucleotide
  Antisense strand to SEQ ID NO: 2497716
uucccugagagccucucuc

SEQ ID NO: 2497718 - RNA, 19 nt, Artificial Sequence
  Description of Artificial Sequence: Synthetic oligonucleotide
  Sense strand starting at position 1623 of SEQ ID NO: 1887802
cacgcaguccuugaguuua

SEQ ID NO: 2497719 - RNA, 19 nt, Artificial Sequence
  Description of Artificial Sequence: Synthetic oligonucleotide
  Antisense strand to SEQ ID NO: 2497718
uaaacucaaggacugcgug

SEQ ID NO: 2497720 - RNA, 19 nt, Artificial Sequence
  Description of Artificial Sequence: Synthetic oligonucleotide
  Sense strand starting at position 1628 of SEQ ID NO: 1887802
aguccuugaguuuagagga

SEQ ID NO: 2497721 - RNA, 19 nt, Artificial Sequence
  Description of Artificial Sequence: Synthetic oligonucleotide
  Antisense strand to SEQ ID NO: 2497720
uccucuaaacucaaggacu

SEQ ID NO: 2497722 - RNA, 19 nt, Artificial Sequence
  Description of Artificial Sequence: Synthetic oligonucleotide
  Sense strand starting at position 1633 of SEQ ID NO: 1887802
uugaguuuagaggaugugu

SEQ ID NO: 2497723 - RNA, 19 nt, Artificial Sequence
  Description of Artificial Sequence: Synthetic oligonucleotide
  Antisense strand to SEQ ID NO: 2497722
acacauccucuaaacucaa

SEQ ID NO: 2497724 - RNA, 19 nt, Artificial Sequence
  Description of Artificial Sequence: Synthetic oligonucleotide
  Sense strand starting at position 1638 of SEQ ID NO: 1887802
uuuagaggauguguuucuu

SEQ ID NO: 2497725 - RNA, 19 nt, Artificial Sequence
  Description of Artificial Sequence: Synthetic oligonucleotide
  Antisense strand to SEQ ID NO: 2497724
aagaaacacauccucuaaa

SEQ ID NO: 2497726 - RNA, 19 nt, Artificial Sequence
  Description of Artificial Sequence: Synthetic oligonucleotide
  Sense strand starting at position 1679 of SEQ ID NO: 1887802
uguugacaguguccaugua

SEQ ID NO: 2497727 - RNA, 19 nt, Artificial Sequence
  Description of Artificial Sequence: Synthetic oligonucleotide
  Antisense strand to SEQ ID NO: 2497726
uacauggacacugucaaca

SEQ ID NO: 2497728 - RNA, 19 nt, Artificial Sequence
  Description of Artificial Sequence: Synthetic oligonucleotide
  Sense strand starting at position 1701 of SEQ ID NO: 1887802
guccuuguccuuggucaga

SEQ ID NO: 2497729 - RNA, 19 nt, Artificial Sequence
  Description of Artificial Sequence: Synthetic oligonucleotide
  Antisense strand to SEQ ID NO: 2497728
ucugaccaaggacaaggac

SEQ ID NO: 2497730 - RNA, 19 nt, Artificial Sequence
  Description of Artificial Sequence: Synthetic oligonucleotide
  Sense strand starting at position 1703 of SEQ ID NO: 1887802
ccuuguccuuggucagaaa

SEQ ID NO: 2497731 - RNA, 19 nt, Artificial Sequence
  Description of Artificial Sequence: Synthetic oligonucleotide
  Antisense strand to SEQ ID NO: 2497730
uuucugaccaaggacaagg

SEQ ID NO: 2497732 - RNA, 19 nt, Artificial Sequence
  Description of Artificial Sequence: Synthetic oligonucleotide
  Sense strand starting at position 1711 of SEQ ID NO: 1887802
uuggucagaaacugguuaa

SEQ ID NO: 2497733 - RNA, 19 nt, Artificial Sequence
  Description of Artificial Sequence: Synthetic oligonucleotide
  Antisense strand to SEQ ID NO: 2497732
uuaaccaguuucugaccaa

SEQ ID NO: 2497734 - RNA, 19 nt, Artificial Sequence
  Description of Artificial Sequence: Synthetic oligonucleotide
  Sense strand starting at position 1712 of SEQ ID NO: 1887802
uggucagaaacugguuaau

SEQ ID NO: 2497735 - RNA, 19 nt, Artificial Sequence
  Description of Artificial Sequence: Synthetic oligonucleotide
  Antisense strand to SEQ ID NO: 2497734
auuaaccaguuucugacca

SEQ ID NO: 2497736 - RNA, 19 nt, Artificial Sequence
  Description of Artificial Sequence: Synthetic oligonucleotide
  Sense strand starting at position 1714 of SEQ ID NO: 1887802
gucagaaacugguuaauga

SEQ ID NO: 2497737 - RNA, 19 nt, Artificial Sequence
  Description of Artificial Sequence: Synthetic oligonucleotide
  Antisense strand to SEQ ID NO: 2497736
ucauuaaccaguuucugac

SEQ ID NO: 2497738 - RNA, 19 nt, Artificial Sequence
  Description of Artificial Sequence: Synthetic oligonucleotide
  Sense strand starting at position 1722 of SEQ ID NO: 1887802
cugguuaaugaccgucaua

SEQ ID NO: 2497739 - RNA, 19 nt, Artificial Sequence
  Description of Artificial Sequence: Synthetic oligonucleotide
  Antisense strand to SEQ ID NO: 2497738
uaugacggucauuaaccag

SEQ ID NO: 2497740 - RNA, 19 nt, Artificial Sequence
  Description of Artificial Sequence: Synthetic oligonucleotide
  Sense strand starting at position 2291 of SEQ ID NO: 1887802
gggugcacgcguuugagaa

SEQ ID NO: 2497741 - RNA, 19 nt, Artificial Sequence
  Description of Artificial Sequence: Synthetic oligonucleotide
  Antisense strand to SEQ ID NO: 2497740
uucucaaacgcgugcaccc

SEQ ID NO: 2497742 - RNA, 19 nt, Artificial Sequence
  Description of Artificial Sequence: Synthetic oligonucleotide
  Sense strand starting at position 2298 of SEQ ID NO: 1887802
cgcguuugagaaugggaua

SEQ ID NO: 2497743 - RNA, 19 nt, Artificial Sequence
  Description of Artificial Sequence: Synthetic oligonucleotide
  Antisense strand to SEQ ID NO: 2497742
uaucccauucucaaacgcg

SEQ ID NO: 2497744 - RNA, 19 nt, Artificial Sequence
  Description of Artificial Sequence: Synthetic oligonucleotide
  Sense strand starting at position 2299 of SEQ ID NO: 1887802
gcguuugagaaugggauau

SEQ ID NO: 2497745 - RNA, 19 nt, Artificial Sequence
  Description of Artificial Sequence: Synthetic oligonucleotide
  Antisense strand to SEQ ID NO: 2497744
auaucccauucucaaacgc

SEQ ID NO: 2497746 - RNA, 19 nt, Artificial Sequence
  Description of Artificial Sequence: Synthetic oligonucleotide
  Sense strand starting at position 2467 of SEQ ID NO: 1887802
ugccucugcaucugagaga

SEQ ID NO: 2497747 - RNA, 19 nt, Artificial Sequence
  Description of Artificial Sequence: Synthetic oligonucleotide
  Antisense strand to SEQ ID NO: 2497746
ucucucagaugcagaggca

SEQ ID NO: 2497748 - RNA, 19 nt, Artificial Sequence
  Description of Artificial Sequence: Synthetic oligonucleotide
  Sense strand starting at position 2556 of SEQ ID NO: 1887802
augccaucuggaggugaaa

SEQ ID NO: 2497749 - RNA, 19 nt, Artificial Sequence
  Description of Artificial Sequence: Synthetic oligonucleotide
  Antisense strand to SEQ ID NO: 2497748
uuucaccuccagauggcau

SEQ ID NO: 2497750 - RNA, 19 nt, Artificial Sequence
  Description of Artificial Sequence: Synthetic oligonucleotide
  Sense strand starting at position 2884 of SEQ ID NO: 1887802
ucugcuuugcccugggaga

SEQ ID NO: 2497751 - RNA, 19 nt, Artificial Sequence
  Description of Artificial Sequence: Synthetic oligonucleotide
  Antisense strand to SEQ ID NO: 2497750
ucucccagggcaaagcaga

SEQ ID NO: 2497752 - RNA, 19 nt, Artificial Sequence
  Description of Artificial Sequence: Synthetic oligonucleotide
  Sense strand starting at position 2886 of SEQ ID NO: 1887802
ugcuuugcccugggagaga

SEQ ID NO: 2497753 - RNA, 19 nt, Artificial Sequence
  Description of Artificial Sequence: Synthetic oligonucleotide
  Antisense strand to SEQ ID NO: 2497752
ucucucccagggcaaagca

SEQ ID NO: 2497754 - RNA, 19 nt, Artificial Sequence
  Description of Artificial Sequence: Synthetic oligonucleotide
  Sense strand starting at position 3145 of SEQ ID NO: 1887802
augacaugaucagaucaug

SEQ ID NO: 2497755 - RNA, 19 nt, Artificial Sequence
  Description of Artificial Sequence: Synthetic oligonucleotide
  Antisense strand to SEQ ID NO: 2497754
caugaucugaucaugucau

SEQ ID NO: 2497756 - RNA, 19 nt, Artificial Sequence
  Description of Artificial Sequence: Synthetic oligonucleotide
  Sense strand starting at position 3346 of SEQ ID NO: 1887802
cuagcaguuccaugaaggu

SEQ ID NO: 2497757 - RNA, 19 nt, Artificial Sequence
  Description of Artificial Sequence: Synthetic oligonucleotide
  Antisense strand to SEQ ID NO: 2497756
accuucauggaacugcuag

SEQ ID NO: 2497758 - RNA, 19 nt, Artificial Sequence
  Description of Artificial Sequence: Synthetic oligonucleotide
  Sense strand starting at position 3736 of SEQ ID NO: 1887802
guuugcaagagccauguua

SEQ ID NO: 2497759 - RNA, 19 nt, Artificial Sequence
  Description of Artificial Sequence: Synthetic oligonucleotide
  Antisense strand to SEQ ID NO: 2497758
uaacauggcucuugcaaac

SEQ ID NO: 2497760 - RNA, 19 nt, Artificial Sequence
  Description of Artificial Sequence: Synthetic oligonucleotide
  Sense strand starting at position 3738 of SEQ ID NO: 1887802
uugcaagagccauguuaag

SEQ ID NO: 2497761 - RNA, 19 nt, Artificial Sequence
  Description of Artificial Sequence: Synthetic oligonucleotide
  Antisense strand to SEQ ID NO: 2497760
cuuaacauggcucuugcaa

SEQ ID NO: 2497762 - RNA, 19 nt, Artificial Sequence
  Description of Artificial Sequence: Synthetic oligonucleotide
  Sense strand starting at position 79 of SEQ ID NO: 1887803
ugugguucucaucacuauu

SEQ ID NO: 2497763 - RNA, 19 nt, Artificial Sequence
  Description of Artificial Sequence: Synthetic oligonucleotide
  Antisense strand to SEQ ID NO: 2497762
aauagugaugagaaccaca

SEQ ID NO: 2497764 - RNA, 19 nt, Artificial Sequence
  Description of Artificial Sequence: Synthetic oligonucleotide
  Sense strand starting at position 82 of SEQ ID NO: 1887803
gguucucaucacuauuaca

SEQ ID NO: 2497765 - RNA, 19 nt, Artificial Sequence
  Description of Artificial Sequence: Synthetic oligonucleotide
  Antisense strand to SEQ ID NO: 2497764
uguaauagugaugagaacc

SEQ ID NO: 2497766 - RNA, 19 nt, Artificial Sequence
  Description of Artificial Sequence: Synthetic oligonucleotide
  Sense strand starting at position 273 of SEQ ID NO: 1887803
guguuaagugaaggcaauu

SEQ ID NO: 2497767 - RNA, 19 nt, Artificial Sequence
  Description of Artificial Sequence: Synthetic oligonucleotide
  Antisense strand to SEQ ID NO: 2497766
aauugccuucacuuaacac

SEQ ID NO: 2497768 - RNA, 19 nt, Artificial Sequence
  Description of Artificial Sequence: Synthetic oligonucleotide
  Sense strand starting at position 337 of SEQ ID NO: 1887803
augucugacccgggaggaa

SEQ ID NO: 2497769 - RNA, 19 nt, Artificial Sequence
  Description of Artificial Sequence: Synthetic oligonucleotide
  Antisense strand to SEQ ID NO: 2497768
uuccucccgggucagacau

SEQ ID NO: 2497770 - RNA, 19 nt, Artificial Sequence
  Description of Artificial Sequence: Synthetic oligonucleotide
  Sense strand starting at position 473 of SEQ ID NO: 1887803
ggccauugcccaggagauc

SEQ ID NO: 2497771 - RNA, 19 nt, Artificial Sequence
  Description of Artificial Sequence: Synthetic oligonucleotide
  Antisense strand to SEQ ID NO: 2497770
gaucuccugggcaauggcc

SEQ ID NO: 2497772 - RNA, 19 nt, Artificial Sequence
  Description of Artificial Sequence: Synthetic oligonucleotide
  Sense strand starting at position 502 of SEQ ID NO: 1887803
gcagaaagggccugagguu

SEQ ID NO: 2497773 - RNA, 19 nt, Artificial Sequence
  Description of Artificial Sequence: Synthetic oligonucleotide
  Antisense strand to SEQ ID NO: 2497772
aaccucaggcccuuucugc

SEQ ID NO: 2497774 - RNA, 19 nt, Artificial Sequence
  Description of Artificial Sequence: Synthetic oligonucleotide
  Sense strand starting at position 917 of SEQ ID NO: 1887803
uuguguuaggguugauuuc

SEQ ID NO: 2497775 - RNA, 19 nt, Artificial Sequence
  Description of Artificial Sequence: Synthetic oligonucleotide
  Antisense strand to SEQ ID NO: 2497774
gaaaucaacccuaacacaa

SEQ ID NO: 2497776 - RNA, 19 nt, Artificial Sequence
  Description of Artificial Sequence: Synthetic oligonucleotide
  Sense strand starting at position 926 of SEQ ID NO: 1887803
gguugauuuccugggcuca

SEQ ID NO: 2497777 - RNA, 19 nt, Artificial Sequence
  Description of Artificial Sequence: Synthetic oligonucleotide
  Antisense strand to SEQ ID NO: 2497776
ugagcccaggaaaucaacc

SEQ ID NO: 2497778 - RNA, 19 nt, Artificial Sequence
  Description of Artificial Sequence: Synthetic oligonucleotide
  Sense strand starting at position 973 of SEQ ID NO: 1887803
ugaguucuuccucagucac

SEQ ID NO: 2497779 - RNA, 19 nt, Artificial Sequence
  Description of Artificial Sequence: Synthetic oligonucleotide
  Antisense strand to SEQ ID NO: 2497778
gugacugaggaagaacuca

SEQ ID NO: 2497780 - RNA, 19 nt, Artificial Sequence
  Description of Artificial Sequence: Synthetic oligonucleotide
  Sense strand starting at position 988 of SEQ ID NO: 1887803
ucacguaauuucgcaggca

SEQ ID NO: 2497781 - RNA, 19 nt, Artificial Sequence
  Description of Artificial Sequence: Synthetic oligonucleotide
  Antisense strand to SEQ ID NO: 2497780
ugccugcgaaauuacguga

SEQ ID NO: 2497782 - RNA, 19 nt, Artificial Sequence
  Description of Artificial Sequence: Synthetic oligonucleotide
  Sense strand starting at position 991 of SEQ ID NO: 1887803
cguaauuucgcaggcagac

SEQ ID NO: 2497783 - RNA, 19 nt, Artificial Sequence
  Description of Artificial Sequence: Synthetic oligonucleotide
  Antisense strand to SEQ ID NO: 2497782
gucugccugcgaaauuacg

SEQ ID NO: 2497784 - RNA, 19 nt, Artificial Sequence
  Description of Artificial Sequence: Synthetic oligonucleotide
  Sense strand starting at position 1095 of SEQ ID NO: 1887803
uuguuuguugauggauaga

SEQ ID NO: 2497785 - RNA, 19 nt, Artificial Sequence
  Description of Artificial Sequence: Synthetic oligonucleotide
  Antisense strand to SEQ ID NO: 2497784
ucuauccaucaacaaacaa

SEQ ID NO: 2497786 - RNA, 19 nt, Artificial Sequence
  Description of Artificial Sequence: Synthetic oligonucleotide
  Sense strand starting at position 1515 of SEQ ID NO: 1887803
ucaucaucagugcauugau

SEQ ID NO: 2497787 - RNA, 19 nt, Artificial Sequence
  Description of Artificial Sequence: Synthetic oligonucleotide
  Antisense strand to SEQ ID NO: 2497786
aucaaugcacugaugauga

SEQ ID NO: 2497788 - RNA, 19 nt, Artificial Sequence
  Description of Artificial Sequence: Synthetic oligonucleotide
  Sense strand starting at position 1523 of SEQ ID NO: 1887803
agugcauugauguagugau

SEQ ID NO: 2497789 - RNA, 19 nt, Artificial Sequence
  Description of Artificial Sequence: Synthetic oligonucleotide
  Antisense strand to SEQ ID NO: 2497788
aucacuacaucaaugcacu

SEQ ID NO: 2497790 - RNA, 19 nt, Artificial Sequence
  Description of Artificial Sequence: Synthetic oligonucleotide
  Sense strand starting at position 1700 of SEQ ID NO: 1887803
uggcuuccugcucaggaua

SEQ ID NO: 2497791 - RNA, 19 nt, Artificial Sequence
  Description of Artificial Sequence: Synthetic oligonucleotide
  Antisense strand to SEQ ID NO: 2497790
uauccugagcaggaagcca

SEQ ID NO: 2497792 - RNA, 19 nt, Artificial Sequence
  Description of Artificial Sequence: Synthetic oligonucleotide
  Sense strand starting at position 1748 of SEQ ID NO: 1887803
ggcauaaggccugggacuu

SEQ ID NO: 2497793 - RNA, 19 nt, Artificial Sequence
  Description of Artificial Sequence: Synthetic oligonucleotide
  Antisense strand to SEQ ID NO: 2497792
aagucccaggccuuaugcc

SEQ ID NO: 2497794 - RNA, 19 nt, Artificial Sequence
  Description of Artificial Sequence: Synthetic oligonucleotide
  Sense strand starting at position 1821 of SEQ ID NO: 1887803
cagcaaggcuuucugggaa

SEQ ID NO: 2497795 - RNA, 19 nt, Artificial Sequence
  Description of Artificial Sequence: Synthetic oligonucleotide
  Antisense strand to SEQ ID NO: 2497794
uucccagaaagccuugcug

SEQ ID NO: 2497796 - RNA, 19 nt, Artificial Sequence
  Description of Artificial Sequence: Synthetic oligonucleotide
  Sense strand starting at position 2049 of SEQ ID NO: 1887803
uggcaaaugucugcaauag

SEQ ID NO: 2497797 - RNA, 19 nt, Artificial Sequence
  Description of Artificial Sequence: Synthetic oligonucleotide
  Antisense strand to SEQ ID NO: 2497796
cuauugcagacauuugcca

SEQ ID NO: 2497798 - RNA, 19 nt, Artificial Sequence
  Description of Artificial Sequence: Synthetic oligonucleotide
  Sense strand starting at position 2050 of SEQ ID NO: 1887803
ggcaaaugucugcaauagu

SEQ ID NO: 2497799 - RNA, 19 nt, Artificial Sequence
  Description of Artificial Sequence: Synthetic oligonucleotide
  Antisense strand to SEQ ID NO: 2497798
acuauugcagacauuugcc

SEQ ID NO: 2497800 - RNA, 19 nt, Artificial Sequence
  Description of Artificial Sequence: Synthetic oligonucleotide
  Sense strand starting at position 2198 of SEQ ID NO: 1887803
gggugucauccucaugaca

SEQ ID NO: 2497801 - RNA, 19 nt, Artificial Sequence
  Description of Artificial Sequence: Synthetic oligonucleotide
  Antisense strand to SEQ ID NO: 2497800
ugucaugaggaugacaccc

SEQ ID NO: 2497802 - RNA, 19 nt, Artificial Sequence
  Description of Artificial Sequence: Synthetic oligonucleotide
  Sense strand starting at position 2246 of SEQ ID NO: 1887803
gggacuuggccauggauga

SEQ ID NO: 2497803 - RNA, 19 nt, Artificial Sequence
  Description of Artificial Sequence: Synthetic oligonucleotide
  Antisense strand to SEQ ID NO: 2497802
ucauccauggccaaguccc

SEQ ID NO: 2497804 - RNA, 19 nt, Artificial Sequence
  Description of Artificial Sequence: Synthetic oligonucleotide
  Sense strand starting at position 2253 of SEQ ID NO: 1887803
ggccauggaugagcuuuau

SEQ ID NO: 2497805 - RNA, 19 nt, Artificial Sequence
  Description of Artificial Sequence: Synthetic oligonucleotide
  Antisense strand to SEQ ID NO: 2497804
auaaagcucauccauggcc

SEQ ID NO: 2497806 - RNA, 19 nt, Artificial Sequence
  Description of Artificial Sequence: Synthetic oligonucleotide
  Sense strand starting at position 2257 of SEQ ID NO: 1887803
auggaugagcuuuaugugu

SEQ ID NO: 2497807 - RNA, 19 nt, Artificial Sequence
  Description of Artificial Sequence: Synthetic oligonucleotide
  Antisense strand to SEQ ID NO: 2497806
acacauaaagcucauccau

SEQ ID NO: 2497808 - RNA, 19 nt, Artificial Sequence
  Description of Artificial Sequence: Synthetic oligonucleotide
  Sense strand starting at position 2266 of SEQ ID NO: 1887803
cuuuauguguaucuggaca

SEQ ID NO: 2497809 - RNA, 19 nt, Artificial Sequence
  Description of Artificial Sequence: Synthetic oligonucleotide
  Antisense strand to SEQ ID NO: 2497808
uguccagauacacauaaag

SEQ ID NO: 2497810 - RNA, 19 nt, Artificial Sequence
  Description of Artificial Sequence: Synthetic oligonucleotide
  Sense strand starting at position 2271 of SEQ ID NO: 1887803
uguguaucuggacaacuga

SEQ ID NO: 2497811 - RNA, 19 nt, Artificial Sequence
  Description of Artificial Sequence: Synthetic oligonucleotide
  Antisense strand to SEQ ID NO: 2497810
ucaguuguccagauacaca

SEQ ID NO: 2497812 - RNA, 19 nt, Artificial Sequence
  Description of Artificial Sequence: Synthetic oligonucleotide
  Sense strand starting at position 2689 of SEQ ID NO: 1887803
cuaagugaguuugucugaa

SEQ ID NO: 2497813 - RNA, 19 nt, Artificial Sequence
  Description of Artificial Sequence: Synthetic oligonucleotide
  Antisense strand to SEQ ID NO: 2497812
uucagacaaacucacuuag

SEQ ID NO: 2497814 - RNA, 19 nt, Artificial Sequence
  Description of Artificial Sequence: Synthetic oligonucleotide
  Sense strand starting at position 2691 of SEQ ID NO: 1887803
aagugaguuugucugaaug

SEQ ID NO: 2497815 - RNA, 19 nt, Artificial Sequence
  Description of Artificial Sequence: Synthetic oligonucleotide
  Antisense strand to SEQ ID NO: 2497814
cauucagacaaacucacuu

SEQ ID NO: 2497816 - RNA, 19 nt, Artificial Sequence
  Description of Artificial Sequence: Synthetic oligonucleotide
  Sense strand starting at position 2705 of SEQ ID NO: 1887803
gaauguuugccugugcguu

SEQ ID NO: 2497817 - RNA, 19 nt, Artificial Sequence
  Description of Artificial Sequence: Synthetic oligonucleotide
  Antisense strand to SEQ ID NO: 2497816
aacgcacaggcaaacauuc

SEQ ID NO: 2497818 - RNA, 19 nt, Artificial Sequence
  Description of Artificial Sequence: Synthetic oligonucleotide
  Sense strand starting at position 2738 of SEQ ID NO: 1887803
gaagauauuucuggguaga

SEQ ID NO: 2497819 - RNA, 19 nt, Artificial Sequence
  Description of Artificial Sequence: Synthetic oligonucleotide
  Antisense strand to SEQ ID NO: 2497818
ucuacccagaaauaucuuc

SEQ ID NO: 2497820 - RNA, 19 nt, Artificial Sequence
  Description of Artificial Sequence: Synthetic oligonucleotide
  Sense strand starting at position 2933 of SEQ ID NO: 1887803
gcucguugugcuucaguuu

SEQ ID NO: 2497821 - RNA, 19 nt, Artificial Sequence
  Description of Artificial Sequence: Synthetic oligonucleotide
  Antisense strand to SEQ ID NO: 2497820
aaacugaagcacaacgagc

SEQ ID NO: 2497822 - RNA, 19 nt, Artificial Sequence
  Description of Artificial Sequence: Synthetic oligonucleotide
  Sense strand starting at position 2983 of SEQ ID NO: 1887803
ugggcacucaguuaauagu

SEQ ID NO: 2497823 - RNA, 19 nt, Artificial Sequence
  Description of Artificial Sequence: Synthetic oligonucleotide
  Antisense strand to SEQ ID NO: 2497822
acuauuaacugagugccca

SEQ ID NO: 2497824 - RNA, 19 nt, Artificial Sequence
  Description of Artificial Sequence: Synthetic oligonucleotide
  Sense strand starting at position 3063 of SEQ ID NO: 1887803
caaauuaugugaguccaug

SEQ ID NO: 2497825 - RNA, 19 nt, Artificial Sequence
  Description of Artificial Sequence: Synthetic oligonucleotide
  Antisense strand to SEQ ID NO: 2497824
cauggacucacauaauuug

SEQ ID NO: 2497826 - RNA, 19 nt, Artificial Sequence
  Description of Artificial Sequence: Synthetic oligonucleotide
  Sense strand starting at position 3069 of SEQ ID NO: 1887803
augugaguccauggaaaug

SEQ ID NO: 2497827 - RNA, 19 nt, Artificial Sequence
  Description of Artificial Sequence: Synthetic oligonucleotide
  Antisense strand to SEQ ID NO: 2497826
cauuuccauggacucacau

SEQ ID NO: 2497828 - RNA, 19 nt, Artificial Sequence
  Description of Artificial Sequence: Synthetic oligonucleotide
  Sense strand starting at position 3165 of SEQ ID NO: 1887803
auaugugugacauggcuga

SEQ ID NO: 2497829 - RNA, 19 nt, Artificial Sequence
  Description of Artificial Sequence: Synthetic oligonucleotide
  Antisense strand to SEQ ID NO: 2497828
ucagccaugucacacauau

SEQ ID NO: 2497830 - RNA, 19 nt, Artificial Sequence
  Description of Artificial Sequence: Synthetic oligonucleotide
  Sense strand starting at position 3249 of SEQ ID NO: 1887803
uuauaugaguuacccagaa

SEQ ID NO: 2497831 - RNA, 19 nt, Artificial Sequence
  Description of Artificial Sequence: Synthetic oligonucleotide
  Antisense strand to SEQ ID NO: 2497830
uucuggguaacucauauaa

SEQ ID NO: 2497832 - RNA, 19 nt, Artificial Sequence
  Description of Artificial Sequence: Synthetic oligonucleotide
  Sense strand starting at position 3406 of SEQ ID NO: 1887803
guggcacaacauugagaau

SEQ ID NO: 2497833 - RNA, 19 nt, Artificial Sequence
  Description of Artificial Sequence: Synthetic oligonucleotide
  Antisense strand to SEQ ID NO: 2497832
auucucaauguugugccac

SEQ ID NO: 2497834 - RNA, 19 nt, Artificial Sequence
  Description of Artificial Sequence: Synthetic oligonucleotide
  Sense strand starting at position 3409 of SEQ ID NO: 1887803
gcacaacauugagaauuua

SEQ ID NO: 2497835 - RNA, 19 nt, Artificial Sequence
  Description of Artificial Sequence: Synthetic oligonucleotide
  Antisense strand to SEQ ID NO: 2497834
uaaauucucaauguugugc

SEQ ID NO: 2497836 - RNA, 19 nt, Artificial Sequence
  Description of Artificial Sequence: Synthetic oligonucleotide
  Sense strand starting at position 3727 of SEQ ID NO: 1887803
guuaucugucugcucguau

SEQ ID NO: 2497837 - RNA, 19 nt, Artificial Sequence
  Description of Artificial Sequence: Synthetic oligonucleotide
  Antisense strand to SEQ ID NO: 2497836
auacgagcagacagauaac

SEQ ID NO: 2497838 - RNA, 19 nt, Artificial Sequence
  Description of Artificial Sequence: Synthetic oligonucleotide
  Sense strand starting at position 3780 of SEQ ID NO: 1887803
aaacuuugguuguugauau

SEQ ID NO: 2497839 - RNA, 19 nt, Artificial Sequence
  Description of Artificial Sequence: Synthetic oligonucleotide
  Antisense strand to SEQ ID NO: 2497838
auaucaacaaccaaaguuu

SEQ ID NO: 2497840 - RNA, 19 nt, Artificial Sequence
  Description of Artificial Sequence: Synthetic oligonucleotide
  Sense strand starting at position 3976 of SEQ ID NO: 1887803
cuuucugacuucuugugga

SEQ ID NO: 2497841 - RNA, 19 nt, Artificial Sequence
  Description of Artificial Sequence: Synthetic oligonucleotide
  Antisense strand to SEQ ID NO: 2497840
uccacaagaagucagaaag

SEQ ID NO: 2497842 - RNA, 19 nt, Artificial Sequence
  Description of Artificial Sequence: Synthetic oligonucleotide
  Sense strand starting at position 177 of SEQ ID NO: 1887804
ccaggaacucuacgggaau

SEQ ID NO: 2497843 - RNA, 19 nt, Artificial Sequence
  Description of Artificial Sequence: Synthetic oligonucleotide
  Antisense strand to SEQ ID NO: 2497842
auucccguagaguuccugg

SEQ ID NO: 2497844 - RNA, 19 nt, Artificial Sequence
  Description of Artificial Sequence: Synthetic oligonucleotide
  Sense strand starting at position 178 of SEQ ID NO: 1887804
caggaacucuacgggaauu

SEQ ID NO: 2497845 - RNA, 19 nt, Artificial Sequence
  Description of Artificial Sequence: Synthetic oligonucleotide
  Antisense strand to SEQ ID NO: 2497844
aauucccguagaguuccug

SEQ ID NO: 2497846 - RNA, 19 nt, Artificial Sequence
  Description of Artificial Sequence: Synthetic oligonucleotide
  Sense strand starting at position 475 of SEQ ID NO: 1887804
ucgcaucuccuacaagagu

SEQ ID NO: 2497847 - RNA, 19 nt, Artificial Sequence
  Description of Artificial Sequence: Synthetic oligonucleotide
  Antisense strand to SEQ ID NO: 2497846
acucuuguaggagaugcga

SEQ ID NO: 2497848 - RNA, 19 nt, Artificial Sequence
  Description of Artificial Sequence: Synthetic oligonucleotide
  Sense strand starting at position 553 of SEQ ID NO: 1887804
ucuuuacucuggccugaua

SEQ ID NO: 2497849 - RNA, 19 nt, Artificial Sequence
  Description of Artificial Sequence: Synthetic oligonucleotide
  Antisense strand to SEQ ID NO: 2497848
uaucaggccagaguaaaga

SEQ ID NO: 2497850 - RNA, 19 nt, Artificial Sequence
  Description of Artificial Sequence: Synthetic oligonucleotide
  Sense strand starting at position 555 of SEQ ID NO: 1887804
uuuacucuggccugauauu

SEQ ID NO: 2497851 - RNA, 19 nt, Artificial Sequence
  Description of Artificial Sequence: Synthetic oligonucleotide
  Antisense strand to SEQ ID NO: 2497850
aauaucaggccagaguaaa

SEQ ID NO: 2497852 - RNA, 19 nt, Artificial Sequence
  Description of Artificial Sequence: Synthetic oligonucleotide
  Sense strand starting at position 566 of SEQ ID NO: 1887804
cugauauucccgcagauga

SEQ ID NO: 2497853 - RNA, 19 nt, Artificial Sequence
  Description of Artificial Sequence: Synthetic oligonucleotide
  Antisense strand to SEQ ID NO: 2497852
ucaucugcgggaauaucag

SEQ ID NO: 2497854 - RNA, 19 nt, Artificial Sequence
  Description of Artificial Sequence: Synthetic oligonucleotide
  Sense strand starting at position 568 of SEQ ID NO: 1887804
gauauucccgcagaugaug

SEQ ID NO: 2497855 - RNA, 19 nt, Artificial Sequence
  Description of Artificial Sequence: Synthetic oligonucleotide
  Antisense strand to SEQ ID NO: 2497854
caucaucugcgggaauauc

SEQ ID NO: 2497856 - RNA, 19 nt, Artificial Sequence
  Description of Artificial Sequence: Synthetic oligonucleotide
  Sense strand starting at position 576 of SEQ ID NO: 1887804
cgcagaugaugccuacuuu

SEQ ID NO: 2497857 - RNA, 19 nt, Artificial Sequence
  Description of Artificial Sequence: Synthetic oligonucleotide
  Antisense strand to SEQ ID NO: 2497856
aaaguaggcaucaucugcg

SEQ ID NO: 2497858 - RNA, 19 nt, Artificial Sequence
  Description of Artificial Sequence: Synthetic oligonucleotide
  Sense strand starting at position 613 of SEQ ID NO: 1887804
gagcuccuguucccugaau

SEQ ID NO: 2497859 - RNA, 19 nt, Artificial Sequence
  Description of Artificial Sequence: Synthetic oligonucleotide
  Antisense strand to SEQ ID NO: 2497858
auucagggaacaggagcuc

SEQ ID NO: 2497860 - RNA, 19 nt, Artificial Sequence
  Description of Artificial Sequence: Synthetic oligonucleotide
  Sense strand starting at position 680 of SEQ ID NO: 1887804
ccgagacugucaccuggau

SEQ ID NO: 2497861 - RNA, 19 nt, Artificial Sequence
  Description of Artificial Sequence: Synthetic oligonucleotide
  Antisense strand to SEQ ID NO: 2497860
auccaggugacagucucgg

SEQ ID NO: 2497862 - RNA, 19 nt, Artificial Sequence
  Description of Artificial Sequence: Synthetic oligonucleotide
  Sense strand starting at position 928 of SEQ ID NO: 1887804
ugacgucaccaagaccauu

SEQ ID NO: 2497863 - RNA, 19 nt, Artificial Sequence
  Description of Artificial Sequence: Synthetic oligonucleotide
  Antisense strand to SEQ ID NO: 2497862
aauggucuuggugacguca

SEQ ID NO: 2497864 - RNA, 19 nt, Artificial Sequence
  Description of Artificial Sequence: Synthetic oligonucleotide
  Sense strand starting at position 985 of SEQ ID NO: 1887804
agaugcacucccugagacu

SEQ ID NO: 2497865 - RNA, 19 nt, Artificial Sequence
  Description of Artificial Sequence: Synthetic oligonucleotide
  Antisense strand to SEQ ID NO: 2497864
agucucagggagugcaucu

SEQ ID NO: 2497866 - RNA, 19 nt, Artificial Sequence
  Description of Artificial Sequence: Synthetic oligonucleotide
  Sense strand starting at position 1173 of SEQ ID NO: 1887804
ccucuaagucuugggcuaa

SEQ ID NO: 2497867 - RNA, 19 nt, Artificial Sequence
  Description of Artificial Sequence: Synthetic oligonucleotide
  Antisense strand to SEQ ID NO: 2497866
uuagcccaagacuuagagg

SEQ ID NO: 2497868 - RNA, 19 nt, Artificial Sequence
  Description of Artificial Sequence: Synthetic oligonucleotide
  Sense strand starting at position 1212 of SEQ ID NO: 1887804
cuuggugucucagugugau

SEQ ID NO: 2497869 - RNA, 19 nt, Artificial Sequence
  Description of Artificial Sequence: Synthetic oligonucleotide
  Antisense strand to SEQ ID NO: 2497868
aucacacugagacaccaag

SEQ ID NO: 2497870 - RNA, 19 nt, Artificial Sequence
  Description of Artificial Sequence: Synthetic oligonucleotide
  Sense strand starting at position 1215 of SEQ ID NO: 1887804
ggugucucagugugauuca

SEQ ID NO: 2497871 - RNA, 19 nt, Artificial Sequence
  Description of Artificial Sequence: Synthetic oligonucleotide
  Antisense strand to SEQ ID NO: 2497870
ugaaucacacugagacacc

SEQ ID NO: 2497872 - RNA, 19 nt, Artificial Sequence
  Description of Artificial Sequence: Synthetic oligonucleotide
  Sense strand starting at position 1218 of SEQ ID NO: 1887804
gucucagugugauucaguc

SEQ ID NO: 2497873 - RNA, 19 nt, Artificial Sequence
  Description of Artificial Sequence: Synthetic oligonucleotide
  Antisense strand to SEQ ID NO: 2497872
gacugaaucacacugagac

SEQ ID NO: 2497874 - RNA, 19 nt, Artificial Sequence
  Description of Artificial Sequence: Synthetic oligonucleotide
  Sense strand starting at position 1268 of SEQ ID NO: 1887804
ccucgugagcugucucuuu

SEQ ID NO: 2497875 - RNA, 19 nt, Artificial Sequence
  Description of Artificial Sequence: Synthetic oligonucleotide
  Antisense strand to SEQ ID NO: 2497874
aaagagacagcucacgagg

SEQ ID NO: 2497876 - RNA, 19 nt, Artificial Sequence
  Description of Artificial Sequence: Synthetic oligonucleotide
  Sense strand starting at position 1298 of SEQ ID NO: 1887804
ccuacaugucuauguggua

SEQ ID NO: 2497877 - RNA, 19 nt, Artificial Sequence
  Description of Artificial Sequence: Synthetic oligonucleotide
  Antisense strand to SEQ ID NO: 2497876
uaccacauagacauguagg

SEQ ID NO: 2497878 - RNA, 19 nt, Artificial Sequence
  Description of Artificial Sequence: Synthetic oligonucleotide
  Sense strand starting at position 1376 of SEQ ID NO: 1887804
cuuuguaacuuggucuaua

SEQ ID NO: 2497879 - RNA, 19 nt, Artificial Sequence
  Description of Artificial Sequence: Synthetic oligonucleotide
  Antisense strand to SEQ ID NO: 2497878
uauagaccaaguuacaaag

SEQ ID NO: 2497880 - RNA, 19 nt, Artificial Sequence
  Description of Artificial Sequence: Synthetic oligonucleotide
  Sense strand starting at position 1377 of SEQ ID NO: 1887804
uuuguaacuuggucuauaa

SEQ ID NO: 2497881 - RNA, 19 nt, Artificial Sequence
  Description of Artificial Sequence: Synthetic oligonucleotide
  Antisense strand to SEQ ID NO: 2497880
uuauagaccaaguuacaaa

SEQ ID NO: 2497882 - RNA, 19 nt, Artificial Sequence
  Description of Artificial Sequence: Synthetic oligonucleotide
  Sense strand starting at position 1408 of SEQ ID NO: 1887804
gccuuccuaugguccaauu

SEQ ID NO: 2497883 - RNA, 19 nt, Artificial Sequence
  Description of Artificial Sequence: Synthetic oligonucleotide
  Antisense strand to SEQ ID NO: 2497882
aauuggaccauaggaaggc

SEQ ID NO: 2497884 - RNA, 19 nt, Artificial Sequence
  Description of Artificial Sequence: Synthetic oligonucleotide
  Sense strand starting at position 1431 of SEQ ID NO: 1887804
acuguucugugcuuccuau

SEQ ID NO: 2497885 - RNA, 19 nt, Artificial Sequence
  Description of Artificial Sequence: Synthetic oligonucleotide
  Antisense strand to SEQ ID NO: 2497884
auaggaagcacagaacagu

SEQ ID NO: 2497886 - RNA, 19 nt, Artificial Sequence
  Description of Artificial Sequence: Synthetic oligonucleotide
  Sense strand starting at position 1432 of SEQ ID NO: 1887804
cuguucugugcuuccuauu

SEQ ID NO: 2497887 - RNA, 19 nt, Artificial Sequence
  Description of Artificial Sequence: Synthetic oligonucleotide
  Antisense strand to SEQ ID NO: 2497886
aauaggaagcacagaacag

SEQ ID NO: 2497888 - RNA, 19 nt, Artificial Sequence
  Description of Artificial Sequence: Synthetic oligonucleotide
  Sense strand starting at position 1595 of SEQ ID NO: 1887804
ugugguuuagcccaggaau

SEQ ID NO: 2497889 - RNA, 19 nt, Artificial Sequence
  Description of Artificial Sequence: Synthetic oligonucleotide
  Antisense strand to SEQ ID NO: 2497888
auuccugggcuaaaccaca

SEQ ID NO: 2497890 - RNA, 19 nt, Artificial Sequence
  Description of Artificial Sequence: Synthetic oligonucleotide
  Sense strand starting at position 1597 of SEQ ID NO: 1887804
ugguuuagcccaggaaucu

SEQ ID NO: 2497891 - RNA, 19 nt, Artificial Sequence
  Description of Artificial Sequence: Synthetic oligonucleotide
  Antisense strand to SEQ ID NO: 2497890
agauuccugggcuaaacca

SEQ ID NO: 2497892 - RNA, 19 nt, Artificial Sequence
  Description of Artificial Sequence: Synthetic oligonucleotide
  Sense strand starting at position 1876 of SEQ ID NO: 1887804
cguuguucucugucuuaca

SEQ ID NO: 2497893 - RNA, 19 nt, Artificial Sequence
  Description of Artificial Sequence: Synthetic oligonucleotide
  Antisense strand to SEQ ID NO: 2497892
uguaagacagagaacaacg

SEQ ID NO: 2497894 - RNA, 19 nt, Artificial Sequence
  Description of Artificial Sequence: Synthetic oligonucleotide
  Sense strand starting at position 2025 of SEQ ID NO: 1887804
uucucaguggucugauucu

SEQ ID NO: 2497895 - RNA, 19 nt, Artificial Sequence
  Description of Artificial Sequence: Synthetic oligonucleotide
  Antisense strand to SEQ ID NO: 2497894
agaaucagaccacugagaa

SEQ ID NO: 2497896 - RNA, 19 nt, Artificial Sequence
  Description of Artificial Sequence: Synthetic oligonucleotide
  Sense strand starting at position 2054 of SEQ ID NO: 1887804
gggaaacauuuggguauua

SEQ ID NO: 2497897 - RNA, 19 nt, Artificial Sequence
  Description of Artificial Sequence: Synthetic oligonucleotide
  Antisense strand to SEQ ID NO: 2497896
uaauacccaaauguuuccc

SEQ ID NO: 2497898 - RNA, 19 nt, Artificial Sequence
  Description of Artificial Sequence: Synthetic oligonucleotide
  Sense strand starting at position 2059 of SEQ ID NO: 1887804
acauuuggguauuaaagaa

SEQ ID NO: 2497899 - RNA, 19 nt, Artificial Sequence
  Description of Artificial Sequence: Synthetic oligonucleotide
  Antisense strand to SEQ ID NO: 2497898
uucuuuaauacccaaaugu

SEQ ID NO: 2497900 - RNA, 19 nt, Artificial Sequence
  Description of Artificial Sequence: Synthetic oligonucleotide
  Sense strand starting at position 2226 of SEQ ID NO: 1887804
cgagcagagccaugugcuu

SEQ ID NO: 2497901 - RNA, 19 nt, Artificial Sequence
  Description of Artificial Sequence: Synthetic oligonucleotide
  Antisense strand to SEQ ID NO: 2497900
aagcacauggcucugcucg

SEQ ID NO: 2497902 - RNA, 19 nt, Artificial Sequence
  Description of Artificial Sequence: Synthetic oligonucleotide
  Sense strand starting at position 2431 of SEQ ID NO: 1887804
caaggugucggagacgauu

SEQ ID NO: 2497903 - RNA, 19 nt, Artificial Sequence
  Description of Artificial Sequence: Synthetic oligonucleotide
  Antisense strand to SEQ ID NO: 2497902
aaucgucuccgacaccuug

SEQ ID NO: 2497904 - RNA, 19 nt, Artificial Sequence
  Description of Artificial Sequence: Synthetic oligonucleotide
  Sense strand starting at position 2442 of SEQ ID NO: 1887804
agacgauugguccguguuu

SEQ ID NO: 2497905 - RNA, 19 nt, Artificial Sequence
  Description of Artificial Sequence: Synthetic oligonucleotide
  Antisense strand to SEQ ID NO: 2497904
aaacacggaccaaucgucu

SEQ ID NO: 2497906 - RNA, 19 nt, Artificial Sequence
  Description of Artificial Sequence: Synthetic oligonucleotide
  Sense strand starting at position 2697 of SEQ ID NO: 1887804
uugcgagagcugcagauuu

SEQ ID NO: 2497907 - RNA, 19 nt, Artificial Sequence
  Description of Artificial Sequence: Synthetic oligonucleotide
  Antisense strand to SEQ ID NO: 2497906
aaaucugcagcucucgcaa

SEQ ID NO: 2497908 - RNA, 19 nt, Artificial Sequence
  Description of Artificial Sequence: Synthetic oligonucleotide
  Sense strand starting at position 2900 of SEQ ID NO: 1887804
cagcguucuggauacugga

SEQ ID NO: 2497909 - RNA, 19 nt, Artificial Sequence
  Description of Artificial Sequence: Synthetic oligonucleotide
  Antisense strand to SEQ ID NO: 2497908
uccaguauccagaacgcug

SEQ ID NO: 2497910 - RNA, 19 nt, Artificial Sequence
  Description of Artificial Sequence: Synthetic oligonucleotide
  Sense strand starting at position 2948 of SEQ ID NO: 1887804
ggcagacacucguccaaac

SEQ ID NO: 2497911 - RNA, 19 nt, Artificial Sequence
  Description of Artificial Sequence: Synthetic oligonucleotide
  Antisense strand to SEQ ID NO: 2497910
guuuggacgagugucugcc

SEQ ID NO: 2497912 - RNA, 19 nt, Artificial Sequence
  Description of Artificial Sequence: Synthetic oligonucleotide
  Sense strand starting at position 3668 of SEQ ID NO: 1887804
ggguaauuacagugaaauu

SEQ ID NO: 2497913 - RNA, 19 nt, Artificial Sequence
  Description of Artificial Sequence: Synthetic oligonucleotide
  Antisense strand to SEQ ID NO: 2497912
aauuucacuguaauuaccc

SEQ ID NO: 2497914 - RNA, 19 nt, Artificial Sequence
  Description of Artificial Sequence: Synthetic oligonucleotide
  Sense strand starting at position 3678 of SEQ ID NO: 1887804
agugaaauuacagagcugu

SEQ ID NO: 2497915 - RNA, 19 nt, Artificial Sequence
  Description of Artificial Sequence: Synthetic oligonucleotide
  Antisense strand to SEQ ID NO: 2497914
acagcucuguaauuucacu

SEQ ID NO: 2497916 - RNA, 19 nt, Artificial Sequence
  Description of Artificial Sequence: Synthetic oligonucleotide
  Sense strand starting at position 3783 of SEQ ID NO: 1887804
cugucuuucugugugucua

SEQ ID NO: 2497917 - RNA, 19 nt, Artificial Sequence
  Description of Artificial Sequence: Synthetic oligonucleotide
  Antisense strand to SEQ ID NO: 2497916
uagacacacagaaagacag

SEQ ID NO: 2497918 - RNA, 19 nt, Artificial Sequence
  Description of Artificial Sequence: Synthetic oligonucleotide
  Sense strand starting at position 3784 of SEQ ID NO: 1887804
ugucuuucugugugucuau

SEQ ID NO: 2497919 - RNA, 19 nt, Artificial Sequence
  Description of Artificial Sequence: Synthetic oligonucleotide
  Antisense strand to SEQ ID NO: 2497918
auagacacacagaaagaca

SEQ ID NO: 2497920 - RNA, 19 nt, Artificial Sequence
  Description of Artificial Sequence: Synthetic oligonucleotide
  Sense strand starting at position 3785 of SEQ ID NO: 1887804
gucuuucugugugucuauu

SEQ ID NO: 2497921 - RNA, 19 nt, Artificial Sequence
  Description of Artificial Sequence: Synthetic oligonucleotide
  Antisense strand to SEQ ID NO: 2497920
aauagacacacagaaagac

SEQ ID NO: 2497922 - RNA, 19 nt, Artificial Sequence
  Description of Artificial Sequence: Synthetic oligonucleotide
  Sense strand starting at position 27 of SEQ ID NO: 1887805
gggacuucccucugggcaa

SEQ ID NO: 2497923 - RNA, 19 nt, Artificial Sequence
  Description of Artificial Sequence: Synthetic oligonucleotide
  Antisense strand to SEQ ID NO: 2497922
uugcccagagggaaguccc

SEQ ID NO: 2497924 - RNA, 19 nt, Artificial Sequence
  Description of Artificial Sequence: Synthetic oligonucleotide
  Sense strand starting at position 28 of SEQ ID NO: 1887805
ggacuucccucugggcaaa

SEQ ID NO: 2497925 - RNA, 19 nt, Artificial Sequence
  Description of Artificial Sequence: Synthetic oligonucleotide
  Antisense strand to SEQ ID NO: 2497924
uuugcccagagggaagucc

SEQ ID NO: 2497926 - RNA, 19 nt, Artificial Sequence
  Description of Artificial Sequence: Synthetic oligonucleotide
  Sense strand starting at position 138 of SEQ ID NO: 1887805
agggucuacacagguaaga

SEQ ID NO: 2497927 - RNA, 19 nt, Artificial Sequence
  Description of Artificial Sequence: Synthetic oligonucleotide
  Antisense strand to SEQ ID NO: 2497926
ucuuaccuguguagacccu

SEQ ID NO: 2497928 - RNA, 19 nt, Artificial Sequence
  Description of Artificial Sequence: Synthetic oligonucleotide
  Sense strand starting at position 727 of SEQ ID NO: 1887805
gggcaucugcaacaagauu

SEQ ID NO: 2497929 - RNA, 19 nt, Artificial Sequence
  Description of Artificial Sequence: Synthetic oligonucleotide
  Antisense strand to SEQ ID NO: 2497928
aaucuuguugcagaugccc

SEQ ID NO: 2497930 - RNA, 19 nt, Artificial Sequence
  Description of Artificial Sequence: Synthetic oligonucleotide
  Sense strand starting at position 2086 of SEQ ID NO: 1887805
ccgcaauguccugaaagcu

SEQ ID NO: 2497931 - RNA, 19 nt, Artificial Sequence
  Description of Artificial Sequence: Synthetic oligonucleotide
  Antisense strand to SEQ ID NO: 2497930
agcuuucaggacauugcgg

SEQ ID NO: 2497932 - RNA, 19 nt, Artificial Sequence
  Description of Artificial Sequence: Synthetic oligonucleotide
  Sense strand starting at position 2241 of SEQ ID NO: 1887805
gagucauggcugcagguga

SEQ ID NO: 2497933 - RNA, 19 nt, Artificial Sequence
  Description of Artificial Sequence: Synthetic oligonucleotide
  Antisense strand to SEQ ID NO: 2497932
ucaccugcagccaugacuc

SEQ ID NO: 2497934 - RNA, 19 nt, Artificial Sequence
  Description of Artificial Sequence: Synthetic oligonucleotide
  Sense strand starting at position 2540 of SEQ ID NO: 1887805
gguuuagugcucugagguu

SEQ ID NO: 2497935 - RNA, 19 nt, Artificial Sequence
  Description of Artificial Sequence: Synthetic oligonucleotide
  Antisense strand to SEQ ID NO: 2497934
aaccucagagcacuaaacc

SEQ ID NO: 2497936 - RNA, 19 nt, Artificial Sequence
  Description of Artificial Sequence: Synthetic oligonucleotide
  Sense strand starting at position 2612 of SEQ ID NO: 1887805
gucuaauugguucauggag

SEQ ID NO: 2497937 - RNA, 19 nt, Artificial Sequence
  Description of Artificial Sequence: Synthetic oligonucleotide
  Antisense strand to SEQ ID NO: 2497936
cuccaugaaccaauuagac

SEQ ID NO: 2497938 - RNA, 19 nt, Artificial Sequence
  Description of Artificial Sequence: Synthetic oligonucleotide
  Sense strand starting at position 2688 of SEQ ID NO: 1887805
cccugaugcccagacuagu

SEQ ID NO: 2497939 - RNA, 19 nt, Artificial Sequence
  Description of Artificial Sequence: Synthetic oligonucleotide
  Antisense strand to SEQ ID NO: 2497938
acuagucugggcaucaggg

SEQ ID NO: 2497940 - RNA, 19 nt, Artificial Sequence
  Description of Artificial Sequence: Synthetic oligonucleotide
  Sense strand starting at position 2698 of SEQ ID NO: 1887805
cagacuaguuuguggcuca

SEQ ID NO: 2497941 - RNA, 19 nt, Artificial Sequence
  Description of Artificial Sequence: Synthetic oligonucleotide
  Antisense strand to SEQ ID NO: 2497940
ugagccacaaacuagucug

SEQ ID NO: 2497942 - RNA, 19 nt, Artificial Sequence
  Description of Artificial Sequence: Synthetic oligonucleotide
  Sense strand starting at position 2754 of SEQ ID NO: 1887805
cuggguugugcagacucaa

SEQ ID NO: 2497943 - RNA, 19 nt, Artificial Sequence
  Description of Artificial Sequence: Synthetic oligonucleotide
  Antisense strand to SEQ ID NO: 2497942
uugagucugcacaacccag

SEQ ID NO: 2497944 - RNA, 19 nt, Artificial Sequence
  Description of Artificial Sequence: Synthetic oligonucleotide
  Sense strand starting at position 2806 of SEQ ID NO: 1887805
ggcugaggauuuggacauu

SEQ ID NO: 2497945 - RNA, 19 nt, Artificial Sequence
  Description of Artificial Sequence: Synthetic oligonucleotide
  Antisense strand to SEQ ID NO: 2497944
aauguccaaauccucagcc

SEQ ID NO: 2497946 - RNA, 19 nt, Artificial Sequence
  Description of Artificial Sequence: Synthetic oligonucleotide
  Sense strand starting at position 2925 of SEQ ID NO: 1887805
cauagaugguccugacaac

SEQ ID NO: 2497947 - RNA, 19 nt, Artificial Sequence
  Description of Artificial Sequence: Synthetic oligonucleotide
  Antisense strand to SEQ ID NO: 2497946
guugucaggaccaucuaug

SEQ ID NO: 2497948 - RNA, 19 nt, Artificial Sequence
  Description of Artificial Sequence: Synthetic oligonucleotide
  Sense strand starting at position 3013 of SEQ ID NO: 1887805
aauguagugacaggaagua

SEQ ID NO: 2497949 - RNA, 19 nt, Artificial Sequence
  Description of Artificial Sequence: Synthetic oligonucleotide
  Antisense strand to SEQ ID NO: 2497948
uacuuccugucacuacauu

SEQ ID NO: 2497950 - RNA, 19 nt, Artificial Sequence
  Description of Artificial Sequence: Synthetic oligonucleotide
  Sense strand starting at position 3135 of SEQ ID NO: 1887805
ggagcugaugguugcacaa

SEQ ID NO: 2497951 - RNA, 19 nt, Artificial Sequence
  Description of Artificial Sequence: Synthetic oligonucleotide
  Antisense strand to SEQ ID NO: 2497950
uugugcaaccaucagcucc

SEQ ID NO: 2497952 - RNA, 19 nt, Artificial Sequence
  Description of Artificial Sequence: Synthetic oligonucleotide
  Sense strand starting at position 3137 of SEQ ID NO: 1887805
agcugaugguugcacaaga

SEQ ID NO: 2497953 - RNA, 19 nt, Artificial Sequence
  Description of Artificial Sequence: Synthetic oligonucleotide
  Antisense strand to SEQ ID NO: 2497952
ucuugugcaaccaucagcu

SEQ ID NO: 2497954 - RNA, 19 nt, Artificial Sequence
  Description of Artificial Sequence: Synthetic oligonucleotide
  Sense strand starting at position 3681 of SEQ ID NO: 1887805
ugguuaaaguaguagguuu

SEQ ID NO: 2497955 - RNA, 19 nt, Artificial Sequence
  Description of Artificial Sequence: Synthetic oligonucleotide
  Antisense strand to SEQ ID NO: 2497954
aaaccuacuacuuuaacca

SEQ ID NO: 2497956 - RNA, 19 nt, Artificial Sequence
  Description of Artificial Sequence: Synthetic oligonucleotide
  Sense strand starting at position 3688 of SEQ ID NO: 1887805
aguaguagguuuguguuau

SEQ ID NO: 2497957 - RNA, 19 nt, Artificial Sequence
  Description of Artificial Sequence: Synthetic oligonucleotide
  Antisense strand to SEQ ID NO: 2497956
auaacacaaaccuacuacu

SEQ ID NO: 2497958 - RNA, 19 nt, Artificial Sequence
  Description of Artificial Sequence: Synthetic oligonucleotide
  Sense strand starting at position 3689 of SEQ ID NO: 1887805
guaguagguuuguguuaug

SEQ ID NO: 2497959 - RNA, 19 nt, Artificial Sequence
  Description of Artificial Sequence: Synthetic oligonucleotide
  Antisense strand to SEQ ID NO: 2497958
cauaacacaaaccuacuac

SEQ ID NO: 2497960 - RNA, 19 nt, Artificial Sequence
  Description of Artificial Sequence: Synthetic oligonucleotide
  Sense strand starting at position 3692 of SEQ ID NO: 1887805
guagguuuguguuaugggu

SEQ ID NO: 2497961 - RNA, 19 nt, Artificial Sequence
  Description of Artificial Sequence: Synthetic oligonucleotide
  Antisense strand to SEQ ID NO: 2497960
acccauaacacaaaccuac

SEQ ID NO: 2497962 - RNA, 19 nt, Artificial Sequence
  Description of Artificial Sequence: Synthetic oligonucleotide
  Sense strand starting at position 3694 of SEQ ID NO: 1887805
agguuuguguuauggguau

SEQ ID NO: 2497963 - RNA, 19 nt, Artificial Sequence
  Description of Artificial Sequence: Synthetic oligonucleotide
  Antisense strand to SEQ ID NO: 2497962
auacccauaacacaaaccu

SEQ ID NO: 2497964 - RNA, 19 nt, Artificial Sequence
  Description of Artificial Sequence: Synthetic oligonucleotide
  Sense strand starting at position 3696 of SEQ ID NO: 1887805
guuuguguuauggguauuu

SEQ ID NO: 2497965 - RNA, 19 nt, Artificial Sequence
  Description of Artificial Sequence: Synthetic oligonucleotide
  Antisense strand to SEQ ID NO: 2497964
aaauacccauaacacaaac

SEQ ID NO: 2497966 - RNA, 19 nt, Artificial Sequence
  Description of Artificial Sequence: Synthetic oligonucleotide
  Sense strand starting at position 3836 of SEQ ID NO: 1887805
gaaagucacucacuuggaa

SEQ ID NO: 2497967 - RNA, 19 nt, Artificial Sequence
  Description of Artificial Sequence: Synthetic oligonucleotide
  Antisense strand to SEQ ID NO: 2497966
uuccaagugagugacuuuc

SEQ ID NO: 2497968 - RNA, 19 nt, Artificial Sequence
  Description of Artificial Sequence: Synthetic oligonucleotide
  Sense strand starting at position 3839 of SEQ ID NO: 1887805
agucacucacuuggaaaga

SEQ ID NO: 2497969 - RNA, 19 nt, Artificial Sequence
  Description of Artificial Sequence: Synthetic oligonucleotide
  Antisense strand to SEQ ID NO: 2497968
ucuuuccaagugagugacu

SEQ ID NO: 2497970 - RNA, 19 nt, Artificial Sequence
  Description of Artificial Sequence: Synthetic oligonucleotide
  Sense strand starting at position 3931 of SEQ ID NO: 1887805
aguuauacuuacuccagau

SEQ ID NO: 2497971 - RNA, 19 nt, Artificial Sequence
  Description of Artificial Sequence: Synthetic oligonucleotide
  Antisense strand to SEQ ID NO: 2497970
aucuggaguaaguauaacu

SEQ ID NO: 2497972 - RNA, 19 nt, Artificial Sequence
  Description of Artificial Sequence: Synthetic oligonucleotide
  Sense strand starting at position 166 of SEQ ID NO: 1887806
auucucugauaagcagaaa

SEQ ID NO: 2497973 - RNA, 19 nt, Artificial Sequence
  Description of Artificial Sequence: Synthetic oligonucleotide
  Antisense strand to SEQ ID NO: 2497972
uuucugcuuaucagagaau

SEQ ID NO: 2497974 - RNA, 19 nt, Artificial Sequence
  Description of Artificial Sequence: Synthetic oligonucleotide
  Sense strand starting at position 461 of SEQ ID NO: 1887806
cgucuccaaacaugagaga

SEQ ID NO: 2497975 - RNA, 19 nt, Artificial Sequence
  Description of Artificial Sequence: Synthetic oligonucleotide
  Antisense strand to SEQ ID NO: 2497974
ucucucauguuuggagacg

SEQ ID NO: 2497976 - RNA, 19 nt, Artificial Sequence
  Description of Artificial Sequence: Synthetic oligonucleotide
  Sense strand starting at position 574 of SEQ ID NO: 1887806
aggagucucugguuaccau

SEQ ID NO: 2497977 - RNA, 19 nt, Artificial Sequence
  Description of Artificial Sequence: Synthetic oligonucleotide
  Antisense strand to SEQ ID NO: 2497976
augguaaccagagacuccu

SEQ ID NO: 2497978 - RNA, 19 nt, Artificial Sequence
  Description of Artificial Sequence: Synthetic oligonucleotide
  Sense strand starting at position 581 of SEQ ID NO: 1887806
ucugguuaccauggugagu

SEQ ID NO: 2497979 - RNA, 19 nt, Artificial Sequence
  Description of Artificial Sequence: Synthetic oligonucleotide
  Antisense strand to SEQ ID NO: 2497978
acucaccaugguaaccaga

SEQ ID NO: 2497980 - RNA, 19 nt, Artificial Sequence
  Description of Artificial Sequence: Synthetic oligonucleotide
  Sense strand starting at position 791 of SEQ ID NO: 1887806
ucuagaagcccgcagaaau

SEQ ID NO: 2497981 - RNA, 19 nt, Artificial Sequence
  Description of Artificial Sequence: Synthetic oligonucleotide
  Antisense strand to SEQ ID NO: 2497980
auuucugcgggcuucuaga

SEQ ID NO: 2497982 - RNA, 19 nt, Artificial Sequence
  Description of Artificial Sequence: Synthetic oligonucleotide
  Sense strand starting at position 1988 of SEQ ID NO: 1887806
gcaugagaucuuggcaguu

SEQ ID NO: 2497983 - RNA, 19 nt, Artificial Sequence
  Description of Artificial Sequence: Synthetic oligonucleotide
  Antisense strand to SEQ ID NO: 2497982
aacugccaagaucucaugc

SEQ ID NO: 2497984 - RNA, 19 nt, Artificial Sequence
  Description of Artificial Sequence: Synthetic oligonucleotide
  Sense strand starting at position 2209 of SEQ ID NO: 1887806
augggacaccugugucuaa

SEQ ID NO: 2497985 - RNA, 19 nt, Artificial Sequence
  Description of Artificial Sequence: Synthetic oligonucleotide
  Antisense strand to SEQ ID NO: 2497984
uuagacacaggugucccau

SEQ ID NO: 2497986 - RNA, 19 nt, Artificial Sequence
  Description of Artificial Sequence: Synthetic oligonucleotide
  Sense strand starting at position 2210 of SEQ ID NO: 1887806
ugggacaccugugucuaaa

SEQ ID NO: 2497987 - RNA, 19 nt, Artificial Sequence
  Description of Artificial Sequence: Synthetic oligonucleotide
  Antisense strand to SEQ ID NO: 2497986
uuuagacacagguguccca

SEQ ID NO: 2497988 - RNA, 19 nt, Artificial Sequence
  Description of Artificial Sequence: Synthetic oligonucleotide
  Sense strand starting at position 2262 of SEQ ID NO: 1887806
auuguuuacgucugggaac

SEQ ID NO: 2497989 - RNA, 19 nt, Artificial Sequence
  Description of Artificial Sequence: Synthetic oligonucleotide
  Antisense strand to SEQ ID NO: 2497988
guucccagacguaaacaau

SEQ ID NO: 2497990 - RNA, 19 nt, Artificial Sequence
  Description of Artificial Sequence: Synthetic oligonucleotide
  Sense strand starting at position 2313 of SEQ ID NO: 1887806
caucuugagccaugagaua

SEQ ID NO: 2497991 - RNA, 19 nt, Artificial Sequence
  Description of Artificial Sequence: Synthetic oligonucleotide
  Antisense strand to SEQ ID NO: 2497990
uaucucauggcucaagaug

SEQ ID NO: 2497992 - RNA, 19 nt, Artificial Sequence
  Description of Artificial Sequence: Synthetic oligonucleotide
  Sense strand starting at position 2322 of SEQ ID NO: 1887806
ccaugagauagucgauccu

SEQ ID NO: 2497993 - RNA, 19 nt, Artificial Sequence
  Description of Artificial Sequence: Synthetic oligonucleotide
  Antisense strand to SEQ ID NO: 2497992
aggaucgacuaucucaugg

SEQ ID NO: 2497994 - RNA, 19 nt, Artificial Sequence
  Description of Artificial Sequence: Synthetic oligonucleotide
  Sense strand starting at position 2349 of SEQ ID NO: 1887806
uaggauucuguagggucua

SEQ ID NO: 2497995 - RNA, 19 nt, Artificial Sequence
  Description of Artificial Sequence: Synthetic oligonucleotide
  Antisense strand to SEQ ID NO: 2497994
uagacccuacagaauccua

SEQ ID NO: 2497996 - RNA, 19 nt, Artificial Sequence
  Description of Artificial Sequence: Synthetic oligonucleotide
  Sense strand starting at position 2516 of SEQ ID NO: 1887806
uugagauggucccuaucca

SEQ ID NO: 2497997 - RNA, 19 nt, Artificial Sequence
  Description of Artificial Sequence: Synthetic oligonucleotide
  Antisense strand to SEQ ID NO: 2497996
uggauagggaccaucucaa

SEQ ID NO: 2497998 - RNA, 19 nt, Artificial Sequence
  Description of Artificial Sequence: Synthetic oligonucleotide
  Sense strand starting at position 2517 of SEQ ID NO: 1887806
ugagauggucccuauccau

SEQ ID NO: 2497999 - RNA, 19 nt, Artificial Sequence
  Description of Artificial Sequence: Synthetic oligonucleotide
  Antisense strand to SEQ ID NO: 2497998
auggauagggaccaucuca

SEQ ID NO: 2498000 - RNA, 19 nt, Artificial Sequence
  Description of Artificial Sequence: Synthetic oligonucleotide
  Sense strand starting at position 2537 of SEQ ID NO: 1887806
gccucauguccuuagcaca

SEQ ID NO: 2498001 - RNA, 19 nt, Artificial Sequence
  Description of Artificial Sequence: Synthetic oligonucleotide
  Antisense strand to SEQ ID NO: 2498000
ugugcuaaggacaugaggc

SEQ ID NO: 2498002 - RNA, 19 nt, Artificial Sequence
  Description of Artificial Sequence: Synthetic oligonucleotide
  Sense strand starting at position 2558 of SEQ ID NO: 1887806
cacacugucuggcuuuaga

SEQ ID NO: 2498003 - RNA, 19 nt, Artificial Sequence
  Description of Artificial Sequence: Synthetic oligonucleotide
  Antisense strand to SEQ ID NO: 2498002
ucuaaagccagacagugug

SEQ ID NO: 2498004 - RNA, 19 nt, Artificial Sequence
  Description of Artificial Sequence: Synthetic oligonucleotide
  Sense strand starting at position 2585 of SEQ ID NO: 1887806
cacugaugaguuugccaug

SEQ ID NO: 2498005 - RNA, 19 nt, Artificial Sequence
  Description of Artificial Sequence: Synthetic oligonucleotide
  Antisense strand to SEQ ID NO: 2498004
cauggcaaacucaucagug

SEQ ID NO: 2498006 - RNA, 19 nt, Artificial Sequence
  Description of Artificial Sequence: Synthetic oligonucleotide
  Sense strand starting at position 2740 of SEQ ID NO: 1887806
aaggacacauguucuauga

SEQ ID NO: 2498007 - RNA, 19 nt, Artificial Sequence
  Description of Artificial Sequence: Synthetic oligonucleotide
  Antisense strand to SEQ ID NO: 2498006
ucauagaacauguguccuu

SEQ ID NO: 2498008 - RNA, 19 nt, Artificial Sequence
  Description of Artificial Sequence: Synthetic oligonucleotide
  Sense strand starting at position 2749 of SEQ ID NO: 1887806
uguucuaugaaccagugua

SEQ ID NO: 2498009 - RNA, 19 nt, Artificial Sequence
  Description of Artificial Sequence: Synthetic oligonucleotide
  Antisense strand to SEQ ID NO: 2498008
uacacugguucauagaaca

SEQ ID NO: 2498010 - RNA, 19 nt, Artificial Sequence
  Description of Artificial Sequence: Synthetic oligonucleotide
  Sense strand starting at position 2783 of SEQ ID NO: 1887806
cgguuaaugcugccucuca

SEQ ID NO: 2498011 - RNA, 19 nt, Artificial Sequence
  Description of Artificial Sequence: Synthetic oligonucleotide
  Antisense strand to SEQ ID NO: 2498010
ugagaggcagcauuaaccg

SEQ ID NO: 2498012 - RNA, 19 nt, Artificial Sequence
  Description of Artificial Sequence: Synthetic oligonucleotide
  Sense strand starting at position 2785 of SEQ ID NO: 1887806
guuaaugcugccucucagu

SEQ ID NO: 2498013 - RNA, 19 nt, Artificial Sequence
  Description of Artificial Sequence: Synthetic oligonucleotide
  Antisense strand to SEQ ID NO: 2498012
acugagaggcagcauuaac

SEQ ID NO: 2498014 - RNA, 19 nt, Artificial Sequence
  Description of Artificial Sequence: Synthetic oligonucleotide
  Sense strand starting at position 2970 of SEQ ID NO: 1887806
guuuaugacuauuugucuu

SEQ ID NO: 2498015 - RNA, 19 nt, Artificial Sequence
  Description of Artificial Sequence: Synthetic oligonucleotide
  Antisense strand to SEQ ID NO: 2498014
aagacaaauagucauaaac

SEQ ID NO: 2498016 - RNA, 19 nt, Artificial Sequence
  Description of Artificial Sequence: Synthetic oligonucleotide
  Sense strand starting at position 2976 of SEQ ID NO: 1887806
gacuauuugucuuucguga

SEQ ID NO: 2498017 - RNA, 19 nt, Artificial Sequence
  Description of Artificial Sequence: Synthetic oligonucleotide
  Antisense strand to SEQ ID NO: 2498016
ucacgaaagacaaauaguc

SEQ ID NO: 2498018 - RNA, 19 nt, Artificial Sequence
  Description of Artificial Sequence: Synthetic oligonucleotide
  Sense strand starting at position 3011 of SEQ ID NO: 1887806
uuaauugucuuguuggaau

SEQ ID NO: 2498019 - RNA, 19 nt, Artificial Sequence
  Description of Artificial Sequence: Synthetic oligonucleotide
  Antisense strand to SEQ ID NO: 2498018
auuccaacaagacaauuaa

SEQ ID NO: 2498020 - RNA, 19 nt, Artificial Sequence
  Description of Artificial Sequence: Synthetic oligonucleotide
  Sense strand starting at position 3062 of SEQ ID NO: 1887806
ucccucuuguuugucagaa

SEQ ID NO: 2498021 - RNA, 19 nt, Artificial Sequence
  Description of Artificial Sequence: Synthetic oligonucleotide
  Antisense strand to SEQ ID NO: 2498020
uucugacaaacaagaggga

SEQ ID NO: 2498022 - RNA, 19 nt, Artificial Sequence
  Description of Artificial Sequence: Synthetic oligonucleotide
  Sense strand starting at position 3063 of SEQ ID NO: 1887806
cccucuuguuugucagaag

SEQ ID NO: 2498023 - RNA, 19 nt, Artificial Sequence
  Description of Artificial Sequence: Synthetic oligonucleotide
  Antisense strand to SEQ ID NO: 2498022
cuucugacaaacaagaggg

SEQ ID NO: 2498024 - RNA, 19 nt, Artificial Sequence
  Description of Artificial Sequence: Synthetic oligonucleotide
  Sense strand starting at position 3425 of SEQ ID NO: 1887806
cugaucucuuaugugagau

SEQ ID NO: 2498025 - RNA, 19 nt, Artificial Sequence
  Description of Artificial Sequence: Synthetic oligonucleotide
  Antisense strand to SEQ ID NO: 2498024
aucucacauaagagaucag

SEQ ID NO: 2498026 - RNA, 19 nt, Artificial Sequence
  Description of Artificial Sequence: Synthetic oligonucleotide
  Sense strand starting at position 3427 of SEQ ID NO: 1887806
gaucucuuaugugagauuu

SEQ ID NO: 2498027 - RNA, 19 nt, Artificial Sequence
  Description of Artificial Sequence: Synthetic oligonucleotide
  Antisense strand to SEQ ID NO: 2498026
aaaucucacauaagagauc

SEQ ID NO: 2498028 - RNA, 19 nt, Artificial Sequence
  Description of Artificial Sequence: Synthetic oligonucleotide
  Sense strand starting at position 3435 of SEQ ID NO: 1887806
augugagauuuggaaaucu

SEQ ID NO: 2498029 - RNA, 19 nt, Artificial Sequence
  Description of Artificial Sequence: Synthetic oligonucleotide
  Antisense strand to SEQ ID NO: 2498028
agauuuccaaaucucacau

SEQ ID NO: 2498030 - RNA, 19 nt, Artificial Sequence
  Description of Artificial Sequence: Synthetic oligonucleotide
  Sense strand starting at position 3444 of SEQ ID NO: 1887806
uuggaaaucugccuuccua

SEQ ID NO: 2498031 - RNA, 19 nt, Artificial Sequence
  Description of Artificial Sequence: Synthetic oligonucleotide
  Antisense strand to SEQ ID NO: 2498030
uaggaaggcagauuuccaa

SEQ ID NO: 2498032 - RNA, 19 nt, Artificial Sequence
  Description of Artificial Sequence: Synthetic oligonucleotide
  Sense strand starting at position 3519 of SEQ ID NO: 1887806
acuaaauguccuggcccau

SEQ ID NO: 2498033 - RNA, 19 nt, Artificial Sequence
  Description of Artificial Sequence: Synthetic oligonucleotide
  Antisense strand to SEQ ID NO: 2498032
augggccaggacauuuagu

SEQ ID NO: 2498034 - RNA, 19 nt, Artificial Sequence
  Description of Artificial Sequence: Synthetic oligonucleotide
  Sense strand starting at position 3531 of SEQ ID NO: 1887806
ggcccauucuguuuauaga

SEQ ID NO: 2498035 - RNA, 19 nt, Artificial Sequence
  Description of Artificial Sequence: Synthetic oligonucleotide
  Antisense strand to SEQ ID NO: 2498034
ucuauaaacagaaugggcc

SEQ ID NO: 2498036 - RNA, 19 nt, Artificial Sequence
  Description of Artificial Sequence: Synthetic oligonucleotide
  Sense strand starting at position 3532 of SEQ ID NO: 1887806
gcccauucuguuuauagau

SEQ ID NO: 2498037 - RNA, 19 nt, Artificial Sequence
  Description of Artificial Sequence: Synthetic oligonucleotide
  Antisense strand to SEQ ID NO: 2498036
aucuauaaacagaaugggc

SEQ ID NO: 2498038 - RNA, 19 nt, Artificial Sequence
  Description of Artificial Sequence: Synthetic oligonucleotide
  Sense strand starting at position 3654 of SEQ ID NO: 1887806
guaacaguauuaucuaggu

SEQ ID NO: 2498039 - RNA, 19 nt, Artificial Sequence
  Description of Artificial Sequence: Synthetic oligonucleotide
  Antisense strand to SEQ ID NO: 2498038
accuagauaauacuguuac

SEQ ID NO: 2498040 - RNA, 19 nt, Artificial Sequence
  Description of Artificial Sequence: Synthetic oligonucleotide
  Sense strand starting at position 3659 of SEQ ID NO: 1887806
aguauuaucuagguaaaug

SEQ ID NO: 2498041 - RNA, 19 nt, Artificial Sequence
  Description of Artificial Sequence: Synthetic oligonucleotide
  Antisense strand to SEQ ID NO: 2498040
cauuuaccuagauaauacu

SEQ ID NO: 2498042 - RNA, 19 nt, Artificial Sequence
  Description of Artificial Sequence: Synthetic oligonucleotide
  Sense strand starting at position 3660 of SEQ ID NO: 1887806
guauuaucuagguaaaugu

SEQ ID NO: 2498043 - RNA, 19 nt, Artificial Sequence
  Description of Artificial Sequence: Synthetic oligonucleotide
  Antisense strand to SEQ ID NO: 2498042
acauuuaccuagauaauac

SEQ ID NO: 2498044 - RNA, 19 nt, Artificial Sequence
  Description of Artificial Sequence: Synthetic oligonucleotide
  Sense strand starting at position 3728 of SEQ ID NO: 1887806
ggaauugagucuuuaauaa

SEQ ID NO: 2498045 - RNA, 19 nt, Artificial Sequence
  Description of Artificial Sequence: Synthetic oligonucleotide
  Antisense strand to SEQ ID NO: 2498044
uuauuaaagacucaauucc

SEQ ID NO: 2498046 - RNA, 19 nt, Artificial Sequence
  Description of Artificial Sequence: Synthetic oligonucleotide
  Sense strand starting at position 3758 of SEQ ID NO: 1887806
ccuuguaaguucuucuaaa

SEQ ID NO: 2498047 - RNA, 19 nt, Artificial Sequence
  Description of Artificial Sequence: Synthetic oligonucleotide
  Antisense strand to SEQ ID NO: 2498046
uuuagaagaacuuacaagg

SEQ ID NO: 2498048 - RNA, 19 nt, Artificial Sequence
  Description of Artificial Sequence: Synthetic oligonucleotide
  Sense strand starting at position 3843 of SEQ ID NO: 1887806
auuuaugggucagaauguu

SEQ ID NO: 2498049 - RNA, 19 nt, Artificial Sequence
  Description of Artificial Sequence: Synthetic oligonucleotide
  Antisense strand to SEQ ID NO: 2498048
aacauucugacccauaaau

SEQ ID NO: 2498050 - RNA, 19 nt, Artificial Sequence
  Description of Artificial Sequence: Synthetic oligonucleotide
  Sense strand starting at position 3909 of SEQ ID NO: 1887806
aggcauaauuuacaugaaa

SEQ ID NO: 2498051 - RNA, 19 nt, Artificial Sequence
  Description of Artificial Sequence: Synthetic oligonucleotide
  Antisense strand to SEQ ID NO: 2498050
uuucauguaaauuaugccu

SEQ ID NO: 2498052 - RNA, 19 nt, Artificial Sequence
  Description of Artificial Sequence: Synthetic oligonucleotide
  Sense strand starting at position 89 of SEQ ID NO: 1887807
ugugccuuaucugucacau

SEQ ID NO: 2498053 - RNA, 19 nt, Artificial Sequence
  Description of Artificial Sequence: Synthetic oligonucleotide
  Antisense strand to SEQ ID NO: 2498052
augugacagauaaggcaca

SEQ ID NO: 2498054 - RNA, 19 nt, Artificial Sequence
  Description of Artificial Sequence: Synthetic oligonucleotide
  Sense strand starting at position 165 of SEQ ID NO: 1887807
aguaguaguuccucaaauc

SEQ ID NO: 2498055 - RNA, 19 nt, Artificial Sequence
  Description of Artificial Sequence: Synthetic oligonucleotide
  Antisense strand to SEQ ID NO: 2498054
gauuugaggaacuacuacu

SEQ ID NO: 2498056 - RNA, 19 nt, Artificial Sequence
  Description of Artificial Sequence: Synthetic oligonucleotide
  Sense strand starting at position 273 of SEQ ID NO: 1887807
uuccauuugggauguuugu

SEQ ID NO: 2498057 - RNA, 19 nt, Artificial Sequence
  Description of Artificial Sequence: Synthetic oligonucleotide
  Antisense strand to SEQ ID NO: 2498056
acaaacaucccaaauggaa

SEQ ID NO: 2498058 - RNA, 19 nt, Artificial Sequence
  Description of Artificial Sequence: Synthetic oligonucleotide
  Sense strand starting at position 299 of SEQ ID NO: 1887807
ggauuauuccauuguauau

SEQ ID NO: 2498059 - RNA, 19 nt, Artificial Sequence
  Description of Artificial Sequence: Synthetic oligonucleotide
  Antisense strand to SEQ ID NO: 2498058
auauacaauggaauaaucc

SEQ ID NO: 2498060 - RNA, 19 nt, Artificial Sequence
  Description of Artificial Sequence: Synthetic oligonucleotide
  Sense strand starting at position 309 of SEQ ID NO: 1887807
auuguauauugaucccuuu

SEQ ID NO: 2498061 - RNA, 19 nt, Artificial Sequence
  Description of Artificial Sequence: Synthetic oligonucleotide
  Antisense strand to SEQ ID NO: 2498060
aaagggaucaauauacaau

SEQ ID NO: 2498062 - RNA, 19 nt, Artificial Sequence
  Description of Artificial Sequence: Synthetic oligonucleotide
  Sense strand starting at position 312 of SEQ ID NO: 1887807
guauauugaucccuuucuu

SEQ ID NO: 2498063 - RNA, 19 nt, Artificial Sequence
  Description of Artificial Sequence: Synthetic oligonucleotide
  Antisense strand to SEQ ID NO: 2498062
aagaaagggaucaauauac

SEQ ID NO: 2498064 - RNA, 19 nt, Artificial Sequence
  Description of Artificial Sequence: Synthetic oligonucleotide
  Sense strand starting at position 350 of SEQ ID NO: 1887807
gggcuagagucaguucagu

SEQ ID NO: 2498065 - RNA, 19 nt, Artificial Sequence
  Description of Artificial Sequence: Synthetic oligonucleotide
  Antisense strand to SEQ ID NO: 2498064
acugaacugacucuagccc

SEQ ID NO: 2498066 - RNA, 19 nt, Artificial Sequence
  Description of Artificial Sequence: Synthetic oligonucleotide
  Sense strand starting at position 355 of SEQ ID NO: 1887807
agagucaguucaguuguaa

SEQ ID NO: 2498067 - RNA, 19 nt, Artificial Sequence
  Description of Artificial Sequence: Synthetic oligonucleotide
  Antisense strand to SEQ ID NO: 2498066
uuacaacugaacugacucu

SEQ ID NO: 2498068 - RNA, 19 nt, Artificial Sequence
  Description of Artificial Sequence: Synthetic oligonucleotide
  Sense strand starting at position 364 of SEQ ID NO: 1887807
ucaguuguaauaggguuaa

SEQ ID NO: 2498069 - RNA, 19 nt, Artificial Sequence
  Description of Artificial Sequence: Synthetic oligonucleotide
  Antisense strand to SEQ ID NO: 2498068
uuaacccuauuacaacuga

SEQ ID NO: 2498070 - RNA, 19 nt, Artificial Sequence
  Description of Artificial Sequence: Synthetic oligonucleotide
  Sense strand starting at position 573 of SEQ ID NO: 1887807
cuccuugugugagcagaga

SEQ ID NO: 2498071 - RNA, 19 nt, Artificial Sequence
  Description of Artificial Sequence: Synthetic oligonucleotide
  Antisense strand to SEQ ID NO: 2498070
ucucugcucacacaaggag

SEQ ID NO: 2498072 - RNA, 19 nt, Artificial Sequence
  Description of Artificial Sequence: Synthetic oligonucleotide
  Sense strand starting at position 900 of SEQ ID NO: 1887807
ugagcaucuaaauguggau

SEQ ID NO: 2498073 - RNA, 19 nt, Artificial Sequence
  Description of Artificial Sequence: Synthetic oligonucleotide
  Antisense strand to SEQ ID NO: 2498072
auccacauuuagaugcuca

SEQ ID NO: 2498074 - RNA, 19 nt, Artificial Sequence
  Description of Artificial Sequence: Synthetic oligonucleotide
  Sense strand starting at position 999 of SEQ ID NO: 1887807
uugguuugcgccaggaagu

SEQ ID NO: 2498075 - RNA, 19 nt, Artificial Sequence
  Description of Artificial Sequence: Synthetic oligonucleotide
  Antisense strand to SEQ ID NO: 2498074
acuuccuggcgcaaaccaa

SEQ ID NO: 2498076 - RNA, 19 nt, Artificial Sequence
  Description of Artificial Sequence: Synthetic oligonucleotide
  Sense strand starting at position 1103 of SEQ ID NO: 1887807
guuuaacaauguguggaga

SEQ ID NO: 2498077 - RNA, 19 nt, Artificial Sequence
  Description of Artificial Sequence: Synthetic oligonucleotide
  Antisense strand to SEQ ID NO: 2498076
ucuccacacauuguuaaac

SEQ ID NO: 2498078 - RNA, 19 nt, Artificial Sequence
  Description of Artificial Sequence: Synthetic oligonucleotide
  Sense strand starting at position 1104 of SEQ ID NO: 1887807
uuuaacaauguguggagau

SEQ ID NO: 2498079 - RNA, 19 nt, Artificial Sequence
  Description of Artificial Sequence: Synthetic oligonucleotide
  Antisense strand to SEQ ID NO: 2498078
aucuccacacauuguuaaa

SEQ ID NO: 2498080 - RNA, 19 nt, Artificial Sequence
  Description of Artificial Sequence: Synthetic oligonucleotide
  Sense strand starting at position 1116 of SEQ ID NO: 1887807
uggagauaauuguuauugu

SEQ ID NO: 2498081 - RNA, 19 nt, Artificial Sequence
  Description of Artificial Sequence: Synthetic oligonucleotide
  Antisense strand to SEQ ID NO: 2498080
acaauaacaauuaucucca

SEQ ID NO: 2498082 - RNA, 19 nt, Artificial Sequence
  Description of Artificial Sequence: Synthetic oligonucleotide
  Sense strand starting at position 1127 of SEQ ID NO: 1887807
guuauugucucacugcaug

SEQ ID NO: 2498083 - RNA, 19 nt, Artificial Sequence
  Description of Artificial Sequence: Synthetic oligonucleotide
  Antisense strand to SEQ ID NO: 2498082
caugcagugagacaauaac

SEQ ID NO: 2498084 - RNA, 19 nt, Artificial Sequence
  Description of Artificial Sequence: Synthetic oligonucleotide
  Sense strand starting at position 1491 of SEQ ID NO: 1887807
gugccuuaccugucacguu

SEQ ID NO: 2498085 - RNA, 19 nt, Artificial Sequence
  Description of Artificial Sequence: Synthetic oligonucleotide
  Antisense strand to SEQ ID NO: 2498084
aacgugacagguaaggcac

SEQ ID NO: 2498086 - RNA, 19 nt, Artificial Sequence
  Description of Artificial Sequence: Synthetic oligonucleotide
  Sense strand starting at position 2618 of SEQ ID NO: 1887807
ggcugugaaggugaggauu

SEQ ID NO: 2498087 - RNA, 19 nt, Artificial Sequence
  Description of Artificial Sequence: Synthetic oligonucleotide
  Antisense strand to SEQ ID NO: 2498086
aauccucaccuucacagcc

SEQ ID NO: 2498088 - RNA, 19 nt, Artificial Sequence
  Description of Artificial Sequence: Synthetic oligonucleotide
  Sense strand starting at position 2630 of SEQ ID NO: 1887807
gaggauugcgccuguugau

SEQ ID NO: 2498089 - RNA, 19 nt, Artificial Sequence
  Description of Artificial Sequence: Synthetic oligonucleotide
  Antisense strand to SEQ ID NO: 2498088
aucaacaggcgcaauccuc

SEQ ID NO: 2498090 - RNA, 19 nt, Artificial Sequence
  Description of Artificial Sequence: Synthetic oligonucleotide
  Sense strand starting at position 2699 of SEQ ID NO: 1887807
ugaggcugugauuguugua

SEQ ID NO: 2498091 - RNA, 19 nt, Artificial Sequence
  Description of Artificial Sequence: Synthetic oligonucleotide
  Antisense strand to SEQ ID NO: 2498090
uacaacaaucacagccuca

SEQ ID NO: 2498092 - RNA, 19 nt, Artificial Sequence
  Description of Artificial Sequence: Synthetic oligonucleotide
  Sense strand starting at position 2734 of SEQ ID NO: 1887807
acaggaaagucauaaggga

SEQ ID NO: 2498093 - RNA, 19 nt, Artificial Sequence
  Description of Artificial Sequence: Synthetic oligonucleotide
  Antisense strand to SEQ ID NO: 2498092
ucccuuaugacuuuccugu

SEQ ID NO: 2498094 - RNA, 19 nt, Artificial Sequence
  Description of Artificial Sequence: Synthetic oligonucleotide
  Sense strand starting at position 2968 of SEQ ID NO: 1887807
cucagugaugggcgcgauu

SEQ ID NO: 2498095 - RNA, 19 nt, Artificial Sequence
  Description of Artificial Sequence: Synthetic oligonucleotide
  Antisense strand to SEQ ID NO: 2498094
aaucgcgcccaucacugag

SEQ ID NO: 2498096 - RNA, 19 nt, Artificial Sequence
  Description of Artificial Sequence: Synthetic oligonucleotide
  Sense strand starting at position 3233 of SEQ ID NO: 1887807
ucaagucugucccuugaaa

SEQ ID NO: 2498097 - RNA, 19 nt, Artificial Sequence
  Description of Artificial Sequence: Synthetic oligonucleotide
  Antisense strand to SEQ ID NO: 2498096
uuucaagggacagacuuga

SEQ ID NO: 2498098 - RNA, 19 nt, Artificial Sequence
  Description of Artificial Sequence: Synthetic oligonucleotide
  Sense strand starting at position 3235 of SEQ ID NO: 1887807
aagucugucccuugaaaug

SEQ ID NO: 2498099 - RNA, 19 nt, Artificial Sequence
  Description of Artificial Sequence: Synthetic oligonucleotide
  Antisense strand to SEQ ID NO: 2498098
cauuucaagggacagacuu

SEQ ID NO: 2498100 - RNA, 19 nt, Artificial Sequence
  Description of Artificial Sequence: Synthetic oligonucleotide
  Sense strand starting at position 3351 of SEQ ID NO: 1887807
ugauaauagucuuccugcu

SEQ ID NO: 2498101 - RNA, 19 nt, Artificial Sequence
  Description of Artificial Sequence: Synthetic oligonucleotide
  Antisense strand to SEQ ID NO: 2498100
agcaggaagacuauuauca

SEQ ID NO: 2498102 - RNA, 19 nt, Artificial Sequence
  Description of Artificial Sequence: Synthetic oligonucleotide
  Sense strand starting at position 3391 of SEQ ID NO: 1887807
ggcacaugcugccuugaaa

SEQ ID NO: 2498103 - RNA, 19 nt, Artificial Sequence
  Description of Artificial Sequence: Synthetic oligonucleotide
  Antisense strand to SEQ ID NO: 2498102
uuucaaggcagcaugugcc

SEQ ID NO: 2498104 - RNA, 19 nt, Artificial Sequence
  Description of Artificial Sequence: Synthetic oligonucleotide
  Sense strand starting at position 3530 of SEQ ID NO: 1887807
uagagaucauuuggcugua

SEQ ID NO: 2498105 - RNA, 19 nt, Artificial Sequence
  Description of Artificial Sequence: Synthetic oligonucleotide
  Antisense strand to SEQ ID NO: 2498104
uacagccaaaugaucucua

SEQ ID NO: 2498106 - RNA, 19 nt, Artificial Sequence
  Description of Artificial Sequence: Synthetic oligonucleotide
  Sense strand starting at position 3542 of SEQ ID NO: 1887807
ggcuguaacgauugagaga

SEQ ID NO: 2498107 - RNA, 19 nt, Artificial Sequence
  Description of Artificial Sequence: Synthetic oligonucleotide
  Antisense strand to SEQ ID NO: 2498106
ucucucaaucguuacagcc

SEQ ID NO: 2498108 - RNA, 19 nt, Artificial Sequence
  Description of Artificial Sequence: Synthetic oligonucleotide
  Sense strand starting at position 3543 of SEQ ID NO: 1887807
gcuguaacgauugagagag

SEQ ID NO: 2498109 - RNA, 19 nt, Artificial Sequence
  Description of Artificial Sequence: Synthetic oligonucleotide
  Antisense strand to SEQ ID NO: 2498108
cucucucaaucguuacagc

SEQ ID NO: 2498110 - RNA, 19 nt, Artificial Sequence
  Description of Artificial Sequence: Synthetic oligonucleotide
  Sense strand starting at position 3626 of SEQ ID NO: 1887807
gcuaguaucucauccugca

SEQ ID NO: 2498111 - RNA, 19 nt, Artificial Sequence
  Description of Artificial Sequence: Synthetic oligonucleotide
  Antisense strand to SEQ ID NO: 2498110
ugcaggaugagauacuagc

SEQ ID NO: 2498112 - RNA, 19 nt, Artificial Sequence
  Description of Artificial Sequence: Synthetic oligonucleotide
  Sense strand starting at position 3696 of SEQ ID NO: 1887807
uaaggauauuugcaguauc

SEQ ID NO: 2498113 - RNA, 19 nt, Artificial Sequence
  Description of Artificial Sequence: Synthetic oligonucleotide
  Antisense strand to SEQ ID NO: 2498112
gauacugcaaauauccuua

SEQ ID NO: 2498114 - RNA, 19 nt, Artificial Sequence
  Description of Artificial Sequence: Synthetic oligonucleotide
  Sense strand starting at position 3722 of SEQ ID NO: 1887807
gcagaaguguuaccggaug

SEQ ID NO: 2498115 - RNA, 19 nt, Artificial Sequence
  Description of Artificial Sequence: Synthetic oligonucleotide
  Antisense strand to SEQ ID NO: 2498114
cauccgguaacacuucugc

SEQ ID NO: 2498116 - RNA, 19 nt, Artificial Sequence
  Description of Artificial Sequence: Synthetic oligonucleotide
  Sense strand starting at position 3724 of SEQ ID NO: 1887807
agaaguguuaccggauggu

SEQ ID NO: 2498117 - RNA, 19 nt, Artificial Sequence
  Description of Artificial Sequence: Synthetic oligonucleotide
  Antisense strand to SEQ ID NO: 2498116
accauccgguaacacuucu

SEQ ID NO: 2498118 - RNA, 19 nt, Artificial Sequence
  Description of Artificial Sequence: Synthetic oligonucleotide
  Sense strand starting at position 3757 of SEQ ID NO: 1887807
ggcucuuggugucuuaaac

SEQ ID NO: 2498119 - RNA, 19 nt, Artificial Sequence
  Description of Artificial Sequence: Synthetic oligonucleotide
  Antisense strand to SEQ ID NO: 2498118
guuuaagacaccaagagcc

SEQ ID NO: 2498120 - RNA, 19 nt, Artificial Sequence
  Description of Artificial Sequence: Synthetic oligonucleotide
  Sense strand starting at position 3773 of SEQ ID NO: 1887807
aacaaagaauuggaugaga

SEQ ID NO: 2498121 - RNA, 19 nt, Artificial Sequence
  Description of Artificial Sequence: Synthetic oligonucleotide
  Antisense strand to SEQ ID NO: 2498120
ucucauccaauucuuuguu

SEQ ID NO: 2498122 - RNA, 19 nt, Artificial Sequence
  Description of Artificial Sequence: Synthetic oligonucleotide
  Sense strand starting at position 3819 of SEQ ID NO: 1887807
gcaguuuauuaagcacagu

SEQ ID NO: 2498123 - RNA, 19 nt, Artificial Sequence
  Description of Artificial Sequence: Synthetic oligonucleotide
  Antisense strand to SEQ ID NO: 2498122
acugugcuuaauaaacugc

SEQ ID NO: 2498124 - RNA, 19 nt, Artificial Sequence
  Description of Artificial Sequence: Synthetic oligonucleotide
  Sense strand starting at position 3863 of SEQ ID NO: 1887807
aacugaucucuaugaggug

SEQ ID NO: 2498125 - RNA, 19 nt, Artificial Sequence
  Description of Artificial Sequence: Synthetic oligonucleotide
  Antisense strand to SEQ ID NO: 2498124
caccucauagagaucaguu

SEQ ID NO: 2498126 - RNA, 19 nt, Artificial Sequence
  Description of Artificial Sequence: Synthetic oligonucleotide
  Sense strand starting at position 3864 of SEQ ID NO: 1887807
acugaucucuaugagguga

SEQ ID NO: 2498127 - RNA, 19 nt, Artificial Sequence
  Description of Artificial Sequence: Synthetic oligonucleotide
  Antisense strand to SEQ ID NO: 2498126
ucaccucauagagaucagu

SEQ ID NO: 2498128 - RNA, 19 nt, Artificial Sequence
  Description of Artificial Sequence: Synthetic oligonucleotide
  Sense strand starting at position 3868 of SEQ ID NO: 1887807
aucucuaugaggugagauc

SEQ ID NO: 2498129 - RNA, 19 nt, Artificial Sequence
  Description of Artificial Sequence: Synthetic oligonucleotide
  Antisense strand to SEQ ID NO: 2498128
gaucucaccucauagagau

SEQ ID NO: 2498130 - RNA, 19 nt, Artificial Sequence
  Description of Artificial Sequence: Synthetic oligonucleotide
  Sense strand starting at position 3877 of SEQ ID NO: 1887807
aggugagaucagcauuacu

SEQ ID NO: 2498131 - RNA, 19 nt, Artificial Sequence
  Description of Artificial Sequence: Synthetic oligonucleotide
  Antisense strand to SEQ ID NO: 2498130
aguaaugcugaucucaccu

SEQ ID NO: 2498132 - RNA, 19 nt, Artificial Sequence
  Description of Artificial Sequence: Synthetic oligonucleotide
  Sense strand starting at position 302 of SEQ ID NO: 1887808
uuccauauuucggcauguu

SEQ ID NO: 2498133 - RNA, 19 nt, Artificial Sequence
  Description of Artificial Sequence: Synthetic oligonucleotide
  Antisense strand to SEQ ID NO: 2498132
aacaugccgaaauauggaa

SEQ ID NO: 2498134 - RNA, 19 nt, Artificial Sequence
  Description of Artificial Sequence: Synthetic oligonucleotide
  Sense strand starting at position 303 of SEQ ID NO: 1887808
uccauauuucggcauguuu

SEQ ID NO: 2498135 - RNA, 19 nt, Artificial Sequence
  Description of Artificial Sequence: Synthetic oligonucleotide
  Antisense strand to SEQ ID NO: 2498134
aaacaugccgaaauaugga

SEQ ID NO: 2498136 - RNA, 19 nt, Artificial Sequence
  Description of Artificial Sequence: Synthetic oligonucleotide
  Sense strand starting at position 399 of SEQ ID NO: 1887808
aaagauaucgcccaaguuu

SEQ ID NO: 2498137 - RNA, 19 nt, Artificial Sequence
  Description of Artificial Sequence: Synthetic oligonucleotide
  Antisense strand to SEQ ID NO: 2498136
aaacuugggcgauaucuuu

SEQ ID NO: 2498138 - RNA, 19 nt, Artificial Sequence
  Description of Artificial Sequence: Synthetic oligonucleotide
  Sense strand starting at position 412 of SEQ ID NO: 1887808
aaguuuccaggucguuaaa

SEQ ID NO: 2498139 - RNA, 19 nt, Artificial Sequence
  Description of Artificial Sequence: Synthetic oligonucleotide
  Antisense strand to SEQ ID NO: 2498138
uuuaacgaccuggaaacuu

SEQ ID NO: 2498140 - RNA, 19 nt, Artificial Sequence
  Description of Artificial Sequence: Synthetic oligonucleotide
  Sense strand starting at position 515 of SEQ ID NO: 1887808
cauguuagauggucggaau

SEQ ID NO: 2498141 - RNA, 19 nt, Artificial Sequence
  Description of Artificial Sequence: Synthetic oligonucleotide
  Antisense strand to SEQ ID NO: 2498140
auuccgaccaucuaacaug

SEQ ID NO: 2498142 - RNA, 19 nt, Artificial Sequence
  Description of Artificial Sequence: Synthetic oligonucleotide
  Sense strand starting at position 516 of SEQ ID NO: 1887808
auguuagauggucggaaug

SEQ ID NO: 2498143 - RNA, 19 nt, Artificial Sequence
  Description of Artificial Sequence: Synthetic oligonucleotide
  Antisense strand to SEQ ID NO: 2498142
cauuccgaccaucuaacau

SEQ ID NO: 2498144 - RNA, 19 nt, Artificial Sequence
  Description of Artificial Sequence: Synthetic oligonucleotide
  Sense strand starting at position 528 of SEQ ID NO: 1887808
cggaaugagccuugucuag

SEQ ID NO: 2498145 - RNA, 19 nt, Artificial Sequence
  Description of Artificial Sequence: Synthetic oligonucleotide
  Antisense strand to SEQ ID NO: 2498144
cuagacaaggcucauuccg

SEQ ID NO: 2498146 - RNA, 19 nt, Artificial Sequence
  Description of Artificial Sequence: Synthetic oligonucleotide
  Sense strand starting at position 530 of SEQ ID NO: 1887808
gaaugagccuugucuaggu

SEQ ID NO: 2498147 - RNA, 19 nt, Artificial Sequence
  Description of Artificial Sequence: Synthetic oligonucleotide
  Antisense strand to SEQ ID NO: 2498146
accuagacaaggcucauuc

SEQ ID NO: 2498148 - RNA, 19 nt, Artificial Sequence
  Description of Artificial Sequence: Synthetic oligonucleotide
  Sense strand starting at position 565 of SEQ ID NO: 1887808
ccaguaaagcacugaauaa

SEQ ID NO: 2498149 - RNA, 19 nt, Artificial Sequence
  Description of Artificial Sequence: Synthetic oligonucleotide
  Antisense strand to SEQ ID NO: 2498148
uuauucagugcuuuacugg

SEQ ID NO: 2498150 - RNA, 19 nt, Artificial Sequence
  Description of Artificial Sequence: Synthetic oligonucleotide
  Sense strand starting at position 575 of SEQ ID NO: 1887808
acugaauaacuguggucaa

SEQ ID NO: 2498151 - RNA, 19 nt, Artificial Sequence
  Description of Artificial Sequence: Synthetic oligonucleotide
  Antisense strand to SEQ ID NO: 2498150
uugaccacaguuauucagu

SEQ ID NO: 2498152 - RNA, 19 nt, Artificial Sequence
  Description of Artificial Sequence: Synthetic oligonucleotide
  Sense strand starting at position 578 of SEQ ID NO: 1887808
gaauaacuguggucaagua

SEQ ID NO: 2498153 - RNA, 19 nt, Artificial Sequence
  Description of Artificial Sequence: Synthetic oligonucleotide
  Antisense strand to SEQ ID NO: 2498152
uacuugaccacaguuauuc

SEQ ID NO: 2498154 - RNA, 19 nt, Artificial Sequence
  Description of Artificial Sequence: Synthetic oligonucleotide
  Sense strand starting at position 579 of SEQ ID NO: 1887808
aauaacuguggucaaguau

SEQ ID NO: 2498155 - RNA, 19 nt, Artificial Sequence
  Description of Artificial Sequence: Synthetic oligonucleotide
  Antisense strand to SEQ ID NO: 2498154
auacuugaccacaguuauu

SEQ ID NO: 2498156 - RNA, 19 nt, Artificial Sequence
  Description of Artificial Sequence: Synthetic oligonucleotide
  Sense strand starting at position 621 of SEQ ID NO: 1887808
guguaacaugaguggguuu

SEQ ID NO: 2498157 - RNA, 19 nt, Artificial Sequence
  Description of Artificial Sequence: Synthetic oligonucleotide
  Antisense strand to SEQ ID NO: 2498156
aaacccacucauguuacac

SEQ ID NO: 2498158 - RNA, 19 nt, Artificial Sequence
  Description of Artificial Sequence: Synthetic oligonucleotide
  Sense strand starting at position 638 of SEQ ID NO: 1887808
uuuacugcuggagauguaa

SEQ ID NO: 2498159 - RNA, 19 nt, Artificial Sequence
  Description of Artificial Sequence: Synthetic oligonucleotide
  Antisense strand to SEQ ID NO: 2498158
uuacaucuccagcaguaaa

SEQ ID NO: 2498160 - RNA, 19 nt, Artificial Sequence
  Description of Artificial Sequence: Synthetic oligonucleotide
  Sense strand starting at position 1147 of SEQ ID NO: 1887808
ucaggauauucucuguucu

SEQ ID NO: 2498161 - RNA, 19 nt, Artificial Sequence
  Description of Artificial Sequence: Synthetic oligonucleotide
  Antisense strand to SEQ ID NO: 2498160
agaacagagaauauccuga

SEQ ID NO: 2498162 - RNA, 19 nt, Artificial Sequence
  Description of Artificial Sequence: Synthetic oligonucleotide
  Sense strand starting at position 1170 of SEQ ID NO: 1887808
acacuuccaucuguguauu

SEQ ID NO: 2498163 - RNA, 19 nt, Artificial Sequence
  Description of Artificial Sequence: Synthetic oligonucleotide
  Antisense strand to SEQ ID NO: 2498162
aauacacagauggaagugu

SEQ ID NO: 2498164 - RNA, 19 nt, Artificial Sequence
  Description of Artificial Sequence: Synthetic oligonucleotide
  Sense strand starting at position 1176 of SEQ ID NO: 1887808
ccaucuguguauuuccuua

SEQ ID NO: 2498165 - RNA, 19 nt, Artificial Sequence
  Description of Artificial Sequence: Synthetic oligonucleotide
  Antisense strand to SEQ ID NO: 2498164
uaaggaaauacacagaugg

SEQ ID NO: 2498166 - RNA, 19 nt, Artificial Sequence
  Description of Artificial Sequence: Synthetic oligonucleotide
  Sense strand starting at position 1180 of SEQ ID NO: 1887808
cuguguauuuccuuagcag

SEQ ID NO: 2498167 - RNA, 19 nt, Artificial Sequence
  Description of Artificial Sequence: Synthetic oligonucleotide
  Antisense strand to SEQ ID NO: 2498166
cugcuaaggaaauacacag

SEQ ID NO: 2498168 - RNA, 19 nt, Artificial Sequence
  Description of Artificial Sequence: Synthetic oligonucleotide
  Sense strand starting at position 1200 of SEQ ID NO: 1887808
gugugagugaugcaaaggu

SEQ ID NO: 2498169 - RNA, 19 nt, Artificial Sequence
  Description of Artificial Sequence: Synthetic oligonucleotide
  Antisense strand to SEQ ID NO: 2498168
accuuugcaucacucacac

SEQ ID NO: 2498170 - RNA, 19 nt, Artificial Sequence
  Description of Artificial Sequence: Synthetic oligonucleotide
  Sense strand starting at position 1204 of SEQ ID NO: 1887808
gagugaugcaaagguguuc

SEQ ID NO: 2498171 - RNA, 19 nt, Artificial Sequence
  Description of Artificial Sequence: Synthetic oligonucleotide
  Antisense strand to SEQ ID NO: 2498170
gaacaccuuugcaucacuc

SEQ ID NO: 2498172 - RNA, 19 nt, Artificial Sequence
  Description of Artificial Sequence: Synthetic oligonucleotide
  Sense strand starting at position 1237 of SEQ ID NO: 1887808
agggcugacuuacuaauga

SEQ ID NO: 2498173 - RNA, 19 nt, Artificial Sequence
  Description of Artificial Sequence: Synthetic oligonucleotide
  Antisense strand to SEQ ID NO: 2498172
ucauuaguaagucagcccu

SEQ ID NO: 2498174 - RNA, 19 nt, Artificial Sequence
  Description of Artificial Sequence: Synthetic oligonucleotide
  Sense strand starting at position 1259 of SEQ ID NO: 1887808
accuauuuauggugaggaa

SEQ ID NO: 2498175 - RNA, 19 nt, Artificial Sequence
  Description of Artificial Sequence: Synthetic oligonucleotide
  Antisense strand to SEQ ID NO: 2498174
uuccucaccauaaauaggu

SEQ ID NO: 2498176 - RNA, 19 nt, Artificial Sequence
  Description of Artificial Sequence: Synthetic oligonucleotide
  Sense strand starting at position 1331 of SEQ ID NO: 1887808
augggauaacugugugagu

SEQ ID NO: 2498177 - RNA, 19 nt, Artificial Sequence
  Description of Artificial Sequence: Synthetic oligonucleotide
  Antisense strand to SEQ ID NO: 2498176
acucacacaguuaucccau

SEQ ID NO: 2498178 - RNA, 19 nt, Artificial Sequence
  Description of Artificial Sequence: Synthetic oligonucleotide
  Sense strand starting at position 1332 of SEQ ID NO: 1887808
ugggauaacugugugagua

SEQ ID NO: 2498179 - RNA, 19 nt, Artificial Sequence
  Description of Artificial Sequence: Synthetic oligonucleotide
  Antisense strand to SEQ ID NO: 2498178
uacucacacaguuauccca

SEQ ID NO: 2498180 - RNA, 19 nt, Artificial Sequence
  Description of Artificial Sequence: Synthetic oligonucleotide
  Sense strand starting at position 1333 of SEQ ID NO: 1887808
gggauaacugugugaguaa

SEQ ID NO: 2498181 - RNA, 19 nt, Artificial Sequence
  Description of Artificial Sequence: Synthetic oligonucleotide
  Antisense strand to SEQ ID NO: 2498180
uuacucacacaguuauccc

SEQ ID NO: 2498182 - RNA, 19 nt, Artificial Sequence
  Description of Artificial Sequence: Synthetic oligonucleotide
  Sense strand starting at position 1336 of SEQ ID NO: 1887808
auaacugugugaguaauga

SEQ ID NO: 2498183 - RNA, 19 nt, Artificial Sequence
  Description of Artificial Sequence: Synthetic oligonucleotide
  Antisense strand to SEQ ID NO: 2498182
ucauuacucacacaguuau

SEQ ID NO: 2498184 - RNA, 19 nt, Artificial Sequence
  Description of Artificial Sequence: Synthetic oligonucleotide
  Sense strand starting at position 1370 of SEQ ID NO: 1887808
ggguguaacuuaccaagag

SEQ ID NO: 2498185 - RNA, 19 nt, Artificial Sequence
  Description of Artificial Sequence: Synthetic oligonucleotide
  Antisense strand to SEQ ID NO: 2498184
cucuugguaaguuacaccc

SEQ ID NO: 2498186 - RNA, 19 nt, Artificial Sequence
  Description of Artificial Sequence: Synthetic oligonucleotide
  Sense strand starting at position 1471 of SEQ ID NO: 1887808
gggacuaaccguugacuca

SEQ ID NO: 2498187 - RNA, 19 nt, Artificial Sequence
  Description of Artificial Sequence: Synthetic oligonucleotide
  Antisense strand to SEQ ID NO: 2498186
ugagucaacgguuaguccc

SEQ ID NO: 2498188 - RNA, 19 nt, Artificial Sequence
  Description of Artificial Sequence: Synthetic oligonucleotide
  Sense strand starting at position 1472 of SEQ ID NO: 1887808
ggacuaaccguugacucau

SEQ ID NO: 2498189 - RNA, 19 nt, Artificial Sequence
  Description of Artificial Sequence: Synthetic oligonucleotide
  Antisense strand to SEQ ID NO: 2498188
augagucaacgguuagucc

SEQ ID NO: 2498190 - RNA, 19 nt, Artificial Sequence
  Description of Artificial Sequence: Synthetic oligonucleotide
  Sense strand starting at position 1496 of SEQ ID NO: 1887808
cacugaccugauugugaac

SEQ ID NO: 2498191 - RNA, 19 nt, Artificial Sequence
  Description of Artificial Sequence: Synthetic oligonucleotide
  Antisense strand to SEQ ID NO: 2498190
guucacaaucaggucagug

SEQ ID NO: 2498192 - RNA, 19 nt, Artificial Sequence
  Description of Artificial Sequence: Synthetic oligonucleotide
  Sense strand starting at position 1528 of SEQ ID NO: 1887808
gcuuaccuucuugguagau

SEQ ID NO: 2498193 - RNA, 19 nt, Artificial Sequence
  Description of Artificial Sequence: Synthetic oligonucleotide
  Antisense strand to SEQ ID NO: 2498192
aucuaccaagaagguaagc

SEQ ID NO: 2498194 - RNA, 19 nt, Artificial Sequence
  Description of Artificial Sequence: Synthetic oligonucleotide
  Sense strand starting at position 3273 of SEQ ID NO: 1887808
cacguuacucuauggaaua

SEQ ID NO: 2498195 - RNA, 19 nt, Artificial Sequence
  Description of Artificial Sequence: Synthetic oligonucleotide
  Antisense strand to SEQ ID NO: 2498194
uauuccauagaguaacgug

SEQ ID NO: 2498196 - RNA, 19 nt, Artificial Sequence
  Description of Artificial Sequence: Synthetic oligonucleotide
  Sense strand starting at position 3284 of SEQ ID NO: 1887808
auggaauagcccugaauuc

SEQ ID NO: 2498197 - RNA, 19 nt, Artificial Sequence
  Description of Artificial Sequence: Synthetic oligonucleotide
  Antisense strand to SEQ ID NO: 2498196
gaauucagggcuauuccau

SEQ ID NO: 2498198 - RNA, 19 nt, Artificial Sequence
  Description of Artificial Sequence: Synthetic oligonucleotide
  Sense strand starting at position 3285 of SEQ ID NO: 1887808
uggaauagcccugaauucu

SEQ ID NO: 2498199 - RNA, 19 nt, Artificial Sequence
  Description of Artificial Sequence: Synthetic oligonucleotide
  Antisense strand to SEQ ID NO: 2498198
agaauucagggcuauucca

SEQ ID NO: 2498200 - RNA, 19 nt, Artificial Sequence
  Description of Artificial Sequence: Synthetic oligonucleotide
  Sense strand starting at position 3526 of SEQ ID NO: 1887808
cuuccacugcugcaaagau

SEQ ID NO: 2498201 - RNA, 19 nt, Artificial Sequence
  Description of Artificial Sequence: Synthetic oligonucleotide
  Antisense strand to SEQ ID NO: 2498200
aucuuugcagcaguggaag

SEQ ID NO: 2498202 - RNA, 19 nt, Artificial Sequence
  Description of Artificial Sequence: Synthetic oligonucleotide
  Sense strand starting at position 3552 of SEQ ID NO: 1887808
ccuuuauuggaauaauugu

SEQ ID NO: 2498203 - RNA, 19 nt, Artificial Sequence
  Description of Artificial Sequence: Synthetic oligonucleotide
  Antisense strand to SEQ ID NO: 2498202
acaauuauuccaauaaagg

SEQ ID NO: 2498204 - RNA, 19 nt, Artificial Sequence
  Description of Artificial Sequence: Synthetic oligonucleotide
  Sense strand starting at position 3585 of SEQ ID NO: 1887808
ugccuuauuuaugugcaga

SEQ ID NO: 2498205 - RNA, 19 nt, Artificial Sequence
  Description of Artificial Sequence: Synthetic oligonucleotide
  Antisense strand to SEQ ID NO: 2498204
ucugcacauaaauaaggca

SEQ ID NO: 2498206 - RNA, 19 nt, Artificial Sequence
  Description of Artificial Sequence: Synthetic oligonucleotide
  Sense strand starting at position 3587 of SEQ ID NO: 1887808
ccuuauuuaugugcagauu

SEQ ID NO: 2498207 - RNA, 19 nt, Artificial Sequence
  Description of Artificial Sequence: Synthetic oligonucleotide
  Antisense strand to SEQ ID NO: 2498206
aaucugcacauaaauaagg

SEQ ID NO: 2498208 - RNA, 19 nt, Artificial Sequence
  Description of Artificial Sequence: Synthetic oligonucleotide
  Sense strand starting at position 3794 of SEQ ID NO: 1887808
cuugcuuuguaauugauau

SEQ ID NO: 2498209 - RNA, 19 nt, Artificial Sequence
  Description of Artificial Sequence: Synthetic oligonucleotide
  Antisense strand to SEQ ID NO: 2498208
auaucaauuacaaagcaag

SEQ ID NO: 2498210 - RNA, 19 nt, Artificial Sequence
  Description of Artificial Sequence: Synthetic oligonucleotide
  Sense strand starting at position 3806 of SEQ ID NO: 1887808
uugauauuaucaguaccua

SEQ ID NO: 2498211 - RNA, 19 nt, Artificial Sequence
  Description of Artificial Sequence: Synthetic oligonucleotide
  Antisense strand to SEQ ID NO: 2498210
uagguacugauaauaucaa

SEQ ID NO: 2498212 - RNA, 19 nt, Artificial Sequence
  Description of Artificial Sequence: Synthetic oligonucleotide
  Sense strand starting at position 315 of SEQ ID NO: 1887809
auaagccuccuguaguaau

SEQ ID NO: 2498213 - RNA, 19 nt, Artificial Sequence
  Description of Artificial Sequence: Synthetic oligonucleotide
  Antisense strand to SEQ ID NO: 2498212
auuacuacaggaggcuuau

SEQ ID NO: 2498214 - RNA, 19 nt, Artificial Sequence
  Description of Artificial Sequence: Synthetic oligonucleotide
  Sense strand starting at position 327 of SEQ ID NO: 1887809
uaguaauaaccacggcaca

SEQ ID NO: 2498215 - RNA, 19 nt, Artificial Sequence
  Description of Artificial Sequence: Synthetic oligonucleotide
  Antisense strand to SEQ ID NO: 2498214
ugugccgugguuauuacua

SEQ ID NO: 2498216 - RNA, 19 nt, Artificial Sequence
  Description of Artificial Sequence: Synthetic oligonucleotide
  Sense strand starting at position 657 of SEQ ID NO: 1887809
gagugauccucccacgaug

SEQ ID NO: 2498217 - RNA, 19 nt, Artificial Sequence
  Description of Artificial Sequence: Synthetic oligonucleotide
  Antisense strand to SEQ ID NO: 2498216
caucgugggaggaucacuc

SEQ ID NO: 2498218 - RNA, 19 nt, Artificial Sequence
  Description of Artificial Sequence: Synthetic oligonucleotide
  Sense strand starting at position 744 of SEQ ID NO: 1887809
cgccaauaaccuuaugagu

SEQ ID NO: 2498219 - RNA, 19 nt, Artificial Sequence
  Description of Artificial Sequence: Synthetic oligonucleotide
  Antisense strand to SEQ ID NO: 2498218
acucauaagguuauuggcg

SEQ ID NO: 2498220 - RNA, 19 nt, Artificial Sequence
  Description of Artificial Sequence: Synthetic oligonucleotide
  Sense strand starting at position 749 of SEQ ID NO: 1887809
auaaccuuaugaguuagau

SEQ ID NO: 2498221 - RNA, 19 nt, Artificial Sequence
  Description of Artificial Sequence: Synthetic oligonucleotide
  Antisense strand to SEQ ID NO: 2498220
aucuaacucauaagguuau

SEQ ID NO: 2498222 - RNA, 19 nt, Artificial Sequence
  Description of Artificial Sequence: Synthetic oligonucleotide
  Sense strand starting at position 753 of SEQ ID NO: 1887809
ccuuaugaguuagauacua

SEQ ID NO: 2498223 - RNA, 19 nt, Artificial Sequence
  Description of Artificial Sequence: Synthetic oligonucleotide
  Antisense strand to SEQ ID NO: 2498222
uaguaucuaacucauaagg

SEQ ID NO: 2498224 - RNA, 19 nt, Artificial Sequence
  Description of Artificial Sequence: Synthetic oligonucleotide
  Sense strand starting at position 758 of SEQ ID NO: 1887809
ugaguuagauacuauaauc

SEQ ID NO: 2498225 - RNA, 19 nt, Artificial Sequence
  Description of Artificial Sequence: Synthetic oligonucleotide
  Antisense strand to SEQ ID NO: 2498224
gauuauaguaucuaacuca

SEQ ID NO: 2498226 - RNA, 19 nt, Artificial Sequence
  Description of Artificial Sequence: Synthetic oligonucleotide
  Sense strand starting at position 792 of SEQ ID NO: 1887809
ugaaacaggccuggucaau

SEQ ID NO: 2498227 - RNA, 19 nt, Artificial Sequence
  Description of Artificial Sequence: Synthetic oligonucleotide
  Antisense strand to SEQ ID NO: 2498226
auugaccaggccuguuuca

SEQ ID NO: 2498228 - RNA, 19 nt, Artificial Sequence
  Description of Artificial Sequence: Synthetic oligonucleotide
  Sense strand starting at position 804 of SEQ ID NO: 1887809
ggucaaucagagugcagua

SEQ ID NO: 2498229 - RNA, 19 nt, Artificial Sequence
  Description of Artificial Sequence: Synthetic oligonucleotide
  Antisense strand to SEQ ID NO: 2498228
uacugcacucugauugacc

SEQ ID NO: 2498230 - RNA, 19 nt, Artificial Sequence
  Description of Artificial Sequence: Synthetic oligonucleotide
  Sense strand starting at position 806 of SEQ ID NO: 1887809
ucaaucagagugcaguaau

SEQ ID NO: 2498231 - RNA, 19 nt, Artificial Sequence
  Description of Artificial Sequence: Synthetic oligonucleotide
  Antisense strand to SEQ ID NO: 2498230
auuacugcacucugauuga

SEQ ID NO: 2498232 - RNA, 19 nt, Artificial Sequence
  Description of Artificial Sequence: Synthetic oligonucleotide
  Sense strand starting at position 906 of SEQ ID NO: 1887809
gagccaaucucugcuguuu

SEQ ID NO: 2498233 - RNA, 19 nt, Artificial Sequence
  Description of Artificial Sequence: Synthetic oligonucleotide
  Antisense strand to SEQ ID NO: 2498232
aaacagcagagauuggcuc

SEQ ID NO: 2498234 - RNA, 19 nt, Artificial Sequence
  Description of Artificial Sequence: Synthetic oligonucleotide
  Sense strand starting at position 917 of SEQ ID NO: 1887809
ugcuguuugguuugaacua

SEQ ID NO: 2498235 - RNA, 19 nt, Artificial Sequence
  Description of Artificial Sequence: Synthetic oligonucleotide
  Antisense strand to SEQ ID NO: 2498234
uaguucaaaccaaacagca

SEQ ID NO: 2498236 - RNA, 19 nt, Artificial Sequence
  Description of Artificial Sequence: Synthetic oligonucleotide
  Sense strand starting at position 1140 of SEQ ID NO: 1887809
cuggguuucuugcuacuua

SEQ ID NO: 2498237 - RNA, 19 nt, Artificial Sequence
  Description of Artificial Sequence: Synthetic oligonucleotide
  Antisense strand to SEQ ID NO: 2498236
uaaguagcaagaaacccag

SEQ ID NO: 2498238 - RNA, 19 nt, Artificial Sequence
  Description of Artificial Sequence: Synthetic oligonucleotide
  Sense strand starting at position 1141 of SEQ ID NO: 1887809
uggguuucuugcuacuuau

SEQ ID NO: 2498239 - RNA, 19 nt, Artificial Sequence
  Description of Artificial Sequence: Synthetic oligonucleotide
  Antisense strand to SEQ ID NO: 2498238
auaaguagcaagaaaccca

SEQ ID NO: 2498240 - RNA, 19 nt, Artificial Sequence
  Description of Artificial Sequence: Synthetic oligonucleotide
  Sense strand starting at position 1259 of SEQ ID NO: 1887809
agcguucgcucugcaugua

SEQ ID NO: 2498241 - RNA, 19 nt, Artificial Sequence
  Description of Artificial Sequence: Synthetic oligonucleotide
  Antisense strand to SEQ ID NO: 2498240
uacaugcagagcgaacgcu

SEQ ID NO: 2498242 - RNA, 19 nt, Artificial Sequence
  Description of Artificial Sequence: Synthetic oligonucleotide
  Sense strand starting at position 1336 of SEQ ID NO: 1887809
cugagcgucugggagaaua

SEQ ID NO: 2498243 - RNA, 19 nt, Artificial Sequence
  Description of Artificial Sequence: Synthetic oligonucleotide
  Antisense strand to SEQ ID NO: 2498242
uauucucccagacgcucag

SEQ ID NO: 2498244 - RNA, 19 nt, Artificial Sequence
  Description of Artificial Sequence: Synthetic oligonucleotide
  Sense strand starting at position 1348 of SEQ ID NO: 1887809
gagaauaaguuccgcagga

SEQ ID NO: 2498245 - RNA, 19 nt, Artificial Sequence
  Description of Artificial Sequence: Synthetic oligonucleotide
  Antisense strand to SEQ ID NO: 2498244
uccugcggaacuuauucuc

SEQ ID NO: 2498246 - RNA, 19 nt, Artificial Sequence
  Description of Artificial Sequence: Synthetic oligonucleotide
  Sense strand starting at position 1349 of SEQ ID NO: 1887809
agaauaaguuccgcaggaa

SEQ ID NO: 2498247 - RNA, 19 nt, Artificial Sequence
  Description of Artificial Sequence: Synthetic oligonucleotide
  Antisense strand to SEQ ID NO: 2498246
uuccugcggaacuuauucu

SEQ ID NO: 2498248 - RNA, 19 nt, Artificial Sequence
  Description of Artificial Sequence: Synthetic oligonucleotide
  Sense strand starting at position 1350 of SEQ ID NO: 1887809
gaauaaguuccgcaggaag

SEQ ID NO: 2498249 - RNA, 19 nt, Artificial Sequence
  Description of Artificial Sequence: Synthetic oligonucleotide
  Antisense strand to SEQ ID NO: 2498248
cuuccugcggaacuuauuc

SEQ ID NO: 2498250 - RNA, 19 nt, Artificial Sequence
  Description of Artificial Sequence: Synthetic oligonucleotide
  Sense strand starting at position 1559 of SEQ ID NO: 1887809
ggaugucacuccugaugga

SEQ ID NO: 2498251 - RNA, 19 nt, Artificial Sequence
  Description of Artificial Sequence: Synthetic oligonucleotide
  Antisense strand to SEQ ID NO: 2498250
uccaucaggagugacaucc

SEQ ID NO: 2498252 - RNA, 19 nt, Artificial Sequence
  Description of Artificial Sequence: Synthetic oligonucleotide
  Sense strand starting at position 1562 of SEQ ID NO: 1887809
ugucacuccugauggaguu

SEQ ID NO: 2498253 - RNA, 19 nt, Artificial Sequence
  Description of Artificial Sequence: Synthetic oligonucleotide
  Antisense strand to SEQ ID NO: 2498252
aacuccaucaggagugaca

SEQ ID NO: 2498254 - RNA, 19 nt, Artificial Sequence
  Description of Artificial Sequence: Synthetic oligonucleotide
  Sense strand starting at position 1574 of SEQ ID NO: 1887809
uggaguugaggagguauca

SEQ ID NO: 2498255 - RNA, 19 nt, Artificial Sequence
  Description of Artificial Sequence: Synthetic oligonucleotide
  Antisense strand to SEQ ID NO: 2498254
ugauaccuccucaacucca

SEQ ID NO: 2498256 - RNA, 19 nt, Artificial Sequence
  Description of Artificial Sequence: Synthetic oligonucleotide
  Sense strand starting at position 1702 of SEQ ID NO: 1887809
gaaucugaguccuggaagg

SEQ ID NO: 2498257 - RNA, 19 nt, Artificial Sequence
  Description of Artificial Sequence: Synthetic oligonucleotide
  Antisense strand to SEQ ID NO: 2498256
ccuuccaggacucagauuc

SEQ ID NO: 2498258 - RNA, 19 nt, Artificial Sequence
  Description of Artificial Sequence: Synthetic oligonucleotide
  Sense strand starting at position 2123 of SEQ ID NO: 1887809
guuuguuugcuuuguagag

SEQ ID NO: 2498259 - RNA, 19 nt, Artificial Sequence
  Description of Artificial Sequence: Synthetic oligonucleotide
  Antisense strand to SEQ ID NO: 2498258
cucuacaaagcaaacaaac

SEQ ID NO: 2498260 - RNA, 19 nt, Artificial Sequence
  Description of Artificial Sequence: Synthetic oligonucleotide
  Sense strand starting at position 2127 of SEQ ID NO: 1887809
guuugcuuuguagagacga

SEQ ID NO: 2498261 - RNA, 19 nt, Artificial Sequence
  Description of Artificial Sequence: Synthetic oligonucleotide
  Antisense strand to SEQ ID NO: 2498260
ucgucucuacaaagcaaac

SEQ ID NO: 2498262 - RNA, 19 nt, Artificial Sequence
  Description of Artificial Sequence: Synthetic oligonucleotide
  Sense strand starting at position 2352 of SEQ ID NO: 1887809
cuggcuguugcuguuauua

SEQ ID NO: 2498263 - RNA, 19 nt, Artificial Sequence
  Description of Artificial Sequence: Synthetic oligonucleotide
  Antisense strand to SEQ ID NO: 2498262
uaauaacagcaacagccag

SEQ ID NO: 2498264 - RNA, 19 nt, Artificial Sequence
  Description of Artificial Sequence: Synthetic oligonucleotide
  Sense strand starting at position 2451 of SEQ ID NO: 1887809
ucugaauaaugucccaagu

SEQ ID NO: 2498265 - RNA, 19 nt, Artificial Sequence
  Description of Artificial Sequence: Synthetic oligonucleotide
  Antisense strand to SEQ ID NO: 2498264
acuugggacauuauucaga

SEQ ID NO: 2498266 - RNA, 19 nt, Artificial Sequence
  Description of Artificial Sequence: Synthetic oligonucleotide
  Sense strand starting at position 2453 of SEQ ID NO: 1887809
ugaauaaugucccaaguca

SEQ ID NO: 2498267 - RNA, 19 nt, Artificial Sequence
  Description of Artificial Sequence: Synthetic oligonucleotide
  Antisense strand to SEQ ID NO: 2498266
ugacuugggacauuauuca

SEQ ID NO: 2498268 - RNA, 19 nt, Artificial Sequence
  Description of Artificial Sequence: Synthetic oligonucleotide
  Sense strand starting at position 2464 of SEQ ID NO: 1887809
ccaagucacucugggaaug

SEQ ID NO: 2498269 - RNA, 19 nt, Artificial Sequence
  Description of Artificial Sequence: Synthetic oligonucleotide
  Antisense strand to SEQ ID NO: 2498268
cauucccagagugacuugg

SEQ ID NO: 2498270 - RNA, 19 nt, Artificial Sequence
  Description of Artificial Sequence: Synthetic oligonucleotide
  Sense strand starting at position 2465 of SEQ ID NO: 1887809
caagucacucugggaauga

SEQ ID NO: 2498271 - RNA, 19 nt, Artificial Sequence
  Description of Artificial Sequence: Synthetic oligonucleotide
  Antisense strand to SEQ ID NO: 2498270
ucauucccagagugacuug

SEQ ID NO: 2498272 - RNA, 19 nt, Artificial Sequence
  Description of Artificial Sequence: Synthetic oligonucleotide
  Sense strand starting at position 2466 of SEQ ID NO: 1887809
aagucacucugggaaugau

SEQ ID NO: 2498273 - RNA, 19 nt, Artificial Sequence
  Description of Artificial Sequence: Synthetic oligonucleotide
  Antisense strand to SEQ ID NO: 2498272
aucauucccagagugacuu

SEQ ID NO: 2498274 - RNA, 19 nt, Artificial Sequence
  Description of Artificial Sequence: Synthetic oligonucleotide
  Sense strand starting at position 2475 of SEQ ID NO: 1887809
ugggaaugauuccaaugca

SEQ ID NO: 2498275 - RNA, 19 nt, Artificial Sequence
  Description of Artificial Sequence: Synthetic oligonucleotide
  Antisense strand to SEQ ID NO: 2498274
ugcauuggaaucauuccca

SEQ ID NO: 2498276 - RNA, 19 nt, Artificial Sequence
  Description of Artificial Sequence: Synthetic oligonucleotide
  Sense strand starting at position 2673 of SEQ ID NO: 1887809
gguuaccugucucauccau

SEQ ID NO: 2498277 - RNA, 19 nt, Artificial Sequence
  Description of Artificial Sequence: Synthetic oligonucleotide
  Antisense strand to SEQ ID NO: 2498276
auggaugagacagguaacc

SEQ ID NO: 2498278 - RNA, 19 nt, Artificial Sequence
  Description of Artificial Sequence: Synthetic oligonucleotide
  Sense strand starting at position 2854 of SEQ ID NO: 1887809
gccucaucucaaugcgauc

SEQ ID NO: 2498279 - RNA, 19 nt, Artificial Sequence
  Description of Artificial Sequence: Synthetic oligonucleotide
  Antisense strand to SEQ ID NO: 2498278
gaucgcauugagaugaggc

SEQ ID NO: 2498280 - RNA, 19 nt, Artificial Sequence
  Description of Artificial Sequence: Synthetic oligonucleotide
  Sense strand starting at position 2857 of SEQ ID NO: 1887809
ucaucucaaugcgaucgua

SEQ ID NO: 2498281 - RNA, 19 nt, Artificial Sequence
  Description of Artificial Sequence: Synthetic oligonucleotide
  Antisense strand to SEQ ID NO: 2498280
uacgaucgcauugagauga

SEQ ID NO: 2498282 - RNA, 19 nt, Artificial Sequence
  Description of Artificial Sequence: Synthetic oligonucleotide
  Sense strand starting at position 3173 of SEQ ID NO: 1887809
ucugcagucuucccagaca

SEQ ID NO: 2498283 - RNA, 19 nt, Artificial Sequence
  Description of Artificial Sequence: Synthetic oligonucleotide
  Antisense strand to SEQ ID NO: 2498282
ugucugggaagacugcaga

SEQ ID NO: 2498284 - RNA, 19 nt, Artificial Sequence
  Description of Artificial Sequence: Synthetic oligonucleotide
  Sense strand starting at position 3176 of SEQ ID NO: 1887809
gcagucuucccagacaucu

SEQ ID NO: 2498285 - RNA, 19 nt, Artificial Sequence
  Description of Artificial Sequence: Synthetic oligonucleotide
  Antisense strand to SEQ ID NO: 2498284
agaugucugggaagacugc

SEQ ID NO: 2498286 - RNA, 19 nt, Artificial Sequence
  Description of Artificial Sequence: Synthetic oligonucleotide
  Sense strand starting at position 3184 of SEQ ID NO: 1887809
cccagacaucuauggaauu

SEQ ID NO: 2498287 - RNA, 19 nt, Artificial Sequence
  Description of Artificial Sequence: Synthetic oligonucleotide
  Antisense strand to SEQ ID NO: 2498286
aauuccauagaugucuggg

SEQ ID NO: 2498288 - RNA, 19 nt, Artificial Sequence
  Description of Artificial Sequence: Synthetic oligonucleotide
  Sense strand starting at position 3185 of SEQ ID NO: 1887809
ccagacaucuauggaauug

SEQ ID NO: 2498289 - RNA, 19 nt, Artificial Sequence
  Description of Artificial Sequence: Synthetic oligonucleotide
  Antisense strand to SEQ ID NO: 2498288
caauuccauagaugucugg

SEQ ID NO: 2498290 - RNA, 19 nt, Artificial Sequence
  Description of Artificial Sequence: Synthetic oligonucleotide
  Sense strand starting at position 3288 of SEQ ID NO: 1887809
uccucuaccuuggaaugaa

SEQ ID NO: 2498291 - RNA, 19 nt, Artificial Sequence
  Description of Artificial Sequence: Synthetic oligonucleotide
  Antisense strand to SEQ ID NO: 2498290
uucauuccaagguagagga

SEQ ID NO: 2498292 - RNA, 19 nt, Artificial Sequence
  Description of Artificial Sequence: Synthetic oligonucleotide
  Sense strand starting at position 13 of SEQ ID NO: 1887810
uuauguguccauuagcaga

SEQ ID NO: 2498293 - RNA, 19 nt, Artificial Sequence
  Description of Artificial Sequence: Synthetic oligonucleotide
  Antisense strand to SEQ ID NO: 2498292
ucugcuaauggacacauaa

SEQ ID NO: 2498294 - RNA, 19 nt, Artificial Sequence
  Description of Artificial Sequence: Synthetic oligonucleotide
  Sense strand starting at position 26 of SEQ ID NO: 1887810
agcagaugauuggauguua

SEQ ID NO: 2498295 - RNA, 19 nt, Artificial Sequence
  Description of Artificial Sequence: Synthetic oligonucleotide
  Antisense strand to SEQ ID NO: 2498294
uaacauccaaucaucugcu

SEQ ID NO: 2498296 - RNA, 19 nt, Artificial Sequence
  Description of Artificial Sequence: Synthetic oligonucleotide
  Sense strand starting at position 113 of SEQ ID NO: 1887810
gucgaauugcuugagucca

SEQ ID NO: 2498297 - RNA, 19 nt, Artificial Sequence
  Description of Artificial Sequence: Synthetic oligonucleotide
  Antisense strand to SEQ ID NO: 2498296
uggacucaagcaauucgac

SEQ ID NO: 2498298 - RNA, 19 nt, Artificial Sequence
  Description of Artificial Sequence: Synthetic oligonucleotide
  Sense strand starting at position 115 of SEQ ID NO: 1887810
cgaauugcuugaguccaag

SEQ ID NO: 2498299 - RNA, 19 nt, Artificial Sequence
  Description of Artificial Sequence: Synthetic oligonucleotide
  Antisense strand to SEQ ID NO: 2498298
cuuggacucaagcaauucg

SEQ ID NO: 2498300 - RNA, 19 nt, Artificial Sequence
  Description of Artificial Sequence: Synthetic oligonucleotide
  Sense strand starting at position 326 of SEQ ID NO: 1887810
cugggaaauuggagugaga

SEQ ID NO: 2498301 - RNA, 19 nt, Artificial Sequence
  Description of Artificial Sequence: Synthetic oligonucleotide
  Antisense strand to SEQ ID NO: 2498300
ucucacuccaauuucccag

SEQ ID NO: 2498302 - RNA, 19 nt, Artificial Sequence
  Description of Artificial Sequence: Synthetic oligonucleotide
  Sense strand starting at position 413 of SEQ ID NO: 1887810
auaugcuaucuagauagca

SEQ ID NO: 2498303 - RNA, 19 nt, Artificial Sequence
  Description of Artificial Sequence: Synthetic oligonucleotide
  Antisense strand to SEQ ID NO: 2498302
ugcuaucuagauagcauau

SEQ ID NO: 2498304 - RNA, 19 nt, Artificial Sequence
  Description of Artificial Sequence: Synthetic oligonucleotide
  Sense strand starting at position 442 of SEQ ID NO: 1887810
ggauacaaaugcccuauaa

SEQ ID NO: 2498305 - RNA, 19 nt, Artificial Sequence
  Description of Artificial Sequence: Synthetic oligonucleotide
  Antisense strand to SEQ ID NO: 2498304
uuauagggcauuuguaucc

SEQ ID NO: 2498306 - RNA, 19 nt, Artificial Sequence
  Description of Artificial Sequence: Synthetic oligonucleotide
  Sense strand starting at position 507 of SEQ ID NO: 1887810
auaugcuaucuagacagca

SEQ ID NO: 2498307 - RNA, 19 nt, Artificial Sequence
  Description of Artificial Sequence: Synthetic oligonucleotide
  Antisense strand to SEQ ID NO: 2498306
ugcugucuagauagcauau

SEQ ID NO: 2498308 - RNA, 19 nt, Artificial Sequence
  Description of Artificial Sequence: Synthetic oligonucleotide
  Sense strand starting at position 708 of SEQ ID NO: 1887810
gcauauaugucacauguau

SEQ ID NO: 2498309 - RNA, 19 nt, Artificial Sequence
  Description of Artificial Sequence: Synthetic oligonucleotide
  Antisense strand to SEQ ID NO: 2498308
auacaugugacauauaugc

SEQ ID NO: 2498310 - RNA, 19 nt, Artificial Sequence
  Description of Artificial Sequence: Synthetic oligonucleotide
  Sense strand starting at position 716 of SEQ ID NO: 1887810
gucacauguaugugcucua

SEQ ID NO: 2498311 - RNA, 19 nt, Artificial Sequence
  Description of Artificial Sequence: Synthetic oligonucleotide
  Antisense strand to SEQ ID NO: 2498310
uagagcacauacaugugac

SEQ ID NO: 2498312 - RNA, 19 nt, Artificial Sequence
  Description of Artificial Sequence: Synthetic oligonucleotide
  Sense strand starting at position 717 of SEQ ID NO: 1887810
ucacauguaugugcucuau

SEQ ID NO: 2498313 - RNA, 19 nt, Artificial Sequence
  Description of Artificial Sequence: Synthetic oligonucleotide
  Antisense strand to SEQ ID NO: 2498312
auagagcacauacauguga

SEQ ID NO: 2498314 - RNA, 19 nt, Artificial Sequence
  Description of Artificial Sequence: Synthetic oligonucleotide
  Sense strand starting at position 719 of SEQ ID NO: 1887810
acauguaugugcucuauau

SEQ ID NO: 2498315 - RNA, 19 nt, Artificial Sequence
  Description of Artificial Sequence: Synthetic oligonucleotide
  Antisense strand to SEQ ID NO: 2498314
auauagagcacauacaugu

SEQ ID NO: 2498316 - RNA, 19 nt, Artificial Sequence
  Description of Artificial Sequence: Synthetic oligonucleotide
  Sense strand starting at position 721 of SEQ ID NO: 1887810
auguaugugcucuauauau

SEQ ID NO: 2498317 - RNA, 19 nt, Artificial Sequence
  Description of Artificial Sequence: Synthetic oligonucleotide
  Antisense strand to SEQ ID NO: 2498316
auauauagagcacauacau

SEQ ID NO: 2498318 - RNA, 19 nt, Artificial Sequence
  Description of Artificial Sequence: Synthetic oligonucleotide
  Sense strand starting at position 767 of SEQ ID NO: 1887810
guggaauacuuagccauaa

SEQ ID NO: 2498319 - RNA, 19 nt, Artificial Sequence
  Description of Artificial Sequence: Synthetic oligonucleotide
  Antisense strand to SEQ ID NO: 2498318
uuauggcuaaguauuccac

SEQ ID NO: 2498320 - RNA, 19 nt, Artificial Sequence
  Description of Artificial Sequence: Synthetic oligonucleotide
  Sense strand starting at position 791 of SEQ ID NO: 1887810
agugaaaucuugucuucug

SEQ ID NO: 2498321 - RNA, 19 nt, Artificial Sequence
  Description of Artificial Sequence: Synthetic oligonucleotide
  Antisense strand to SEQ ID NO: 2498320
cagaagacaagauuucacu

SEQ ID NO: 2498322 - RNA, 19 nt, Artificial Sequence
  Description of Artificial Sequence: Synthetic oligonucleotide
  Sense strand starting at position 794 of SEQ ID NO: 1887810
gaaaucuugucuucugcag

SEQ ID NO: 2498323 - RNA, 19 nt, Artificial Sequence
  Description of Artificial Sequence: Synthetic oligonucleotide
  Antisense strand to SEQ ID NO: 2498322
cugcagaagacaagauuuc

SEQ ID NO: 2498324 - RNA, 19 nt, Artificial Sequence
  Description of Artificial Sequence: Synthetic oligonucleotide
  Sense strand starting at position 988 of SEQ ID NO: 1887810
gggauacaguacuaccuau

SEQ ID NO: 2498325 - RNA, 19 nt, Artificial Sequence
  Description of Artificial Sequence: Synthetic oligonucleotide
  Antisense strand to SEQ ID NO: 2498324
auagguaguacuguauccc

SEQ ID NO: 2498326 - RNA, 19 nt, Artificial Sequence
  Description of Artificial Sequence: Synthetic oligonucleotide
  Sense strand starting at position 1001 of SEQ ID NO: 1887810
accuauuggcuacaaugua

SEQ ID NO: 2498327 - RNA, 19 nt, Artificial Sequence
  Description of Artificial Sequence: Synthetic oligonucleotide
  Antisense strand to SEQ ID NO: 2498326
uacauuguagccaauaggu

SEQ ID NO: 2498328 - RNA, 19 nt, Artificial Sequence
  Description of Artificial Sequence: Synthetic oligonucleotide
  Sense strand starting at position 1026 of SEQ ID NO: 1887810
uugggugaugauugcacua

SEQ ID NO: 2498329 - RNA, 19 nt, Artificial Sequence
  Description of Artificial Sequence: Synthetic oligonucleotide
  Antisense strand to SEQ ID NO: 2498328
uagugcaaucaucacccaa

SEQ ID NO: 2498330 - RNA, 19 nt, Artificial Sequence
  Description of Artificial Sequence: Synthetic oligonucleotide
  Sense strand starting at position 1028 of SEQ ID NO: 1887810
gggugaugauugcacuaaa

SEQ ID NO: 2498331 - RNA, 19 nt, Artificial Sequence
  Description of Artificial Sequence: Synthetic oligonucleotide
  Antisense strand to SEQ ID NO: 2498330
uuuagugcaaucaucaccc

SEQ ID NO: 2498332 - RNA, 19 nt, Artificial Sequence
  Description of Artificial Sequence: Synthetic oligonucleotide
  Sense strand starting at position 1135 of SEQ ID NO: 1887810
ucuuaauucuucuagggca

SEQ ID NO: 2498333 - RNA, 19 nt, Artificial Sequence
  Description of Artificial Sequence: Synthetic oligonucleotide
  Antisense strand to SEQ ID NO: 2498332
ugcccuagaagaauuaaga

SEQ ID NO: 2498334 - RNA, 19 nt, Artificial Sequence
  Description of Artificial Sequence: Synthetic oligonucleotide
  Sense strand starting at position 1213 of SEQ ID NO: 1887810
agcggugagugcuaugaag

SEQ ID NO: 2498335 - RNA, 19 nt, Artificial Sequence
  Description of Artificial Sequence: Synthetic oligonucleotide
  Antisense strand to SEQ ID NO: 2498334
cuucauagcacucaccgcu

SEQ ID NO: 2498336 - RNA, 19 nt, Artificial Sequence
  Description of Artificial Sequence: Synthetic oligonucleotide
  Sense strand starting at position 1215 of SEQ ID NO: 1887810
cggugagugcuaugaagac

SEQ ID NO: 2498337 - RNA, 19 nt, Artificial Sequence
  Description of Artificial Sequence: Synthetic oligonucleotide
  Antisense strand to SEQ ID NO: 2498336
gucuucauagcacucaccg

SEQ ID NO: 2498338 - RNA, 19 nt, Artificial Sequence
  Description of Artificial Sequence: Synthetic oligonucleotide
  Sense strand starting at position 1221 of SEQ ID NO: 1887810
gugcuaugaagacacgaaa

SEQ ID NO: 2498339 - RNA, 19 nt, Artificial Sequence
  Description of Artificial Sequence: Synthetic oligonucleotide
  Antisense strand to SEQ ID NO: 2498338
uuucgugucuucauagcac

SEQ ID NO: 2498340 - RNA, 19 nt, Artificial Sequence
  Description of Artificial Sequence: Synthetic oligonucleotide
  Sense strand starting at position 1685 of SEQ ID NO: 1887810
cagccaugggaguauucua

SEQ ID NO: 2498341 - RNA, 19 nt, Artificial Sequence
  Description of Artificial Sequence: Synthetic oligonucleotide
  Antisense strand to SEQ ID NO: 2498340
uagaauacucccauggcug

SEQ ID NO: 2498342 - RNA, 19 nt, Artificial Sequence
  Description of Artificial Sequence: Synthetic oligonucleotide
  Sense strand starting at position 1690 of SEQ ID NO: 1887810
augggaguauucuaccugu

SEQ ID NO: 2498343 - RNA, 19 nt, Artificial Sequence
  Description of Artificial Sequence: Synthetic oligonucleotide
  Antisense strand to SEQ ID NO: 2498342
acagguagaauacucccau

SEQ ID NO: 2498344 - RNA, 19 nt, Artificial Sequence
  Description of Artificial Sequence: Synthetic oligonucleotide
  Sense strand starting at position 1694 of SEQ ID NO: 1887810
gaguauucuaccuguggga

SEQ ID NO: 2498345 - RNA, 19 nt, Artificial Sequence
  Description of Artificial Sequence: Synthetic oligonucleotide
  Antisense strand to SEQ ID NO: 2498344
ucccacagguagaauacuc

SEQ ID NO: 2498346 - RNA, 19 nt, Artificial Sequence
  Description of Artificial Sequence: Synthetic oligonucleotide
  Sense strand starting at position 1696 of SEQ ID NO: 1887810
guauucuaccugugggaac

SEQ ID NO: 2498347 - RNA, 19 nt, Artificial Sequence
  Description of Artificial Sequence: Synthetic oligonucleotide
  Antisense strand to SEQ ID NO: 2498346
guucccacagguagaauac

SEQ ID NO: 2498348 - RNA, 19 nt, Artificial Sequence
  Description of Artificial Sequence: Synthetic oligonucleotide
  Sense strand starting at position 1697 of SEQ ID NO: 1887810
uauucuaccugugggaaca

SEQ ID NO: 2498349 - RNA, 19 nt, Artificial Sequence
  Description of Artificial Sequence: Synthetic oligonucleotide
  Antisense strand to SEQ ID NO: 2498348
uguucccacagguagaaua

SEQ ID NO: 2498350 - RNA, 19 nt, Artificial Sequence
  Description of Artificial Sequence: Synthetic oligonucleotide
  Sense strand starting at position 1773 of SEQ ID NO: 1887810
ggccaugugcuggaaggua

SEQ ID NO: 2498351 - RNA, 19 nt, Artificial Sequence
  Description of Artificial Sequence: Synthetic oligonucleotide
  Antisense strand to SEQ ID NO: 2498350
uaccuuccagcacauggcc

SEQ ID NO: 2498352 - RNA, 19 nt, Artificial Sequence
  Description of Artificial Sequence: Synthetic oligonucleotide
  Sense strand starting at position 1798 of SEQ ID NO: 1887810
agaggaaugccuggugaga

SEQ ID NO: 2498353 - RNA, 19 nt, Artificial Sequence
  Description of Artificial Sequence: Synthetic oligonucleotide
  Antisense strand to SEQ ID NO: 2498352
ucucaccaggcauuccucu

SEQ ID NO: 2498354 - RNA, 19 nt, Artificial Sequence
  Description of Artificial Sequence: Synthetic oligonucleotide
  Sense strand starting at position 1800 of SEQ ID NO: 1887810
aggaaugccuggugagaag

SEQ ID NO: 2498355 - RNA, 19 nt, Artificial Sequence
  Description of Artificial Sequence: Synthetic oligonucleotide
  Antisense strand to SEQ ID NO: 2498354
cuucucaccaggcauuccu

SEQ ID NO: 2498356 - RNA, 19 nt, Artificial Sequence
  Description of Artificial Sequence: Synthetic oligonucleotide
  Sense strand starting at position 1949 of SEQ ID NO: 1887810
gcucuuucucaaggaguca

SEQ ID NO: 2498357 - RNA, 19 nt, Artificial Sequence
  Description of Artificial Sequence: Synthetic oligonucleotide
  Antisense strand to SEQ ID NO: 2498356
ugacuccuugagaaagagc

SEQ ID NO: 2498358 - RNA, 19 nt, Artificial Sequence
  Description of Artificial Sequence: Synthetic oligonucleotide
  Sense strand starting at position 2828 of SEQ ID NO: 1887810
gggaaauccuuuccauacu

SEQ ID NO: 2498359 - RNA, 19 nt, Artificial Sequence
  Description of Artificial Sequence: Synthetic oligonucleotide
  Antisense strand to SEQ ID NO: 2498358
aguauggaaaggauuuccc

SEQ ID NO: 2498360 - RNA, 19 nt, Artificial Sequence
  Description of Artificial Sequence: Synthetic oligonucleotide
  Sense strand starting at position 3128 of SEQ ID NO: 1887810
acccaacuccggugaauaa

SEQ ID NO: 2498361 - RNA, 19 nt, Artificial Sequence
  Description of Artificial Sequence: Synthetic oligonucleotide
  Antisense strand to SEQ ID NO: 2498360
uuauucaccggaguugggu

SEQ ID NO: 2498362 - RNA, 19 nt, Artificial Sequence
  Description of Artificial Sequence: Synthetic oligonucleotide
  Sense strand starting at position 3629 of SEQ ID NO: 1887810
cagguaaauuagccaaguu

SEQ ID NO: 2498363 - RNA, 19 nt, Artificial Sequence
  Description of Artificial Sequence: Synthetic oligonucleotide
  Antisense strand to SEQ ID NO: 2498362
aacuuggcuaauuuaccug

SEQ ID NO: 2498364 - RNA, 19 nt, Artificial Sequence
  Description of Artificial Sequence: Synthetic oligonucleotide
  Sense strand starting at position 3647 of SEQ ID NO: 1887810
uugguaguuugugcuugua

SEQ ID NO: 2498365 - RNA, 19 nt, Artificial Sequence
  Description of Artificial Sequence: Synthetic oligonucleotide
  Antisense strand to SEQ ID NO: 2498364
uacaagcacaaacuaccaa

SEQ ID NO: 2498366 - RNA, 19 nt, Artificial Sequence
  Description of Artificial Sequence: Synthetic oligonucleotide
  Sense strand starting at position 3855 of SEQ ID NO: 1887810
gcuguagugaaauaugaua

SEQ ID NO: 2498367 - RNA, 19 nt, Artificial Sequence
  Description of Artificial Sequence: Synthetic oligonucleotide
  Antisense strand to SEQ ID NO: 2498366
uaucauauuucacuacagc

SEQ ID NO: 2498368 - RNA, 19 nt, Artificial Sequence
  Description of Artificial Sequence: Synthetic oligonucleotide
  Sense strand starting at position 3894 of SEQ ID NO: 1887810
aggagauagugagacucaa

SEQ ID NO: 2498369 - RNA, 19 nt, Artificial Sequence
  Description of Artificial Sequence: Synthetic oligonucleotide
  Antisense strand to SEQ ID NO: 2498368
uugagucucacuaucuccu

SEQ ID NO: 2498370 - RNA, 19 nt, Artificial Sequence
  Description of Artificial Sequence: Synthetic oligonucleotide
  Sense strand starting at position 3980 of SEQ ID NO: 1887810
aagagugagcccugcccaa

SEQ ID NO: 2498371 - RNA, 19 nt, Artificial Sequence
  Description of Artificial Sequence: Synthetic oligonucleotide
  Antisense strand to SEQ ID NO: 2498370
uugggcagggcucacucuu

SEQ ID NO: 2498372 - RNA, 19 nt, Artificial Sequence
  Description of Artificial Sequence: Synthetic oligonucleotide
  Sense strand starting at position 531 of SEQ ID NO: 1887811
agcggacucuagugaugga

SEQ ID NO: 2498373 - RNA, 19 nt, Artificial Sequence
  Description of Artificial Sequence: Synthetic oligonucleotide
  Antisense strand to SEQ ID NO: 2498372
uccaucacuagaguccgcu

SEQ ID NO: 2498374 - RNA, 19 nt, Artificial Sequence
  Description of Artificial Sequence: Synthetic oligonucleotide
  Sense strand starting at position 532 of SEQ ID NO: 1887811
gcggacucuagugauggau

SEQ ID NO: 2498375 - RNA, 19 nt, Artificial Sequence
  Description of Artificial Sequence: Synthetic oligonucleotide
  Antisense strand to SEQ ID NO: 2498374
auccaucacuagaguccgc

SEQ ID NO: 2498376 - RNA, 19 nt, Artificial Sequence
  Description of Artificial Sequence: Synthetic oligonucleotide
  Sense strand starting at position 535 of SEQ ID NO: 1887811
gacucuagugauggaugga

SEQ ID NO: 2498377 - RNA, 19 nt, Artificial Sequence
  Description of Artificial Sequence: Synthetic oligonucleotide
  Antisense strand to SEQ ID NO: 2498376
uccauccaucacuagaguc

SEQ ID NO: 2498378 - RNA, 19 nt, Artificial Sequence
  Description of Artificial Sequence: Synthetic oligonucleotide
  Sense strand starting at position 983 of SEQ ID NO: 1887811
ugggaagucuucucaccgu

SEQ ID NO: 2498379 - RNA, 19 nt, Artificial Sequence
  Description of Artificial Sequence: Synthetic oligonucleotide
  Antisense strand to SEQ ID NO: 2498378
acggugagaagacuuccca

SEQ ID NO: 2498380 - RNA, 19 nt, Artificial Sequence
  Description of Artificial Sequence: Synthetic oligonucleotide
  Sense strand starting at position 986 of SEQ ID NO: 1887811
gaagucuucucaccgucua

SEQ ID NO: 2498381 - RNA, 19 nt, Artificial Sequence
  Description of Artificial Sequence: Synthetic oligonucleotide
  Antisense strand to SEQ ID NO: 2498380
uagacggugagaagacuuc

SEQ ID NO: 2498382 - RNA, 19 nt, Artificial Sequence
  Description of Artificial Sequence: Synthetic oligonucleotide
  Sense strand starting at position 1083 of SEQ ID NO: 1887811
cgagguguccagugacuga

SEQ ID NO: 2498383 - RNA, 19 nt, Artificial Sequence
  Description of Artificial Sequence: Synthetic oligonucleotide
  Antisense strand to SEQ ID NO: 2498382
ucagucacuggacaccucg

SEQ ID NO: 2498384 - RNA, 19 nt, Artificial Sequence
  Description of Artificial Sequence: Synthetic oligonucleotide
  Sense strand starting at position 1309 of SEQ ID NO: 1887811
cagggaucagccugcaaug

SEQ ID NO: 2498385 - RNA, 19 nt, Artificial Sequence
  Description of Artificial Sequence: Synthetic oligonucleotide
  Antisense strand to SEQ ID NO: 2498384
cauugcaggcugaucccug

SEQ ID NO: 2498386 - RNA, 19 nt, Artificial Sequence
  Description of Artificial Sequence: Synthetic oligonucleotide
  Sense strand starting at position 1582 of SEQ ID NO: 1887811
gaaugaggcuucuaugagc

SEQ ID NO: 2498387 - RNA, 19 nt, Artificial Sequence
  Description of Artificial Sequence: Synthetic oligonucleotide
  Antisense strand to SEQ ID NO: 2498386
gcucauagaagccucauuc

SEQ ID NO: 2498388 - RNA, 19 nt, Artificial Sequence
  Description of Artificial Sequence: Synthetic oligonucleotide
  Sense strand starting at position 2051 of SEQ ID NO: 1887811
cgcccuuaagucuugcuau

SEQ ID NO: 2498389 - RNA, 19 nt, Artificial Sequence
  Description of Artificial Sequence: Synthetic oligonucleotide
  Antisense strand to SEQ ID NO: 2498388
auagcaagacuuaagggcg

SEQ ID NO: 2498390 - RNA, 19 nt, Artificial Sequence
  Description of Artificial Sequence: Synthetic oligonucleotide
  Sense strand starting at position 2052 of SEQ ID NO: 1887811
gcccuuaagucuugcuauu

SEQ ID NO: 2498391 - RNA, 19 nt, Artificial Sequence
  Description of Artificial Sequence: Synthetic oligonucleotide
  Antisense strand to SEQ ID NO: 2498390
aauagcaagacuuaagggc

SEQ ID NO: 2498392 - RNA, 19 nt, Artificial Sequence
  Description of Artificial Sequence: Synthetic oligonucleotide
  Sense strand starting at position 2871 of SEQ ID NO: 1887811
cccucuguugcuggacuaa

SEQ ID NO: 2498393 - RNA, 19 nt, Artificial Sequence
  Description of Artificial Sequence: Synthetic oligonucleotide
  Antisense strand to SEQ ID NO: 2498392
uuaguccagcaacagaggg

SEQ ID NO: 2498394 - RNA, 19 nt, Artificial Sequence
  Description of Artificial Sequence: Synthetic oligonucleotide
  Sense strand starting at position 2882 of SEQ ID NO: 1887811
uggacuaacucaugaagcu

SEQ ID NO: 2498395 - RNA, 19 nt, Artificial Sequence
  Description of Artificial Sequence: Synthetic oligonucleotide
  Antisense strand to SEQ ID NO: 2498394
agcuucaugaguuagucca

SEQ ID NO: 2498396 - RNA, 19 nt, Artificial Sequence
  Description of Artificial Sequence: Synthetic oligonucleotide
  Sense strand starting at position 2907 of SEQ ID NO: 1887811
gugugcuuugcuucucgca

SEQ ID NO: 2498397 - RNA, 19 nt, Artificial Sequence
  Description of Artificial Sequence: Synthetic oligonucleotide
  Antisense strand to SEQ ID NO: 2498396
ugcgagaagcaaagcacac

SEQ ID NO: 2498398 - RNA, 19 nt, Artificial Sequence
  Description of Artificial Sequence: Synthetic oligonucleotide
  Sense strand starting at position 2909 of SEQ ID NO: 1887811
gugcuuugcuucucgcaga

SEQ ID NO: 2498399 - RNA, 19 nt, Artificial Sequence
  Description of Artificial Sequence: Synthetic oligonucleotide
  Antisense strand to SEQ ID NO: 2498398
ucugcgagaagcaaagcac

SEQ ID NO: 2498400 - RNA, 19 nt, Artificial Sequence
  Description of Artificial Sequence: Synthetic oligonucleotide
  Sense strand starting at position 2930 of SEQ ID NO: 1887811
gguggguucuggccgaaag

SEQ ID NO: 2498401 - RNA, 19 nt, Artificial Sequence
  Description of Artificial Sequence: Synthetic oligonucleotide
  Antisense strand to SEQ ID NO: 2498400
cuuucggccagaacccacc

SEQ ID NO: 2498402 - RNA, 19 nt, Artificial Sequence
  Description of Artificial Sequence: Synthetic oligonucleotide
  Sense strand starting at position 2932 of SEQ ID NO: 1887811
uggguucuggccgaaaggu

SEQ ID NO: 2498403 - RNA, 19 nt, Artificial Sequence
  Description of Artificial Sequence: Synthetic oligonucleotide
  Antisense strand to SEQ ID NO: 2498402
accuuucggccagaaccca

SEQ ID NO: 2498404 - RNA, 19 nt, Artificial Sequence
  Description of Artificial Sequence: Synthetic oligonucleotide
  Sense strand starting at position 2945 of SEQ ID NO: 1887811
aaaggucaaguccgaagau

SEQ ID NO: 2498405 - RNA, 19 nt, Artificial Sequence
  Description of Artificial Sequence: Synthetic oligonucleotide
  Antisense strand to SEQ ID NO: 2498404
aucuucggacuugaccuuu

SEQ ID NO: 2498406 - RNA, 19 nt, Artificial Sequence
  Description of Artificial Sequence: Synthetic oligonucleotide
  Sense strand starting at position 2957 of SEQ ID NO: 1887811
cgaagauccagucggucaa

SEQ ID NO: 2498407 - RNA, 19 nt, Artificial Sequence
  Description of Artificial Sequence: Synthetic oligonucleotide
  Antisense strand to SEQ ID NO: 2498406
uugaccgacuggaucuucg

SEQ ID NO: 2498408 - RNA, 19 nt, Artificial Sequence
  Description of Artificial Sequence: Synthetic oligonucleotide
  Sense strand starting at position 3020 of SEQ ID NO: 1887811
gugauuuagccuugccgag

SEQ ID NO: 2498409 - RNA, 19 nt, Artificial Sequence
  Description of Artificial Sequence: Synthetic oligonucleotide
  Antisense strand to SEQ ID NO: 2498408
cucggcaaggcuaaaucac

SEQ ID NO: 2498410 - RNA, 19 nt, Artificial Sequence
  Description of Artificial Sequence: Synthetic oligonucleotide
  Sense strand starting at position 3065 of SEQ ID NO: 1887811
ggcugauagucccacucuu

SEQ ID NO: 2498411 - RNA, 19 nt, Artificial Sequence
  Description of Artificial Sequence: Synthetic oligonucleotide
  Antisense strand to SEQ ID NO: 2498410
aagagugggacuaucagcc

SEQ ID NO: 2498412 - RNA, 19 nt, Artificial Sequence
  Description of Artificial Sequence: Synthetic oligonucleotide
  Sense strand starting at position 3075 of SEQ ID NO: 1887811
cccacucuugucuguguaa

SEQ ID NO: 2498413 - RNA, 19 nt, Artificial Sequence
  Description of Artificial Sequence: Synthetic oligonucleotide
  Antisense strand to SEQ ID NO: 2498412
uuacacagacaagaguggg

SEQ ID NO: 2498414 - RNA, 19 nt, Artificial Sequence
  Description of Artificial Sequence: Synthetic oligonucleotide
  Sense strand starting at position 3076 of SEQ ID NO: 1887811
ccacucuugucuguguaag

SEQ ID NO: 2498415 - RNA, 19 nt, Artificial Sequence
  Description of Artificial Sequence: Synthetic oligonucleotide
  Antisense strand to SEQ ID NO: 2498414
cuuacacagacaagagugg

SEQ ID NO: 2498416 - RNA, 19 nt, Artificial Sequence
  Description of Artificial Sequence: Synthetic oligonucleotide
  Sense strand starting at position 3078 of SEQ ID NO: 1887811
acucuugucuguguaaggu

SEQ ID NO: 2498417 - RNA, 19 nt, Artificial Sequence
  Description of Artificial Sequence: Synthetic oligonucleotide
  Antisense strand to SEQ ID NO: 2498416
accuuacacagacaagagu

SEQ ID NO: 2498418 - RNA, 19 nt, Artificial Sequence
  Description of Artificial Sequence: Synthetic oligonucleotide
  Sense strand starting at position 3134 of SEQ ID NO: 1887811
agacuagacugacaaucua

SEQ ID NO: 2498419 - RNA, 19 nt, Artificial Sequence
  Description of Artificial Sequence: Synthetic oligonucleotide
  Antisense strand to SEQ ID NO: 2498418
uagauugucagucuagucu

SEQ ID NO: 2498420 - RNA, 19 nt, Artificial Sequence
  Description of Artificial Sequence: Synthetic oligonucleotide
  Sense strand starting at position 3251 of SEQ ID NO: 1887811
gaaggccuggcuugagaaa

SEQ ID NO: 2498421 - RNA, 19 nt, Artificial Sequence
  Description of Artificial Sequence: Synthetic oligonucleotide
  Antisense strand to SEQ ID NO: 2498420
uuucucaagccaggccuuc

SEQ ID NO: 2498422 - RNA, 19 nt, Artificial Sequence
  Description of Artificial Sequence: Synthetic oligonucleotide
  Sense strand starting at position 3673 of SEQ ID NO: 1887811
gucgcuuucuguuugagac

SEQ ID NO: 2498423 - RNA, 19 nt, Artificial Sequence
  Description of Artificial Sequence: Synthetic oligonucleotide
  Antisense strand to SEQ ID NO: 2498422
gucucaaacagaaagcgac

SEQ ID NO: 2498424 - RNA, 19 nt, Artificial Sequence
  Description of Artificial Sequence: Synthetic oligonucleotide
  Sense strand starting at position 3674 of SEQ ID NO: 1887811
ucgcuuucuguuugagaca

SEQ ID NO: 2498425 - RNA, 19 nt, Artificial Sequence
  Description of Artificial Sequence: Synthetic oligonucleotide
  Antisense strand to SEQ ID NO: 2498424
ugucucaaacagaaagcga

SEQ ID NO: 2498426 - RNA, 19 nt, Artificial Sequence
  Description of Artificial Sequence: Synthetic oligonucleotide
  Sense strand starting at position 3675 of SEQ ID NO: 1887811
cgcuuucuguuugagacaa

SEQ ID NO: 2498427 - RNA, 19 nt, Artificial Sequence
  Description of Artificial Sequence: Synthetic oligonucleotide
  Antisense strand to SEQ ID NO: 2498426
uugucucaaacagaaagcg

SEQ ID NO: 2498428 - RNA, 19 nt, Artificial Sequence
  Description of Artificial Sequence: Synthetic oligonucleotide
  Sense strand starting at position 3870 of SEQ ID NO: 1887811
cugacugcaccagaacuua

SEQ ID NO: 2498429 - RNA, 19 nt, Artificial Sequence
  Description of Artificial Sequence: Synthetic oligonucleotide
  Antisense strand to SEQ ID NO: 2498428
uaaguucuggugcagucag

SEQ ID NO: 2498430 - RNA, 19 nt, Artificial Sequence
  Description of Artificial Sequence: Synthetic oligonucleotide
  Sense strand starting at position 2819 of SEQ ID NO: 1887812
auacgacgucuuggaaauc

SEQ ID NO: 2498431 - RNA, 19 nt, Artificial Sequence
  Description of Artificial Sequence: Synthetic oligonucleotide
  Antisense strand to SEQ ID NO: 2498430
gauuuccaagacgucguau

SEQ ID NO: 2498432 - RNA, 19 nt, Artificial Sequence
  Description of Artificial Sequence: Synthetic oligonucleotide
  Sense strand starting at position 1216 of SEQ ID NO: 1887814
accuuuaaguucugaguuu

SEQ ID NO: 2498433 - RNA, 19 nt, Artificial Sequence
  Description of Artificial Sequence: Synthetic oligonucleotide
  Antisense strand to SEQ ID NO: 2498432
aaacucagaacuuaaaggu

SEQ ID NO: 2498434 - RNA, 19 nt, Artificial Sequence
  Description of Artificial Sequence: Synthetic oligonucleotide
  Sense strand starting at position 1217 of SEQ ID NO: 1887814
ccuuuaaguucugaguuuc

SEQ ID NO: 2498435 - RNA, 19 nt, Artificial Sequence
  Description of Artificial Sequence: Synthetic oligonucleotide
  Antisense strand to SEQ ID NO: 2498434
gaaacucagaacuuaaagg

SEQ ID NO: 2498436 - RNA, 19 nt, Artificial Sequence
  Description of Artificial Sequence: Synthetic oligonucleotide
  Sense strand starting at position 1227 of SEQ ID NO: 1887814
cugaguuucuaauguccgu

SEQ ID NO: 2498437 - RNA, 19 nt, Artificial Sequence
  Description of Artificial Sequence: Synthetic oligonucleotide
  Antisense strand to SEQ ID NO: 2498436
acggacauuagaaacucag

SEQ ID NO: 2498438 - RNA, 19 nt, Artificial Sequence
  Description of Artificial Sequence: Synthetic oligonucleotide
  Sense strand starting at position 2245 of SEQ ID NO: 1887814
ggaguugcacuuuauaaua

SEQ ID NO: 2498439 - RNA, 19 nt, Artificial Sequence
  Description of Artificial Sequence: Synthetic oligonucleotide
  Antisense strand to SEQ ID NO: 2498438
uauuauaaagugcaacucc

SEQ ID NO: 2498440 - RNA, 19 nt, Artificial Sequence
  Description of Artificial Sequence: Synthetic oligonucleotide
  Sense strand starting at position 60 of SEQ ID NO: 1887815
cgcaauuucuuccugucga

SEQ ID NO: 2498441 - RNA, 19 nt, Artificial Sequence
  Description of Artificial Sequence: Synthetic oligonucleotide
  Antisense strand to SEQ ID NO: 2498440
ucgacaggaagaaauugcg

SEQ ID NO: 2498442 - RNA, 19 nt, Artificial Sequence
  Description of Artificial Sequence: Synthetic oligonucleotide
  Sense strand starting at position 61 of SEQ ID NO: 1887815
gcaauuucuuccugucgag

SEQ ID NO: 2498443 - RNA, 19 nt, Artificial Sequence
  Description of Artificial Sequence: Synthetic oligonucleotide
  Antisense strand to SEQ ID NO: 2498442
cucgacaggaagaaauugc

SEQ ID NO: 2498444 - RNA, 19 nt, Artificial Sequence
  Description of Artificial Sequence: Synthetic oligonucleotide
  Sense strand starting at position 82 of SEQ ID NO: 1887815
cucccuuuaugacggaaca

SEQ ID NO: 2498445 - RNA, 19 nt, Artificial Sequence
  Description of Artificial Sequence: Synthetic oligonucleotide
  Antisense strand to SEQ ID NO: 2498444
uguuccgucauaaagggag

SEQ ID NO: 2498446 - RNA, 19 nt, Artificial Sequence
  Description of Artificial Sequence: Synthetic oligonucleotide
  Sense strand starting at position 83 of SEQ ID NO: 1887815
ucccuuuaugacggaacaa

SEQ ID NO: 2498447 - RNA, 19 nt, Artificial Sequence
  Description of Artificial Sequence: Synthetic oligonucleotide
  Antisense strand to SEQ ID NO: 2498446
uuguuccgucauaaaggga

SEQ ID NO: 2498448 - RNA, 19 nt, Artificial Sequence
  Description of Artificial Sequence: Synthetic oligonucleotide
  Sense strand starting at position 402 of SEQ ID NO: 1887815
gccuacuguucuggagaga

SEQ ID NO: 2498449 - RNA, 19 nt, Artificial Sequence
  Description of Artificial Sequence: Synthetic oligonucleotide
  Antisense strand to SEQ ID NO: 2498448
ucucuccagaacaguaggc

SEQ ID NO: 2498450 - RNA, 19 nt, Artificial Sequence
  Description of Artificial Sequence: Synthetic oligonucleotide
  Sense strand starting at position 3917 of SEQ ID NO: 1887815
ugcauagacgcauguggaa

SEQ ID NO: 2498451 - RNA, 19 nt, Artificial Sequence
  Description of Artificial Sequence: Synthetic oligonucleotide
  Antisense strand to SEQ ID NO: 2498450
uuccacaugcgucuaugca

SEQ ID NO: 2498452 - RNA, 19 nt, Artificial Sequence
  Description of Artificial Sequence: Synthetic oligonucleotide
  Sense strand starting at position 1216 of SEQ ID NO: 1887824
accuuuaaguucugaguuu

SEQ ID NO: 2498453 - RNA, 19 nt, Artificial Sequence
  Description of Artificial Sequence: Synthetic oligonucleotide
  Antisense strand to SEQ ID NO: 2498452
aaacucagaacuuaaaggu

SEQ ID NO: 2498454 - RNA, 19 nt, Artificial Sequence
  Description of Artificial Sequence: Synthetic oligonucleotide
  Sense strand starting at position 1217 of SEQ ID NO: 1887824
ccuuuaaguucugaguuuc

SEQ ID NO: 2498455 - RNA, 19 nt, Artificial Sequence
  Description of Artificial Sequence: Synthetic oligonucleotide
  Antisense strand to SEQ ID NO: 2498454
gaaacucagaacuuaaagg

SEQ ID NO: 2498456 - RNA, 19 nt, Artificial Sequence
  Description of Artificial Sequence: Synthetic oligonucleotide
  Sense strand starting at position 1227 of SEQ ID NO: 1887824
cugaguuucuaauguccgu

SEQ ID NO: 2498457 - RNA, 19 nt, Artificial Sequence
  Description of Artificial Sequence: Synthetic oligonucleotide
  Antisense strand to SEQ ID NO: 2498456
acggacauuagaaacucag

SEQ ID NO: 2498458 - RNA, 19 nt, Artificial Sequence
  Description of Artificial Sequence: Synthetic oligonucleotide
  Sense strand starting at position 2245 of SEQ ID NO: 1887824
ggaguugcacuuuauaaua

SEQ ID NO: 2498459 - RNA, 19 nt, Artificial Sequence
  Description of Artificial Sequence: Synthetic oligonucleotide
  Antisense strand to SEQ ID NO: 2498458
uauuauaaagugcaacucc

SEQ ID NO: 2498460 - RNA, 19 nt, Artificial Sequence
  Description of Artificial Sequence: Synthetic oligonucleotide
  Sense strand starting at position 60 of SEQ ID NO: 1887825
cgcaauuucuuccugucga

SEQ ID NO: 2498461 - RNA, 19 nt, Artificial Sequence
  Description of Artificial Sequence: Synthetic oligonucleotide
  Antisense strand to SEQ ID NO: 2498460
ucgacaggaagaaauugcg

SEQ ID NO: 2498462 - RNA, 19 nt, Artificial Sequence
  Description of Artificial Sequence: Synthetic oligonucleotide
  Sense strand starting at position 61 of SEQ ID NO: 1887825
gcaauuucuuccugucgag

SEQ ID NO: 2498463 - RNA, 19 nt, Artificial Sequence
  Description of Artificial Sequence: Synthetic oligonucleotide
  Antisense strand to SEQ ID NO: 2498462
cucgacaggaagaaauugc

SEQ ID NO: 2498464 - RNA, 19 nt, Artificial Sequence
  Description of Artificial Sequence: Synthetic oligonucleotide
  Sense strand starting at position 82 of SEQ ID NO: 1887825
cucccuuuaugacggaaca

SEQ ID NO: 2498465 - RNA, 19 nt, Artificial Sequence
  Description of Artificial Sequence: Synthetic oligonucleotide
  Antisense strand to SEQ ID NO: 2498464
uguuccgucauaaagggag

SEQ ID NO: 2498466 - RNA, 19 nt, Artificial Sequence
  Description of Artificial Sequence: Synthetic oligonucleotide
  Sense strand starting at position 83 of SEQ ID NO: 1887825
ucccuuuaugacggaacaa

SEQ ID NO: 2498467 - RNA, 19 nt, Artificial Sequence
  Description of Artificial Sequence: Synthetic oligonucleotide
  Antisense strand to SEQ ID NO: 2498466
uuguuccgucauaaaggga

SEQ ID NO: 2498468 - RNA, 19 nt, Artificial Sequence
  Description of Artificial Sequence: Synthetic oligonucleotide
  Sense strand starting at position 402 of SEQ ID NO: 1887825
gccuacuguucuggagaga

SEQ ID NO: 2498469 - RNA, 19 nt, Artificial Sequence
  Description of Artificial Sequence: Synthetic oligonucleotide
  Antisense strand to SEQ ID NO: 2498468
ucucuccagaacaguaggc

SEQ ID NO: 2498470 - RNA, 19 nt, Artificial Sequence
  Description of Artificial Sequence: Synthetic oligonucleotide
  Sense strand starting at position 3917 of SEQ ID NO: 1887825
ugcauagacgcauguggaa

SEQ ID NO: 2498471 - RNA, 19 nt, Artificial Sequence
  Description of Artificial Sequence: Synthetic oligonucleotide
  Antisense strand to SEQ ID NO: 2498470
uuccacaugcgucuaugca

SEQ ID NO: 2498472 - RNA, 19 nt, Artificial Sequence
  Description of Artificial Sequence: Synthetic oligonucleotide
  Sense strand starting at position 3624 of SEQ ID NO: 1887834
ucaguaucagaaugacucu

SEQ ID NO: 2498473 - RNA, 19 nt, Artificial Sequence
  Description of Artificial Sequence: Synthetic oligonucleotide
  Antisense strand to SEQ ID NO: 2498472
agagucauucugauacuga

SEQ ID NO: 2498474 - RNA, 19 nt, Artificial Sequence
  Description of Artificial Sequence: Synthetic oligonucleotide
  Sense strand starting at position 1048 of SEQ ID NO: 1887835
auaaauuccugucguguuu

SEQ ID NO: 2498475 - RNA, 19 nt, Artificial Sequence
  Description of Artificial Sequence: Synthetic oligonucleotide
  Antisense strand to SEQ ID NO: 2498474
aaacacgacaggaauuuau

SEQ ID NO: 2498476 - RNA, 19 nt, Artificial Sequence
  Description of Artificial Sequence: Synthetic oligonucleotide
  Sense strand starting at position 3624 of SEQ ID NO: 1887836
ucaguaucagaaugacucu

SEQ ID NO: 2498477 - RNA, 19 nt, Artificial Sequence
  Description of Artificial Sequence: Synthetic oligonucleotide
  Antisense strand to SEQ ID NO: 2498476
agagucauucugauacuga

SEQ ID NO: 2498478 - RNA, 19 nt, Artificial Sequence
  Description of Artificial Sequence: Synthetic oligonucleotide
  Sense strand starting at position 1048 of SEQ ID NO: 1887837
auaaauuccugucguguuu

SEQ ID NO: 2498479 - RNA, 19 nt, Artificial Sequence
  Description of Artificial Sequence: Synthetic oligonucleotide
  Antisense strand to SEQ ID NO: 2498478
aaacacgacaggaauuuau

SEQ ID NO: 2498480 - RNA, 19 nt, Artificial Sequence
  Description of Artificial Sequence: Synthetic oligonucleotide
  Sense strand starting at position 1216 of SEQ ID NO: 1887838
accuuuaaguucugaguuu

SEQ ID NO: 2498481 - RNA, 19 nt, Artificial Sequence
  Description of Artificial Sequence: Synthetic oligonucleotide
  Antisense strand to SEQ ID NO: 2498480
aaacucagaacuuaaaggu

SEQ ID NO: 2498482 - RNA, 19 nt, Artificial Sequence
  Description of Artificial Sequence: Synthetic oligonucleotide
  Sense strand starting at position 1217 of SEQ ID NO: 1887838
ccuuuaaguucugaguuuc

SEQ ID NO: 2498483 - RNA, 19 nt, Artificial Sequence
  Description of Artificial Sequence: Synthetic oligonucleotide
  Antisense strand to SEQ ID NO: 2498482
gaaacucagaacuuaaagg

SEQ ID NO: 2498484 - RNA, 19 nt, Artificial Sequence
  Description of Artificial Sequence: Synthetic oligonucleotide
  Sense strand starting at position 1227 of SEQ ID NO: 1887838
cugaguuucuaauguccgu

SEQ ID NO: 2498485 - RNA, 19 nt, Artificial Sequence
  Description of Artificial Sequence: Synthetic oligonucleotide
  Antisense strand to SEQ ID NO: 2498484
acggacauuagaaacucag

SEQ ID NO: 2498486 - RNA, 19 nt, Artificial Sequence
  Description of Artificial Sequence: Synthetic oligonucleotide
  Sense strand starting at position 2245 of SEQ ID NO: 1887838
ggaguugcacuuuauaaua

SEQ ID NO: 2498487 - RNA, 19 nt, Artificial Sequence
  Description of Artificial Sequence: Synthetic oligonucleotide
  Antisense strand to SEQ ID NO: 2498486
uauuauaaagugcaacucc

SEQ ID NO: 2498488 - RNA, 19 nt, Artificial Sequence
  Description of Artificial Sequence: Synthetic oligonucleotide
  Sense strand starting at position 60 of SEQ ID NO: 1887839
cgcaauuucuuccugucga

SEQ ID NO: 2498489 - RNA, 19 nt, Artificial Sequence
  Description of Artificial Sequence: Synthetic oligonucleotide
  Antisense strand to SEQ ID NO: 2498488
ucgacaggaagaaauugcg

SEQ ID NO: 2498490 - RNA, 19 nt, Artificial Sequence
  Description of Artificial Sequence: Synthetic oligonucleotide
  Sense strand starting at position 61 of SEQ ID NO: 1887839
gcaauuucuuccugucgag

SEQ ID NO: 2498491 - RNA, 19 nt, Artificial Sequence
  Description of Artificial Sequence: Synthetic oligonucleotide
  Antisense strand to SEQ ID NO: 2498490
cucgacaggaagaaauugc

SEQ ID NO: 2498492 - RNA, 19 nt, Artificial Sequence
  Description of Artificial Sequence: Synthetic oligonucleotide
  Sense strand starting at position 82 of SEQ ID NO: 1887839
cucccuuuaugacggaaca

SEQ ID NO: 2498493 - RNA, 19 nt, Artificial Sequence
  Description of Artificial Sequence: Synthetic oligonucleotide
  Antisense strand to SEQ ID NO: 2498492
uguuccgucauaaagggag

SEQ ID NO: 2498494 - RNA, 19 nt, Artificial Sequence
  Description of Artificial Sequence: Synthetic oligonucleotide
  Sense strand starting at position 83 of SEQ ID NO: 1887839
ucccuuuaugacggaacaa

SEQ ID NO: 2498495 - RNA, 19 nt, Artificial Sequence
  Description of Artificial Sequence: Synthetic oligonucleotide
  Antisense strand to SEQ ID NO: 2498494
uuguuccgucauaaaggga

SEQ ID NO: 2498496 - RNA, 19 nt, Artificial Sequence
  Description of Artificial Sequence: Synthetic oligonucleotide
  Sense strand starting at position 402 of SEQ ID NO: 1887839
gccuacuguucuggagaga

SEQ ID NO: 2498497 - RNA, 19 nt, Artificial Sequence
  Description of Artificial Sequence: Synthetic oligonucleotide
  Antisense strand to SEQ ID NO: 2498496
ucucuccagaacaguaggc

SEQ ID NO: 2498498 - RNA, 19 nt, Artificial Sequence
  Description of Artificial Sequence: Synthetic oligonucleotide
  Sense strand starting at position 3917 of SEQ ID NO: 1887839
ugcauagacgcauguggaa

SEQ ID NO: 2498499 - RNA, 19 nt, Artificial Sequence
  Description of Artificial Sequence: Synthetic oligonucleotide
  Antisense strand to SEQ ID NO: 2498498
uuccacaugcgucuaugca

SEQ ID NO: 2498500 - RNA, 19 nt, Artificial Sequence
  Description of Artificial Sequence: Synthetic oligonucleotide
  Sense strand starting at position 2819 of SEQ ID NO: 1887848
auacgacgucuuggaaauc

SEQ ID NO: 2498501 - RNA, 19 nt, Artificial Sequence
  Description of Artificial Sequence: Synthetic oligonucleotide
  Antisense strand to SEQ ID NO: 2498500
gauuuccaagacgucguau

SEQ ID NO: 2498502 - RNA, 19 nt, Artificial Sequence
  Description of Artificial Sequence: Synthetic oligonucleotide
  Sense strand starting at position 1216 of SEQ ID NO: 1887850
accuuuaaguucugaguuu

SEQ ID NO: 2498503 - RNA, 19 nt, Artificial Sequence
  Description of Artificial Sequence: Synthetic oligonucleotide
  Antisense strand to SEQ ID NO: 2498502
aaacucagaacuuaaaggu

SEQ ID NO: 2498504 - RNA, 19 nt, Artificial Sequence
  Description of Artificial Sequence: Synthetic oligonucleotide
  Sense strand starting at position 1217 of SEQ ID NO: 1887850
ccuuuaaguucugaguuuc

SEQ ID NO: 2498505 - RNA, 19 nt, Artificial Sequence
  Description of Artificial Sequence: Synthetic oligonucleotide
  Antisense strand to SEQ ID NO: 2498504
gaaacucagaacuuaaagg

SEQ ID NO: 2498506 - RNA, 19 nt, Artificial Sequence
  Description of Artificial Sequence: Synthetic oligonucleotide
  Sense strand starting at position 1227 of SEQ ID NO: 1887850
cugaguuucuaauguccgu

SEQ ID NO: 2498507 - RNA, 19 nt, Artificial Sequence
  Description of Artificial Sequence: Synthetic oligonucleotide
  Antisense strand to SEQ ID NO: 2498506
acggacauuagaaacucag

SEQ ID NO: 2498508 - RNA, 19 nt, Artificial Sequence
  Description of Artificial Sequence: Synthetic oligonucleotide
  Sense strand starting at position 2245 of SEQ ID NO: 1887850
ggaguugcacuuuauaaua

SEQ ID NO: 2498509 - RNA, 19 nt, Artificial Sequence
  Description of Artificial Sequence: Synthetic oligonucleotide
  Antisense strand to SEQ ID NO: 2498508
uauuauaaagugcaacucc

SEQ ID NO: 2498510 - RNA, 19 nt, Artificial Sequence
  Description of Artificial Sequence: Synthetic oligonucleotide
  Sense strand starting at position 60 of SEQ ID NO: 1887851
cgcaauuucuuccugucga

SEQ ID NO: 2498511 - RNA, 19 nt, Artificial Sequence
  Description of Artificial Sequence: Synthetic oligonucleotide
  Antisense strand to SEQ ID NO: 2498510
ucgacaggaagaaauugcg

SEQ ID NO: 2498512 - RNA, 19 nt, Artificial Sequence
  Description of Artificial Sequence: Synthetic oligonucleotide
  Sense strand starting at position 61 of SEQ ID NO: 1887851
gcaauuucuuccugucgag

SEQ ID NO: 2498513 - RNA, 19 nt, Artificial Sequence
  Description of Artificial Sequence: Synthetic oligonucleotide
  Antisense strand to SEQ ID NO: 2498512
cucgacaggaagaaauugc

SEQ ID NO: 2498514 - RNA, 19 nt, Artificial Sequence
  Description of Artificial Sequence: Synthetic oligonucleotide
  Sense strand starting at position 82 of SEQ ID NO: 1887851
cucccuuuaugacggaaca

SEQ ID NO: 2498515 - RNA, 19 nt, Artificial Sequence
  Description of Artificial Sequence: Synthetic oligonucleotide
  Antisense strand to SEQ ID NO: 2498514
uguuccgucauaaagggag

SEQ ID NO: 2498516 - RNA, 19 nt, Artificial Sequence
  Description of Artificial Sequence: Synthetic oligonucleotide
  Sense strand starting at position 83 of SEQ ID NO: 1887851
ucccuuuaugacggaacaa

SEQ ID NO: 2498517 - RNA, 19 nt, Artificial Sequence
  Description of Artificial Sequence: Synthetic oligonucleotide
  Antisense strand to SEQ ID NO: 2498516
uuguuccgucauaaaggga

SEQ ID NO: 2498518 - RNA, 19 nt, Artificial Sequence
  Description of Artificial Sequence: Synthetic oligonucleotide
  Sense strand starting at position 402 of SEQ ID NO: 1887851
gccuacuguucuggagaga

SEQ ID NO: 2498519 - RNA, 19 nt, Artificial Sequence
  Description of Artificial Sequence: Synthetic oligonucleotide
  Antisense strand to SEQ ID NO: 2498518
ucucuccagaacaguaggc

SEQ ID NO: 2498520 - RNA, 19 nt, Artificial Sequence
  Description of Artificial Sequence: Synthetic oligonucleotide
  Sense strand starting at position 3917 of SEQ ID NO: 1887851
ugcauagacgcauguggaa

SEQ ID NO: 2498521 - RNA, 19 nt, Artificial Sequence
  Description of Artificial Sequence: Synthetic oligonucleotide
  Antisense strand to SEQ ID NO: 2498520
uuccacaugcgucuaugca

SEQ ID NO: 2498522 - RNA, 19 nt, Artificial Sequence
  Description of Artificial Sequence: Synthetic oligonucleotide
  Sense strand starting at position 1216 of SEQ ID NO: 1887860
accuuuaaguucugaguuu

SEQ ID NO: 2498523 - RNA, 19 nt, Artificial Sequence
  Description of Artificial Sequence: Synthetic oligonucleotide
  Antisense strand to SEQ ID NO: 2498522
aaacucagaacuuaaaggu

SEQ ID NO: 2498524 - RNA, 19 nt, Artificial Sequence
  Description of Artificial Sequence: Synthetic oligonucleotide
  Sense strand starting at position 1217 of SEQ ID NO: 1887860
ccuuuaaguucugaguuuc

SEQ ID NO: 2498525 - RNA, 19 nt, Artificial Sequence
  Description of Artificial Sequence: Synthetic oligonucleotide
  Antisense strand to SEQ ID NO: 2498524
gaaacucagaacuuaaagg

SEQ ID NO: 2498526 - RNA, 19 nt, Artificial Sequence
  Description of Artificial Sequence: Synthetic oligonucleotide
  Sense strand starting at position 1227 of SEQ ID NO: 1887860
cugaguuucuaauguccgu

SEQ ID NO: 2498527 - RNA, 19 nt, Artificial Sequence
  Description of Artificial Sequence: Synthetic oligonucleotide
  Antisense strand to SEQ ID NO: 2498526
acggacauuagaaacucag

SEQ ID NO: 2498528 - RNA, 19 nt, Artificial Sequence
  Description of Artificial Sequence: Synthetic oligonucleotide
  Sense strand starting at position 2245 of SEQ ID NO: 1887860
ggaguugcacuuuauaaua

SEQ ID NO: 2498529 - RNA, 19 nt, Artificial Sequence
  Description of Artificial Sequence: Synthetic oligonucleotide
  Antisense strand to SEQ ID NO: 2498528
uauuauaaagugcaacucc

SEQ ID NO: 2498530 - RNA, 19 nt, Artificial Sequence
  Description of Artificial Sequence: Synthetic oligonucleotide
  Sense strand starting at position 60 of SEQ ID NO: 1887861
cgcaauuucuuccugucga

SEQ ID NO: 2498531 - RNA, 19 nt, Artificial Sequence
  Description of Artificial Sequence: Synthetic oligonucleotide
  Antisense strand to SEQ ID NO: 2498530
ucgacaggaagaaauugcg

SEQ ID NO: 2498532 - RNA, 19 nt, Artificial Sequence
  Description of Artificial Sequence: Synthetic oligonucleotide
  Sense strand starting at position 61 of SEQ ID NO: 1887861
gcaauuucuuccugucgag

SEQ ID NO: 2498533 - RNA, 19 nt, Artificial Sequence
  Description of Artificial Sequence: Synthetic oligonucleotide
  Antisense strand to SEQ ID NO: 2498532
cucgacaggaagaaauugc

SEQ ID NO: 2498534 - RNA, 19 nt, Artificial Sequence
  Description of Artificial Sequence: Synthetic oligonucleotide
  Sense strand starting at position 82 of SEQ ID NO: 1887861
cucccuuuaugacggaaca

SEQ ID NO: 2498535 - RNA, 19 nt, Artificial Sequence
  Description of Artificial Sequence: Synthetic oligonucleotide
  Antisense strand to SEQ ID NO: 2498534
uguuccgucauaaagggag

SEQ ID NO: 2498536 - RNA, 19 nt, Artificial Sequence
  Description of Artificial Sequence: Synthetic oligonucleotide
  Sense strand starting at position 83 of SEQ ID NO: 1887861
ucccuuuaugacggaacaa

SEQ ID NO: 2498537 - RNA, 19 nt, Artificial Sequence
  Description of Artificial Sequence: Synthetic oligonucleotide
  Antisense strand to SEQ ID NO: 2498536
uuguuccgucauaaaggga

SEQ ID NO: 2498538 - RNA, 19 nt, Artificial Sequence
  Description of Artificial Sequence: Synthetic oligonucleotide
  Sense strand starting at position 402 of SEQ ID NO: 1887861
gccuacuguucuggagaga

SEQ ID NO: 2498539 - RNA, 19 nt, Artificial Sequence
  Description of Artificial Sequence: Synthetic oligonucleotide
  Antisense strand to SEQ ID NO: 2498538
ucucuccagaacaguaggc

SEQ ID NO: 2498540 - RNA, 19 nt, Artificial Sequence
  Description of Artificial Sequence: Synthetic oligonucleotide
  Sense strand starting at position 3917 of SEQ ID NO: 1887861
ugcauagacgcauguggaa

SEQ ID NO: 2498541 - RNA, 19 nt, Artificial Sequence
  Description of Artificial Sequence: Synthetic oligonucleotide
  Antisense strand to SEQ ID NO: 2498540
uuccacaugcgucuaugca

SEQ ID NO: 2498542 - RNA, 19 nt, Artificial Sequence
  Description of Artificial Sequence: Synthetic oligonucleotide
  Sense strand starting at position 1216 of SEQ ID NO: 1887870
accuuuaaguucugaguuu

SEQ ID NO: 2498543 - RNA, 19 nt, Artificial Sequence
  Description of Artificial Sequence: Synthetic oligonucleotide
  Antisense strand to SEQ ID NO: 2498542
aaacucagaacuuaaaggu

SEQ ID NO: 2498544 - RNA, 19 nt, Artificial Sequence
  Description of Artificial Sequence: Synthetic oligonucleotide
  Sense strand starting at position 1217 of SEQ ID NO: 1887870
ccuuuaaguucugaguuuc

SEQ ID NO: 2498545 - RNA, 19 nt, Artificial Sequence
  Description of Artificial Sequence: Synthetic oligonucleotide
  Antisense strand to SEQ ID NO: 2498544
gaaacucagaacuuaaagg

SEQ ID NO: 2498546 - RNA, 19 nt, Artificial Sequence
  Description of Artificial Sequence: Synthetic oligonucleotide
  Sense strand starting at position 1227 of SEQ ID NO: 1887870
cugaguuucuaauguccgu

SEQ ID NO: 2498547 - RNA, 19 nt, Artificial Sequence
  Description of Artificial Sequence: Synthetic oligonucleotide
  Antisense strand to SEQ ID NO: 2498546
acggacauuagaaacucag

SEQ ID NO: 2498548 - RNA, 19 nt, Artificial Sequence
  Description of Artificial Sequence: Synthetic oligonucleotide
  Sense strand starting at position 2245 of SEQ ID NO: 1887870
ggaguugcacuuuauaaua

SEQ ID NO: 2498549 - RNA, 19 nt, Artificial Sequence
  Description of Artificial Sequence: Synthetic oligonucleotide
  Antisense strand to SEQ ID NO: 2498548
uauuauaaagugcaacucc

SEQ ID NO: 2498550 - RNA, 19 nt, Artificial Sequence
  Description of Artificial Sequence: Synthetic oligonucleotide
  Sense strand starting at position 60 of SEQ ID NO: 1887871
cgcaauuucuuccugucga

SEQ ID NO: 2498551 - RNA, 19 nt, Artificial Sequence
  Description of Artificial Sequence: Synthetic oligonucleotide
  Antisense strand to SEQ ID NO: 2498550
ucgacaggaagaaauugcg

SEQ ID NO: 2498552 - RNA, 19 nt, Artificial Sequence
  Description of Artificial Sequence: Synthetic oligonucleotide
  Sense strand starting at position 61 of SEQ ID NO: 1887871
gcaauuucuuccugucgag

SEQ ID NO: 2498553 - RNA, 19 nt, Artificial Sequence
  Description of Artificial Sequence: Synthetic oligonucleotide
  Antisense strand to SEQ ID NO: 2498552
cucgacaggaagaaauugc

SEQ ID NO: 2498554 - RNA, 19 nt, Artificial Sequence
  Description of Artificial Sequence: Synthetic oligonucleotide
  Sense strand starting at position 82 of SEQ ID NO: 1887871
cucccuuuaugacggaaca

SEQ ID NO: 2498555 - RNA, 19 nt, Artificial Sequence
  Description of Artificial Sequence: Synthetic oligonucleotide
  Antisense strand to SEQ ID NO: 2498554
uguuccgucauaaagggag

SEQ ID NO: 2498556 - RNA, 19 nt, Artificial Sequence
  Description of Artificial Sequence: Synthetic oligonucleotide
  Sense strand starting at position 83 of SEQ ID NO: 1887871
ucccuuuaugacggaacaa

SEQ ID NO: 2498557 - RNA, 19 nt, Artificial Sequence
  Description of Artificial Sequence: Synthetic oligonucleotide
  Antisense strand to SEQ ID NO: 2498556
uuguuccgucauaaaggga

SEQ ID NO: 2498558 - RNA, 19 nt, Artificial Sequence
  Description of Artificial Sequence: Synthetic oligonucleotide
  Sense strand starting at position 402 of SEQ ID NO: 1887871
gccuacuguucuggagaga

SEQ ID NO: 2498559 - RNA, 19 nt, Artificial Sequence
  Description of Artificial Sequence: Synthetic oligonucleotide
  Antisense strand to SEQ ID NO: 2498558
ucucuccagaacaguaggc

SEQ ID NO: 2498560 - RNA, 19 nt, Artificial Sequence
  Description of Artificial Sequence: Synthetic oligonucleotide
  Sense strand starting at position 3917 of SEQ ID NO: 1887871
ugcauagacgcauguggaa

SEQ ID NO: 2498561 - RNA, 19 nt, Artificial Sequence
  Description of Artificial Sequence: Synthetic oligonucleotide
  Antisense strand to SEQ ID NO: 2498560
uuccacaugcgucuaugca

SEQ ID NO: 2498562 - RNA, 19 nt, Artificial Sequence
  Description of Artificial Sequence: Synthetic oligonucleotide
  Sense strand starting at position 1216 of SEQ ID NO: 1887880
accuuuaaguucugaguuu

SEQ ID NO: 2498563 - RNA, 19 nt, Artificial Sequence
  Description of Artificial Sequence: Synthetic oligonucleotide
  Antisense strand to SEQ ID NO: 2498562
aaacucagaacuuaaaggu

SEQ ID NO: 2498564 - RNA, 19 nt, Artificial Sequence
  Description of Artificial Sequence: Synthetic oligonucleotide
  Sense strand starting at position 1217 of SEQ ID NO: 1887880
ccuuuaaguucugaguuuc

SEQ ID NO: 2498565 - RNA, 19 nt, Artificial Sequence
  Description of Artificial Sequence: Synthetic oligonucleotide
  Antisense strand to SEQ ID NO: 2498564
gaaacucagaacuuaaagg

SEQ ID NO: 2498566 - RNA, 19 nt, Artificial Sequence
  Description of Artificial Sequence: Synthetic oligonucleotide
  Sense strand starting at position 1227 of SEQ ID NO: 1887880
cugaguuucuaauguccgu

SEQ ID NO: 2498567 - RNA, 19 nt, Artificial Sequence
  Description of Artificial Sequence: Synthetic oligonucleotide
  Antisense strand to SEQ ID NO: 2498566
acggacauuagaaacucag

SEQ ID NO: 2498568 - RNA, 19 nt, Artificial Sequence
  Description of Artificial Sequence: Synthetic oligonucleotide
  Sense strand starting at position 2245 of SEQ ID NO: 1887880
ggaguugcacuuuauaaua

SEQ ID NO: 2498569 - RNA, 19 nt, Artificial Sequence
  Description of Artificial Sequence: Synthetic oligonucleotide
  Antisense strand to SEQ ID NO: 2498568
uauuauaaagugcaacucc

SEQ ID NO: 2498570 - RNA, 19 nt, Artificial Sequence
  Description of Artificial Sequence: Synthetic oligonucleotide
  Sense strand starting at position 60 of SEQ ID NO: 1887881
cgcaauuucuuccugucga

SEQ ID NO: 2498571 - RNA, 19 nt, Artificial Sequence
  Description of Artificial Sequence: Synthetic oligonucleotide
  Antisense strand to SEQ ID NO: 2498570
ucgacaggaagaaauugcg

SEQ ID NO: 2498572 - RNA, 19 nt, Artificial Sequence
  Description of Artificial Sequence: Synthetic oligonucleotide
  Sense strand starting at position 61 of SEQ ID NO: 1887881
gcaauuucuuccugucgag

SEQ ID NO: 2498573 - RNA, 19 nt, Artificial Sequence
  Description of Artificial Sequence: Synthetic oligonucleotide
  Antisense strand to SEQ ID NO: 2498572
cucgacaggaagaaauugc

SEQ ID NO: 2498574 - RNA, 19 nt, Artificial Sequence
  Description of Artificial Sequence: Synthetic oligonucleotide
  Sense strand starting at position 82 of SEQ ID NO: 1887881
cucccuuuaugacggaaca

SEQ ID NO: 2498575 - RNA, 19 nt, Artificial Sequence
  Description of Artificial Sequence: Synthetic oligonucleotide
  Antisense strand to SEQ ID NO: 2498574
uguuccgucauaaagggag

SEQ ID NO: 2498576 - RNA, 19 nt, Artificial Sequence
  Description of Artificial Sequence: Synthetic oligonucleotide
  Sense strand starting at position 83 of SEQ ID NO: 1887881
ucccuuuaugacggaacaa

SEQ ID NO: 2498577 - RNA, 19 nt, Artificial Sequence
  Description of Artificial Sequence: Synthetic oligonucleotide
  Antisense strand to SEQ ID NO: 2498576
uuguuccgucauaaaggga

SEQ ID NO: 2498578 - RNA, 19 nt, Artificial Sequence
  Description of Artificial Sequence: Synthetic oligonucleotide
  Sense strand starting at position 402 of SEQ ID NO: 1887881
gccuacuguucuggagaga

SEQ ID NO: 2498579 - RNA, 19 nt, Artificial Sequence
  Description of Artificial Sequence: Synthetic oligonucleotide
  Antisense strand to SEQ ID NO: 2498578
ucucuccagaacaguaggc

SEQ ID NO: 2498580 - RNA, 19 nt, Artificial Sequence
  Description of Artificial Sequence: Synthetic oligonucleotide
  Sense strand starting at position 3917 of SEQ ID NO: 1887881
ugcauagacgcauguggaa

SEQ ID NO: 2498581 - RNA, 19 nt, Artificial Sequence
  Description of Artificial Sequence: Synthetic oligonucleotide
  Antisense strand to SEQ ID NO: 2498580
uuccacaugcgucuaugca

SEQ ID NO: 2498582 - RNA, 19 nt, Artificial Sequence
  Description of Artificial Sequence: Synthetic oligonucleotide
  Sense strand starting at position 1216 of SEQ ID NO: 1887890
accuuuaaguucugaguuu

SEQ ID NO: 2498583 - RNA, 19 nt, Artificial Sequence
  Description of Artificial Sequence: Synthetic oligonucleotide
  Antisense strand to SEQ ID NO: 2498582
aaacucagaacuuaaaggu

SEQ ID NO: 2498584 - RNA, 19 nt, Artificial Sequence
  Description of Artificial Sequence: Synthetic oligonucleotide
  Sense strand starting at position 1217 of SEQ ID NO: 1887890
ccuuuaaguucugaguuuc

SEQ ID NO: 2498585 - RNA, 19 nt, Artificial Sequence
  Description of Artificial Sequence: Synthetic oligonucleotide
  Antisense strand to SEQ ID NO: 2498584
gaaacucagaacuuaaagg

SEQ ID NO: 2498586 - RNA, 19 nt, Artificial Sequence
  Description of Artificial Sequence: Synthetic oligonucleotide
  Sense strand starting at position 1227 of SEQ ID NO: 1887890
cugaguuucuaauguccgu

SEQ ID NO: 2498587 - RNA, 19 nt, Artificial Sequence
  Description of Artificial Sequence: Synthetic oligonucleotide
  Antisense strand to SEQ ID NO: 2498586
acggacauuagaaacucag

SEQ ID NO: 2498588 - RNA, 19 nt, Artificial Sequence
  Description of Artificial Sequence: Synthetic oligonucleotide
  Sense strand starting at position 2245 of SEQ ID NO: 1887890
ggaguugcacuuuauaaua

SEQ ID NO: 2498589 - RNA, 19 nt, Artificial Sequence
  Description of Artificial Sequence: Synthetic oligonucleotide
  Antisense strand to SEQ ID NO: 2498588
uauuauaaagugcaacucc

SEQ ID NO: 2498590 - RNA, 19 nt, Artificial Sequence
  Description of Artificial Sequence: Synthetic oligonucleotide
  Sense strand starting at position 60 of SEQ ID NO: 1887891
cgcaauuucuuccugucga

SEQ ID NO: 2498591 - RNA, 19 nt, Artificial Sequence
  Description of Artificial Sequence: Synthetic oligonucleotide
  Antisense strand to SEQ ID NO: 2498590
ucgacaggaagaaauugcg

SEQ ID NO: 2498592 - RNA, 19 nt, Artificial Sequence
  Description of Artificial Sequence: Synthetic oligonucleotide
  Sense strand starting at position 61 of SEQ ID NO: 1887891
gcaauuucuuccugucgag

SEQ ID NO: 2498593 - RNA, 19 nt, Artificial Sequence
  Description of Artificial Sequence: Synthetic oligonucleotide
  Antisense strand to SEQ ID NO: 2498592
cucgacaggaagaaauugc

SEQ ID NO: 2498594 - RNA, 19 nt, Artificial Sequence
  Description of Artificial Sequence: Synthetic oligonucleotide
  Sense strand starting at position 82 of SEQ ID NO: 1887891
cucccuuuaugacggaaca

SEQ ID NO: 2498595 - RNA, 19 nt, Artificial Sequence
  Description of Artificial Sequence: Synthetic oligonucleotide
  Antisense strand to SEQ ID NO: 2498594
uguuccgucauaaagggag

SEQ ID NO: 2498596 - RNA, 19 nt, Artificial Sequence
  Description of Artificial Sequence: Synthetic oligonucleotide
  Sense strand starting at position 83 of SEQ ID NO: 1887891
ucccuuuaugacggaacaa

SEQ ID NO: 2498597 - RNA, 19 nt, Artificial Sequence
  Description of Artificial Sequence: Synthetic oligonucleotide
  Antisense strand to SEQ ID NO: 2498596
uuguuccgucauaaaggga

SEQ ID NO: 2498598 - RNA, 19 nt, Artificial Sequence
  Description of Artificial Sequence: Synthetic oligonucleotide
  Sense strand starting at position 402 of SEQ ID NO: 1887891
gccuacuguucuggagaga

SEQ ID NO: 2498599 - RNA, 19 nt, Artificial Sequence
  Description of Artificial Sequence: Synthetic oligonucleotide
  Antisense strand to SEQ ID NO: 2498598
ucucuccagaacaguaggc

SEQ ID NO: 2498600 - RNA, 19 nt, Artificial Sequence
  Description of Artificial Sequence: Synthetic oligonucleotide
  Sense strand starting at position 3917 of SEQ ID NO: 1887891
ugcauagacgcauguggaa

SEQ ID NO: 2498601 - RNA, 19 nt, Artificial Sequence
  Description of Artificial Sequence: Synthetic oligonucleotide
  Antisense strand to SEQ ID NO: 2498600
uuccacaugcgucuaugca

SEQ ID NO: 2498602 - RNA, 19 nt, Artificial Sequence
  Description of Artificial Sequence: Synthetic oligonucleotide
  Sense strand starting at position 1216 of SEQ ID NO: 1887900
accuuuaaguucugaguuu

SEQ ID NO: 2498603 - RNA, 19 nt, Artificial Sequence
  Description of Artificial Sequence: Synthetic oligonucleotide
  Antisense strand to SEQ ID NO: 2498602
aaacucagaacuuaaaggu

SEQ ID NO: 2498604 - RNA, 19 nt, Artificial Sequence
  Description of Artificial Sequence: Synthetic oligonucleotide
  Sense strand starting at position 1217 of SEQ ID NO: 1887900
ccuuuaaguucugaguuuc

SEQ ID NO: 2498605 - RNA, 19 nt, Artificial Sequence
  Description of Artificial Sequence: Synthetic oligonucleotide
  Antisense strand to SEQ ID NO: 2498604
gaaacucagaacuuaaagg

SEQ ID NO: 2498606 - RNA, 19 nt, Artificial Sequence
  Description of Artificial Sequence: Synthetic oligonucleotide
  Sense strand starting at position 1227 of SEQ ID NO: 1887900
cugaguuucuaauguccgu

SEQ ID NO: 2498607 - RNA, 19 nt, Artificial Sequence
  Description of Artificial Sequence: Synthetic oligonucleotide
  Antisense strand to SEQ ID NO: 2498606
acggacauuagaaacucag

SEQ ID NO: 2498608 - RNA, 19 nt, Artificial Sequence
  Description of Artificial Sequence: Synthetic oligonucleotide
  Sense strand starting at position 2245 of SEQ ID NO: 1887900
ggaguugcacuuuauaaua

SEQ ID NO: 2498609 - RNA, 19 nt, Artificial Sequence
  Description of Artificial Sequence: Synthetic oligonucleotide
  Antisense strand to SEQ ID NO: 2498608
uauuauaaagugcaacucc

SEQ ID NO: 2498610 - RNA, 19 nt, Artificial Sequence
  Description of Artificial Sequence: Synthetic oligonucleotide
  Sense strand starting at position 60 of SEQ ID NO: 1887901
cgcaauuucuuccugucga

SEQ ID NO: 2498611 - RNA, 19 nt, Artificial Sequence
  Description of Artificial Sequence: Synthetic oligonucleotide
  Antisense strand to SEQ ID NO: 2498610
ucgacaggaagaaauugcg

SEQ ID NO: 2498612 - RNA, 19 nt, Artificial Sequence
  Description of Artificial Sequence: Synthetic oligonucleotide
  Sense strand starting at position 61 of SEQ ID NO: 1887901
gcaauuucuuccugucgag

SEQ ID NO: 2498613 - RNA, 19 nt, Artificial Sequence
  Description of Artificial Sequence: Synthetic oligonucleotide
  Antisense strand to SEQ ID NO: 2498612
cucgacaggaagaaauugc

SEQ ID NO: 2498614 - RNA, 19 nt, Artificial Sequence
  Description of Artificial Sequence: Synthetic oligonucleotide
  Sense strand starting at position 82 of SEQ ID NO: 1887901
cucccuuuaugacggaaca

SEQ ID NO: 2498615 - RNA, 19 nt, Artificial Sequence
  Description of Artificial Sequence: Synthetic oligonucleotide
  Antisense strand to SEQ ID NO: 2498614
uguuccgucauaaagggag

SEQ ID NO: 2498616 - RNA, 19 nt, Artificial Sequence
  Description of Artificial Sequence: Synthetic oligonucleotide
  Sense strand starting at position 83 of SEQ ID NO: 1887901
ucccuuuaugacggaacaa

SEQ ID NO: 2498617 - RNA, 19 nt, Artificial Sequence
  Description of Artificial Sequence: Synthetic oligonucleotide
  Antisense strand to SEQ ID NO: 2498616
uuguuccgucauaaaggga

SEQ ID NO: 2498618 - RNA, 19 nt, Artificial Sequence
  Description of Artificial Sequence: Synthetic oligonucleotide
  Sense strand starting at position 402 of SEQ ID NO: 1887901
gccuacuguucuggagaga

SEQ ID NO: 2498619 - RNA, 19 nt, Artificial Sequence
  Description of Artificial Sequence: Synthetic oligonucleotide
  Antisense strand to SEQ ID NO: 2498618
ucucuccagaacaguaggc

SEQ ID NO: 2498620 - RNA, 19 nt, Artificial Sequence
  Description of Artificial Sequence: Synthetic oligonucleotide
  Sense strand starting at position 3917 of SEQ ID NO: 1887901
ugcauagacgcauguggaa

SEQ ID NO: 2498621 - RNA, 19 nt, Artificial Sequence
  Description of Artificial Sequence: Synthetic oligonucleotide
  Antisense strand to SEQ ID NO: 2498620
uuccacaugcgucuaugca

SEQ ID NO: 2498622 - RNA, 19 nt, Artificial Sequence
  Description of Artificial Sequence: Synthetic oligonucleotide
  Sense strand starting at position 1216 of SEQ ID NO: 1887910
accuuuaaguucugaguuu

SEQ ID NO: 2498623 - RNA, 19 nt, Artificial Sequence
  Description of Artificial Sequence: Synthetic oligonucleotide
  Antisense strand to SEQ ID NO: 2498622
aaacucagaacuuaaaggu

SEQ ID NO: 2498624 - RNA, 19 nt, Artificial Sequence
  Description of Artificial Sequence: Synthetic oligonucleotide
  Sense strand starting at position 1217 of SEQ ID NO: 1887910
ccuuuaaguucugaguuuc

SEQ ID NO: 2498625 - RNA, 19 nt, Artificial Sequence
  Description of Artificial Sequence: Synthetic oligonucleotide
  Antisense strand to SEQ ID NO: 2498624
gaaacucagaacuuaaagg

SEQ ID NO: 2498626 - RNA, 19 nt, Artificial Sequence
  Description of Artificial Sequence: Synthetic oligonucleotide
  Sense strand starting at position 1227 of SEQ ID NO: 1887910
cugaguuucuaauguccgu

SEQ ID NO: 2498627 - RNA, 19 nt, Artificial Sequence
  Description of Artificial Sequence: Synthetic oligonucleotide
  Antisense strand to SEQ ID NO: 2498626
acggacauuagaaacucag

SEQ ID NO: 2498628 - RNA, 19 nt, Artificial Sequence
  Description of Artificial Sequence: Synthetic oligonucleotide
  Sense strand starting at position 2245 of SEQ ID NO: 1887910
ggaguugcacuuuauaaua

SEQ ID NO: 2498629 - RNA, 19 nt, Artificial Sequence
  Description of Artificial Sequence: Synthetic oligonucleotide
  Antisense strand to SEQ ID NO: 2498628
uauuauaaagugcaacucc

SEQ ID NO: 2498630 - RNA, 19 nt, Artificial Sequence
  Description of Artificial Sequence: Synthetic oligonucleotide
  Sense strand starting at position 60 of SEQ ID NO: 1887911
cgcaauuucuuccugucga

SEQ ID NO: 2498631 - RNA, 19 nt, Artificial Sequence
  Description of Artificial Sequence: Synthetic oligonucleotide
  Antisense strand to SEQ ID NO: 2498630
ucgacaggaagaaauugcg

SEQ ID NO: 2498632 - RNA, 19 nt, Artificial Sequence
  Description of Artificial Sequence: Synthetic oligonucleotide
  Sense strand starting at position 61 of SEQ ID NO: 1887911
gcaauuucuuccugucgag

SEQ ID NO: 2498633 - RNA, 19 nt, Artificial Sequence
  Description of Artificial Sequence: Synthetic oligonucleotide
  Antisense strand to SEQ ID NO: 2498632
cucgacaggaagaaauugc

SEQ ID NO: 2498634 - RNA, 19 nt, Artificial Sequence
  Description of Artificial Sequence: Synthetic oligonucleotide
  Sense strand starting at position 82 of SEQ ID NO: 1887911
cucccuuuaugacggaaca

SEQ ID NO: 2498635 - RNA, 19 nt, Artificial Sequence
  Description of Artificial Sequence: Synthetic oligonucleotide
  Antisense strand to SEQ ID NO: 2498634
uguuccgucauaaagggag

SEQ ID NO: 2498636 - RNA, 19 nt, Artificial Sequence
  Description of Artificial Sequence: Synthetic oligonucleotide
  Sense strand starting at position 83 of SEQ ID NO: 1887911
ucccuuuaugacggaacaa

SEQ ID NO: 2498637 - RNA, 19 nt, Artificial Sequence
  Description of Artificial Sequence: Synthetic oligonucleotide
  Antisense strand to SEQ ID NO: 2498636
uuguuccgucauaaaggga

SEQ ID NO: 2498638 - RNA, 19 nt, Artificial Sequence
  Description of Artificial Sequence: Synthetic oligonucleotide
  Sense strand starting at position 402 of SEQ ID NO: 1887911
gccuacuguucuggagaga

SEQ ID NO: 2498639 - RNA, 19 nt, Artificial Sequence
  Description of Artificial Sequence: Synthetic oligonucleotide
  Antisense strand to SEQ ID NO: 2498638
ucucuccagaacaguaggc

SEQ ID NO: 2498640 - RNA, 19 nt, Artificial Sequence
  Description of Artificial Sequence: Synthetic oligonucleotide
  Sense strand starting at position 3917 of SEQ ID NO: 1887911
ugcauagacgcauguggaa

SEQ ID NO: 2498641 - RNA, 19 nt, Artificial Sequence
  Description of Artificial Sequence: Synthetic oligonucleotide
  Antisense strand to SEQ ID NO: 2498640
uuccacaugcgucuaugca

SEQ ID NO: 2498642 - RNA, 19 nt, Artificial Sequence
  Description of Artificial Sequence: Synthetic oligonucleotide
  Sense strand starting at position 3035 of SEQ ID NO: 1887920
gggagaugucaccaacggu

SEQ ID NO: 2498643 - RNA, 19 nt, Artificial Sequence
  Description of Artificial Sequence: Synthetic oligonucleotide
  Antisense strand to SEQ ID NO: 2498642
accguuggugacaucuccc

SEQ ID NO: 2498644 - RNA, 19 nt, Artificial Sequence
  Description of Artificial Sequence: Synthetic oligonucleotide
  Sense strand starting at position 3420 of SEQ ID NO: 1887920
acuggaguuuguucuguau

SEQ ID NO: 2498645 - RNA, 19 nt, Artificial Sequence
  Description of Artificial Sequence: Synthetic oligonucleotide
  Antisense strand to SEQ ID NO: 2498644
auacagaacaaacuccagu

SEQ ID NO: 2498646 - RNA, 19 nt, Artificial Sequence
  Description of Artificial Sequence: Synthetic oligonucleotide
  Sense strand starting at position 3449 of SEQ ID NO: 1887920
caaauucugcgccaguuga

SEQ ID NO: 2498647 - RNA, 19 nt, Artificial Sequence
  Description of Artificial Sequence: Synthetic oligonucleotide
  Antisense strand to SEQ ID NO: 2498646
ucaacuggcgcagaauuug

SEQ ID NO: 2498648 - RNA, 19 nt, Artificial Sequence
  Description of Artificial Sequence: Synthetic oligonucleotide
  Sense strand starting at position 3639 of SEQ ID NO: 1887920
ucagaaugacucugacuuc

SEQ ID NO: 2498649 - RNA, 19 nt, Artificial Sequence
  Description of Artificial Sequence: Synthetic oligonucleotide
  Antisense strand to SEQ ID NO: 2498648
gaagucagagucauucuga

SEQ ID NO: 2498650 - RNA, 19 nt, Artificial Sequence
  Description of Artificial Sequence: Synthetic oligonucleotide
  Sense strand starting at position 3791 of SEQ ID NO: 1887920
guugguaggucuuguauga

SEQ ID NO: 2498651 - RNA, 19 nt, Artificial Sequence
  Description of Artificial Sequence: Synthetic oligonucleotide
  Antisense strand to SEQ ID NO: 2498650
ucauacaagaccuaccaac

SEQ ID NO: 2498652 - RNA, 19 nt, Artificial Sequence
  Description of Artificial Sequence: Synthetic oligonucleotide
  Sense strand starting at position 3795 of SEQ ID NO: 1887920
guaggucuuguaugacuaa

SEQ ID NO: 2498653 - RNA, 19 nt, Artificial Sequence
  Description of Artificial Sequence: Synthetic oligonucleotide
  Antisense strand to SEQ ID NO: 2498652
uuagucauacaagaccuac

SEQ ID NO: 2498654 - RNA, 19 nt, Artificial Sequence
  Description of Artificial Sequence: Synthetic oligonucleotide
  Sense strand starting at position 3955 of SEQ ID NO: 1887920
caggguuucuuguaugucu

SEQ ID NO: 2498655 - RNA, 19 nt, Artificial Sequence
  Description of Artificial Sequence: Synthetic oligonucleotide
  Antisense strand to SEQ ID NO: 2498654
agacauacaagaaacccug

SEQ ID NO: 2498656 - RNA, 19 nt, Artificial Sequence
  Description of Artificial Sequence: Synthetic oligonucleotide
  Sense strand starting at position 3970 of SEQ ID NO: 1887920
gucugugggucagugguaa

SEQ ID NO: 2498657 - RNA, 19 nt, Artificial Sequence
  Description of Artificial Sequence: Synthetic oligonucleotide
  Antisense strand to SEQ ID NO: 2498656
uuaccacugacccacagac

SEQ ID NO: 2498658 - RNA, 19 nt, Artificial Sequence
  Description of Artificial Sequence: Synthetic oligonucleotide
  Sense strand starting at position 3982 of SEQ ID NO: 1887920
gugguaaugucaccucugu

SEQ ID NO: 2498659 - RNA, 19 nt, Artificial Sequence
  Description of Artificial Sequence: Synthetic oligonucleotide
  Antisense strand to SEQ ID NO: 2498658
acagaggugacauuaccac

SEQ ID NO: 2498660 - RNA, 19 nt, Artificial Sequence
  Description of Artificial Sequence: Synthetic oligonucleotide
  Sense strand starting at position 2896 of SEQ ID NO: 1887921
auaggaagaugucauuucu

SEQ ID NO: 2498661 - RNA, 19 nt, Artificial Sequence
  Description of Artificial Sequence: Synthetic oligonucleotide
  Antisense strand to SEQ ID NO: 2498660
agaaaugacaucuuccuau

SEQ ID NO: 2498662 - RNA, 19 nt, Artificial Sequence
  Description of Artificial Sequence: Synthetic oligonucleotide
  Sense strand starting at position 3035 of SEQ ID NO: 1887922
gggagaugucaccaacggu

SEQ ID NO: 2498663 - RNA, 19 nt, Artificial Sequence
  Description of Artificial Sequence: Synthetic oligonucleotide
  Antisense strand to SEQ ID NO: 2498662
accguuggugacaucuccc

SEQ ID NO: 2498664 - RNA, 19 nt, Artificial Sequence
  Description of Artificial Sequence: Synthetic oligonucleotide
  Sense strand starting at position 3420 of SEQ ID NO: 1887922
acuggaguuuguucuguau

SEQ ID NO: 2498665 - RNA, 19 nt, Artificial Sequence
  Description of Artificial Sequence: Synthetic oligonucleotide
  Antisense strand to SEQ ID NO: 2498664
auacagaacaaacuccagu

SEQ ID NO: 2498666 - RNA, 19 nt, Artificial Sequence
  Description of Artificial Sequence: Synthetic oligonucleotide
  Sense strand starting at position 3449 of SEQ ID NO: 1887922
caaauucugcgccaguuga

SEQ ID NO: 2498667 - RNA, 19 nt, Artificial Sequence
  Description of Artificial Sequence: Synthetic oligonucleotide
  Antisense strand to SEQ ID NO: 2498666
ucaacuggcgcagaauuug

SEQ ID NO: 2498668 - RNA, 19 nt, Artificial Sequence
  Description of Artificial Sequence: Synthetic oligonucleotide
  Sense strand starting at position 3639 of SEQ ID NO: 1887922
ucagaaugacucugacuuc

SEQ ID NO: 2498669 - RNA, 19 nt, Artificial Sequence
  Description of Artificial Sequence: Synthetic oligonucleotide
  Antisense strand to SEQ ID NO: 2498668
gaagucagagucauucuga

SEQ ID NO: 2498670 - RNA, 19 nt, Artificial Sequence
  Description of Artificial Sequence: Synthetic oligonucleotide
  Sense strand starting at position 3791 of SEQ ID NO: 1887922
guugguaggucuuguauga

SEQ ID NO: 2498671 - RNA, 19 nt, Artificial Sequence
  Description of Artificial Sequence: Synthetic oligonucleotide
  Antisense strand to SEQ ID NO: 2498670
ucauacaagaccuaccaac

SEQ ID NO: 2498672 - RNA, 19 nt, Artificial Sequence
  Description of Artificial Sequence: Synthetic oligonucleotide
  Sense strand starting at position 3795 of SEQ ID NO: 1887922
guaggucuuguaugacuaa

SEQ ID NO: 2498673 - RNA, 19 nt, Artificial Sequence
  Description of Artificial Sequence: Synthetic oligonucleotide
  Antisense strand to SEQ ID NO: 2498672
uuagucauacaagaccuac

SEQ ID NO: 2498674 - RNA, 19 nt, Artificial Sequence
  Description of Artificial Sequence: Synthetic oligonucleotide
  Sense strand starting at position 3955 of SEQ ID NO: 1887922
caggguuucuuguaugucu

SEQ ID NO: 2498675 - RNA, 19 nt, Artificial Sequence
  Description of Artificial Sequence: Synthetic oligonucleotide
  Antisense strand to SEQ ID NO: 2498674
agacauacaagaaacccug

SEQ ID NO: 2498676 - RNA, 19 nt, Artificial Sequence
  Description of Artificial Sequence: Synthetic oligonucleotide
  Sense strand starting at position 3970 of SEQ ID NO: 1887922
gucugugggucagugguaa

SEQ ID NO: 2498677 - RNA, 19 nt, Artificial Sequence
  Description of Artificial Sequence: Synthetic oligonucleotide
  Antisense strand to SEQ ID NO: 2498676
uuaccacugacccacagac

SEQ ID NO: 2498678 - RNA, 19 nt, Artificial Sequence
  Description of Artificial Sequence: Synthetic oligonucleotide
  Sense strand starting at position 3982 of SEQ ID NO: 1887922
gugguaaugucaccucugu

SEQ ID NO: 2498679 - RNA, 19 nt, Artificial Sequence
  Description of Artificial Sequence: Synthetic oligonucleotide
  Antisense strand to SEQ ID NO: 2498678
acagaggugacauuaccac

SEQ ID NO: 2498680 - RNA, 19 nt, Artificial Sequence
  Description of Artificial Sequence: Synthetic oligonucleotide
  Sense strand starting at position 2896 of SEQ ID NO: 1887923
auaggaagaugucauuucu

SEQ ID NO: 2498681 - RNA, 19 nt, Artificial Sequence
  Description of Artificial Sequence: Synthetic oligonucleotide
  Antisense strand to SEQ ID NO: 2498680
agaaaugacaucuuccuau

SEQ ID NO: 2498682 - RNA, 19 nt, Artificial Sequence
  Description of Artificial Sequence: Synthetic oligonucleotide
  Sense strand starting at position 3940 of SEQ ID NO: 1887924
uuggaauagucucaggguu

SEQ ID NO: 2498683 - RNA, 19 nt, Artificial Sequence
  Description of Artificial Sequence: Synthetic oligonucleotide
  Antisense strand to SEQ ID NO: 2498682
aacccugagacuauuccaa

SEQ ID NO: 2498684 - RNA, 19 nt, Artificial Sequence
  Description of Artificial Sequence: Synthetic oligonucleotide
  Sense strand starting at position 2967 of SEQ ID NO: 1887925
gccugcuucuacgggaaca

SEQ ID NO: 2498685 - RNA, 19 nt, Artificial Sequence
  Description of Artificial Sequence: Synthetic oligonucleotide
  Antisense strand to SEQ ID NO: 2498684
uguucccguagaagcaggc

SEQ ID NO: 2498686 - RNA, 19 nt, Artificial Sequence
  Description of Artificial Sequence: Synthetic oligonucleotide
  Sense strand starting at position 2969 of SEQ ID NO: 1887925
cugcuucuacgggaacagu

SEQ ID NO: 2498687 - RNA, 19 nt, Artificial Sequence
  Description of Artificial Sequence: Synthetic oligonucleotide
  Antisense strand to SEQ ID NO: 2498686
acuguucccguagaagcag

SEQ ID NO: 2498688 - RNA, 19 nt, Artificial Sequence
  Description of Artificial Sequence: Synthetic oligonucleotide
  Sense strand starting at position 998 of SEQ ID NO: 1887926
uugcuugaauaauugaaca

SEQ ID NO: 2498689 - RNA, 19 nt, Artificial Sequence
  Description of Artificial Sequence: Synthetic oligonucleotide
  Antisense strand to SEQ ID NO: 2498688
uguucaauuauucaagcaa

SEQ ID NO: 2498690 - RNA, 19 nt, Artificial Sequence
  Description of Artificial Sequence: Synthetic oligonucleotide
  Sense strand starting at position 3940 of SEQ ID NO: 1887927
uuggaauagucucaggguu

SEQ ID NO: 2498691 - RNA, 19 nt, Artificial Sequence
  Description of Artificial Sequence: Synthetic oligonucleotide
  Antisense strand to SEQ ID NO: 2498690
aacccugagacuauuccaa

SEQ ID NO: 2498692 - RNA, 19 nt, Artificial Sequence
  Description of Artificial Sequence: Synthetic oligonucleotide
  Sense strand starting at position 2967 of SEQ ID NO: 1887928
gccugcuucuacgggaaca

SEQ ID NO: 2498693 - RNA, 19 nt, Artificial Sequence
  Description of Artificial Sequence: Synthetic oligonucleotide
  Antisense strand to SEQ ID NO: 2498692
uguucccguagaagcaggc

SEQ ID NO: 2498694 - RNA, 19 nt, Artificial Sequence
  Description of Artificial Sequence: Synthetic oligonucleotide
  Sense strand starting at position 2969 of SEQ ID NO: 1887928
cugcuucuacgggaacagu

SEQ ID NO: 2498695 - RNA, 19 nt, Artificial Sequence
  Description of Artificial Sequence: Synthetic oligonucleotide
  Antisense strand to SEQ ID NO: 2498694
acuguucccguagaagcag

SEQ ID NO: 2498696 - RNA, 19 nt, Artificial Sequence
  Description of Artificial Sequence: Synthetic oligonucleotide
  Sense strand starting at position 998 of SEQ ID NO: 1887929
uugcuugaauaauugaaca

SEQ ID NO: 2498697 - RNA, 19 nt, Artificial Sequence
  Description of Artificial Sequence: Synthetic oligonucleotide
  Antisense strand to SEQ ID NO: 2498696
uguucaauuauucaagcaa

SEQ ID NO: 2498698 - RNA, 19 nt, Artificial Sequence
  Description of Artificial Sequence: Synthetic oligonucleotide
  Sense strand starting at position 2261 of SEQ ID NO: 1887930
auacacgccucauguauaa

SEQ ID NO: 2498699 - RNA, 19 nt, Artificial Sequence
  Description of Artificial Sequence: Synthetic oligonucleotide
  Antisense strand to SEQ ID NO: 2498698
uuauacaugaggcguguau

SEQ ID NO: 2498700 - RNA, 19 nt, Artificial Sequence
  Description of Artificial Sequence: Synthetic oligonucleotide
  Sense strand starting at position 3940 of SEQ ID NO: 1887932
uuggaauagucucaggguu

SEQ ID NO: 2498701 - RNA, 19 nt, Artificial Sequence
  Description of Artificial Sequence: Synthetic oligonucleotide
  Antisense strand to SEQ ID NO: 2498700
aacccugagacuauuccaa

SEQ ID NO: 2498702 - RNA, 19 nt, Artificial Sequence
  Description of Artificial Sequence: Synthetic oligonucleotide
  Sense strand starting at position 2967 of SEQ ID NO: 1887933
gccugcuucuacgggaaca

SEQ ID NO: 2498703 - RNA, 19 nt, Artificial Sequence
  Description of Artificial Sequence: Synthetic oligonucleotide
  Antisense strand to SEQ ID NO: 2498702
uguucccguagaagcaggc

SEQ ID NO: 2498704 - RNA, 19 nt, Artificial Sequence
  Description of Artificial Sequence: Synthetic oligonucleotide
  Sense strand starting at position 2969 of SEQ ID NO: 1887933
cugcuucuacgggaacagu

SEQ ID NO: 2498705 - RNA, 19 nt, Artificial Sequence
  Description of Artificial Sequence: Synthetic oligonucleotide
  Antisense strand to SEQ ID NO: 2498704
acuguucccguagaagcag

SEQ ID NO: 2498706 - RNA, 19 nt, Artificial Sequence
  Description of Artificial Sequence: Synthetic oligonucleotide
  Sense strand starting at position 998 of SEQ ID NO: 1887934
uugcuugaauaauugaaca

SEQ ID NO: 2498707 - RNA, 19 nt, Artificial Sequence
  Description of Artificial Sequence: Synthetic oligonucleotide
  Antisense strand to SEQ ID NO: 2498706
uguucaauuauucaagcaa

SEQ ID NO: 2498708 - RNA, 19 nt, Artificial Sequence
  Description of Artificial Sequence: Synthetic oligonucleotide
  Sense strand starting at position 1813 of SEQ ID NO: 1887935
auaggaagaugucauuucu

SEQ ID NO: 2498709 - RNA, 19 nt, Artificial Sequence
  Description of Artificial Sequence: Synthetic oligonucleotide
  Antisense strand to SEQ ID NO: 2498708
agaaaugacaucuuccuau

SEQ ID NO: 2498710 - RNA, 19 nt, Artificial Sequence
  Description of Artificial Sequence: Synthetic oligonucleotide
  Sense strand starting at position 3552 of SEQ ID NO: 1887935
aaguguuaaugacagauuu

SEQ ID NO: 2498711 - RNA, 19 nt, Artificial Sequence
  Description of Artificial Sequence: Synthetic oligonucleotide
  Antisense strand to SEQ ID NO: 2498710
aaaucugucauuaacacuu

SEQ ID NO: 2498712 - RNA, 19 nt, Artificial Sequence
  Description of Artificial Sequence: Synthetic oligonucleotide
  Sense strand starting at position 3603 of SEQ ID NO: 1887935
ucaaauucugucuagggua

SEQ ID NO: 2498713 - RNA, 19 nt, Artificial Sequence
  Description of Artificial Sequence: Synthetic oligonucleotide
  Antisense strand to SEQ ID NO: 2498712
uacccuagacagaauuuga

SEQ ID NO: 2498714 - RNA, 19 nt, Artificial Sequence
  Description of Artificial Sequence: Synthetic oligonucleotide
  Sense strand starting at position 3605 of SEQ ID NO: 1887935
aaauucugucuaggguaua

SEQ ID NO: 2498715 - RNA, 19 nt, Artificial Sequence
  Description of Artificial Sequence: Synthetic oligonucleotide
  Antisense strand to SEQ ID NO: 2498714
uauacccuagacagaauuu

SEQ ID NO: 2498716 - RNA, 19 nt, Artificial Sequence
  Description of Artificial Sequence: Synthetic oligonucleotide
  Sense strand starting at position 3606 of SEQ ID NO: 1887935
aauucugucuaggguauau

SEQ ID NO: 2498717 - RNA, 19 nt, Artificial Sequence
  Description of Artificial Sequence: Synthetic oligonucleotide
  Antisense strand to SEQ ID NO: 2498716
auauacccuagacagaauu

SEQ ID NO: 2498718 - RNA, 19 nt, Artificial Sequence
  Description of Artificial Sequence: Synthetic oligonucleotide
  Sense strand starting at position 3608 of SEQ ID NO: 1887935
uucugucuaggguauauau

SEQ ID NO: 2498719 - RNA, 19 nt, Artificial Sequence
  Description of Artificial Sequence: Synthetic oligonucleotide
  Antisense strand to SEQ ID NO: 2498718
auauauacccuagacagaa

SEQ ID NO: 2498720 - RNA, 19 nt, Artificial Sequence
  Description of Artificial Sequence: Synthetic oligonucleotide
  Sense strand starting at position 3610 of SEQ ID NO: 1887935
cugucuaggguauauauga

SEQ ID NO: 2498721 - RNA, 19 nt, Artificial Sequence
  Description of Artificial Sequence: Synthetic oligonucleotide
  Antisense strand to SEQ ID NO: 2498720
ucauauauacccuagacag

SEQ ID NO: 2498722 - RNA, 19 nt, Artificial Sequence
  Description of Artificial Sequence: Synthetic oligonucleotide
  Sense strand starting at position 3615 of SEQ ID NO: 1887935
uaggguauauaugaaagau

SEQ ID NO: 2498723 - RNA, 19 nt, Artificial Sequence
  Description of Artificial Sequence: Synthetic oligonucleotide
  Antisense strand to SEQ ID NO: 2498722
aucuuucauauauacccua

SEQ ID NO: 2498724 - RNA, 19 nt, Artificial Sequence
  Description of Artificial Sequence: Synthetic oligonucleotide
  Sense strand starting at position 3697 of SEQ ID NO: 1887935
aguuuagcauuccaggaaa

SEQ ID NO: 2498725 - RNA, 19 nt, Artificial Sequence
  Description of Artificial Sequence: Synthetic oligonucleotide
  Antisense strand to SEQ ID NO: 2498724
uuuccuggaaugcuaaacu

SEQ ID NO: 2498726 - RNA, 19 nt, Artificial Sequence
  Description of Artificial Sequence: Synthetic oligonucleotide
  Sense strand starting at position 3880 of SEQ ID NO: 1887935
uuaggaauuagcuaggcau

SEQ ID NO: 2498727 - RNA, 19 nt, Artificial Sequence
  Description of Artificial Sequence: Synthetic oligonucleotide
  Antisense strand to SEQ ID NO: 2498726
augccuagcuaauuccuaa

SEQ ID NO: 2498728 - RNA, 19 nt, Artificial Sequence
  Description of Artificial Sequence: Synthetic oligonucleotide
  Sense strand starting at position 2 of SEQ ID NO: 1887936
cugagucauugagcacaga

SEQ ID NO: 2498729 - RNA, 19 nt, Artificial Sequence
  Description of Artificial Sequence: Synthetic oligonucleotide
  Antisense strand to SEQ ID NO: 2498728
ucugugcucaaugacucag

SEQ ID NO: 2498730 - RNA, 19 nt, Artificial Sequence
  Description of Artificial Sequence: Synthetic oligonucleotide
  Sense strand starting at position 117 of SEQ ID NO: 1887936
guuugucacguagguauau

SEQ ID NO: 2498731 - RNA, 19 nt, Artificial Sequence
  Description of Artificial Sequence: Synthetic oligonucleotide
  Antisense strand to SEQ ID NO: 2498730
auauaccuacgugacaaac

SEQ ID NO: 2498732 - RNA, 19 nt, Artificial Sequence
  Description of Artificial Sequence: Synthetic oligonucleotide
  Sense strand starting at position 162 of SEQ ID NO: 1887936
guuggccuguccucaaagu

SEQ ID NO: 2498733 - RNA, 19 nt, Artificial Sequence
  Description of Artificial Sequence: Synthetic oligonucleotide
  Antisense strand to SEQ ID NO: 2498732
acuuugaggacaggccaac

SEQ ID NO: 2498734 - RNA, 19 nt, Artificial Sequence
  Description of Artificial Sequence: Synthetic oligonucleotide
  Sense strand starting at position 163 of SEQ ID NO: 1887936
uuggccuguccucaaaguu

SEQ ID NO: 2498735 - RNA, 19 nt, Artificial Sequence
  Description of Artificial Sequence: Synthetic oligonucleotide
  Antisense strand to SEQ ID NO: 2498734
aacuuugaggacaggccaa

SEQ ID NO: 2498736 - RNA, 19 nt, Artificial Sequence
  Description of Artificial Sequence: Synthetic oligonucleotide
  Sense strand starting at position 369 of SEQ ID NO: 1887936
augcuuggcuaguugaauu

SEQ ID NO: 2498737 - RNA, 19 nt, Artificial Sequence
  Description of Artificial Sequence: Synthetic oligonucleotide
  Antisense strand to SEQ ID NO: 2498736
aauucaacuagccaagcau

SEQ ID NO: 2498738 - RNA, 19 nt, Artificial Sequence
  Description of Artificial Sequence: Synthetic oligonucleotide
  Sense strand starting at position 494 of SEQ ID NO: 1887936
ccucccaaaucugggauua

SEQ ID NO: 2498739 - RNA, 19 nt, Artificial Sequence
  Description of Artificial Sequence: Synthetic oligonucleotide
  Antisense strand to SEQ ID NO: 2498738
uaaucccagauuugggagg

SEQ ID NO: 2498740 - RNA, 19 nt, Artificial Sequence
  Description of Artificial Sequence: Synthetic oligonucleotide
  Sense strand starting at position 496 of SEQ ID NO: 1887936
ucccaaaucugggauuaga

SEQ ID NO: 2498741 - RNA, 19 nt, Artificial Sequence
  Description of Artificial Sequence: Synthetic oligonucleotide
  Antisense strand to SEQ ID NO: 2498740
ucuaaucccagauuuggga

SEQ ID NO: 2498742 - RNA, 19 nt, Artificial Sequence
  Description of Artificial Sequence: Synthetic oligonucleotide
  Sense strand starting at position 638 of SEQ ID NO: 1887936
gucucugugcuguacauuu

SEQ ID NO: 2498743 - RNA, 19 nt, Artificial Sequence
  Description of Artificial Sequence: Synthetic oligonucleotide
  Antisense strand to SEQ ID NO: 2498742
aaauguacagcacagagac

SEQ ID NO: 2498744 - RNA, 19 nt, Artificial Sequence
  Description of Artificial Sequence: Synthetic oligonucleotide
  Sense strand starting at position 664 of SEQ ID NO: 1887936
auggaauucugugcuaggu

SEQ ID NO: 2498745 - RNA, 19 nt, Artificial Sequence
  Description of Artificial Sequence: Synthetic oligonucleotide
  Antisense strand to SEQ ID NO: 2498744
accuagcacagaauuccau

SEQ ID NO: 2498746 - RNA, 19 nt, Artificial Sequence
  Description of Artificial Sequence: Synthetic oligonucleotide
  Sense strand starting at position 712 of SEQ ID NO: 1887936
gcaucacaucuucgagguu

SEQ ID NO: 2498747 - RNA, 19 nt, Artificial Sequence
  Description of Artificial Sequence: Synthetic oligonucleotide
  Antisense strand to SEQ ID NO: 2498746
aaccucgaagaugugaugc

SEQ ID NO: 2498748 - RNA, 19 nt, Artificial Sequence
  Description of Artificial Sequence: Synthetic oligonucleotide
  Sense strand starting at position 746 of SEQ ID NO: 1887936
augcgucagugcugcauuu

SEQ ID NO: 2498749 - RNA, 19 nt, Artificial Sequence
  Description of Artificial Sequence: Synthetic oligonucleotide
  Antisense strand to SEQ ID NO: 2498748
aaaugcagcacugacgcau

SEQ ID NO: 2498750 - RNA, 19 nt, Artificial Sequence
  Description of Artificial Sequence: Synthetic oligonucleotide
  Sense strand starting at position 1076 of SEQ ID NO: 1887936
cuggcugaguucuguacuu

SEQ ID NO: 2498751 - RNA, 19 nt, Artificial Sequence
  Description of Artificial Sequence: Synthetic oligonucleotide
  Antisense strand to SEQ ID NO: 2498750
aaguacagaacucagccag

SEQ ID NO: 2498752 - RNA, 19 nt, Artificial Sequence
  Description of Artificial Sequence: Synthetic oligonucleotide
  Sense strand starting at position 1132 of SEQ ID NO: 1887936
ugcaguuuccgugcaguga

SEQ ID NO: 2498753 - RNA, 19 nt, Artificial Sequence
  Description of Artificial Sequence: Synthetic oligonucleotide
  Antisense strand to SEQ ID NO: 2498752
ucacugcacggaaacugca

SEQ ID NO: 2498754 - RNA, 19 nt, Artificial Sequence
  Description of Artificial Sequence: Synthetic oligonucleotide
  Sense strand starting at position 1262 of SEQ ID NO: 1887936
ccgaguuuguccuugagua

SEQ ID NO: 2498755 - RNA, 19 nt, Artificial Sequence
  Description of Artificial Sequence: Synthetic oligonucleotide
  Antisense strand to SEQ ID NO: 2498754
uacucaaggacaaacucgg

SEQ ID NO: 2498756 - RNA, 19 nt, Artificial Sequence
  Description of Artificial Sequence: Synthetic oligonucleotide
  Sense strand starting at position 1263 of SEQ ID NO: 1887936
cgaguuuguccuugaguag

SEQ ID NO: 2498757 - RNA, 19 nt, Artificial Sequence
  Description of Artificial Sequence: Synthetic oligonucleotide
  Antisense strand to SEQ ID NO: 2498756
cuacucaaggacaaacucg

SEQ ID NO: 2498758 - RNA, 19 nt, Artificial Sequence
  Description of Artificial Sequence: Synthetic oligonucleotide
  Sense strand starting at position 1264 of SEQ ID NO: 1887936
gaguuuguccuugaguagc

SEQ ID NO: 2498759 - RNA, 19 nt, Artificial Sequence
  Description of Artificial Sequence: Synthetic oligonucleotide
  Antisense strand to SEQ ID NO: 2498758
gcuacucaaggacaaacuc

SEQ ID NO: 2498760 - RNA, 19 nt, Artificial Sequence
  Description of Artificial Sequence: Synthetic oligonucleotide
  Sense strand starting at position 1270 of SEQ ID NO: 1887936
guccuugaguagcuguaaa

SEQ ID NO: 2498761 - RNA, 19 nt, Artificial Sequence
  Description of Artificial Sequence: Synthetic oligonucleotide
  Antisense strand to SEQ ID NO: 2498760
uuuacagcuacucaaggac

SEQ ID NO: 2498762 - RNA, 19 nt, Artificial Sequence
  Description of Artificial Sequence: Synthetic oligonucleotide
  Sense strand starting at position 1382 of SEQ ID NO: 1887936
ucaguuacugaguggaaag

SEQ ID NO: 2498763 - RNA, 19 nt, Artificial Sequence
  Description of Artificial Sequence: Synthetic oligonucleotide
  Antisense strand to SEQ ID NO: 2498762
cuuuccacucaguaacuga

SEQ ID NO: 2498764 - RNA, 19 nt, Artificial Sequence
  Description of Artificial Sequence: Synthetic oligonucleotide
  Sense strand starting at position 1383 of SEQ ID NO: 1887936
caguuacugaguggaaagu

SEQ ID NO: 2498765 - RNA, 19 nt, Artificial Sequence
  Description of Artificial Sequence: Synthetic oligonucleotide
  Antisense strand to SEQ ID NO: 2498764
acuuuccacucaguaacug

SEQ ID NO: 2498766 - RNA, 19 nt, Artificial Sequence
  Description of Artificial Sequence: Synthetic oligonucleotide
  Sense strand starting at position 1384 of SEQ ID NO: 1887936
aguuacugaguggaaaguu

SEQ ID NO: 2498767 - RNA, 19 nt, Artificial Sequence
  Description of Artificial Sequence: Synthetic oligonucleotide
  Antisense strand to SEQ ID NO: 2498766
aacuuuccacucaguaacu

SEQ ID NO: 2498768 - RNA, 19 nt, Artificial Sequence
  Description of Artificial Sequence: Synthetic oligonucleotide
  Sense strand starting at position 1393 of SEQ ID NO: 1887936
guggaaaguuacugaguca

SEQ ID NO: 2498769 - RNA, 19 nt, Artificial Sequence
  Description of Artificial Sequence: Synthetic oligonucleotide
  Antisense strand to SEQ ID NO: 2498768
ugacucaguaacuuuccac

SEQ ID NO: 2498770 - RNA, 19 nt, Artificial Sequence
  Description of Artificial Sequence: Synthetic oligonucleotide
  Sense strand starting at position 1396 of SEQ ID NO: 1887936
gaaaguuacugagucagag

SEQ ID NO: 2498771 - RNA, 19 nt, Artificial Sequence
  Description of Artificial Sequence: Synthetic oligonucleotide
  Antisense strand to SEQ ID NO: 2498770
cucugacucaguaacuuuc

SEQ ID NO: 2498772 - RNA, 19 nt, Artificial Sequence
  Description of Artificial Sequence: Synthetic oligonucleotide
  Sense strand starting at position 2123 of SEQ ID NO: 1887936
gagggaagcucugacguua

SEQ ID NO: 2498773 - RNA, 19 nt, Artificial Sequence
  Description of Artificial Sequence: Synthetic oligonucleotide
  Antisense strand to SEQ ID NO: 2498772
uaacgucagagcuucccuc

SEQ ID NO: 2498774 - RNA, 19 nt, Artificial Sequence
  Description of Artificial Sequence: Synthetic oligonucleotide
  Sense strand starting at position 2327 of SEQ ID NO: 1887936
gggaauguuugugacaugu

SEQ ID NO: 2498775 - RNA, 19 nt, Artificial Sequence
  Description of Artificial Sequence: Synthetic oligonucleotide
  Antisense strand to SEQ ID NO: 2498774
acaugucacaaacauuccc

SEQ ID NO: 2498776 - RNA, 19 nt, Artificial Sequence
  Description of Artificial Sequence: Synthetic oligonucleotide
  Sense strand starting at position 2329 of SEQ ID NO: 1887936
gaauguuugugacauguau

SEQ ID NO: 2498777 - RNA, 19 nt, Artificial Sequence
  Description of Artificial Sequence: Synthetic oligonucleotide
  Antisense strand to SEQ ID NO: 2498776
auacaugucacaaacauuc

SEQ ID NO: 2498778 - RNA, 19 nt, Artificial Sequence
  Description of Artificial Sequence: Synthetic oligonucleotide
  Sense strand starting at position 2331 of SEQ ID NO: 1887936
auguuugugacauguauga

SEQ ID NO: 2498779 - RNA, 19 nt, Artificial Sequence
  Description of Artificial Sequence: Synthetic oligonucleotide
  Antisense strand to SEQ ID NO: 2498778
ucauacaugucacaaacau

SEQ ID NO: 2498780 - RNA, 19 nt, Artificial Sequence
  Description of Artificial Sequence: Synthetic oligonucleotide
  Sense strand starting at position 2333 of SEQ ID NO: 1887936
guuugugacauguaugaca

SEQ ID NO: 2498781 - RNA, 19 nt, Artificial Sequence
  Description of Artificial Sequence: Synthetic oligonucleotide
  Antisense strand to SEQ ID NO: 2498780
ugucauacaugucacaaac

SEQ ID NO: 2498782 - RNA, 19 nt, Artificial Sequence
  Description of Artificial Sequence: Synthetic oligonucleotide
  Sense strand starting at position 2459 of SEQ ID NO: 1887936
augaaugacuaguaauguu

SEQ ID NO: 2498783 - RNA, 19 nt, Artificial Sequence
  Description of Artificial Sequence: Synthetic oligonucleotide
  Antisense strand to SEQ ID NO: 2498782
aacauuacuagucauucau

SEQ ID NO: 2498784 - RNA, 19 nt, Artificial Sequence
  Description of Artificial Sequence: Synthetic oligonucleotide
  Sense strand starting at position 2467 of SEQ ID NO: 1887936
cuaguaauguucgaccuca

SEQ ID NO: 2498785 - RNA, 19 nt, Artificial Sequence
  Description of Artificial Sequence: Synthetic oligonucleotide
  Antisense strand to SEQ ID NO: 2498784
ugaggucgaacauuacuag

SEQ ID NO: 2498786 - RNA, 19 nt, Artificial Sequence
  Description of Artificial Sequence: Synthetic oligonucleotide
  Sense strand starting at position 2475 of SEQ ID NO: 1887936
guucgaccucauugguaac

SEQ ID NO: 2498787 - RNA, 19 nt, Artificial Sequence
  Description of Artificial Sequence: Synthetic oligonucleotide
  Antisense strand to SEQ ID NO: 2498786
guuaccaaugaggucgaac

SEQ ID NO: 2498788 - RNA, 19 nt, Artificial Sequence
  Description of Artificial Sequence: Synthetic oligonucleotide
  Sense strand starting at position 2613 of SEQ ID NO: 1887936
gggugaaccuaucaaauga

SEQ ID NO: 2498789 - RNA, 19 nt, Artificial Sequence
  Description of Artificial Sequence: Synthetic oligonucleotide
  Antisense strand to SEQ ID NO: 2498788
ucauuugauagguucaccc

SEQ ID NO: 2498790 - RNA, 19 nt, Artificial Sequence
  Description of Artificial Sequence: Synthetic oligonucleotide
  Sense strand starting at position 2686 of SEQ ID NO: 1887936
ccuccacauguaugugaaa

SEQ ID NO: 2498791 - RNA, 19 nt, Artificial Sequence
  Description of Artificial Sequence: Synthetic oligonucleotide
  Antisense strand to SEQ ID NO: 2498790
uuucacauacauguggagg

SEQ ID NO: 2498792 - RNA, 19 nt, Artificial Sequence
  Description of Artificial Sequence: Synthetic oligonucleotide
  Sense strand starting at position 2890 of SEQ ID NO: 1887936
guuauauccucacaaguac

SEQ ID NO: 2498793 - RNA, 19 nt, Artificial Sequence
  Description of Artificial Sequence: Synthetic oligonucleotide
  Antisense strand to SEQ ID NO: 2498792
guacuugugaggauauaac

SEQ ID NO: 2498794 - RNA, 19 nt, Artificial Sequence
  Description of Artificial Sequence: Synthetic oligonucleotide
  Sense strand starting at position 2902 of SEQ ID NO: 1887936
caaguacgugcaugaaauu

SEQ ID NO: 2498795 - RNA, 19 nt, Artificial Sequence
  Description of Artificial Sequence: Synthetic oligonucleotide
  Antisense strand to SEQ ID NO: 2498794
aauuucaugcacguacuug

SEQ ID NO: 2498796 - RNA, 19 nt, Artificial Sequence
  Description of Artificial Sequence: Synthetic oligonucleotide
  Sense strand starting at position 3232 of SEQ ID NO: 1887936
gagauaggguuuguucugu

SEQ ID NO: 2498797 - RNA, 19 nt, Artificial Sequence
  Description of Artificial Sequence: Synthetic oligonucleotide
  Antisense strand to SEQ ID NO: 2498796
acagaacaaacccuaucuc

SEQ ID NO: 2498798 - RNA, 19 nt, Artificial Sequence
  Description of Artificial Sequence: Synthetic oligonucleotide
  Sense strand starting at position 3345 of SEQ ID NO: 1887936
ugggaucgcaggugugaua

SEQ ID NO: 2498799 - RNA, 19 nt, Artificial Sequence
  Description of Artificial Sequence: Synthetic oligonucleotide
  Antisense strand to SEQ ID NO: 2498798
uaucacaccugcgauccca

SEQ ID NO: 2498800 - RNA, 19 nt, Artificial Sequence
  Description of Artificial Sequence: Synthetic oligonucleotide
  Sense strand starting at position 3354 of SEQ ID NO: 1887936
aggugugauaccuaccaug

SEQ ID NO: 2498801 - RNA, 19 nt, Artificial Sequence
  Description of Artificial Sequence: Synthetic oligonucleotide
  Antisense strand to SEQ ID NO: 2498800
caugguagguaucacaccu

SEQ ID NO: 2498802 - RNA, 19 nt, Artificial Sequence
  Description of Artificial Sequence: Synthetic oligonucleotide
  Sense strand starting at position 3365 of SEQ ID NO: 1887936
cuaccauguccaggauauu

SEQ ID NO: 2498803 - RNA, 19 nt, Artificial Sequence
  Description of Artificial Sequence: Synthetic oligonucleotide
  Antisense strand to SEQ ID NO: 2498802
aauauccuggacaugguag

SEQ ID NO: 2498804 - RNA, 19 nt, Artificial Sequence
  Description of Artificial Sequence: Synthetic oligonucleotide
  Sense strand starting at position 3754 of SEQ ID NO: 1887936
cggugaaacuugucucuac

SEQ ID NO: 2498805 - RNA, 19 nt, Artificial Sequence
  Description of Artificial Sequence: Synthetic oligonucleotide
  Antisense strand to SEQ ID NO: 2498804
guagagacaaguuucaccg

SEQ ID NO: 2498806 - RNA, 19 nt, Artificial Sequence
  Description of Artificial Sequence: Synthetic oligonucleotide
  Sense strand starting at position 76 of SEQ ID NO: 1887937
uaacguguacccugaacca

SEQ ID NO: 2498807 - RNA, 19 nt, Artificial Sequence
  Description of Artificial Sequence: Synthetic oligonucleotide
  Antisense strand to SEQ ID NO: 2498806
ugguucaggguacacguua

SEQ ID NO: 2498808 - RNA, 19 nt, Artificial Sequence
  Description of Artificial Sequence: Synthetic oligonucleotide
  Sense strand starting at position 226 of SEQ ID NO: 1887937
gcaucuuggcaggaggaaa

SEQ ID NO: 2498809 - RNA, 19 nt, Artificial Sequence
  Description of Artificial Sequence: Synthetic oligonucleotide
  Antisense strand to SEQ ID NO: 2498808
uuuccuccugccaagaugc

SEQ ID NO: 2498810 - RNA, 19 nt, Artificial Sequence
  Description of Artificial Sequence: Synthetic oligonucleotide
  Sense strand starting at position 237 of SEQ ID NO: 1887937
ggaggaaagugaccuguau

SEQ ID NO: 2498811 - RNA, 19 nt, Artificial Sequence
  Description of Artificial Sequence: Synthetic oligonucleotide
  Antisense strand to SEQ ID NO: 2498810
auacaggucacuuuccucc

SEQ ID NO: 2498812 - RNA, 19 nt, Artificial Sequence
  Description of Artificial Sequence: Synthetic oligonucleotide
  Sense strand starting at position 239 of SEQ ID NO: 1887937
aggaaagugaccuguaucu

SEQ ID NO: 2498813 - RNA, 19 nt, Artificial Sequence
  Description of Artificial Sequence: Synthetic oligonucleotide
  Antisense strand to SEQ ID NO: 2498812
agauacaggucacuuuccu

SEQ ID NO: 2498814 - RNA, 19 nt, Artificial Sequence
  Description of Artificial Sequence: Synthetic oligonucleotide
  Sense strand starting at position 245 of SEQ ID NO: 1887937
gugaccuguaucugagaga

SEQ ID NO: 2498815 - RNA, 19 nt, Artificial Sequence
  Description of Artificial Sequence: Synthetic oligonucleotide
  Antisense strand to SEQ ID NO: 2498814
ucucucagauacaggucac

SEQ ID NO: 2498816 - RNA, 19 nt, Artificial Sequence
  Description of Artificial Sequence: Synthetic oligonucleotide
  Sense strand starting at position 420 of SEQ ID NO: 1887937
gauccauaguuccaggcau

SEQ ID NO: 2498817 - RNA, 19 nt, Artificial Sequence
  Description of Artificial Sequence: Synthetic oligonucleotide
  Antisense strand to SEQ ID NO: 2498816
augccuggaacuauggauc

SEQ ID NO: 2498818 - RNA, 19 nt, Artificial Sequence
  Description of Artificial Sequence: Synthetic oligonucleotide
  Sense strand starting at position 467 of SEQ ID NO: 1887937
agcauccaaucagaguaau

SEQ ID NO: 2498819 - RNA, 19 nt, Artificial Sequence
  Description of Artificial Sequence: Synthetic oligonucleotide
  Antisense strand to SEQ ID NO: 2498818
auuacucugauuggaugcu

SEQ ID NO: 2498820 - RNA, 19 nt, Artificial Sequence
  Description of Artificial Sequence: Synthetic oligonucleotide
  Sense strand starting at position 1531 of SEQ ID NO: 1887937
gcgagaucucuugaggcca

SEQ ID NO: 2498821 - RNA, 19 nt, Artificial Sequence
  Description of Artificial Sequence: Synthetic oligonucleotide
  Antisense strand to SEQ ID NO: 2498820
uggccucaagagaucucgc

SEQ ID NO: 2498822 - RNA, 19 nt, Artificial Sequence
  Description of Artificial Sequence: Synthetic oligonucleotide
  Sense strand starting at position 2141 of SEQ ID NO: 1887937
ggaacuguaucugagagag

SEQ ID NO: 2498823 - RNA, 19 nt, Artificial Sequence
  Description of Artificial Sequence: Synthetic oligonucleotide
  Antisense strand to SEQ ID NO: 2498822
cucucucagauacaguucc

SEQ ID NO: 2498824 - RNA, 19 nt, Artificial Sequence
  Description of Artificial Sequence: Synthetic oligonucleotide
  Sense strand starting at position 2329 of SEQ ID NO: 1887937
ggcauccaguuauguacaa

SEQ ID NO: 2498825 - RNA, 19 nt, Artificial Sequence
  Description of Artificial Sequence: Synthetic oligonucleotide
  Antisense strand to SEQ ID NO: 2498824
uuguacauaacuggaugcc

SEQ ID NO: 2498826 - RNA, 19 nt, Artificial Sequence
  Description of Artificial Sequence: Synthetic oligonucleotide
  Sense strand starting at position 2360 of SEQ ID NO: 1887937
caggcauccgaucagagua

SEQ ID NO: 2498827 - RNA, 19 nt, Artificial Sequence
  Description of Artificial Sequence: Synthetic oligonucleotide
  Antisense strand to SEQ ID NO: 2498826
uacucugaucggaugccug

SEQ ID NO: 2498828 - RNA, 19 nt, Artificial Sequence
  Description of Artificial Sequence: Synthetic oligonucleotide
  Sense strand starting at position 2362 of SEQ ID NO: 1887937
ggcauccgaucagaguaau

SEQ ID NO: 2498829 - RNA, 19 nt, Artificial Sequence
  Description of Artificial Sequence: Synthetic oligonucleotide
  Antisense strand to SEQ ID NO: 2498828
auuacucugaucggaugcc

SEQ ID NO: 2498830 - RNA, 19 nt, Artificial Sequence
  Description of Artificial Sequence: Synthetic oligonucleotide
  Sense strand starting at position 2420 of SEQ ID NO: 1887937
caggguugccaggaugaca

SEQ ID NO: 2498831 - RNA, 19 nt, Artificial Sequence
  Description of Artificial Sequence: Synthetic oligonucleotide
  Antisense strand to SEQ ID NO: 2498830
ugucauccuggcaacccug

SEQ ID NO: 2498832 - RNA, 19 nt, Artificial Sequence
  Description of Artificial Sequence: Synthetic oligonucleotide
  Sense strand starting at position 2434 of SEQ ID NO: 1887937
ugacacgagucucuccaua

SEQ ID NO: 2498833 - RNA, 19 nt, Artificial Sequence
  Description of Artificial Sequence: Synthetic oligonucleotide
  Antisense strand to SEQ ID NO: 2498832
uauggagagacucguguca

SEQ ID NO: 2498834 - RNA, 19 nt, Artificial Sequence
  Description of Artificial Sequence: Synthetic oligonucleotide
  Sense strand starting at position 2620 of SEQ ID NO: 1887937
gcgugaguucgugugagcu

SEQ ID NO: 2498835 - RNA, 19 nt, Artificial Sequence
  Description of Artificial Sequence: Synthetic oligonucleotide
  Antisense strand to SEQ ID NO: 2498834
agcucacacgaacucacgc

SEQ ID NO: 2498836 - RNA, 19 nt, Artificial Sequence
  Description of Artificial Sequence: Synthetic oligonucleotide
  Sense strand starting at position 2784 of SEQ ID NO: 1887937
gcucgagguucgaaggaga

SEQ ID NO: 2498837 - RNA, 19 nt, Artificial Sequence
  Description of Artificial Sequence: Synthetic oligonucleotide
  Antisense strand to SEQ ID NO: 2498836
ucuccuucgaaccucgagc

SEQ ID NO: 2498838 - RNA, 19 nt, Artificial Sequence
  Description of Artificial Sequence: Synthetic oligonucleotide
  Sense strand starting at position 3432 of SEQ ID NO: 1887937
ucacuugaugccggaaguu

SEQ ID NO: 2498839 - RNA, 19 nt, Artificial Sequence
  Description of Artificial Sequence: Synthetic oligonucleotide
  Antisense strand to SEQ ID NO: 2498838
aacuuccggcaucaaguga

SEQ ID NO: 2498840 - RNA, 19 nt, Artificial Sequence
  Description of Artificial Sequence: Synthetic oligonucleotide
  Sense strand starting at position 3441 of SEQ ID NO: 1887937
gccggaaguucaggaccau

SEQ ID NO: 2498841 - RNA, 19 nt, Artificial Sequence
  Description of Artificial Sequence: Synthetic oligonucleotide
  Antisense strand to SEQ ID NO: 2498840
augguccugaacuuccggc

SEQ ID NO: 2498842 - RNA, 19 nt, Artificial Sequence
  Description of Artificial Sequence: Synthetic oligonucleotide
  Sense strand starting at position 3605 of SEQ ID NO: 1887937
gguugcaguuuaccaagau

SEQ ID NO: 2498843 - RNA, 19 nt, Artificial Sequence
  Description of Artificial Sequence: Synthetic oligonucleotide
  Antisense strand to SEQ ID NO: 2498842
aucuugguaaacugcaacc

SEQ ID NO: 2498844 - RNA, 19 nt, Artificial Sequence
  Description of Artificial Sequence: Synthetic oligonucleotide
  Sense strand starting at position 3606 of SEQ ID NO: 1887937
guugcaguuuaccaagauu

SEQ ID NO: 2498845 - RNA, 19 nt, Artificial Sequence
  Description of Artificial Sequence: Synthetic oligonucleotide
  Antisense strand to SEQ ID NO: 2498844
aaucuugguaaacugcaac

SEQ ID NO: 2498846 - RNA, 19 nt, Artificial Sequence
  Description of Artificial Sequence: Synthetic oligonucleotide
  Sense strand starting at position 3609 of SEQ ID NO: 1887937
gcaguuuaccaagauugug

SEQ ID NO: 2498847 - RNA, 19 nt, Artificial Sequence
  Description of Artificial Sequence: Synthetic oligonucleotide
  Antisense strand to SEQ ID NO: 2498846
cacaaucuugguaaacugc

SEQ ID NO: 2498848 - RNA, 19 nt, Artificial Sequence
  Description of Artificial Sequence: Synthetic oligonucleotide
  Sense strand starting at position 3614 of SEQ ID NO: 1887937
uuaccaagauugugucacu

SEQ ID NO: 2498849 - RNA, 19 nt, Artificial Sequence
  Description of Artificial Sequence: Synthetic oligonucleotide
  Antisense strand to SEQ ID NO: 2498848
agugacacaaucuugguaa

SEQ ID NO: 2498850 - RNA, 19 nt, Artificial Sequence
  Description of Artificial Sequence: Synthetic oligonucleotide
  Sense strand starting at position 3972 of SEQ ID NO: 1887937
uauaguggacaguguuaga

SEQ ID NO: 2498851 - RNA, 19 nt, Artificial Sequence
  Description of Artificial Sequence: Synthetic oligonucleotide
  Antisense strand to SEQ ID NO: 2498850
ucuaacacuguccacuaua

SEQ ID NO: 2498852 - RNA, 19 nt, Artificial Sequence
  Description of Artificial Sequence: Synthetic oligonucleotide
  Sense strand starting at position 3977 of SEQ ID NO: 1887937
uggacaguguuagacacau

SEQ ID NO: 2498853 - RNA, 19 nt, Artificial Sequence
  Description of Artificial Sequence: Synthetic oligonucleotide
  Antisense strand to SEQ ID NO: 2498852
augugucuaacacugucca

SEQ ID NO: 2498854 - RNA, 19 nt, Artificial Sequence
  Description of Artificial Sequence: Synthetic oligonucleotide
  Sense strand starting at position 3983 of SEQ ID NO: 1887937
guguuagacacauggcaga

SEQ ID NO: 2498855 - RNA, 19 nt, Artificial Sequence
  Description of Artificial Sequence: Synthetic oligonucleotide
  Antisense strand to SEQ ID NO: 2498854
ucugccaugugucuaacac

SEQ ID NO: 2498856 - RNA, 19 nt, Artificial Sequence
  Description of Artificial Sequence: Synthetic oligonucleotide
  Sense strand starting at position 153 of SEQ ID NO: 1887938
agcgauacuucaccgguga

SEQ ID NO: 2498857 - RNA, 19 nt, Artificial Sequence
  Description of Artificial Sequence: Synthetic oligonucleotide
  Antisense strand to SEQ ID NO: 2498856
ucaccggugaaguaucgcu

SEQ ID NO: 2498858 - RNA, 19 nt, Artificial Sequence
  Description of Artificial Sequence: Synthetic oligonucleotide
  Sense strand starting at position 323 of SEQ ID NO: 1887938
ccgcuucgaggccgauaaa

SEQ ID NO: 2498859 - RNA, 19 nt, Artificial Sequence
  Description of Artificial Sequence: Synthetic oligonucleotide
  Antisense strand to SEQ ID NO: 2498858
uuuaucggccucgaagcgg

SEQ ID NO: 2498860 - RNA, 19 nt, Artificial Sequence
  Description of Artificial Sequence: Synthetic oligonucleotide
  Sense strand starting at position 324 of SEQ ID NO: 1887938
cgcuucgaggccgauaaau

SEQ ID NO: 2498861 - RNA, 19 nt, Artificial Sequence
  Description of Artificial Sequence: Synthetic oligonucleotide
  Antisense strand to SEQ ID NO: 2498860
auuuaucggccucgaagcg

SEQ ID NO: 2498862 - RNA, 19 nt, Artificial Sequence
  Description of Artificial Sequence: Synthetic oligonucleotide
  Sense strand starting at position 335 of SEQ ID NO: 1887938
cgauaaaucuaaggaaggu

SEQ ID NO: 2498863 - RNA, 19 nt, Artificial Sequence
  Description of Artificial Sequence: Synthetic oligonucleotide
  Antisense strand to SEQ ID NO: 2498862
accuuccuuagauuuaucg

SEQ ID NO: 2498864 - RNA, 19 nt, Artificial Sequence
  Description of Artificial Sequence: Synthetic oligonucleotide
  Sense strand starting at position 684 of SEQ ID NO: 1887938
gagcucaaucucuguagga

SEQ ID NO: 2498865 - RNA, 19 nt, Artificial Sequence
  Description of Artificial Sequence: Synthetic oligonucleotide
  Antisense strand to SEQ ID NO: 2498864
uccuacagagauugagcuc

SEQ ID NO: 2498866 - RNA, 19 nt, Artificial Sequence
  Description of Artificial Sequence: Synthetic oligonucleotide
  Sense strand starting at position 685 of SEQ ID NO: 1887938
agcucaaucucuguaggau

SEQ ID NO: 2498867 - RNA, 19 nt, Artificial Sequence
  Description of Artificial Sequence: Synthetic oligonucleotide
  Antisense strand to SEQ ID NO: 2498866
auccuacagagauugagcu

SEQ ID NO: 2498868 - RNA, 19 nt, Artificial Sequence
  Description of Artificial Sequence: Synthetic oligonucleotide
  Sense strand starting at position 686 of SEQ ID NO: 1887938
gcucaaucucuguaggaug

SEQ ID NO: 2498869 - RNA, 19 nt, Artificial Sequence
  Description of Artificial Sequence: Synthetic oligonucleotide
  Antisense strand to SEQ ID NO: 2498868
cauccuacagagauugagc

SEQ ID NO: 2498870 - RNA, 19 nt, Artificial Sequence
  Description of Artificial Sequence: Synthetic oligonucleotide
  Sense strand starting at position 697 of SEQ ID NO: 1887938
guaggaugggugcaacaau

SEQ ID NO: 2498871 - RNA, 19 nt, Artificial Sequence
  Description of Artificial Sequence: Synthetic oligonucleotide
  Antisense strand to SEQ ID NO: 2498870
auuguugcacccauccuac

SEQ ID NO: 2498872 - RNA, 19 nt, Artificial Sequence
  Description of Artificial Sequence: Synthetic oligonucleotide
  Sense strand starting at position 1680 of SEQ ID NO: 1887938
cgccauucuguuuaccaca

SEQ ID NO: 2498873 - RNA, 19 nt, Artificial Sequence
  Description of Artificial Sequence: Synthetic oligonucleotide
  Antisense strand to SEQ ID NO: 2498872
ugugguaaacagaauggcg

SEQ ID NO: 2498874 - RNA, 19 nt, Artificial Sequence
  Description of Artificial Sequence: Synthetic oligonucleotide
  Sense strand starting at position 1685 of SEQ ID NO: 1887938
uucuguuuaccacagguga

SEQ ID NO: 2498875 - RNA, 19 nt, Artificial Sequence
  Description of Artificial Sequence: Synthetic oligonucleotide
  Antisense strand to SEQ ID NO: 2498874
ucaccugugguaaacagaa

SEQ ID NO: 2498876 - RNA, 19 nt, Artificial Sequence
  Description of Artificial Sequence: Synthetic oligonucleotide
  Sense strand starting at position 2140 of SEQ ID NO: 1887938
gggaacugcaucugagaga

SEQ ID NO: 2498877 - RNA, 19 nt, Artificial Sequence
  Description of Artificial Sequence: Synthetic oligonucleotide
  Antisense strand to SEQ ID NO: 2498876
ucucucagaugcaguuccc

SEQ ID NO: 2498878 - RNA, 19 nt, Artificial Sequence
  Description of Artificial Sequence: Synthetic oligonucleotide
  Sense strand starting at position 3589 of SEQ ID NO: 1887938
ccuguaauugucggaggcu

SEQ ID NO: 2498879 - RNA, 19 nt, Artificial Sequence
  Description of Artificial Sequence: Synthetic oligonucleotide
  Antisense strand to SEQ ID NO: 2498878
agccuccgacaauuacagg

SEQ ID NO: 2498880 - RNA, 19 nt, Artificial Sequence
  Description of Artificial Sequence: Synthetic oligonucleotide
  Sense strand starting at position 177 of SEQ ID NO: 1887939
cggcgagucaucaggguga

SEQ ID NO: 2498881 - RNA, 19 nt, Artificial Sequence
  Description of Artificial Sequence: Synthetic oligonucleotide
  Antisense strand to SEQ ID NO: 2498880
ucacccugaugacucgccg

SEQ ID NO: 2498882 - RNA, 19 nt, Artificial Sequence
  Description of Artificial Sequence: Synthetic oligonucleotide
  Sense strand starting at position 343 of SEQ ID NO: 1887939
ggccgauaacucugaagaa

SEQ ID NO: 2498883 - RNA, 19 nt, Artificial Sequence
  Description of Artificial Sequence: Synthetic oligonucleotide
  Antisense strand to SEQ ID NO: 2498882
uucuucagaguuaucggcc

SEQ ID NO: 2498884 - RNA, 19 nt, Artificial Sequence
  Description of Artificial Sequence: Synthetic oligonucleotide
  Sense strand starting at position 344 of SEQ ID NO: 1887939
gccgauaacucugaagaag

SEQ ID NO: 2498885 - RNA, 19 nt, Artificial Sequence
  Description of Artificial Sequence: Synthetic oligonucleotide
  Antisense strand to SEQ ID NO: 2498884
cuucuucagaguuaucggc

SEQ ID NO: 2498886 - RNA, 19 nt, Artificial Sequence
  Description of Artificial Sequence: Synthetic oligonucleotide
  Sense strand starting at position 818 of SEQ ID NO: 1887939
aguguuuacucuuucguag

SEQ ID NO: 2498887 - RNA, 19 nt, Artificial Sequence
  Description of Artificial Sequence: Synthetic oligonucleotide
  Antisense strand to SEQ ID NO: 2498886
cuacgaaagaguaaacacu

SEQ ID NO: 2498888 - RNA, 19 nt, Artificial Sequence
  Description of Artificial Sequence: Synthetic oligonucleotide
  Sense strand starting at position 825 of SEQ ID NO: 1887939
acucuuucguagcccuaau

SEQ ID NO: 2498889 - RNA, 19 nt, Artificial Sequence
  Description of Artificial Sequence: Synthetic oligonucleotide
  Antisense strand to SEQ ID NO: 2498888
auuagggcuacgaaagagu

SEQ ID NO: 2498890 - RNA, 19 nt, Artificial Sequence
  Description of Artificial Sequence: Synthetic oligonucleotide
  Sense strand starting at position 1039 of SEQ ID NO: 1887939
acagaaggccuuuaaguau

SEQ ID NO: 2498891 - RNA, 19 nt, Artificial Sequence
  Description of Artificial Sequence: Synthetic oligonucleotide
  Antisense strand to SEQ ID NO: 2498890
auacuuaaaggccuucugu

SEQ ID NO: 2498892 - RNA, 19 nt, Artificial Sequence
  Description of Artificial Sequence: Synthetic oligonucleotide
  Sense strand starting at position 1570 of SEQ ID NO: 1887939
cucucucauugggcagaaa

SEQ ID NO: 2498893 - RNA, 19 nt, Artificial Sequence
  Description of Artificial Sequence: Synthetic oligonucleotide
  Antisense strand to SEQ ID NO: 2498892
uuucugcccaaugagagag

SEQ ID NO: 2498894 - RNA, 19 nt, Artificial Sequence
  Description of Artificial Sequence: Synthetic oligonucleotide
  Sense strand starting at position 1631 of SEQ ID NO: 1887939
cuccuagguuccugugauu

SEQ ID NO: 2498895 - RNA, 19 nt, Artificial Sequence
  Description of Artificial Sequence: Synthetic oligonucleotide
  Antisense strand to SEQ ID NO: 2498894
aaucacaggaaccuaggag

SEQ ID NO: 2498896 - RNA, 19 nt, Artificial Sequence
  Description of Artificial Sequence: Synthetic oligonucleotide
  Sense strand starting at position 1862 of SEQ ID NO: 1887939
guuauuauauagggaacga

SEQ ID NO: 2498897 - RNA, 19 nt, Artificial Sequence
  Description of Artificial Sequence: Synthetic oligonucleotide
  Antisense strand to SEQ ID NO: 2498896
ucguucccuauauaauaac

SEQ ID NO: 2498898 - RNA, 19 nt, Artificial Sequence
  Description of Artificial Sequence: Synthetic oligonucleotide
  Sense strand starting at position 2406 of SEQ ID NO: 1887939
ggccaucacuggcaugaga

SEQ ID NO: 2498899 - RNA, 19 nt, Artificial Sequence
  Description of Artificial Sequence: Synthetic oligonucleotide
  Antisense strand to SEQ ID NO: 2498898
ucucaugccagugauggcc

SEQ ID NO: 2498900 - RNA, 19 nt, Artificial Sequence
  Description of Artificial Sequence: Synthetic oligonucleotide
  Sense strand starting at position 2408 of SEQ ID NO: 1887939
ccaucacuggcaugagaag

SEQ ID NO: 2498901 - RNA, 19 nt, Artificial Sequence
  Description of Artificial Sequence: Synthetic oligonucleotide
  Antisense strand to SEQ ID NO: 2498900
cuucucaugccagugaugg

SEQ ID NO: 2498902 - RNA, 19 nt, Artificial Sequence
  Description of Artificial Sequence: Synthetic oligonucleotide
  Sense strand starting at position 137 of SEQ ID NO: 1887940
caaguuccuggguguuaca

SEQ ID NO: 2498903 - RNA, 19 nt, Artificial Sequence
  Description of Artificial Sequence: Synthetic oligonucleotide
  Antisense strand to SEQ ID NO: 2498902
uguaacacccaggaacuug

SEQ ID NO: 2498904 - RNA, 19 nt, Artificial Sequence
  Description of Artificial Sequence: Synthetic oligonucleotide
  Sense strand starting at position 180 of SEQ ID NO: 1887940
aggccugguuuccuggaaa

SEQ ID NO: 2498905 - RNA, 19 nt, Artificial Sequence
  Description of Artificial Sequence: Synthetic oligonucleotide
  Antisense strand to SEQ ID NO: 2498904
uuuccaggaaaccaggccu

SEQ ID NO: 2498906 - RNA, 19 nt, Artificial Sequence
  Description of Artificial Sequence: Synthetic oligonucleotide
  Sense strand starting at position 183 of SEQ ID NO: 1887940
ccugguuuccuggaaacca

SEQ ID NO: 2498907 - RNA, 19 nt, Artificial Sequence
  Description of Artificial Sequence: Synthetic oligonucleotide
  Antisense strand to SEQ ID NO: 2498906
ugguuuccaggaaaccagg

SEQ ID NO: 2498908 - RNA, 19 nt, Artificial Sequence
  Description of Artificial Sequence: Synthetic oligonucleotide
  Sense strand starting at position 221 of SEQ ID NO: 1887940
gaggaaaggcuguguccuu

SEQ ID NO: 2498909 - RNA, 19 nt, Artificial Sequence
  Description of Artificial Sequence: Synthetic oligonucleotide
  Antisense strand to SEQ ID NO: 2498908
aaggacacagccuuuccuc

SEQ ID NO: 2498910 - RNA, 19 nt, Artificial Sequence
  Description of Artificial Sequence: Synthetic oligonucleotide
  Sense strand starting at position 489 of SEQ ID NO: 1887940
uucccacaucaauguggaa

SEQ ID NO: 2498911 - RNA, 19 nt, Artificial Sequence
  Description of Artificial Sequence: Synthetic oligonucleotide
  Antisense strand to SEQ ID NO: 2498910
uuccacauugaugugggaa

SEQ ID NO: 2498912 - RNA, 19 nt, Artificial Sequence
  Description of Artificial Sequence: Synthetic oligonucleotide
  Sense strand starting at position 686 of SEQ ID NO: 1887940
uagugucaugccuggaauu

SEQ ID NO: 2498913 - RNA, 19 nt, Artificial Sequence
  Description of Artificial Sequence: Synthetic oligonucleotide
  Antisense strand to SEQ ID NO: 2498912
aauuccaggcaugacacua

SEQ ID NO: 2498914 - RNA, 19 nt, Artificial Sequence
  Description of Artificial Sequence: Synthetic oligonucleotide
  Sense strand starting at position 687 of SEQ ID NO: 1887940
agugucaugccuggaauuu

SEQ ID NO: 2498915 - RNA, 19 nt, Artificial Sequence
  Description of Artificial Sequence: Synthetic oligonucleotide
  Antisense strand to SEQ ID NO: 2498914
aaauuccaggcaugacacu

SEQ ID NO: 2498916 - RNA, 19 nt, Artificial Sequence
  Description of Artificial Sequence: Synthetic oligonucleotide
  Sense strand starting at position 717 of SEQ ID NO: 1887940
ggcaguuucccagagauga

SEQ ID NO: 2498917 - RNA, 19 nt, Artificial Sequence
  Description of Artificial Sequence: Synthetic oligonucleotide
  Antisense strand to SEQ ID NO: 2498916
ucaucucugggaaacugcc

SEQ ID NO: 2498918 - RNA, 19 nt, Artificial Sequence
  Description of Artificial Sequence: Synthetic oligonucleotide
  Sense strand starting at position 769 of SEQ ID NO: 1887940
agaugagggcgucaucuaa

SEQ ID NO: 2498919 - RNA, 19 nt, Artificial Sequence
  Description of Artificial Sequence: Synthetic oligonucleotide
  Antisense strand to SEQ ID NO: 2498918
uuagaugacgcccucaucu

SEQ ID NO: 2498920 - RNA, 19 nt, Artificial Sequence
  Description of Artificial Sequence: Synthetic oligonucleotide
  Sense strand starting at position 851 of SEQ ID NO: 1887940
acuugugucuacucugaaa

SEQ ID NO: 2498921 - RNA, 19 nt, Artificial Sequence
  Description of Artificial Sequence: Synthetic oligonucleotide
  Antisense strand to SEQ ID NO: 2498920
uuucagaguagacacaagu

SEQ ID NO: 2498922 - RNA, 19 nt, Artificial Sequence
  Description of Artificial Sequence: Synthetic oligonucleotide
  Sense strand starting at position 931 of SEQ ID NO: 1887940
ggagauucucccuggucca

SEQ ID NO: 2498923 - RNA, 19 nt, Artificial Sequence
  Description of Artificial Sequence: Synthetic oligonucleotide
  Antisense strand to SEQ ID NO: 2498922
uggaccagggagaaucucc

SEQ ID NO: 2498924 - RNA, 19 nt, Artificial Sequence
  Description of Artificial Sequence: Synthetic oligonucleotide
  Sense strand starting at position 1126 of SEQ ID NO: 1887940
ggaggaugugaggguuugu

SEQ ID NO: 2498925 - RNA, 19 nt, Artificial Sequence
  Description of Artificial Sequence: Synthetic oligonucleotide
  Antisense strand to SEQ ID NO: 2498924
acaaacccucacauccucc

SEQ ID NO: 2498926 - RNA, 19 nt, Artificial Sequence
  Description of Artificial Sequence: Synthetic oligonucleotide
  Sense strand starting at position 1143 of SEQ ID NO: 1887940
guuuguuugcacugaagac

SEQ ID NO: 2498927 - RNA, 19 nt, Artificial Sequence
  Description of Artificial Sequence: Synthetic oligonucleotide
  Antisense strand to SEQ ID NO: 2498926
gucuucagugcaaacaaac

SEQ ID NO: 2498928 - RNA, 19 nt, Artificial Sequence
  Description of Artificial Sequence: Synthetic oligonucleotide
  Sense strand starting at position 1410 of SEQ ID NO: 1887940
cuuggaguccugugaggaa

SEQ ID NO: 2498929 - RNA, 19 nt, Artificial Sequence
  Description of Artificial Sequence: Synthetic oligonucleotide
  Antisense strand to SEQ ID NO: 2498928
uuccucacaggacuccaag

SEQ ID NO: 2498930 - RNA, 19 nt, Artificial Sequence
  Description of Artificial Sequence: Synthetic oligonucleotide
  Sense strand starting at position 1745 of SEQ ID NO: 1887940
gcccaaugaccugacacau

SEQ ID NO: 2498931 - RNA, 19 nt, Artificial Sequence
  Description of Artificial Sequence: Synthetic oligonucleotide
  Antisense strand to SEQ ID NO: 2498930
augugucaggucauugggc

SEQ ID NO: 2498932 - RNA, 19 nt, Artificial Sequence
  Description of Artificial Sequence: Synthetic oligonucleotide
  Sense strand starting at position 1854 of SEQ ID NO: 1887940
gucacuggccacuagaguu

SEQ ID NO: 2498933 - RNA, 19 nt, Artificial Sequence
  Description of Artificial Sequence: Synthetic oligonucleotide
  Antisense strand to SEQ ID NO: 2498932
aacucuaguggccagugac

SEQ ID NO: 2498934 - RNA, 19 nt, Artificial Sequence
  Description of Artificial Sequence: Synthetic oligonucleotide
  Sense strand starting at position 1860 of SEQ ID NO: 1887940
ggccacuagaguuguggaa

SEQ ID NO: 2498935 - RNA, 19 nt, Artificial Sequence
  Description of Artificial Sequence: Synthetic oligonucleotide
  Antisense strand to SEQ ID NO: 2498934
uuccacaacucuaguggcc

SEQ ID NO: 2498936 - RNA, 19 nt, Artificial Sequence
  Description of Artificial Sequence: Synthetic oligonucleotide
  Sense strand starting at position 1994 of SEQ ID NO: 1887940
ggugcaaucagggaggugu

SEQ ID NO: 2498937 - RNA, 19 nt, Artificial Sequence
  Description of Artificial Sequence: Synthetic oligonucleotide
  Antisense strand to SEQ ID NO: 2498936
acaccucccugauugcacc

SEQ ID NO: 2498938 - RNA, 19 nt, Artificial Sequence
  Description of Artificial Sequence: Synthetic oligonucleotide
  Sense strand starting at position 2076 of SEQ ID NO: 1887940
ggguucaauucgguucuca

SEQ ID NO: 2498939 - RNA, 19 nt, Artificial Sequence
  Description of Artificial Sequence: Synthetic oligonucleotide
  Antisense strand to SEQ ID NO: 2498938
ugagaaccgaauugaaccc

SEQ ID NO: 2498940 - RNA, 19 nt, Artificial Sequence
  Description of Artificial Sequence: Synthetic oligonucleotide
  Sense strand starting at position 2157 of SEQ ID NO: 1887940
ggaguuuccagaugugaug

SEQ ID NO: 2498941 - RNA, 19 nt, Artificial Sequence
  Description of Artificial Sequence: Synthetic oligonucleotide
  Antisense strand to SEQ ID NO: 2498940
caucacaucuggaaacucc

SEQ ID NO: 2498942 - RNA, 19 nt, Artificial Sequence
  Description of Artificial Sequence: Synthetic oligonucleotide
  Sense strand starting at position 2171 of SEQ ID NO: 1887940
ugaugugauuuacaaccga

SEQ ID NO: 2498943 - RNA, 19 nt, Artificial Sequence
  Description of Artificial Sequence: Synthetic oligonucleotide
  Antisense strand to SEQ ID NO: 2498942
ucgguuguaaaucacauca

SEQ ID NO: 2498944 - RNA, 19 nt, Artificial Sequence
  Description of Artificial Sequence: Synthetic oligonucleotide
  Sense strand starting at position 2742 of SEQ ID NO: 1887940
gaugcaguuccugaacuca

SEQ ID NO: 2498945 - RNA, 19 nt, Artificial Sequence
  Description of Artificial Sequence: Synthetic oligonucleotide
  Antisense strand to SEQ ID NO: 2498944
ugaguucaggaacugcauc

SEQ ID NO: 2498946 - RNA, 19 nt, Artificial Sequence
  Description of Artificial Sequence: Synthetic oligonucleotide
  Sense strand starting at position 2901 of SEQ ID NO: 1887940
gucccuggcuuucuaauca

SEQ ID NO: 2498947 - RNA, 19 nt, Artificial Sequence
  Description of Artificial Sequence: Synthetic oligonucleotide
  Antisense strand to SEQ ID NO: 2498946
ugauuagaaagccagggac

SEQ ID NO: 2498948 - RNA, 19 nt, Artificial Sequence
  Description of Artificial Sequence: Synthetic oligonucleotide
  Sense strand starting at position 2905 of SEQ ID NO: 1887940
cuggcuuucuaaucaggga

SEQ ID NO: 2498949 - RNA, 19 nt, Artificial Sequence
  Description of Artificial Sequence: Synthetic oligonucleotide
  Antisense strand to SEQ ID NO: 2498948
ucccugauuagaaagccag

SEQ ID NO: 2498950 - RNA, 19 nt, Artificial Sequence
  Description of Artificial Sequence: Synthetic oligonucleotide
  Sense strand starting at position 2987 of SEQ ID NO: 1887940
gucugaugugaugggauua

SEQ ID NO: 2498951 - RNA, 19 nt, Artificial Sequence
  Description of Artificial Sequence: Synthetic oligonucleotide
  Antisense strand to SEQ ID NO: 2498950
uaaucccaucacaucagac

SEQ ID NO: 2498952 - RNA, 19 nt, Artificial Sequence
  Description of Artificial Sequence: Synthetic oligonucleotide
  Sense strand starting at position 3029 of SEQ ID NO: 1887940
uucgaugucugauuaauuc

SEQ ID NO: 2498953 - RNA, 19 nt, Artificial Sequence
  Description of Artificial Sequence: Synthetic oligonucleotide
  Antisense strand to SEQ ID NO: 2498952
gaauuaaucagacaucgaa

SEQ ID NO: 2498954 - RNA, 19 nt, Artificial Sequence
  Description of Artificial Sequence: Synthetic oligonucleotide
  Sense strand starting at position 3036 of SEQ ID NO: 1887940
ucugauuaauucuugagau

SEQ ID NO: 2498955 - RNA, 19 nt, Artificial Sequence
  Description of Artificial Sequence: Synthetic oligonucleotide
  Antisense strand to SEQ ID NO: 2498954
aucucaagaauuaaucaga

SEQ ID NO: 2498956 - RNA, 19 nt, Artificial Sequence
  Description of Artificial Sequence: Synthetic oligonucleotide
  Sense strand starting at position 3038 of SEQ ID NO: 1887940
ugauuaauucuugagaugc

SEQ ID NO: 2498957 - RNA, 19 nt, Artificial Sequence
  Description of Artificial Sequence: Synthetic oligonucleotide
  Antisense strand to SEQ ID NO: 2498956
gcaucucaagaauuaauca

SEQ ID NO: 2498958 - RNA, 19 nt, Artificial Sequence
  Description of Artificial Sequence: Synthetic oligonucleotide
  Sense strand starting at position 3424 of SEQ ID NO: 1887940
ccauguggauucuugguga

SEQ ID NO: 2498959 - RNA, 19 nt, Artificial Sequence
  Description of Artificial Sequence: Synthetic oligonucleotide
  Antisense strand to SEQ ID NO: 2498958
ucaccaagaauccacaugg

SEQ ID NO: 2498960 - RNA, 19 nt, Artificial Sequence
  Description of Artificial Sequence: Synthetic oligonucleotide
  Sense strand starting at position 3427 of SEQ ID NO: 1887940
uguggauucuuggugacug

SEQ ID NO: 2498961 - RNA, 19 nt, Artificial Sequence
  Description of Artificial Sequence: Synthetic oligonucleotide
  Antisense strand to SEQ ID NO: 2498960
cagucaccaagaauccaca

SEQ ID NO: 2498962 - RNA, 19 nt, Artificial Sequence
  Description of Artificial Sequence: Synthetic oligonucleotide
  Sense strand starting at position 3429 of SEQ ID NO: 1887940
uggauucuuggugacugua

SEQ ID NO: 2498963 - RNA, 19 nt, Artificial Sequence
  Description of Artificial Sequence: Synthetic oligonucleotide
  Antisense strand to SEQ ID NO: 2498962
uacagucaccaagaaucca

SEQ ID NO: 2498964 - RNA, 19 nt, Artificial Sequence
  Description of Artificial Sequence: Synthetic oligonucleotide
  Sense strand starting at position 3561 of SEQ ID NO: 1887940
ccaggaaagcuguggcuua

SEQ ID NO: 2498965 - RNA, 19 nt, Artificial Sequence
  Description of Artificial Sequence: Synthetic oligonucleotide
  Antisense strand to SEQ ID NO: 2498964
uaagccacagcuuuccugg

SEQ ID NO: 2498966 - RNA, 19 nt, Artificial Sequence
  Description of Artificial Sequence: Synthetic oligonucleotide
  Sense strand starting at position 3827 of SEQ ID NO: 1887940
aaacguuuggcccagggaa

SEQ ID NO: 2498967 - RNA, 19 nt, Artificial Sequence
  Description of Artificial Sequence: Synthetic oligonucleotide
  Antisense strand to SEQ ID NO: 2498966
uucccugggccaaacguuu

SEQ ID NO: 2498968 - RNA, 19 nt, Artificial Sequence
  Description of Artificial Sequence: Synthetic oligonucleotide
  Sense strand starting at position 3829 of SEQ ID NO: 1887940
acguuuggcccagggaaga

SEQ ID NO: 2498969 - RNA, 19 nt, Artificial Sequence
  Description of Artificial Sequence: Synthetic oligonucleotide
  Antisense strand to SEQ ID NO: 2498968
ucuucccugggccaaacgu

SEQ ID NO: 2498970 - RNA, 19 nt, Artificial Sequence
  Description of Artificial Sequence: Synthetic oligonucleotide
  Sense strand starting at position 3868 of SEQ ID NO: 1887940
aggugagaaucuuugguca

SEQ ID NO: 2498971 - RNA, 19 nt, Artificial Sequence
  Description of Artificial Sequence: Synthetic oligonucleotide
  Antisense strand to SEQ ID NO: 2498970
ugaccaaagauucucaccu

SEQ ID NO: 2498972 - RNA, 19 nt, Artificial Sequence
  Description of Artificial Sequence: Synthetic oligonucleotide
  Sense strand starting at position 3871 of SEQ ID NO: 1887940
ugagaaucuuuggucaagu

SEQ ID NO: 2498973 - RNA, 19 nt, Artificial Sequence
  Description of Artificial Sequence: Synthetic oligonucleotide
  Antisense strand to SEQ ID NO: 2498972
acuugaccaaagauucuca

SEQ ID NO: 2498974 - RNA, 19 nt, Artificial Sequence
  Description of Artificial Sequence: Synthetic oligonucleotide
  Sense strand starting at position 3872 of SEQ ID NO: 1887940
gagaaucuuuggucaaguc

SEQ ID NO: 2498975 - RNA, 19 nt, Artificial Sequence
  Description of Artificial Sequence: Synthetic oligonucleotide
  Antisense strand to SEQ ID NO: 2498974
gacuugaccaaagauucuc

SEQ ID NO: 2498976 - RNA, 19 nt, Artificial Sequence
  Description of Artificial Sequence: Synthetic oligonucleotide
  Sense strand starting at position 3886 of SEQ ID NO: 1887940
aaguccaggcucugugaua

SEQ ID NO: 2498977 - RNA, 19 nt, Artificial Sequence
  Description of Artificial Sequence: Synthetic oligonucleotide
  Antisense strand to SEQ ID NO: 2498976
uaucacagagccuggacuu

SEQ ID NO: 2498978 - RNA, 19 nt, Artificial Sequence
  Description of Artificial Sequence: Synthetic oligonucleotide
  Sense strand starting at position 3887 of SEQ ID NO: 1887940
aguccaggcucugugauau

SEQ ID NO: 2498979 - RNA, 19 nt, Artificial Sequence
  Description of Artificial Sequence: Synthetic oligonucleotide
  Antisense strand to SEQ ID NO: 2498978
auaucacagagccuggacu

SEQ ID NO: 2498980 - RNA, 19 nt, Artificial Sequence
  Description of Artificial Sequence: Synthetic oligonucleotide
  Sense strand starting at position 3893 of SEQ ID NO: 1887940
ggcucugugauauggcaca

SEQ ID NO: 2498981 - RNA, 19 nt, Artificial Sequence
  Description of Artificial Sequence: Synthetic oligonucleotide
  Antisense strand to SEQ ID NO: 2498980
ugugccauaucacagagcc

SEQ ID NO: 2498982 - RNA, 19 nt, Artificial Sequence
  Description of Artificial Sequence: Synthetic oligonucleotide
  Sense strand starting at position 48 of SEQ ID NO: 1887941
ccaguagacucauggcaaa

SEQ ID NO: 2498983 - RNA, 19 nt, Artificial Sequence
  Description of Artificial Sequence: Synthetic oligonucleotide
  Antisense strand to SEQ ID NO: 2498982
uuugccaugagucuacugg

SEQ ID NO: 2498984 - RNA, 19 nt, Artificial Sequence
  Description of Artificial Sequence: Synthetic oligonucleotide
  Sense strand starting at position 51 of SEQ ID NO: 1887941
guagacucauggcaaaguu

SEQ ID NO: 2498985 - RNA, 19 nt, Artificial Sequence
  Description of Artificial Sequence: Synthetic oligonucleotide
  Antisense strand to SEQ ID NO: 2498984
aacuuugccaugagucuac

SEQ ID NO: 2498986 - RNA, 19 nt, Artificial Sequence
  Description of Artificial Sequence: Synthetic oligonucleotide
  Sense strand starting at position 114 of SEQ ID NO: 1887941
uguggcacuggcuagaaau

SEQ ID NO: 2498987 - RNA, 19 nt, Artificial Sequence
  Description of Artificial Sequence: Synthetic oligonucleotide
  Antisense strand to SEQ ID NO: 2498986
auuucuagccagugccaca

SEQ ID NO: 2498988 - RNA, 19 nt, Artificial Sequence
  Description of Artificial Sequence: Synthetic oligonucleotide
  Sense strand starting at position 694 of SEQ ID NO: 1887941
acaagaaauucugguccca

SEQ ID NO: 2498989 - RNA, 19 nt, Artificial Sequence
  Description of Artificial Sequence: Synthetic oligonucleotide
  Antisense strand to SEQ ID NO: 2498988
ugggaccagaauuucuugu

SEQ ID NO: 2498990 - RNA, 19 nt, Artificial Sequence
  Description of Artificial Sequence: Synthetic oligonucleotide
  Sense strand starting at position 696 of SEQ ID NO: 1887941
aagaaauucuggucccaga

SEQ ID NO: 2498991 - RNA, 19 nt, Artificial Sequence
  Description of Artificial Sequence: Synthetic oligonucleotide
  Antisense strand to SEQ ID NO: 2498990
ucugggaccagaauuucuu

SEQ ID NO: 2498992 - RNA, 19 nt, Artificial Sequence
  Description of Artificial Sequence: Synthetic oligonucleotide
  Sense strand starting at position 715 of SEQ ID NO: 1887941
gccguauuagccucccuga

SEQ ID NO: 2498993 - RNA, 19 nt, Artificial Sequence
  Description of Artificial Sequence: Synthetic oligonucleotide
  Antisense strand to SEQ ID NO: 2498992
ucagggaggcuaauacggc

SEQ ID NO: 2498994 - RNA, 19 nt, Artificial Sequence
  Description of Artificial Sequence: Synthetic oligonucleotide
  Sense strand starting at position 718 of SEQ ID NO: 1887941
guauuagccucccugauga

SEQ ID NO: 2498995 - RNA, 19 nt, Artificial Sequence
  Description of Artificial Sequence: Synthetic oligonucleotide
  Antisense strand to SEQ ID NO: 2498994
ucaucagggaggcuaauac

SEQ ID NO: 2498996 - RNA, 19 nt, Artificial Sequence
  Description of Artificial Sequence: Synthetic oligonucleotide
  Sense strand starting at position 726 of SEQ ID NO: 1887941
cucccugaugacugauauc

SEQ ID NO: 2498997 - RNA, 19 nt, Artificial Sequence
  Description of Artificial Sequence: Synthetic oligonucleotide
  Antisense strand to SEQ ID NO: 2498996
gauaucagucaucagggag

SEQ ID NO: 2498998 - RNA, 19 nt, Artificial Sequence
  Description of Artificial Sequence: Synthetic oligonucleotide
  Sense strand starting at position 729 of SEQ ID NO: 1887941
ccugaugacugauaucuua

SEQ ID NO: 2498999 - RNA, 19 nt, Artificial Sequence
  Description of Artificial Sequence: Synthetic oligonucleotide
  Antisense strand to SEQ ID NO: 2498998
uaagauaucagucaucagg

SEQ ID NO: 2499000 - RNA, 19 nt, Artificial Sequence
  Description of Artificial Sequence: Synthetic oligonucleotide
  Sense strand starting at position 767 of SEQ ID NO: 1887941
aucugagagucacuaguga

SEQ ID NO: 2499001 - RNA, 19 nt, Artificial Sequence
  Description of Artificial Sequence: Synthetic oligonucleotide
  Antisense strand to SEQ ID NO: 2499000
ucacuagugacucucagau

SEQ ID NO: 2499002 - RNA, 19 nt, Artificial Sequence
  Description of Artificial Sequence: Synthetic oligonucleotide
  Sense strand starting at position 771 of SEQ ID NO: 1887941
gagagucacuagugacaag

SEQ ID NO: 2499003 - RNA, 19 nt, Artificial Sequence
  Description of Artificial Sequence: Synthetic oligonucleotide
  Antisense strand to SEQ ID NO: 2499002
cuugucacuagugacucuc

SEQ ID NO: 2499004 - RNA, 19 nt, Artificial Sequence
  Description of Artificial Sequence: Synthetic oligonucleotide
  Sense strand starting at position 774 of SEQ ID NO: 1887941
agucacuagugacaaggau

SEQ ID NO: 2499005 - RNA, 19 nt, Artificial Sequence
  Description of Artificial Sequence: Synthetic oligonucleotide
  Antisense strand to SEQ ID NO: 2499004
auccuugucacuagugacu

SEQ ID NO: 2499006 - RNA, 19 nt, Artificial Sequence
  Description of Artificial Sequence: Synthetic oligonucleotide
  Sense strand starting at position 806 of SEQ ID NO: 1887941
ucaggagccagaugaaauu

SEQ ID NO: 2499007 - RNA, 19 nt, Artificial Sequence
  Description of Artificial Sequence: Synthetic oligonucleotide
  Antisense strand to SEQ ID NO: 2499006
aauuucaucuggcuccuga

SEQ ID NO: 2499008 - RNA, 19 nt, Artificial Sequence
  Description of Artificial Sequence: Synthetic oligonucleotide
  Sense strand starting at position 1263 of SEQ ID NO: 1887941
gaaacagagcuccaucagu

SEQ ID NO: 2499009 - RNA, 19 nt, Artificial Sequence
  Description of Artificial Sequence: Synthetic oligonucleotide
  Antisense strand to SEQ ID NO: 2499008
acugauggagcucuguuuc

SEQ ID NO: 2499010 - RNA, 19 nt, Artificial Sequence
  Description of Artificial Sequence: Synthetic oligonucleotide
  Sense strand starting at position 1680 of SEQ ID NO: 1887941
cagcgaguacuguaggaca

SEQ ID NO: 2499011 - RNA, 19 nt, Artificial Sequence
  Description of Artificial Sequence: Synthetic oligonucleotide
  Antisense strand to SEQ ID NO: 2499010
uguccuacaguacucgcug

SEQ ID NO: 2499012 - RNA, 19 nt, Artificial Sequence
  Description of Artificial Sequence: Synthetic oligonucleotide
  Sense strand starting at position 2030 of SEQ ID NO: 1887941
gagggcgucuacucacaaa

SEQ ID NO: 2499013 - RNA, 19 nt, Artificial Sequence
  Description of Artificial Sequence: Synthetic oligonucleotide
  Antisense strand to SEQ ID NO: 2499012
uuugugaguagacgcccuc

SEQ ID NO: 2499014 - RNA, 19 nt, Artificial Sequence
  Description of Artificial Sequence: Synthetic oligonucleotide
  Sense strand starting at position 2033 of SEQ ID NO: 1887941
ggcgucuacucacaaagua

SEQ ID NO: 2499015 - RNA, 19 nt, Artificial Sequence
  Description of Artificial Sequence: Synthetic oligonucleotide
  Antisense strand to SEQ ID NO: 2499014
uacuuugugaguagacgcc

SEQ ID NO: 2499016 - RNA, 19 nt, Artificial Sequence
  Description of Artificial Sequence: Synthetic oligonucleotide
  Sense strand starting at position 2230 of SEQ ID NO: 1887941
uggucugucuugcaucuga

SEQ ID NO: 2499017 - RNA, 19 nt, Artificial Sequence
  Description of Artificial Sequence: Synthetic oligonucleotide
  Antisense strand to SEQ ID NO: 2499016
ucagaugcaagacagacca

SEQ ID NO: 2499018 - RNA, 19 nt, Artificial Sequence
  Description of Artificial Sequence: Synthetic oligonucleotide
  Sense strand starting at position 2278 of SEQ ID NO: 1887941
gaucuuagccuuuagaguc

SEQ ID NO: 2499019 - RNA, 19 nt, Artificial Sequence
  Description of Artificial Sequence: Synthetic oligonucleotide
  Antisense strand to SEQ ID NO: 2499018
gacucuaaaggcuaagauc

SEQ ID NO: 2499020 - RNA, 19 nt, Artificial Sequence
  Description of Artificial Sequence: Synthetic oligonucleotide
  Sense strand starting at position 2307 of SEQ ID NO: 1887941
agauuugaguucuaacucu

SEQ ID NO: 2499021 - RNA, 19 nt, Artificial Sequence
  Description of Artificial Sequence: Synthetic oligonucleotide
  Antisense strand to SEQ ID NO: 2499020
agaguuagaacucaaaucu

SEQ ID NO: 2499022 - RNA, 19 nt, Artificial Sequence
  Description of Artificial Sequence: Synthetic oligonucleotide
  Sense strand starting at position 2385 of SEQ ID NO: 1887941
uuaaguaacuugcaucaga

SEQ ID NO: 2499023 - RNA, 19 nt, Artificial Sequence
  Description of Artificial Sequence: Synthetic oligonucleotide
  Antisense strand to SEQ ID NO: 2499022
ucugaugcaaguuacuuaa

SEQ ID NO: 2499024 - RNA, 19 nt, Artificial Sequence
  Description of Artificial Sequence: Synthetic oligonucleotide
  Sense strand starting at position 2750 of SEQ ID NO: 1887941
agauuccagucuuaacugu

SEQ ID NO: 2499025 - RNA, 19 nt, Artificial Sequence
  Description of Artificial Sequence: Synthetic oligonucleotide
  Antisense strand to SEQ ID NO: 2499024
acaguuaagacuggaaucu

SEQ ID NO: 2499026 - RNA, 19 nt, Artificial Sequence
  Description of Artificial Sequence: Synthetic oligonucleotide
  Sense strand starting at position 2757 of SEQ ID NO: 1887941
agucuuaacugucaggcuu

SEQ ID NO: 2499027 - RNA, 19 nt, Artificial Sequence
  Description of Artificial Sequence: Synthetic oligonucleotide
  Antisense strand to SEQ ID NO: 2499026
aagccugacaguuaagacu

SEQ ID NO: 2499028 - RNA, 19 nt, Artificial Sequence
  Description of Artificial Sequence: Synthetic oligonucleotide
  Sense strand starting at position 2771 of SEQ ID NO: 1887941
ggcuuaggcgacuaucuau

SEQ ID NO: 2499029 - RNA, 19 nt, Artificial Sequence
  Description of Artificial Sequence: Synthetic oligonucleotide
  Antisense strand to SEQ ID NO: 2499028
auagauagucgccuaagcc

SEQ ID NO: 2499030 - RNA, 19 nt, Artificial Sequence
  Description of Artificial Sequence: Synthetic oligonucleotide
  Sense strand starting at position 2778 of SEQ ID NO: 1887941
gcgacuaucuaucucccaa

SEQ ID NO: 2499031 - RNA, 19 nt, Artificial Sequence
  Description of Artificial Sequence: Synthetic oligonucleotide
  Antisense strand to SEQ ID NO: 2499030
uugggagauagauagucgc

SEQ ID NO: 2499032 - RNA, 19 nt, Artificial Sequence
  Description of Artificial Sequence: Synthetic oligonucleotide
  Sense strand starting at position 3679 of SEQ ID NO: 1887941
agggaaugacuguggcaau

SEQ ID NO: 2499033 - RNA, 19 nt, Artificial Sequence
  Description of Artificial Sequence: Synthetic oligonucleotide
  Antisense strand to SEQ ID NO: 2499032
auugccacagucauucccu

SEQ ID NO: 2499034 - RNA, 19 nt, Artificial Sequence
  Description of Artificial Sequence: Synthetic oligonucleotide
  Sense strand starting at position 3680 of SEQ ID NO: 1887941
gggaaugacuguggcaauc

SEQ ID NO: 2499035 - RNA, 19 nt, Artificial Sequence
  Description of Artificial Sequence: Synthetic oligonucleotide
  Antisense strand to SEQ ID NO: 2499034
gauugccacagucauuccc

SEQ ID NO: 2499036 - RNA, 19 nt, Artificial Sequence
  Description of Artificial Sequence: Synthetic oligonucleotide
  Sense strand starting at position 3682 of SEQ ID NO: 1887941
gaaugacuguggcaaucau

SEQ ID NO: 2499037 - RNA, 19 nt, Artificial Sequence
  Description of Artificial Sequence: Synthetic oligonucleotide
  Antisense strand to SEQ ID NO: 2499036
augauugccacagucauuc

SEQ ID NO: 2499038 - RNA, 19 nt, Artificial Sequence
  Description of Artificial Sequence: Synthetic oligonucleotide
  Sense strand starting at position 3701 of SEQ ID NO: 1887941
ucacuuuagucucgcaacu

SEQ ID NO: 2499039 - RNA, 19 nt, Artificial Sequence
  Description of Artificial Sequence: Synthetic oligonucleotide
  Antisense strand to SEQ ID NO: 2499038
aguugcgagacuaaaguga

SEQ ID NO: 2499040 - RNA, 19 nt, Artificial Sequence
  Description of Artificial Sequence: Synthetic oligonucleotide
  Sense strand starting at position 3810 of SEQ ID NO: 1887941
aggcgggcguuucgugaau

SEQ ID NO: 2499041 - RNA, 19 nt, Artificial Sequence
  Description of Artificial Sequence: Synthetic oligonucleotide
  Antisense strand to SEQ ID NO: 2499040
auucacgaaacgcccgccu

SEQ ID NO: 2499042 - RNA, 19 nt, Artificial Sequence
  Description of Artificial Sequence: Synthetic oligonucleotide
  Sense strand starting at position 3811 of SEQ ID NO: 1887941
ggcgggcguuucgugaaua

SEQ ID NO: 2499043 - RNA, 19 nt, Artificial Sequence
  Description of Artificial Sequence: Synthetic oligonucleotide
  Antisense strand to SEQ ID NO: 2499042
uauucacgaaacgcccgcc

SEQ ID NO: 2499044 - RNA, 19 nt, Artificial Sequence
  Description of Artificial Sequence: Synthetic oligonucleotide
  Sense strand starting at position 3812 of SEQ ID NO: 1887941
gcgggcguuucgugaauaa

SEQ ID NO: 2499045 - RNA, 19 nt, Artificial Sequence
  Description of Artificial Sequence: Synthetic oligonucleotide
  Antisense strand to SEQ ID NO: 2499044
uuauucacgaaacgcccgc

SEQ ID NO: 2499046 - RNA, 19 nt, Artificial Sequence
  Description of Artificial Sequence: Synthetic oligonucleotide
  Sense strand starting at position 3813 of SEQ ID NO: 1887941
cgggcguuucgugaauaac

SEQ ID NO: 2499047 - RNA, 19 nt, Artificial Sequence
  Description of Artificial Sequence: Synthetic oligonucleotide
  Antisense strand to SEQ ID NO: 2499046
guuauucacgaaacgcccg

SEQ ID NO: 2499048 - RNA, 19 nt, Artificial Sequence
  Description of Artificial Sequence: Synthetic oligonucleotide
  Sense strand starting at position 213 of SEQ ID NO: 1887942
aagcucaucugcugaaagu

SEQ ID NO: 2499049 - RNA, 19 nt, Artificial Sequence
  Description of Artificial Sequence: Synthetic oligonucleotide
  Antisense strand to SEQ ID NO: 2499048
acuuucagcagaugagcuu

SEQ ID NO: 2499050 - RNA, 19 nt, Artificial Sequence
  Description of Artificial Sequence: Synthetic oligonucleotide
  Sense strand starting at position 404 of SEQ ID NO: 1887942
ugcuuuguauggcuccaga

SEQ ID NO: 2499051 - RNA, 19 nt, Artificial Sequence
  Description of Artificial Sequence: Synthetic oligonucleotide
  Antisense strand to SEQ ID NO: 2499050
ucuggagccauacaaagca

SEQ ID NO: 2499052 - RNA, 19 nt, Artificial Sequence
  Description of Artificial Sequence: Synthetic oligonucleotide
  Sense strand starting at position 407 of SEQ ID NO: 1887942
uuuguauggcuccagaauc

SEQ ID NO: 2499053 - RNA, 19 nt, Artificial Sequence
  Description of Artificial Sequence: Synthetic oligonucleotide
  Antisense strand to SEQ ID NO: 2499052
gauucuggagccauacaaa

SEQ ID NO: 2499054 - RNA, 19 nt, Artificial Sequence
  Description of Artificial Sequence: Synthetic oligonucleotide
  Sense strand starting at position 1043 of SEQ ID NO: 1887942
ggcucuucuuucuggagga

SEQ ID NO: 2499055 - RNA, 19 nt, Artificial Sequence
  Description of Artificial Sequence: Synthetic oligonucleotide
  Antisense strand to SEQ ID NO: 2499054
uccuccagaaagaagagcc

SEQ ID NO: 2499056 - RNA, 19 nt, Artificial Sequence
  Description of Artificial Sequence: Synthetic oligonucleotide
  Sense strand starting at position 1626 of SEQ ID NO: 1887942
cccuguguguaggacauaa

SEQ ID NO: 2499057 - RNA, 19 nt, Artificial Sequence
  Description of Artificial Sequence: Synthetic oligonucleotide
  Antisense strand to SEQ ID NO: 2499056
uuauguccuacacacaggg

SEQ ID NO: 2499058 - RNA, 19 nt, Artificial Sequence
  Description of Artificial Sequence: Synthetic oligonucleotide
  Sense strand starting at position 2146 of SEQ ID NO: 1887942
ccaguagacucauggcaaa

SEQ ID NO: 2499059 - RNA, 19 nt, Artificial Sequence
  Description of Artificial Sequence: Synthetic oligonucleotide
  Antisense strand to SEQ ID NO: 2499058
uuugccaugagucuacugg

SEQ ID NO: 2499060 - RNA, 19 nt, Artificial Sequence
  Description of Artificial Sequence: Synthetic oligonucleotide
  Sense strand starting at position 2149 of SEQ ID NO: 1887942
guagacucauggcaaaguu

SEQ ID NO: 2499061 - RNA, 19 nt, Artificial Sequence
  Description of Artificial Sequence: Synthetic oligonucleotide
  Antisense strand to SEQ ID NO: 2499060
aacuuugccaugagucuac

SEQ ID NO: 2499062 - RNA, 19 nt, Artificial Sequence
  Description of Artificial Sequence: Synthetic oligonucleotide
  Sense strand starting at position 2212 of SEQ ID NO: 1887942
uguggcacuggcuagaaau

SEQ ID NO: 2499063 - RNA, 19 nt, Artificial Sequence
  Description of Artificial Sequence: Synthetic oligonucleotide
  Antisense strand to SEQ ID NO: 2499062
auuucuagccagugccaca

SEQ ID NO: 2499064 - RNA, 19 nt, Artificial Sequence
  Description of Artificial Sequence: Synthetic oligonucleotide
  Sense strand starting at position 2792 of SEQ ID NO: 1887942
acaagaaauucugguccca

SEQ ID NO: 2499065 - RNA, 19 nt, Artificial Sequence
  Description of Artificial Sequence: Synthetic oligonucleotide
  Antisense strand to SEQ ID NO: 2499064
ugggaccagaauuucuugu

SEQ ID NO: 2499066 - RNA, 19 nt, Artificial Sequence
  Description of Artificial Sequence: Synthetic oligonucleotide
  Sense strand starting at position 2794 of SEQ ID NO: 1887942
aagaaauucuggucccaga

SEQ ID NO: 2499067 - RNA, 19 nt, Artificial Sequence
  Description of Artificial Sequence: Synthetic oligonucleotide
  Antisense strand to SEQ ID NO: 2499066
ucugggaccagaauuucuu

SEQ ID NO: 2499068 - RNA, 19 nt, Artificial Sequence
  Description of Artificial Sequence: Synthetic oligonucleotide
  Sense strand starting at position 2813 of SEQ ID NO: 1887942
gccguauuagccucccuga

SEQ ID NO: 2499069 - RNA, 19 nt, Artificial Sequence
  Description of Artificial Sequence: Synthetic oligonucleotide
  Antisense strand to SEQ ID NO: 2499068
ucagggaggcuaauacggc

SEQ ID NO: 2499070 - RNA, 19 nt, Artificial Sequence
  Description of Artificial Sequence: Synthetic oligonucleotide
  Sense strand starting at position 2816 of SEQ ID NO: 1887942
guauuagccucccugauga

SEQ ID NO: 2499071 - RNA, 19 nt, Artificial Sequence
  Description of Artificial Sequence: Synthetic oligonucleotide
  Antisense strand to SEQ ID NO: 2499070
ucaucagggaggcuaauac

SEQ ID NO: 2499072 - RNA, 19 nt, Artificial Sequence
  Description of Artificial Sequence: Synthetic oligonucleotide
  Sense strand starting at position 2824 of SEQ ID NO: 1887942
cucccugaugacugauauc

SEQ ID NO: 2499073 - RNA, 19 nt, Artificial Sequence
  Description of Artificial Sequence: Synthetic oligonucleotide
  Antisense strand to SEQ ID NO: 2499072
gauaucagucaucagggag

SEQ ID NO: 2499074 - RNA, 19 nt, Artificial Sequence
  Description of Artificial Sequence: Synthetic oligonucleotide
  Sense strand starting at position 2827 of SEQ ID NO: 1887942
ccugaugacugauaucuua

SEQ ID NO: 2499075 - RNA, 19 nt, Artificial Sequence
  Description of Artificial Sequence: Synthetic oligonucleotide
  Antisense strand to SEQ ID NO: 2499074
uaagauaucagucaucagg

SEQ ID NO: 2499076 - RNA, 19 nt, Artificial Sequence
  Description of Artificial Sequence: Synthetic oligonucleotide
  Sense strand starting at position 2865 of SEQ ID NO: 1887942
aucugagagucacuaguga

SEQ ID NO: 2499077 - RNA, 19 nt, Artificial Sequence
  Description of Artificial Sequence: Synthetic oligonucleotide
  Antisense strand to SEQ ID NO: 2499076
ucacuagugacucucagau

SEQ ID NO: 2499078 - RNA, 19 nt, Artificial Sequence
  Description of Artificial Sequence: Synthetic oligonucleotide
  Sense strand starting at position 2869 of SEQ ID NO: 1887942
gagagucacuagugacaag

SEQ ID NO: 2499079 - RNA, 19 nt, Artificial Sequence
  Description of Artificial Sequence: Synthetic oligonucleotide
  Antisense strand to SEQ ID NO: 2499078
cuugucacuagugacucuc

SEQ ID NO: 2499080 - RNA, 19 nt, Artificial Sequence
  Description of Artificial Sequence: Synthetic oligonucleotide
  Sense strand starting at position 2872 of SEQ ID NO: 1887942
agucacuagugacaaggau

SEQ ID NO: 2499081 - RNA, 19 nt, Artificial Sequence
  Description of Artificial Sequence: Synthetic oligonucleotide
  Antisense strand to SEQ ID NO: 2499080
auccuugucacuagugacu

SEQ ID NO: 2499082 - RNA, 19 nt, Artificial Sequence
  Description of Artificial Sequence: Synthetic oligonucleotide
  Sense strand starting at position 2904 of SEQ ID NO: 1887942
ucaggagccagaugaaauu

SEQ ID NO: 2499083 - RNA, 19 nt, Artificial Sequence
  Description of Artificial Sequence: Synthetic oligonucleotide
  Antisense strand to SEQ ID NO: 2499082
aauuucaucuggcuccuga

SEQ ID NO: 2499084 - RNA, 19 nt, Artificial Sequence
  Description of Artificial Sequence: Synthetic oligonucleotide
  Sense strand starting at position 3361 of SEQ ID NO: 1887942
gaaacagagcuccaucagu

SEQ ID NO: 2499085 - RNA, 19 nt, Artificial Sequence
  Description of Artificial Sequence: Synthetic oligonucleotide
  Antisense strand to SEQ ID NO: 2499084
acugauggagcucuguuuc

SEQ ID NO: 2499086 - RNA, 19 nt, Artificial Sequence
  Description of Artificial Sequence: Synthetic oligonucleotide
  Sense strand starting at position 3778 of SEQ ID NO: 1887942
cagcgaguacuguaggaca

SEQ ID NO: 2499087 - RNA, 19 nt, Artificial Sequence
  Description of Artificial Sequence: Synthetic oligonucleotide
  Antisense strand to SEQ ID NO: 2499086
uguccuacaguacucgcug

SEQ ID NO: 2499088 - RNA, 19 nt, Artificial Sequence
  Description of Artificial Sequence: Synthetic oligonucleotide
  Sense strand starting at position 242 of SEQ ID NO: 1887943
gccgcugugaguucaguga

SEQ ID NO: 2499089 - RNA, 19 nt, Artificial Sequence
  Description of Artificial Sequence: Synthetic oligonucleotide
  Antisense strand to SEQ ID NO: 2499088
ucacugaacucacagcggc

SEQ ID NO: 2499090 - RNA, 19 nt, Artificial Sequence
  Description of Artificial Sequence: Synthetic oligonucleotide
  Sense strand starting at position 246 of SEQ ID NO: 1887943
cugugaguucagugaguga

SEQ ID NO: 2499091 - RNA, 19 nt, Artificial Sequence
  Description of Artificial Sequence: Synthetic oligonucleotide
  Antisense strand to SEQ ID NO: 2499090
ucacucacugaacucacag

SEQ ID NO: 2499092 - RNA, 19 nt, Artificial Sequence
  Description of Artificial Sequence: Synthetic oligonucleotide
  Sense strand starting at position 249 of SEQ ID NO: 1887943
ugaguucagugagugaauc

SEQ ID NO: 2499093 - RNA, 19 nt, Artificial Sequence
  Description of Artificial Sequence: Synthetic oligonucleotide
  Antisense strand to SEQ ID NO: 2499092
gauucacucacugaacuca

SEQ ID NO: 2499094 - RNA, 19 nt, Artificial Sequence
  Description of Artificial Sequence: Synthetic oligonucleotide
  Sense strand starting at position 271 of SEQ ID NO: 1887943
cugcuuaaacccgauagca

SEQ ID NO: 2499095 - RNA, 19 nt, Artificial Sequence
  Description of Artificial Sequence: Synthetic oligonucleotide
  Antisense strand to SEQ ID NO: 2499094
ugcuaucggguuuaagcag

SEQ ID NO: 2499096 - RNA, 19 nt, Artificial Sequence
  Description of Artificial Sequence: Synthetic oligonucleotide
  Sense strand starting at position 280 of SEQ ID NO: 1887943
cccgauagcagguguucua

SEQ ID NO: 2499097 - RNA, 19 nt, Artificial Sequence
  Description of Artificial Sequence: Synthetic oligonucleotide
  Antisense strand to SEQ ID NO: 2499096
uagaacaccugcuaucggg

SEQ ID NO: 2499098 - RNA, 19 nt, Artificial Sequence
  Description of Artificial Sequence: Synthetic oligonucleotide
  Sense strand starting at position 291 of SEQ ID NO: 1887943
guguucuaucggcagaggu

SEQ ID NO: 2499099 - RNA, 19 nt, Artificial Sequence
  Description of Artificial Sequence: Synthetic oligonucleotide
  Antisense strand to SEQ ID NO: 2499098
accucugccgauagaacac

SEQ ID NO: 2499100 - RNA, 19 nt, Artificial Sequence
  Description of Artificial Sequence: Synthetic oligonucleotide
  Sense strand starting at position 293 of SEQ ID NO: 1887943
guucuaucggcagagguca

SEQ ID NO: 2499101 - RNA, 19 nt, Artificial Sequence
  Description of Artificial Sequence: Synthetic oligonucleotide
  Antisense strand to SEQ ID NO: 2499100
ugaccucugccgauagaac

SEQ ID NO: 2499102 - RNA, 19 nt, Artificial Sequence
  Description of Artificial Sequence: Synthetic oligonucleotide
  Sense strand starting at position 323 of SEQ ID NO: 1887943
uccuucuaucaguguggca

SEQ ID NO: 2499103 - RNA, 19 nt, Artificial Sequence
  Description of Artificial Sequence: Synthetic oligonucleotide
  Antisense strand to SEQ ID NO: 2499102
ugccacacugauagaagga

SEQ ID NO: 2499104 - RNA, 19 nt, Artificial Sequence
  Description of Artificial Sequence: Synthetic oligonucleotide
  Sense strand starting at position 325 of SEQ ID NO: 1887943
cuucuaucaguguggcaag

SEQ ID NO: 2499105 - RNA, 19 nt, Artificial Sequence
  Description of Artificial Sequence: Synthetic oligonucleotide
  Antisense strand to SEQ ID NO: 2499104
cuugccacacugauagaag

SEQ ID NO: 2499106 - RNA, 19 nt, Artificial Sequence
  Description of Artificial Sequence: Synthetic oligonucleotide
  Sense strand starting at position 326 of SEQ ID NO: 1887943
uucuaucaguguggcaaga

SEQ ID NO: 2499107 - RNA, 19 nt, Artificial Sequence
  Description of Artificial Sequence: Synthetic oligonucleotide
  Antisense strand to SEQ ID NO: 2499106
ucuugccacacugauagaa

SEQ ID NO: 2499108 - RNA, 19 nt, Artificial Sequence
  Description of Artificial Sequence: Synthetic oligonucleotide
  Sense strand starting at position 1478 of SEQ ID NO: 1887943
gggcucaguguugggauga

SEQ ID NO: 2499109 - RNA, 19 nt, Artificial Sequence
  Description of Artificial Sequence: Synthetic oligonucleotide
  Antisense strand to SEQ ID NO: 2499108
ucaucccaacacugagccc

SEQ ID NO: 2499110 - RNA, 19 nt, Artificial Sequence
  Description of Artificial Sequence: Synthetic oligonucleotide
  Sense strand starting at position 1479 of SEQ ID NO: 1887943
ggcucaguguugggaugac

SEQ ID NO: 2499111 - RNA, 19 nt, Artificial Sequence
  Description of Artificial Sequence: Synthetic oligonucleotide
  Antisense strand to SEQ ID NO: 2499110
gucaucccaacacugagcc

SEQ ID NO: 2499112 - RNA, 19 nt, Artificial Sequence
  Description of Artificial Sequence: Synthetic oligonucleotide
  Sense strand starting at position 1741 of SEQ ID NO: 1887943
caggguugguucugagcuu

SEQ ID NO: 2499113 - RNA, 19 nt, Artificial Sequence
  Description of Artificial Sequence: Synthetic oligonucleotide
  Antisense strand to SEQ ID NO: 2499112
aagcucagaaccaacccug

SEQ ID NO: 2499114 - RNA, 19 nt, Artificial Sequence
  Description of Artificial Sequence: Synthetic oligonucleotide
  Sense strand starting at position 1768 of SEQ ID NO: 1887943
ucccucuaguccuaaaggu

SEQ ID NO: 2499115 - RNA, 19 nt, Artificial Sequence
  Description of Artificial Sequence: Synthetic oligonucleotide
  Antisense strand to SEQ ID NO: 2499114
accuuuaggacuagaggga

SEQ ID NO: 2499116 - RNA, 19 nt, Artificial Sequence
  Description of Artificial Sequence: Synthetic oligonucleotide
  Sense strand starting at position 2088 of SEQ ID NO: 1887943
gugccugguaccugcagaa

SEQ ID NO: 2499117 - RNA, 19 nt, Artificial Sequence
  Description of Artificial Sequence: Synthetic oligonucleotide
  Antisense strand to SEQ ID NO: 2499116
uucugcagguaccaggcac

SEQ ID NO: 2499118 - RNA, 19 nt, Artificial Sequence
  Description of Artificial Sequence: Synthetic oligonucleotide
  Sense strand starting at position 2238 of SEQ ID NO: 1887943
gugggcaguuccugaacaa

SEQ ID NO: 2499119 - RNA, 19 nt, Artificial Sequence
  Description of Artificial Sequence: Synthetic oligonucleotide
  Antisense strand to SEQ ID NO: 2499118
uuguucaggaacugcccac

SEQ ID NO: 2499120 - RNA, 19 nt, Artificial Sequence
  Description of Artificial Sequence: Synthetic oligonucleotide
  Sense strand starting at position 2239 of SEQ ID NO: 1887943
ugggcaguuccugaacaaa

SEQ ID NO: 2499121 - RNA, 19 nt, Artificial Sequence
  Description of Artificial Sequence: Synthetic oligonucleotide
  Antisense strand to SEQ ID NO: 2499120
uuuguucaggaacugccca

SEQ ID NO: 2499122 - RNA, 19 nt, Artificial Sequence
  Description of Artificial Sequence: Synthetic oligonucleotide
  Sense strand starting at position 2555 of SEQ ID NO: 1887943
gggagaccuucucucuaca

SEQ ID NO: 2499123 - RNA, 19 nt, Artificial Sequence
  Description of Artificial Sequence: Synthetic oligonucleotide
  Antisense strand to SEQ ID NO: 2499122
uguagagagaaggucuccc

SEQ ID NO: 2499124 - RNA, 19 nt, Artificial Sequence
  Description of Artificial Sequence: Synthetic oligonucleotide
  Sense strand starting at position 2576 of SEQ ID NO: 1887943
gggagccuucccugcacaa

SEQ ID NO: 2499125 - RNA, 19 nt, Artificial Sequence
  Description of Artificial Sequence: Synthetic oligonucleotide
  Antisense strand to SEQ ID NO: 2499124
uugugcagggaaggcuccc

SEQ ID NO: 2499126 - RNA, 19 nt, Artificial Sequence
  Description of Artificial Sequence: Synthetic oligonucleotide
  Sense strand starting at position 2800 of SEQ ID NO: 1887943
aaaugagucucagcuguga

SEQ ID NO: 2499127 - RNA, 19 nt, Artificial Sequence
  Description of Artificial Sequence: Synthetic oligonucleotide
  Antisense strand to SEQ ID NO: 2499126
ucacagcugagacucauuu

SEQ ID NO: 2499128 - RNA, 19 nt, Artificial Sequence
  Description of Artificial Sequence: Synthetic oligonucleotide
  Sense strand starting at position 2804 of SEQ ID NO: 1887943
gagucucagcugugaggau

SEQ ID NO: 2499129 - RNA, 19 nt, Artificial Sequence
  Description of Artificial Sequence: Synthetic oligonucleotide
  Antisense strand to SEQ ID NO: 2499128
auccucacagcugagacuc

SEQ ID NO: 2499130 - RNA, 19 nt, Artificial Sequence
  Description of Artificial Sequence: Synthetic oligonucleotide
  Sense strand starting at position 3577 of SEQ ID NO: 1887943
gagauagaguuucugucuu

SEQ ID NO: 2499131 - RNA, 19 nt, Artificial Sequence
  Description of Artificial Sequence: Synthetic oligonucleotide
  Antisense strand to SEQ ID NO: 2499130
aagacagaaacucuaucuc

SEQ ID NO: 2499132 - RNA, 19 nt, Artificial Sequence
  Description of Artificial Sequence: Synthetic oligonucleotide
  Sense strand starting at position 3579 of SEQ ID NO: 1887943
gauagaguuucugucuugu

SEQ ID NO: 2499133 - RNA, 19 nt, Artificial Sequence
  Description of Artificial Sequence: Synthetic oligonucleotide
  Antisense strand to SEQ ID NO: 2499132
acaagacagaaacucuauc

SEQ ID NO: 2499134 - RNA, 19 nt, Artificial Sequence
  Description of Artificial Sequence: Synthetic oligonucleotide
  Sense strand starting at position 3581 of SEQ ID NO: 1887943
uagaguuucugucuuguug

SEQ ID NO: 2499135 - RNA, 19 nt, Artificial Sequence
  Description of Artificial Sequence: Synthetic oligonucleotide
  Antisense strand to SEQ ID NO: 2499134
caacaagacagaaacucua

SEQ ID NO: 2499136 - RNA, 19 nt, Artificial Sequence
  Description of Artificial Sequence: Synthetic oligonucleotide
  Sense strand starting at position 3683 of SEQ ID NO: 1887943
ccgaguagcuacuauuaca

SEQ ID NO: 2499137 - RNA, 19 nt, Artificial Sequence
  Description of Artificial Sequence: Synthetic oligonucleotide
  Antisense strand to SEQ ID NO: 2499136
uguaauaguagcuacucgg

SEQ ID NO: 2499138 - RNA, 19 nt, Artificial Sequence
  Description of Artificial Sequence: Synthetic oligonucleotide
  Sense strand starting at position 3719 of SEQ ID NO: 1887943
ccggcuaauucuguaacuu

SEQ ID NO: 2499139 - RNA, 19 nt, Artificial Sequence
  Description of Artificial Sequence: Synthetic oligonucleotide
  Antisense strand to SEQ ID NO: 2499138
aaguuacagaauuagccgg

SEQ ID NO: 2499140 - RNA, 19 nt, Artificial Sequence
  Description of Artificial Sequence: Synthetic oligonucleotide
  Sense strand starting at position 3720 of SEQ ID NO: 1887943
cggcuaauucuguaacuuu

SEQ ID NO: 2499141 - RNA, 19 nt, Artificial Sequence
  Description of Artificial Sequence: Synthetic oligonucleotide
  Antisense strand to SEQ ID NO: 2499140
aaaguuacagaauuagccg

SEQ ID NO: 2499142 - RNA, 19 nt, Artificial Sequence
  Description of Artificial Sequence: Synthetic oligonucleotide
  Sense strand starting at position 3728 of SEQ ID NO: 1887943
ucuguaacuuuaguagaga

SEQ ID NO: 2499143 - RNA, 19 nt, Artificial Sequence
  Description of Artificial Sequence: Synthetic oligonucleotide
  Antisense strand to SEQ ID NO: 2499142
ucucuacuaaaguuacaga

SEQ ID NO: 2499144 - RNA, 19 nt, Artificial Sequence
  Description of Artificial Sequence: Synthetic oligonucleotide
  Sense strand starting at position 3729 of SEQ ID NO: 1887943
cuguaacuuuaguagagau

SEQ ID NO: 2499145 - RNA, 19 nt, Artificial Sequence
  Description of Artificial Sequence: Synthetic oligonucleotide
  Antisense strand to SEQ ID NO: 2499144
aucucuacuaaaguuacag

SEQ ID NO: 2499146 - RNA, 19 nt, Artificial Sequence
  Description of Artificial Sequence: Synthetic oligonucleotide
  Sense strand starting at position 3889 of SEQ ID NO: 1887943
ugggcuggucccugagaca

SEQ ID NO: 2499147 - RNA, 19 nt, Artificial Sequence
  Description of Artificial Sequence: Synthetic oligonucleotide
  Antisense strand to SEQ ID NO: 2499146
ugucucagggaccagccca

SEQ ID NO: 2499148 - RNA, 19 nt, Artificial Sequence
  Description of Artificial Sequence: Synthetic oligonucleotide
  Sense strand starting at position 3958 of SEQ ID NO: 1887943
ggcugacaugugugagguu

SEQ ID NO: 2499149 - RNA, 19 nt, Artificial Sequence
  Description of Artificial Sequence: Synthetic oligonucleotide
  Antisense strand to SEQ ID NO: 2499148
aaccucacacaugucagcc

SEQ ID NO: 2499150 - RNA, 19 nt, Artificial Sequence
  Description of Artificial Sequence: Synthetic oligonucleotide
  Sense strand starting at position 3959 of SEQ ID NO: 1887943
gcugacaugugugagguuu

SEQ ID NO: 2499151 - RNA, 19 nt, Artificial Sequence
  Description of Artificial Sequence: Synthetic oligonucleotide
  Antisense strand to SEQ ID NO: 2499150
aaaccucacacaugucagc

SEQ ID NO: 2499152 - RNA, 19 nt, Artificial Sequence
  Description of Artificial Sequence: Synthetic oligonucleotide
  Sense strand starting at position 3970 of SEQ ID NO: 1887943
ugagguuuccuuuacggac

SEQ ID NO: 2499153 - RNA, 19 nt, Artificial Sequence
  Description of Artificial Sequence: Synthetic oligonucleotide
  Antisense strand to SEQ ID NO: 2499152
guccguaaaggaaaccuca

SEQ ID NO: 2499154 - RNA, 19 nt, Artificial Sequence
  Description of Artificial Sequence: Synthetic oligonucleotide
  Sense strand starting at position 3976 of SEQ ID NO: 1887943
uuccuuuacggacagugaa

SEQ ID NO: 2499155 - RNA, 19 nt, Artificial Sequence
  Description of Artificial Sequence: Synthetic oligonucleotide
  Antisense strand to SEQ ID NO: 2499154
uucacuguccguaaaggaa

SEQ ID NO: 2499156 - RNA, 19 nt, Artificial Sequence
  Description of Artificial Sequence: Synthetic oligonucleotide
  Sense strand starting at position 336 of SEQ ID NO: 1887944
aguuaagaguacucuguga

SEQ ID NO: 2499157 - RNA, 19 nt, Artificial Sequence
  Description of Artificial Sequence: Synthetic oligonucleotide
  Antisense strand to SEQ ID NO: 2499156
ucacagaguacucuuaacu

SEQ ID NO: 2499158 - RNA, 19 nt, Artificial Sequence
  Description of Artificial Sequence: Synthetic oligonucleotide
  Sense strand starting at position 338 of SEQ ID NO: 1887944
uuaagaguacucugugagc

SEQ ID NO: 2499159 - RNA, 19 nt, Artificial Sequence
  Description of Artificial Sequence: Synthetic oligonucleotide
  Antisense strand to SEQ ID NO: 2499158
gcucacagaguacucuuaa

SEQ ID NO: 2499160 - RNA, 19 nt, Artificial Sequence
  Description of Artificial Sequence: Synthetic oligonucleotide
  Sense strand starting at position 340 of SEQ ID NO: 1887944
aagaguacucugugagcaa

SEQ ID NO: 2499161 - RNA, 19 nt, Artificial Sequence
  Description of Artificial Sequence: Synthetic oligonucleotide
  Antisense strand to SEQ ID NO: 2499160
uugcucacagaguacucuu

SEQ ID NO: 2499162 - RNA, 19 nt, Artificial Sequence
  Description of Artificial Sequence: Synthetic oligonucleotide
  Sense strand starting at position 642 of SEQ ID NO: 1887944
gacagcugggcauaucaua

SEQ ID NO: 2499163 - RNA, 19 nt, Artificial Sequence
  Description of Artificial Sequence: Synthetic oligonucleotide
  Antisense strand to SEQ ID NO: 2499162
uaugauaugcccagcuguc

SEQ ID NO: 2499164 - RNA, 19 nt, Artificial Sequence
  Description of Artificial Sequence: Synthetic oligonucleotide
  Sense strand starting at position 1185 of SEQ ID NO: 1887944
auaccuguugggugacaga

SEQ ID NO: 2499165 - RNA, 19 nt, Artificial Sequence
  Description of Artificial Sequence: Synthetic oligonucleotide
  Antisense strand to SEQ ID NO: 2499164
ucugucacccaacagguau

SEQ ID NO: 2499166 - RNA, 19 nt, Artificial Sequence
  Description of Artificial Sequence: Synthetic oligonucleotide
  Sense strand starting at position 1666 of SEQ ID NO: 1887944
uuacacuuguuucuguaga

SEQ ID NO: 2499167 - RNA, 19 nt, Artificial Sequence
  Description of Artificial Sequence: Synthetic oligonucleotide
  Antisense strand to SEQ ID NO: 2499166
ucuacagaaacaaguguaa

SEQ ID NO: 2499168 - RNA, 19 nt, Artificial Sequence
  Description of Artificial Sequence: Synthetic oligonucleotide
  Sense strand starting at position 1818 of SEQ ID NO: 1887944
caguacuugccagagcuaa

SEQ ID NO: 2499169 - RNA, 19 nt, Artificial Sequence
  Description of Artificial Sequence: Synthetic oligonucleotide
  Antisense strand to SEQ ID NO: 2499168
uuagcucuggcaaguacug

SEQ ID NO: 2499170 - RNA, 19 nt, Artificial Sequence
  Description of Artificial Sequence: Synthetic oligonucleotide
  Sense strand starting at position 1829 of SEQ ID NO: 1887944
agagcuaaguuccuguuua

SEQ ID NO: 2499171 - RNA, 19 nt, Artificial Sequence
  Description of Artificial Sequence: Synthetic oligonucleotide
  Antisense strand to SEQ ID NO: 2499170
uaaacaggaacuuagcucu

SEQ ID NO: 2499172 - RNA, 19 nt, Artificial Sequence
  Description of Artificial Sequence: Synthetic oligonucleotide
  Sense strand starting at position 1833 of SEQ ID NO: 1887944
cuaaguuccuguuuaaaug

SEQ ID NO: 2499173 - RNA, 19 nt, Artificial Sequence
  Description of Artificial Sequence: Synthetic oligonucleotide
  Antisense strand to SEQ ID NO: 2499172
cauuuaaacaggaacuuag

SEQ ID NO: 2499174 - RNA, 19 nt, Artificial Sequence
  Description of Artificial Sequence: Synthetic oligonucleotide
  Sense strand starting at position 2158 of SEQ ID NO: 1887944
gccuuugauuguccucaca

SEQ ID NO: 2499175 - RNA, 19 nt, Artificial Sequence
  Description of Artificial Sequence: Synthetic oligonucleotide
  Antisense strand to SEQ ID NO: 2499174
ugugaggacaaucaaaggc

SEQ ID NO: 2499176 - RNA, 19 nt, Artificial Sequence
  Description of Artificial Sequence: Synthetic oligonucleotide
  Sense strand starting at position 2160 of SEQ ID NO: 1887944
cuuugauuguccucacaag

SEQ ID NO: 2499177 - RNA, 19 nt, Artificial Sequence
  Description of Artificial Sequence: Synthetic oligonucleotide
  Antisense strand to SEQ ID NO: 2499176
cuugugaggacaaucaaag

SEQ ID NO: 2499178 - RNA, 19 nt, Artificial Sequence
  Description of Artificial Sequence: Synthetic oligonucleotide
  Sense strand starting at position 2231 of SEQ ID NO: 1887944
ccaucagagcugggaacua

SEQ ID NO: 2499179 - RNA, 19 nt, Artificial Sequence
  Description of Artificial Sequence: Synthetic oligonucleotide
  Antisense strand to SEQ ID NO: 2499178
uaguucccagcucugaugg

SEQ ID NO: 2499180 - RNA, 19 nt, Artificial Sequence
  Description of Artificial Sequence: Synthetic oligonucleotide
  Sense strand starting at position 2345 of SEQ ID NO: 1887944
ccucauaucugaguucuuc

SEQ ID NO: 2499181 - RNA, 19 nt, Artificial Sequence
  Description of Artificial Sequence: Synthetic oligonucleotide
  Antisense strand to SEQ ID NO: 2499180
gaagaacucagauaugagg

SEQ ID NO: 2499182 - RNA, 19 nt, Artificial Sequence
  Description of Artificial Sequence: Synthetic oligonucleotide
  Sense strand starting at position 2349 of SEQ ID NO: 1887944
auaucugaguucuucuaug

SEQ ID NO: 2499183 - RNA, 19 nt, Artificial Sequence
  Description of Artificial Sequence: Synthetic oligonucleotide
  Antisense strand to SEQ ID NO: 2499182
cauagaagaacucagauau

SEQ ID NO: 2499184 - RNA, 19 nt, Artificial Sequence
  Description of Artificial Sequence: Synthetic oligonucleotide
  Sense strand starting at position 2354 of SEQ ID NO: 1887944
ugaguucuucuaugaguau

SEQ ID NO: 2499185 - RNA, 19 nt, Artificial Sequence
  Description of Artificial Sequence: Synthetic oligonucleotide
  Antisense strand to SEQ ID NO: 2499184
auacucauagaagaacuca

SEQ ID NO: 2499186 - RNA, 19 nt, Artificial Sequence
  Description of Artificial Sequence: Synthetic oligonucleotide
  Sense strand starting at position 2374 of SEQ ID NO: 1887944
uuaugcucagauuguauuu

SEQ ID NO: 2499187 - RNA, 19 nt, Artificial Sequence
  Description of Artificial Sequence: Synthetic oligonucleotide
  Antisense strand to SEQ ID NO: 2499186
aaauacaaucugagcauaa

SEQ ID NO: 2499188 - RNA, 19 nt, Artificial Sequence
  Description of Artificial Sequence: Synthetic oligonucleotide
  Sense strand starting at position 2399 of SEQ ID NO: 1887944
gcaauuggauuugaacgaa

SEQ ID NO: 2499189 - RNA, 19 nt, Artificial Sequence
  Description of Artificial Sequence: Synthetic oligonucleotide
  Antisense strand to SEQ ID NO: 2499188
uucguucaaauccaauugc

SEQ ID NO: 2499190 - RNA, 19 nt, Artificial Sequence
  Description of Artificial Sequence: Synthetic oligonucleotide
  Sense strand starting at position 2449 of SEQ ID NO: 1887944
guuacaagaccuuguaacu

SEQ ID NO: 2499191 - RNA, 19 nt, Artificial Sequence
  Description of Artificial Sequence: Synthetic oligonucleotide
  Antisense strand to SEQ ID NO: 2499190
aguuacaaggucuuguaac

SEQ ID NO: 2499192 - RNA, 19 nt, Artificial Sequence
  Description of Artificial Sequence: Synthetic oligonucleotide
  Sense strand starting at position 2745 of SEQ ID NO: 1887944
uggccaaucaauuguagga

SEQ ID NO: 2499193 - RNA, 19 nt, Artificial Sequence
  Description of Artificial Sequence: Synthetic oligonucleotide
  Antisense strand to SEQ ID NO: 2499192
uccuacaauugauuggcca

SEQ ID NO: 2499194 - RNA, 19 nt, Artificial Sequence
  Description of Artificial Sequence: Synthetic oligonucleotide
  Sense strand starting at position 2749 of SEQ ID NO: 1887944
caaucaauuguaggauguu

SEQ ID NO: 2499195 - RNA, 19 nt, Artificial Sequence
  Description of Artificial Sequence: Synthetic oligonucleotide
  Antisense strand to SEQ ID NO: 2499194
aacauccuacaauugauug

SEQ ID NO: 2499196 - RNA, 19 nt, Artificial Sequence
  Description of Artificial Sequence: Synthetic oligonucleotide
  Sense strand starting at position 2752 of SEQ ID NO: 1887944
ucaauuguaggauguuaac

SEQ ID NO: 2499197 - RNA, 19 nt, Artificial Sequence
  Description of Artificial Sequence: Synthetic oligonucleotide
  Antisense strand to SEQ ID NO: 2499196
guuaacauccuacaauuga

SEQ ID NO: 2499198 - RNA, 19 nt, Artificial Sequence
  Description of Artificial Sequence: Synthetic oligonucleotide
  Sense strand starting at position 2846 of SEQ ID NO: 1887944
ggaugagauuaggcagagu

SEQ ID NO: 2499199 - RNA, 19 nt, Artificial Sequence
  Description of Artificial Sequence: Synthetic oligonucleotide
  Antisense strand to SEQ ID NO: 2499198
acucugccuaaucucaucc

SEQ ID NO: 2499200 - RNA, 19 nt, Artificial Sequence
  Description of Artificial Sequence: Synthetic oligonucleotide
  Sense strand starting at position 2849 of SEQ ID NO: 1887944
ugagauuaggcagaguagu

SEQ ID NO: 2499201 - RNA, 19 nt, Artificial Sequence
  Description of Artificial Sequence: Synthetic oligonucleotide
  Antisense strand to SEQ ID NO: 2499200
acuacucugccuaaucuca

SEQ ID NO: 2499202 - RNA, 19 nt, Artificial Sequence
  Description of Artificial Sequence: Synthetic oligonucleotide
  Sense strand starting at position 2875 of SEQ ID NO: 1887944
ccaugcuagcucugcuaua

SEQ ID NO: 2499203 - RNA, 19 nt, Artificial Sequence
  Description of Artificial Sequence: Synthetic oligonucleotide
  Antisense strand to SEQ ID NO: 2499202
uauagcagagcuagcaugg

SEQ ID NO: 2499204 - RNA, 19 nt, Artificial Sequence
  Description of Artificial Sequence: Synthetic oligonucleotide
  Sense strand starting at position 2937 of SEQ ID NO: 1887944
cagcuuccuccggaguaga

SEQ ID NO: 2499205 - RNA, 19 nt, Artificial Sequence
  Description of Artificial Sequence: Synthetic oligonucleotide
  Antisense strand to SEQ ID NO: 2499204
ucuacuccggaggaagcug

SEQ ID NO: 2499206 - RNA, 19 nt, Artificial Sequence
  Description of Artificial Sequence: Synthetic oligonucleotide
  Sense strand starting at position 2940 of SEQ ID NO: 1887944
cuuccuccggaguagaaau

SEQ ID NO: 2499207 - RNA, 19 nt, Artificial Sequence
  Description of Artificial Sequence: Synthetic oligonucleotide
  Antisense strand to SEQ ID NO: 2499206
auuucuacuccggaggaag

SEQ ID NO: 2499208 - RNA, 19 nt, Artificial Sequence
  Description of Artificial Sequence: Synthetic oligonucleotide
  Sense strand starting at position 3259 of SEQ ID NO: 1887944
aguagaaauccucauuguu

SEQ ID NO: 2499209 - RNA, 19 nt, Artificial Sequence
  Description of Artificial Sequence: Synthetic oligonucleotide
  Antisense strand to SEQ ID NO: 2499208
aacaaugaggauuucuacu

SEQ ID NO: 2499210 - RNA, 19 nt, Artificial Sequence
  Description of Artificial Sequence: Synthetic oligonucleotide
  Sense strand starting at position 3308 of SEQ ID NO: 1887944
uguuacacaugcuuuguaa

SEQ ID NO: 2499211 - RNA, 19 nt, Artificial Sequence
  Description of Artificial Sequence: Synthetic oligonucleotide
  Antisense strand to SEQ ID NO: 2499210
uuacaaagcauguguaaca

SEQ ID NO: 2499212 - RNA, 19 nt, Artificial Sequence
  Description of Artificial Sequence: Synthetic oligonucleotide
  Sense strand starting at position 3317 of SEQ ID NO: 1887944
ugcuuuguaagcguuggua

SEQ ID NO: 2499213 - RNA, 19 nt, Artificial Sequence
  Description of Artificial Sequence: Synthetic oligonucleotide
  Antisense strand to SEQ ID NO: 2499212
uaccaacgcuuacaaagca

SEQ ID NO: 2499214 - RNA, 19 nt, Artificial Sequence
  Description of Artificial Sequence: Synthetic oligonucleotide
  Sense strand starting at position 3321 of SEQ ID NO: 1887944
uuguaagcguugguacaaa

SEQ ID NO: 2499215 - RNA, 19 nt, Artificial Sequence
  Description of Artificial Sequence: Synthetic oligonucleotide
  Antisense strand to SEQ ID NO: 2499214
uuuguaccaacgcuuacaa

SEQ ID NO: 2499216 - RNA, 19 nt, Artificial Sequence
  Description of Artificial Sequence: Synthetic oligonucleotide
  Sense strand starting at position 3352 of SEQ ID NO: 1887944
cagacagacuuccugaagu

SEQ ID NO: 2499217 - RNA, 19 nt, Artificial Sequence
  Description of Artificial Sequence: Synthetic oligonucleotide
  Antisense strand to SEQ ID NO: 2499216
acuucaggaagucugucug

SEQ ID NO: 2499218 - RNA, 19 nt, Artificial Sequence
  Description of Artificial Sequence: Synthetic oligonucleotide
  Sense strand starting at position 3433 of SEQ ID NO: 1887944
caguaacugccucaggaau

SEQ ID NO: 2499219 - RNA, 19 nt, Artificial Sequence
  Description of Artificial Sequence: Synthetic oligonucleotide
  Antisense strand to SEQ ID NO: 2499218
auuccugaggcaguuacug

SEQ ID NO: 2499220 - RNA, 19 nt, Artificial Sequence
  Description of Artificial Sequence: Synthetic oligonucleotide
  Sense strand starting at position 3441 of SEQ ID NO: 1887944
gccucaggaauaugguuaa

SEQ ID NO: 2499221 - RNA, 19 nt, Artificial Sequence
  Description of Artificial Sequence: Synthetic oligonucleotide
  Antisense strand to SEQ ID NO: 2499220
uuaaccauauuccugaggc

SEQ ID NO: 2499222 - RNA, 19 nt, Artificial Sequence
  Description of Artificial Sequence: Synthetic oligonucleotide
  Sense strand starting at position 3444 of SEQ ID NO: 1887944
ucaggaauaugguuaacug

SEQ ID NO: 2499223 - RNA, 19 nt, Artificial Sequence
  Description of Artificial Sequence: Synthetic oligonucleotide
  Antisense strand to SEQ ID NO: 2499222
caguuaaccauauuccuga

SEQ ID NO: 2499224 - RNA, 19 nt, Artificial Sequence
  Description of Artificial Sequence: Synthetic oligonucleotide
  Sense strand starting at position 3480 of SEQ ID NO: 1887944
cgaacugugcuaggcacaa

SEQ ID NO: 2499225 - RNA, 19 nt, Artificial Sequence
  Description of Artificial Sequence: Synthetic oligonucleotide
  Antisense strand to SEQ ID NO: 2499224
uugugccuagcacaguucg

SEQ ID NO: 2499226 - RNA, 19 nt, Artificial Sequence
  Description of Artificial Sequence: Synthetic oligonucleotide
  Sense strand starting at position 3500 of SEQ ID NO: 1887944
gacacaugcuuggugaaca

SEQ ID NO: 2499227 - RNA, 19 nt, Artificial Sequence
  Description of Artificial Sequence: Synthetic oligonucleotide
  Antisense strand to SEQ ID NO: 2499226
uguucaccaagcauguguc

SEQ ID NO: 2499228 - RNA, 19 nt, Artificial Sequence
  Description of Artificial Sequence: Synthetic oligonucleotide
  Sense strand starting at position 3670 of SEQ ID NO: 1887944
augucccauccuuguggaa

SEQ ID NO: 2499229 - RNA, 19 nt, Artificial Sequence
  Description of Artificial Sequence: Synthetic oligonucleotide
  Antisense strand to SEQ ID NO: 2499228
uuccacaaggaugggacau

SEQ ID NO: 2499230 - RNA, 19 nt, Artificial Sequence
  Description of Artificial Sequence: Synthetic oligonucleotide
  Sense strand starting at position 3806 of SEQ ID NO: 1887944
gcagaaaggcauugagaau

SEQ ID NO: 2499231 - RNA, 19 nt, Artificial Sequence
  Description of Artificial Sequence: Synthetic oligonucleotide
  Antisense strand to SEQ ID NO: 2499230
auucucaaugccuuucugc

SEQ ID NO: 2499232 - RNA, 19 nt, Artificial Sequence
  Description of Artificial Sequence: Synthetic oligonucleotide
  Sense strand starting at position 3855 of SEQ ID NO: 1887944
uuaacaccuccacgugaaa

SEQ ID NO: 2499233 - RNA, 19 nt, Artificial Sequence
  Description of Artificial Sequence: Synthetic oligonucleotide
  Antisense strand to SEQ ID NO: 2499232
uuucacguggagguguuaa

SEQ ID NO: 2499234 - RNA, 19 nt, Artificial Sequence
  Description of Artificial Sequence: Synthetic oligonucleotide
  Sense strand starting at position 3886 of SEQ ID NO: 1887944
gcgcacugagcgggauaaa

SEQ ID NO: 2499235 - RNA, 19 nt, Artificial Sequence
  Description of Artificial Sequence: Synthetic oligonucleotide
  Antisense strand to SEQ ID NO: 2499234
uuuaucccgcucagugcgc

SEQ ID NO: 2499236 - RNA, 19 nt, Artificial Sequence
  Description of Artificial Sequence: Synthetic oligonucleotide
  Sense strand starting at position 103 of SEQ ID NO: 1887945
gcuuuacauuaacuaggaa

SEQ ID NO: 2499237 - RNA, 19 nt, Artificial Sequence
  Description of Artificial Sequence: Synthetic oligonucleotide
  Antisense strand to SEQ ID NO: 2499236
uuccuaguuaauguaaagc

SEQ ID NO: 2499238 - RNA, 19 nt, Artificial Sequence
  Description of Artificial Sequence: Synthetic oligonucleotide
  Sense strand starting at position 146 of SEQ ID NO: 1887945
uuaugucuuugguuuguaa

SEQ ID NO: 2499239 - RNA, 19 nt, Artificial Sequence
  Description of Artificial Sequence: Synthetic oligonucleotide
  Antisense strand to SEQ ID NO: 2499238
uuacaaaccaaagacauaa

SEQ ID NO: 2499240 - RNA, 19 nt, Artificial Sequence
  Description of Artificial Sequence: Synthetic oligonucleotide
  Sense strand starting at position 148 of SEQ ID NO: 1887945
augucuuugguuuguaaac

SEQ ID NO: 2499241 - RNA, 19 nt, Artificial Sequence
  Description of Artificial Sequence: Synthetic oligonucleotide
  Antisense strand to SEQ ID NO: 2499240
guuuacaaaccaaagacau

SEQ ID NO: 2499242 - RNA, 19 nt, Artificial Sequence
  Description of Artificial Sequence: Synthetic oligonucleotide
  Sense strand starting at position 157 of SEQ ID NO: 1887945
guuuguaaacggugucuau

SEQ ID NO: 2499243 - RNA, 19 nt, Artificial Sequence
  Description of Artificial Sequence: Synthetic oligonucleotide
  Antisense strand to SEQ ID NO: 2499242
auagacaccguuuacaaac

SEQ ID NO: 2499244 - RNA, 19 nt, Artificial Sequence
  Description of Artificial Sequence: Synthetic oligonucleotide
  Sense strand starting at position 160 of SEQ ID NO: 1887945
uguaaacggugucuauaaa

SEQ ID NO: 2499245 - RNA, 19 nt, Artificial Sequence
  Description of Artificial Sequence: Synthetic oligonucleotide
  Antisense strand to SEQ ID NO: 2499244
uuuauagacaccguuuaca

SEQ ID NO: 2499246 - RNA, 19 nt, Artificial Sequence
  Description of Artificial Sequence: Synthetic oligonucleotide
  Sense strand starting at position 161 of SEQ ID NO: 1887945
guaaacggugucuauaaag

SEQ ID NO: 2499247 - RNA, 19 nt, Artificial Sequence
  Description of Artificial Sequence: Synthetic oligonucleotide
  Antisense strand to SEQ ID NO: 2499246
cuuuauagacaccguuuac

SEQ ID NO: 2499248 - RNA, 19 nt, Artificial Sequence
  Description of Artificial Sequence: Synthetic oligonucleotide
  Sense strand starting at position 167 of SEQ ID NO: 1887945
ggugucuauaaaggaucau

SEQ ID NO: 2499249 - RNA, 19 nt, Artificial Sequence
  Description of Artificial Sequence: Synthetic oligonucleotide
  Antisense strand to SEQ ID NO: 2499248
augauccuuuauagacacc

SEQ ID NO: 2499250 - RNA, 19 nt, Artificial Sequence
  Description of Artificial Sequence: Synthetic oligonucleotide
  Sense strand starting at position 987 of SEQ ID NO: 1887945
aguuaagaguacucuguga

SEQ ID NO: 2499251 - RNA, 19 nt, Artificial Sequence
  Description of Artificial Sequence: Synthetic oligonucleotide
  Antisense strand to SEQ ID NO: 2499250
ucacagaguacucuuaacu

SEQ ID NO: 2499252 - RNA, 19 nt, Artificial Sequence
  Description of Artificial Sequence: Synthetic oligonucleotide
  Sense strand starting at position 989 of SEQ ID NO: 1887945
uuaagaguacucugugagc

SEQ ID NO: 2499253 - RNA, 19 nt, Artificial Sequence
  Description of Artificial Sequence: Synthetic oligonucleotide
  Antisense strand to SEQ ID NO: 2499252
gcucacagaguacucuuaa

SEQ ID NO: 2499254 - RNA, 19 nt, Artificial Sequence
  Description of Artificial Sequence: Synthetic oligonucleotide
  Sense strand starting at position 991 of SEQ ID NO: 1887945
aagaguacucugugagcaa

SEQ ID NO: 2499255 - RNA, 19 nt, Artificial Sequence
  Description of Artificial Sequence: Synthetic oligonucleotide
  Antisense strand to SEQ ID NO: 2499254
uugcucacagaguacucuu

SEQ ID NO: 2499256 - RNA, 19 nt, Artificial Sequence
  Description of Artificial Sequence: Synthetic oligonucleotide
  Sense strand starting at position 1293 of SEQ ID NO: 1887945
gacagcugggcauaucaua

SEQ ID NO: 2499257 - RNA, 19 nt, Artificial Sequence
  Description of Artificial Sequence: Synthetic oligonucleotide
  Antisense strand to SEQ ID NO: 2499256
uaugauaugcccagcuguc

SEQ ID NO: 2499258 - RNA, 19 nt, Artificial Sequence
  Description of Artificial Sequence: Synthetic oligonucleotide
  Sense strand starting at position 1474 of SEQ ID NO: 1887945
ccugaaaucucccaaguag

SEQ ID NO: 2499259 - RNA, 19 nt, Artificial Sequence
  Description of Artificial Sequence: Synthetic oligonucleotide
  Antisense strand to SEQ ID NO: 2499258
cuacuugggagauuucagg

SEQ ID NO: 2499260 - RNA, 19 nt, Artificial Sequence
  Description of Artificial Sequence: Synthetic oligonucleotide
  Sense strand starting at position 1836 of SEQ ID NO: 1887945
auaccuguugggugacaga

SEQ ID NO: 2499261 - RNA, 19 nt, Artificial Sequence
  Description of Artificial Sequence: Synthetic oligonucleotide
  Antisense strand to SEQ ID NO: 2499260
ucugucacccaacagguau

SEQ ID NO: 2499262 - RNA, 19 nt, Artificial Sequence
  Description of Artificial Sequence: Synthetic oligonucleotide
  Sense strand starting at position 2317 of SEQ ID NO: 1887945
uuacacuuguuucuguaga

SEQ ID NO: 2499263 - RNA, 19 nt, Artificial Sequence
  Description of Artificial Sequence: Synthetic oligonucleotide
  Antisense strand to SEQ ID NO: 2499262
ucuacagaaacaaguguaa

SEQ ID NO: 2499264 - RNA, 19 nt, Artificial Sequence
  Description of Artificial Sequence: Synthetic oligonucleotide
  Sense strand starting at position 2469 of SEQ ID NO: 1887945
caguacuugccagagcuaa

SEQ ID NO: 2499265 - RNA, 19 nt, Artificial Sequence
  Description of Artificial Sequence: Synthetic oligonucleotide
  Antisense strand to SEQ ID NO: 2499264
uuagcucuggcaaguacug

SEQ ID NO: 2499266 - RNA, 19 nt, Artificial Sequence
  Description of Artificial Sequence: Synthetic oligonucleotide
  Sense strand starting at position 2480 of SEQ ID NO: 1887945
agagcuaaguuccuguuua

SEQ ID NO: 2499267 - RNA, 19 nt, Artificial Sequence
  Description of Artificial Sequence: Synthetic oligonucleotide
  Antisense strand to SEQ ID NO: 2499266
uaaacaggaacuuagcucu

SEQ ID NO: 2499268 - RNA, 19 nt, Artificial Sequence
  Description of Artificial Sequence: Synthetic oligonucleotide
  Sense strand starting at position 2484 of SEQ ID NO: 1887945
cuaaguuccuguuuaaaug

SEQ ID NO: 2499269 - RNA, 19 nt, Artificial Sequence
  Description of Artificial Sequence: Synthetic oligonucleotide
  Antisense strand to SEQ ID NO: 2499268
cauuuaaacaggaacuuag

SEQ ID NO: 2499270 - RNA, 19 nt, Artificial Sequence
  Description of Artificial Sequence: Synthetic oligonucleotide
  Sense strand starting at position 2809 of SEQ ID NO: 1887945
gccuuugauuguccucaca

SEQ ID NO: 2499271 - RNA, 19 nt, Artificial Sequence
  Description of Artificial Sequence: Synthetic oligonucleotide
  Antisense strand to SEQ ID NO: 2499270
ugugaggacaaucaaaggc

SEQ ID NO: 2499272 - RNA, 19 nt, Artificial Sequence
  Description of Artificial Sequence: Synthetic oligonucleotide
  Sense strand starting at position 2811 of SEQ ID NO: 1887945
cuuugauuguccucacaag

SEQ ID NO: 2499273 - RNA, 19 nt, Artificial Sequence
  Description of Artificial Sequence: Synthetic oligonucleotide
  Antisense strand to SEQ ID NO: 2499272
cuugugaggacaaucaaag

SEQ ID NO: 2499274 - RNA, 19 nt, Artificial Sequence
  Description of Artificial Sequence: Synthetic oligonucleotide
  Sense strand starting at position 2882 of SEQ ID NO: 1887945
ccaucagagcugggaacua

SEQ ID NO: 2499275 - RNA, 19 nt, Artificial Sequence
  Description of Artificial Sequence: Synthetic oligonucleotide
  Antisense strand to SEQ ID NO: 2499274
uaguucccagcucugaugg

SEQ ID NO: 2499276 - RNA, 19 nt, Artificial Sequence
  Description of Artificial Sequence: Synthetic oligonucleotide
  Sense strand starting at position 2996 of SEQ ID NO: 1887945
ccucauaucugaguucuuc

SEQ ID NO: 2499277 - RNA, 19 nt, Artificial Sequence
  Description of Artificial Sequence: Synthetic oligonucleotide
  Antisense strand to SEQ ID NO: 2499276
gaagaacucagauaugagg

SEQ ID NO: 2499278 - RNA, 19 nt, Artificial Sequence
  Description of Artificial Sequence: Synthetic oligonucleotide
  Sense strand starting at position 3000 of SEQ ID NO: 1887945
auaucugaguucuucuaug

SEQ ID NO: 2499279 - RNA, 19 nt, Artificial Sequence
  Description of Artificial Sequence: Synthetic oligonucleotide
  Antisense strand to SEQ ID NO: 2499278
cauagaagaacucagauau

SEQ ID NO: 2499280 - RNA, 19 nt, Artificial Sequence
  Description of Artificial Sequence: Synthetic oligonucleotide
  Sense strand starting at position 3005 of SEQ ID NO: 1887945
ugaguucuucuaugaguau

SEQ ID NO: 2499281 - RNA, 19 nt, Artificial Sequence
  Description of Artificial Sequence: Synthetic oligonucleotide
  Antisense strand to SEQ ID NO: 2499280
auacucauagaagaacuca

SEQ ID NO: 2499282 - RNA, 19 nt, Artificial Sequence
  Description of Artificial Sequence: Synthetic oligonucleotide
  Sense strand starting at position 3025 of SEQ ID NO: 1887945
uuaugcucagauuguauuu

SEQ ID NO: 2499283 - RNA, 19 nt, Artificial Sequence
  Description of Artificial Sequence: Synthetic oligonucleotide
  Antisense strand to SEQ ID NO: 2499282
aaauacaaucugagcauaa

SEQ ID NO: 2499284 - RNA, 19 nt, Artificial Sequence
  Description of Artificial Sequence: Synthetic oligonucleotide
  Sense strand starting at position 3050 of SEQ ID NO: 1887945
gcaauuggauuugaacgaa

SEQ ID NO: 2499285 - RNA, 19 nt, Artificial Sequence
  Description of Artificial Sequence: Synthetic oligonucleotide
  Antisense strand to SEQ ID NO: 2499284
uucguucaaauccaauugc

SEQ ID NO: 2499286 - RNA, 19 nt, Artificial Sequence
  Description of Artificial Sequence: Synthetic oligonucleotide
  Sense strand starting at position 3100 of SEQ ID NO: 1887945
guuacaagaccuuguaacu

SEQ ID NO: 2499287 - RNA, 19 nt, Artificial Sequence
  Description of Artificial Sequence: Synthetic oligonucleotide
  Antisense strand to SEQ ID NO: 2499286
aguuacaaggucuuguaac

SEQ ID NO: 2499288 - RNA, 19 nt, Artificial Sequence
  Description of Artificial Sequence: Synthetic oligonucleotide
  Sense strand starting at position 3396 of SEQ ID NO: 1887945
uggccaaucaauuguagga

SEQ ID NO: 2499289 - RNA, 19 nt, Artificial Sequence
  Description of Artificial Sequence: Synthetic oligonucleotide
  Antisense strand to SEQ ID NO: 2499288
uccuacaauugauuggcca

SEQ ID NO: 2499290 - RNA, 19 nt, Artificial Sequence
  Description of Artificial Sequence: Synthetic oligonucleotide
  Sense strand starting at position 3400 of SEQ ID NO: 1887945
caaucaauuguaggauguu

SEQ ID NO: 2499291 - RNA, 19 nt, Artificial Sequence
  Description of Artificial Sequence: Synthetic oligonucleotide
  Antisense strand to SEQ ID NO: 2499290
aacauccuacaauugauug

SEQ ID NO: 2499292 - RNA, 19 nt, Artificial Sequence
  Description of Artificial Sequence: Synthetic oligonucleotide
  Sense strand starting at position 3403 of SEQ ID NO: 1887945
ucaauuguaggauguuaac

SEQ ID NO: 2499293 - RNA, 19 nt, Artificial Sequence
  Description of Artificial Sequence: Synthetic oligonucleotide
  Antisense strand to SEQ ID NO: 2499292
guuaacauccuacaauuga

SEQ ID NO: 2499294 - RNA, 19 nt, Artificial Sequence
  Description of Artificial Sequence: Synthetic oligonucleotide
  Sense strand starting at position 3445 of SEQ ID NO: 1887945
auaggauguuucuaccaca

SEQ ID NO: 2499295 - RNA, 19 nt, Artificial Sequence
  Description of Artificial Sequence: Synthetic oligonucleotide
  Antisense strand to SEQ ID NO: 2499294
ugugguagaaacauccuau

SEQ ID NO: 2499296 - RNA, 19 nt, Artificial Sequence
  Description of Artificial Sequence: Synthetic oligonucleotide
  Sense strand starting at position 3448 of SEQ ID NO: 1887945
ggauguuucuaccacaaau

SEQ ID NO: 2499297 - RNA, 19 nt, Artificial Sequence
  Description of Artificial Sequence: Synthetic oligonucleotide
  Antisense strand to SEQ ID NO: 2499296
auuugugguagaaacaucc

SEQ ID NO: 2499298 - RNA, 19 nt, Artificial Sequence
  Description of Artificial Sequence: Synthetic oligonucleotide
  Sense strand starting at position 3497 of SEQ ID NO: 1887945
ggaugagauuaggcagagu

SEQ ID NO: 2499299 - RNA, 19 nt, Artificial Sequence
  Description of Artificial Sequence: Synthetic oligonucleotide
  Antisense strand to SEQ ID NO: 2499298
acucugccuaaucucaucc

SEQ ID NO: 2499300 - RNA, 19 nt, Artificial Sequence
  Description of Artificial Sequence: Synthetic oligonucleotide
  Sense strand starting at position 3500 of SEQ ID NO: 1887945
ugagauuaggcagaguagu

SEQ ID NO: 2499301 - RNA, 19 nt, Artificial Sequence
  Description of Artificial Sequence: Synthetic oligonucleotide
  Antisense strand to SEQ ID NO: 2499300
acuacucugccuaaucuca

SEQ ID NO: 2499302 - RNA, 19 nt, Artificial Sequence
  Description of Artificial Sequence: Synthetic oligonucleotide
  Sense strand starting at position 3526 of SEQ ID NO: 1887945
ccaugcuagcucugcuaua

SEQ ID NO: 2499303 - RNA, 19 nt, Artificial Sequence
  Description of Artificial Sequence: Synthetic oligonucleotide
  Antisense strand to SEQ ID NO: 2499302
uauagcagagcuagcaugg

SEQ ID NO: 2499304 - RNA, 19 nt, Artificial Sequence
  Description of Artificial Sequence: Synthetic oligonucleotide
  Sense strand starting at position 3588 of SEQ ID NO: 1887945
cagcuuccuccggaguaga

SEQ ID NO: 2499305 - RNA, 19 nt, Artificial Sequence
  Description of Artificial Sequence: Synthetic oligonucleotide
  Antisense strand to SEQ ID NO: 2499304
ucuacuccggaggaagcug

SEQ ID NO: 2499306 - RNA, 19 nt, Artificial Sequence
  Description of Artificial Sequence: Synthetic oligonucleotide
  Sense strand starting at position 3591 of SEQ ID NO: 1887945
cuuccuccggaguagaaau

SEQ ID NO: 2499307 - RNA, 19 nt, Artificial Sequence
  Description of Artificial Sequence: Synthetic oligonucleotide
  Antisense strand to SEQ ID NO: 2499306
auuucuacuccggaggaag

SEQ ID NO: 2499308 - RNA, 19 nt, Artificial Sequence
  Description of Artificial Sequence: Synthetic oligonucleotide
  Sense strand starting at position 3910 of SEQ ID NO: 1887945
aguagaaauccucauuguu

SEQ ID NO: 2499309 - RNA, 19 nt, Artificial Sequence
  Description of Artificial Sequence: Synthetic oligonucleotide
  Antisense strand to SEQ ID NO: 2499308
aacaaugaggauuucuacu

SEQ ID NO: 2499310 - RNA, 19 nt, Artificial Sequence
  Description of Artificial Sequence: Synthetic oligonucleotide
  Sense strand starting at position 3959 of SEQ ID NO: 1887945
uguuacacaugcuuuguaa

SEQ ID NO: 2499311 - RNA, 19 nt, Artificial Sequence
  Description of Artificial Sequence: Synthetic oligonucleotide
  Antisense strand to SEQ ID NO: 2499310
uuacaaagcauguguaaca

SEQ ID NO: 2499312 - RNA, 19 nt, Artificial Sequence
  Description of Artificial Sequence: Synthetic oligonucleotide
  Sense strand starting at position 3968 of SEQ ID NO: 1887945
ugcuuuguaagcguuggua

SEQ ID NO: 2499313 - RNA, 19 nt, Artificial Sequence
  Description of Artificial Sequence: Synthetic oligonucleotide
  Antisense strand to SEQ ID NO: 2499312
uaccaacgcuuacaaagca

SEQ ID NO: 2499314 - RNA, 19 nt, Artificial Sequence
  Description of Artificial Sequence: Synthetic oligonucleotide
  Sense strand starting at position 3972 of SEQ ID NO: 1887945
uuguaagcguugguacaaa

SEQ ID NO: 2499315 - RNA, 19 nt, Artificial Sequence
  Description of Artificial Sequence: Synthetic oligonucleotide
  Antisense strand to SEQ ID NO: 2499314
uuuguaccaacgcuuacaa

SEQ ID NO: 2499316 - RNA, 19 nt, Artificial Sequence
  Description of Artificial Sequence: Synthetic oligonucleotide
  Sense strand starting at position 85 of SEQ ID NO: 1887946
cuggguaugacguauuacu

SEQ ID NO: 2499317 - RNA, 19 nt, Artificial Sequence
  Description of Artificial Sequence: Synthetic oligonucleotide
  Antisense strand to SEQ ID NO: 2499316
aguaauacgucauacccag

SEQ ID NO: 2499318 - RNA, 19 nt, Artificial Sequence
  Description of Artificial Sequence: Synthetic oligonucleotide
  Sense strand starting at position 111 of SEQ ID NO: 1887946
acugcuagacaucaguaaa

SEQ ID NO: 2499319 - RNA, 19 nt, Artificial Sequence
  Description of Artificial Sequence: Synthetic oligonucleotide
  Antisense strand to SEQ ID NO: 2499318
uuuacugaugucuagcagu

SEQ ID NO: 2499320 - RNA, 19 nt, Artificial Sequence
  Description of Artificial Sequence: Synthetic oligonucleotide
  Sense strand starting at position 153 of SEQ ID NO: 1887946
aagcuuugaccagggacau

SEQ ID NO: 2499321 - RNA, 19 nt, Artificial Sequence
  Description of Artificial Sequence: Synthetic oligonucleotide
  Antisense strand to SEQ ID NO: 2499320
augucccuggucaaagcuu

SEQ ID NO: 2499322 - RNA, 19 nt, Artificial Sequence
  Description of Artificial Sequence: Synthetic oligonucleotide
  Sense strand starting at position 154 of SEQ ID NO: 1887946
agcuuugaccagggacauu

SEQ ID NO: 2499323 - RNA, 19 nt, Artificial Sequence
  Description of Artificial Sequence: Synthetic oligonucleotide
  Antisense strand to SEQ ID NO: 2499322
aaugucccuggucaaagcu

SEQ ID NO: 2499324 - RNA, 19 nt, Artificial Sequence
  Description of Artificial Sequence: Synthetic oligonucleotide
  Sense strand starting at position 176 of SEQ ID NO: 1887946
ugaaauugcuaccuaguac

SEQ ID NO: 2499325 - RNA, 19 nt, Artificial Sequence
  Description of Artificial Sequence: Synthetic oligonucleotide
  Antisense strand to SEQ ID NO: 2499324
guacuagguagcaauuuca

SEQ ID NO: 2499326 - RNA, 19 nt, Artificial Sequence
  Description of Artificial Sequence: Synthetic oligonucleotide
  Sense strand starting at position 190 of SEQ ID NO: 1887946
aguacuaaaugcucuguau

SEQ ID NO: 2499327 - RNA, 19 nt, Artificial Sequence
  Description of Artificial Sequence: Synthetic oligonucleotide
  Antisense strand to SEQ ID NO: 2499326
auacagagcauuuaguacu

SEQ ID NO: 2499328 - RNA, 19 nt, Artificial Sequence
  Description of Artificial Sequence: Synthetic oligonucleotide
  Sense strand starting at position 193 of SEQ ID NO: 1887946
acuaaaugcucuguaucag

SEQ ID NO: 2499329 - RNA, 19 nt, Artificial Sequence
  Description of Artificial Sequence: Synthetic oligonucleotide
  Antisense strand to SEQ ID NO: 2499328
cugauacagagcauuuagu

SEQ ID NO: 2499330 - RNA, 19 nt, Artificial Sequence
  Description of Artificial Sequence: Synthetic oligonucleotide
  Sense strand starting at position 194 of SEQ ID NO: 1887946
cuaaaugcucuguaucagu

SEQ ID NO: 2499331 - RNA, 19 nt, Artificial Sequence
  Description of Artificial Sequence: Synthetic oligonucleotide
  Antisense strand to SEQ ID NO: 2499330
acugauacagagcauuuag

SEQ ID NO: 2499332 - RNA, 19 nt, Artificial Sequence
  Description of Artificial Sequence: Synthetic oligonucleotide
  Sense strand starting at position 221 of SEQ ID NO: 1887946
ugggauucagacuggcaga

SEQ ID NO: 2499333 - RNA, 19 nt, Artificial Sequence
  Description of Artificial Sequence: Synthetic oligonucleotide
  Antisense strand to SEQ ID NO: 2499332
ucugccagucugaauccca

SEQ ID NO: 2499334 - RNA, 19 nt, Artificial Sequence
  Description of Artificial Sequence: Synthetic oligonucleotide
  Sense strand starting at position 234 of SEQ ID NO: 1887946
ggcagaucuaauggguucu

SEQ ID NO: 2499335 - RNA, 19 nt, Artificial Sequence
  Description of Artificial Sequence: Synthetic oligonucleotide
  Antisense strand to SEQ ID NO: 2499334
agaacccauuagaucugcc

SEQ ID NO: 2499336 - RNA, 19 nt, Artificial Sequence
  Description of Artificial Sequence: Synthetic oligonucleotide
  Sense strand starting at position 240 of SEQ ID NO: 1887946
ucuaauggguucucuuagu

SEQ ID NO: 2499337 - RNA, 19 nt, Artificial Sequence
  Description of Artificial Sequence: Synthetic oligonucleotide
  Antisense strand to SEQ ID NO: 2499336
acuaagagaacccauuaga

SEQ ID NO: 2499338 - RNA, 19 nt, Artificial Sequence
  Description of Artificial Sequence: Synthetic oligonucleotide
  Sense strand starting at position 281 of SEQ ID NO: 1887946
uuauucuagugcuuaucau

SEQ ID NO: 2499339 - RNA, 19 nt, Artificial Sequence
  Description of Artificial Sequence: Synthetic oligonucleotide
  Antisense strand to SEQ ID NO: 2499338
augauaagcacuagaauaa

SEQ ID NO: 2499340 - RNA, 19 nt, Artificial Sequence
  Description of Artificial Sequence: Synthetic oligonucleotide
  Sense strand starting at position 393 of SEQ ID NO: 1887946
gcuuuacauuaacuaggaa

SEQ ID NO: 2499341 - RNA, 19 nt, Artificial Sequence
  Description of Artificial Sequence: Synthetic oligonucleotide
  Antisense strand to SEQ ID NO: 2499340
uuccuaguuaauguaaagc

SEQ ID NO: 2499342 - RNA, 19 nt, Artificial Sequence
  Description of Artificial Sequence: Synthetic oligonucleotide
  Sense strand starting at position 450 of SEQ ID NO: 1887946
uguaaacggugucuauaaa

SEQ ID NO: 2499343 - RNA, 19 nt, Artificial Sequence
  Description of Artificial Sequence: Synthetic oligonucleotide
  Antisense strand to SEQ ID NO: 2499342
uuuauagacaccguuuaca

SEQ ID NO: 2499344 - RNA, 19 nt, Artificial Sequence
  Description of Artificial Sequence: Synthetic oligonucleotide
  Sense strand starting at position 451 of SEQ ID NO: 1887946
guaaacggugucuauaaag

SEQ ID NO: 2499345 - RNA, 19 nt, Artificial Sequence
  Description of Artificial Sequence: Synthetic oligonucleotide
  Antisense strand to SEQ ID NO: 2499344
cuuuauagacaccguuuac

SEQ ID NO: 2499346 - RNA, 19 nt, Artificial Sequence
  Description of Artificial Sequence: Synthetic oligonucleotide
  Sense strand starting at position 457 of SEQ ID NO: 1887946
ggugucuauaaaggaucau

SEQ ID NO: 2499347 - RNA, 19 nt, Artificial Sequence
  Description of Artificial Sequence: Synthetic oligonucleotide
  Antisense strand to SEQ ID NO: 2499346
augauccuuuauagacacc

SEQ ID NO: 2499348 - RNA, 19 nt, Artificial Sequence
  Description of Artificial Sequence: Synthetic oligonucleotide
  Sense strand starting at position 1277 of SEQ ID NO: 1887946
aguuaagaguacucuguga

SEQ ID NO: 2499349 - RNA, 19 nt, Artificial Sequence
  Description of Artificial Sequence: Synthetic oligonucleotide
  Antisense strand to SEQ ID NO: 2499348
ucacagaguacucuuaacu

SEQ ID NO: 2499350 - RNA, 19 nt, Artificial Sequence
  Description of Artificial Sequence: Synthetic oligonucleotide
  Sense strand starting at position 1279 of SEQ ID NO: 1887946
uuaagaguacucugugagc

SEQ ID NO: 2499351 - RNA, 19 nt, Artificial Sequence
  Description of Artificial Sequence: Synthetic oligonucleotide
  Antisense strand to SEQ ID NO: 2499350
gcucacagaguacucuuaa

SEQ ID NO: 2499352 - RNA, 19 nt, Artificial Sequence
  Description of Artificial Sequence: Synthetic oligonucleotide
  Sense strand starting at position 1281 of SEQ ID NO: 1887946
aagaguacucugugagcaa

SEQ ID NO: 2499353 - RNA, 19 nt, Artificial Sequence
  Description of Artificial Sequence: Synthetic oligonucleotide
  Antisense strand to SEQ ID NO: 2499352
uugcucacagaguacucuu

SEQ ID NO: 2499354 - RNA, 19 nt, Artificial Sequence
  Description of Artificial Sequence: Synthetic oligonucleotide
  Sense strand starting at position 1583 of SEQ ID NO: 1887946
gacagcugggcauaucaua

SEQ ID NO: 2499355 - RNA, 19 nt, Artificial Sequence
  Description of Artificial Sequence: Synthetic oligonucleotide
  Antisense strand to SEQ ID NO: 2499354
uaugauaugcccagcuguc

SEQ ID NO: 2499356 - RNA, 19 nt, Artificial Sequence
  Description of Artificial Sequence: Synthetic oligonucleotide
  Sense strand starting at position 2126 of SEQ ID NO: 1887946
auaccuguugggugacaga

SEQ ID NO: 2499357 - RNA, 19 nt, Artificial Sequence
  Description of Artificial Sequence: Synthetic oligonucleotide
  Antisense strand to SEQ ID NO: 2499356
ucugucacccaacagguau

SEQ ID NO: 2499358 - RNA, 19 nt, Artificial Sequence
  Description of Artificial Sequence: Synthetic oligonucleotide
  Sense strand starting at position 2607 of SEQ ID NO: 1887946
uuacacuuguuucuguaga

SEQ ID NO: 2499359 - RNA, 19 nt, Artificial Sequence
  Description of Artificial Sequence: Synthetic oligonucleotide
  Antisense strand to SEQ ID NO: 2499358
ucuacagaaacaaguguaa

SEQ ID NO: 2499360 - RNA, 19 nt, Artificial Sequence
  Description of Artificial Sequence: Synthetic oligonucleotide
  Sense strand starting at position 2759 of SEQ ID NO: 1887946
caguacuugccagagcuaa

SEQ ID NO: 2499361 - RNA, 19 nt, Artificial Sequence
  Description of Artificial Sequence: Synthetic oligonucleotide
  Antisense strand to SEQ ID NO: 2499360
uuagcucuggcaaguacug

SEQ ID NO: 2499362 - RNA, 19 nt, Artificial Sequence
  Description of Artificial Sequence: Synthetic oligonucleotide
  Sense strand starting at position 2770 of SEQ ID NO: 1887946
agagcuaaguuccuguuua

SEQ ID NO: 2499363 - RNA, 19 nt, Artificial Sequence
  Description of Artificial Sequence: Synthetic oligonucleotide
  Antisense strand to SEQ ID NO: 2499362
uaaacaggaacuuagcucu

SEQ ID NO: 2499364 - RNA, 19 nt, Artificial Sequence
  Description of Artificial Sequence: Synthetic oligonucleotide
  Sense strand starting at position 2774 of SEQ ID NO: 1887946
cuaaguuccuguuuaaaug

SEQ ID NO: 2499365 - RNA, 19 nt, Artificial Sequence
  Description of Artificial Sequence: Synthetic oligonucleotide
  Antisense strand to SEQ ID NO: 2499364
cauuuaaacaggaacuuag

SEQ ID NO: 2499366 - RNA, 19 nt, Artificial Sequence
  Description of Artificial Sequence: Synthetic oligonucleotide
  Sense strand starting at position 3101 of SEQ ID NO: 1887946
cuuugauuguccucacaag

SEQ ID NO: 2499367 - RNA, 19 nt, Artificial Sequence
  Description of Artificial Sequence: Synthetic oligonucleotide
  Antisense strand to SEQ ID NO: 2499366
cuugugaggacaaucaaag

SEQ ID NO: 2499368 - RNA, 19 nt, Artificial Sequence
  Description of Artificial Sequence: Synthetic oligonucleotide
  Sense strand starting at position 3172 of SEQ ID NO: 1887946
ccaucagagcugggaacua

SEQ ID NO: 2499369 - RNA, 19 nt, Artificial Sequence
  Description of Artificial Sequence: Synthetic oligonucleotide
  Antisense strand to SEQ ID NO: 2499368
uaguucccagcucugaugg

SEQ ID NO: 2499370 - RNA, 19 nt, Artificial Sequence
  Description of Artificial Sequence: Synthetic oligonucleotide
  Sense strand starting at position 3286 of SEQ ID NO: 1887946
ccucauaucugaguucuuc

SEQ ID NO: 2499371 - RNA, 19 nt, Artificial Sequence
  Description of Artificial Sequence: Synthetic oligonucleotide
  Antisense strand to SEQ ID NO: 2499370
gaagaacucagauaugagg

SEQ ID NO: 2499372 - RNA, 19 nt, Artificial Sequence
  Description of Artificial Sequence: Synthetic oligonucleotide
  Sense strand starting at position 3290 of SEQ ID NO: 1887946
auaucugaguucuucuaug

SEQ ID NO: 2499373 - RNA, 19 nt, Artificial Sequence
  Description of Artificial Sequence: Synthetic oligonucleotide
  Antisense strand to SEQ ID NO: 2499372
cauagaagaacucagauau

SEQ ID NO: 2499374 - RNA, 19 nt, Artificial Sequence
  Description of Artificial Sequence: Synthetic oligonucleotide
  Sense strand starting at position 3295 of SEQ ID NO: 1887946
ugaguucuucuaugaguau

SEQ ID NO: 2499375 - RNA, 19 nt, Artificial Sequence
  Description of Artificial Sequence: Synthetic oligonucleotide
  Antisense strand to SEQ ID NO: 2499374
auacucauagaagaacuca

SEQ ID NO: 2499376 - RNA, 19 nt, Artificial Sequence
  Description of Artificial Sequence: Synthetic oligonucleotide
  Sense strand starting at position 3315 of SEQ ID NO: 1887946
uuaugcucagauuguauuu

SEQ ID NO: 2499377 - RNA, 19 nt, Artificial Sequence
  Description of Artificial Sequence: Synthetic oligonucleotide
  Antisense strand to SEQ ID NO: 2499376
aaauacaaucugagcauaa

SEQ ID NO: 2499378 - RNA, 19 nt, Artificial Sequence
  Description of Artificial Sequence: Synthetic oligonucleotide
  Sense strand starting at position 3340 of SEQ ID NO: 1887946
gcaauuggauuugaacgaa

SEQ ID NO: 2499379 - RNA, 19 nt, Artificial Sequence
  Description of Artificial Sequence: Synthetic oligonucleotide
  Antisense strand to SEQ ID NO: 2499378
uucguucaaauccaauugc

SEQ ID NO: 2499380 - RNA, 19 nt, Artificial Sequence
  Description of Artificial Sequence: Synthetic oligonucleotide
  Sense strand starting at position 3390 of SEQ ID NO: 1887946
guuacaagaccuuguaacu

SEQ ID NO: 2499381 - RNA, 19 nt, Artificial Sequence
  Description of Artificial Sequence: Synthetic oligonucleotide
  Antisense strand to SEQ ID NO: 2499380
aguuacaaggucuuguaac

SEQ ID NO: 2499382 - RNA, 19 nt, Artificial Sequence
  Description of Artificial Sequence: Synthetic oligonucleotide
  Sense strand starting at position 3686 of SEQ ID NO: 1887946
uggccaaucaauuguagga

SEQ ID NO: 2499383 - RNA, 19 nt, Artificial Sequence
  Description of Artificial Sequence: Synthetic oligonucleotide
  Antisense strand to SEQ ID NO: 2499382
uccuacaauugauuggcca

SEQ ID NO: 2499384 - RNA, 19 nt, Artificial Sequence
  Description of Artificial Sequence: Synthetic oligonucleotide
  Sense strand starting at position 3690 of SEQ ID NO: 1887946
caaucaauuguaggauguu

SEQ ID NO: 2499385 - RNA, 19 nt, Artificial Sequence
  Description of Artificial Sequence: Synthetic oligonucleotide
  Antisense strand to SEQ ID NO: 2499384
aacauccuacaauugauug

SEQ ID NO: 2499386 - RNA, 19 nt, Artificial Sequence
  Description of Artificial Sequence: Synthetic oligonucleotide
  Sense strand starting at position 3693 of SEQ ID NO: 1887946
ucaauuguaggauguuaac

SEQ ID NO: 2499387 - RNA, 19 nt, Artificial Sequence
  Description of Artificial Sequence: Synthetic oligonucleotide
  Antisense strand to SEQ ID NO: 2499386
guuaacauccuacaauuga

SEQ ID NO: 2499388 - RNA, 19 nt, Artificial Sequence
  Description of Artificial Sequence: Synthetic oligonucleotide
  Sense strand starting at position 3787 of SEQ ID NO: 1887946
ggaugagauuaggcagagu

SEQ ID NO: 2499389 - RNA, 19 nt, Artificial Sequence
  Description of Artificial Sequence: Synthetic oligonucleotide
  Antisense strand to SEQ ID NO: 2499388
acucugccuaaucucaucc

SEQ ID NO: 2499390 - RNA, 19 nt, Artificial Sequence
  Description of Artificial Sequence: Synthetic oligonucleotide
  Sense strand starting at position 3790 of SEQ ID NO: 1887946
ugagauuaggcagaguagu

SEQ ID NO: 2499391 - RNA, 19 nt, Artificial Sequence
  Description of Artificial Sequence: Synthetic oligonucleotide
  Antisense strand to SEQ ID NO: 2499390
acuacucugccuaaucuca

SEQ ID NO: 2499392 - RNA, 19 nt, Artificial Sequence
  Description of Artificial Sequence: Synthetic oligonucleotide
  Sense strand starting at position 3878 of SEQ ID NO: 1887946
cagcuuccuccggaguaga

SEQ ID NO: 2499393 - RNA, 19 nt, Artificial Sequence
  Description of Artificial Sequence: Synthetic oligonucleotide
  Antisense strand to SEQ ID NO: 2499392
ucuacuccggaggaagcug

SEQ ID NO: 2499394 - RNA, 19 nt, Artificial Sequence
  Description of Artificial Sequence: Synthetic oligonucleotide
  Sense strand starting at position 3881 of SEQ ID NO: 1887946
cuuccuccggaguagaaau

SEQ ID NO: 2499395 - RNA, 19 nt, Artificial Sequence
  Description of Artificial Sequence: Synthetic oligonucleotide
  Antisense strand to SEQ ID NO: 2499394
auuucuacuccggaggaag

SEQ ID NO: 2499396 - RNA, 19 nt, Artificial Sequence
  Description of Artificial Sequence: Synthetic oligonucleotide
  Sense strand starting at position 7 of SEQ ID NO: 1887947
gcuucucugguggaugaga

SEQ ID NO: 2499397 - RNA, 19 nt, Artificial Sequence
  Description of Artificial Sequence: Synthetic oligonucleotide
  Antisense strand to SEQ ID NO: 2499396
ucucauccaccagagaagc

SEQ ID NO: 2499398 - RNA, 19 nt, Artificial Sequence
  Description of Artificial Sequence: Synthetic oligonucleotide
  Sense strand starting at position 9 of SEQ ID NO: 1887947
uucucugguggaugagaau

SEQ ID NO: 2499399 - RNA, 19 nt, Artificial Sequence
  Description of Artificial Sequence: Synthetic oligonucleotide
  Antisense strand to SEQ ID NO: 2499398
auucucauccaccagagaa

SEQ ID NO: 2499400 - RNA, 19 nt, Artificial Sequence
  Description of Artificial Sequence: Synthetic oligonucleotide
  Sense strand starting at position 253 of SEQ ID NO: 1887947
uccugaaucuuggcaucca

SEQ ID NO: 2499401 - RNA, 19 nt, Artificial Sequence
  Description of Artificial Sequence: Synthetic oligonucleotide
  Antisense strand to SEQ ID NO: 2499400
uggaugccaagauucagga

SEQ ID NO: 2499402 - RNA, 19 nt, Artificial Sequence
  Description of Artificial Sequence: Synthetic oligonucleotide
  Sense strand starting at position 353 of SEQ ID NO: 1887947
cuggguaugacguauuacu

SEQ ID NO: 2499403 - RNA, 19 nt, Artificial Sequence
  Description of Artificial Sequence: Synthetic oligonucleotide
  Antisense strand to SEQ ID NO: 2499402
aguaauacgucauacccag

SEQ ID NO: 2499404 - RNA, 19 nt, Artificial Sequence
  Description of Artificial Sequence: Synthetic oligonucleotide
  Sense strand starting at position 379 of SEQ ID NO: 1887947
acugcuagacaucaguaaa

SEQ ID NO: 2499405 - RNA, 19 nt, Artificial Sequence
  Description of Artificial Sequence: Synthetic oligonucleotide
  Antisense strand to SEQ ID NO: 2499404
uuuacugaugucuagcagu

SEQ ID NO: 2499406 - RNA, 19 nt, Artificial Sequence
  Description of Artificial Sequence: Synthetic oligonucleotide
  Sense strand starting at position 421 of SEQ ID NO: 1887947
aagcuuugaccagggacau

SEQ ID NO: 2499407 - RNA, 19 nt, Artificial Sequence
  Description of Artificial Sequence: Synthetic oligonucleotide
  Antisense strand to SEQ ID NO: 2499406
augucccuggucaaagcuu

SEQ ID NO: 2499408 - RNA, 19 nt, Artificial Sequence
  Description of Artificial Sequence: Synthetic oligonucleotide
  Sense strand starting at position 422 of SEQ ID NO: 1887947
agcuuugaccagggacauu

SEQ ID NO: 2499409 - RNA, 19 nt, Artificial Sequence
  Description of Artificial Sequence: Synthetic oligonucleotide
  Antisense strand to SEQ ID NO: 2499408
aaugucccuggucaaagcu

SEQ ID NO: 2499410 - RNA, 19 nt, Artificial Sequence
  Description of Artificial Sequence: Synthetic oligonucleotide
  Sense strand starting at position 444 of SEQ ID NO: 1887947
ugaaauugcuaccuaguac

SEQ ID NO: 2499411 - RNA, 19 nt, Artificial Sequence
  Description of Artificial Sequence: Synthetic oligonucleotide
  Antisense strand to SEQ ID NO: 2499410
guacuagguagcaauuuca

SEQ ID NO: 2499412 - RNA, 19 nt, Artificial Sequence
  Description of Artificial Sequence: Synthetic oligonucleotide
  Sense strand starting at position 458 of SEQ ID NO: 1887947
aguacuaaaugcucuguau

SEQ ID NO: 2499413 - RNA, 19 nt, Artificial Sequence
  Description of Artificial Sequence: Synthetic oligonucleotide
  Antisense strand to SEQ ID NO: 2499412
auacagagcauuuaguacu

SEQ ID NO: 2499414 - RNA, 19 nt, Artificial Sequence
  Description of Artificial Sequence: Synthetic oligonucleotide
  Sense strand starting at position 461 of SEQ ID NO: 1887947
acuaaaugcucuguaucag

SEQ ID NO: 2499415 - RNA, 19 nt, Artificial Sequence
  Description of Artificial Sequence: Synthetic oligonucleotide
  Antisense strand to SEQ ID NO: 2499414
cugauacagagcauuuagu

SEQ ID NO: 2499416 - RNA, 19 nt, Artificial Sequence
  Description of Artificial Sequence: Synthetic oligonucleotide
  Sense strand starting at position 462 of SEQ ID NO: 1887947
cuaaaugcucuguaucagu

SEQ ID NO: 2499417 - RNA, 19 nt, Artificial Sequence
  Description of Artificial Sequence: Synthetic oligonucleotide
  Antisense strand to SEQ ID NO: 2499416
acugauacagagcauuuag

SEQ ID NO: 2499418 - RNA, 19 nt, Artificial Sequence
  Description of Artificial Sequence: Synthetic oligonucleotide
  Sense strand starting at position 489 of SEQ ID NO: 1887947
ugggauucagacuggcaga

SEQ ID NO: 2499419 - RNA, 19 nt, Artificial Sequence
  Description of Artificial Sequence: Synthetic oligonucleotide
  Antisense strand to SEQ ID NO: 2499418
ucugccagucugaauccca

SEQ ID NO: 2499420 - RNA, 19 nt, Artificial Sequence
  Description of Artificial Sequence: Synthetic oligonucleotide
  Sense strand starting at position 502 of SEQ ID NO: 1887947
ggcagaucuaauggguucu

SEQ ID NO: 2499421 - RNA, 19 nt, Artificial Sequence
  Description of Artificial Sequence: Synthetic oligonucleotide
  Antisense strand to SEQ ID NO: 2499420
agaacccauuagaucugcc

SEQ ID NO: 2499422 - RNA, 19 nt, Artificial Sequence
  Description of Artificial Sequence: Synthetic oligonucleotide
  Sense strand starting at position 508 of SEQ ID NO: 1887947
ucuaauggguucucuuagu

SEQ ID NO: 2499423 - RNA, 19 nt, Artificial Sequence
  Description of Artificial Sequence: Synthetic oligonucleotide
  Antisense strand to SEQ ID NO: 2499422
acuaagagaacccauuaga

SEQ ID NO: 2499424 - RNA, 19 nt, Artificial Sequence
  Description of Artificial Sequence: Synthetic oligonucleotide
  Sense strand starting at position 549 of SEQ ID NO: 1887947
uuauucuagugcuuaucau

SEQ ID NO: 2499425 - RNA, 19 nt, Artificial Sequence
  Description of Artificial Sequence: Synthetic oligonucleotide
  Antisense strand to SEQ ID NO: 2499424
augauaagcacuagaauaa

SEQ ID NO: 2499426 - RNA, 19 nt, Artificial Sequence
  Description of Artificial Sequence: Synthetic oligonucleotide
  Sense strand starting at position 661 of SEQ ID NO: 1887947
gcuuuacauuaacuaggaa

SEQ ID NO: 2499427 - RNA, 19 nt, Artificial Sequence
  Description of Artificial Sequence: Synthetic oligonucleotide
  Antisense strand to SEQ ID NO: 2499426
uuccuaguuaauguaaagc

SEQ ID NO: 2499428 - RNA, 19 nt, Artificial Sequence
  Description of Artificial Sequence: Synthetic oligonucleotide
  Sense strand starting at position 706 of SEQ ID NO: 1887947
augucuuugguuuguaaac

SEQ ID NO: 2499429 - RNA, 19 nt, Artificial Sequence
  Description of Artificial Sequence: Synthetic oligonucleotide
  Antisense strand to SEQ ID NO: 2499428
guuuacaaaccaaagacau

SEQ ID NO: 2499430 - RNA, 19 nt, Artificial Sequence
  Description of Artificial Sequence: Synthetic oligonucleotide
  Sense strand starting at position 718 of SEQ ID NO: 1887947
uguaaacggugucuauaaa

SEQ ID NO: 2499431 - RNA, 19 nt, Artificial Sequence
  Description of Artificial Sequence: Synthetic oligonucleotide
  Antisense strand to SEQ ID NO: 2499430
uuuauagacaccguuuaca

SEQ ID NO: 2499432 - RNA, 19 nt, Artificial Sequence
  Description of Artificial Sequence: Synthetic oligonucleotide
  Sense strand starting at position 719 of SEQ ID NO: 1887947
guaaacggugucuauaaag

SEQ ID NO: 2499433 - RNA, 19 nt, Artificial Sequence
  Description of Artificial Sequence: Synthetic oligonucleotide
  Antisense strand to SEQ ID NO: 2499432
cuuuauagacaccguuuac

SEQ ID NO: 2499434 - RNA, 19 nt, Artificial Sequence
  Description of Artificial Sequence: Synthetic oligonucleotide
  Sense strand starting at position 725 of SEQ ID NO: 1887947
ggugucuauaaaggaucau

SEQ ID NO: 2499435 - RNA, 19 nt, Artificial Sequence
  Description of Artificial Sequence: Synthetic oligonucleotide
  Antisense strand to SEQ ID NO: 2499434
augauccuuuauagacacc

SEQ ID NO: 2499436 - RNA, 19 nt, Artificial Sequence
  Description of Artificial Sequence: Synthetic oligonucleotide
  Sense strand starting at position 1545 of SEQ ID NO: 1887947
aguuaagaguacucuguga

SEQ ID NO: 2499437 - RNA, 19 nt, Artificial Sequence
  Description of Artificial Sequence: Synthetic oligonucleotide
  Antisense strand to SEQ ID NO: 2499436
ucacagaguacucuuaacu

SEQ ID NO: 2499438 - RNA, 19 nt, Artificial Sequence
  Description of Artificial Sequence: Synthetic oligonucleotide
  Sense strand starting at position 1547 of SEQ ID NO: 1887947
uuaagaguacucugugagc

SEQ ID NO: 2499439 - RNA, 19 nt, Artificial Sequence
  Description of Artificial Sequence: Synthetic oligonucleotide
  Antisense strand to SEQ ID NO: 2499438
gcucacagaguacucuuaa

SEQ ID NO: 2499440 - RNA, 19 nt, Artificial Sequence
  Description of Artificial Sequence: Synthetic oligonucleotide
  Sense strand starting at position 1549 of SEQ ID NO: 1887947
aagaguacucugugagcaa

SEQ ID NO: 2499441 - RNA, 19 nt, Artificial Sequence
  Description of Artificial Sequence: Synthetic oligonucleotide
  Antisense strand to SEQ ID NO: 2499440
uugcucacagaguacucuu

SEQ ID NO: 2499442 - RNA, 19 nt, Artificial Sequence
  Description of Artificial Sequence: Synthetic oligonucleotide
  Sense strand starting at position 1851 of SEQ ID NO: 1887947
gacagcugggcauaucaua

SEQ ID NO: 2499443 - RNA, 19 nt, Artificial Sequence
  Description of Artificial Sequence: Synthetic oligonucleotide
  Antisense strand to SEQ ID NO: 2499442
uaugauaugcccagcuguc

SEQ ID NO: 2499444 - RNA, 19 nt, Artificial Sequence
  Description of Artificial Sequence: Synthetic oligonucleotide
  Sense strand starting at position 2394 of SEQ ID NO: 1887947
auaccuguugggugacaga

SEQ ID NO: 2499445 - RNA, 19 nt, Artificial Sequence
  Description of Artificial Sequence: Synthetic oligonucleotide
  Antisense strand to SEQ ID NO: 2499444
ucugucacccaacagguau

SEQ ID NO: 2499446 - RNA, 19 nt, Artificial Sequence
  Description of Artificial Sequence: Synthetic oligonucleotide
  Sense strand starting at position 2875 of SEQ ID NO: 1887947
uuacacuuguuucuguaga

SEQ ID NO: 2499447 - RNA, 19 nt, Artificial Sequence
  Description of Artificial Sequence: Synthetic oligonucleotide
  Antisense strand to SEQ ID NO: 2499446
ucuacagaaacaaguguaa

SEQ ID NO: 2499448 - RNA, 19 nt, Artificial Sequence
  Description of Artificial Sequence: Synthetic oligonucleotide
  Sense strand starting at position 3027 of SEQ ID NO: 1887947
caguacuugccagagcuaa

SEQ ID NO: 2499449 - RNA, 19 nt, Artificial Sequence
  Description of Artificial Sequence: Synthetic oligonucleotide
  Antisense strand to SEQ ID NO: 2499448
uuagcucuggcaaguacug

SEQ ID NO: 2499450 - RNA, 19 nt, Artificial Sequence
  Description of Artificial Sequence: Synthetic oligonucleotide
  Sense strand starting at position 3038 of SEQ ID NO: 1887947
agagcuaaguuccuguuua

SEQ ID NO: 2499451 - RNA, 19 nt, Artificial Sequence
  Description of Artificial Sequence: Synthetic oligonucleotide
  Antisense strand to SEQ ID NO: 2499450
uaaacaggaacuuagcucu

SEQ ID NO: 2499452 - RNA, 19 nt, Artificial Sequence
  Description of Artificial Sequence: Synthetic oligonucleotide
  Sense strand starting at position 3042 of SEQ ID NO: 1887947
cuaaguuccuguuuaaaug

SEQ ID NO: 2499453 - RNA, 19 nt, Artificial Sequence
  Description of Artificial Sequence: Synthetic oligonucleotide
  Antisense strand to SEQ ID NO: 2499452
cauuuaaacaggaacuuag

SEQ ID NO: 2499454 - RNA, 19 nt, Artificial Sequence
  Description of Artificial Sequence: Synthetic oligonucleotide
  Sense strand starting at position 3369 of SEQ ID NO: 1887947
cuuugauuguccucacaag

SEQ ID NO: 2499455 - RNA, 19 nt, Artificial Sequence
  Description of Artificial Sequence: Synthetic oligonucleotide
  Antisense strand to SEQ ID NO: 2499454
cuugugaggacaaucaaag

SEQ ID NO: 2499456 - RNA, 19 nt, Artificial Sequence
  Description of Artificial Sequence: Synthetic oligonucleotide
  Sense strand starting at position 3440 of SEQ ID NO: 1887947
ccaucagagcugggaacua

SEQ ID NO: 2499457 - RNA, 19 nt, Artificial Sequence
  Description of Artificial Sequence: Synthetic oligonucleotide
  Antisense strand to SEQ ID NO: 2499456
uaguucccagcucugaugg

SEQ ID NO: 2499458 - RNA, 19 nt, Artificial Sequence
  Description of Artificial Sequence: Synthetic oligonucleotide
  Sense strand starting at position 3554 of SEQ ID NO: 1887947
ccucauaucugaguucuuc

SEQ ID NO: 2499459 - RNA, 19 nt, Artificial Sequence
  Description of Artificial Sequence: Synthetic oligonucleotide
  Antisense strand to SEQ ID NO: 2499458
gaagaacucagauaugagg

SEQ ID NO: 2499460 - RNA, 19 nt, Artificial Sequence
  Description of Artificial Sequence: Synthetic oligonucleotide
  Sense strand starting at position 3558 of SEQ ID NO: 1887947
auaucugaguucuucuaug

SEQ ID NO: 2499461 - RNA, 19 nt, Artificial Sequence
  Description of Artificial Sequence: Synthetic oligonucleotide
  Antisense strand to SEQ ID NO: 2499460
cauagaagaacucagauau

SEQ ID NO: 2499462 - RNA, 19 nt, Artificial Sequence
  Description of Artificial Sequence: Synthetic oligonucleotide
  Sense strand starting at position 3563 of SEQ ID NO: 1887947
ugaguucuucuaugaguau

SEQ ID NO: 2499463 - RNA, 19 nt, Artificial Sequence
  Description of Artificial Sequence: Synthetic oligonucleotide
  Antisense strand to SEQ ID NO: 2499462
auacucauagaagaacuca

SEQ ID NO: 2499464 - RNA, 19 nt, Artificial Sequence
  Description of Artificial Sequence: Synthetic oligonucleotide
  Sense strand starting at position 3583 of SEQ ID NO: 1887947
uuaugcucagauuguauuu

SEQ ID NO: 2499465 - RNA, 19 nt, Artificial Sequence
  Description of Artificial Sequence: Synthetic oligonucleotide
  Antisense strand to SEQ ID NO: 2499464
aaauacaaucugagcauaa

SEQ ID NO: 2499466 - RNA, 19 nt, Artificial Sequence
  Description of Artificial Sequence: Synthetic oligonucleotide
  Sense strand starting at position 3608 of SEQ ID NO: 1887947
gcaauuggauuugaacgaa

SEQ ID NO: 2499467 - RNA, 19 nt, Artificial Sequence
  Description of Artificial Sequence: Synthetic oligonucleotide
  Antisense strand to SEQ ID NO: 2499466
uucguucaaauccaauugc

SEQ ID NO: 2499468 - RNA, 19 nt, Artificial Sequence
  Description of Artificial Sequence: Synthetic oligonucleotide
  Sense strand starting at position 3658 of SEQ ID NO: 1887947
guuacaagaccuuguaacu

SEQ ID NO: 2499469 - RNA, 19 nt, Artificial Sequence
  Description of Artificial Sequence: Synthetic oligonucleotide
  Antisense strand to SEQ ID NO: 2499468
aguuacaaggucuuguaac

SEQ ID NO: 2499470 - RNA, 19 nt, Artificial Sequence
  Description of Artificial Sequence: Synthetic oligonucleotide
  Sense strand starting at position 3954 of SEQ ID NO: 1887947
uggccaaucaauuguagga

SEQ ID NO: 2499471 - RNA, 19 nt, Artificial Sequence
  Description of Artificial Sequence: Synthetic oligonucleotide
  Antisense strand to SEQ ID NO: 2499470
uccuacaauugauuggcca

SEQ ID NO: 2499472 - RNA, 19 nt, Artificial Sequence
  Description of Artificial Sequence: Synthetic oligonucleotide
  Sense strand starting at position 3958 of SEQ ID NO: 1887947
caaucaauuguaggauguu

SEQ ID NO: 2499473 - RNA, 19 nt, Artificial Sequence
  Description of Artificial Sequence: Synthetic oligonucleotide
  Antisense strand to SEQ ID NO: 2499472
aacauccuacaauugauug

SEQ ID NO: 2499474 - RNA, 19 nt, Artificial Sequence
  Description of Artificial Sequence: Synthetic oligonucleotide
  Sense strand starting at position 3961 of SEQ ID NO: 1887947
ucaauuguaggauguuaac

SEQ ID NO: 2499475 - RNA, 19 nt, Artificial Sequence
  Description of Artificial Sequence: Synthetic oligonucleotide
  Antisense strand to SEQ ID NO: 2499474
guuaacauccuacaauuga

SEQ ID NO: 2499476 - RNA, 19 nt, Artificial Sequence
  Description of Artificial Sequence: Synthetic oligonucleotide
  Sense strand starting at position 355 of SEQ ID NO: 1887948
ccuccuuucguacaaguuu

SEQ ID NO: 2499477 - RNA, 19 nt, Artificial Sequence
  Description of Artificial Sequence: Synthetic oligonucleotide
  Antisense strand to SEQ ID NO: 2499476
aaacuuguacgaaaggagg

SEQ ID NO: 2499478 - RNA, 19 nt, Artificial Sequence
  Description of Artificial Sequence: Synthetic oligonucleotide
  Sense strand starting at position 549 of SEQ ID NO: 1887948
gucccuuaucgcucagcau

SEQ ID NO: 2499479 - RNA, 19 nt, Artificial Sequence
  Description of Artificial Sequence: Synthetic oligonucleotide
  Antisense strand to SEQ ID NO: 2499478
augcugagcgauaagggac

SEQ ID NO: 2499480 - RNA, 19 nt, Artificial Sequence
  Description of Artificial Sequence: Synthetic oligonucleotide
  Sense strand starting at position 671 of SEQ ID NO: 1887948
ugguuauacuuggcuguca

SEQ ID NO: 2499481 - RNA, 19 nt, Artificial Sequence
  Description of Artificial Sequence: Synthetic oligonucleotide
  Antisense strand to SEQ ID NO: 2499480
ugacagccaaguauaacca

SEQ ID NO: 2499482 - RNA, 19 nt, Artificial Sequence
  Description of Artificial Sequence: Synthetic oligonucleotide
  Sense strand starting at position 672 of SEQ ID NO: 1887948
gguuauacuuggcugucau

SEQ ID NO: 2499483 - RNA, 19 nt, Artificial Sequence
  Description of Artificial Sequence: Synthetic oligonucleotide
  Antisense strand to SEQ ID NO: 2499482
augacagccaaguauaacc

SEQ ID NO: 2499484 - RNA, 19 nt, Artificial Sequence
  Description of Artificial Sequence: Synthetic oligonucleotide
  Sense strand starting at position 673 of SEQ ID NO: 1887948
guuauacuuggcugucauc

SEQ ID NO: 2499485 - RNA, 19 nt, Artificial Sequence
  Description of Artificial Sequence: Synthetic oligonucleotide
  Antisense strand to SEQ ID NO: 2499484
gaugacagccaaguauaac

SEQ ID NO: 2499486 - RNA, 19 nt, Artificial Sequence
  Description of Artificial Sequence: Synthetic oligonucleotide
  Sense strand starting at position 786 of SEQ ID NO: 1887948
cgugauaagcucuaacuaa

SEQ ID NO: 2499487 - RNA, 19 nt, Artificial Sequence
  Description of Artificial Sequence: Synthetic oligonucleotide
  Antisense strand to SEQ ID NO: 2499486
uuaguuagagcuuaucacg

SEQ ID NO: 2499488 - RNA, 19 nt, Artificial Sequence
  Description of Artificial Sequence: Synthetic oligonucleotide
  Sense strand starting at position 835 of SEQ ID NO: 1887948
uuccaacauuucugagguu

SEQ ID NO: 2499489 - RNA, 19 nt, Artificial Sequence
  Description of Artificial Sequence: Synthetic oligonucleotide
  Antisense strand to SEQ ID NO: 2499488
aaccucagaaauguuggaa

SEQ ID NO: 2499490 - RNA, 19 nt, Artificial Sequence
  Description of Artificial Sequence: Synthetic oligonucleotide
  Sense strand starting at position 851 of SEQ ID NO: 1887948
guucccaucugguaugaca

SEQ ID NO: 2499491 - RNA, 19 nt, Artificial Sequence
  Description of Artificial Sequence: Synthetic oligonucleotide
  Antisense strand to SEQ ID NO: 2499490
ugucauaccagaugggaac

SEQ ID NO: 2499492 - RNA, 19 nt, Artificial Sequence
  Description of Artificial Sequence: Synthetic oligonucleotide
  Sense strand starting at position 1237 of SEQ ID NO: 1887948
cacggugccuggcuagaau

SEQ ID NO: 2499493 - RNA, 19 nt, Artificial Sequence
  Description of Artificial Sequence: Synthetic oligonucleotide
  Antisense strand to SEQ ID NO: 2499492
auucuagccaggcaccgug

SEQ ID NO: 2499494 - RNA, 19 nt, Artificial Sequence
  Description of Artificial Sequence: Synthetic oligonucleotide
  Sense strand starting at position 1246 of SEQ ID NO: 1887948
uggcuagaaucugaaacuu

SEQ ID NO: 2499495 - RNA, 19 nt, Artificial Sequence
  Description of Artificial Sequence: Synthetic oligonucleotide
  Antisense strand to SEQ ID NO: 2499494
aaguuucagauucuagcca

SEQ ID NO: 2499496 - RNA, 19 nt, Artificial Sequence
  Description of Artificial Sequence: Synthetic oligonucleotide
  Sense strand starting at position 1404 of SEQ ID NO: 1887948
uguuuagaccuaugucaca

SEQ ID NO: 2499497 - RNA, 19 nt, Artificial Sequence
  Description of Artificial Sequence: Synthetic oligonucleotide
  Antisense strand to SEQ ID NO: 2499496
ugugacauaggucuaaaca

SEQ ID NO: 2499498 - RNA, 19 nt, Artificial Sequence
  Description of Artificial Sequence: Synthetic oligonucleotide
  Sense strand starting at position 1434 of SEQ ID NO: 1887948
ucucacuauguaugcgaga

SEQ ID NO: 2499499 - RNA, 19 nt, Artificial Sequence
  Description of Artificial Sequence: Synthetic oligonucleotide
  Antisense strand to SEQ ID NO: 2499498
ucucgcauacauagugaga

SEQ ID NO: 2499500 - RNA, 19 nt, Artificial Sequence
  Description of Artificial Sequence: Synthetic oligonucleotide
  Sense strand starting at position 1435 of SEQ ID NO: 1887948
cucacuauguaugcgagaa

SEQ ID NO: 2499501 - RNA, 19 nt, Artificial Sequence
  Description of Artificial Sequence: Synthetic oligonucleotide
  Antisense strand to SEQ ID NO: 2499500
uucucgcauacauagugag

SEQ ID NO: 2499502 - RNA, 19 nt, Artificial Sequence
  Description of Artificial Sequence: Synthetic oligonucleotide
  Sense strand starting at position 1436 of SEQ ID NO: 1887948
ucacuauguaugcgagaac

SEQ ID NO: 2499503 - RNA, 19 nt, Artificial Sequence
  Description of Artificial Sequence: Synthetic oligonucleotide
  Antisense strand to SEQ ID NO: 2499502
guucucgcauacauaguga

SEQ ID NO: 2499504 - RNA, 19 nt, Artificial Sequence
  Description of Artificial Sequence: Synthetic oligonucleotide
  Sense strand starting at position 1437 of SEQ ID NO: 1887948
cacuauguaugcgagaaca

SEQ ID NO: 2499505 - RNA, 19 nt, Artificial Sequence
  Description of Artificial Sequence: Synthetic oligonucleotide
  Antisense strand to SEQ ID NO: 2499504
uguucucgcauacauagug

SEQ ID NO: 2499506 - RNA, 19 nt, Artificial Sequence
  Description of Artificial Sequence: Synthetic oligonucleotide
  Sense strand starting at position 1439 of SEQ ID NO: 1887948
cuauguaugcgagaacauu

SEQ ID NO: 2499507 - RNA, 19 nt, Artificial Sequence
  Description of Artificial Sequence: Synthetic oligonucleotide
  Antisense strand to SEQ ID NO: 2499506
aauguucucgcauacauag

SEQ ID NO: 2499508 - RNA, 19 nt, Artificial Sequence
  Description of Artificial Sequence: Synthetic oligonucleotide
  Sense strand starting at position 1500 of SEQ ID NO: 1887948
uguagaacgcuuugauucu

SEQ ID NO: 2499509 - RNA, 19 nt, Artificial Sequence
  Description of Artificial Sequence: Synthetic oligonucleotide
  Antisense strand to SEQ ID NO: 2499508
agaaucaaagcguucuaca

SEQ ID NO: 2499510 - RNA, 19 nt, Artificial Sequence
  Description of Artificial Sequence: Synthetic oligonucleotide
  Sense strand starting at position 1507 of SEQ ID NO: 1887948
cgcuuugauucugaagaac

SEQ ID NO: 2499511 - RNA, 19 nt, Artificial Sequence
  Description of Artificial Sequence: Synthetic oligonucleotide
  Antisense strand to SEQ ID NO: 2499510
guucuucagaaucaaagcg

SEQ ID NO: 2499512 - RNA, 19 nt, Artificial Sequence
  Description of Artificial Sequence: Synthetic oligonucleotide
  Sense strand starting at position 1589 of SEQ ID NO: 1887948
cucaguuggccuuaaauug

SEQ ID NO: 2499513 - RNA, 19 nt, Artificial Sequence
  Description of Artificial Sequence: Synthetic oligonucleotide
  Antisense strand to SEQ ID NO: 2499512
caauuuaaggccaacugag

SEQ ID NO: 2499514 - RNA, 19 nt, Artificial Sequence
  Description of Artificial Sequence: Synthetic oligonucleotide
  Sense strand starting at position 1596 of SEQ ID NO: 1887948
ggccuuaaauugguccgau

SEQ ID NO: 2499515 - RNA, 19 nt, Artificial Sequence
  Description of Artificial Sequence: Synthetic oligonucleotide
  Antisense strand to SEQ ID NO: 2499514
aucggaccaauuuaaggcc

SEQ ID NO: 2499516 - RNA, 19 nt, Artificial Sequence
  Description of Artificial Sequence: Synthetic oligonucleotide
  Sense strand starting at position 1597 of SEQ ID NO: 1887948
gccuuaaauugguccgauc

SEQ ID NO: 2499517 - RNA, 19 nt, Artificial Sequence
  Description of Artificial Sequence: Synthetic oligonucleotide
  Antisense strand to SEQ ID NO: 2499516
gaucggaccaauuuaaggc

SEQ ID NO: 2499518 - RNA, 19 nt, Artificial Sequence
  Description of Artificial Sequence: Synthetic oligonucleotide
  Sense strand starting at position 2516 of SEQ ID NO: 1887948
gcacgcucagucuacagau

SEQ ID NO: 2499519 - RNA, 19 nt, Artificial Sequence
  Description of Artificial Sequence: Synthetic oligonucleotide
  Antisense strand to SEQ ID NO: 2499518
aucuguagacugagcgugc

SEQ ID NO: 2499520 - RNA, 19 nt, Artificial Sequence
  Description of Artificial Sequence: Synthetic oligonucleotide
  Sense strand starting at position 2518 of SEQ ID NO: 1887948
acgcucagucuacagauua

SEQ ID NO: 2499521 - RNA, 19 nt, Artificial Sequence
  Description of Artificial Sequence: Synthetic oligonucleotide
  Antisense strand to SEQ ID NO: 2499520
uaaucuguagacugagcgu

SEQ ID NO: 2499522 - RNA, 19 nt, Artificial Sequence
  Description of Artificial Sequence: Synthetic oligonucleotide
  Sense strand starting at position 2528 of SEQ ID NO: 1887948
uacagauuaugaggagaaa

SEQ ID NO: 2499523 - RNA, 19 nt, Artificial Sequence
  Description of Artificial Sequence: Synthetic oligonucleotide
  Antisense strand to SEQ ID NO: 2499522
uuucuccucauaaucugua

SEQ ID NO: 2499524 - RNA, 19 nt, Artificial Sequence
  Description of Artificial Sequence: Synthetic oligonucleotide
  Sense strand starting at position 2720 of SEQ ID NO: 1887948
agaucuaagcccgagguua

SEQ ID NO: 2499525 - RNA, 19 nt, Artificial Sequence
  Description of Artificial Sequence: Synthetic oligonucleotide
  Antisense strand to SEQ ID NO: 2499524
uaaccucgggcuuagaucu

SEQ ID NO: 2499526 - RNA, 19 nt, Artificial Sequence
  Description of Artificial Sequence: Synthetic oligonucleotide
  Sense strand starting at position 2722 of SEQ ID NO: 1887948
aucuaagcccgagguuauu

SEQ ID NO: 2499527 - RNA, 19 nt, Artificial Sequence
  Description of Artificial Sequence: Synthetic oligonucleotide
  Antisense strand to SEQ ID NO: 2499526
aauaaccucgggcuuagau

SEQ ID NO: 2499528 - RNA, 19 nt, Artificial Sequence
  Description of Artificial Sequence: Synthetic oligonucleotide
  Sense strand starting at position 2876 of SEQ ID NO: 1887948
cuccuuauguaguacauaa

SEQ ID NO: 2499529 - RNA, 19 nt, Artificial Sequence
  Description of Artificial Sequence: Synthetic oligonucleotide
  Antisense strand to SEQ ID NO: 2499528
uuauguacuacauaaggag

SEQ ID NO: 2499530 - RNA, 19 nt, Artificial Sequence
  Description of Artificial Sequence: Synthetic oligonucleotide
  Sense strand starting at position 2929 of SEQ ID NO: 1887948
uggauuagcccuuaggagu

SEQ ID NO: 2499531 - RNA, 19 nt, Artificial Sequence
  Description of Artificial Sequence: Synthetic oligonucleotide
  Antisense strand to SEQ ID NO: 2499530
acuccuaagggcuaaucca

SEQ ID NO: 2499532 - RNA, 19 nt, Artificial Sequence
  Description of Artificial Sequence: Synthetic oligonucleotide
  Sense strand starting at position 2942 of SEQ ID NO: 1887948
aggaguccguuuccacaga

SEQ ID NO: 2499533 - RNA, 19 nt, Artificial Sequence
  Description of Artificial Sequence: Synthetic oligonucleotide
  Antisense strand to SEQ ID NO: 2499532
ucuguggaaacggacuccu

SEQ ID NO: 2499534 - RNA, 19 nt, Artificial Sequence
  Description of Artificial Sequence: Synthetic oligonucleotide
  Sense strand starting at position 2943 of SEQ ID NO: 1887948
ggaguccguuuccacagaa

SEQ ID NO: 2499535 - RNA, 19 nt, Artificial Sequence
  Description of Artificial Sequence: Synthetic oligonucleotide
  Antisense strand to SEQ ID NO: 2499534
uucuguggaaacggacucc

SEQ ID NO: 2499536 - RNA, 19 nt, Artificial Sequence
  Description of Artificial Sequence: Synthetic oligonucleotide
  Sense strand starting at position 3468 of SEQ ID NO: 1887948
cggugucucgcgagagucu

SEQ ID NO: 2499537 - RNA, 19 nt, Artificial Sequence
  Description of Artificial Sequence: Synthetic oligonucleotide
  Antisense strand to SEQ ID NO: 2499536
agacucucgcgagacaccg

SEQ ID NO: 2499538 - RNA, 19 nt, Artificial Sequence
  Description of Artificial Sequence: Synthetic oligonucleotide
  Sense strand starting at position 3469 of SEQ ID NO: 1887948
ggugucucgcgagagucuu

SEQ ID NO: 2499539 - RNA, 19 nt, Artificial Sequence
  Description of Artificial Sequence: Synthetic oligonucleotide
  Antisense strand to SEQ ID NO: 2499538
aagacucucgcgagacacc

SEQ ID NO: 2499540 - RNA, 19 nt, Artificial Sequence
  Description of Artificial Sequence: Synthetic oligonucleotide
  Sense strand starting at position 3470 of SEQ ID NO: 1887948
gugucucgcgagagucuua

SEQ ID NO: 2499541 - RNA, 19 nt, Artificial Sequence
  Description of Artificial Sequence: Synthetic oligonucleotide
  Antisense strand to SEQ ID NO: 2499540
uaagacucucgcgagacac

SEQ ID NO: 2499542 - RNA, 19 nt, Artificial Sequence
  Description of Artificial Sequence: Synthetic oligonucleotide
  Sense strand starting at position 3523 of SEQ ID NO: 1887948
ggaagaugugaccagccuu

SEQ ID NO: 2499543 - RNA, 19 nt, Artificial Sequence
  Description of Artificial Sequence: Synthetic oligonucleotide
  Antisense strand to SEQ ID NO: 2499542
aaggcuggucacaucuucc

SEQ ID NO: 2499544 - RNA, 19 nt, Artificial Sequence
  Description of Artificial Sequence: Synthetic oligonucleotide
  Sense strand starting at position 3548 of SEQ ID NO: 1887948
gcccguauuaucgcgagag

SEQ ID NO: 2499545 - RNA, 19 nt, Artificial Sequence
  Description of Artificial Sequence: Synthetic oligonucleotide
  Antisense strand to SEQ ID NO: 2499544
cucucgcgauaauacgggc

SEQ ID NO: 2499546 - RNA, 19 nt, Artificial Sequence
  Description of Artificial Sequence: Synthetic oligonucleotide
  Sense strand starting at position 3550 of SEQ ID NO: 1887948
ccguauuaucgcgagaguc

SEQ ID NO: 2499547 - RNA, 19 nt, Artificial Sequence
  Description of Artificial Sequence: Synthetic oligonucleotide
  Antisense strand to SEQ ID NO: 2499546
gacucucgcgauaauacgg

SEQ ID NO: 2499548 - RNA, 19 nt, Artificial Sequence
  Description of Artificial Sequence: Synthetic oligonucleotide
  Sense strand starting at position 3551 of SEQ ID NO: 1887948
cguauuaucgcgagagucg

SEQ ID NO: 2499549 - RNA, 19 nt, Artificial Sequence
  Description of Artificial Sequence: Synthetic oligonucleotide
  Antisense strand to SEQ ID NO: 2499548
cgacucucgcgauaauacg

SEQ ID NO: 2499550 - RNA, 19 nt, Artificial Sequence
  Description of Artificial Sequence: Synthetic oligonucleotide
  Sense strand starting at position 3552 of SEQ ID NO: 1887948
guauuaucgcgagagucgu

SEQ ID NO: 2499551 - RNA, 19 nt, Artificial Sequence
  Description of Artificial Sequence: Synthetic oligonucleotide
  Antisense strand to SEQ ID NO: 2499550
acgacucucgcgauaauac

SEQ ID NO: 2499552 - RNA, 19 nt, Artificial Sequence
  Description of Artificial Sequence: Synthetic oligonucleotide
  Sense strand starting at position 3597 of SEQ ID NO: 1887948
cguaggcucccgugggauu

SEQ ID NO: 2499553 - RNA, 19 nt, Artificial Sequence
  Description of Artificial Sequence: Synthetic oligonucleotide
  Antisense strand to SEQ ID NO: 2499552
aaucccacgggagccuacg

SEQ ID NO: 2499554 - RNA, 19 nt, Artificial Sequence
  Description of Artificial Sequence: Synthetic oligonucleotide
  Sense strand starting at position 3718 of SEQ ID NO: 1887948
ggcgucgccaucuuuguua

SEQ ID NO: 2499555 - RNA, 19 nt, Artificial Sequence
  Description of Artificial Sequence: Synthetic oligonucleotide
  Antisense strand to SEQ ID NO: 2499554
uaacaaagauggcgacgcc

SEQ ID NO: 2499556 - RNA, 19 nt, Artificial Sequence
  Description of Artificial Sequence: Synthetic oligonucleotide
  Sense strand starting at position 34 of SEQ ID NO: 1887949
cgagaagacucguccaaag

SEQ ID NO: 2499557 - RNA, 19 nt, Artificial Sequence
  Description of Artificial Sequence: Synthetic oligonucleotide
  Antisense strand to SEQ ID NO: 2499556
cuuuggacgagucuucucg

SEQ ID NO: 2499558 - RNA, 19 nt, Artificial Sequence
  Description of Artificial Sequence: Synthetic oligonucleotide
  Sense strand starting at position 156 of SEQ ID NO: 1887949
ccgcaagcuuuauuccagu

SEQ ID NO: 2499559 - RNA, 19 nt, Artificial Sequence
  Description of Artificial Sequence: Synthetic oligonucleotide
  Antisense strand to SEQ ID NO: 2499558
acuggaauaaagcuugcgg

SEQ ID NO: 2499560 - RNA, 19 nt, Artificial Sequence
  Description of Artificial Sequence: Synthetic oligonucleotide
  Sense strand starting at position 162 of SEQ ID NO: 1887949
gcuuuauuccagugcagcu

SEQ ID NO: 2499561 - RNA, 19 nt, Artificial Sequence
  Description of Artificial Sequence: Synthetic oligonucleotide
  Antisense strand to SEQ ID NO: 2499560
agcugcacuggaauaaagc

SEQ ID NO: 2499562 - RNA, 19 nt, Artificial Sequence
  Description of Artificial Sequence: Synthetic oligonucleotide
  Sense strand starting at position 318 of SEQ ID NO: 1887949
guacuucugggccgucaca

SEQ ID NO: 2499563 - RNA, 19 nt, Artificial Sequence
  Description of Artificial Sequence: Synthetic oligonucleotide
  Antisense strand to SEQ ID NO: 2499562
ugugacggcccagaaguac

SEQ ID NO: 2499564 - RNA, 19 nt, Artificial Sequence
  Description of Artificial Sequence: Synthetic oligonucleotide
  Sense strand starting at position 353 of SEQ ID NO: 1887949
uggugaucaucugcaacaa

SEQ ID NO: 2499565 - RNA, 19 nt, Artificial Sequence
  Description of Artificial Sequence: Synthetic oligonucleotide
  Antisense strand to SEQ ID NO: 2499564
uuguugcagaugaucacca

SEQ ID NO: 2499566 - RNA, 19 nt, Artificial Sequence
  Description of Artificial Sequence: Synthetic oligonucleotide
  Sense strand starting at position 354 of SEQ ID NO: 1887949
ggugaucaucugcaacaag

SEQ ID NO: 2499567 - RNA, 19 nt, Artificial Sequence
  Description of Artificial Sequence: Synthetic oligonucleotide
  Antisense strand to SEQ ID NO: 2499566
cuuguugcagaugaucacc

SEQ ID NO: 2499568 - RNA, 19 nt, Artificial Sequence
  Description of Artificial Sequence: Synthetic oligonucleotide
  Sense strand starting at position 506 of SEQ ID NO: 1887949
ggacuaacguucuccaaag

SEQ ID NO: 2499569 - RNA, 19 nt, Artificial Sequence
  Description of Artificial Sequence: Synthetic oligonucleotide
  Antisense strand to SEQ ID NO: 2499568
cuuuggagaacguuagucc

SEQ ID NO: 2499570 - RNA, 19 nt, Artificial Sequence
  Description of Artificial Sequence: Synthetic oligonucleotide
  Sense strand starting at position 799 of SEQ ID NO: 1887949
ccucgcuguccaguuugau

SEQ ID NO: 2499571 - RNA, 19 nt, Artificial Sequence
  Description of Artificial Sequence: Synthetic oligonucleotide
  Antisense strand to SEQ ID NO: 2499570
aucaaacuggacagcgagg

SEQ ID NO: 2499572 - RNA, 19 nt, Artificial Sequence
  Description of Artificial Sequence: Synthetic oligonucleotide
  Sense strand starting at position 808 of SEQ ID NO: 1887949
ccaguuugauguccaguuu

SEQ ID NO: 2499573 - RNA, 19 nt, Artificial Sequence
  Description of Artificial Sequence: Synthetic oligonucleotide
  Antisense strand to SEQ ID NO: 2499572
aaacuggacaucaaacugg

SEQ ID NO: 2499574 - RNA, 19 nt, Artificial Sequence
  Description of Artificial Sequence: Synthetic oligonucleotide
  Sense strand starting at position 1190 of SEQ ID NO: 1887949
cuaugcaguccagaucuua

SEQ ID NO: 2499575 - RNA, 19 nt, Artificial Sequence
  Description of Artificial Sequence: Synthetic oligonucleotide
  Antisense strand to SEQ ID NO: 2499574
uaagaucuggacugcauag

SEQ ID NO: 2499576 - RNA, 19 nt, Artificial Sequence
  Description of Artificial Sequence: Synthetic oligonucleotide
  Sense strand starting at position 1195 of SEQ ID NO: 1887949
caguccagaucuuaagaga

SEQ ID NO: 2499577 - RNA, 19 nt, Artificial Sequence
  Description of Artificial Sequence: Synthetic oligonucleotide
  Antisense strand to SEQ ID NO: 2499576
ucucuuaagaucuggacug

SEQ ID NO: 2499578 - RNA, 19 nt, Artificial Sequence
  Description of Artificial Sequence: Synthetic oligonucleotide
  Sense strand starting at position 1198 of SEQ ID NO: 1887949
uccagaucuuaagagagga

SEQ ID NO: 2499579 - RNA, 19 nt, Artificial Sequence
  Description of Artificial Sequence: Synthetic oligonucleotide
  Antisense strand to SEQ ID NO: 2499578
uccucucuuaagaucugga

SEQ ID NO: 2499580 - RNA, 19 nt, Artificial Sequence
  Description of Artificial Sequence: Synthetic oligonucleotide
  Sense strand starting at position 1458 of SEQ ID NO: 1887949
ugccguuggcugggucaaa

SEQ ID NO: 2499581 - RNA, 19 nt, Artificial Sequence
  Description of Artificial Sequence: Synthetic oligonucleotide
  Antisense strand to SEQ ID NO: 2499580
uuugacccagccaacggca

SEQ ID NO: 2499582 - RNA, 19 nt, Artificial Sequence
  Description of Artificial Sequence: Synthetic oligonucleotide
  Sense strand starting at position 1753 of SEQ ID NO: 1887949
cggcgaacuuggccacaua

SEQ ID NO: 2499583 - RNA, 19 nt, Artificial Sequence
  Description of Artificial Sequence: Synthetic oligonucleotide
  Antisense strand to SEQ ID NO: 2499582
uauguggccaaguucgccg

SEQ ID NO: 2499584 - RNA, 19 nt, Artificial Sequence
  Description of Artificial Sequence: Synthetic oligonucleotide
  Sense strand starting at position 1756 of SEQ ID NO: 1887949
cgaacuuggccacauacau

SEQ ID NO: 2499585 - RNA, 19 nt, Artificial Sequence
  Description of Artificial Sequence: Synthetic oligonucleotide
  Antisense strand to SEQ ID NO: 2499584
auguauguggccaaguucg

SEQ ID NO: 2499586 - RNA, 19 nt, Artificial Sequence
  Description of Artificial Sequence: Synthetic oligonucleotide
  Sense strand starting at position 1767 of SEQ ID NO: 1887949
acauacaucucggcaaacu

SEQ ID NO: 2499587 - RNA, 19 nt, Artificial Sequence
  Description of Artificial Sequence: Synthetic oligonucleotide
  Antisense strand to SEQ ID NO: 2499586
aguuugccgagauguaugu

SEQ ID NO: 2499588 - RNA, 19 nt, Artificial Sequence
  Description of Artificial Sequence: Synthetic oligonucleotide
  Sense strand starting at position 1842 of SEQ ID NO: 1887949
acaggaucgaucuggaagu

SEQ ID NO: 2499589 - RNA, 19 nt, Artificial Sequence
  Description of Artificial Sequence: Synthetic oligonucleotide
  Antisense strand to SEQ ID NO: 2499588
acuuccagaucgauccugu

SEQ ID NO: 2499590 - RNA, 19 nt, Artificial Sequence
  Description of Artificial Sequence: Synthetic oligonucleotide
  Sense strand starting at position 1848 of SEQ ID NO: 1887949
ucgaucuggaagugugaga

SEQ ID NO: 2499591 - RNA, 19 nt, Artificial Sequence
  Description of Artificial Sequence: Synthetic oligonucleotide
  Antisense strand to SEQ ID NO: 2499590
ucucacacuuccagaucga

SEQ ID NO: 2499592 - RNA, 19 nt, Artificial Sequence
  Description of Artificial Sequence: Synthetic oligonucleotide
  Sense strand starting at position 1957 of SEQ ID NO: 1887949
guagacaucuggucaaagu

SEQ ID NO: 2499593 - RNA, 19 nt, Artificial Sequence
  Description of Artificial Sequence: Synthetic oligonucleotide
  Antisense strand to SEQ ID NO: 2499592
acuuugaccagaugucuac

SEQ ID NO: 2499594 - RNA, 19 nt, Artificial Sequence
  Description of Artificial Sequence: Synthetic oligonucleotide
  Sense strand starting at position 1981 of SEQ ID NO: 1887949
aaugaucagucaucacgaa

SEQ ID NO: 2499595 - RNA, 19 nt, Artificial Sequence
  Description of Artificial Sequence: Synthetic oligonucleotide
  Antisense strand to SEQ ID NO: 2499594
uucgugaugacugaucauu

SEQ ID NO: 2499596 - RNA, 19 nt, Artificial Sequence
  Description of Artificial Sequence: Synthetic oligonucleotide
  Sense strand starting at position 1982 of SEQ ID NO: 1887949
augaucagucaucacgaau

SEQ ID NO: 2499597 - RNA, 19 nt, Artificial Sequence
  Description of Artificial Sequence: Synthetic oligonucleotide
  Antisense strand to SEQ ID NO: 2499596
auucgugaugacugaucau

SEQ ID NO: 2499598 - RNA, 19 nt, Artificial Sequence
  Description of Artificial Sequence: Synthetic oligonucleotide
  Sense strand starting at position 2051 of SEQ ID NO: 1887949
cuuccagcugcccaaagau

SEQ ID NO: 2499599 - RNA, 19 nt, Artificial Sequence
  Description of Artificial Sequence: Synthetic oligonucleotide
  Antisense strand to SEQ ID NO: 2499598
aucuuugggcagcuggaag

SEQ ID NO: 2499600 - RNA, 19 nt, Artificial Sequence
  Description of Artificial Sequence: Synthetic oligonucleotide
  Sense strand starting at position 2077 of SEQ ID NO: 1887949
ugggucaagucggaugaaa

SEQ ID NO: 2499601 - RNA, 19 nt, Artificial Sequence
  Description of Artificial Sequence: Synthetic oligonucleotide
  Antisense strand to SEQ ID NO: 2499600
uuucauccgacuugaccca

SEQ ID NO: 2499602 - RNA, 19 nt, Artificial Sequence
  Description of Artificial Sequence: Synthetic oligonucleotide
  Sense strand starting at position 2300 of SEQ ID NO: 1887949
ccacgaugcgcuggaaagu

SEQ ID NO: 2499603 - RNA, 19 nt, Artificial Sequence
  Description of Artificial Sequence: Synthetic oligonucleotide
  Antisense strand to SEQ ID NO: 2499602
acuuuccagcgcaucgugg

SEQ ID NO: 2499604 - RNA, 19 nt, Artificial Sequence
  Description of Artificial Sequence: Synthetic oligonucleotide
  Sense strand starting at position 2471 of SEQ ID NO: 1887949
cgcugucauccucaagcaa

SEQ ID NO: 2499605 - RNA, 19 nt, Artificial Sequence
  Description of Artificial Sequence: Synthetic oligonucleotide
  Antisense strand to SEQ ID NO: 2499604
uugcuugaggaugacagcg

SEQ ID NO: 2499606 - RNA, 19 nt, Artificial Sequence
  Description of Artificial Sequence: Synthetic oligonucleotide
  Sense strand starting at position 2622 of SEQ ID NO: 1887949
gggagucaaugagguugau

SEQ ID NO: 2499607 - RNA, 19 nt, Artificial Sequence
  Description of Artificial Sequence: Synthetic oligonucleotide
  Antisense strand to SEQ ID NO: 2499606
aucaaccucauugacuccc

SEQ ID NO: 2499608 - RNA, 19 nt, Artificial Sequence
  Description of Artificial Sequence: Synthetic oligonucleotide
  Sense strand starting at position 2628 of SEQ ID NO: 1887949
caaugagguugaugaggaa

SEQ ID NO: 2499609 - RNA, 19 nt, Artificial Sequence
  Description of Artificial Sequence: Synthetic oligonucleotide
  Antisense strand to SEQ ID NO: 2499608
uuccucaucaaccucauug

SEQ ID NO: 2499610 - RNA, 19 nt, Artificial Sequence
  Description of Artificial Sequence: Synthetic oligonucleotide
  Sense strand starting at position 2658 of SEQ ID NO: 1887949
ccuugcucugcuugaugaa

SEQ ID NO: 2499611 - RNA, 19 nt, Artificial Sequence
  Description of Artificial Sequence: Synthetic oligonucleotide
  Antisense strand to SEQ ID NO: 2499610
uucaucaagcagagcaagg

SEQ ID NO: 2499612 - RNA, 19 nt, Artificial Sequence
  Description of Artificial Sequence: Synthetic oligonucleotide
  Sense strand starting at position 2813 of SEQ ID NO: 1887949
caugacucaucccuggaga

SEQ ID NO: 2499613 - RNA, 19 nt, Artificial Sequence
  Description of Artificial Sequence: Synthetic oligonucleotide
  Antisense strand to SEQ ID NO: 2499612
ucuccagggaugagucaug

SEQ ID NO: 2499614 - RNA, 19 nt, Artificial Sequence
  Description of Artificial Sequence: Synthetic oligonucleotide
  Sense strand starting at position 2896 of SEQ ID NO: 1887949
cagggaacuccugguacca

SEQ ID NO: 2499615 - RNA, 19 nt, Artificial Sequence
  Description of Artificial Sequence: Synthetic oligonucleotide
  Antisense strand to SEQ ID NO: 2499614
ugguaccaggaguucccug

SEQ ID NO: 2499616 - RNA, 19 nt, Artificial Sequence
  Description of Artificial Sequence: Synthetic oligonucleotide
  Sense strand starting at position 3101 of SEQ ID NO: 1887949
gccagagucccucaccaau

SEQ ID NO: 2499617 - RNA, 19 nt, Artificial Sequence
  Description of Artificial Sequence: Synthetic oligonucleotide
  Antisense strand to SEQ ID NO: 2499616
auuggugagggacucuggc

SEQ ID NO: 2499618 - RNA, 19 nt, Artificial Sequence
  Description of Artificial Sequence: Synthetic oligonucleotide
  Sense strand starting at position 3185 of SEQ ID NO: 1887949
gccagaaacugacauggaa

SEQ ID NO: 2499619 - RNA, 19 nt, Artificial Sequence
  Description of Artificial Sequence: Synthetic oligonucleotide
  Antisense strand to SEQ ID NO: 2499618
uuccaugucaguuucuggc

SEQ ID NO: 2499620 - RNA, 19 nt, Artificial Sequence
  Description of Artificial Sequence: Synthetic oligonucleotide
  Sense strand starting at position 3566 of SEQ ID NO: 1887949
ugacuugauggugaugcaa

SEQ ID NO: 2499621 - RNA, 19 nt, Artificial Sequence
  Description of Artificial Sequence: Synthetic oligonucleotide
  Antisense strand to SEQ ID NO: 2499620
uugcaucaccaucaaguca

SEQ ID NO: 2499622 - RNA, 19 nt, Artificial Sequence
  Description of Artificial Sequence: Synthetic oligonucleotide
  Sense strand starting at position 3595 of SEQ ID NO: 1887949
cguccuuccggguaucagu

SEQ ID NO: 2499623 - RNA, 19 nt, Artificial Sequence
  Description of Artificial Sequence: Synthetic oligonucleotide
  Antisense strand to SEQ ID NO: 2499622
acugauacccggaaggacg

SEQ ID NO: 2499624 - RNA, 19 nt, Artificial Sequence
  Description of Artificial Sequence: Synthetic oligonucleotide
  Sense strand starting at position 3602 of SEQ ID NO: 1887949
ccggguaucagugaagcgu

SEQ ID NO: 2499625 - RNA, 19 nt, Artificial Sequence
  Description of Artificial Sequence: Synthetic oligonucleotide
  Antisense strand to SEQ ID NO: 2499624
acgcuucacugauacccgg

SEQ ID NO: 2499626 - RNA, 19 nt, Artificial Sequence
  Description of Artificial Sequence: Synthetic oligonucleotide
  Sense strand starting at position 3730 of SEQ ID NO: 1887949
uggccuucuuguccaugau

SEQ ID NO: 2499627 - RNA, 19 nt, Artificial Sequence
  Description of Artificial Sequence: Synthetic oligonucleotide
  Antisense strand to SEQ ID NO: 2499626
aucauggacaagaaggcca

SEQ ID NO: 2499628 - RNA, 19 nt, Artificial Sequence
  Description of Artificial Sequence: Synthetic oligonucleotide
  Sense strand starting at position 3757 of SEQ ID NO: 1887949
ucuggucuaccgugaaguu

SEQ ID NO: 2499629 - RNA, 19 nt, Artificial Sequence
  Description of Artificial Sequence: Synthetic oligonucleotide
  Antisense strand to SEQ ID NO: 2499628
aacuucacgguagaccaga

SEQ ID NO: 2499630 - RNA, 19 nt, Artificial Sequence
  Description of Artificial Sequence: Synthetic oligonucleotide
  Sense strand starting at position 3797 of SEQ ID NO: 1887949
cucagaccagcucgugauu

SEQ ID NO: 2499631 - RNA, 19 nt, Artificial Sequence
  Description of Artificial Sequence: Synthetic oligonucleotide
  Antisense strand to SEQ ID NO: 2499630
aaucacgagcuggucugag

SEQ ID NO: 2499632 - RNA, 19 nt, Artificial Sequence
  Description of Artificial Sequence: Synthetic oligonucleotide
  Sense strand starting at position 3806 of SEQ ID NO: 1887949
gcucgugauuuccaggaac

SEQ ID NO: 2499633 - RNA, 19 nt, Artificial Sequence
  Description of Artificial Sequence: Synthetic oligonucleotide
  Antisense strand to SEQ ID NO: 2499632
guuccuggaaaucacgagc

SEQ ID NO: 2499634 - RNA, 19 nt, Artificial Sequence
  Description of Artificial Sequence: Synthetic oligonucleotide
  Sense strand starting at position 3965 of SEQ ID NO: 1887949
accguuaauaggugucauu

SEQ ID NO: 2499635 - RNA, 19 nt, Artificial Sequence
  Description of Artificial Sequence: Synthetic oligonucleotide
  Antisense strand to SEQ ID NO: 2499634
aaugacaccuauuaacggu

SEQ ID NO: 2499636 - RNA, 19 nt, Artificial Sequence
  Description of Artificial Sequence: Synthetic oligonucleotide
  Sense strand starting at position 20 of SEQ ID NO: 1887950
uucuguaugcguucaguac

SEQ ID NO: 2499637 - RNA, 19 nt, Artificial Sequence
  Description of Artificial Sequence: Synthetic oligonucleotide
  Antisense strand to SEQ ID NO: 2499636
guacugaacgcauacagaa

SEQ ID NO: 2499638 - RNA, 19 nt, Artificial Sequence
  Description of Artificial Sequence: Synthetic oligonucleotide
  Sense strand starting at position 21 of SEQ ID NO: 1887950
ucuguaugcguucaguaca

SEQ ID NO: 2499639 - RNA, 19 nt, Artificial Sequence
  Description of Artificial Sequence: Synthetic oligonucleotide
  Antisense strand to SEQ ID NO: 2499638
uguacugaacgcauacaga

SEQ ID NO: 2499640 - RNA, 19 nt, Artificial Sequence
  Description of Artificial Sequence: Synthetic oligonucleotide
  Sense strand starting at position 24 of SEQ ID NO: 1887950
guaugcguucaguacagau

SEQ ID NO: 2499641 - RNA, 19 nt, Artificial Sequence
  Description of Artificial Sequence: Synthetic oligonucleotide
  Antisense strand to SEQ ID NO: 2499640
aucuguacugaacgcauac

SEQ ID NO: 2499642 - RNA, 19 nt, Artificial Sequence
  Description of Artificial Sequence: Synthetic oligonucleotide
  Sense strand starting at position 68 of SEQ ID NO: 1887950
aucugagguuacuugaauc

SEQ ID NO: 2499643 - RNA, 19 nt, Artificial Sequence
  Description of Artificial Sequence: Synthetic oligonucleotide
  Antisense strand to SEQ ID NO: 2499642
gauucaaguaaccucagau

SEQ ID NO: 2499644 - RNA, 19 nt, Artificial Sequence
  Description of Artificial Sequence: Synthetic oligonucleotide
  Sense strand starting at position 76 of SEQ ID NO: 1887950
uuacuugaaucuugggaug

SEQ ID NO: 2499645 - RNA, 19 nt, Artificial Sequence
  Description of Artificial Sequence: Synthetic oligonucleotide
  Antisense strand to SEQ ID NO: 2499644
caucccaagauucaaguaa

SEQ ID NO: 2499646 - RNA, 19 nt, Artificial Sequence
  Description of Artificial Sequence: Synthetic oligonucleotide
  Sense strand starting at position 79 of SEQ ID NO: 1887950
cuugaaucuugggauguag

SEQ ID NO: 2499647 - RNA, 19 nt, Artificial Sequence
  Description of Artificial Sequence: Synthetic oligonucleotide
  Antisense strand to SEQ ID NO: 2499646
cuacaucccaagauucaag

SEQ ID NO: 2499648 - RNA, 19 nt, Artificial Sequence
  Description of Artificial Sequence: Synthetic oligonucleotide
  Sense strand starting at position 183 of SEQ ID NO: 1887950
aagacagagucucaguuua

SEQ ID NO: 2499649 - RNA, 19 nt, Artificial Sequence
  Description of Artificial Sequence: Synthetic oligonucleotide
  Antisense strand to SEQ ID NO: 2499648
uaaacugagacucugucuu

SEQ ID NO: 2499650 - RNA, 19 nt, Artificial Sequence
  Description of Artificial Sequence: Synthetic oligonucleotide
  Sense strand starting at position 627 of SEQ ID NO: 1887950
cugauuuccuuugggcaca

SEQ ID NO: 2499651 - RNA, 19 nt, Artificial Sequence
  Description of Artificial Sequence: Synthetic oligonucleotide
  Antisense strand to SEQ ID NO: 2499650
ugugcccaaaggaaaucag

SEQ ID NO: 2499652 - RNA, 19 nt, Artificial Sequence
  Description of Artificial Sequence: Synthetic oligonucleotide
  Sense strand starting at position 628 of SEQ ID NO: 1887950
ugauuuccuuugggcacaa

SEQ ID NO: 2499653 - RNA, 19 nt, Artificial Sequence
  Description of Artificial Sequence: Synthetic oligonucleotide
  Antisense strand to SEQ ID NO: 2499652
uugugcccaaaggaaauca

SEQ ID NO: 2499654 - RNA, 19 nt, Artificial Sequence
  Description of Artificial Sequence: Synthetic oligonucleotide
  Sense strand starting at position 737 of SEQ ID NO: 1887950
cagcaaugucaugauguug

SEQ ID NO: 2499655 - RNA, 19 nt, Artificial Sequence
  Description of Artificial Sequence: Synthetic oligonucleotide
  Antisense strand to SEQ ID NO: 2499654
caacaucaugacauugcug

SEQ ID NO: 2499656 - RNA, 19 nt, Artificial Sequence
  Description of Artificial Sequence: Synthetic oligonucleotide
  Sense strand starting at position 814 of SEQ ID NO: 1887950
gauccagugcuacgaucau

SEQ ID NO: 2499657 - RNA, 19 nt, Artificial Sequence
  Description of Artificial Sequence: Synthetic oligonucleotide
  Antisense strand to SEQ ID NO: 2499656
augaucguagcacuggauc

SEQ ID NO: 2499658 - RNA, 19 nt, Artificial Sequence
  Description of Artificial Sequence: Synthetic oligonucleotide
  Sense strand starting at position 1175 of SEQ ID NO: 1887950
ggaagagguccuugucuuc

SEQ ID NO: 2499659 - RNA, 19 nt, Artificial Sequence
  Description of Artificial Sequence: Synthetic oligonucleotide
  Antisense strand to SEQ ID NO: 2499658
gaagacaaggaccucuucc

SEQ ID NO: 2499660 - RNA, 19 nt, Artificial Sequence
  Description of Artificial Sequence: Synthetic oligonucleotide
  Sense strand starting at position 1206 of SEQ ID NO: 1887950
auuccacuucuggaucagu

SEQ ID NO: 2499661 - RNA, 19 nt, Artificial Sequence
  Description of Artificial Sequence: Synthetic oligonucleotide
  Antisense strand to SEQ ID NO: 2499660
acugauccagaaguggaau

SEQ ID NO: 2499662 - RNA, 19 nt, Artificial Sequence
  Description of Artificial Sequence: Synthetic oligonucleotide
  Sense strand starting at position 1239 of SEQ ID NO: 1887950
cuggauguauuccuggaga

SEQ ID NO: 2499663 - RNA, 19 nt, Artificial Sequence
  Description of Artificial Sequence: Synthetic oligonucleotide
  Antisense strand to SEQ ID NO: 2499662
ucuccaggaauacauccag

SEQ ID NO: 2499664 - RNA, 19 nt, Artificial Sequence
  Description of Artificial Sequence: Synthetic oligonucleotide
  Sense strand starting at position 1241 of SEQ ID NO: 1887950
ggauguauuccuggagagg

SEQ ID NO: 2499665 - RNA, 19 nt, Artificial Sequence
  Description of Artificial Sequence: Synthetic oligonucleotide
  Antisense strand to SEQ ID NO: 2499664
ccucuccaggaauacaucc

SEQ ID NO: 2499666 - RNA, 19 nt, Artificial Sequence
  Description of Artificial Sequence: Synthetic oligonucleotide
  Sense strand starting at position 1309 of SEQ ID NO: 1887950
guaccuguugcccgaguga

SEQ ID NO: 2499667 - RNA, 19 nt, Artificial Sequence
  Description of Artificial Sequence: Synthetic oligonucleotide
  Antisense strand to SEQ ID NO: 2499666
ucacucgggcaacagguac

SEQ ID NO: 2499668 - RNA, 19 nt, Artificial Sequence
  Description of Artificial Sequence: Synthetic oligonucleotide
  Sense strand starting at position 1740 of SEQ ID NO: 1887950
gcagguucuugugcuggua

SEQ ID NO: 2499669 - RNA, 19 nt, Artificial Sequence
  Description of Artificial Sequence: Synthetic oligonucleotide
  Antisense strand to SEQ ID NO: 2499668
uaccagcacaagaaccugc

SEQ ID NO: 2499670 - RNA, 19 nt, Artificial Sequence
  Description of Artificial Sequence: Synthetic oligonucleotide
  Sense strand starting at position 1743 of SEQ ID NO: 1887950
gguucuugugcugguauuu

SEQ ID NO: 2499671 - RNA, 19 nt, Artificial Sequence
  Description of Artificial Sequence: Synthetic oligonucleotide
  Antisense strand to SEQ ID NO: 2499670
aaauaccagcacaagaacc

SEQ ID NO: 2499672 - RNA, 19 nt, Artificial Sequence
  Description of Artificial Sequence: Synthetic oligonucleotide
  Sense strand starting at position 1785 of SEQ ID NO: 1887950
ccaggauguagcugaggua

SEQ ID NO: 2499673 - RNA, 19 nt, Artificial Sequence
  Description of Artificial Sequence: Synthetic oligonucleotide
  Antisense strand to SEQ ID NO: 2499672
uaccucagcuacauccugg

SEQ ID NO: 2499674 - RNA, 19 nt, Artificial Sequence
  Description of Artificial Sequence: Synthetic oligonucleotide
  Sense strand starting at position 1932 of SEQ ID NO: 1887950
aggaucagccaguacgaau

SEQ ID NO: 2499675 - RNA, 19 nt, Artificial Sequence
  Description of Artificial Sequence: Synthetic oligonucleotide
  Antisense strand to SEQ ID NO: 2499674
auucguacuggcugauccu

SEQ ID NO: 2499676 - RNA, 19 nt, Artificial Sequence
  Description of Artificial Sequence: Synthetic oligonucleotide
  Sense strand starting at position 1943 of SEQ ID NO: 1887950
guacgaauacgcgauaaau

SEQ ID NO: 2499677 - RNA, 19 nt, Artificial Sequence
  Description of Artificial Sequence: Synthetic oligonucleotide
  Antisense strand to SEQ ID NO: 2499676
auuuaucgcguauucguac

SEQ ID NO: 2499678 - RNA, 19 nt, Artificial Sequence
  Description of Artificial Sequence: Synthetic oligonucleotide
  Sense strand starting at position 1945 of SEQ ID NO: 1887950
acgaauacgcgauaaauca

SEQ ID NO: 2499679 - RNA, 19 nt, Artificial Sequence
  Description of Artificial Sequence: Synthetic oligonucleotide
  Antisense strand to SEQ ID NO: 2499678
ugauuuaucgcguauucgu

SEQ ID NO: 2499680 - RNA, 19 nt, Artificial Sequence
  Description of Artificial Sequence: Synthetic oligonucleotide
  Sense strand starting at position 2373 of SEQ ID NO: 1887950
aacugaggcuuagaguuua

SEQ ID NO: 2499681 - RNA, 19 nt, Artificial Sequence
  Description of Artificial Sequence: Synthetic oligonucleotide
  Antisense strand to SEQ ID NO: 2499680
uaaacucuaagccucaguu

SEQ ID NO: 2499682 - RNA, 19 nt, Artificial Sequence
  Description of Artificial Sequence: Synthetic oligonucleotide
  Sense strand starting at position 2378 of SEQ ID NO: 1887950
aggcuuagaguuuaaauca

SEQ ID NO: 2499683 - RNA, 19 nt, Artificial Sequence
  Description of Artificial Sequence: Synthetic oligonucleotide
  Antisense strand to SEQ ID NO: 2499682
ugauuuaaacucuaagccu

SEQ ID NO: 2499684 - RNA, 19 nt, Artificial Sequence
  Description of Artificial Sequence: Synthetic oligonucleotide
  Sense strand starting at position 2531 of SEQ ID NO: 1887950
ggcgcagugguacgaucau

SEQ ID NO: 2499685 - RNA, 19 nt, Artificial Sequence
  Description of Artificial Sequence: Synthetic oligonucleotide
  Antisense strand to SEQ ID NO: 2499684
augaucguaccacugcgcc

SEQ ID NO: 2499686 - RNA, 19 nt, Artificial Sequence
  Description of Artificial Sequence: Synthetic oligonucleotide
  Sense strand starting at position 2676 of SEQ ID NO: 1887950
uuaccauguugaccaagau

SEQ ID NO: 2499687 - RNA, 19 nt, Artificial Sequence
  Description of Artificial Sequence: Synthetic oligonucleotide
  Antisense strand to SEQ ID NO: 2499686
aucuuggucaacaugguaa

SEQ ID NO: 2499688 - RNA, 19 nt, Artificial Sequence
  Description of Artificial Sequence: Synthetic oligonucleotide
  Sense strand starting at position 2685 of SEQ ID NO: 1887950
ugaccaagauggucucagu

SEQ ID NO: 2499689 - RNA, 19 nt, Artificial Sequence
  Description of Artificial Sequence: Synthetic oligonucleotide
  Antisense strand to SEQ ID NO: 2499688
acugagaccaucuugguca

SEQ ID NO: 2499690 - RNA, 19 nt, Artificial Sequence
  Description of Artificial Sequence: Synthetic oligonucleotide
  Sense strand starting at position 2776 of SEQ ID NO: 1887950
gccaaagagcuccguguua

SEQ ID NO: 2499691 - RNA, 19 nt, Artificial Sequence
  Description of Artificial Sequence: Synthetic oligonucleotide
  Antisense strand to SEQ ID NO: 2499690
uaacacggagcucuuuggc

SEQ ID NO: 2499692 - RNA, 19 nt, Artificial Sequence
  Description of Artificial Sequence: Synthetic oligonucleotide
  Sense strand starting at position 2778 of SEQ ID NO: 1887950
caaagagcuccguguuauu

SEQ ID NO: 2499693 - RNA, 19 nt, Artificial Sequence
  Description of Artificial Sequence: Synthetic oligonucleotide
  Antisense strand to SEQ ID NO: 2499692
aauaacacggagcucuuug

SEQ ID NO: 2499694 - RNA, 19 nt, Artificial Sequence
  Description of Artificial Sequence: Synthetic oligonucleotide
  Sense strand starting at position 2785 of SEQ ID NO: 1887950
cuccguguuauugcguuaa

SEQ ID NO: 2499695 - RNA, 19 nt, Artificial Sequence
  Description of Artificial Sequence: Synthetic oligonucleotide
  Antisense strand to SEQ ID NO: 2499694
uuaacgcaauaacacggag

SEQ ID NO: 2499696 - RNA, 19 nt, Artificial Sequence
  Description of Artificial Sequence: Synthetic oligonucleotide
  Sense strand starting at position 2788 of SEQ ID NO: 1887950
cguguuauugcguuaauuc

SEQ ID NO: 2499697 - RNA, 19 nt, Artificial Sequence
  Description of Artificial Sequence: Synthetic oligonucleotide
  Antisense strand to SEQ ID NO: 2499696
gaauuaacgcaauaacacg

SEQ ID NO: 2499698 - RNA, 19 nt, Artificial Sequence
  Description of Artificial Sequence: Synthetic oligonucleotide
  Sense strand starting at position 2929 of SEQ ID NO: 1887950
uugaaacaguucuuaagau

SEQ ID NO: 2499699 - RNA, 19 nt, Artificial Sequence
  Description of Artificial Sequence: Synthetic oligonucleotide
  Antisense strand to SEQ ID NO: 2499698
aucuuaagaacuguuucaa

SEQ ID NO: 2499700 - RNA, 19 nt, Artificial Sequence
  Description of Artificial Sequence: Synthetic oligonucleotide
  Sense strand starting at position 2930 of SEQ ID NO: 1887950
ugaaacaguucuuaagaug

SEQ ID NO: 2499701 - RNA, 19 nt, Artificial Sequence
  Description of Artificial Sequence: Synthetic oligonucleotide
  Antisense strand to SEQ ID NO: 2499700
caucuuaagaacuguuuca

SEQ ID NO: 2499702 - RNA, 19 nt, Artificial Sequence
  Description of Artificial Sequence: Synthetic oligonucleotide
  Sense strand starting at position 2939 of SEQ ID NO: 1887950
ucuuaagauguuugugagu

SEQ ID NO: 2499703 - RNA, 19 nt, Artificial Sequence
  Description of Artificial Sequence: Synthetic oligonucleotide
  Antisense strand to SEQ ID NO: 2499702
acucacaaacaucuuaaga

SEQ ID NO: 2499704 - RNA, 19 nt, Artificial Sequence
  Description of Artificial Sequence: Synthetic oligonucleotide
  Sense strand starting at position 3069 of SEQ ID NO: 1887950
ucaagugauuuccugccua

SEQ ID NO: 2499705 - RNA, 19 nt, Artificial Sequence
  Description of Artificial Sequence: Synthetic oligonucleotide
  Antisense strand to SEQ ID NO: 2499704
uaggcaggaaaucacuuga

SEQ ID NO: 2499706 - RNA, 19 nt, Artificial Sequence
  Description of Artificial Sequence: Synthetic oligonucleotide
  Sense strand starting at position 3242 of SEQ ID NO: 1887950
auaggugucuggccguuua

SEQ ID NO: 2499707 - RNA, 19 nt, Artificial Sequence
  Description of Artificial Sequence: Synthetic oligonucleotide
  Antisense strand to SEQ ID NO: 2499706
uaaacggccagacaccuau

SEQ ID NO: 2499708 - RNA, 19 nt, Artificial Sequence
  Description of Artificial Sequence: Synthetic oligonucleotide
  Sense strand starting at position 3245 of SEQ ID NO: 1887950
ggugucuggccguuuauga

SEQ ID NO: 2499709 - RNA, 19 nt, Artificial Sequence
  Description of Artificial Sequence: Synthetic oligonucleotide
  Antisense strand to SEQ ID NO: 2499708
ucauaaacggccagacacc

SEQ ID NO: 2499710 - RNA, 19 nt, Artificial Sequence
  Description of Artificial Sequence: Synthetic oligonucleotide
  Sense strand starting at position 3246 of SEQ ID NO: 1887950
gugucuggccguuuaugau

SEQ ID NO: 2499711 - RNA, 19 nt, Artificial Sequence
  Description of Artificial Sequence: Synthetic oligonucleotide
  Antisense strand to SEQ ID NO: 2499710
aucauaaacggccagacac

SEQ ID NO: 2499712 - RNA, 19 nt, Artificial Sequence
  Description of Artificial Sequence: Synthetic oligonucleotide
  Sense strand starting at position 3253 of SEQ ID NO: 1887950
gccguuuaugauuguucua

SEQ ID NO: 2499713 - RNA, 19 nt, Artificial Sequence
  Description of Artificial Sequence: Synthetic oligonucleotide
  Antisense strand to SEQ ID NO: 2499712
uagaacaaucauaaacggc

SEQ ID NO: 2499714 - RNA, 19 nt, Artificial Sequence
  Description of Artificial Sequence: Synthetic oligonucleotide
  Sense strand starting at position 3255 of SEQ ID NO: 1887950
cguuuaugauuguucuauu

SEQ ID NO: 2499715 - RNA, 19 nt, Artificial Sequence
  Description of Artificial Sequence: Synthetic oligonucleotide
  Antisense strand to SEQ ID NO: 2499714
aauagaacaaucauaaacg

SEQ ID NO: 2499716 - RNA, 19 nt, Artificial Sequence
  Description of Artificial Sequence: Synthetic oligonucleotide
  Sense strand starting at position 367 of SEQ ID NO: 1887951
gccugcuucccucaugaca

SEQ ID NO: 2499717 - RNA, 19 nt, Artificial Sequence
  Description of Artificial Sequence: Synthetic oligonucleotide
  Antisense strand to SEQ ID NO: 2499716
ugucaugagggaagcaggc

SEQ ID NO: 2499718 - RNA, 19 nt, Artificial Sequence
  Description of Artificial Sequence: Synthetic oligonucleotide
  Sense strand starting at position 379 of SEQ ID NO: 1887951
caugacaucuggccaguga

SEQ ID NO: 2499719 - RNA, 19 nt, Artificial Sequence
  Description of Artificial Sequence: Synthetic oligonucleotide
  Antisense strand to SEQ ID NO: 2499718
ucacuggccagaugucaug

SEQ ID NO: 2499720 - RNA, 19 nt, Artificial Sequence
  Description of Artificial Sequence: Synthetic oligonucleotide
  Sense strand starting at position 580 of SEQ ID NO: 1887951
ccaggauucuggccugcuu

SEQ ID NO: 2499721 - RNA, 19 nt, Artificial Sequence
  Description of Artificial Sequence: Synthetic oligonucleotide
  Antisense strand to SEQ ID NO: 2499720
aagcaggccagaauccugg

SEQ ID NO: 2499722 - RNA, 19 nt, Artificial Sequence
  Description of Artificial Sequence: Synthetic oligonucleotide
  Sense strand starting at position 622 of SEQ ID NO: 1887951
cggugucuguccuugagag

SEQ ID NO: 2499723 - RNA, 19 nt, Artificial Sequence
  Description of Artificial Sequence: Synthetic oligonucleotide
  Antisense strand to SEQ ID NO: 2499722
cucucaaggacagacaccg

SEQ ID NO: 2499724 - RNA, 19 nt, Artificial Sequence
  Description of Artificial Sequence: Synthetic oligonucleotide
  Sense strand starting at position 1146 of SEQ ID NO: 1887951
ugcagugguagcugaagau

SEQ ID NO: 2499725 - RNA, 19 nt, Artificial Sequence
  Description of Artificial Sequence: Synthetic oligonucleotide
  Antisense strand to SEQ ID NO: 2499724
aucuucagcuaccacugca

SEQ ID NO: 2499726 - RNA, 19 nt, Artificial Sequence
  Description of Artificial Sequence: Synthetic oligonucleotide
  Sense strand starting at position 1168 of SEQ ID NO: 1887951
accuuaucagguuggauca

SEQ ID NO: 2499727 - RNA, 19 nt, Artificial Sequence
  Description of Artificial Sequence: Synthetic oligonucleotide
  Antisense strand to SEQ ID NO: 2499726
ugauccaaccugauaaggu

SEQ ID NO: 2499728 - RNA, 19 nt, Artificial Sequence
  Description of Artificial Sequence: Synthetic oligonucleotide
  Sense strand starting at position 1269 of SEQ ID NO: 1887951
guugcaguucuugcccgaa

SEQ ID NO: 2499729 - RNA, 19 nt, Artificial Sequence
  Description of Artificial Sequence: Synthetic oligonucleotide
  Antisense strand to SEQ ID NO: 2499728
uucgggcaagaacugcaac

SEQ ID NO: 2499730 - RNA, 19 nt, Artificial Sequence
  Description of Artificial Sequence: Synthetic oligonucleotide
  Sense strand starting at position 1404 of SEQ ID NO: 1887951
gcagagugucuggagggau

SEQ ID NO: 2499731 - RNA, 19 nt, Artificial Sequence
  Description of Artificial Sequence: Synthetic oligonucleotide
  Antisense strand to SEQ ID NO: 2499730
aucccuccagacacucugc

SEQ ID NO: 2499732 - RNA, 19 nt, Artificial Sequence
  Description of Artificial Sequence: Synthetic oligonucleotide
  Sense strand starting at position 1672 of SEQ ID NO: 1887951
caggguuacuaagguuaau

SEQ ID NO: 2499733 - RNA, 19 nt, Artificial Sequence
  Description of Artificial Sequence: Synthetic oligonucleotide
  Antisense strand to SEQ ID NO: 2499732
auuaaccuuaguaacccug

SEQ ID NO: 2499734 - RNA, 19 nt, Artificial Sequence
  Description of Artificial Sequence: Synthetic oligonucleotide
  Sense strand starting at position 1785 of SEQ ID NO: 1887951
cucuguucuuaaugaguga

SEQ ID NO: 2499735 - RNA, 19 nt, Artificial Sequence
  Description of Artificial Sequence: Synthetic oligonucleotide
  Antisense strand to SEQ ID NO: 2499734
ucacucauuaagaacagag

SEQ ID NO: 2499736 - RNA, 19 nt, Artificial Sequence
  Description of Artificial Sequence: Synthetic oligonucleotide
  Sense strand starting at position 1789 of SEQ ID NO: 1887951
guucuuaaugagugauggu

SEQ ID NO: 2499737 - RNA, 19 nt, Artificial Sequence
  Description of Artificial Sequence: Synthetic oligonucleotide
  Antisense strand to SEQ ID NO: 2499736
accaucacucauuaagaac

SEQ ID NO: 2499738 - RNA, 19 nt, Artificial Sequence
  Description of Artificial Sequence: Synthetic oligonucleotide
  Sense strand starting at position 1798 of SEQ ID NO: 1887951
gagugauggucaggcccuu

SEQ ID NO: 2499739 - RNA, 19 nt, Artificial Sequence
  Description of Artificial Sequence: Synthetic oligonucleotide
  Antisense strand to SEQ ID NO: 2499738
aagggccugaccaucacuc

SEQ ID NO: 2499740 - RNA, 19 nt, Artificial Sequence
  Description of Artificial Sequence: Synthetic oligonucleotide
  Sense strand starting at position 2152 of SEQ ID NO: 1887951
ggguauggcuccuuguaug

SEQ ID NO: 2499741 - RNA, 19 nt, Artificial Sequence
  Description of Artificial Sequence: Synthetic oligonucleotide
  Antisense strand to SEQ ID NO: 2499740
cauacaaggagccauaccc

SEQ ID NO: 2499742 - RNA, 19 nt, Artificial Sequence
  Description of Artificial Sequence: Synthetic oligonucleotide
  Sense strand starting at position 2157 of SEQ ID NO: 1887951
uggcuccuuguaugaucua

SEQ ID NO: 2499743 - RNA, 19 nt, Artificial Sequence
  Description of Artificial Sequence: Synthetic oligonucleotide
  Antisense strand to SEQ ID NO: 2499742
uagaucauacaaggagcca

SEQ ID NO: 2499744 - RNA, 19 nt, Artificial Sequence
  Description of Artificial Sequence: Synthetic oligonucleotide
  Sense strand starting at position 2210 of SEQ ID NO: 1887951
agcaguguuucucuggaaa

SEQ ID NO: 2499745 - RNA, 19 nt, Artificial Sequence
  Description of Artificial Sequence: Synthetic oligonucleotide
  Antisense strand to SEQ ID NO: 2499744
uuuccagagaaacacugcu

SEQ ID NO: 2499746 - RNA, 19 nt, Artificial Sequence
  Description of Artificial Sequence: Synthetic oligonucleotide
  Sense strand starting at position 2382 of SEQ ID NO: 1887951
accagaaccuucugugaca

SEQ ID NO: 2499747 - RNA, 19 nt, Artificial Sequence
  Description of Artificial Sequence: Synthetic oligonucleotide
  Antisense strand to SEQ ID NO: 2499746
ugucacagaagguucuggu

SEQ ID NO: 2499748 - RNA, 19 nt, Artificial Sequence
  Description of Artificial Sequence: Synthetic oligonucleotide
  Sense strand starting at position 2383 of SEQ ID NO: 1887951
ccagaaccuucugugacau

SEQ ID NO: 2499749 - RNA, 19 nt, Artificial Sequence
  Description of Artificial Sequence: Synthetic oligonucleotide
  Antisense strand to SEQ ID NO: 2499748
augucacagaagguucugg

SEQ ID NO: 2499750 - RNA, 19 nt, Artificial Sequence
  Description of Artificial Sequence: Synthetic oligonucleotide
  Sense strand starting at position 2495 of SEQ ID NO: 1887951
gggugcugcuguuuaacaa

SEQ ID NO: 2499751 - RNA, 19 nt, Artificial Sequence
  Description of Artificial Sequence: Synthetic oligonucleotide
  Antisense strand to SEQ ID NO: 2499750
uuguuaaacagcagcaccc

SEQ ID NO: 2499752 - RNA, 19 nt, Artificial Sequence
  Description of Artificial Sequence: Synthetic oligonucleotide
  Sense strand starting at position 2543 of SEQ ID NO: 1887951
auagaaauaugcuuuguag

SEQ ID NO: 2499753 - RNA, 19 nt, Artificial Sequence
  Description of Artificial Sequence: Synthetic oligonucleotide
  Antisense strand to SEQ ID NO: 2499752
cuacaaagcauauuucuau

SEQ ID NO: 2499754 - RNA, 19 nt, Artificial Sequence
  Description of Artificial Sequence: Synthetic oligonucleotide
  Sense strand starting at position 2545 of SEQ ID NO: 1887951
agaaauaugcuuuguagga

SEQ ID NO: 2499755 - RNA, 19 nt, Artificial Sequence
  Description of Artificial Sequence: Synthetic oligonucleotide
  Antisense strand to SEQ ID NO: 2499754
uccuacaaagcauauuucu

SEQ ID NO: 2499756 - RNA, 19 nt, Artificial Sequence
  Description of Artificial Sequence: Synthetic oligonucleotide
  Sense strand starting at position 2546 of SEQ ID NO: 1887951
gaaauaugcuuuguaggaa

SEQ ID NO: 2499757 - RNA, 19 nt, Artificial Sequence
  Description of Artificial Sequence: Synthetic oligonucleotide
  Antisense strand to SEQ ID NO: 2499756
uuccuacaaagcauauuuc

SEQ ID NO: 2499758 - RNA, 19 nt, Artificial Sequence
  Description of Artificial Sequence: Synthetic oligonucleotide
  Sense strand starting at position 2701 of SEQ ID NO: 1887951
ucuggacagucguaaggaa

SEQ ID NO: 2499759 - RNA, 19 nt, Artificial Sequence
  Description of Artificial Sequence: Synthetic oligonucleotide
  Antisense strand to SEQ ID NO: 2499758
uuccuuacgacuguccaga

SEQ ID NO: 2499760 - RNA, 19 nt, Artificial Sequence
  Description of Artificial Sequence: Synthetic oligonucleotide
  Sense strand starting at position 2893 of SEQ ID NO: 1887951
cacagaggaucucggauua

SEQ ID NO: 2499761 - RNA, 19 nt, Artificial Sequence
  Description of Artificial Sequence: Synthetic oligonucleotide
  Antisense strand to SEQ ID NO: 2499760
uaauccgagauccucugug

SEQ ID NO: 2499762 - RNA, 19 nt, Artificial Sequence
  Description of Artificial Sequence: Synthetic oligonucleotide
  Sense strand starting at position 3244 of SEQ ID NO: 1887951
acaggacccucagaaagau

SEQ ID NO: 2499763 - RNA, 19 nt, Artificial Sequence
  Description of Artificial Sequence: Synthetic oligonucleotide
  Antisense strand to SEQ ID NO: 2499762
aucuuucugaggguccugu

SEQ ID NO: 2499764 - RNA, 19 nt, Artificial Sequence
  Description of Artificial Sequence: Synthetic oligonucleotide
  Sense strand starting at position 3461 of SEQ ID NO: 1887951
acucaugcuugucugauuu

SEQ ID NO: 2499765 - RNA, 19 nt, Artificial Sequence
  Description of Artificial Sequence: Synthetic oligonucleotide
  Antisense strand to SEQ ID NO: 2499764
aaaucagacaagcaugagu

SEQ ID NO: 2499766 - RNA, 19 nt, Artificial Sequence
  Description of Artificial Sequence: Synthetic oligonucleotide
  Sense strand starting at position 3499 of SEQ ID NO: 1887951
ccugauaaagccuguuauu

SEQ ID NO: 2499767 - RNA, 19 nt, Artificial Sequence
  Description of Artificial Sequence: Synthetic oligonucleotide
  Antisense strand to SEQ ID NO: 2499766
aauaacaggcuuuaucagg

SEQ ID NO: 2499768 - RNA, 19 nt, Artificial Sequence
  Description of Artificial Sequence: Synthetic oligonucleotide
  Sense strand starting at position 3530 of SEQ ID NO: 1887951
auaggaguucccugaauuc

SEQ ID NO: 2499769 - RNA, 19 nt, Artificial Sequence
  Description of Artificial Sequence: Synthetic oligonucleotide
  Antisense strand to SEQ ID NO: 2499768
gaauucagggaacuccuau

SEQ ID NO: 2499770 - RNA, 19 nt, Artificial Sequence
  Description of Artificial Sequence: Synthetic oligonucleotide
  Sense strand starting at position 3577 of SEQ ID NO: 1887951
caggcuaagcugugcuuaa

SEQ ID NO: 2499771 - RNA, 19 nt, Artificial Sequence
  Description of Artificial Sequence: Synthetic oligonucleotide
  Antisense strand to SEQ ID NO: 2499770
uuaagcacagcuuagccug

SEQ ID NO: 2499772 - RNA, 19 nt, Artificial Sequence
  Description of Artificial Sequence: Synthetic oligonucleotide
  Sense strand starting at position 3578 of SEQ ID NO: 1887951
aggcuaagcugugcuuaaa

SEQ ID NO: 2499773 - RNA, 19 nt, Artificial Sequence
  Description of Artificial Sequence: Synthetic oligonucleotide
  Antisense strand to SEQ ID NO: 2499772
uuuaagcacagcuuagccu

SEQ ID NO: 2499774 - RNA, 19 nt, Artificial Sequence
  Description of Artificial Sequence: Synthetic oligonucleotide
  Sense strand starting at position 3627 of SEQ ID NO: 1887951
gaaguaacgugacagaauc

SEQ ID NO: 2499775 - RNA, 19 nt, Artificial Sequence
  Description of Artificial Sequence: Synthetic oligonucleotide
  Antisense strand to SEQ ID NO: 2499774
gauucugucacguuacuuc

SEQ ID NO: 2499776 - RNA, 19 nt, Artificial Sequence
  Description of Artificial Sequence: Synthetic oligonucleotide
  Sense strand starting at position 3635 of SEQ ID NO: 1887951
gugacagaaucaccuggua

SEQ ID NO: 2499777 - RNA, 19 nt, Artificial Sequence
  Description of Artificial Sequence: Synthetic oligonucleotide
  Antisense strand to SEQ ID NO: 2499776
uaccaggugauucugucac

SEQ ID NO: 2499778 - RNA, 19 nt, Artificial Sequence
  Description of Artificial Sequence: Synthetic oligonucleotide
  Sense strand starting at position 3638 of SEQ ID NO: 1887951
acagaaucaccugguaguu

SEQ ID NO: 2499779 - RNA, 19 nt, Artificial Sequence
  Description of Artificial Sequence: Synthetic oligonucleotide
  Antisense strand to SEQ ID NO: 2499778
aacuaccaggugauucugu

SEQ ID NO: 2499780 - RNA, 19 nt, Artificial Sequence
  Description of Artificial Sequence: Synthetic oligonucleotide
  Sense strand starting at position 3681 of SEQ ID NO: 1887951
uuugacauguuugauuagu

SEQ ID NO: 2499781 - RNA, 19 nt, Artificial Sequence
  Description of Artificial Sequence: Synthetic oligonucleotide
  Antisense strand to SEQ ID NO: 2499780
acuaaucaaacaugucaaa

SEQ ID NO: 2499782 - RNA, 19 nt, Artificial Sequence
  Description of Artificial Sequence: Synthetic oligonucleotide
  Sense strand starting at position 3683 of SEQ ID NO: 1887951
ugacauguuugauuaguuc

SEQ ID NO: 2499783 - RNA, 19 nt, Artificial Sequence
  Description of Artificial Sequence: Synthetic oligonucleotide
  Antisense strand to SEQ ID NO: 2499782
gaacuaaucaaacauguca

SEQ ID NO: 2499784 - RNA, 19 nt, Artificial Sequence
  Description of Artificial Sequence: Synthetic oligonucleotide
  Sense strand starting at position 3847 of SEQ ID NO: 1887951
gagugauggccuggugaau

SEQ ID NO: 2499785 - RNA, 19 nt, Artificial Sequence
  Description of Artificial Sequence: Synthetic oligonucleotide
  Antisense strand to SEQ ID NO: 2499784
auucaccaggccaucacuc

SEQ ID NO: 2499786 - RNA, 19 nt, Artificial Sequence
  Description of Artificial Sequence: Synthetic oligonucleotide
  Sense strand starting at position 3859 of SEQ ID NO: 1887951
ggugaaugucuccaagccu

SEQ ID NO: 2499787 - RNA, 19 nt, Artificial Sequence
  Description of Artificial Sequence: Synthetic oligonucleotide
  Antisense strand to SEQ ID NO: 2499786
aggcuuggagacauucacc

SEQ ID NO: 2499788 - RNA, 19 nt, Artificial Sequence
  Description of Artificial Sequence: Synthetic oligonucleotide
  Sense strand starting at position 3923 of SEQ ID NO: 1887951
uuuccauaguugugagaug

SEQ ID NO: 2499789 - RNA, 19 nt, Artificial Sequence
  Description of Artificial Sequence: Synthetic oligonucleotide
  Antisense strand to SEQ ID NO: 2499788
caucucacaacuauggaaa

SEQ ID NO: 2499790 - RNA, 19 nt, Artificial Sequence
  Description of Artificial Sequence: Synthetic oligonucleotide
  Sense strand starting at position 3930 of SEQ ID NO: 1887951
aguugugagauggguguuu

SEQ ID NO: 2499791 - RNA, 19 nt, Artificial Sequence
  Description of Artificial Sequence: Synthetic oligonucleotide
  Antisense strand to SEQ ID NO: 2499790
aaacacccaucucacaacu

SEQ ID NO: 2499792 - RNA, 19 nt, Artificial Sequence
  Description of Artificial Sequence: Synthetic oligonucleotide
  Sense strand starting at position 1 of SEQ ID NO: 1887952
gaguguucuguccgcuguu

SEQ ID NO: 2499793 - RNA, 19 nt, Artificial Sequence
  Description of Artificial Sequence: Synthetic oligonucleotide
  Antisense strand to SEQ ID NO: 2499792
aacagcggacagaacacuc

SEQ ID NO: 2499794 - RNA, 19 nt, Artificial Sequence
  Description of Artificial Sequence: Synthetic oligonucleotide
  Sense strand starting at position 3 of SEQ ID NO: 1887952
guguucuguccgcuguuua

SEQ ID NO: 2499795 - RNA, 19 nt, Artificial Sequence
  Description of Artificial Sequence: Synthetic oligonucleotide
  Antisense strand to SEQ ID NO: 2499794
uaaacagcggacagaacac

SEQ ID NO: 2499796 - RNA, 19 nt, Artificial Sequence
  Description of Artificial Sequence: Synthetic oligonucleotide
  Sense strand starting at position 4 of SEQ ID NO: 1887952
uguucuguccgcuguuuaa

SEQ ID NO: 2499797 - RNA, 19 nt, Artificial Sequence
  Description of Artificial Sequence: Synthetic oligonucleotide
  Antisense strand to SEQ ID NO: 2499796
uuaaacagcggacagaaca

SEQ ID NO: 2499798 - RNA, 19 nt, Artificial Sequence
  Description of Artificial Sequence: Synthetic oligonucleotide
  Sense strand starting at position 73 of SEQ ID NO: 1887952
cucagugaguccucacaga

SEQ ID NO: 2499799 - RNA, 19 nt, Artificial Sequence
  Description of Artificial Sequence: Synthetic oligonucleotide
  Antisense strand to SEQ ID NO: 2499798
ucugugaggacucacugag

SEQ ID NO: 2499800 - RNA, 19 nt, Artificial Sequence
  Description of Artificial Sequence: Synthetic oligonucleotide
  Sense strand starting at position 89 of SEQ ID NO: 1887952
agagcugucaccugagauu

SEQ ID NO: 2499801 - RNA, 19 nt, Artificial Sequence
  Description of Artificial Sequence: Synthetic oligonucleotide
  Antisense strand to SEQ ID NO: 2499800
aaucucaggugacagcucu

SEQ ID NO: 2499802 - RNA, 19 nt, Artificial Sequence
  Description of Artificial Sequence: Synthetic oligonucleotide
  Sense strand starting at position 777 of SEQ ID NO: 1887952
gccugcuucccucaugaca

SEQ ID NO: 2499803 - RNA, 19 nt, Artificial Sequence
  Description of Artificial Sequence: Synthetic oligonucleotide
  Antisense strand to SEQ ID NO: 2499802
ugucaugagggaagcaggc

SEQ ID NO: 2499804 - RNA, 19 nt, Artificial Sequence
  Description of Artificial Sequence: Synthetic oligonucleotide
  Sense strand starting at position 789 of SEQ ID NO: 1887952
caugacaucuggccaguga

SEQ ID NO: 2499805 - RNA, 19 nt, Artificial Sequence
  Description of Artificial Sequence: Synthetic oligonucleotide
  Antisense strand to SEQ ID NO: 2499804
ucacuggccagaugucaug

SEQ ID NO: 2499806 - RNA, 19 nt, Artificial Sequence
  Description of Artificial Sequence: Synthetic oligonucleotide
  Sense strand starting at position 990 of SEQ ID NO: 1887952
ccaggauucuggccugcuu

SEQ ID NO: 2499807 - RNA, 19 nt, Artificial Sequence
  Description of Artificial Sequence: Synthetic oligonucleotide
  Antisense strand to SEQ ID NO: 2499806
aagcaggccagaauccugg

SEQ ID NO: 2499808 - RNA, 19 nt, Artificial Sequence
  Description of Artificial Sequence: Synthetic oligonucleotide
  Sense strand starting at position 1032 of SEQ ID NO: 1887952
cggugucuguccuugagag

SEQ ID NO: 2499809 - RNA, 19 nt, Artificial Sequence
  Description of Artificial Sequence: Synthetic oligonucleotide
  Antisense strand to SEQ ID NO: 2499808
cucucaaggacagacaccg

SEQ ID NO: 2499810 - RNA, 19 nt, Artificial Sequence
  Description of Artificial Sequence: Synthetic oligonucleotide
  Sense strand starting at position 1556 of SEQ ID NO: 1887952
ugcagugguagcugaagau

SEQ ID NO: 2499811 - RNA, 19 nt, Artificial Sequence
  Description of Artificial Sequence: Synthetic oligonucleotide
  Antisense strand to SEQ ID NO: 2499810
aucuucagcuaccacugca

SEQ ID NO: 2499812 - RNA, 19 nt, Artificial Sequence
  Description of Artificial Sequence: Synthetic oligonucleotide
  Sense strand starting at position 1578 of SEQ ID NO: 1887952
accuuaucagguuggauca

SEQ ID NO: 2499813 - RNA, 19 nt, Artificial Sequence
  Description of Artificial Sequence: Synthetic oligonucleotide
  Antisense strand to SEQ ID NO: 2499812
ugauccaaccugauaaggu

SEQ ID NO: 2499814 - RNA, 19 nt, Artificial Sequence
  Description of Artificial Sequence: Synthetic oligonucleotide
  Sense strand starting at position 1679 of SEQ ID NO: 1887952
guugcaguucuugcccgaa

SEQ ID NO: 2499815 - RNA, 19 nt, Artificial Sequence
  Description of Artificial Sequence: Synthetic oligonucleotide
  Antisense strand to SEQ ID NO: 2499814
uucgggcaagaacugcaac

SEQ ID NO: 2499816 - RNA, 19 nt, Artificial Sequence
  Description of Artificial Sequence: Synthetic oligonucleotide
  Sense strand starting at position 1814 of SEQ ID NO: 1887952
gcagagugucuggagggau

SEQ ID NO: 2499817 - RNA, 19 nt, Artificial Sequence
  Description of Artificial Sequence: Synthetic oligonucleotide
  Antisense strand to SEQ ID NO: 2499816
aucccuccagacacucugc

SEQ ID NO: 2499818 - RNA, 19 nt, Artificial Sequence
  Description of Artificial Sequence: Synthetic oligonucleotide
  Sense strand starting at position 2082 of SEQ ID NO: 1887952
caggguuacuaagguuaau

SEQ ID NO: 2499819 - RNA, 19 nt, Artificial Sequence
  Description of Artificial Sequence: Synthetic oligonucleotide
  Antisense strand to SEQ ID NO: 2499818
auuaaccuuaguaacccug

SEQ ID NO: 2499820 - RNA, 19 nt, Artificial Sequence
  Description of Artificial Sequence: Synthetic oligonucleotide
  Sense strand starting at position 2195 of SEQ ID NO: 1887952
cucuguucuuaaugaguga

SEQ ID NO: 2499821 - RNA, 19 nt, Artificial Sequence
  Description of Artificial Sequence: Synthetic oligonucleotide
  Antisense strand to SEQ ID NO: 2499820
ucacucauuaagaacagag

SEQ ID NO: 2499822 - RNA, 19 nt, Artificial Sequence
  Description of Artificial Sequence: Synthetic oligonucleotide
  Sense strand starting at position 2199 of SEQ ID NO: 1887952
guucuuaaugagugauggu

SEQ ID NO: 2499823 - RNA, 19 nt, Artificial Sequence
  Description of Artificial Sequence: Synthetic oligonucleotide
  Antisense strand to SEQ ID NO: 2499822
accaucacucauuaagaac

SEQ ID NO: 2499824 - RNA, 19 nt, Artificial Sequence
  Description of Artificial Sequence: Synthetic oligonucleotide
  Sense strand starting at position 2208 of SEQ ID NO: 1887952
gagugauggucaggcccuu

SEQ ID NO: 2499825 - RNA, 19 nt, Artificial Sequence
  Description of Artificial Sequence: Synthetic oligonucleotide
  Antisense strand to SEQ ID NO: 2499824
aagggccugaccaucacuc

SEQ ID NO: 2499826 - RNA, 19 nt, Artificial Sequence
  Description of Artificial Sequence: Synthetic oligonucleotide
  Sense strand starting at position 2562 of SEQ ID NO: 1887952
ggguauggcuccuuguaug

SEQ ID NO: 2499827 - RNA, 19 nt, Artificial Sequence
  Description of Artificial Sequence: Synthetic oligonucleotide
  Antisense strand to SEQ ID NO: 2499826
cauacaaggagccauaccc

SEQ ID NO: 2499828 - RNA, 19 nt, Artificial Sequence
  Description of Artificial Sequence: Synthetic oligonucleotide
  Sense strand starting at position 2567 of SEQ ID NO: 1887952
uggcuccuuguaugaucua

SEQ ID NO: 2499829 - RNA, 19 nt, Artificial Sequence
  Description of Artificial Sequence: Synthetic oligonucleotide
  Antisense strand to SEQ ID NO: 2499828
uagaucauacaaggagcca

SEQ ID NO: 2499830 - RNA, 19 nt, Artificial Sequence
  Description of Artificial Sequence: Synthetic oligonucleotide
  Sense strand starting at position 2620 of SEQ ID NO: 1887952
agcaguguuucucuggaaa

SEQ ID NO: 2499831 - RNA, 19 nt, Artificial Sequence
  Description of Artificial Sequence: Synthetic oligonucleotide
  Antisense strand to SEQ ID NO: 2499830
uuuccagagaaacacugcu

SEQ ID NO: 2499832 - RNA, 19 nt, Artificial Sequence
  Description of Artificial Sequence: Synthetic oligonucleotide
  Sense strand starting at position 2792 of SEQ ID NO: 1887952
accagaaccuucugugaca

SEQ ID NO: 2499833 - RNA, 19 nt, Artificial Sequence
  Description of Artificial Sequence: Synthetic oligonucleotide
  Antisense strand to SEQ ID NO: 2499832
ugucacagaagguucuggu

SEQ ID NO: 2499834 - RNA, 19 nt, Artificial Sequence
  Description of Artificial Sequence: Synthetic oligonucleotide
  Sense strand starting at position 2793 of SEQ ID NO: 1887952
ccagaaccuucugugacau

SEQ ID NO: 2499835 - RNA, 19 nt, Artificial Sequence
  Description of Artificial Sequence: Synthetic oligonucleotide
  Antisense strand to SEQ ID NO: 2499834
augucacagaagguucugg

SEQ ID NO: 2499836 - RNA, 19 nt, Artificial Sequence
  Description of Artificial Sequence: Synthetic oligonucleotide
  Sense strand starting at position 2905 of SEQ ID NO: 1887952
gggugcugcuguuuaacaa

SEQ ID NO: 2499837 - RNA, 19 nt, Artificial Sequence
  Description of Artificial Sequence: Synthetic oligonucleotide
  Antisense strand to SEQ ID NO: 2499836
uuguuaaacagcagcaccc

SEQ ID NO: 2499838 - RNA, 19 nt, Artificial Sequence
  Description of Artificial Sequence: Synthetic oligonucleotide
  Sense strand starting at position 2953 of SEQ ID NO: 1887952
auagaaauaugcuuuguag

SEQ ID NO: 2499839 - RNA, 19 nt, Artificial Sequence
  Description of Artificial Sequence: Synthetic oligonucleotide
  Antisense strand to SEQ ID NO: 2499838
cuacaaagcauauuucuau

SEQ ID NO: 2499840 - RNA, 19 nt, Artificial Sequence
  Description of Artificial Sequence: Synthetic oligonucleotide
  Sense strand starting at position 2955 of SEQ ID NO: 1887952
agaaauaugcuuuguagga

SEQ ID NO: 2499841 - RNA, 19 nt, Artificial Sequence
  Description of Artificial Sequence: Synthetic oligonucleotide
  Antisense strand to SEQ ID NO: 2499840
uccuacaaagcauauuucu

SEQ ID NO: 2499842 - RNA, 19 nt, Artificial Sequence
  Description of Artificial Sequence: Synthetic oligonucleotide
  Sense strand starting at position 2956 of SEQ ID NO: 1887952
gaaauaugcuuuguaggaa

SEQ ID NO: 2499843 - RNA, 19 nt, Artificial Sequence
  Description of Artificial Sequence: Synthetic oligonucleotide
  Antisense strand to SEQ ID NO: 2499842
uuccuacaaagcauauuuc

SEQ ID NO: 2499844 - RNA, 19 nt, Artificial Sequence
  Description of Artificial Sequence: Synthetic oligonucleotide
  Sense strand starting at position 3111 of SEQ ID NO: 1887952
ucuggacagucguaaggaa

SEQ ID NO: 2499845 - RNA, 19 nt, Artificial Sequence
  Description of Artificial Sequence: Synthetic oligonucleotide
  Antisense strand to SEQ ID NO: 2499844
uuccuuacgacuguccaga

SEQ ID NO: 2499846 - RNA, 19 nt, Artificial Sequence
  Description of Artificial Sequence: Synthetic oligonucleotide
  Sense strand starting at position 3303 of SEQ ID NO: 1887952
cacagaggaucucggauua

SEQ ID NO: 2499847 - RNA, 19 nt, Artificial Sequence
  Description of Artificial Sequence: Synthetic oligonucleotide
  Antisense strand to SEQ ID NO: 2499846
uaauccgagauccucugug

SEQ ID NO: 2499848 - RNA, 19 nt, Artificial Sequence
  Description of Artificial Sequence: Synthetic oligonucleotide
  Sense strand starting at position 3654 of SEQ ID NO: 1887952
acaggacccucagaaagau

SEQ ID NO: 2499849 - RNA, 19 nt, Artificial Sequence
  Description of Artificial Sequence: Synthetic oligonucleotide
  Antisense strand to SEQ ID NO: 2499848
aucuuucugaggguccugu

SEQ ID NO: 2499850 - RNA, 19 nt, Artificial Sequence
  Description of Artificial Sequence: Synthetic oligonucleotide
  Sense strand starting at position 3871 of SEQ ID NO: 1887952
acucaugcuugucugauuu

SEQ ID NO: 2499851 - RNA, 19 nt, Artificial Sequence
  Description of Artificial Sequence: Synthetic oligonucleotide
  Antisense strand to SEQ ID NO: 2499850
aaaucagacaagcaugagu

SEQ ID NO: 2499852 - RNA, 19 nt, Artificial Sequence
  Description of Artificial Sequence: Synthetic oligonucleotide
  Sense strand starting at position 3909 of SEQ ID NO: 1887952
ccugauaaagccuguuauu

SEQ ID NO: 2499853 - RNA, 19 nt, Artificial Sequence
  Description of Artificial Sequence: Synthetic oligonucleotide
  Antisense strand to SEQ ID NO: 2499852
aauaacaggcuuuaucagg

SEQ ID NO: 2499854 - RNA, 19 nt, Artificial Sequence
  Description of Artificial Sequence: Synthetic oligonucleotide
  Sense strand starting at position 3940 of SEQ ID NO: 1887952
auaggaguucccugaauuc

SEQ ID NO: 2499855 - RNA, 19 nt, Artificial Sequence
  Description of Artificial Sequence: Synthetic oligonucleotide
  Antisense strand to SEQ ID NO: 2499854
gaauucagggaacuccuau

SEQ ID NO: 2499856 - RNA, 19 nt, Artificial Sequence
  Description of Artificial Sequence: Synthetic oligonucleotide
  Sense strand starting at position 358 of SEQ ID NO: 1887953
acaggacccucagaaagau

SEQ ID NO: 2499857 - RNA, 19 nt, Artificial Sequence
  Description of Artificial Sequence: Synthetic oligonucleotide
  Antisense strand to SEQ ID NO: 2499856
aucuuucugaggguccugu

SEQ ID NO: 2499858 - RNA, 19 nt, Artificial Sequence
  Description of Artificial Sequence: Synthetic oligonucleotide
  Sense strand starting at position 575 of SEQ ID NO: 1887953
acucaugcuugucugauuu

SEQ ID NO: 2499859 - RNA, 19 nt, Artificial Sequence
  Description of Artificial Sequence: Synthetic oligonucleotide
  Antisense strand to SEQ ID NO: 2499858
aaaucagacaagcaugagu

SEQ ID NO: 2499860 - RNA, 19 nt, Artificial Sequence
  Description of Artificial Sequence: Synthetic oligonucleotide
  Sense strand starting at position 613 of SEQ ID NO: 1887953
ccugauaaagccuguuauu

SEQ ID NO: 2499861 - RNA, 19 nt, Artificial Sequence
  Description of Artificial Sequence: Synthetic oligonucleotide
  Antisense strand to SEQ ID NO: 2499860
aauaacaggcuuuaucagg

SEQ ID NO: 2499862 - RNA, 19 nt, Artificial Sequence
  Description of Artificial Sequence: Synthetic oligonucleotide
  Sense strand starting at position 644 of SEQ ID NO: 1887953
auaggaguucccugaauuc

SEQ ID NO: 2499863 - RNA, 19 nt, Artificial Sequence
  Description of Artificial Sequence: Synthetic oligonucleotide
  Antisense strand to SEQ ID NO: 2499862
gaauucagggaacuccuau

SEQ ID NO: 2499864 - RNA, 19 nt, Artificial Sequence
  Description of Artificial Sequence: Synthetic oligonucleotide
  Sense strand starting at position 691 of SEQ ID NO: 1887953
caggcuaagcugugcuuaa

SEQ ID NO: 2499865 - RNA, 19 nt, Artificial Sequence
  Description of Artificial Sequence: Synthetic oligonucleotide
  Antisense strand to SEQ ID NO: 2499864
uuaagcacagcuuagccug

SEQ ID NO: 2499866 - RNA, 19 nt, Artificial Sequence
  Description of Artificial Sequence: Synthetic oligonucleotide
  Sense strand starting at position 692 of SEQ ID NO: 1887953
aggcuaagcugugcuuaaa

SEQ ID NO: 2499867 - RNA, 19 nt, Artificial Sequence
  Description of Artificial Sequence: Synthetic oligonucleotide
  Antisense strand to SEQ ID NO: 2499866
uuuaagcacagcuuagccu

SEQ ID NO: 2499868 - RNA, 19 nt, Artificial Sequence
  Description of Artificial Sequence: Synthetic oligonucleotide
  Sense strand starting at position 749 of SEQ ID NO: 1887953
gugacagaaucaccuggua

SEQ ID NO: 2499869 - RNA, 19 nt, Artificial Sequence
  Description of Artificial Sequence: Synthetic oligonucleotide
  Antisense strand to SEQ ID NO: 2499868
uaccaggugauucugucac

SEQ ID NO: 2499870 - RNA, 19 nt, Artificial Sequence
  Description of Artificial Sequence: Synthetic oligonucleotide
  Sense strand starting at position 752 of SEQ ID NO: 1887953
acagaaucaccugguaguu

SEQ ID NO: 2499871 - RNA, 19 nt, Artificial Sequence
  Description of Artificial Sequence: Synthetic oligonucleotide
  Antisense strand to SEQ ID NO: 2499870
aacuaccaggugauucugu

SEQ ID NO: 2499872 - RNA, 19 nt, Artificial Sequence
  Description of Artificial Sequence: Synthetic oligonucleotide
  Sense strand starting at position 797 of SEQ ID NO: 1887953
ugacauguuugauuaguuc

SEQ ID NO: 2499873 - RNA, 19 nt, Artificial Sequence
  Description of Artificial Sequence: Synthetic oligonucleotide
  Antisense strand to SEQ ID NO: 2499872
gaacuaaucaaacauguca

SEQ ID NO: 2499874 - RNA, 19 nt, Artificial Sequence
  Description of Artificial Sequence: Synthetic oligonucleotide
  Sense strand starting at position 961 of SEQ ID NO: 1887953
gagugauggccuggugaau

SEQ ID NO: 2499875 - RNA, 19 nt, Artificial Sequence
  Description of Artificial Sequence: Synthetic oligonucleotide
  Antisense strand to SEQ ID NO: 2499874
auucaccaggccaucacuc

SEQ ID NO: 2499876 - RNA, 19 nt, Artificial Sequence
  Description of Artificial Sequence: Synthetic oligonucleotide
  Sense strand starting at position 973 of SEQ ID NO: 1887953
ggugaaugucuccaagccu

SEQ ID NO: 2499877 - RNA, 19 nt, Artificial Sequence
  Description of Artificial Sequence: Synthetic oligonucleotide
  Antisense strand to SEQ ID NO: 2499876
aggcuuggagacauucacc

SEQ ID NO: 2499878 - RNA, 19 nt, Artificial Sequence
  Description of Artificial Sequence: Synthetic oligonucleotide
  Sense strand starting at position 1044 of SEQ ID NO: 1887953
aguugugagauggguguuu

SEQ ID NO: 2499879 - RNA, 19 nt, Artificial Sequence
  Description of Artificial Sequence: Synthetic oligonucleotide
  Antisense strand to SEQ ID NO: 2499878
aaacacccaucucacaacu

SEQ ID NO: 2499880 - RNA, 19 nt, Artificial Sequence
  Description of Artificial Sequence: Synthetic oligonucleotide
  Sense strand starting at position 1670 of SEQ ID NO: 1887953
guauguaaacacugaguac

SEQ ID NO: 2499881 - RNA, 19 nt, Artificial Sequence
  Description of Artificial Sequence: Synthetic oligonucleotide
  Antisense strand to SEQ ID NO: 2499880
guacucaguguuuacauac

SEQ ID NO: 2499882 - RNA, 19 nt, Artificial Sequence
  Description of Artificial Sequence: Synthetic oligonucleotide
  Sense strand starting at position 1673 of SEQ ID NO: 1887953
uguaaacacugaguacaau

SEQ ID NO: 2499883 - RNA, 19 nt, Artificial Sequence
  Description of Artificial Sequence: Synthetic oligonucleotide
  Antisense strand to SEQ ID NO: 2499882
auuguacucaguguuuaca

SEQ ID NO: 2499884 - RNA, 19 nt, Artificial Sequence
  Description of Artificial Sequence: Synthetic oligonucleotide
  Sense strand starting at position 1683 of SEQ ID NO: 1887953
gaguacaaucauuggcaca

SEQ ID NO: 2499885 - RNA, 19 nt, Artificial Sequence
  Description of Artificial Sequence: Synthetic oligonucleotide
  Antisense strand to SEQ ID NO: 2499884
ugugccaaugauuguacuc

SEQ ID NO: 2499886 - RNA, 19 nt, Artificial Sequence
  Description of Artificial Sequence: Synthetic oligonucleotide
  Sense strand starting at position 1721 of SEQ ID NO: 1887953
acgguaugaagucaaccua

SEQ ID NO: 2499887 - RNA, 19 nt, Artificial Sequence
  Description of Artificial Sequence: Synthetic oligonucleotide
  Antisense strand to SEQ ID NO: 2499886
uagguugacuucauaccgu

SEQ ID NO: 2499888 - RNA, 19 nt, Artificial Sequence
  Description of Artificial Sequence: Synthetic oligonucleotide
  Sense strand starting at position 1736 of SEQ ID NO: 1887953
ccuagacagugagauauuu

SEQ ID NO: 2499889 - RNA, 19 nt, Artificial Sequence
  Description of Artificial Sequence: Synthetic oligonucleotide
  Antisense strand to SEQ ID NO: 2499888
aaauaucucacugucuagg

SEQ ID NO: 2499890 - RNA, 19 nt, Artificial Sequence
  Description of Artificial Sequence: Synthetic oligonucleotide
  Sense strand starting at position 1784 of SEQ ID NO: 1887953
aaggguucuuaccuggaua

SEQ ID NO: 2499891 - RNA, 19 nt, Artificial Sequence
  Description of Artificial Sequence: Synthetic oligonucleotide
  Antisense strand to SEQ ID NO: 2499890
uauccagguaagaacccuu

SEQ ID NO: 2499892 - RNA, 19 nt, Artificial Sequence
  Description of Artificial Sequence: Synthetic oligonucleotide
  Sense strand starting at position 1785 of SEQ ID NO: 1887953
aggguucuuaccuggauag

SEQ ID NO: 2499893 - RNA, 19 nt, Artificial Sequence
  Description of Artificial Sequence: Synthetic oligonucleotide
  Antisense strand to SEQ ID NO: 2499892
cuauccagguaagaacccu

SEQ ID NO: 2499894 - RNA, 19 nt, Artificial Sequence
  Description of Artificial Sequence: Synthetic oligonucleotide
  Sense strand starting at position 1869 of SEQ ID NO: 1887953
gaggaaacagucugcaagu

SEQ ID NO: 2499895 - RNA, 19 nt, Artificial Sequence
  Description of Artificial Sequence: Synthetic oligonucleotide
  Antisense strand to SEQ ID NO: 2499894
acuugcagacuguuuccuc

SEQ ID NO: 2499896 - RNA, 19 nt, Artificial Sequence
  Description of Artificial Sequence: Synthetic oligonucleotide
  Sense strand starting at position 2226 of SEQ ID NO: 1887953
ggagaaugccuguaaucuc

SEQ ID NO: 2499897 - RNA, 19 nt, Artificial Sequence
  Description of Artificial Sequence: Synthetic oligonucleotide
  Antisense strand to SEQ ID NO: 2499896
gagauuacaggcauucucc

SEQ ID NO: 2499898 - RNA, 19 nt, Artificial Sequence
  Description of Artificial Sequence: Synthetic oligonucleotide
  Sense strand starting at position 2584 of SEQ ID NO: 1887953
agagaaagcugccaagaca

SEQ ID NO: 2499899 - RNA, 19 nt, Artificial Sequence
  Description of Artificial Sequence: Synthetic oligonucleotide
  Antisense strand to SEQ ID NO: 2499898
ugucuuggcagcuuucucu

SEQ ID NO: 2499900 - RNA, 19 nt, Artificial Sequence
  Description of Artificial Sequence: Synthetic oligonucleotide
  Sense strand starting at position 2613 of SEQ ID NO: 1887953
ggaagaacuuauugagaga

SEQ ID NO: 2499901 - RNA, 19 nt, Artificial Sequence
  Description of Artificial Sequence: Synthetic oligonucleotide
  Antisense strand to SEQ ID NO: 2499900
ucucucaauaaguucuucc

SEQ ID NO: 2499902 - RNA, 19 nt, Artificial Sequence
  Description of Artificial Sequence: Synthetic oligonucleotide
  Sense strand starting at position 2658 of SEQ ID NO: 1887953
aaauaauaaugaggagaga

SEQ ID NO: 2499903 - RNA, 19 nt, Artificial Sequence
  Description of Artificial Sequence: Synthetic oligonucleotide
  Antisense strand to SEQ ID NO: 2499902
ucucuccucauuauuauuu

SEQ ID NO: 2499904 - RNA, 19 nt, Artificial Sequence
  Description of Artificial Sequence: Synthetic oligonucleotide
  Sense strand starting at position 2678 of SEQ ID NO: 1887953
ccucgacugagucagguuu

SEQ ID NO: 2499905 - RNA, 19 nt, Artificial Sequence
  Description of Artificial Sequence: Synthetic oligonucleotide
  Antisense strand to SEQ ID NO: 2499904
aaaccugacucagucgagg

SEQ ID NO: 2499906 - RNA, 19 nt, Artificial Sequence
  Description of Artificial Sequence: Synthetic oligonucleotide
  Sense strand starting at position 2684 of SEQ ID NO: 1887953
cugagucagguuugaacau

SEQ ID NO: 2499907 - RNA, 19 nt, Artificial Sequence
  Description of Artificial Sequence: Synthetic oligonucleotide
  Antisense strand to SEQ ID NO: 2499906
auguucaaaccugacucag

SEQ ID NO: 2499908 - RNA, 19 nt, Artificial Sequence
  Description of Artificial Sequence: Synthetic oligonucleotide
  Sense strand starting at position 2695 of SEQ ID NO: 1887953
uugaacauaucagcuguaa

SEQ ID NO: 2499909 - RNA, 19 nt, Artificial Sequence
  Description of Artificial Sequence: Synthetic oligonucleotide
  Antisense strand to SEQ ID NO: 2499908
uuacagcugauauguucaa

SEQ ID NO: 2499910 - RNA, 19 nt, Artificial Sequence
  Description of Artificial Sequence: Synthetic oligonucleotide
  Sense strand starting at position 2724 of SEQ ID NO: 1887953
gaagaugacugaggaacaa

SEQ ID NO: 2499911 - RNA, 19 nt, Artificial Sequence
  Description of Artificial Sequence: Synthetic oligonucleotide
  Antisense strand to SEQ ID NO: 2499910
uuguuccucagucaucuuc

SEQ ID NO: 2499912 - RNA, 19 nt, Artificial Sequence
  Description of Artificial Sequence: Synthetic oligonucleotide
  Sense strand starting at position 2760 of SEQ ID NO: 1887953
guuaaauugcaguauuaag

SEQ ID NO: 2499913 - RNA, 19 nt, Artificial Sequence
  Description of Artificial Sequence: Synthetic oligonucleotide
  Antisense strand to SEQ ID NO: 2499912
cuuaauacugcaauuuaac

SEQ ID NO: 2499914 - RNA, 19 nt, Artificial Sequence
  Description of Artificial Sequence: Synthetic oligonucleotide
  Sense strand starting at position 2767 of SEQ ID NO: 1887953
ugcaguauuaagggugaca

SEQ ID NO: 2499915 - RNA, 19 nt, Artificial Sequence
  Description of Artificial Sequence: Synthetic oligonucleotide
  Antisense strand to SEQ ID NO: 2499914
ugucacccuuaauacugca

SEQ ID NO: 2499916 - RNA, 19 nt, Artificial Sequence
  Description of Artificial Sequence: Synthetic oligonucleotide
  Sense strand starting at position 2769 of SEQ ID NO: 1887953
caguauuaagggugacaau

SEQ ID NO: 2499917 - RNA, 19 nt, Artificial Sequence
  Description of Artificial Sequence: Synthetic oligonucleotide
  Antisense strand to SEQ ID NO: 2499916
auugucacccuuaauacug

SEQ ID NO: 2499918 - RNA, 19 nt, Artificial Sequence
  Description of Artificial Sequence: Synthetic oligonucleotide
  Sense strand starting at position 2866 of SEQ ID NO: 1887953
aaguaagagucugcucugu

SEQ ID NO: 2499919 - RNA, 19 nt, Artificial Sequence
  Description of Artificial Sequence: Synthetic oligonucleotide
  Antisense strand to SEQ ID NO: 2499918
acagagcagacucuuacuu

SEQ ID NO: 2499920 - RNA, 19 nt, Artificial Sequence
  Description of Artificial Sequence: Synthetic oligonucleotide
  Sense strand starting at position 3111 of SEQ ID NO: 1887953
gcguucggccaugaaacuu

SEQ ID NO: 2499921 - RNA, 19 nt, Artificial Sequence
  Description of Artificial Sequence: Synthetic oligonucleotide
  Antisense strand to SEQ ID NO: 2499920
aaguuucauggccgaacgc

SEQ ID NO: 2499922 - RNA, 19 nt, Artificial Sequence
  Description of Artificial Sequence: Synthetic oligonucleotide
  Sense strand starting at position 3193 of SEQ ID NO: 1887953
cccauuuguugguagauuu

SEQ ID NO: 2499923 - RNA, 19 nt, Artificial Sequence
  Description of Artificial Sequence: Synthetic oligonucleotide
  Antisense strand to SEQ ID NO: 2499922
aaaucuaccaacaaauggg

SEQ ID NO: 2499924 - RNA, 19 nt, Artificial Sequence
  Description of Artificial Sequence: Synthetic oligonucleotide
  Sense strand starting at position 3228 of SEQ ID NO: 1887953
cgacgugccaacgaugaau

SEQ ID NO: 2499925 - RNA, 19 nt, Artificial Sequence
  Description of Artificial Sequence: Synthetic oligonucleotide
  Antisense strand to SEQ ID NO: 2499924
auucaucguuggcacgucg

SEQ ID NO: 2499926 - RNA, 19 nt, Artificial Sequence
  Description of Artificial Sequence: Synthetic oligonucleotide
  Sense strand starting at position 3312 of SEQ ID NO: 1887953
ggagguaagucaaguagag

SEQ ID NO: 2499927 - RNA, 19 nt, Artificial Sequence
  Description of Artificial Sequence: Synthetic oligonucleotide
  Antisense strand to SEQ ID NO: 2499926
cucuacuugacuuaccucc

SEQ ID NO: 2499928 - RNA, 19 nt, Artificial Sequence
  Description of Artificial Sequence: Synthetic oligonucleotide
  Sense strand starting at position 3532 of SEQ ID NO: 1887953
ccucguuugcuuccuucua

SEQ ID NO: 2499929 - RNA, 19 nt, Artificial Sequence
  Description of Artificial Sequence: Synthetic oligonucleotide
  Antisense strand to SEQ ID NO: 2499928
uagaaggaagcaaacgagg

SEQ ID NO: 2499930 - RNA, 19 nt, Artificial Sequence
  Description of Artificial Sequence: Synthetic oligonucleotide
  Sense strand starting at position 3607 of SEQ ID NO: 1887953
cuucuuugguaacucgaua

SEQ ID NO: 2499931 - RNA, 19 nt, Artificial Sequence
  Description of Artificial Sequence: Synthetic oligonucleotide
  Antisense strand to SEQ ID NO: 2499930
uaucgaguuaccaaagaag

SEQ ID NO: 2499932 - RNA, 19 nt, Artificial Sequence
  Description of Artificial Sequence: Synthetic oligonucleotide
  Sense strand starting at position 3612 of SEQ ID NO: 1887953
uugguaacucgauacccua

SEQ ID NO: 2499933 - RNA, 19 nt, Artificial Sequence
  Description of Artificial Sequence: Synthetic oligonucleotide
  Antisense strand to SEQ ID NO: 2499932
uaggguaucgaguuaccaa

SEQ ID NO: 2499934 - RNA, 19 nt, Artificial Sequence
  Description of Artificial Sequence: Synthetic oligonucleotide
  Sense strand starting at position 3768 of SEQ ID NO: 1887953
uggaaacacucggaaagaa

SEQ ID NO: 2499935 - RNA, 19 nt, Artificial Sequence
  Description of Artificial Sequence: Synthetic oligonucleotide
  Antisense strand to SEQ ID NO: 2499934
uucuuuccgaguguuucca

SEQ ID NO: 2499936 - RNA, 19 nt, Artificial Sequence
  Description of Artificial Sequence: Synthetic oligonucleotide
  Sense strand starting at position 6 of SEQ ID NO: 1887954
ggaucauggccauggugau

SEQ ID NO: 2499937 - RNA, 19 nt, Artificial Sequence
  Description of Artificial Sequence: Synthetic oligonucleotide
  Antisense strand to SEQ ID NO: 2499936
aucaccauggccaugaucc

SEQ ID NO: 2499938 - RNA, 19 nt, Artificial Sequence
  Description of Artificial Sequence: Synthetic oligonucleotide
  Sense strand starting at position 19 of SEQ ID NO: 1887954
ggugaucaggcaugauuac

SEQ ID NO: 2499939 - RNA, 19 nt, Artificial Sequence
  Description of Artificial Sequence: Synthetic oligonucleotide
  Antisense strand to SEQ ID NO: 2499938
guaaucaugccugaucacc

SEQ ID NO: 2499940 - RNA, 19 nt, Artificial Sequence
  Description of Artificial Sequence: Synthetic oligonucleotide
  Sense strand starting at position 112 of SEQ ID NO: 1887954
gucacaugugccugucuca

SEQ ID NO: 2499941 - RNA, 19 nt, Artificial Sequence
  Description of Artificial Sequence: Synthetic oligonucleotide
  Antisense strand to SEQ ID NO: 2499940
ugagacaggcacaugugac

SEQ ID NO: 2499942 - RNA, 19 nt, Artificial Sequence
  Description of Artificial Sequence: Synthetic oligonucleotide
  Sense strand starting at position 159 of SEQ ID NO: 1887954
acugcugucaccugaguga

SEQ ID NO: 2499943 - RNA, 19 nt, Artificial Sequence
  Description of Artificial Sequence: Synthetic oligonucleotide
  Antisense strand to SEQ ID NO: 2499942
ucacucaggugacagcagu

SEQ ID NO: 2499944 - RNA, 19 nt, Artificial Sequence
  Description of Artificial Sequence: Synthetic oligonucleotide
  Sense strand starting at position 163 of SEQ ID NO: 1887954
cugucaccugagugaucca

SEQ ID NO: 2499945 - RNA, 19 nt, Artificial Sequence
  Description of Artificial Sequence: Synthetic oligonucleotide
  Antisense strand to SEQ ID NO: 2499944
uggaucacucaggugacag

SEQ ID NO: 2499946 - RNA, 19 nt, Artificial Sequence
  Description of Artificial Sequence: Synthetic oligonucleotide
  Sense strand starting at position 275 of SEQ ID NO: 1887954
aguguaugucucugagcgu

SEQ ID NO: 2499947 - RNA, 19 nt, Artificial Sequence
  Description of Artificial Sequence: Synthetic oligonucleotide
  Antisense strand to SEQ ID NO: 2499946
acgcucagagacauacacu

SEQ ID NO: 2499948 - RNA, 19 nt, Artificial Sequence
  Description of Artificial Sequence: Synthetic oligonucleotide
  Sense strand starting at position 313 of SEQ ID NO: 1887954
uguguucuauccuagagga

SEQ ID NO: 2499949 - RNA, 19 nt, Artificial Sequence
  Description of Artificial Sequence: Synthetic oligonucleotide
  Antisense strand to SEQ ID NO: 2499948
uccucuaggauagaacaca

SEQ ID NO: 2499950 - RNA, 19 nt, Artificial Sequence
  Description of Artificial Sequence: Synthetic oligonucleotide
  Sense strand starting at position 332 of SEQ ID NO: 1887954
agaugccuucccuaagauc

SEQ ID NO: 2499951 - RNA, 19 nt, Artificial Sequence
  Description of Artificial Sequence: Synthetic oligonucleotide
  Antisense strand to SEQ ID NO: 2499950
gaucuuagggaaggcaucu

SEQ ID NO: 2499952 - RNA, 19 nt, Artificial Sequence
  Description of Artificial Sequence: Synthetic oligonucleotide
  Sense strand starting at position 405 of SEQ ID NO: 1887954
gcaagaagauugucccacu

SEQ ID NO: 2499953 - RNA, 19 nt, Artificial Sequence
  Description of Artificial Sequence: Synthetic oligonucleotide
  Antisense strand to SEQ ID NO: 2499952
agugggacaaucuucuugc

SEQ ID NO: 2499954 - RNA, 19 nt, Artificial Sequence
  Description of Artificial Sequence: Synthetic oligonucleotide
  Sense strand starting at position 408 of SEQ ID NO: 1887954
agaagauugucccacuuua

SEQ ID NO: 2499955 - RNA, 19 nt, Artificial Sequence
  Description of Artificial Sequence: Synthetic oligonucleotide
  Antisense strand to SEQ ID NO: 2499954
uaaagugggacaaucuucu

SEQ ID NO: 2499956 - RNA, 19 nt, Artificial Sequence
  Description of Artificial Sequence: Synthetic oligonucleotide
  Sense strand starting at position 617 of SEQ ID NO: 1887954
ucagccuucguuuggacaa

SEQ ID NO: 2499957 - RNA, 19 nt, Artificial Sequence
  Description of Artificial Sequence: Synthetic oligonucleotide
  Antisense strand to SEQ ID NO: 2499956
uuguccaaacgaaggcuga

SEQ ID NO: 2499958 - RNA, 19 nt, Artificial Sequence
  Description of Artificial Sequence: Synthetic oligonucleotide
  Sense strand starting at position 632 of SEQ ID NO: 1887954
acaaguagcugagcucaau

SEQ ID NO: 2499959 - RNA, 19 nt, Artificial Sequence
  Description of Artificial Sequence: Synthetic oligonucleotide
  Antisense strand to SEQ ID NO: 2499958
auugagcucagcuacuugu

SEQ ID NO: 2499960 - RNA, 19 nt, Artificial Sequence
  Description of Artificial Sequence: Synthetic oligonucleotide
  Sense strand starting at position 2914 of SEQ ID NO: 1887954
cccaaauguuccuggaauc

SEQ ID NO: 2499961 - RNA, 19 nt, Artificial Sequence
  Description of Artificial Sequence: Synthetic oligonucleotide
  Antisense strand to SEQ ID NO: 2499960
gauuccaggaacauuuggg

SEQ ID NO: 2499962 - RNA, 19 nt, Artificial Sequence
  Description of Artificial Sequence: Synthetic oligonucleotide
  Sense strand starting at position 3055 of SEQ ID NO: 1887954
gaaggcauggccugauaga

SEQ ID NO: 2499963 - RNA, 19 nt, Artificial Sequence
  Description of Artificial Sequence: Synthetic oligonucleotide
  Antisense strand to SEQ ID NO: 2499962
ucuaucaggccaugccuuc

SEQ ID NO: 2499964 - RNA, 19 nt, Artificial Sequence
  Description of Artificial Sequence: Synthetic oligonucleotide
  Sense strand starting at position 3105 of SEQ ID NO: 1887954
gaaccucauuugucucgua

SEQ ID NO: 2499965 - RNA, 19 nt, Artificial Sequence
  Description of Artificial Sequence: Synthetic oligonucleotide
  Antisense strand to SEQ ID NO: 2499964
uacgagacaaaugagguuc

SEQ ID NO: 2499966 - RNA, 19 nt, Artificial Sequence
  Description of Artificial Sequence: Synthetic oligonucleotide
  Sense strand starting at position 3108 of SEQ ID NO: 1887954
ccucauuugucucguaauu

SEQ ID NO: 2499967 - RNA, 19 nt, Artificial Sequence
  Description of Artificial Sequence: Synthetic oligonucleotide
  Antisense strand to SEQ ID NO: 2499966
aauuacgagacaaaugagg

SEQ ID NO: 2499968 - RNA, 19 nt, Artificial Sequence
  Description of Artificial Sequence: Synthetic oligonucleotide
  Sense strand starting at position 3110 of SEQ ID NO: 1887954
ucauuugucucguaauuug

SEQ ID NO: 2499969 - RNA, 19 nt, Artificial Sequence
  Description of Artificial Sequence: Synthetic oligonucleotide
  Antisense strand to SEQ ID NO: 2499968
caaauuacgagacaaauga

SEQ ID NO: 2499970 - RNA, 19 nt, Artificial Sequence
  Description of Artificial Sequence: Synthetic oligonucleotide
  Sense strand starting at position 3161 of SEQ ID NO: 1887954
uccugucagucugcagaga

SEQ ID NO: 2499971 - RNA, 19 nt, Artificial Sequence
  Description of Artificial Sequence: Synthetic oligonucleotide
  Antisense strand to SEQ ID NO: 2499970
ucucugcagacugacagga

SEQ ID NO: 2499972 - RNA, 19 nt, Artificial Sequence
  Description of Artificial Sequence: Synthetic oligonucleotide
  Sense strand starting at position 3264 of SEQ ID NO: 1887954
uugggucauuuacaacuau

SEQ ID NO: 2499973 - RNA, 19 nt, Artificial Sequence
  Description of Artificial Sequence: Synthetic oligonucleotide
  Antisense strand to SEQ ID NO: 2499972
auaguuguaaaugacccaa

SEQ ID NO: 2499974 - RNA, 19 nt, Artificial Sequence
  Description of Artificial Sequence: Synthetic oligonucleotide
  Sense strand starting at position 3957 of SEQ ID NO: 1887954
ggaugucuuuccucacuuc

SEQ ID NO: 2499975 - RNA, 19 nt, Artificial Sequence
  Description of Artificial Sequence: Synthetic oligonucleotide
  Antisense strand to SEQ ID NO: 2499974
gaagugaggaaagacaucc

SEQ ID NO: 2499976 - RNA, 19 nt, Artificial Sequence
  Description of Artificial Sequence: Synthetic oligonucleotide
  Sense strand starting at position 145 of SEQ ID NO: 1887955
gagggauguccugaugcag

SEQ ID NO: 2499977 - RNA, 19 nt, Artificial Sequence
  Description of Artificial Sequence: Synthetic oligonucleotide
  Antisense strand to SEQ ID NO: 2499976
cugcaucaggacaucccuc

SEQ ID NO: 2499978 - RNA, 19 nt, Artificial Sequence
  Description of Artificial Sequence: Synthetic oligonucleotide
  Sense strand starting at position 227 of SEQ ID NO: 1887955
agaccuggacugcgagaaa

SEQ ID NO: 2499979 - RNA, 19 nt, Artificial Sequence
  Description of Artificial Sequence: Synthetic oligonucleotide
  Antisense strand to SEQ ID NO: 2499978
uuucucgcaguccaggucu

SEQ ID NO: 2499980 - RNA, 19 nt, Artificial Sequence
  Description of Artificial Sequence: Synthetic oligonucleotide
  Sense strand starting at position 575 of SEQ ID NO: 1887955
gggucagcgcugggagauu

SEQ ID NO: 2499981 - RNA, 19 nt, Artificial Sequence
  Description of Artificial Sequence: Synthetic oligonucleotide
  Antisense strand to SEQ ID NO: 2499980
aaucucccagcgcugaccc

SEQ ID NO: 2499982 - RNA, 19 nt, Artificial Sequence
  Description of Artificial Sequence: Synthetic oligonucleotide
  Sense strand starting at position 586 of SEQ ID NO: 1887955
gggagauuguggcugucau

SEQ ID NO: 2499983 - RNA, 19 nt, Artificial Sequence
  Description of Artificial Sequence: Synthetic oligonucleotide
  Antisense strand to SEQ ID NO: 2499982
augacagccacaaucuccc

SEQ ID NO: 2499984 - RNA, 19 nt, Artificial Sequence
  Description of Artificial Sequence: Synthetic oligonucleotide
  Sense strand starting at position 587 of SEQ ID NO: 1887955
ggagauuguggcugucaua

SEQ ID NO: 2499985 - RNA, 19 nt, Artificial Sequence
  Description of Artificial Sequence: Synthetic oligonucleotide
  Antisense strand to SEQ ID NO: 2499984
uaugacagccacaaucucc

SEQ ID NO: 2499986 - RNA, 19 nt, Artificial Sequence
  Description of Artificial Sequence: Synthetic oligonucleotide
  Sense strand starting at position 596 of SEQ ID NO: 1887955
ggcugucauaguuguaaau

SEQ ID NO: 2499987 - RNA, 19 nt, Artificial Sequence
  Description of Artificial Sequence: Synthetic oligonucleotide
  Antisense strand to SEQ ID NO: 2499986
auuuacaacuaugacagcc

SEQ ID NO: 2499988 - RNA, 19 nt, Artificial Sequence
  Description of Artificial Sequence: Synthetic oligonucleotide
  Sense strand starting at position 598 of SEQ ID NO: 1887955
cugucauaguuguaaauga

SEQ ID NO: 2499989 - RNA, 19 nt, Artificial Sequence
  Description of Artificial Sequence: Synthetic oligonucleotide
  Antisense strand to SEQ ID NO: 2499988
ucauuuacaacuaugacag

SEQ ID NO: 2499990 - RNA, 19 nt, Artificial Sequence
  Description of Artificial Sequence: Synthetic oligonucleotide
  Sense strand starting at position 651 of SEQ ID NO: 1887955
uagggaggcucugaugguu

SEQ ID NO: 2499991 - RNA, 19 nt, Artificial Sequence
  Description of Artificial Sequence: Synthetic oligonucleotide
  Antisense strand to SEQ ID NO: 2499990
aaccaucagagccucccua

SEQ ID NO: 2499992 - RNA, 19 nt, Artificial Sequence
  Description of Artificial Sequence: Synthetic oligonucleotide
  Sense strand starting at position 699 of SEQ ID NO: 1887955
ccuggagucucugcagacu

SEQ ID NO: 2499993 - RNA, 19 nt, Artificial Sequence
  Description of Artificial Sequence: Synthetic oligonucleotide
  Antisense strand to SEQ ID NO: 2499992
agucugcagagacuccagg

SEQ ID NO: 2499994 - RNA, 19 nt, Artificial Sequence
  Description of Artificial Sequence: Synthetic oligonucleotide
  Sense strand starting at position 753 of SEQ ID NO: 1887955
gggccaaauuacgagacaa

SEQ ID NO: 2499995 - RNA, 19 nt, Artificial Sequence
  Description of Artificial Sequence: Synthetic oligonucleotide
  Antisense strand to SEQ ID NO: 2499994
uugucucguaauuuggccc

SEQ ID NO: 2499996 - RNA, 19 nt, Artificial Sequence
  Description of Artificial Sequence: Synthetic oligonucleotide
  Sense strand starting at position 761 of SEQ ID NO: 1887955
uuacgagacaaaugagguu

SEQ ID NO: 2499997 - RNA, 19 nt, Artificial Sequence
  Description of Artificial Sequence: Synthetic oligonucleotide
  Antisense strand to SEQ ID NO: 2499996
aaccucauuugucucguaa

SEQ ID NO: 2499998 - RNA, 19 nt, Artificial Sequence
  Description of Artificial Sequence: Synthetic oligonucleotide
  Sense strand starting at position 915 of SEQ ID NO: 1887955
gacucaugagucugaggga

SEQ ID NO: 2499999 - RNA, 19 nt, Artificial Sequence
  Description of Artificial Sequence: Synthetic oligonucleotide
  Antisense strand to SEQ ID NO: 2499998
ucccucagacucaugaguc

SEQ ID NO: 2500000 - RNA, 19 nt, Artificial Sequence
  Description of Artificial Sequence: Synthetic oligonucleotide
  Sense strand starting at position 998 of SEQ ID NO: 1887955
cugggucuguggugaggaa

SEQ ID NO: 2500001 - RNA, 19 nt, Artificial Sequence
  Description of Artificial Sequence: Synthetic oligonucleotide
  Antisense strand to SEQ ID NO: 2500000
uuccucaccacagacccag

SEQ ID NO: 2500002 - RNA, 19 nt, Artificial Sequence
  Description of Artificial Sequence: Synthetic oligonucleotide
  Sense strand starting at position 1020 of SEQ ID NO: 1887955
ccuagacuucuggguucuu

SEQ ID NO: 2500003 - RNA, 19 nt, Artificial Sequence
  Description of Artificial Sequence: Synthetic oligonucleotide
  Antisense strand to SEQ ID NO: 2500002
aagaacccagaagucuagg

SEQ ID NO: 2500004 - RNA, 19 nt, Artificial Sequence
  Description of Artificial Sequence: Synthetic oligonucleotide
  Sense strand starting at position 1021 of SEQ ID NO: 1887955
cuagacuucuggguucuuu

SEQ ID NO: 2500005 - RNA, 19 nt, Artificial Sequence
  Description of Artificial Sequence: Synthetic oligonucleotide
  Antisense strand to SEQ ID NO: 2500004
aaagaacccagaagucuag

SEQ ID NO: 2500006 - RNA, 19 nt, Artificial Sequence
  Description of Artificial Sequence: Synthetic oligonucleotide
  Sense strand starting at position 1029 of SEQ ID NO: 1887955
cuggguucuuuagggagga

SEQ ID NO: 2500007 - RNA, 19 nt, Artificial Sequence
  Description of Artificial Sequence: Synthetic oligonucleotide
  Antisense strand to SEQ ID NO: 2500006
uccucccuaaagaacccag

SEQ ID NO: 2500008 - RNA, 19 nt, Artificial Sequence
  Description of Artificial Sequence: Synthetic oligonucleotide
  Sense strand starting at position 1069 of SEQ ID NO: 1887955
cagggucccugaugaggaa

SEQ ID NO: 2500009 - RNA, 19 nt, Artificial Sequence
  Description of Artificial Sequence: Synthetic oligonucleotide
  Antisense strand to SEQ ID NO: 2500008
uuccucaucagggacccug

SEQ ID NO: 2500010 - RNA, 19 nt, Artificial Sequence
  Description of Artificial Sequence: Synthetic oligonucleotide
  Sense strand starting at position 1670 of SEQ ID NO: 1887955
ccgauaucucucugugucu

SEQ ID NO: 2500011 - RNA, 19 nt, Artificial Sequence
  Description of Artificial Sequence: Synthetic oligonucleotide
  Antisense strand to SEQ ID NO: 2500010
agacacagagagauaucgg

SEQ ID NO: 2500012 - RNA, 19 nt, Artificial Sequence
  Description of Artificial Sequence: Synthetic oligonucleotide
  Sense strand starting at position 1726 of SEQ ID NO: 1887955
ucagaaugucucugugccu

SEQ ID NO: 2500013 - RNA, 19 nt, Artificial Sequence
  Description of Artificial Sequence: Synthetic oligonucleotide
  Antisense strand to SEQ ID NO: 2500012
aggcacagagacauucuga

SEQ ID NO: 2500014 - RNA, 19 nt, Artificial Sequence
  Description of Artificial Sequence: Synthetic oligonucleotide
  Sense strand starting at position 1727 of SEQ ID NO: 1887955
cagaaugucucugugccua

SEQ ID NO: 2500015 - RNA, 19 nt, Artificial Sequence
  Description of Artificial Sequence: Synthetic oligonucleotide
  Antisense strand to SEQ ID NO: 2500014
uaggcacagagacauucug

SEQ ID NO: 2500016 - RNA, 19 nt, Artificial Sequence
  Description of Artificial Sequence: Synthetic oligonucleotide
  Sense strand starting at position 3192 of SEQ ID NO: 1887955
cccagaguugggcagugau

SEQ ID NO: 2500017 - RNA, 19 nt, Artificial Sequence
  Description of Artificial Sequence: Synthetic oligonucleotide
  Antisense strand to SEQ ID NO: 2500016
aucacugcccaacucuggg

SEQ ID NO: 2500018 - RNA, 19 nt, Artificial Sequence
  Description of Artificial Sequence: Synthetic oligonucleotide
  Sense strand starting at position 3243 of SEQ ID NO: 1887955
cagcuacuuguccaaacga

SEQ ID NO: 2500019 - RNA, 19 nt, Artificial Sequence
  Description of Artificial Sequence: Synthetic oligonucleotide
  Antisense strand to SEQ ID NO: 2500018
ucguuuggacaaguagcug

SEQ ID NO: 2500020 - RNA, 19 nt, Artificial Sequence
  Description of Artificial Sequence: Synthetic oligonucleotide
  Sense strand starting at position 3319 of SEQ ID NO: 1887955
gcagaaauugccuagagcu

SEQ ID NO: 2500021 - RNA, 19 nt, Artificial Sequence
  Description of Artificial Sequence: Synthetic oligonucleotide
  Antisense strand to SEQ ID NO: 2500020
agcucuaggcaauuucugc

SEQ ID NO: 2500022 - RNA, 19 nt, Artificial Sequence
  Description of Artificial Sequence: Synthetic oligonucleotide
  Sense strand starting at position 3395 of SEQ ID NO: 1887955
ucuuacuggcuaugaaguu

SEQ ID NO: 2500023 - RNA, 19 nt, Artificial Sequence
  Description of Artificial Sequence: Synthetic oligonucleotide
  Antisense strand to SEQ ID NO: 2500022
aacuucauagccaguaaga

SEQ ID NO: 2500024 - RNA, 19 nt, Artificial Sequence
  Description of Artificial Sequence: Synthetic oligonucleotide
  Sense strand starting at position 3407 of SEQ ID NO: 1887955
ugaaguucuggguguguca

SEQ ID NO: 2500025 - RNA, 19 nt, Artificial Sequence
  Description of Artificial Sequence: Synthetic oligonucleotide
  Antisense strand to SEQ ID NO: 2500024
ugacacacccagaacuuca

SEQ ID NO: 2500026 - RNA, 19 nt, Artificial Sequence
  Description of Artificial Sequence: Synthetic oligonucleotide
  Sense strand starting at position 3522 of SEQ ID NO: 1887955
gccugaugagccugaucuu

SEQ ID NO: 2500027 - RNA, 19 nt, Artificial Sequence
  Description of Artificial Sequence: Synthetic oligonucleotide
  Antisense strand to SEQ ID NO: 2500026
aagaucaggcucaucaggc

SEQ ID NO: 2500028 - RNA, 19 nt, Artificial Sequence
  Description of Artificial Sequence: Synthetic oligonucleotide
  Sense strand starting at position 3523 of SEQ ID NO: 1887955
ccugaugagccugaucuua

SEQ ID NO: 2500029 - RNA, 19 nt, Artificial Sequence
  Description of Artificial Sequence: Synthetic oligonucleotide
  Antisense strand to SEQ ID NO: 2500028
uaagaucaggcucaucagg

SEQ ID NO: 2500030 - RNA, 19 nt, Artificial Sequence
  Description of Artificial Sequence: Synthetic oligonucleotide
  Sense strand starting at position 3528 of SEQ ID NO: 1887955
ugagccugaucuuagggaa

SEQ ID NO: 2500031 - RNA, 19 nt, Artificial Sequence
  Description of Artificial Sequence: Synthetic oligonucleotide
  Antisense strand to SEQ ID NO: 2500030
uucccuaagaucaggcuca

SEQ ID NO: 2500032 - RNA, 19 nt, Artificial Sequence
  Description of Artificial Sequence: Synthetic oligonucleotide
  Sense strand starting at position 3547 of SEQ ID NO: 1887955
ggcaucuuccucuaggaua

SEQ ID NO: 2500033 - RNA, 19 nt, Artificial Sequence
  Description of Artificial Sequence: Synthetic oligonucleotide
  Antisense strand to SEQ ID NO: 2500032
uauccuagaggaagaugcc

SEQ ID NO: 2500034 - RNA, 19 nt, Artificial Sequence
  Description of Artificial Sequence: Synthetic oligonucleotide
  Sense strand starting at position 3550 of SEQ ID NO: 1887955
aucuuccucuaggauagaa

SEQ ID NO: 2500035 - RNA, 19 nt, Artificial Sequence
  Description of Artificial Sequence: Synthetic oligonucleotide
  Antisense strand to SEQ ID NO: 2500034
uucuauccuagaggaagau

SEQ ID NO: 2500036 - RNA, 19 nt, Artificial Sequence
  Description of Artificial Sequence: Synthetic oligonucleotide
  Sense strand starting at position 3670 of SEQ ID NO: 1887955
gcaauuagagggcgggaaa

SEQ ID NO: 2500037 - RNA, 19 nt, Artificial Sequence
  Description of Artificial Sequence: Synthetic oligonucleotide
  Antisense strand to SEQ ID NO: 2500036
uuucccgcccucuaauugc

SEQ ID NO: 2500038 - RNA, 19 nt, Artificial Sequence
  Description of Artificial Sequence: Synthetic oligonucleotide
  Sense strand starting at position 3703 of SEQ ID NO: 1887955
guggaucacucaggugaca

SEQ ID NO: 2500039 - RNA, 19 nt, Artificial Sequence
  Description of Artificial Sequence: Synthetic oligonucleotide
  Antisense strand to SEQ ID NO: 2500038
ugucaccugagugauccac

SEQ ID NO: 2500040 - RNA, 19 nt, Artificial Sequence
  Description of Artificial Sequence: Synthetic oligonucleotide
  Sense strand starting at position 3741 of SEQ ID NO: 1887955
ugugacuguccuggugaga

SEQ ID NO: 2500041 - RNA, 19 nt, Artificial Sequence
  Description of Artificial Sequence: Synthetic oligonucleotide
  Antisense strand to SEQ ID NO: 2500040
ucucaccaggacagucaca

SEQ ID NO: 2500042 - RNA, 19 nt, Artificial Sequence
  Description of Artificial Sequence: Synthetic oligonucleotide
  Sense strand starting at position 3837 of SEQ ID NO: 1887955
cagcaugggcgguaaucau

SEQ ID NO: 2500043 - RNA, 19 nt, Artificial Sequence
  Description of Artificial Sequence: Synthetic oligonucleotide
  Antisense strand to SEQ ID NO: 2500042
augauuaccgcccaugcug

SEQ ID NO: 2500044 - RNA, 19 nt, Artificial Sequence
  Description of Artificial Sequence: Synthetic oligonucleotide
  Sense strand starting at position 3846 of SEQ ID NO: 1887955
cgguaaucaugccugauca

SEQ ID NO: 2500045 - RNA, 19 nt, Artificial Sequence
  Description of Artificial Sequence: Synthetic oligonucleotide
  Antisense strand to SEQ ID NO: 2500044
ugaucaggcaugauuaccg

SEQ ID NO: 2500046 - RNA, 19 nt, Artificial Sequence
  Description of Artificial Sequence: Synthetic oligonucleotide
  Sense strand starting at position 3847 of SEQ ID NO: 1887955
gguaaucaugccugaucac

SEQ ID NO: 2500047 - RNA, 19 nt, Artificial Sequence
  Description of Artificial Sequence: Synthetic oligonucleotide
  Antisense strand to SEQ ID NO: 2500046
gugaucaggcaugauuacc

SEQ ID NO: 2500048 - RNA, 19 nt, Artificial Sequence
  Description of Artificial Sequence: Synthetic oligonucleotide
  Sense strand starting at position 3856 of SEQ ID NO: 1887955
gccugaucaccauggccau

SEQ ID NO: 2500049 - RNA, 19 nt, Artificial Sequence
  Description of Artificial Sequence: Synthetic oligonucleotide
  Antisense strand to SEQ ID NO: 2500048
auggccauggugaucaggc

SEQ ID NO: 2500050 - RNA, 19 nt, Artificial Sequence
  Description of Artificial Sequence: Synthetic oligonucleotide
  Sense strand starting at position 3912 of SEQ ID NO: 1887955
cucggaguugcaggaguua

SEQ ID NO: 2500051 - RNA, 19 nt, Artificial Sequence
  Description of Artificial Sequence: Synthetic oligonucleotide
  Antisense strand to SEQ ID NO: 2500050
uaacuccugcaacuccgag

SEQ ID NO: 2500052 - RNA, 19 nt, Artificial Sequence
  Description of Artificial Sequence: Synthetic oligonucleotide
  Sense strand starting at position 3932 of SEQ ID NO: 1887955
agagcccugcgcuauagaa

SEQ ID NO: 2500053 - RNA, 19 nt, Artificial Sequence
  Description of Artificial Sequence: Synthetic oligonucleotide
  Antisense strand to SEQ ID NO: 2500052
uucuauagcgcagggcucu

SEQ ID NO: 2500054 - RNA, 19 nt, Artificial Sequence
  Description of Artificial Sequence: Synthetic oligonucleotide
  Sense strand starting at position 3934 of SEQ ID NO: 1887955
agcccugcgcuauagaaua

SEQ ID NO: 2500055 - RNA, 19 nt, Artificial Sequence
  Description of Artificial Sequence: Synthetic oligonucleotide
  Antisense strand to SEQ ID NO: 2500054
uauucuauagcgcagggcu

SEQ ID NO: 2500056 - RNA, 19 nt, Artificial Sequence
  Description of Artificial Sequence: Synthetic oligonucleotide
  Sense strand starting at position 431 of SEQ ID NO: 1887956
acccuagugucuucucaca

SEQ ID NO: 2500057 - RNA, 19 nt, Artificial Sequence
  Description of Artificial Sequence: Synthetic oligonucleotide
  Antisense strand to SEQ ID NO: 2500056
ugugagaagacacuagggu

SEQ ID NO: 2500058 - RNA, 19 nt, Artificial Sequence
  Description of Artificial Sequence: Synthetic oligonucleotide
  Sense strand starting at position 436 of SEQ ID NO: 1887956
agugucuucucacaaaccu

SEQ ID NO: 2500059 - RNA, 19 nt, Artificial Sequence
  Description of Artificial Sequence: Synthetic oligonucleotide
  Antisense strand to SEQ ID NO: 2500058
agguuugugagaagacacu

SEQ ID NO: 2500060 - RNA, 19 nt, Artificial Sequence
  Description of Artificial Sequence: Synthetic oligonucleotide
  Sense strand starting at position 581 of SEQ ID NO: 1887956
gggcucacuacggaaucaa

SEQ ID NO: 2500061 - RNA, 19 nt, Artificial Sequence
  Description of Artificial Sequence: Synthetic oligonucleotide
  Antisense strand to SEQ ID NO: 2500060
uugauuccguagugagccc

SEQ ID NO: 2500062 - RNA, 19 nt, Artificial Sequence
  Description of Artificial Sequence: Synthetic oligonucleotide
  Sense strand starting at position 892 of SEQ ID NO: 1887956
ugugaauccucuucugaua

SEQ ID NO: 2500063 - RNA, 19 nt, Artificial Sequence
  Description of Artificial Sequence: Synthetic oligonucleotide
  Antisense strand to SEQ ID NO: 2500062
uaucagaagaggauucaca

SEQ ID NO: 2500064 - RNA, 19 nt, Artificial Sequence
  Description of Artificial Sequence: Synthetic oligonucleotide
  Sense strand starting at position 1166 of SEQ ID NO: 1887956
ugccuaguaucaccauauu

SEQ ID NO: 2500065 - RNA, 19 nt, Artificial Sequence
  Description of Artificial Sequence: Synthetic oligonucleotide
  Antisense strand to SEQ ID NO: 2500064
aauauggugauacuaggca

SEQ ID NO: 2500066 - RNA, 19 nt, Artificial Sequence
  Description of Artificial Sequence: Synthetic oligonucleotide
  Sense strand starting at position 1329 of SEQ ID NO: 1887956
cccaguuauuccugaugaa

SEQ ID NO: 2500067 - RNA, 19 nt, Artificial Sequence
  Description of Artificial Sequence: Synthetic oligonucleotide
  Antisense strand to SEQ ID NO: 2500066
uucaucaggaauaacuggg

SEQ ID NO: 2500068 - RNA, 19 nt, Artificial Sequence
  Description of Artificial Sequence: Synthetic oligonucleotide
  Sense strand starting at position 1330 of SEQ ID NO: 1887956
ccaguuauuccugaugaac

SEQ ID NO: 2500069 - RNA, 19 nt, Artificial Sequence
  Description of Artificial Sequence: Synthetic oligonucleotide
  Antisense strand to SEQ ID NO: 2500068
guucaucaggaauaacugg

SEQ ID NO: 2500070 - RNA, 19 nt, Artificial Sequence
  Description of Artificial Sequence: Synthetic oligonucleotide
  Sense strand starting at position 1352 of SEQ ID NO: 1887956
uguauagaauugucaacca

SEQ ID NO: 2500071 - RNA, 19 nt, Artificial Sequence
  Description of Artificial Sequence: Synthetic oligonucleotide
  Antisense strand to SEQ ID NO: 2500070
ugguugacaauucuauaca

SEQ ID NO: 2500072 - RNA, 19 nt, Artificial Sequence
  Description of Artificial Sequence: Synthetic oligonucleotide
  Sense strand starting at position 1406 of SEQ ID NO: 1887956
ucacuauacuuagggcaga

SEQ ID NO: 2500073 - RNA, 19 nt, Artificial Sequence
  Description of Artificial Sequence: Synthetic oligonucleotide
  Antisense strand to SEQ ID NO: 2500072
ucugcccuaaguauaguga

SEQ ID NO: 2500074 - RNA, 19 nt, Artificial Sequence
  Description of Artificial Sequence: Synthetic oligonucleotide
  Sense strand starting at position 1455 of SEQ ID NO: 1887956
aaggaucucugagcaagau

SEQ ID NO: 2500075 - RNA, 19 nt, Artificial Sequence
  Description of Artificial Sequence: Synthetic oligonucleotide
  Antisense strand to SEQ ID NO: 2500074
aucuugcucagagauccuu

SEQ ID NO: 2500076 - RNA, 19 nt, Artificial Sequence
  Description of Artificial Sequence: Synthetic oligonucleotide
  Sense strand starting at position 1591 of SEQ ID NO: 1887956
cgaggauagucuggcugga

SEQ ID NO: 2500077 - RNA, 19 nt, Artificial Sequence
  Description of Artificial Sequence: Synthetic oligonucleotide
  Antisense strand to SEQ ID NO: 2500076
uccagccagacuauccucg

SEQ ID NO: 2500078 - RNA, 19 nt, Artificial Sequence
  Description of Artificial Sequence: Synthetic oligonucleotide
  Sense strand starting at position 1593 of SEQ ID NO: 1887956
aggauagucuggcuggaag

SEQ ID NO: 2500079 - RNA, 19 nt, Artificial Sequence
  Description of Artificial Sequence: Synthetic oligonucleotide
  Antisense strand to SEQ ID NO: 2500078
cuuccagccagacuauccu

SEQ ID NO: 2500080 - RNA, 19 nt, Artificial Sequence
  Description of Artificial Sequence: Synthetic oligonucleotide
  Sense strand starting at position 2482 of SEQ ID NO: 1887956
gugagaaacccaggcucuu

SEQ ID NO: 2500081 - RNA, 19 nt, Artificial Sequence
  Description of Artificial Sequence: Synthetic oligonucleotide
  Antisense strand to SEQ ID NO: 2500080
aagagccuggguuucucac

SEQ ID NO: 2500082 - RNA, 19 nt, Artificial Sequence
  Description of Artificial Sequence: Synthetic oligonucleotide
  Sense strand starting at position 2544 of SEQ ID NO: 1887956
ugcaaagcucacugaguca

SEQ ID NO: 2500083 - RNA, 19 nt, Artificial Sequence
  Description of Artificial Sequence: Synthetic oligonucleotide
  Antisense strand to SEQ ID NO: 2500082
ugacucagugagcuuugca

SEQ ID NO: 2500084 - RNA, 19 nt, Artificial Sequence
  Description of Artificial Sequence: Synthetic oligonucleotide
  Sense strand starting at position 2863 of SEQ ID NO: 1887956
cccaguaaucgggaucagu

SEQ ID NO: 2500085 - RNA, 19 nt, Artificial Sequence
  Description of Artificial Sequence: Synthetic oligonucleotide
  Antisense strand to SEQ ID NO: 2500084
acugaucccgauuacuggg

SEQ ID NO: 2500086 - RNA, 19 nt, Artificial Sequence
  Description of Artificial Sequence: Synthetic oligonucleotide
  Sense strand starting at position 3218 of SEQ ID NO: 1887956
gggagugguccucagcguu

SEQ ID NO: 2500087 - RNA, 19 nt, Artificial Sequence
  Description of Artificial Sequence: Synthetic oligonucleotide
  Antisense strand to SEQ ID NO: 2500086
aacgcugaggaccacuccc

SEQ ID NO: 2500088 - RNA, 19 nt, Artificial Sequence
  Description of Artificial Sequence: Synthetic oligonucleotide
  Sense strand starting at position 3309 of SEQ ID NO: 1887956
gaagacugguacccugaau

SEQ ID NO: 2500089 - RNA, 19 nt, Artificial Sequence
  Description of Artificial Sequence: Synthetic oligonucleotide
  Antisense strand to SEQ ID NO: 2500088
auucaggguaccagucuuc

SEQ ID NO: 2500090 - RNA, 19 nt, Artificial Sequence
  Description of Artificial Sequence: Synthetic oligonucleotide
  Sense strand starting at position 3786 of SEQ ID NO: 1887956
cugcgccauuggucucuaa

SEQ ID NO: 2500091 - RNA, 19 nt, Artificial Sequence
  Description of Artificial Sequence: Synthetic oligonucleotide
  Antisense strand to SEQ ID NO: 2500090
uuagagaccaauggcgcag

SEQ ID NO: 2500092 - RNA, 19 nt, Artificial Sequence
  Description of Artificial Sequence: Synthetic oligonucleotide
  Sense strand starting at position 3787 of SEQ ID NO: 1887956
ugcgccauuggucucuaau

SEQ ID NO: 2500093 - RNA, 19 nt, Artificial Sequence
  Description of Artificial Sequence: Synthetic oligonucleotide
  Antisense strand to SEQ ID NO: 2500092
auuagagaccaauggcgca

SEQ ID NO: 2500094 - RNA, 19 nt, Artificial Sequence
  Description of Artificial Sequence: Synthetic oligonucleotide
  Sense strand starting at position 3790 of SEQ ID NO: 1887956
gccauuggucucuaaugcu

SEQ ID NO: 2500095 - RNA, 19 nt, Artificial Sequence
  Description of Artificial Sequence: Synthetic oligonucleotide
  Antisense strand to SEQ ID NO: 2500094
agcauuagagaccaauggc

SEQ ID NO: 2500096 - RNA, 19 nt, Artificial Sequence
  Description of Artificial Sequence: Synthetic oligonucleotide
  Sense strand starting at position 3798 of SEQ ID NO: 1887956
ucucuaaugcuaugaggag

SEQ ID NO: 2500097 - RNA, 19 nt, Artificial Sequence
  Description of Artificial Sequence: Synthetic oligonucleotide
  Antisense strand to SEQ ID NO: 2500096
cuccucauagcauuagaga

SEQ ID NO: 2500098 - RNA, 19 nt, Artificial Sequence
  Description of Artificial Sequence: Synthetic oligonucleotide
  Sense strand starting at position 3833 of SEQ ID NO: 1887956
agggacuggucucaagguu

SEQ ID NO: 2500099 - RNA, 19 nt, Artificial Sequence
  Description of Artificial Sequence: Synthetic oligonucleotide
  Antisense strand to SEQ ID NO: 2500098
aaccuugagaccagucccu

SEQ ID NO: 2500100 - RNA, 19 nt, Artificial Sequence
  Description of Artificial Sequence: Synthetic oligonucleotide
  Sense strand starting at position 3841 of SEQ ID NO: 1887956
gucucaagguucuaaagag

SEQ ID NO: 2500101 - RNA, 19 nt, Artificial Sequence
  Description of Artificial Sequence: Synthetic oligonucleotide
  Antisense strand to SEQ ID NO: 2500100
cucuuuagaaccuugagac

SEQ ID NO: 2500102 - RNA, 19 nt, Artificial Sequence
  Description of Artificial Sequence: Synthetic oligonucleotide
  Sense strand starting at position 79 of SEQ ID NO: 1887957
agcaccuguccagauggau

SEQ ID NO: 2500103 - RNA, 19 nt, Artificial Sequence
  Description of Artificial Sequence: Synthetic oligonucleotide
  Antisense strand to SEQ ID NO: 2500102
auccaucuggacaggugcu

SEQ ID NO: 2500104 - RNA, 19 nt, Artificial Sequence
  Description of Artificial Sequence: Synthetic oligonucleotide
  Sense strand starting at position 846 of SEQ ID NO: 1887957
ggaaacagauucuuaggca

SEQ ID NO: 2500105 - RNA, 19 nt, Artificial Sequence
  Description of Artificial Sequence: Synthetic oligonucleotide
  Antisense strand to SEQ ID NO: 2500104
ugccuaagaaucuguuucc

SEQ ID NO: 2500106 - RNA, 19 nt, Artificial Sequence
  Description of Artificial Sequence: Synthetic oligonucleotide
  Sense strand starting at position 850 of SEQ ID NO: 1887957
acagauucuuaggcaacau

SEQ ID NO: 2500107 - RNA, 19 nt, Artificial Sequence
  Description of Artificial Sequence: Synthetic oligonucleotide
  Antisense strand to SEQ ID NO: 2500106
auguugccuaagaaucugu

SEQ ID NO: 2500108 - RNA, 19 nt, Artificial Sequence
  Description of Artificial Sequence: Synthetic oligonucleotide
  Sense strand starting at position 854 of SEQ ID NO: 1887957
auucuuaggcaacauguaa

SEQ ID NO: 2500109 - RNA, 19 nt, Artificial Sequence
  Description of Artificial Sequence: Synthetic oligonucleotide
  Antisense strand to SEQ ID NO: 2500108
uuacauguugccuaagaau

SEQ ID NO: 2500110 - RNA, 19 nt, Artificial Sequence
  Description of Artificial Sequence: Synthetic oligonucleotide
  Sense strand starting at position 880 of SEQ ID NO: 1887957
acgcauccugagugucuaa

SEQ ID NO: 2500111 - RNA, 19 nt, Artificial Sequence
  Description of Artificial Sequence: Synthetic oligonucleotide
  Antisense strand to SEQ ID NO: 2500110
uuagacacucaggaugcgu

SEQ ID NO: 2500112 - RNA, 19 nt, Artificial Sequence
  Description of Artificial Sequence: Synthetic oligonucleotide
  Sense strand starting at position 921 of SEQ ID NO: 1887957
ggugccacucgauaaacau

SEQ ID NO: 2500113 - RNA, 19 nt, Artificial Sequence
  Description of Artificial Sequence: Synthetic oligonucleotide
  Antisense strand to SEQ ID NO: 2500112
auguuuaucgaguggcacc

SEQ ID NO: 2500114 - RNA, 19 nt, Artificial Sequence
  Description of Artificial Sequence: Synthetic oligonucleotide
  Sense strand starting at position 1031 of SEQ ID NO: 1887957
aaguauuccugcugugagg

SEQ ID NO: 2500115 - RNA, 19 nt, Artificial Sequence
  Description of Artificial Sequence: Synthetic oligonucleotide
  Antisense strand to SEQ ID NO: 2500114
ccucacagcaggaauacuu

SEQ ID NO: 2500116 - RNA, 19 nt, Artificial Sequence
  Description of Artificial Sequence: Synthetic oligonucleotide
  Sense strand starting at position 1284 of SEQ ID NO: 1887957
ugucauguccacuguuauc

SEQ ID NO: 2500117 - RNA, 19 nt, Artificial Sequence
  Description of Artificial Sequence: Synthetic oligonucleotide
  Antisense strand to SEQ ID NO: 2500116
gauaacaguggacaugaca

SEQ ID NO: 2500118 - RNA, 19 nt, Artificial Sequence
  Description of Artificial Sequence: Synthetic oligonucleotide
  Sense strand starting at position 1563 of SEQ ID NO: 1887957
ugaacuuugcccggcuuaa

SEQ ID NO: 2500119 - RNA, 19 nt, Artificial Sequence
  Description of Artificial Sequence: Synthetic oligonucleotide
  Antisense strand to SEQ ID NO: 2500118
uuaagccgggcaaaguuca

SEQ ID NO: 2500120 - RNA, 19 nt, Artificial Sequence
  Description of Artificial Sequence: Synthetic oligonucleotide
  Sense strand starting at position 2238 of SEQ ID NO: 1887957
gcaggaucgcagggcaaua

SEQ ID NO: 2500121 - RNA, 19 nt, Artificial Sequence
  Description of Artificial Sequence: Synthetic oligonucleotide
  Antisense strand to SEQ ID NO: 2500120
uauugcccugcgauccugc

SEQ ID NO: 2500122 - RNA, 19 nt, Artificial Sequence
  Description of Artificial Sequence: Synthetic oligonucleotide
  Sense strand starting at position 2249 of SEQ ID NO: 1887957
gggcaauaaucccuccauc

SEQ ID NO: 2500123 - RNA, 19 nt, Artificial Sequence
  Description of Artificial Sequence: Synthetic oligonucleotide
  Antisense strand to SEQ ID NO: 2500122
gauggagggauuauugccc

SEQ ID NO: 2500124 - RNA, 19 nt, Artificial Sequence
  Description of Artificial Sequence: Synthetic oligonucleotide
  Sense strand starting at position 2277 of SEQ ID NO: 1887957
agguucugugccugcaaga

SEQ ID NO: 2500125 - RNA, 19 nt, Artificial Sequence
  Description of Artificial Sequence: Synthetic oligonucleotide
  Antisense strand to SEQ ID NO: 2500124
ucuugcaggcacagaaccu

SEQ ID NO: 2500126 - RNA, 19 nt, Artificial Sequence
  Description of Artificial Sequence: Synthetic oligonucleotide
  Sense strand starting at position 2396 of SEQ ID NO: 1887957
gcagcagccgucuuggaua

SEQ ID NO: 2500127 - RNA, 19 nt, Artificial Sequence
  Description of Artificial Sequence: Synthetic oligonucleotide
  Antisense strand to SEQ ID NO: 2500126
uauccaagacggcugcugc

SEQ ID NO: 2500128 - RNA, 19 nt, Artificial Sequence
  Description of Artificial Sequence: Synthetic oligonucleotide
  Sense strand starting at position 2399 of SEQ ID NO: 1887957
gcagccgucuuggauaacu

SEQ ID NO: 2500129 - RNA, 19 nt, Artificial Sequence
  Description of Artificial Sequence: Synthetic oligonucleotide
  Antisense strand to SEQ ID NO: 2500128
aguuauccaagacggcugc

SEQ ID NO: 2500130 - RNA, 19 nt, Artificial Sequence
  Description of Artificial Sequence: Synthetic oligonucleotide
  Sense strand starting at position 2401 of SEQ ID NO: 1887957
agccgucuuggauaacuuu

SEQ ID NO: 2500131 - RNA, 19 nt, Artificial Sequence
  Description of Artificial Sequence: Synthetic oligonucleotide
  Antisense strand to SEQ ID NO: 2500130
aaaguuauccaagacggcu

SEQ ID NO: 2500132 - RNA, 19 nt, Artificial Sequence
  Description of Artificial Sequence: Synthetic oligonucleotide
  Sense strand starting at position 2706 of SEQ ID NO: 1887957
gcccucaaaugcuugcaaa

SEQ ID NO: 2500133 - RNA, 19 nt, Artificial Sequence
  Description of Artificial Sequence: Synthetic oligonucleotide
  Antisense strand to SEQ ID NO: 2500132
uuugcaagcauuugagggc

SEQ ID NO: 2500134 - RNA, 19 nt, Artificial Sequence
  Description of Artificial Sequence: Synthetic oligonucleotide
  Sense strand starting at position 2765 of SEQ ID NO: 1887957
uguguccugucgcuuggaa

SEQ ID NO: 2500135 - RNA, 19 nt, Artificial Sequence
  Description of Artificial Sequence: Synthetic oligonucleotide
  Antisense strand to SEQ ID NO: 2500134
uuccaagcgacaggacaca

SEQ ID NO: 2500136 - RNA, 19 nt, Artificial Sequence
  Description of Artificial Sequence: Synthetic oligonucleotide
  Sense strand starting at position 2822 of SEQ ID NO: 1887957
cgauuuaaggugcgaggua

SEQ ID NO: 2500137 - RNA, 19 nt, Artificial Sequence
  Description of Artificial Sequence: Synthetic oligonucleotide
  Antisense strand to SEQ ID NO: 2500136
uaccucgcaccuuaaaucg

SEQ ID NO: 2500138 - RNA, 19 nt, Artificial Sequence
  Description of Artificial Sequence: Synthetic oligonucleotide
  Sense strand starting at position 2823 of SEQ ID NO: 1887957
gauuuaaggugcgagguau

SEQ ID NO: 2500139 - RNA, 19 nt, Artificial Sequence
  Description of Artificial Sequence: Synthetic oligonucleotide
  Antisense strand to SEQ ID NO: 2500138
auaccucgcaccuuaaauc

SEQ ID NO: 2500140 - RNA, 19 nt, Artificial Sequence
  Description of Artificial Sequence: Synthetic oligonucleotide
  Sense strand starting at position 2831 of SEQ ID NO: 1887957
gugcgagguaugugugcaa

SEQ ID NO: 2500141 - RNA, 19 nt, Artificial Sequence
  Description of Artificial Sequence: Synthetic oligonucleotide
  Antisense strand to SEQ ID NO: 2500140
uugcacacauaccucgcac

SEQ ID NO: 2500142 - RNA, 19 nt, Artificial Sequence
  Description of Artificial Sequence: Synthetic oligonucleotide
  Sense strand starting at position 2834 of SEQ ID NO: 1887957
cgagguaugugugcaaaca

SEQ ID NO: 2500143 - RNA, 19 nt, Artificial Sequence
  Description of Artificial Sequence: Synthetic oligonucleotide
  Antisense strand to SEQ ID NO: 2500142
uguuugcacacauaccucg

SEQ ID NO: 2500144 - RNA, 19 nt, Artificial Sequence
  Description of Artificial Sequence: Synthetic oligonucleotide
  Sense strand starting at position 2835 of SEQ ID NO: 1887957
gagguaugugugcaaacag

SEQ ID NO: 2500145 - RNA, 19 nt, Artificial Sequence
  Description of Artificial Sequence: Synthetic oligonucleotide
  Antisense strand to SEQ ID NO: 2500144
cuguuugcacacauaccuc

SEQ ID NO: 2500146 - RNA, 19 nt, Artificial Sequence
  Description of Artificial Sequence: Synthetic oligonucleotide
  Sense strand starting at position 2851 of SEQ ID NO: 1887957
cagacucuugcuggucuga

SEQ ID NO: 2500147 - RNA, 19 nt, Artificial Sequence
  Description of Artificial Sequence: Synthetic oligonucleotide
  Antisense strand to SEQ ID NO: 2500146
ucagaccagcaagagucug

SEQ ID NO: 2500148 - RNA, 19 nt, Artificial Sequence
  Description of Artificial Sequence: Synthetic oligonucleotide
  Sense strand starting at position 2886 of SEQ ID NO: 1887957
ggccguguugaugaaggua

SEQ ID NO: 2500149 - RNA, 19 nt, Artificial Sequence
  Description of Artificial Sequence: Synthetic oligonucleotide
  Antisense strand to SEQ ID NO: 2500148
uaccuucaucaacacggcc

SEQ ID NO: 2500150 - RNA, 19 nt, Artificial Sequence
  Description of Artificial Sequence: Synthetic oligonucleotide
  Sense strand starting at position 3044 of SEQ ID NO: 1887957
ggacuuuacugaggaugac

SEQ ID NO: 2500151 - RNA, 19 nt, Artificial Sequence
  Description of Artificial Sequence: Synthetic oligonucleotide
  Antisense strand to SEQ ID NO: 2500150
gucauccucaguaaagucc

SEQ ID NO: 2500152 - RNA, 19 nt, Artificial Sequence
  Description of Artificial Sequence: Synthetic oligonucleotide
  Sense strand starting at position 3196 of SEQ ID NO: 1887957
gggccagacuucuguagga

SEQ ID NO: 2500153 - RNA, 19 nt, Artificial Sequence
  Description of Artificial Sequence: Synthetic oligonucleotide
  Antisense strand to SEQ ID NO: 2500152
uccuacagaagucuggccc

SEQ ID NO: 2500154 - RNA, 19 nt, Artificial Sequence
  Description of Artificial Sequence: Synthetic oligonucleotide
  Sense strand starting at position 3198 of SEQ ID NO: 1887957
gccagacuucuguaggaca

SEQ ID NO: 2500155 - RNA, 19 nt, Artificial Sequence
  Description of Artificial Sequence: Synthetic oligonucleotide
  Antisense strand to SEQ ID NO: 2500154
uguccuacagaagucuggc

SEQ ID NO: 2500156 - RNA, 19 nt, Artificial Sequence
  Description of Artificial Sequence: Synthetic oligonucleotide
  Sense strand starting at position 3308 of SEQ ID NO: 1887957
uagguaggaguuugagcua

SEQ ID NO: 2500157 - RNA, 19 nt, Artificial Sequence
  Description of Artificial Sequence: Synthetic oligonucleotide
  Antisense strand to SEQ ID NO: 2500156
uagcucaaacuccuaccua

SEQ ID NO: 2500158 - RNA, 19 nt, Artificial Sequence
  Description of Artificial Sequence: Synthetic oligonucleotide
  Sense strand starting at position 3757 of SEQ ID NO: 1887957
ugcguaagucaauggcuuu

SEQ ID NO: 2500159 - RNA, 19 nt, Artificial Sequence
  Description of Artificial Sequence: Synthetic oligonucleotide
  Antisense strand to SEQ ID NO: 2500158
aaagccauugacuuacgca

SEQ ID NO: 2500160 - RNA, 19 nt, Artificial Sequence
  Description of Artificial Sequence: Synthetic oligonucleotide
  Sense strand starting at position 3783 of SEQ ID NO: 1887957
uuuggaguuguguguccau

SEQ ID NO: 2500161 - RNA, 19 nt, Artificial Sequence
  Description of Artificial Sequence: Synthetic oligonucleotide
  Antisense strand to SEQ ID NO: 2500160
auggacacacaacuccaaa

SEQ ID NO: 2500162 - RNA, 19 nt, Artificial Sequence
  Description of Artificial Sequence: Synthetic oligonucleotide
  Sense strand starting at position 3786 of SEQ ID NO: 1887957
ggaguuguguguccauuac

SEQ ID NO: 2500163 - RNA, 19 nt, Artificial Sequence
  Description of Artificial Sequence: Synthetic oligonucleotide
  Antisense strand to SEQ ID NO: 2500162
guaauggacacacaacucc

SEQ ID NO: 2500164 - RNA, 19 nt, Artificial Sequence
  Description of Artificial Sequence: Synthetic oligonucleotide
  Sense strand starting at position 3790 of SEQ ID NO: 1887957
uuguguguccauuaccaca

SEQ ID NO: 2500165 - RNA, 19 nt, Artificial Sequence
  Description of Artificial Sequence: Synthetic oligonucleotide
  Antisense strand to SEQ ID NO: 2500164
ugugguaauggacacacaa

SEQ ID NO: 2500166 - RNA, 19 nt, Artificial Sequence
  Description of Artificial Sequence: Synthetic oligonucleotide
  Sense strand starting at position 3792 of SEQ ID NO: 1887957
guguguccauuaccacaau

SEQ ID NO: 2500167 - RNA, 19 nt, Artificial Sequence
  Description of Artificial Sequence: Synthetic oligonucleotide
  Antisense strand to SEQ ID NO: 2500166
auugugguaauggacacac

SEQ ID NO: 2500168 - RNA, 19 nt, Artificial Sequence
  Description of Artificial Sequence: Synthetic oligonucleotide
  Sense strand starting at position 139 of SEQ ID NO: 1887958
uucaaaggauuguggguaa

SEQ ID NO: 2500169 - RNA, 19 nt, Artificial Sequence
  Description of Artificial Sequence: Synthetic oligonucleotide
  Antisense strand to SEQ ID NO: 2500168
uuacccacaauccuuugaa

SEQ ID NO: 2500170 - RNA, 19 nt, Artificial Sequence
  Description of Artificial Sequence: Synthetic oligonucleotide
  Sense strand starting at position 142 of SEQ ID NO: 1887958
aaaggauuguggguaaauu

SEQ ID NO: 2500171 - RNA, 19 nt, Artificial Sequence
  Description of Artificial Sequence: Synthetic oligonucleotide
  Antisense strand to SEQ ID NO: 2500170
aauuuacccacaauccuuu

SEQ ID NO: 2500172 - RNA, 19 nt, Artificial Sequence
  Description of Artificial Sequence: Synthetic oligonucleotide
  Sense strand starting at position 577 of SEQ ID NO: 1887958
acggaaugguggcugagua

SEQ ID NO: 2500173 - RNA, 19 nt, Artificial Sequence
  Description of Artificial Sequence: Synthetic oligonucleotide
  Antisense strand to SEQ ID NO: 2500172
uacucagccaccauuccgu

SEQ ID NO: 2500174 - RNA, 19 nt, Artificial Sequence
  Description of Artificial Sequence: Synthetic oligonucleotide
  Sense strand starting at position 579 of SEQ ID NO: 1887958
ggaaugguggcugaguaga

SEQ ID NO: 2500175 - RNA, 19 nt, Artificial Sequence
  Description of Artificial Sequence: Synthetic oligonucleotide
  Antisense strand to SEQ ID NO: 2500174
ucuacucagccaccauucc

SEQ ID NO: 2500176 - RNA, 19 nt, Artificial Sequence
  Description of Artificial Sequence: Synthetic oligonucleotide
  Sense strand starting at position 581 of SEQ ID NO: 1887958
aaugguggcugaguagaau

SEQ ID NO: 2500177 - RNA, 19 nt, Artificial Sequence
  Description of Artificial Sequence: Synthetic oligonucleotide
  Antisense strand to SEQ ID NO: 2500176
auucuacucagccaccauu

SEQ ID NO: 2500178 - RNA, 19 nt, Artificial Sequence
  Description of Artificial Sequence: Synthetic oligonucleotide
  Sense strand starting at position 633 of SEQ ID NO: 1887958
gggaguuaguauuuaacgu

SEQ ID NO: 2500179 - RNA, 19 nt, Artificial Sequence
  Description of Artificial Sequence: Synthetic oligonucleotide
  Antisense strand to SEQ ID NO: 2500178
acguuaaauacuaacuccc

SEQ ID NO: 2500180 - RNA, 19 nt, Artificial Sequence
  Description of Artificial Sequence: Synthetic oligonucleotide
  Sense strand starting at position 637 of SEQ ID NO: 1887958
guuaguauuuaacgucuac

SEQ ID NO: 2500181 - RNA, 19 nt, Artificial Sequence
  Description of Artificial Sequence: Synthetic oligonucleotide
  Antisense strand to SEQ ID NO: 2500180
guagacguuaaauacuaac

SEQ ID NO: 2500182 - RNA, 19 nt, Artificial Sequence
  Description of Artificial Sequence: Synthetic oligonucleotide
  Sense strand starting at position 641 of SEQ ID NO: 1887958
guauuuaacgucuacagcu

SEQ ID NO: 2500183 - RNA, 19 nt, Artificial Sequence
  Description of Artificial Sequence: Synthetic oligonucleotide
  Antisense strand to SEQ ID NO: 2500182
agcuguagacguuaaauac

SEQ ID NO: 2500184 - RNA, 19 nt, Artificial Sequence
  Description of Artificial Sequence: Synthetic oligonucleotide
  Sense strand starting at position 825 of SEQ ID NO: 1887958
caagaaaucgcucgaccug

SEQ ID NO: 2500185 - RNA, 19 nt, Artificial Sequence
  Description of Artificial Sequence: Synthetic oligonucleotide
  Antisense strand to SEQ ID NO: 2500184
caggucgagcgauuucuug

SEQ ID NO: 2500186 - RNA, 19 nt, Artificial Sequence
  Description of Artificial Sequence: Synthetic oligonucleotide
  Sense strand starting at position 1005 of SEQ ID NO: 1887958
guucuuauacaagguaaca

SEQ ID NO: 2500187 - RNA, 19 nt, Artificial Sequence
  Description of Artificial Sequence: Synthetic oligonucleotide
  Antisense strand to SEQ ID NO: 2500186
uguuaccuuguauaagaac

SEQ ID NO: 2500188 - RNA, 19 nt, Artificial Sequence
  Description of Artificial Sequence: Synthetic oligonucleotide
  Sense strand starting at position 1169 of SEQ ID NO: 1887958
gggcgauaagcacaucaga

SEQ ID NO: 2500189 - RNA, 19 nt, Artificial Sequence
  Description of Artificial Sequence: Synthetic oligonucleotide
  Antisense strand to SEQ ID NO: 2500188
ucugaugugcuuaucgccc

SEQ ID NO: 2500190 - RNA, 19 nt, Artificial Sequence
  Description of Artificial Sequence: Synthetic oligonucleotide
  Sense strand starting at position 1232 of SEQ ID NO: 1887958
agacuugggcuucaagagu

SEQ ID NO: 2500191 - RNA, 19 nt, Artificial Sequence
  Description of Artificial Sequence: Synthetic oligonucleotide
  Antisense strand to SEQ ID NO: 2500190
acucuugaagcccaagucu

SEQ ID NO: 2500192 - RNA, 19 nt, Artificial Sequence
  Description of Artificial Sequence: Synthetic oligonucleotide
  Sense strand starting at position 1302 of SEQ ID NO: 1887958
agaugaccucuuugauaac

SEQ ID NO: 2500193 - RNA, 19 nt, Artificial Sequence
  Description of Artificial Sequence: Synthetic oligonucleotide
  Antisense strand to SEQ ID NO: 2500192
guuaucaaagaggucaucu

SEQ ID NO: 2500194 - RNA, 19 nt, Artificial Sequence
  Description of Artificial Sequence: Synthetic oligonucleotide
  Sense strand starting at position 1386 of SEQ ID NO: 1887958
cuaagucucccgggaacgu

SEQ ID NO: 2500195 - RNA, 19 nt, Artificial Sequence
  Description of Artificial Sequence: Synthetic oligonucleotide
  Antisense strand to SEQ ID NO: 2500194
acguucccgggagacuuag

SEQ ID NO: 2500196 - RNA, 19 nt, Artificial Sequence
  Description of Artificial Sequence: Synthetic oligonucleotide
  Sense strand starting at position 1429 of SEQ ID NO: 1887958
ggucguacacaagaauacu

SEQ ID NO: 2500197 - RNA, 19 nt, Artificial Sequence
  Description of Artificial Sequence: Synthetic oligonucleotide
  Antisense strand to SEQ ID NO: 2500196
aguauucuuguguacgacc

SEQ ID NO: 2500198 - RNA, 19 nt, Artificial Sequence
  Description of Artificial Sequence: Synthetic oligonucleotide
  Sense strand starting at position 1485 of SEQ ID NO: 1887958
uggcgcaagauuugugcaa

SEQ ID NO: 2500199 - RNA, 19 nt, Artificial Sequence
  Description of Artificial Sequence: Synthetic oligonucleotide
  Antisense strand to SEQ ID NO: 2500198
uugcacaaaucuugcgcca

SEQ ID NO: 2500200 - RNA, 19 nt, Artificial Sequence
  Description of Artificial Sequence: Synthetic oligonucleotide
  Sense strand starting at position 1498 of SEQ ID NO: 1887958
gugcaagacucccucggau

SEQ ID NO: 2500201 - RNA, 19 nt, Artificial Sequence
  Description of Artificial Sequence: Synthetic oligonucleotide
  Antisense strand to SEQ ID NO: 2500200
auccgagggagucuugcac

SEQ ID NO: 2500202 - RNA, 19 nt, Artificial Sequence
  Description of Artificial Sequence: Synthetic oligonucleotide
  Sense strand starting at position 1500 of SEQ ID NO: 1887958
gcaagacucccucggauug

SEQ ID NO: 2500203 - RNA, 19 nt, Artificial Sequence
  Description of Artificial Sequence: Synthetic oligonucleotide
  Antisense strand to SEQ ID NO: 2500202
caauccgagggagucuugc

SEQ ID NO: 2500204 - RNA, 19 nt, Artificial Sequence
  Description of Artificial Sequence: Synthetic oligonucleotide
  Sense strand starting at position 1551 of SEQ ID NO: 1887958
ugacaaagucugcaacuca

SEQ ID NO: 2500205 - RNA, 19 nt, Artificial Sequence
  Description of Artificial Sequence: Synthetic oligonucleotide
  Antisense strand to SEQ ID NO: 2500204
ugaguugcagacuuuguca

SEQ ID NO: 2500206 - RNA, 19 nt, Artificial Sequence
  Description of Artificial Sequence: Synthetic oligonucleotide
  Sense strand starting at position 1655 of SEQ ID NO: 1887958
guugcagauuuauaaauac

SEQ ID NO: 2500207 - RNA, 19 nt, Artificial Sequence
  Description of Artificial Sequence: Synthetic oligonucleotide
  Antisense strand to SEQ ID NO: 2500206
guauuuauaaaucugcaac

SEQ ID NO: 2500208 - RNA, 19 nt, Artificial Sequence
  Description of Artificial Sequence: Synthetic oligonucleotide
  Sense strand starting at position 1680 of SEQ ID NO: 1887958
cgcacaugcgcauuggaau

SEQ ID NO: 2500209 - RNA, 19 nt, Artificial Sequence
  Description of Artificial Sequence: Synthetic oligonucleotide
  Antisense strand to SEQ ID NO: 2500208
auuccaaugcgcaugugcg

SEQ ID NO: 2500210 - RNA, 19 nt, Artificial Sequence
  Description of Artificial Sequence: Synthetic oligonucleotide
  Sense strand starting at position 1681 of SEQ ID NO: 1887958
gcacaugcgcauuggaauu

SEQ ID NO: 2500211 - RNA, 19 nt, Artificial Sequence
  Description of Artificial Sequence: Synthetic oligonucleotide
  Antisense strand to SEQ ID NO: 2500210
aauuccaaugcgcaugugc

SEQ ID NO: 2500212 - RNA, 19 nt, Artificial Sequence
  Description of Artificial Sequence: Synthetic oligonucleotide
  Sense strand starting at position 1837 of SEQ ID NO: 1887958
cccuguuucucgcuucuua

SEQ ID NO: 2500213 - RNA, 19 nt, Artificial Sequence
  Description of Artificial Sequence: Synthetic oligonucleotide
  Antisense strand to SEQ ID NO: 2500212
uaagaagcgagaaacaggg

SEQ ID NO: 2500214 - RNA, 19 nt, Artificial Sequence
  Description of Artificial Sequence: Synthetic oligonucleotide
  Sense strand starting at position 1847 of SEQ ID NO: 1887958
cgcuucuuaccucguaaug

SEQ ID NO: 2500215 - RNA, 19 nt, Artificial Sequence
  Description of Artificial Sequence: Synthetic oligonucleotide
  Antisense strand to SEQ ID NO: 2500214
cauuacgagguaagaagcg

SEQ ID NO: 2500216 - RNA, 19 nt, Artificial Sequence
  Description of Artificial Sequence: Synthetic oligonucleotide
  Sense strand starting at position 2111 of SEQ ID NO: 1887958
aucaacuugcgagaccaau

SEQ ID NO: 2500217 - RNA, 19 nt, Artificial Sequence
  Description of Artificial Sequence: Synthetic oligonucleotide
  Antisense strand to SEQ ID NO: 2500216
auuggucucgcaaguugau

SEQ ID NO: 2500218 - RNA, 19 nt, Artificial Sequence
  Description of Artificial Sequence: Synthetic oligonucleotide
  Sense strand starting at position 2234 of SEQ ID NO: 1887958
gauggcgucgcuguggaaa

SEQ ID NO: 2500219 - RNA, 19 nt, Artificial Sequence
  Description of Artificial Sequence: Synthetic oligonucleotide
  Antisense strand to SEQ ID NO: 2500218
uuuccacagcgacgccauc

SEQ ID NO: 2500220 - RNA, 19 nt, Artificial Sequence
  Description of Artificial Sequence: Synthetic oligonucleotide
  Sense strand starting at position 2455 of SEQ ID NO: 1887958
aggagacucuugaguggga

SEQ ID NO: 2500221 - RNA, 19 nt, Artificial Sequence
  Description of Artificial Sequence: Synthetic oligonucleotide
  Antisense strand to SEQ ID NO: 2500220
ucccacucaagagucuccu

SEQ ID NO: 2500222 - RNA, 19 nt, Artificial Sequence
  Description of Artificial Sequence: Synthetic oligonucleotide
  Sense strand starting at position 2629 of SEQ ID NO: 1887958
gaaacaaucucguucuguc

SEQ ID NO: 2500223 - RNA, 19 nt, Artificial Sequence
  Description of Artificial Sequence: Synthetic oligonucleotide
  Antisense strand to SEQ ID NO: 2500222
gacagaacgagauuguuuc

SEQ ID NO: 2500224 - RNA, 19 nt, Artificial Sequence
  Description of Artificial Sequence: Synthetic oligonucleotide
  Sense strand starting at position 2949 of SEQ ID NO: 1887958
uacauuggucucugccuga

SEQ ID NO: 2500225 - RNA, 19 nt, Artificial Sequence
  Description of Artificial Sequence: Synthetic oligonucleotide
  Antisense strand to SEQ ID NO: 2500224
ucaggcagagaccaaugua

SEQ ID NO: 2500226 - RNA, 19 nt, Artificial Sequence
  Description of Artificial Sequence: Synthetic oligonucleotide
  Sense strand starting at position 2962 of SEQ ID NO: 1887958
gccugacguccagaaucgu

SEQ ID NO: 2500227 - RNA, 19 nt, Artificial Sequence
  Description of Artificial Sequence: Synthetic oligonucleotide
  Antisense strand to SEQ ID NO: 2500226
acgauucuggacgucaggc

SEQ ID NO: 2500228 - RNA, 19 nt, Artificial Sequence
  Description of Artificial Sequence: Synthetic oligonucleotide
  Sense strand starting at position 3740 of SEQ ID NO: 1887958
ccuuacucuuguuuccaga

SEQ ID NO: 2500229 - RNA, 19 nt, Artificial Sequence
  Description of Artificial Sequence: Synthetic oligonucleotide
  Antisense strand to SEQ ID NO: 2500228
ucuggaaacaagaguaagg

SEQ ID NO: 2500230 - RNA, 19 nt, Artificial Sequence
  Description of Artificial Sequence: Synthetic oligonucleotide
  Sense strand starting at position 3775 of SEQ ID NO: 1887958
ucaugagcuguugaaccau

SEQ ID NO: 2500231 - RNA, 19 nt, Artificial Sequence
  Description of Artificial Sequence: Synthetic oligonucleotide
  Antisense strand to SEQ ID NO: 2500230
augguucaacagcucauga

SEQ ID NO: 2500232 - RNA, 19 nt, Artificial Sequence
  Description of Artificial Sequence: Synthetic oligonucleotide
  Sense strand starting at position 3784 of SEQ ID NO: 1887958
guugaaccaucuggaauuc

SEQ ID NO: 2500233 - RNA, 19 nt, Artificial Sequence
  Description of Artificial Sequence: Synthetic oligonucleotide
  Antisense strand to SEQ ID NO: 2500232
gaauuccagaugguucaac

SEQ ID NO: 2500234 - RNA, 19 nt, Artificial Sequence
  Description of Artificial Sequence: Synthetic oligonucleotide
  Sense strand starting at position 3803 of SEQ ID NO: 1887958
acaggccugucaugagaga

SEQ ID NO: 2500235 - RNA, 19 nt, Artificial Sequence
  Description of Artificial Sequence: Synthetic oligonucleotide
  Antisense strand to SEQ ID NO: 2500234
ucucucaugacaggccugu

SEQ ID NO: 2500236 - RNA, 19 nt, Artificial Sequence
  Description of Artificial Sequence: Synthetic oligonucleotide
  Sense strand starting at position 3839 of SEQ ID NO: 1887958
aaagguagaucacugauuc

SEQ ID NO: 2500237 - RNA, 19 nt, Artificial Sequence
  Description of Artificial Sequence: Synthetic oligonucleotide
  Antisense strand to SEQ ID NO: 2500236
gaaucagugaucuaccuuu

SEQ ID NO: 2500238 - RNA, 19 nt, Artificial Sequence
  Description of Artificial Sequence: Synthetic oligonucleotide
  Sense strand starting at position 3882 of SEQ ID NO: 1887958
gugagucagugcuuggaac

SEQ ID NO: 2500239 - RNA, 19 nt, Artificial Sequence
  Description of Artificial Sequence: Synthetic oligonucleotide
  Antisense strand to SEQ ID NO: 2500238
guuccaagcacugacucac

SEQ ID NO: 2500240 - RNA, 19 nt, Artificial Sequence
  Description of Artificial Sequence: Synthetic oligonucleotide
  Sense strand starting at position 3883 of SEQ ID NO: 1887958
ugagucagugcuuggaacu

SEQ ID NO: 2500241 - RNA, 19 nt, Artificial Sequence
  Description of Artificial Sequence: Synthetic oligonucleotide
  Antisense strand to SEQ ID NO: 2500240
aguuccaagcacugacuca

SEQ ID NO: 2500242 - RNA, 19 nt, Artificial Sequence
  Description of Artificial Sequence: Synthetic oligonucleotide
  Sense strand starting at position 3890 of SEQ ID NO: 1887958
gugcuuggaacucagucau

SEQ ID NO: 2500243 - RNA, 19 nt, Artificial Sequence
  Description of Artificial Sequence: Synthetic oligonucleotide
  Antisense strand to SEQ ID NO: 2500242
augacugaguuccaagcac

SEQ ID NO: 2500244 - RNA, 19 nt, Artificial Sequence
  Description of Artificial Sequence: Synthetic oligonucleotide
  Sense strand starting at position 3896 of SEQ ID NO: 1887958
ggaacucagucauccagau

SEQ ID NO: 2500245 - RNA, 19 nt, Artificial Sequence
  Description of Artificial Sequence: Synthetic oligonucleotide
  Antisense strand to SEQ ID NO: 2500244
aucuggaugacugaguucc

SEQ ID NO: 2500246 - RNA, 19 nt, Artificial Sequence
  Description of Artificial Sequence: Synthetic oligonucleotide
  Sense strand starting at position 3911 of SEQ ID NO: 1887958
agauuuggcucuggaaacu

SEQ ID NO: 2500247 - RNA, 19 nt, Artificial Sequence
  Description of Artificial Sequence: Synthetic oligonucleotide
  Antisense strand to SEQ ID NO: 2500246
aguuuccagagccaaaucu

SEQ ID NO: 2500248 - RNA, 19 nt, Artificial Sequence
  Description of Artificial Sequence: Synthetic oligonucleotide
  Sense strand starting at position 995 of SEQ ID NO: 1887959
accaaaucaucagggaaag

SEQ ID NO: 2500249 - RNA, 19 nt, Artificial Sequence
  Description of Artificial Sequence: Synthetic oligonucleotide
  Antisense strand to SEQ ID NO: 2500248
cuuucccugaugauuuggu

SEQ ID NO: 2500250 - RNA, 19 nt, Artificial Sequence
  Description of Artificial Sequence: Synthetic oligonucleotide
  Sense strand starting at position 1303 of SEQ ID NO: 1887959
agauaagagucagagacaa

SEQ ID NO: 2500251 - RNA, 19 nt, Artificial Sequence
  Description of Artificial Sequence: Synthetic oligonucleotide
  Antisense strand to SEQ ID NO: 2500250
uugucucugacucuuaucu

SEQ ID NO: 2500252 - RNA, 19 nt, Artificial Sequence
  Description of Artificial Sequence: Synthetic oligonucleotide
  Sense strand starting at position 1393 of SEQ ID NO: 1887959
acgagagagugacaaagau

SEQ ID NO: 2500253 - RNA, 19 nt, Artificial Sequence
  Description of Artificial Sequence: Synthetic oligonucleotide
  Antisense strand to SEQ ID NO: 2500252
aucuuugucacucucucgu

SEQ ID NO: 2500254 - RNA, 19 nt, Artificial Sequence
  Description of Artificial Sequence: Synthetic oligonucleotide
  Sense strand starting at position 2308 of SEQ ID NO: 1887959
ggcgcaaucaugguucguu

SEQ ID NO: 2500255 - RNA, 19 nt, Artificial Sequence
  Description of Artificial Sequence: Synthetic oligonucleotide
  Antisense strand to SEQ ID NO: 2500254
aacgaaccaugauugcgcc

SEQ ID NO: 2500256 - RNA, 19 nt, Artificial Sequence
  Description of Artificial Sequence: Synthetic oligonucleotide
  Sense strand starting at position 2538 of SEQ ID NO: 1887959
acgcucagccuacauuaaa

SEQ ID NO: 2500257 - RNA, 19 nt, Artificial Sequence
  Description of Artificial Sequence: Synthetic oligonucleotide
  Antisense strand to SEQ ID NO: 2500256
uuuaauguaggcugagcgu

SEQ ID NO: 2500258 - RNA, 19 nt, Artificial Sequence
  Description of Artificial Sequence: Synthetic oligonucleotide
  Sense strand starting at position 2832 of SEQ ID NO: 1887959
gccacagagcgagacuuau

SEQ ID NO: 2500259 - RNA, 19 nt, Artificial Sequence
  Description of Artificial Sequence: Synthetic oligonucleotide
  Antisense strand to SEQ ID NO: 2500258
auaagucucgcucuguggc

SEQ ID NO: 2500260 - RNA, 19 nt, Artificial Sequence
  Description of Artificial Sequence: Synthetic oligonucleotide
  Sense strand starting at position 2838 of SEQ ID NO: 1887959
gagcgagacuuaucgcaaa

SEQ ID NO: 2500261 - RNA, 19 nt, Artificial Sequence
  Description of Artificial Sequence: Synthetic oligonucleotide
  Antisense strand to SEQ ID NO: 2500260
uuugcgauaagucucgcuc

SEQ ID NO: 2500262 - RNA, 19 nt, Artificial Sequence
  Description of Artificial Sequence: Synthetic oligonucleotide
  Sense strand starting at position 3617 of SEQ ID NO: 1887959
gacagacagucuucuaggu

SEQ ID NO: 2500263 - RNA, 19 nt, Artificial Sequence
  Description of Artificial Sequence: Synthetic oligonucleotide
  Antisense strand to SEQ ID NO: 2500262
accuagaagacugucuguc

SEQ ID NO: 2500264 - RNA, 19 nt, Artificial Sequence
  Description of Artificial Sequence: Synthetic oligonucleotide
  Sense strand starting at position 3622 of SEQ ID NO: 1887959
acagucuucuagguacuuu

SEQ ID NO: 2500265 - RNA, 19 nt, Artificial Sequence
  Description of Artificial Sequence: Synthetic oligonucleotide
  Antisense strand to SEQ ID NO: 2500264
aaaguaccuagaagacugu

SEQ ID NO: 2500266 - RNA, 19 nt, Artificial Sequence
  Description of Artificial Sequence: Synthetic oligonucleotide
  Sense strand starting at position 464 of SEQ ID NO: 1887960
gaacauauuugcuuguggu

SEQ ID NO: 2500267 - RNA, 19 nt, Artificial Sequence
  Description of Artificial Sequence: Synthetic oligonucleotide
  Antisense strand to SEQ ID NO: 2500266
accacaagcaaauauguuc

SEQ ID NO: 2500268 - RNA, 19 nt, Artificial Sequence
  Description of Artificial Sequence: Synthetic oligonucleotide
  Sense strand starting at position 465 of SEQ ID NO: 1887960
aacauauuugcuugugguu

SEQ ID NO: 2500269 - RNA, 19 nt, Artificial Sequence
  Description of Artificial Sequence: Synthetic oligonucleotide
  Antisense strand to SEQ ID NO: 2500268
aaccacaagcaaauauguu

SEQ ID NO: 2500270 - RNA, 19 nt, Artificial Sequence
  Description of Artificial Sequence: Synthetic oligonucleotide
  Sense strand starting at position 477 of SEQ ID NO: 1887960
ugugguuaagagcauaguu

SEQ ID NO: 2500271 - RNA, 19 nt, Artificial Sequence
  Description of Artificial Sequence: Synthetic oligonucleotide
  Antisense strand to SEQ ID NO: 2500270
aacuaugcucuuaaccaca

SEQ ID NO: 2500272 - RNA, 19 nt, Artificial Sequence
  Description of Artificial Sequence: Synthetic oligonucleotide
  Sense strand starting at position 487 of SEQ ID NO: 1887960
agcauaguugcugaaacca

SEQ ID NO: 2500273 - RNA, 19 nt, Artificial Sequence
  Description of Artificial Sequence: Synthetic oligonucleotide
  Antisense strand to SEQ ID NO: 2500272
ugguuucagcaacuaugcu

SEQ ID NO: 2500274 - RNA, 19 nt, Artificial Sequence
  Description of Artificial Sequence: Synthetic oligonucleotide
  Sense strand starting at position 536 of SEQ ID NO: 1887960
gucuguguggccgugaguu

SEQ ID NO: 2500275 - RNA, 19 nt, Artificial Sequence
  Description of Artificial Sequence: Synthetic oligonucleotide
  Antisense strand to SEQ ID NO: 2500274
aacucacggccacacagac

SEQ ID NO: 2500276 - RNA, 19 nt, Artificial Sequence
  Description of Artificial Sequence: Synthetic oligonucleotide
  Sense strand starting at position 552 of SEQ ID NO: 1887960
guugcucagccaucuugua

SEQ ID NO: 2500277 - RNA, 19 nt, Artificial Sequence
  Description of Artificial Sequence: Synthetic oligonucleotide
  Antisense strand to SEQ ID NO: 2500276
uacaagauggcugagcaac

SEQ ID NO: 2500278 - RNA, 19 nt, Artificial Sequence
  Description of Artificial Sequence: Synthetic oligonucleotide
  Sense strand starting at position 625 of SEQ ID NO: 1887960
caaggugguuuggagauuu

SEQ ID NO: 2500279 - RNA, 19 nt, Artificial Sequence
  Description of Artificial Sequence: Synthetic oligonucleotide
  Antisense strand to SEQ ID NO: 2500278
aaaucuccaaaccaccuug

SEQ ID NO: 2500280 - RNA, 19 nt, Artificial Sequence
  Description of Artificial Sequence: Synthetic oligonucleotide
  Sense strand starting at position 661 of SEQ ID NO: 1887960
ugauaugaguuccuuaaac

SEQ ID NO: 2500281 - RNA, 19 nt, Artificial Sequence
  Description of Artificial Sequence: Synthetic oligonucleotide
  Antisense strand to SEQ ID NO: 2500280
guuuaaggaacucauauca

SEQ ID NO: 2500282 - RNA, 19 nt, Artificial Sequence
  Description of Artificial Sequence: Synthetic oligonucleotide
  Sense strand starting at position 679 of SEQ ID NO: 1887960
ccuuuacaccaggguuuau

SEQ ID NO: 2500283 - RNA, 19 nt, Artificial Sequence
  Description of Artificial Sequence: Synthetic oligonucleotide
  Antisense strand to SEQ ID NO: 2500282
auaaacccugguguaaagg

SEQ ID NO: 2500284 - RNA, 19 nt, Artificial Sequence
  Description of Artificial Sequence: Synthetic oligonucleotide
  Sense strand starting at position 688 of SEQ ID NO: 1887960
caggguuuauaccuagaaa

SEQ ID NO: 2500285 - RNA, 19 nt, Artificial Sequence
  Description of Artificial Sequence: Synthetic oligonucleotide
  Antisense strand to SEQ ID NO: 2500284
uuucuagguauaaacccug

SEQ ID NO: 2500286 - RNA, 19 nt, Artificial Sequence
  Description of Artificial Sequence: Synthetic oligonucleotide
  Sense strand starting at position 1275 of SEQ ID NO: 1887960
gaggcugucaaagaucagu

SEQ ID NO: 2500287 - RNA, 19 nt, Artificial Sequence
  Description of Artificial Sequence: Synthetic oligonucleotide
  Antisense strand to SEQ ID NO: 2500286
acugaucuuugacagccuc

SEQ ID NO: 2500288 - RNA, 19 nt, Artificial Sequence
  Description of Artificial Sequence: Synthetic oligonucleotide
  Sense strand starting at position 1322 of SEQ ID NO: 1887960
ugcugaaggaguugucaaa

SEQ ID NO: 2500289 - RNA, 19 nt, Artificial Sequence
  Description of Artificial Sequence: Synthetic oligonucleotide
  Antisense strand to SEQ ID NO: 2500288
uuugacaacuccuucagca

SEQ ID NO: 2500290 - RNA, 19 nt, Artificial Sequence
  Description of Artificial Sequence: Synthetic oligonucleotide
  Sense strand starting at position 2001 of SEQ ID NO: 1887960
agaguccuguccucucaga

SEQ ID NO: 2500291 - RNA, 19 nt, Artificial Sequence
  Description of Artificial Sequence: Synthetic oligonucleotide
  Antisense strand to SEQ ID NO: 2500290
ucugagaggacaggacucu

SEQ ID NO: 2500292 - RNA, 19 nt, Artificial Sequence
  Description of Artificial Sequence: Synthetic oligonucleotide
  Sense strand starting at position 2017 of SEQ ID NO: 1887960
agaggcucccuauacuuau

SEQ ID NO: 2500293 - RNA, 19 nt, Artificial Sequence
  Description of Artificial Sequence: Synthetic oligonucleotide
  Antisense strand to SEQ ID NO: 2500292
auaaguauagggagccucu

SEQ ID NO: 2500294 - RNA, 19 nt, Artificial Sequence
  Description of Artificial Sequence: Synthetic oligonucleotide
  Sense strand starting at position 2619 of SEQ ID NO: 1887960
gccugaugugcccagaaac

SEQ ID NO: 2500295 - RNA, 19 nt, Artificial Sequence
  Description of Artificial Sequence: Synthetic oligonucleotide
  Antisense strand to SEQ ID NO: 2500294
guuucugggcacaucaggc

SEQ ID NO: 2500296 - RNA, 19 nt, Artificial Sequence
  Description of Artificial Sequence: Synthetic oligonucleotide
  Sense strand starting at position 2637 of SEQ ID NO: 1887960
cacucaaccgucugggaau

SEQ ID NO: 2500297 - RNA, 19 nt, Artificial Sequence
  Description of Artificial Sequence: Synthetic oligonucleotide
  Antisense strand to SEQ ID NO: 2500296
auucccagacgguugagug

SEQ ID NO: 2500298 - RNA, 19 nt, Artificial Sequence
  Description of Artificial Sequence: Synthetic oligonucleotide
  Sense strand starting at position 2639 of SEQ ID NO: 1887960
cucaaccgucugggaauau

SEQ ID NO: 2500299 - RNA, 19 nt, Artificial Sequence
  Description of Artificial Sequence: Synthetic oligonucleotide
  Antisense strand to SEQ ID NO: 2500298
auauucccagacgguugag

SEQ ID NO: 2500300 - RNA, 19 nt, Artificial Sequence
  Description of Artificial Sequence: Synthetic oligonucleotide
  Sense strand starting at position 3008 of SEQ ID NO: 1887960
ggcaucagcguaucaguuu

SEQ ID NO: 2500301 - RNA, 19 nt, Artificial Sequence
  Description of Artificial Sequence: Synthetic oligonucleotide
  Antisense strand to SEQ ID NO: 2500300
aaacugauacgcugaugcc

SEQ ID NO: 2500302 - RNA, 19 nt, Artificial Sequence
  Description of Artificial Sequence: Synthetic oligonucleotide
  Sense strand starting at position 3028 of SEQ ID NO: 1887960
cucguaagucgggagugau

SEQ ID NO: 2500303 - RNA, 19 nt, Artificial Sequence
  Description of Artificial Sequence: Synthetic oligonucleotide
  Antisense strand to SEQ ID NO: 2500302
aucacucccgacuuacgag

SEQ ID NO: 2500304 - RNA, 19 nt, Artificial Sequence
  Description of Artificial Sequence: Synthetic oligonucleotide
  Sense strand starting at position 3029 of SEQ ID NO: 1887960
ucguaagucgggagugaug

SEQ ID NO: 2500305 - RNA, 19 nt, Artificial Sequence
  Description of Artificial Sequence: Synthetic oligonucleotide
  Antisense strand to SEQ ID NO: 2500304
caucacucccgacuuacga

SEQ ID NO: 2500306 - RNA, 19 nt, Artificial Sequence
  Description of Artificial Sequence: Synthetic oligonucleotide
  Sense strand starting at position 3031 of SEQ ID NO: 1887960
guaagucgggagugaugga

SEQ ID NO: 2500307 - RNA, 19 nt, Artificial Sequence
  Description of Artificial Sequence: Synthetic oligonucleotide
  Antisense strand to SEQ ID NO: 2500306
uccaucacucccgacuuac

SEQ ID NO: 2500308 - RNA, 19 nt, Artificial Sequence
  Description of Artificial Sequence: Synthetic oligonucleotide
  Sense strand starting at position 3060 of SEQ ID NO: 1887960
uguagugcggcugugagaa

SEQ ID NO: 2500309 - RNA, 19 nt, Artificial Sequence
  Description of Artificial Sequence: Synthetic oligonucleotide
  Antisense strand to SEQ ID NO: 2500308
uucucacagccgcacuaca

SEQ ID NO: 2500310 - RNA, 19 nt, Artificial Sequence
  Description of Artificial Sequence: Synthetic oligonucleotide
  Sense strand starting at position 3073 of SEQ ID NO: 1887960
ugagaauugagaugaggcu

SEQ ID NO: 2500311 - RNA, 19 nt, Artificial Sequence
  Description of Artificial Sequence: Synthetic oligonucleotide
  Antisense strand to SEQ ID NO: 2500310
agccucaucucaauucuca

SEQ ID NO: 2500312 - RNA, 19 nt, Artificial Sequence
  Description of Artificial Sequence: Synthetic oligonucleotide
  Sense strand starting at position 3080 of SEQ ID NO: 1887960
ugagaugaggcuugguuca

SEQ ID NO: 2500313 - RNA, 19 nt, Artificial Sequence
  Description of Artificial Sequence: Synthetic oligonucleotide
  Antisense strand to SEQ ID NO: 2500312
ugaaccaagccucaucuca

SEQ ID NO: 2500314 - RNA, 19 nt, Artificial Sequence
  Description of Artificial Sequence: Synthetic oligonucleotide
  Sense strand starting at position 3082 of SEQ ID NO: 1887960
agaugaggcuugguucaua

SEQ ID NO: 2500315 - RNA, 19 nt, Artificial Sequence
  Description of Artificial Sequence: Synthetic oligonucleotide
  Antisense strand to SEQ ID NO: 2500314
uaugaaccaagccucaucu

SEQ ID NO: 2500316 - RNA, 19 nt, Artificial Sequence
  Description of Artificial Sequence: Synthetic oligonucleotide
  Sense strand starting at position 3357 of SEQ ID NO: 1887960
ggauaauaggccuacgcua

SEQ ID NO: 2500317 - RNA, 19 nt, Artificial Sequence
  Description of Artificial Sequence: Synthetic oligonucleotide
  Antisense strand to SEQ ID NO: 2500316
uagcguaggccuauuaucc

SEQ ID NO: 2500318 - RNA, 19 nt, Artificial Sequence
  Description of Artificial Sequence: Synthetic oligonucleotide
  Sense strand starting at position 3376 of SEQ ID NO: 1887960
cugggcugucuuuaggaua

SEQ ID NO: 2500319 - RNA, 19 nt, Artificial Sequence
  Description of Artificial Sequence: Synthetic oligonucleotide
  Antisense strand to SEQ ID NO: 2500318
uauccuaaagacagcccag

SEQ ID NO: 2500320 - RNA, 19 nt, Artificial Sequence
  Description of Artificial Sequence: Synthetic oligonucleotide
  Sense strand starting at position 3381 of SEQ ID NO: 1887960
cugucuuuaggauacguga

SEQ ID NO: 2500321 - RNA, 19 nt, Artificial Sequence
  Description of Artificial Sequence: Synthetic oligonucleotide
  Antisense strand to SEQ ID NO: 2500320
ucacguauccuaaagacag

SEQ ID NO: 2500322 - RNA, 19 nt, Artificial Sequence
  Description of Artificial Sequence: Synthetic oligonucleotide
  Sense strand starting at position 3383 of SEQ ID NO: 1887960
gucuuuaggauacgugaaa

SEQ ID NO: 2500323 - RNA, 19 nt, Artificial Sequence
  Description of Artificial Sequence: Synthetic oligonucleotide
  Antisense strand to SEQ ID NO: 2500322
uuucacguauccuaaagac

SEQ ID NO: 2500324 - RNA, 19 nt, Artificial Sequence
  Description of Artificial Sequence: Synthetic oligonucleotide
  Sense strand starting at position 3384 of SEQ ID NO: 1887960
ucuuuaggauacgugaaau

SEQ ID NO: 2500325 - RNA, 19 nt, Artificial Sequence
  Description of Artificial Sequence: Synthetic oligonucleotide
  Antisense strand to SEQ ID NO: 2500324
auuucacguauccuaaaga

SEQ ID NO: 2500326 - RNA, 19 nt, Artificial Sequence
  Description of Artificial Sequence: Synthetic oligonucleotide
  Sense strand starting at position 3410 of SEQ ID NO: 1887960
gagugcuugcuuccgcagu

SEQ ID NO: 2500327 - RNA, 19 nt, Artificial Sequence
  Description of Artificial Sequence: Synthetic oligonucleotide
  Antisense strand to SEQ ID NO: 2500326
acugcggaagcaagcacuc

SEQ ID NO: 2500328 - RNA, 19 nt, Artificial Sequence
  Description of Artificial Sequence: Synthetic oligonucleotide
  Sense strand starting at position 3441 of SEQ ID NO: 1887960
acaggcccucaguaaauaa

SEQ ID NO: 2500329 - RNA, 19 nt, Artificial Sequence
  Description of Artificial Sequence: Synthetic oligonucleotide
  Antisense strand to SEQ ID NO: 2500328
uuauuuacugagggccugu

SEQ ID NO: 2500330 - RNA, 19 nt, Artificial Sequence
  Description of Artificial Sequence: Synthetic oligonucleotide
  Sense strand starting at position 3466 of SEQ ID NO: 1887960
guuauuugguucccgucua

SEQ ID NO: 2500331 - RNA, 19 nt, Artificial Sequence
  Description of Artificial Sequence: Synthetic oligonucleotide
  Antisense strand to SEQ ID NO: 2500330
uagacgggaaccaaauaac

SEQ ID NO: 2500332 - RNA, 19 nt, Artificial Sequence
  Description of Artificial Sequence: Synthetic oligonucleotide
  Sense strand starting at position 3471 of SEQ ID NO: 1887960
uugguucccgucuaaacau

SEQ ID NO: 2500333 - RNA, 19 nt, Artificial Sequence
  Description of Artificial Sequence: Synthetic oligonucleotide
  Antisense strand to SEQ ID NO: 2500332
auguuuagacgggaaccaa

SEQ ID NO: 2500334 - RNA, 19 nt, Artificial Sequence
  Description of Artificial Sequence: Synthetic oligonucleotide
  Sense strand starting at position 3500 of SEQ ID NO: 1887960
cagggagauguuuagucuu

SEQ ID NO: 2500335 - RNA, 19 nt, Artificial Sequence
  Description of Artificial Sequence: Synthetic oligonucleotide
  Antisense strand to SEQ ID NO: 2500334
aagacuaaacaucucccug

SEQ ID NO: 2500336 - RNA, 19 nt, Artificial Sequence
  Description of Artificial Sequence: Synthetic oligonucleotide
  Sense strand starting at position 3502 of SEQ ID NO: 1887960
gggagauguuuagucuuca

SEQ ID NO: 2500337 - RNA, 19 nt, Artificial Sequence
  Description of Artificial Sequence: Synthetic oligonucleotide
  Antisense strand to SEQ ID NO: 2500336
ugaagacuaaacaucuccc

SEQ ID NO: 2500338 - RNA, 19 nt, Artificial Sequence
  Description of Artificial Sequence: Synthetic oligonucleotide
  Sense strand starting at position 3614 of SEQ ID NO: 1887960
ggaaguagcucuuuguaau

SEQ ID NO: 2500339 - RNA, 19 nt, Artificial Sequence
  Description of Artificial Sequence: Synthetic oligonucleotide
  Antisense strand to SEQ ID NO: 2500338
auuacaaagagcuacuucc

SEQ ID NO: 2500340 - RNA, 19 nt, Artificial Sequence
  Description of Artificial Sequence: Synthetic oligonucleotide
  Sense strand starting at position 3615 of SEQ ID NO: 1887960
gaaguagcucuuuguaaua

SEQ ID NO: 2500341 - RNA, 19 nt, Artificial Sequence
  Description of Artificial Sequence: Synthetic oligonucleotide
  Antisense strand to SEQ ID NO: 2500340
uauuacaaagagcuacuuc

SEQ ID NO: 2500342 - RNA, 19 nt, Artificial Sequence
  Description of Artificial Sequence: Synthetic oligonucleotide
  Sense strand starting at position 3628 of SEQ ID NO: 1887960
guaauaucaguuugguauu

SEQ ID NO: 2500343 - RNA, 19 nt, Artificial Sequence
  Description of Artificial Sequence: Synthetic oligonucleotide
  Antisense strand to SEQ ID NO: 2500342
aauaccaaacugauauuac

SEQ ID NO: 2500344 - RNA, 19 nt, Artificial Sequence
  Description of Artificial Sequence: Synthetic oligonucleotide
  Sense strand starting at position 3676 of SEQ ID NO: 1887960
acacucacugcuuggacaa

SEQ ID NO: 2500345 - RNA, 19 nt, Artificial Sequence
  Description of Artificial Sequence: Synthetic oligonucleotide
  Antisense strand to SEQ ID NO: 2500344
uuguccaagcagugagugu

SEQ ID NO: 2500346 - RNA, 19 nt, Artificial Sequence
  Description of Artificial Sequence: Synthetic oligonucleotide
  Sense strand starting at position 68 of SEQ ID NO: 1887961
ggccauauuccucaccuga

SEQ ID NO: 2500347 - RNA, 19 nt, Artificial Sequence
  Description of Artificial Sequence: Synthetic oligonucleotide
  Antisense strand to SEQ ID NO: 2500346
ucaggugaggaauauggcc

SEQ ID NO: 2500348 - RNA, 19 nt, Artificial Sequence
  Description of Artificial Sequence: Synthetic oligonucleotide
  Sense strand starting at position 120 of SEQ ID NO: 1887961
gugugugcacuccaagaaa

SEQ ID NO: 2500349 - RNA, 19 nt, Artificial Sequence
  Description of Artificial Sequence: Synthetic oligonucleotide
  Antisense strand to SEQ ID NO: 2500348
uuucuuggagugcacacac

SEQ ID NO: 2500350 - RNA, 19 nt, Artificial Sequence
  Description of Artificial Sequence: Synthetic oligonucleotide
  Sense strand starting at position 198 of SEQ ID NO: 1887961
acuaauacaugcuuaguga

SEQ ID NO: 2500351 - RNA, 19 nt, Artificial Sequence
  Description of Artificial Sequence: Synthetic oligonucleotide
  Antisense strand to SEQ ID NO: 2500350
ucacuaagcauguauuagu

SEQ ID NO: 2500352 - RNA, 19 nt, Artificial Sequence
  Description of Artificial Sequence: Synthetic oligonucleotide
  Sense strand starting at position 199 of SEQ ID NO: 1887961
cuaauacaugcuuagugaa

SEQ ID NO: 2500353 - RNA, 19 nt, Artificial Sequence
  Description of Artificial Sequence: Synthetic oligonucleotide
  Antisense strand to SEQ ID NO: 2500352
uucacuaagcauguauuag

SEQ ID NO: 2500354 - RNA, 19 nt, Artificial Sequence
  Description of Artificial Sequence: Synthetic oligonucleotide
  Sense strand starting at position 271 of SEQ ID NO: 1887961
ccagaugccuucucuguga

SEQ ID NO: 2500355 - RNA, 19 nt, Artificial Sequence
  Description of Artificial Sequence: Synthetic oligonucleotide
  Antisense strand to SEQ ID NO: 2500354
ucacagagaaggcaucugg

SEQ ID NO: 2500356 - RNA, 19 nt, Artificial Sequence
  Description of Artificial Sequence: Synthetic oligonucleotide
  Sense strand starting at position 401 of SEQ ID NO: 1887961
auggaaucacauugcauca

SEQ ID NO: 2500357 - RNA, 19 nt, Artificial Sequence
  Description of Artificial Sequence: Synthetic oligonucleotide
  Antisense strand to SEQ ID NO: 2500356
ugaugcaaugugauuccau

SEQ ID NO: 2500358 - RNA, 19 nt, Artificial Sequence
  Description of Artificial Sequence: Synthetic oligonucleotide
  Sense strand starting at position 535 of SEQ ID NO: 1887961
ccggucagaucuuucuagu

SEQ ID NO: 2500359 - RNA, 19 nt, Artificial Sequence
  Description of Artificial Sequence: Synthetic oligonucleotide
  Antisense strand to SEQ ID NO: 2500358
acuagaaagaucugaccgg

SEQ ID NO: 2500360 - RNA, 19 nt, Artificial Sequence
  Description of Artificial Sequence: Synthetic oligonucleotide
  Sense strand starting at position 541 of SEQ ID NO: 1887961
agaucuuucuagucaucua

SEQ ID NO: 2500361 - RNA, 19 nt, Artificial Sequence
  Description of Artificial Sequence: Synthetic oligonucleotide
  Antisense strand to SEQ ID NO: 2500360
uagaugacuagaaagaucu

SEQ ID NO: 2500362 - RNA, 19 nt, Artificial Sequence
  Description of Artificial Sequence: Synthetic oligonucleotide
  Sense strand starting at position 544 of SEQ ID NO: 1887961
ucuuucuagucaucuagac

SEQ ID NO: 2500363 - RNA, 19 nt, Artificial Sequence
  Description of Artificial Sequence: Synthetic oligonucleotide
  Antisense strand to SEQ ID NO: 2500362
gucuagaugacuagaaaga

SEQ ID NO: 2500364 - RNA, 19 nt, Artificial Sequence
  Description of Artificial Sequence: Synthetic oligonucleotide
  Sense strand starting at position 607 of SEQ ID NO: 1887961
auuccaaacgcuugcauua

SEQ ID NO: 2500365 - RNA, 19 nt, Artificial Sequence
  Description of Artificial Sequence: Synthetic oligonucleotide
  Antisense strand to SEQ ID NO: 2500364
uaaugcaagcguuuggaau

SEQ ID NO: 2500366 - RNA, 19 nt, Artificial Sequence
  Description of Artificial Sequence: Synthetic oligonucleotide
  Sense strand starting at position 620 of SEQ ID NO: 1887961
gcauuauuccuaggaaagg

SEQ ID NO: 2500367 - RNA, 19 nt, Artificial Sequence
  Description of Artificial Sequence: Synthetic oligonucleotide
  Antisense strand to SEQ ID NO: 2500366
ccuuuccuaggaauaaugc

SEQ ID NO: 2500368 - RNA, 19 nt, Artificial Sequence
  Description of Artificial Sequence: Synthetic oligonucleotide
  Sense strand starting at position 694 of SEQ ID NO: 1887961
gacacagugccuuggucau

SEQ ID NO: 2500369 - RNA, 19 nt, Artificial Sequence
  Description of Artificial Sequence: Synthetic oligonucleotide
  Antisense strand to SEQ ID NO: 2500368
augaccaaggcacuguguc

SEQ ID NO: 2500370 - RNA, 19 nt, Artificial Sequence
  Description of Artificial Sequence: Synthetic oligonucleotide
  Sense strand starting at position 788 of SEQ ID NO: 1887961
auggaugggcgauagaguu

SEQ ID NO: 2500371 - RNA, 19 nt, Artificial Sequence
  Description of Artificial Sequence: Synthetic oligonucleotide
  Antisense strand to SEQ ID NO: 2500370
aacucuaucgcccauccau

SEQ ID NO: 2500372 - RNA, 19 nt, Artificial Sequence
  Description of Artificial Sequence: Synthetic oligonucleotide
  Sense strand starting at position 794 of SEQ ID NO: 1887961
gggcgauagaguuaagagu

SEQ ID NO: 2500373 - RNA, 19 nt, Artificial Sequence
  Description of Artificial Sequence: Synthetic oligonucleotide
  Antisense strand to SEQ ID NO: 2500372
acucuuaacucuaucgccc

SEQ ID NO: 2500374 - RNA, 19 nt, Artificial Sequence
  Description of Artificial Sequence: Synthetic oligonucleotide
  Sense strand starting at position 846 of SEQ ID NO: 1887961
cggacacacuuaucuuuga

SEQ ID NO: 2500375 - RNA, 19 nt, Artificial Sequence
  Description of Artificial Sequence: Synthetic oligonucleotide
  Antisense strand to SEQ ID NO: 2500374
ucaaagauaaguguguccg

SEQ ID NO: 2500376 - RNA, 19 nt, Artificial Sequence
  Description of Artificial Sequence: Synthetic oligonucleotide
  Sense strand starting at position 1324 of SEQ ID NO: 1887961
gguucugauccggguuuga

SEQ ID NO: 2500377 - RNA, 19 nt, Artificial Sequence
  Description of Artificial Sequence: Synthetic oligonucleotide
  Antisense strand to SEQ ID NO: 2500376
ucaaacccggaucagaacc

SEQ ID NO: 2500378 - RNA, 19 nt, Artificial Sequence
  Description of Artificial Sequence: Synthetic oligonucleotide
  Sense strand starting at position 2056 of SEQ ID NO: 1887961
gcgucaggauaccuagaga

SEQ ID NO: 2500379 - RNA, 19 nt, Artificial Sequence
  Description of Artificial Sequence: Synthetic oligonucleotide
  Antisense strand to SEQ ID NO: 2500378
ucucuagguauccugacgc

SEQ ID NO: 2500380 - RNA, 19 nt, Artificial Sequence
  Description of Artificial Sequence: Synthetic oligonucleotide
  Sense strand starting at position 2125 of SEQ ID NO: 1887961
uugcguagcacuuaguaaa

SEQ ID NO: 2500381 - RNA, 19 nt, Artificial Sequence
  Description of Artificial Sequence: Synthetic oligonucleotide
  Antisense strand to SEQ ID NO: 2500380
uuuacuaagugcuacgcaa

SEQ ID NO: 2500382 - RNA, 19 nt, Artificial Sequence
  Description of Artificial Sequence: Synthetic oligonucleotide
  Sense strand starting at position 2191 of SEQ ID NO: 1887961
gcgguuaagagugaucacu

SEQ ID NO: 2500383 - RNA, 19 nt, Artificial Sequence
  Description of Artificial Sequence: Synthetic oligonucleotide
  Antisense strand to SEQ ID NO: 2500382
agugaucacucuuaaccgc

SEQ ID NO: 2500384 - RNA, 19 nt, Artificial Sequence
  Description of Artificial Sequence: Synthetic oligonucleotide
  Sense strand starting at position 2193 of SEQ ID NO: 1887961
gguuaagagugaucacuga

SEQ ID NO: 2500385 - RNA, 19 nt, Artificial Sequence
  Description of Artificial Sequence: Synthetic oligonucleotide
  Antisense strand to SEQ ID NO: 2500384
ucagugaucacucuuaacc

SEQ ID NO: 2500386 - RNA, 19 nt, Artificial Sequence
  Description of Artificial Sequence: Synthetic oligonucleotide
  Sense strand starting at position 2200 of SEQ ID NO: 1887961
agugaucacugauuccgua

SEQ ID NO: 2500387 - RNA, 19 nt, Artificial Sequence
  Description of Artificial Sequence: Synthetic oligonucleotide
  Antisense strand to SEQ ID NO: 2500386
uacggaaucagugaucacu

SEQ ID NO: 2500388 - RNA, 19 nt, Artificial Sequence
  Description of Artificial Sequence: Synthetic oligonucleotide
  Sense strand starting at position 2263 of SEQ ID NO: 1887961
ucagaugcccugugaucac

SEQ ID NO: 2500389 - RNA, 19 nt, Artificial Sequence
  Description of Artificial Sequence: Synthetic oligonucleotide
  Antisense strand to SEQ ID NO: 2500388
gugaucacagggcaucuga

SEQ ID NO: 2500390 - RNA, 19 nt, Artificial Sequence
  Description of Artificial Sequence: Synthetic oligonucleotide
  Sense strand starting at position 2364 of SEQ ID NO: 1887961
ggugguuccucuuccagau

SEQ ID NO: 2500391 - RNA, 19 nt, Artificial Sequence
  Description of Artificial Sequence: Synthetic oligonucleotide
  Antisense strand to SEQ ID NO: 2500390
aucuggaagaggaaccacc

SEQ ID NO: 2500392 - RNA, 19 nt, Artificial Sequence
  Description of Artificial Sequence: Synthetic oligonucleotide
  Sense strand starting at position 2427 of SEQ ID NO: 1887961
ccacaaaucccacgugguu

SEQ ID NO: 2500393 - RNA, 19 nt, Artificial Sequence
  Description of Artificial Sequence: Synthetic oligonucleotide
  Antisense strand to SEQ ID NO: 2500392
aaccacgugggauuugugg

SEQ ID NO: 2500394 - RNA, 19 nt, Artificial Sequence
  Description of Artificial Sequence: Synthetic oligonucleotide
  Sense strand starting at position 2436 of SEQ ID NO: 1887961
ccacgugguuuaucuugau

SEQ ID NO: 2500395 - RNA, 19 nt, Artificial Sequence
  Description of Artificial Sequence: Synthetic oligonucleotide
  Antisense strand to SEQ ID NO: 2500394
aucaagauaaaccacgugg

SEQ ID NO: 2500396 - RNA, 19 nt, Artificial Sequence
  Description of Artificial Sequence: Synthetic oligonucleotide
  Sense strand starting at position 2479 of SEQ ID NO: 1887961
ucugcuuucuguucucaga

SEQ ID NO: 2500397 - RNA, 19 nt, Artificial Sequence
  Description of Artificial Sequence: Synthetic oligonucleotide
  Antisense strand to SEQ ID NO: 2500396
ucugagaacagaaagcaga

SEQ ID NO: 2500398 - RNA, 19 nt, Artificial Sequence
  Description of Artificial Sequence: Synthetic oligonucleotide
  Sense strand starting at position 2481 of SEQ ID NO: 1887961
ugcuuucuguucucagaug

SEQ ID NO: 2500399 - RNA, 19 nt, Artificial Sequence
  Description of Artificial Sequence: Synthetic oligonucleotide
  Antisense strand to SEQ ID NO: 2500398
caucugagaacagaaagca

SEQ ID NO: 2500400 - RNA, 19 nt, Artificial Sequence
  Description of Artificial Sequence: Synthetic oligonucleotide
  Sense strand starting at position 2768 of SEQ ID NO: 1887961
uauuaugucccggugcgua

SEQ ID NO: 2500401 - RNA, 19 nt, Artificial Sequence
  Description of Artificial Sequence: Synthetic oligonucleotide
  Antisense strand to SEQ ID NO: 2500400
uacgcaccgggacauaaua

SEQ ID NO: 2500402 - RNA, 19 nt, Artificial Sequence
  Description of Artificial Sequence: Synthetic oligonucleotide
  Sense strand starting at position 2867 of SEQ ID NO: 1887961
ugcugaaggugucugagua

SEQ ID NO: 2500403 - RNA, 19 nt, Artificial Sequence
  Description of Artificial Sequence: Synthetic oligonucleotide
  Antisense strand to SEQ ID NO: 2500402
uacucagacaccuucagca

SEQ ID NO: 2500404 - RNA, 19 nt, Artificial Sequence
  Description of Artificial Sequence: Synthetic oligonucleotide
  Sense strand starting at position 2868 of SEQ ID NO: 1887961
gcugaaggugucugaguac

SEQ ID NO: 2500405 - RNA, 19 nt, Artificial Sequence
  Description of Artificial Sequence: Synthetic oligonucleotide
  Antisense strand to SEQ ID NO: 2500404
guacucagacaccuucagc

SEQ ID NO: 2500406 - RNA, 19 nt, Artificial Sequence
  Description of Artificial Sequence: Synthetic oligonucleotide
  Sense strand starting at position 2877 of SEQ ID NO: 1887961
gucugaguacuggagaauc

SEQ ID NO: 2500407 - RNA, 19 nt, Artificial Sequence
  Description of Artificial Sequence: Synthetic oligonucleotide
  Antisense strand to SEQ ID NO: 2500406
gauucuccaguacucagac

SEQ ID NO: 2500408 - RNA, 19 nt, Artificial Sequence
  Description of Artificial Sequence: Synthetic oligonucleotide
  Sense strand starting at position 2885 of SEQ ID NO: 1887961
acuggagaaucccauccuu

SEQ ID NO: 2500409 - RNA, 19 nt, Artificial Sequence
  Description of Artificial Sequence: Synthetic oligonucleotide
  Antisense strand to SEQ ID NO: 2500408
aaggaugggauucuccagu

SEQ ID NO: 2500410 - RNA, 19 nt, Artificial Sequence
  Description of Artificial Sequence: Synthetic oligonucleotide
  Sense strand starting at position 3251 of SEQ ID NO: 1887961
uggguuaucuagucucccu

SEQ ID NO: 2500411 - RNA, 19 nt, Artificial Sequence
  Description of Artificial Sequence: Synthetic oligonucleotide
  Antisense strand to SEQ ID NO: 2500410
agggagacuagauaaccca

SEQ ID NO: 2500412 - RNA, 19 nt, Artificial Sequence
  Description of Artificial Sequence: Synthetic oligonucleotide
  Sense strand starting at position 3268 of SEQ ID NO: 1887961
cuuccuuauugugacauuu

SEQ ID NO: 2500413 - RNA, 19 nt, Artificial Sequence
  Description of Artificial Sequence: Synthetic oligonucleotide
  Antisense strand to SEQ ID NO: 2500412
aaaugucacaauaaggaag

SEQ ID NO: 2500414 - RNA, 19 nt, Artificial Sequence
  Description of Artificial Sequence: Synthetic oligonucleotide
  Sense strand starting at position 3617 of SEQ ID NO: 1887961
ugacuugucccaugucuug

SEQ ID NO: 2500415 - RNA, 19 nt, Artificial Sequence
  Description of Artificial Sequence: Synthetic oligonucleotide
  Antisense strand to SEQ ID NO: 2500414
caagacaugggacaaguca

SEQ ID NO: 2500416 - RNA, 19 nt, Artificial Sequence
  Description of Artificial Sequence: Synthetic oligonucleotide
  Sense strand starting at position 3647 of SEQ ID NO: 1887961
ccugguuugccaggaguag

SEQ ID NO: 2500417 - RNA, 19 nt, Artificial Sequence
  Description of Artificial Sequence: Synthetic oligonucleotide
  Antisense strand to SEQ ID NO: 2500416
cuacuccuggcaaaccagg

SEQ ID NO: 2500418 - RNA, 19 nt, Artificial Sequence
  Description of Artificial Sequence: Synthetic oligonucleotide
  Sense strand starting at position 3648 of SEQ ID NO: 1887961
cugguuugccaggaguaga

SEQ ID NO: 2500419 - RNA, 19 nt, Artificial Sequence
  Description of Artificial Sequence: Synthetic oligonucleotide
  Antisense strand to SEQ ID NO: 2500418
ucuacuccuggcaaaccag

SEQ ID NO: 2500420 - RNA, 19 nt, Artificial Sequence
  Description of Artificial Sequence: Synthetic oligonucleotide
  Sense strand starting at position 3671 of SEQ ID NO: 1887961
agguuuggaugaucuuuga

SEQ ID NO: 2500421 - RNA, 19 nt, Artificial Sequence
  Description of Artificial Sequence: Synthetic oligonucleotide
  Antisense strand to SEQ ID NO: 2500420
ucaaagaucauccaaaccu

SEQ ID NO: 2500422 - RNA, 19 nt, Artificial Sequence
  Description of Artificial Sequence: Synthetic oligonucleotide
  Sense strand starting at position 3674 of SEQ ID NO: 1887961
uuuggaugaucuuugagca

SEQ ID NO: 2500423 - RNA, 19 nt, Artificial Sequence
  Description of Artificial Sequence: Synthetic oligonucleotide
  Antisense strand to SEQ ID NO: 2500422
ugcucaaagaucauccaaa

SEQ ID NO: 2500424 - RNA, 19 nt, Artificial Sequence
  Description of Artificial Sequence: Synthetic oligonucleotide
  Sense strand starting at position 3682 of SEQ ID NO: 1887961
aucuuugagcaguggcaga

SEQ ID NO: 2500425 - RNA, 19 nt, Artificial Sequence
  Description of Artificial Sequence: Synthetic oligonucleotide
  Antisense strand to SEQ ID NO: 2500424
ucugccacugcucaaagau

SEQ ID NO: 2500426 - RNA, 19 nt, Artificial Sequence
  Description of Artificial Sequence: Synthetic oligonucleotide
  Sense strand starting at position 113 of SEQ ID NO: 1887962
gugcgacucagcgacauua

SEQ ID NO: 2500427 - RNA, 19 nt, Artificial Sequence
  Description of Artificial Sequence: Synthetic oligonucleotide
  Antisense strand to SEQ ID NO: 2500426
uaaugucgcugagucgcac

SEQ ID NO: 2500428 - RNA, 19 nt, Artificial Sequence
  Description of Artificial Sequence: Synthetic oligonucleotide
  Sense strand starting at position 115 of SEQ ID NO: 1887962
gcgacucagcgacauuagu

SEQ ID NO: 2500429 - RNA, 19 nt, Artificial Sequence
  Description of Artificial Sequence: Synthetic oligonucleotide
  Antisense strand to SEQ ID NO: 2500428
acuaaugucgcugagucgc

SEQ ID NO: 2500430 - RNA, 19 nt, Artificial Sequence
  Description of Artificial Sequence: Synthetic oligonucleotide
  Sense strand starting at position 132 of SEQ ID NO: 1887962
gugcacucccaauguuaug

SEQ ID NO: 2500431 - RNA, 19 nt, Artificial Sequence
  Description of Artificial Sequence: Synthetic oligonucleotide
  Antisense strand to SEQ ID NO: 2500430
cauaacauugggagugcac

SEQ ID NO: 2500432 - RNA, 19 nt, Artificial Sequence
  Description of Artificial Sequence: Synthetic oligonucleotide
  Sense strand starting at position 781 of SEQ ID NO: 1887962
uuaugcucaguguaauguu

SEQ ID NO: 2500433 - RNA, 19 nt, Artificial Sequence
  Description of Artificial Sequence: Synthetic oligonucleotide
  Antisense strand to SEQ ID NO: 2500432
aacauuacacugagcauaa

SEQ ID NO: 2500434 - RNA, 19 nt, Artificial Sequence
  Description of Artificial Sequence: Synthetic oligonucleotide
  Sense strand starting at position 1471 of SEQ ID NO: 1887962
uccguuugcccagacauga

SEQ ID NO: 2500435 - RNA, 19 nt, Artificial Sequence
  Description of Artificial Sequence: Synthetic oligonucleotide
  Antisense strand to SEQ ID NO: 2500434
ucaugucugggcaaacgga

SEQ ID NO: 2500436 - RNA, 19 nt, Artificial Sequence
  Description of Artificial Sequence: Synthetic oligonucleotide
  Sense strand starting at position 1539 of SEQ ID NO: 1887962
agaugaucagcaggugaca

SEQ ID NO: 2500437 - RNA, 19 nt, Artificial Sequence
  Description of Artificial Sequence: Synthetic oligonucleotide
  Antisense strand to SEQ ID NO: 2500436
ugucaccugcugaucaucu

SEQ ID NO: 2500438 - RNA, 19 nt, Artificial Sequence
  Description of Artificial Sequence: Synthetic oligonucleotide
  Sense strand starting at position 1551 of SEQ ID NO: 1887962
ggugacagcuccucuaaag

SEQ ID NO: 2500439 - RNA, 19 nt, Artificial Sequence
  Description of Artificial Sequence: Synthetic oligonucleotide
  Antisense strand to SEQ ID NO: 2500438
cuuuagaggagcugucacc

SEQ ID NO: 2500440 - RNA, 19 nt, Artificial Sequence
  Description of Artificial Sequence: Synthetic oligonucleotide
  Sense strand starting at position 1790 of SEQ ID NO: 1887962
gguguccuggcacaaagau

SEQ ID NO: 2500441 - RNA, 19 nt, Artificial Sequence
  Description of Artificial Sequence: Synthetic oligonucleotide
  Antisense strand to SEQ ID NO: 2500440
aucuuugugccaggacacc

SEQ ID NO: 2500442 - RNA, 19 nt, Artificial Sequence
  Description of Artificial Sequence: Synthetic oligonucleotide
  Sense strand starting at position 1802 of SEQ ID NO: 1887962
caaagaugaguuuggcuca

SEQ ID NO: 2500443 - RNA, 19 nt, Artificial Sequence
  Description of Artificial Sequence: Synthetic oligonucleotide
  Antisense strand to SEQ ID NO: 2500442
ugagccaaacucaucuuug

SEQ ID NO: 2500444 - RNA, 19 nt, Artificial Sequence
  Description of Artificial Sequence: Synthetic oligonucleotide
  Sense strand starting at position 1807 of SEQ ID NO: 1887962
augaguuuggcucacuggu

SEQ ID NO: 2500445 - RNA, 19 nt, Artificial Sequence
  Description of Artificial Sequence: Synthetic oligonucleotide
  Antisense strand to SEQ ID NO: 2500444
accagugagccaaacucau

SEQ ID NO: 2500446 - RNA, 19 nt, Artificial Sequence
  Description of Artificial Sequence: Synthetic oligonucleotide
  Sense strand starting at position 1835 of SEQ ID NO: 1887962
gugcuuaugugaccugcuu

SEQ ID NO: 2500447 - RNA, 19 nt, Artificial Sequence
  Description of Artificial Sequence: Synthetic oligonucleotide
  Antisense strand to SEQ ID NO: 2500446
aagcaggucacauaagcac

SEQ ID NO: 2500448 - RNA, 19 nt, Artificial Sequence
  Description of Artificial Sequence: Synthetic oligonucleotide
  Sense strand starting at position 1963 of SEQ ID NO: 1887962
gaaggauccuuccagaagc

SEQ ID NO: 2500449 - RNA, 19 nt, Artificial Sequence
  Description of Artificial Sequence: Synthetic oligonucleotide
  Antisense strand to SEQ ID NO: 2500448
gcuucuggaaggauccuuc

SEQ ID NO: 2500450 - RNA, 19 nt, Artificial Sequence
  Description of Artificial Sequence: Synthetic oligonucleotide
  Sense strand starting at position 2029 of SEQ ID NO: 1887962
cucugagaaagaugacguu

SEQ ID NO: 2500451 - RNA, 19 nt, Artificial Sequence
  Description of Artificial Sequence: Synthetic oligonucleotide
  Antisense strand to SEQ ID NO: 2500450
aacgucaucuuucucagag

SEQ ID NO: 2500452 - RNA, 19 nt, Artificial Sequence
  Description of Artificial Sequence: Synthetic oligonucleotide
  Sense strand starting at position 2035 of SEQ ID NO: 1887962
gaaagaugacguugcacuu

SEQ ID NO: 2500453 - RNA, 19 nt, Artificial Sequence
  Description of Artificial Sequence: Synthetic oligonucleotide
  Antisense strand to SEQ ID NO: 2500452
aagugcaacgucaucuuuc

SEQ ID NO: 2500454 - RNA, 19 nt, Artificial Sequence
  Description of Artificial Sequence: Synthetic oligonucleotide
  Sense strand starting at position 2061 of SEQ ID NO: 1887962
gaggaaaccgcuugugguu

SEQ ID NO: 2500455 - RNA, 19 nt, Artificial Sequence
  Description of Artificial Sequence: Synthetic oligonucleotide
  Antisense strand to SEQ ID NO: 2500454
aaccacaagcgguuuccuc

SEQ ID NO: 2500456 - RNA, 19 nt, Artificial Sequence
  Description of Artificial Sequence: Synthetic oligonucleotide
  Sense strand starting at position 2429 of SEQ ID NO: 1887962
uuuauaucccuagaugucu

SEQ ID NO: 2500457 - RNA, 19 nt, Artificial Sequence
  Description of Artificial Sequence: Synthetic oligonucleotide
  Antisense strand to SEQ ID NO: 2500456
agacaucuagggauauaaa

SEQ ID NO: 2500458 - RNA, 19 nt, Artificial Sequence
  Description of Artificial Sequence: Synthetic oligonucleotide
  Sense strand starting at position 2481 of SEQ ID NO: 1887962
gauguagacgucuaggaac

SEQ ID NO: 2500459 - RNA, 19 nt, Artificial Sequence
  Description of Artificial Sequence: Synthetic oligonucleotide
  Antisense strand to SEQ ID NO: 2500458
guuccuagacgucuacauc

SEQ ID NO: 2500460 - RNA, 19 nt, Artificial Sequence
  Description of Artificial Sequence: Synthetic oligonucleotide
  Sense strand starting at position 2599 of SEQ ID NO: 1887962
uggucugcccucgugcaau

SEQ ID NO: 2500461 - RNA, 19 nt, Artificial Sequence
  Description of Artificial Sequence: Synthetic oligonucleotide
  Antisense strand to SEQ ID NO: 2500460
auugcacgagggcagacca

SEQ ID NO: 2500462 - RNA, 19 nt, Artificial Sequence
  Description of Artificial Sequence: Synthetic oligonucleotide
  Sense strand starting at position 2610 of SEQ ID NO: 1887962
cgugcaauugugaggguuu

SEQ ID NO: 2500463 - RNA, 19 nt, Artificial Sequence
  Description of Artificial Sequence: Synthetic oligonucleotide
  Antisense strand to SEQ ID NO: 2500462
aaacccucacaauugcacg

SEQ ID NO: 2500464 - RNA, 19 nt, Artificial Sequence
  Description of Artificial Sequence: Synthetic oligonucleotide
  Sense strand starting at position 2611 of SEQ ID NO: 1887962
gugcaauugugaggguuua

SEQ ID NO: 2500465 - RNA, 19 nt, Artificial Sequence
  Description of Artificial Sequence: Synthetic oligonucleotide
  Antisense strand to SEQ ID NO: 2500464
uaaacccucacaauugcac

SEQ ID NO: 2500466 - RNA, 19 nt, Artificial Sequence
  Description of Artificial Sequence: Synthetic oligonucleotide
  Sense strand starting at position 2612 of SEQ ID NO: 1887962
ugcaauugugaggguuuau

SEQ ID NO: 2500467 - RNA, 19 nt, Artificial Sequence
  Description of Artificial Sequence: Synthetic oligonucleotide
  Antisense strand to SEQ ID NO: 2500466
auaaacccucacaauugca

SEQ ID NO: 2500468 - RNA, 19 nt, Artificial Sequence
  Description of Artificial Sequence: Synthetic oligonucleotide
  Sense strand starting at position 3001 of SEQ ID NO: 1887962
ggaugagguugcugaagga

SEQ ID NO: 2500469 - RNA, 19 nt, Artificial Sequence
  Description of Artificial Sequence: Synthetic oligonucleotide
  Antisense strand to SEQ ID NO: 2500468
uccuucagcaaccucaucc

SEQ ID NO: 2500470 - RNA, 19 nt, Artificial Sequence
  Description of Artificial Sequence: Synthetic oligonucleotide
  Sense strand starting at position 3005 of SEQ ID NO: 1887962
gagguugcugaaggauaaa

SEQ ID NO: 2500471 - RNA, 19 nt, Artificial Sequence
  Description of Artificial Sequence: Synthetic oligonucleotide
  Antisense strand to SEQ ID NO: 2500470
uuuauccuucagcaaccuc

SEQ ID NO: 2500472 - RNA, 19 nt, Artificial Sequence
  Description of Artificial Sequence: Synthetic oligonucleotide
  Sense strand starting at position 3242 of SEQ ID NO: 1887962
ugggucugacacuggagaa

SEQ ID NO: 2500473 - RNA, 19 nt, Artificial Sequence
  Description of Artificial Sequence: Synthetic oligonucleotide
  Antisense strand to SEQ ID NO: 2500472
uucuccagugucagaccca

SEQ ID NO: 2500474 - RNA, 19 nt, Artificial Sequence
  Description of Artificial Sequence: Synthetic oligonucleotide
  Sense strand starting at position 3328 of SEQ ID NO: 1887962
ggaaauguggugcaaagau

SEQ ID NO: 2500475 - RNA, 19 nt, Artificial Sequence
  Description of Artificial Sequence: Synthetic oligonucleotide
  Antisense strand to SEQ ID NO: 2500474
aucuuugcaccacauuucc

SEQ ID NO: 2500476 - RNA, 19 nt, Artificial Sequence
  Description of Artificial Sequence: Synthetic oligonucleotide
  Sense strand starting at position 3414 of SEQ ID NO: 1887962
augggaaaugauugcuuau

SEQ ID NO: 2500477 - RNA, 19 nt, Artificial Sequence
  Description of Artificial Sequence: Synthetic oligonucleotide
  Antisense strand to SEQ ID NO: 2500476
auaagcaaucauuucccau

SEQ ID NO: 2500478 - RNA, 19 nt, Artificial Sequence
  Description of Artificial Sequence: Synthetic oligonucleotide
  Sense strand starting at position 3423 of SEQ ID NO: 1887962
gauugcuuauuuggaguuu

SEQ ID NO: 2500479 - RNA, 19 nt, Artificial Sequence
  Description of Artificial Sequence: Synthetic oligonucleotide
  Antisense strand to SEQ ID NO: 2500478
aaacuccaaauaagcaauc

SEQ ID NO: 2500480 - RNA, 19 nt, Artificial Sequence
  Description of Artificial Sequence: Synthetic oligonucleotide
  Sense strand starting at position 3494 of SEQ ID NO: 1887962
caacauugggacugugcua

SEQ ID NO: 2500481 - RNA, 19 nt, Artificial Sequence
  Description of Artificial Sequence: Synthetic oligonucleotide
  Antisense strand to SEQ ID NO: 2500480
uagcacagucccaauguug

SEQ ID NO: 2500482 - RNA, 19 nt, Artificial Sequence
  Description of Artificial Sequence: Synthetic oligonucleotide
  Sense strand starting at position 3509 of SEQ ID NO: 1887962
gcuagacgacaccgaauua

SEQ ID NO: 2500483 - RNA, 19 nt, Artificial Sequence
  Description of Artificial Sequence: Synthetic oligonucleotide
  Antisense strand to SEQ ID NO: 2500482
uaauucggugucgucuagc

SEQ ID NO: 2500484 - RNA, 19 nt, Artificial Sequence
  Description of Artificial Sequence: Synthetic oligonucleotide
  Sense strand starting at position 31 of SEQ ID NO: 1887963
ugacaauaggaaggcuauu

SEQ ID NO: 2500485 - RNA, 19 nt, Artificial Sequence
  Description of Artificial Sequence: Synthetic oligonucleotide
  Antisense strand to SEQ ID NO: 2500484
aauagccuuccuauuguca

SEQ ID NO: 2500486 - RNA, 19 nt, Artificial Sequence
  Description of Artificial Sequence: Synthetic oligonucleotide
  Sense strand starting at position 37 of SEQ ID NO: 1887963
uaggaaggcuauuaaagaa

SEQ ID NO: 2500487 - RNA, 19 nt, Artificial Sequence
  Description of Artificial Sequence: Synthetic oligonucleotide
  Antisense strand to SEQ ID NO: 2500486
uucuuuaauagccuuccua

SEQ ID NO: 2500488 - RNA, 19 nt, Artificial Sequence
  Description of Artificial Sequence: Synthetic oligonucleotide
  Sense strand starting at position 113 of SEQ ID NO: 1887963
acucuugaguccgucuuua

SEQ ID NO: 2500489 - RNA, 19 nt, Artificial Sequence
  Description of Artificial Sequence: Synthetic oligonucleotide
  Antisense strand to SEQ ID NO: 2500488
uaaagacggacucaagagu

SEQ ID NO: 2500490 - RNA, 19 nt, Artificial Sequence
  Description of Artificial Sequence: Synthetic oligonucleotide
  Sense strand starting at position 189 of SEQ ID NO: 1887963
uacuaagaauugguuugau

SEQ ID NO: 2500491 - RNA, 19 nt, Artificial Sequence
  Description of Artificial Sequence: Synthetic oligonucleotide
  Antisense strand to SEQ ID NO: 2500490
aucaaaccaauucuuagua

SEQ ID NO: 2500492 - RNA, 19 nt, Artificial Sequence
  Description of Artificial Sequence: Synthetic oligonucleotide
  Sense strand starting at position 192 of SEQ ID NO: 1887963
uaagaauugguuugauacu

SEQ ID NO: 2500493 - RNA, 19 nt, Artificial Sequence
  Description of Artificial Sequence: Synthetic oligonucleotide
  Antisense strand to SEQ ID NO: 2500492
aguaucaaaccaauucuua

SEQ ID NO: 2500494 - RNA, 19 nt, Artificial Sequence
  Description of Artificial Sequence: Synthetic oligonucleotide
  Sense strand starting at position 193 of SEQ ID NO: 1887963
aagaauugguuugauacuc

SEQ ID NO: 2500495 - RNA, 19 nt, Artificial Sequence
  Description of Artificial Sequence: Synthetic oligonucleotide
  Antisense strand to SEQ ID NO: 2500494
gaguaucaaaccaauucuu

SEQ ID NO: 2500496 - RNA, 19 nt, Artificial Sequence
  Description of Artificial Sequence: Synthetic oligonucleotide
  Sense strand starting at position 198 of SEQ ID NO: 1887963
uugguuugauacucccuua

SEQ ID NO: 2500497 - RNA, 19 nt, Artificial Sequence
  Description of Artificial Sequence: Synthetic oligonucleotide
  Antisense strand to SEQ ID NO: 2500496
uaagggaguaucaaaccaa

SEQ ID NO: 2500498 - RNA, 19 nt, Artificial Sequence
  Description of Artificial Sequence: Synthetic oligonucleotide
  Sense strand starting at position 201 of SEQ ID NO: 1887963
guuugauacucccuuaccu

SEQ ID NO: 2500499 - RNA, 19 nt, Artificial Sequence
  Description of Artificial Sequence: Synthetic oligonucleotide
  Antisense strand to SEQ ID NO: 2500498
agguaagggaguaucaaac

SEQ ID NO: 2500500 - RNA, 19 nt, Artificial Sequence
  Description of Artificial Sequence: Synthetic oligonucleotide
  Sense strand starting at position 218 of SEQ ID NO: 1887963
cucuuaccucuccguguua

SEQ ID NO: 2500501 - RNA, 19 nt, Artificial Sequence
  Description of Artificial Sequence: Synthetic oligonucleotide
  Antisense strand to SEQ ID NO: 2500500
uaacacggagagguaagag

SEQ ID NO: 2500502 - RNA, 19 nt, Artificial Sequence
  Description of Artificial Sequence: Synthetic oligonucleotide
  Sense strand starting at position 219 of SEQ ID NO: 1887963
ucuuaccucuccguguuaa

SEQ ID NO: 2500503 - RNA, 19 nt, Artificial Sequence
  Description of Artificial Sequence: Synthetic oligonucleotide
  Antisense strand to SEQ ID NO: 2500502
uuaacacggagagguaaga

SEQ ID NO: 2500504 - RNA, 19 nt, Artificial Sequence
  Description of Artificial Sequence: Synthetic oligonucleotide
  Sense strand starting at position 220 of SEQ ID NO: 1887963
cuuaccucuccguguuaag

SEQ ID NO: 2500505 - RNA, 19 nt, Artificial Sequence
  Description of Artificial Sequence: Synthetic oligonucleotide
  Antisense strand to SEQ ID NO: 2500504
cuuaacacggagagguaag

SEQ ID NO: 2500506 - RNA, 19 nt, Artificial Sequence
  Description of Artificial Sequence: Synthetic oligonucleotide
  Sense strand starting at position 288 of SEQ ID NO: 1887963
agcuaauagcccgauauaa

SEQ ID NO: 2500507 - RNA, 19 nt, Artificial Sequence
  Description of Artificial Sequence: Synthetic oligonucleotide
  Antisense strand to SEQ ID NO: 2500506
uuauaucgggcuauuagcu

SEQ ID NO: 2500508 - RNA, 19 nt, Artificial Sequence
  Description of Artificial Sequence: Synthetic oligonucleotide
  Sense strand starting at position 335 of SEQ ID NO: 1887963
uccaguaauagugaugucu

SEQ ID NO: 2500509 - RNA, 19 nt, Artificial Sequence
  Description of Artificial Sequence: Synthetic oligonucleotide
  Antisense strand to SEQ ID NO: 2500508
agacaucacuauuacugga

SEQ ID NO: 2500510 - RNA, 19 nt, Artificial Sequence
  Description of Artificial Sequence: Synthetic oligonucleotide
  Sense strand starting at position 344 of SEQ ID NO: 1887963
agugaugucuucuaguaaa

SEQ ID NO: 2500511 - RNA, 19 nt, Artificial Sequence
  Description of Artificial Sequence: Synthetic oligonucleotide
  Antisense strand to SEQ ID NO: 2500510
uuuacuagaagacaucacu

SEQ ID NO: 2500512 - RNA, 19 nt, Artificial Sequence
  Description of Artificial Sequence: Synthetic oligonucleotide
  Sense strand starting at position 507 of SEQ ID NO: 1887963
ucgacuuggcgaagucgaa

SEQ ID NO: 2500513 - RNA, 19 nt, Artificial Sequence
  Description of Artificial Sequence: Synthetic oligonucleotide
  Antisense strand to SEQ ID NO: 2500512
uucgacuucgccaagucga

SEQ ID NO: 2500514 - RNA, 19 nt, Artificial Sequence
  Description of Artificial Sequence: Synthetic oligonucleotide
  Sense strand starting at position 748 of SEQ ID NO: 1887963
cacuccgucuuuguugaaa

SEQ ID NO: 2500515 - RNA, 19 nt, Artificial Sequence
  Description of Artificial Sequence: Synthetic oligonucleotide
  Antisense strand to SEQ ID NO: 2500514
uuucaacaaagacggagug

SEQ ID NO: 2500516 - RNA, 19 nt, Artificial Sequence
  Description of Artificial Sequence: Synthetic oligonucleotide
  Sense strand starting at position 797 of SEQ ID NO: 1887963
gccggugcguaucuuaaau

SEQ ID NO: 2500517 - RNA, 19 nt, Artificial Sequence
  Description of Artificial Sequence: Synthetic oligonucleotide
  Antisense strand to SEQ ID NO: 2500516
auuuaagauacgcaccggc

SEQ ID NO: 2500518 - RNA, 19 nt, Artificial Sequence
  Description of Artificial Sequence: Synthetic oligonucleotide
  Sense strand starting at position 835 of SEQ ID NO: 1887963
ccauaucagucugucuagu

SEQ ID NO: 2500519 - RNA, 19 nt, Artificial Sequence
  Description of Artificial Sequence: Synthetic oligonucleotide
  Antisense strand to SEQ ID NO: 2500518
acuagacagacugauaugg

SEQ ID NO: 2500520 - RNA, 19 nt, Artificial Sequence
  Description of Artificial Sequence: Synthetic oligonucleotide
  Sense strand starting at position 844 of SEQ ID NO: 1887963
ucugucuaguccucaguuu

SEQ ID NO: 2500521 - RNA, 19 nt, Artificial Sequence
  Description of Artificial Sequence: Synthetic oligonucleotide
  Antisense strand to SEQ ID NO: 2500520
aaacugaggacuagacaga

SEQ ID NO: 2500522 - RNA, 19 nt, Artificial Sequence
  Description of Artificial Sequence: Synthetic oligonucleotide
  Sense strand starting at position 1237 of SEQ ID NO: 1887963
uguuauaggucuuucucau

SEQ ID NO: 2500523 - RNA, 19 nt, Artificial Sequence
  Description of Artificial Sequence: Synthetic oligonucleotide
  Antisense strand to SEQ ID NO: 2500522
augagaaagaccuauaaca

SEQ ID NO: 2500524 - RNA, 19 nt, Artificial Sequence
  Description of Artificial Sequence: Synthetic oligonucleotide
  Sense strand starting at position 1241 of SEQ ID NO: 1887963
auaggucuuucucauucuu

SEQ ID NO: 2500525 - RNA, 19 nt, Artificial Sequence
  Description of Artificial Sequence: Synthetic oligonucleotide
  Antisense strand to SEQ ID NO: 2500524
aagaaugagaaagaccuau

SEQ ID NO: 2500526 - RNA, 19 nt, Artificial Sequence
  Description of Artificial Sequence: Synthetic oligonucleotide
  Sense strand starting at position 1456 of SEQ ID NO: 1887963
cggugauuguggaggcgaa

SEQ ID NO: 2500527 - RNA, 19 nt, Artificial Sequence
  Description of Artificial Sequence: Synthetic oligonucleotide
  Antisense strand to SEQ ID NO: 2500526
uucgccuccacaaucaccg

SEQ ID NO: 2500528 - RNA, 19 nt, Artificial Sequence
  Description of Artificial Sequence: Synthetic oligonucleotide
  Sense strand starting at position 1457 of SEQ ID NO: 1887963
ggugauuguggaggcgaaa

SEQ ID NO: 2500529 - RNA, 19 nt, Artificial Sequence
  Description of Artificial Sequence: Synthetic oligonucleotide
  Antisense strand to SEQ ID NO: 2500528
uuucgccuccacaaucacc

SEQ ID NO: 2500530 - RNA, 19 nt, Artificial Sequence
  Description of Artificial Sequence: Synthetic oligonucleotide
  Sense strand starting at position 1726 of SEQ ID NO: 1887963
uacauugcccuguagcaga

SEQ ID NO: 2500531 - RNA, 19 nt, Artificial Sequence
  Description of Artificial Sequence: Synthetic oligonucleotide
  Antisense strand to SEQ ID NO: 2500530
ucugcuacagggcaaugua

SEQ ID NO: 2500532 - RNA, 19 nt, Artificial Sequence
  Description of Artificial Sequence: Synthetic oligonucleotide
  Sense strand starting at position 2098 of SEQ ID NO: 1887963
gcgcuuuagagccggcaga

SEQ ID NO: 2500533 - RNA, 19 nt, Artificial Sequence
  Description of Artificial Sequence: Synthetic oligonucleotide
  Antisense strand to SEQ ID NO: 2500532
ucugccggcucuaaagcgc

SEQ ID NO: 2500534 - RNA, 19 nt, Artificial Sequence
  Description of Artificial Sequence: Synthetic oligonucleotide
  Sense strand starting at position 2229 of SEQ ID NO: 1887963
ggaauugucuggaacggga

SEQ ID NO: 2500535 - RNA, 19 nt, Artificial Sequence
  Description of Artificial Sequence: Synthetic oligonucleotide
  Antisense strand to SEQ ID NO: 2500534
ucccguuccagacaauucc

SEQ ID NO: 2500536 - RNA, 19 nt, Artificial Sequence
  Description of Artificial Sequence: Synthetic oligonucleotide
  Sense strand starting at position 2231 of SEQ ID NO: 1887963
aauugucuggaacgggaua

SEQ ID NO: 2500537 - RNA, 19 nt, Artificial Sequence
  Description of Artificial Sequence: Synthetic oligonucleotide
  Antisense strand to SEQ ID NO: 2500536
uaucccguuccagacaauu

SEQ ID NO: 2500538 - RNA, 19 nt, Artificial Sequence
  Description of Artificial Sequence: Synthetic oligonucleotide
  Sense strand starting at position 2712 of SEQ ID NO: 1887963
ccagcacauuuguagaaga

SEQ ID NO: 2500539 - RNA, 19 nt, Artificial Sequence
  Description of Artificial Sequence: Synthetic oligonucleotide
  Antisense strand to SEQ ID NO: 2500538
ucuucuacaaaugugcugg

SEQ ID NO: 2500540 - RNA, 19 nt, Artificial Sequence
  Description of Artificial Sequence: Synthetic oligonucleotide
  Sense strand starting at position 3078 of SEQ ID NO: 1887963
acugucuaauuguugagaa

SEQ ID NO: 2500541 - RNA, 19 nt, Artificial Sequence
  Description of Artificial Sequence: Synthetic oligonucleotide
  Antisense strand to SEQ ID NO: 2500540
uucucaacaauuagacagu

SEQ ID NO: 2500542 - RNA, 19 nt, Artificial Sequence
  Description of Artificial Sequence: Synthetic oligonucleotide
  Sense strand starting at position 3147 of SEQ ID NO: 1887963
ccacgaugaucauagagaa

SEQ ID NO: 2500543 - RNA, 19 nt, Artificial Sequence
  Description of Artificial Sequence: Synthetic oligonucleotide
  Antisense strand to SEQ ID NO: 2500542
uucucuaugaucaucgugg

SEQ ID NO: 2500544 - RNA, 19 nt, Artificial Sequence
  Description of Artificial Sequence: Synthetic oligonucleotide
  Sense strand starting at position 3446 of SEQ ID NO: 1887963
ccaugucuuucugacaagu

SEQ ID NO: 2500545 - RNA, 19 nt, Artificial Sequence
  Description of Artificial Sequence: Synthetic oligonucleotide
  Antisense strand to SEQ ID NO: 2500544
acuugucagaaagacaugg

SEQ ID NO: 2500546 - RNA, 19 nt, Artificial Sequence
  Description of Artificial Sequence: Synthetic oligonucleotide
  Sense strand starting at position 3452 of SEQ ID NO: 1887963
cuuucugacaagugugagu

SEQ ID NO: 2500547 - RNA, 19 nt, Artificial Sequence
  Description of Artificial Sequence: Synthetic oligonucleotide
  Antisense strand to SEQ ID NO: 2500546
acucacacuugucagaaag

SEQ ID NO: 2500548 - RNA, 19 nt, Artificial Sequence
  Description of Artificial Sequence: Synthetic oligonucleotide
  Sense strand starting at position 3454 of SEQ ID NO: 1887963
uucugacaagugugaguuu

SEQ ID NO: 2500549 - RNA, 19 nt, Artificial Sequence
  Description of Artificial Sequence: Synthetic oligonucleotide
  Antisense strand to SEQ ID NO: 2500548
aaacucacacuugucagaa

SEQ ID NO: 2500550 - RNA, 19 nt, Artificial Sequence
  Description of Artificial Sequence: Synthetic oligonucleotide
  Sense strand starting at position 3507 of SEQ ID NO: 1887963
cuccuacagucugacagaa

SEQ ID NO: 2500551 - RNA, 19 nt, Artificial Sequence
  Description of Artificial Sequence: Synthetic oligonucleotide
  Antisense strand to SEQ ID NO: 2500550
uucugucagacuguaggag

SEQ ID NO: 2500552 - RNA, 19 nt, Artificial Sequence
  Description of Artificial Sequence: Synthetic oligonucleotide
  Sense strand starting at position 3561 of SEQ ID NO: 1887963
uaugauuaagcacagaguu

SEQ ID NO: 2500553 - RNA, 19 nt, Artificial Sequence
  Description of Artificial Sequence: Synthetic oligonucleotide
  Antisense strand to SEQ ID NO: 2500552
aacucugugcuuaaucaua

SEQ ID NO: 2500554 - RNA, 19 nt, Artificial Sequence
  Description of Artificial Sequence: Synthetic oligonucleotide
  Sense strand starting at position 3729 of SEQ ID NO: 1887963
gcagcaaggugauugguua

SEQ ID NO: 2500555 - RNA, 19 nt, Artificial Sequence
  Description of Artificial Sequence: Synthetic oligonucleotide
  Antisense strand to SEQ ID NO: 2500554
uaaccaaucaccuugcugc

SEQ ID NO: 2500556 - RNA, 19 nt, Artificial Sequence
  Description of Artificial Sequence: Synthetic oligonucleotide
  Sense strand starting at position 3730 of SEQ ID NO: 1887963
cagcaaggugauugguuau

SEQ ID NO: 2500557 - RNA, 19 nt, Artificial Sequence
  Description of Artificial Sequence: Synthetic oligonucleotide
  Antisense strand to SEQ ID NO: 2500556
auaaccaaucaccuugcug

SEQ ID NO: 2500558 - RNA, 19 nt, Artificial Sequence
  Description of Artificial Sequence: Synthetic oligonucleotide
  Sense strand starting at position 3733 of SEQ ID NO: 1887963
caaggugauugguuaugga

SEQ ID NO: 2500559 - RNA, 19 nt, Artificial Sequence
  Description of Artificial Sequence: Synthetic oligonucleotide
  Antisense strand to SEQ ID NO: 2500558
uccauaaccaaucaccuug

SEQ ID NO: 2500560 - RNA, 19 nt, Artificial Sequence
  Description of Artificial Sequence: Synthetic oligonucleotide
  Sense strand starting at position 3737 of SEQ ID NO: 1887963
gugauugguuauggauuga

SEQ ID NO: 2500561 - RNA, 19 nt, Artificial Sequence
  Description of Artificial Sequence: Synthetic oligonucleotide
  Antisense strand to SEQ ID NO: 2500560
ucaauccauaaccaaucac

SEQ ID NO: 2500562 - RNA, 19 nt, Artificial Sequence
  Description of Artificial Sequence: Synthetic oligonucleotide
  Sense strand starting at position 3741 of SEQ ID NO: 1887963
uugguuauggauugauaua

SEQ ID NO: 2500563 - RNA, 19 nt, Artificial Sequence
  Description of Artificial Sequence: Synthetic oligonucleotide
  Antisense strand to SEQ ID NO: 2500562
uauaucaauccauaaccaa

SEQ ID NO: 2500564 - RNA, 19 nt, Artificial Sequence
  Description of Artificial Sequence: Synthetic oligonucleotide
  Sense strand starting at position 1137 of SEQ ID NO: 1887964
acuugagacgccugagaau

SEQ ID NO: 2500565 - RNA, 19 nt, Artificial Sequence
  Description of Artificial Sequence: Synthetic oligonucleotide
  Antisense strand to SEQ ID NO: 2500564
auucucaggcgucucaagu

SEQ ID NO: 2500566 - RNA, 19 nt, Artificial Sequence
  Description of Artificial Sequence: Synthetic oligonucleotide
  Sense strand starting at position 2241 of SEQ ID NO: 1887964
ugccuuagagcguugguca

SEQ ID NO: 2500567 - RNA, 19 nt, Artificial Sequence
  Description of Artificial Sequence: Synthetic oligonucleotide
  Antisense strand to SEQ ID NO: 2500566
ugaccaacgcucuaaggca

SEQ ID NO: 2500568 - RNA, 19 nt, Artificial Sequence
  Description of Artificial Sequence: Synthetic oligonucleotide
  Sense strand starting at position 2249 of SEQ ID NO: 1887964
agcguuggucaguccuuau

SEQ ID NO: 2500569 - RNA, 19 nt, Artificial Sequence
  Description of Artificial Sequence: Synthetic oligonucleotide
  Antisense strand to SEQ ID NO: 2500568
auaaggacugaccaacgcu

SEQ ID NO: 2500570 - RNA, 19 nt, Artificial Sequence
  Description of Artificial Sequence: Synthetic oligonucleotide
  Sense strand starting at position 2261 of SEQ ID NO: 1887964
uccuuauauggcggauaga

SEQ ID NO: 2500571 - RNA, 19 nt, Artificial Sequence
  Description of Artificial Sequence: Synthetic oligonucleotide
  Antisense strand to SEQ ID NO: 2500570
ucuauccgccauauaagga

SEQ ID NO: 2500572 - RNA, 19 nt, Artificial Sequence
  Description of Artificial Sequence: Synthetic oligonucleotide
  Sense strand starting at position 2351 of SEQ ID NO: 1887964
gcucuuaaaggcgacauaa

SEQ ID NO: 2500573 - RNA, 19 nt, Artificial Sequence
  Description of Artificial Sequence: Synthetic oligonucleotide
  Antisense strand to SEQ ID NO: 2500572
uuaugucgccuuuaagagc

SEQ ID NO: 2500574 - RNA, 19 nt, Artificial Sequence
  Description of Artificial Sequence: Synthetic oligonucleotide
  Sense strand starting at position 2383 of SEQ ID NO: 1887964
aaguaaggucuaggauacu

SEQ ID NO: 2500575 - RNA, 19 nt, Artificial Sequence
  Description of Artificial Sequence: Synthetic oligonucleotide
  Antisense strand to SEQ ID NO: 2500574
aguauccuagaccuuacuu

SEQ ID NO: 2500576 - RNA, 19 nt, Artificial Sequence
  Description of Artificial Sequence: Synthetic oligonucleotide
  Sense strand starting at position 2389 of SEQ ID NO: 1887964
ggucuaggauacucacaga

SEQ ID NO: 2500577 - RNA, 19 nt, Artificial Sequence
  Description of Artificial Sequence: Synthetic oligonucleotide
  Antisense strand to SEQ ID NO: 2500576
ucugugaguauccuagacc

SEQ ID NO: 2500578 - RNA, 19 nt, Artificial Sequence
  Description of Artificial Sequence: Synthetic oligonucleotide
  Sense strand starting at position 2418 of SEQ ID NO: 1887964
accuaugauaucggauugu

SEQ ID NO: 2500579 - RNA, 19 nt, Artificial Sequence
  Description of Artificial Sequence: Synthetic oligonucleotide
  Antisense strand to SEQ ID NO: 2500578
acaauccgauaucauaggu

SEQ ID NO: 2500580 - RNA, 19 nt, Artificial Sequence
  Description of Artificial Sequence: Synthetic oligonucleotide
  Sense strand starting at position 2422 of SEQ ID NO: 1887964
augauaucggauugugaag

SEQ ID NO: 2500581 - RNA, 19 nt, Artificial Sequence
  Description of Artificial Sequence: Synthetic oligonucleotide
  Antisense strand to SEQ ID NO: 2500580
cuucacaauccgauaucau

SEQ ID NO: 2500582 - RNA, 19 nt, Artificial Sequence
  Description of Artificial Sequence: Synthetic oligonucleotide
  Sense strand starting at position 2581 of SEQ ID NO: 1887964
caauaugguugguccaaga

SEQ ID NO: 2500583 - RNA, 19 nt, Artificial Sequence
  Description of Artificial Sequence: Synthetic oligonucleotide
  Antisense strand to SEQ ID NO: 2500582
ucuuggaccaaccauauug

SEQ ID NO: 2500584 - RNA, 19 nt, Artificial Sequence
  Description of Artificial Sequence: Synthetic oligonucleotide
  Sense strand starting at position 2610 of SEQ ID NO: 1887964
agacuacauggcugggaau

SEQ ID NO: 2500585 - RNA, 19 nt, Artificial Sequence
  Description of Artificial Sequence: Synthetic oligonucleotide
  Antisense strand to SEQ ID NO: 2500584
auucccagccauguagucu

SEQ ID NO: 2500586 - RNA, 19 nt, Artificial Sequence
  Description of Artificial Sequence: Synthetic oligonucleotide
  Sense strand starting at position 2611 of SEQ ID NO: 1887964
gacuacauggcugggaauu

SEQ ID NO: 2500587 - RNA, 19 nt, Artificial Sequence
  Description of Artificial Sequence: Synthetic oligonucleotide
  Antisense strand to SEQ ID NO: 2500586
aauucccagccauguaguc

SEQ ID NO: 2500588 - RNA, 19 nt, Artificial Sequence
  Description of Artificial Sequence: Synthetic oligonucleotide
  Sense strand starting at position 2645 of SEQ ID NO: 1887964
aggagauaccgacguagau

SEQ ID NO: 2500589 - RNA, 19 nt, Artificial Sequence
  Description of Artificial Sequence: Synthetic oligonucleotide
  Antisense strand to SEQ ID NO: 2500588
aucuacgucgguaucuccu

SEQ ID NO: 2500590 - RNA, 19 nt, Artificial Sequence
  Description of Artificial Sequence: Synthetic oligonucleotide
  Sense strand starting at position 2647 of SEQ ID NO: 1887964
gagauaccgacguagauug

SEQ ID NO: 2500591 - RNA, 19 nt, Artificial Sequence
  Description of Artificial Sequence: Synthetic oligonucleotide
  Antisense strand to SEQ ID NO: 2500590
caaucuacgucgguaucuc

SEQ ID NO: 2500592 - RNA, 19 nt, Artificial Sequence
  Description of Artificial Sequence: Synthetic oligonucleotide
  Sense strand starting at position 2703 of SEQ ID NO: 1887964
aucauuacugucuguagag

SEQ ID NO: 2500593 - RNA, 19 nt, Artificial Sequence
  Description of Artificial Sequence: Synthetic oligonucleotide
  Antisense strand to SEQ ID NO: 2500592
cucuacagacaguaaugau

SEQ ID NO: 2500594 - RNA, 19 nt, Artificial Sequence
  Description of Artificial Sequence: Synthetic oligonucleotide
  Sense strand starting at position 2715 of SEQ ID NO: 1887964
uguagagucagugauugug

SEQ ID NO: 2500595 - RNA, 19 nt, Artificial Sequence
  Description of Artificial Sequence: Synthetic oligonucleotide
  Antisense strand to SEQ ID NO: 2500594
cacaaucacugacucuaca

SEQ ID NO: 2500596 - RNA, 19 nt, Artificial Sequence
  Description of Artificial Sequence: Synthetic oligonucleotide
  Sense strand starting at position 2851 of SEQ ID NO: 1887964
gccauuuccugacaggaca

SEQ ID NO: 2500597 - RNA, 19 nt, Artificial Sequence
  Description of Artificial Sequence: Synthetic oligonucleotide
  Antisense strand to SEQ ID NO: 2500596
uguccugucaggaaauggc

SEQ ID NO: 2500598 - RNA, 19 nt, Artificial Sequence
  Description of Artificial Sequence: Synthetic oligonucleotide
  Sense strand starting at position 2878 of SEQ ID NO: 1887964
cauuccauaguuggaguau

SEQ ID NO: 2500599 - RNA, 19 nt, Artificial Sequence
  Description of Artificial Sequence: Synthetic oligonucleotide
  Antisense strand to SEQ ID NO: 2500598
auacuccaacuauggaaug

SEQ ID NO: 2500600 - RNA, 19 nt, Artificial Sequence
  Description of Artificial Sequence: Synthetic oligonucleotide
  Sense strand starting at position 2887 of SEQ ID NO: 1887964
guuggaguauauguacaca

SEQ ID NO: 2500601 - RNA, 19 nt, Artificial Sequence
  Description of Artificial Sequence: Synthetic oligonucleotide
  Antisense strand to SEQ ID NO: 2500600
uguguacauauacuccaac

SEQ ID NO: 2500602 - RNA, 19 nt, Artificial Sequence
  Description of Artificial Sequence: Synthetic oligonucleotide
  Sense strand starting at position 2956 of SEQ ID NO: 1887964
cuuccugagaagugaguua

SEQ ID NO: 2500603 - RNA, 19 nt, Artificial Sequence
  Description of Artificial Sequence: Synthetic oligonucleotide
  Antisense strand to SEQ ID NO: 2500602
uaacucacuucucaggaag

SEQ ID NO: 2500604 - RNA, 19 nt, Artificial Sequence
  Description of Artificial Sequence: Synthetic oligonucleotide
  Sense strand starting at position 2979 of SEQ ID NO: 1887964
uuuacagggaguugaaauu

SEQ ID NO: 2500605 - RNA, 19 nt, Artificial Sequence
  Description of Artificial Sequence: Synthetic oligonucleotide
  Antisense strand to SEQ ID NO: 2500604
aauuucaacucccuguaaa

SEQ ID NO: 2500606 - RNA, 19 nt, Artificial Sequence
  Description of Artificial Sequence: Synthetic oligonucleotide
  Sense strand starting at position 2985 of SEQ ID NO: 1887964
gggaguugaaauuaucugu

SEQ ID NO: 2500607 - RNA, 19 nt, Artificial Sequence
  Description of Artificial Sequence: Synthetic oligonucleotide
  Antisense strand to SEQ ID NO: 2500606
acagauaauuucaacuccc

SEQ ID NO: 2500608 - RNA, 19 nt, Artificial Sequence
  Description of Artificial Sequence: Synthetic oligonucleotide
  Sense strand starting at position 2988 of SEQ ID NO: 1887964
aguugaaauuaucugugaa

SEQ ID NO: 2500609 - RNA, 19 nt, Artificial Sequence
  Description of Artificial Sequence: Synthetic oligonucleotide
  Antisense strand to SEQ ID NO: 2500608
uucacagauaauuucaacu

SEQ ID NO: 2500610 - RNA, 19 nt, Artificial Sequence
  Description of Artificial Sequence: Synthetic oligonucleotide
  Sense strand starting at position 3193 of SEQ ID NO: 1887964
caauuauaggccuggauga

SEQ ID NO: 2500611 - RNA, 19 nt, Artificial Sequence
  Description of Artificial Sequence: Synthetic oligonucleotide
  Antisense strand to SEQ ID NO: 2500610
ucauccaggccuauaauug

SEQ ID NO: 2500612 - RNA, 19 nt, Artificial Sequence
  Description of Artificial Sequence: Synthetic oligonucleotide
  Sense strand starting at position 3579 of SEQ ID NO: 1887964
aaaggaugugcguaagaug

SEQ ID NO: 2500613 - RNA, 19 nt, Artificial Sequence
  Description of Artificial Sequence: Synthetic oligonucleotide
  Antisense strand to SEQ ID NO: 2500612
caucuuacgcacauccuuu

SEQ ID NO: 2500614 - RNA, 19 nt, Artificial Sequence
  Description of Artificial Sequence: Synthetic oligonucleotide
  Sense strand starting at position 3658 of SEQ ID NO: 1887964
uucccagaacgaugugaua

SEQ ID NO: 2500615 - RNA, 19 nt, Artificial Sequence
  Description of Artificial Sequence: Synthetic oligonucleotide
  Antisense strand to SEQ ID NO: 2500614
uaucacaucguucugggaa

SEQ ID NO: 2500616 - RNA, 19 nt, Artificial Sequence
  Description of Artificial Sequence: Synthetic oligonucleotide
  Sense strand starting at position 3660 of SEQ ID NO: 1887964
cccagaacgaugugauaag

SEQ ID NO: 2500617 - RNA, 19 nt, Artificial Sequence
  Description of Artificial Sequence: Synthetic oligonucleotide
  Antisense strand to SEQ ID NO: 2500616
cuuaucacaucguucuggg

SEQ ID NO: 2500618 - RNA, 19 nt, Artificial Sequence
  Description of Artificial Sequence: Synthetic oligonucleotide
  Sense strand starting at position 3738 of SEQ ID NO: 1887964
cugaccaaggucugugaga

SEQ ID NO: 2500619 - RNA, 19 nt, Artificial Sequence
  Description of Artificial Sequence: Synthetic oligonucleotide
  Antisense strand to SEQ ID NO: 2500618
ucucacagaccuuggucag

SEQ ID NO: 2500620 - RNA, 19 nt, Artificial Sequence
  Description of Artificial Sequence: Synthetic oligonucleotide
  Sense strand starting at position 3739 of SEQ ID NO: 1887964
ugaccaaggucugugagau

SEQ ID NO: 2500621 - RNA, 19 nt, Artificial Sequence
  Description of Artificial Sequence: Synthetic oligonucleotide
  Antisense strand to SEQ ID NO: 2500620
aucucacagaccuugguca

SEQ ID NO: 2500622 - RNA, 19 nt, Artificial Sequence
  Description of Artificial Sequence: Synthetic oligonucleotide
  Sense strand starting at position 3785 of SEQ ID NO: 1887964
uuggacuaacagugauuau

SEQ ID NO: 2500623 - RNA, 19 nt, Artificial Sequence
  Description of Artificial Sequence: Synthetic oligonucleotide
  Antisense strand to SEQ ID NO: 2500622
auaaucacuguuaguccaa

SEQ ID NO: 2500624 - RNA, 19 nt, Artificial Sequence
  Description of Artificial Sequence: Synthetic oligonucleotide
  Sense strand starting at position 3788 of SEQ ID NO: 1887964
gacuaacagugauuauguu

SEQ ID NO: 2500625 - RNA, 19 nt, Artificial Sequence
  Description of Artificial Sequence: Synthetic oligonucleotide
  Antisense strand to SEQ ID NO: 2500624
aacauaaucacuguuaguc

SEQ ID NO: 2500626 - RNA, 19 nt, Artificial Sequence
  Description of Artificial Sequence: Synthetic oligonucleotide
  Sense strand starting at position 3789 of SEQ ID NO: 1887964
acuaacagugauuauguua

SEQ ID NO: 2500627 - RNA, 19 nt, Artificial Sequence
  Description of Artificial Sequence: Synthetic oligonucleotide
  Antisense strand to SEQ ID NO: 2500626
uaacauaaucacuguuagu

SEQ ID NO: 2500628 - RNA, 19 nt, Artificial Sequence
  Description of Artificial Sequence: Synthetic oligonucleotide
  Sense strand starting at position 3836 of SEQ ID NO: 1887964
acagaaaucucucugugac

SEQ ID NO: 2500629 - RNA, 19 nt, Artificial Sequence
  Description of Artificial Sequence: Synthetic oligonucleotide
  Antisense strand to SEQ ID NO: 2500628
gucacagagagauuucugu

SEQ ID NO: 2500630 - RNA, 19 nt, Artificial Sequence
  Description of Artificial Sequence: Synthetic oligonucleotide
  Sense strand starting at position 3838 of SEQ ID NO: 1887964
agaaaucucucugugacau

SEQ ID NO: 2500631 - RNA, 19 nt, Artificial Sequence
  Description of Artificial Sequence: Synthetic oligonucleotide
  Antisense strand to SEQ ID NO: 2500630
augucacagagagauuucu

SEQ ID NO: 2500632 - RNA, 19 nt, Artificial Sequence
  Description of Artificial Sequence: Synthetic oligonucleotide
  Sense strand starting at position 3839 of SEQ ID NO: 1887964
gaaaucucucugugacaug

SEQ ID NO: 2500633 - RNA, 19 nt, Artificial Sequence
  Description of Artificial Sequence: Synthetic oligonucleotide
  Antisense strand to SEQ ID NO: 2500632
caugucacagagagauuuc

SEQ ID NO: 2500634 - RNA, 19 nt, Artificial Sequence
  Description of Artificial Sequence: Synthetic oligonucleotide
  Sense strand starting at position 3844 of SEQ ID NO: 1887964
cucucugugacaugugaag

SEQ ID NO: 2500635 - RNA, 19 nt, Artificial Sequence
  Description of Artificial Sequence: Synthetic oligonucleotide
  Antisense strand to SEQ ID NO: 2500634
cuucacaugucacagagag

SEQ ID NO: 2500636 - RNA, 19 nt, Artificial Sequence
  Description of Artificial Sequence: Synthetic oligonucleotide
  Sense strand starting at position 3880 of SEQ ID NO: 1887964
uacaguagaguuugagcaa

SEQ ID NO: 2500637 - RNA, 19 nt, Artificial Sequence
  Description of Artificial Sequence: Synthetic oligonucleotide
  Antisense strand to SEQ ID NO: 2500636
uugcucaaacucuacugua

SEQ ID NO: 2500638 - RNA, 19 nt, Artificial Sequence
  Description of Artificial Sequence: Synthetic oligonucleotide
  Sense strand starting at position 3883 of SEQ ID NO: 1887964
aguagaguuugagcaagag

SEQ ID NO: 2500639 - RNA, 19 nt, Artificial Sequence
  Description of Artificial Sequence: Synthetic oligonucleotide
  Antisense strand to SEQ ID NO: 2500638
cucuugcucaaacucuacu

SEQ ID NO: 2500640 - RNA, 19 nt, Artificial Sequence
  Description of Artificial Sequence: Synthetic oligonucleotide
  Sense strand starting at position 3892 of SEQ ID NO: 1887964
ugagcaagagucugagaag

SEQ ID NO: 2500641 - RNA, 19 nt, Artificial Sequence
  Description of Artificial Sequence: Synthetic oligonucleotide
  Antisense strand to SEQ ID NO: 2500640
cuucucagacucuugcuca

SEQ ID NO: 2500642 - RNA, 19 nt, Artificial Sequence
  Description of Artificial Sequence: Synthetic oligonucleotide
  Sense strand starting at position 3961 of SEQ ID NO: 1887964
uucugucuccuauauguau

SEQ ID NO: 2500643 - RNA, 19 nt, Artificial Sequence
  Description of Artificial Sequence: Synthetic oligonucleotide
  Antisense strand to SEQ ID NO: 2500642
auacauauaggagacagaa

SEQ ID NO: 2500644 - RNA, 19 nt, Artificial Sequence
  Description of Artificial Sequence: Synthetic oligonucleotide
  Sense strand starting at position 60 of SEQ ID NO: 1887965
gaggaaucgucaucauucc

SEQ ID NO: 2500645 - RNA, 19 nt, Artificial Sequence
  Description of Artificial Sequence: Synthetic oligonucleotide
  Antisense strand to SEQ ID NO: 2500644
ggaaugaugacgauuccuc

SEQ ID NO: 2500646 - RNA, 19 nt, Artificial Sequence
  Description of Artificial Sequence: Synthetic oligonucleotide
  Sense strand starting at position 61 of SEQ ID NO: 1887965
aggaaucgucaucauucca

SEQ ID NO: 2500647 - RNA, 19 nt, Artificial Sequence
  Description of Artificial Sequence: Synthetic oligonucleotide
  Antisense strand to SEQ ID NO: 2500646
uggaaugaugacgauuccu

SEQ ID NO: 2500648 - RNA, 19 nt, Artificial Sequence
  Description of Artificial Sequence: Synthetic oligonucleotide
  Sense strand starting at position 157 of SEQ ID NO: 1887965
cucuguauuuaacaguuaa

SEQ ID NO: 2500649 - RNA, 19 nt, Artificial Sequence
  Description of Artificial Sequence: Synthetic oligonucleotide
  Antisense strand to SEQ ID NO: 2500648
uuaacuguuaaauacagag

SEQ ID NO: 2500650 - RNA, 19 nt, Artificial Sequence
  Description of Artificial Sequence: Synthetic oligonucleotide
  Sense strand starting at position 666 of SEQ ID NO: 1887965
aacugauccugacauggga

SEQ ID NO: 2500651 - RNA, 19 nt, Artificial Sequence
  Description of Artificial Sequence: Synthetic oligonucleotide
  Antisense strand to SEQ ID NO: 2500650
ucccaugucaggaucaguu

SEQ ID NO: 2500652 - RNA, 19 nt, Artificial Sequence
  Description of Artificial Sequence: Synthetic oligonucleotide
  Sense strand starting at position 910 of SEQ ID NO: 1887965
gauggaggucuccgacaua

SEQ ID NO: 2500653 - RNA, 19 nt, Artificial Sequence
  Description of Artificial Sequence: Synthetic oligonucleotide
  Antisense strand to SEQ ID NO: 2500652
uaugucggagaccuccauc

SEQ ID NO: 2500654 - RNA, 19 nt, Artificial Sequence
  Description of Artificial Sequence: Synthetic oligonucleotide
  Sense strand starting at position 1127 of SEQ ID NO: 1887965
cccgaugggugacucaauu

SEQ ID NO: 2500655 - RNA, 19 nt, Artificial Sequence
  Description of Artificial Sequence: Synthetic oligonucleotide
  Antisense strand to SEQ ID NO: 2500654
aauugagucacccaucggg

SEQ ID NO: 2500656 - RNA, 19 nt, Artificial Sequence
  Description of Artificial Sequence: Synthetic oligonucleotide
  Sense strand starting at position 1741 of SEQ ID NO: 1887965
cagauaaacuucgagagag

SEQ ID NO: 2500657 - RNA, 19 nt, Artificial Sequence
  Description of Artificial Sequence: Synthetic oligonucleotide
  Antisense strand to SEQ ID NO: 2500656
cucucucgaaguuuaucug

SEQ ID NO: 2500658 - RNA, 19 nt, Artificial Sequence
  Description of Artificial Sequence: Synthetic oligonucleotide
  Sense strand starting at position 2305 of SEQ ID NO: 1887965
ccgcaauuauuccuuaaag

SEQ ID NO: 2500659 - RNA, 19 nt, Artificial Sequence
  Description of Artificial Sequence: Synthetic oligonucleotide
  Antisense strand to SEQ ID NO: 2500658
cuuuaaggaauaauugcgg

SEQ ID NO: 2500660 - RNA, 19 nt, Artificial Sequence
  Description of Artificial Sequence: Synthetic oligonucleotide
  Sense strand starting at position 2306 of SEQ ID NO: 1887965
cgcaauuauuccuuaaagg

SEQ ID NO: 2500661 - RNA, 19 nt, Artificial Sequence
  Description of Artificial Sequence: Synthetic oligonucleotide
  Antisense strand to SEQ ID NO: 2500660
ccuuuaaggaauaauugcg

SEQ ID NO: 2500662 - RNA, 19 nt, Artificial Sequence
  Description of Artificial Sequence: Synthetic oligonucleotide
  Sense strand starting at position 2560 of SEQ ID NO: 1887965
cagagucuccgcugggaaa

SEQ ID NO: 2500663 - RNA, 19 nt, Artificial Sequence
  Description of Artificial Sequence: Synthetic oligonucleotide
  Antisense strand to SEQ ID NO: 2500662
uuucccagcggagacucug

SEQ ID NO: 2500664 - RNA, 19 nt, Artificial Sequence
  Description of Artificial Sequence: Synthetic oligonucleotide
  Sense strand starting at position 2793 of SEQ ID NO: 1887965
uguaaaucccuuugaggug

SEQ ID NO: 2500665 - RNA, 19 nt, Artificial Sequence
  Description of Artificial Sequence: Synthetic oligonucleotide
  Antisense strand to SEQ ID NO: 2500664
caccucaaagggauuuaca

SEQ ID NO: 2500666 - RNA, 19 nt, Artificial Sequence
  Description of Artificial Sequence: Synthetic oligonucleotide
  Sense strand starting at position 3016 of SEQ ID NO: 1887965
gacugaugucucugcugag

SEQ ID NO: 2500667 - RNA, 19 nt, Artificial Sequence
  Description of Artificial Sequence: Synthetic oligonucleotide
  Antisense strand to SEQ ID NO: 2500666
cucagcagagacaucaguc

SEQ ID NO: 2500668 - RNA, 19 nt, Artificial Sequence
  Description of Artificial Sequence: Synthetic oligonucleotide
  Sense strand starting at position 3017 of SEQ ID NO: 1887965
acugaugucucugcugaga

SEQ ID NO: 2500669 - RNA, 19 nt, Artificial Sequence
  Description of Artificial Sequence: Synthetic oligonucleotide
  Antisense strand to SEQ ID NO: 2500668
ucucagcagagacaucagu

SEQ ID NO: 2500670 - RNA, 19 nt, Artificial Sequence
  Description of Artificial Sequence: Synthetic oligonucleotide
  Sense strand starting at position 3052 of SEQ ID NO: 1887965
gguggcuucugagcuagaa

SEQ ID NO: 2500671 - RNA, 19 nt, Artificial Sequence
  Description of Artificial Sequence: Synthetic oligonucleotide
  Antisense strand to SEQ ID NO: 2500670
uucuagcucagaagccacc

SEQ ID NO: 2500672 - RNA, 19 nt, Artificial Sequence
  Description of Artificial Sequence: Synthetic oligonucleotide
  Sense strand starting at position 3092 of SEQ ID NO: 1887965
aauugaacccagugaguuc

SEQ ID NO: 2500673 - RNA, 19 nt, Artificial Sequence
  Description of Artificial Sequence: Synthetic oligonucleotide
  Antisense strand to SEQ ID NO: 2500672
gaacucacuggguucaauu

SEQ ID NO: 2500674 - RNA, 19 nt, Artificial Sequence
  Description of Artificial Sequence: Synthetic oligonucleotide
  Sense strand starting at position 3101 of SEQ ID NO: 1887965
cagugaguucuguggcuag

SEQ ID NO: 2500675 - RNA, 19 nt, Artificial Sequence
  Description of Artificial Sequence: Synthetic oligonucleotide
  Antisense strand to SEQ ID NO: 2500674
cuagccacagaacucacug

SEQ ID NO: 2500676 - RNA, 19 nt, Artificial Sequence
  Description of Artificial Sequence: Synthetic oligonucleotide
  Sense strand starting at position 3103 of SEQ ID NO: 1887965
gugaguucuguggcuaguc

SEQ ID NO: 2500677 - RNA, 19 nt, Artificial Sequence
  Description of Artificial Sequence: Synthetic oligonucleotide
  Antisense strand to SEQ ID NO: 2500676
gacuagccacagaacucac

SEQ ID NO: 2500678 - RNA, 19 nt, Artificial Sequence
  Description of Artificial Sequence: Synthetic oligonucleotide
  Sense strand starting at position 3104 of SEQ ID NO: 1887965
ugaguucuguggcuagucu

SEQ ID NO: 2500679 - RNA, 19 nt, Artificial Sequence
  Description of Artificial Sequence: Synthetic oligonucleotide
  Antisense strand to SEQ ID NO: 2500678
agacuagccacagaacuca

SEQ ID NO: 2500680 - RNA, 19 nt, Artificial Sequence
  Description of Artificial Sequence: Synthetic oligonucleotide
  Sense strand starting at position 3108 of SEQ ID NO: 1887965
uucuguggcuagucucaaa

SEQ ID NO: 2500681 - RNA, 19 nt, Artificial Sequence
  Description of Artificial Sequence: Synthetic oligonucleotide
  Antisense strand to SEQ ID NO: 2500680
uuugagacuagccacagaa

SEQ ID NO: 2500682 - RNA, 19 nt, Artificial Sequence
  Description of Artificial Sequence: Synthetic oligonucleotide
  Sense strand starting at position 3322 of SEQ ID NO: 1887965
gagauuaagccucagugug

SEQ ID NO: 2500683 - RNA, 19 nt, Artificial Sequence
  Description of Artificial Sequence: Synthetic oligonucleotide
  Antisense strand to SEQ ID NO: 2500682
cacacugaggcuuaaucuc

SEQ ID NO: 2500684 - RNA, 19 nt, Artificial Sequence
  Description of Artificial Sequence: Synthetic oligonucleotide
  Sense strand starting at position 3365 of SEQ ID NO: 1887965
agaguuucaggcugaaguu

SEQ ID NO: 2500685 - RNA, 19 nt, Artificial Sequence
  Description of Artificial Sequence: Synthetic oligonucleotide
  Antisense strand to SEQ ID NO: 2500684
aacuucagccugaaacucu

SEQ ID NO: 2500686 - RNA, 19 nt, Artificial Sequence
  Description of Artificial Sequence: Synthetic oligonucleotide
  Sense strand starting at position 3472 of SEQ ID NO: 1887965
auugccucacucuggaaua

SEQ ID NO: 2500687 - RNA, 19 nt, Artificial Sequence
  Description of Artificial Sequence: Synthetic oligonucleotide
  Antisense strand to SEQ ID NO: 2500686
uauuccagagugaggcaau

SEQ ID NO: 2500688 - RNA, 19 nt, Artificial Sequence
  Description of Artificial Sequence: Synthetic oligonucleotide
  Sense strand starting at position 3474 of SEQ ID NO: 1887965
ugccucacucuggaauaaa

SEQ ID NO: 2500689 - RNA, 19 nt, Artificial Sequence
  Description of Artificial Sequence: Synthetic oligonucleotide
  Antisense strand to SEQ ID NO: 2500688
uuuauuccagagugaggca

SEQ ID NO: 2500690 - RNA, 19 nt, Artificial Sequence
  Description of Artificial Sequence: Synthetic oligonucleotide
  Sense strand starting at position 3617 of SEQ ID NO: 1887965
aacagaugcguguguuuac

SEQ ID NO: 2500691 - RNA, 19 nt, Artificial Sequence
  Description of Artificial Sequence: Synthetic oligonucleotide
  Antisense strand to SEQ ID NO: 2500690
guaaacacacgcaucuguu

SEQ ID NO: 2500692 - RNA, 19 nt, Artificial Sequence
  Description of Artificial Sequence: Synthetic oligonucleotide
  Sense strand starting at position 3620 of SEQ ID NO: 1887965
agaugcguguguuuaccaa

SEQ ID NO: 2500693 - RNA, 19 nt, Artificial Sequence
  Description of Artificial Sequence: Synthetic oligonucleotide
  Antisense strand to SEQ ID NO: 2500692
uugguaaacacacgcaucu

SEQ ID NO: 2500694 - RNA, 19 nt, Artificial Sequence
  Description of Artificial Sequence: Synthetic oligonucleotide
  Sense strand starting at position 3751 of SEQ ID NO: 1887965
gcugcauucuggguaaugu

SEQ ID NO: 2500695 - RNA, 19 nt, Artificial Sequence
  Description of Artificial Sequence: Synthetic oligonucleotide
  Antisense strand to SEQ ID NO: 2500694
acauuacccagaaugcagc

SEQ ID NO: 2500696 - RNA, 19 nt, Artificial Sequence
  Description of Artificial Sequence: Synthetic oligonucleotide
  Sense strand starting at position 3760 of SEQ ID NO: 1887965
uggguaauguagucccgga

SEQ ID NO: 2500697 - RNA, 19 nt, Artificial Sequence
  Description of Artificial Sequence: Synthetic oligonucleotide
  Antisense strand to SEQ ID NO: 2500696
uccgggacuacauuaccca

SEQ ID NO: 2500698 - RNA, 19 nt, Artificial Sequence
  Description of Artificial Sequence: Synthetic oligonucleotide
  Sense strand starting at position 3764 of SEQ ID NO: 1887965
uaauguagucccggacagu

SEQ ID NO: 2500699 - RNA, 19 nt, Artificial Sequence
  Description of Artificial Sequence: Synthetic oligonucleotide
  Antisense strand to SEQ ID NO: 2500698
acuguccgggacuacauua

SEQ ID NO: 2500700 - RNA, 19 nt, Artificial Sequence
  Description of Artificial Sequence: Synthetic oligonucleotide
  Sense strand starting at position 3765 of SEQ ID NO: 1887965
aauguagucccggacaguu

SEQ ID NO: 2500701 - RNA, 19 nt, Artificial Sequence
  Description of Artificial Sequence: Synthetic oligonucleotide
  Antisense strand to SEQ ID NO: 2500700
aacuguccgggacuacauu

SEQ ID NO: 2500702 - RNA, 19 nt, Artificial Sequence
  Description of Artificial Sequence: Synthetic oligonucleotide
  Sense strand starting at position 3767 of SEQ ID NO: 1887965
uguagucccggacaguuaa

SEQ ID NO: 2500703 - RNA, 19 nt, Artificial Sequence
  Description of Artificial Sequence: Synthetic oligonucleotide
  Antisense strand to SEQ ID NO: 2500702
uuaacuguccgggacuaca

SEQ ID NO: 2500704 - RNA, 19 nt, Artificial Sequence
  Description of Artificial Sequence: Synthetic oligonucleotide
  Sense strand starting at position 3781 of SEQ ID NO: 1887965
guuaagaguggguggagaa

SEQ ID NO: 2500705 - RNA, 19 nt, Artificial Sequence
  Description of Artificial Sequence: Synthetic oligonucleotide
  Antisense strand to SEQ ID NO: 2500704
uucuccacccacucuuaac

SEQ ID NO: 2500706 - RNA, 19 nt, Artificial Sequence
  Description of Artificial Sequence: Synthetic oligonucleotide
  Sense strand starting at position 3793 of SEQ ID NO: 1887965
uggagaaauuccgcuuuaa

SEQ ID NO: 2500707 - RNA, 19 nt, Artificial Sequence
  Description of Artificial Sequence: Synthetic oligonucleotide
  Antisense strand to SEQ ID NO: 2500706
uuaaagcggaauuucucca

SEQ ID NO: 2500708 - RNA, 19 nt, Artificial Sequence
  Description of Artificial Sequence: Synthetic oligonucleotide
  Sense strand starting at position 3804 of SEQ ID NO: 1887965
cgcuuuaagggccggauau

SEQ ID NO: 2500709 - RNA, 19 nt, Artificial Sequence
  Description of Artificial Sequence: Synthetic oligonucleotide
  Antisense strand to SEQ ID NO: 2500708
auauccggcccuuaaagcg

SEQ ID NO: 2500710 - RNA, 19 nt, Artificial Sequence
  Description of Artificial Sequence: Synthetic oligonucleotide
  Sense strand starting at position 3805 of SEQ ID NO: 1887965
gcuuuaagggccggauauc

SEQ ID NO: 2500711 - RNA, 19 nt, Artificial Sequence
  Description of Artificial Sequence: Synthetic oligonucleotide
  Antisense strand to SEQ ID NO: 2500710
gauauccggcccuuaaagc

SEQ ID NO: 2500712 - RNA, 19 nt, Artificial Sequence
  Description of Artificial Sequence: Synthetic oligonucleotide
  Sense strand starting at position 3828 of SEQ ID NO: 1887965
ccaugacaauugguuagau

SEQ ID NO: 2500713 - RNA, 19 nt, Artificial Sequence
  Description of Artificial Sequence: Synthetic oligonucleotide
  Antisense strand to SEQ ID NO: 2500712
aucuaaccaauugucaugg

SEQ ID NO: 2500714 - RNA, 19 nt, Artificial Sequence
  Description of Artificial Sequence: Synthetic oligonucleotide
  Sense strand starting at position 3829 of SEQ ID NO: 1887965
caugacaauugguuagaua

SEQ ID NO: 2500715 - RNA, 19 nt, Artificial Sequence
  Description of Artificial Sequence: Synthetic oligonucleotide
  Antisense strand to SEQ ID NO: 2500714
uaucuaaccaauugucaug

SEQ ID NO: 2500716 - RNA, 19 nt, Artificial Sequence
  Description of Artificial Sequence: Synthetic oligonucleotide
  Sense strand starting at position 3832 of SEQ ID NO: 1887965
gacaauugguuagauaaac

SEQ ID NO: 2500717 - RNA, 19 nt, Artificial Sequence
  Description of Artificial Sequence: Synthetic oligonucleotide
  Antisense strand to SEQ ID NO: 2500716
guuuaucuaaccaauuguc

SEQ ID NO: 2500718 - RNA, 19 nt, Artificial Sequence
  Description of Artificial Sequence: Synthetic oligonucleotide
  Sense strand starting at position 3878 of SEQ ID NO: 1887965
uuuauagcgauuggugaga

SEQ ID NO: 2500719 - RNA, 19 nt, Artificial Sequence
  Description of Artificial Sequence: Synthetic oligonucleotide
  Antisense strand to SEQ ID NO: 2500718
ucucaccaaucgcuauaaa

SEQ ID NO: 2500720 - RNA, 19 nt, Artificial Sequence
  Description of Artificial Sequence: Synthetic oligonucleotide
  Sense strand starting at position 3912 of SEQ ID NO: 1887965
agcguuaucggcucuccca

SEQ ID NO: 2500721 - RNA, 19 nt, Artificial Sequence
  Description of Artificial Sequence: Synthetic oligonucleotide
  Antisense strand to SEQ ID NO: 2500720
ugggagagccgauaacgcu

SEQ ID NO: 2500722 - RNA, 19 nt, Artificial Sequence
  Description of Artificial Sequence: Synthetic oligonucleotide
  Sense strand starting at position 3913 of SEQ ID NO: 1887965
gcguuaucggcucucccau

SEQ ID NO: 2500723 - RNA, 19 nt, Artificial Sequence
  Description of Artificial Sequence: Synthetic oligonucleotide
  Antisense strand to SEQ ID NO: 2500722
augggagagccgauaacgc

SEQ ID NO: 2500724 - RNA, 19 nt, Artificial Sequence
  Description of Artificial Sequence: Synthetic oligonucleotide
  Sense strand starting at position 28 of SEQ ID NO: 1887966
aguaaucuguuaguuguau

SEQ ID NO: 2500725 - RNA, 19 nt, Artificial Sequence
  Description of Artificial Sequence: Synthetic oligonucleotide
  Antisense strand to SEQ ID NO: 2500724
auacaacuaacagauuacu

SEQ ID NO: 2500726 - RNA, 19 nt, Artificial Sequence
  Description of Artificial Sequence: Synthetic oligonucleotide
  Sense strand starting at position 29 of SEQ ID NO: 1887966
guaaucuguuaguuguaua

SEQ ID NO: 2500727 - RNA, 19 nt, Artificial Sequence
  Description of Artificial Sequence: Synthetic oligonucleotide
  Antisense strand to SEQ ID NO: 2500726
uauacaacuaacagauuac

SEQ ID NO: 2500728 - RNA, 19 nt, Artificial Sequence
  Description of Artificial Sequence: Synthetic oligonucleotide
  Sense strand starting at position 34 of SEQ ID NO: 1887966
cuguuaguuguauacaaau

SEQ ID NO: 2500729 - RNA, 19 nt, Artificial Sequence
  Description of Artificial Sequence: Synthetic oligonucleotide
  Antisense strand to SEQ ID NO: 2500728
auuuguauacaacuaacag

SEQ ID NO: 2500730 - RNA, 19 nt, Artificial Sequence
  Description of Artificial Sequence: Synthetic oligonucleotide
  Sense strand starting at position 36 of SEQ ID NO: 1887966
guuaguuguauacaaauag

SEQ ID NO: 2500731 - RNA, 19 nt, Artificial Sequence
  Description of Artificial Sequence: Synthetic oligonucleotide
  Antisense strand to SEQ ID NO: 2500730
cuauuuguauacaacuaac

SEQ ID NO: 2500732 - RNA, 19 nt, Artificial Sequence
  Description of Artificial Sequence: Synthetic oligonucleotide
  Sense strand starting at position 48 of SEQ ID NO: 1887966
caaauagaacugggugagu

SEQ ID NO: 2500733 - RNA, 19 nt, Artificial Sequence
  Description of Artificial Sequence: Synthetic oligonucleotide
  Antisense strand to SEQ ID NO: 2500732
acucacccaguucuauuug

SEQ ID NO: 2500734 - RNA, 19 nt, Artificial Sequence
  Description of Artificial Sequence: Synthetic oligonucleotide
  Sense strand starting at position 143 of SEQ ID NO: 1887966
uugguaagaccucaucugu

SEQ ID NO: 2500735 - RNA, 19 nt, Artificial Sequence
  Description of Artificial Sequence: Synthetic oligonucleotide
  Antisense strand to SEQ ID NO: 2500734
acagaugaggucuuaccaa

SEQ ID NO: 2500736 - RNA, 19 nt, Artificial Sequence
  Description of Artificial Sequence: Synthetic oligonucleotide
  Sense strand starting at position 251 of SEQ ID NO: 1887966
agcucaugagguugagacu

SEQ ID NO: 2500737 - RNA, 19 nt, Artificial Sequence
  Description of Artificial Sequence: Synthetic oligonucleotide
  Antisense strand to SEQ ID NO: 2500736
agucucaaccucaugagcu

SEQ ID NO: 2500738 - RNA, 19 nt, Artificial Sequence
  Description of Artificial Sequence: Synthetic oligonucleotide
  Sense strand starting at position 750 of SEQ ID NO: 1887966
guucuauugguguagccca

SEQ ID NO: 2500739 - RNA, 19 nt, Artificial Sequence
  Description of Artificial Sequence: Synthetic oligonucleotide
  Antisense strand to SEQ ID NO: 2500738
ugggcuacaccaauagaac

SEQ ID NO: 2500740 - RNA, 19 nt, Artificial Sequence
  Description of Artificial Sequence: Synthetic oligonucleotide
  Sense strand starting at position 955 of SEQ ID NO: 1887966
cggccuuaauucucuuuaa

SEQ ID NO: 2500741 - RNA, 19 nt, Artificial Sequence
  Description of Artificial Sequence: Synthetic oligonucleotide
  Antisense strand to SEQ ID NO: 2500740
uuaaagagaauuaaggccg

SEQ ID NO: 2500742 - RNA, 19 nt, Artificial Sequence
  Description of Artificial Sequence: Synthetic oligonucleotide
  Sense strand starting at position 1381 of SEQ ID NO: 1887966
gccugacaauuccuuagca

SEQ ID NO: 2500743 - RNA, 19 nt, Artificial Sequence
  Description of Artificial Sequence: Synthetic oligonucleotide
  Antisense strand to SEQ ID NO: 2500742
ugcuaaggaauugucaggc

SEQ ID NO: 2500744 - RNA, 19 nt, Artificial Sequence
  Description of Artificial Sequence: Synthetic oligonucleotide
  Sense strand starting at position 1508 of SEQ ID NO: 1887966
ggauuugacuuagagccaa

SEQ ID NO: 2500745 - RNA, 19 nt, Artificial Sequence
  Description of Artificial Sequence: Synthetic oligonucleotide
  Antisense strand to SEQ ID NO: 2500744
uuggcucuaagucaaaucc

SEQ ID NO: 2500746 - RNA, 19 nt, Artificial Sequence
  Description of Artificial Sequence: Synthetic oligonucleotide
  Sense strand starting at position 1561 of SEQ ID NO: 1887966
acacucaucugugcuggau

SEQ ID NO: 2500747 - RNA, 19 nt, Artificial Sequence
  Description of Artificial Sequence: Synthetic oligonucleotide
  Antisense strand to SEQ ID NO: 2500746
auccagcacagaugagugu

SEQ ID NO: 2500748 - RNA, 19 nt, Artificial Sequence
  Description of Artificial Sequence: Synthetic oligonucleotide
  Sense strand starting at position 1584 of SEQ ID NO: 1887966
ccagcucucgguugaugga

SEQ ID NO: 2500749 - RNA, 19 nt, Artificial Sequence
  Description of Artificial Sequence: Synthetic oligonucleotide
  Antisense strand to SEQ ID NO: 2500748
uccaucaaccgagagcugg

SEQ ID NO: 2500750 - RNA, 19 nt, Artificial Sequence
  Description of Artificial Sequence: Synthetic oligonucleotide
  Sense strand starting at position 2065 of SEQ ID NO: 1887966
gcucaugguccagggaaau

SEQ ID NO: 2500751 - RNA, 19 nt, Artificial Sequence
  Description of Artificial Sequence: Synthetic oligonucleotide
  Antisense strand to SEQ ID NO: 2500750
auuucccuggaccaugagc

SEQ ID NO: 2500752 - RNA, 19 nt, Artificial Sequence
  Description of Artificial Sequence: Synthetic oligonucleotide
  Sense strand starting at position 2275 of SEQ ID NO: 1887966
gggaacuugggcuguccua

SEQ ID NO: 2500753 - RNA, 19 nt, Artificial Sequence
  Description of Artificial Sequence: Synthetic oligonucleotide
  Antisense strand to SEQ ID NO: 2500752
uaggacagcccaaguuccc

SEQ ID NO: 2500754 - RNA, 19 nt, Artificial Sequence
  Description of Artificial Sequence: Synthetic oligonucleotide
  Sense strand starting at position 2667 of SEQ ID NO: 1887966
ggcucugugaugcagaaau

SEQ ID NO: 2500755 - RNA, 19 nt, Artificial Sequence
  Description of Artificial Sequence: Synthetic oligonucleotide
  Antisense strand to SEQ ID NO: 2500754
auuucugcaucacagagcc

SEQ ID NO: 2500756 - RNA, 19 nt, Artificial Sequence
  Description of Artificial Sequence: Synthetic oligonucleotide
  Sense strand starting at position 2669 of SEQ ID NO: 1887966
cucugugaugcagaaaucu

SEQ ID NO: 2500757 - RNA, 19 nt, Artificial Sequence
  Description of Artificial Sequence: Synthetic oligonucleotide
  Antisense strand to SEQ ID NO: 2500756
agauuucugcaucacagag

SEQ ID NO: 2500758 - RNA, 19 nt, Artificial Sequence
  Description of Artificial Sequence: Synthetic oligonucleotide
  Sense strand starting at position 2678 of SEQ ID NO: 1887966
gcagaaaucuagcuacaag

SEQ ID NO: 2500759 - RNA, 19 nt, Artificial Sequence
  Description of Artificial Sequence: Synthetic oligonucleotide
  Antisense strand to SEQ ID NO: 2500758
cuuguagcuagauuucugc

SEQ ID NO: 2500760 - RNA, 19 nt, Artificial Sequence
  Description of Artificial Sequence: Synthetic oligonucleotide
  Sense strand starting at position 2858 of SEQ ID NO: 1887966
cugugagccauuggucacu

SEQ ID NO: 2500761 - RNA, 19 nt, Artificial Sequence
  Description of Artificial Sequence: Synthetic oligonucleotide
  Antisense strand to SEQ ID NO: 2500760
agugaccaauggcucacag

SEQ ID NO: 2500762 - RNA, 19 nt, Artificial Sequence
  Description of Artificial Sequence: Synthetic oligonucleotide
  Sense strand starting at position 2864 of SEQ ID NO: 1887966
gccauuggucacuggguuu

SEQ ID NO: 2500763 - RNA, 19 nt, Artificial Sequence
  Description of Artificial Sequence: Synthetic oligonucleotide
  Antisense strand to SEQ ID NO: 2500762
aaacccagugaccaauggc

SEQ ID NO: 2500764 - RNA, 19 nt, Artificial Sequence
  Description of Artificial Sequence: Synthetic oligonucleotide
  Sense strand starting at position 3019 of SEQ ID NO: 1887966
uuucuccauggugauagau

SEQ ID NO: 2500765 - RNA, 19 nt, Artificial Sequence
  Description of Artificial Sequence: Synthetic oligonucleotide
  Antisense strand to SEQ ID NO: 2500764
aucuaucaccauggagaaa

SEQ ID NO: 2500766 - RNA, 19 nt, Artificial Sequence
  Description of Artificial Sequence: Synthetic oligonucleotide
  Sense strand starting at position 3025 of SEQ ID NO: 1887966
cauggugauagauguaguu

SEQ ID NO: 2500767 - RNA, 19 nt, Artificial Sequence
  Description of Artificial Sequence: Synthetic oligonucleotide
  Antisense strand to SEQ ID NO: 2500766
aacuacaucuaucaccaug

SEQ ID NO: 2500768 - RNA, 19 nt, Artificial Sequence
  Description of Artificial Sequence: Synthetic oligonucleotide
  Sense strand starting at position 3027 of SEQ ID NO: 1887966
uggugauagauguaguuag

SEQ ID NO: 2500769 - RNA, 19 nt, Artificial Sequence
  Description of Artificial Sequence: Synthetic oligonucleotide
  Antisense strand to SEQ ID NO: 2500768
cuaacuacaucuaucacca

SEQ ID NO: 2500770 - RNA, 19 nt, Artificial Sequence
  Description of Artificial Sequence: Synthetic oligonucleotide
  Sense strand starting at position 3065 of SEQ ID NO: 1887966
uucuguaugucagcacuga

SEQ ID NO: 2500771 - RNA, 19 nt, Artificial Sequence
  Description of Artificial Sequence: Synthetic oligonucleotide
  Antisense strand to SEQ ID NO: 2500770
ucagugcugacauacagaa

SEQ ID NO: 2500772 - RNA, 19 nt, Artificial Sequence
  Description of Artificial Sequence: Synthetic oligonucleotide
  Sense strand starting at position 3066 of SEQ ID NO: 1887966
ucuguaugucagcacugaa

SEQ ID NO: 2500773 - RNA, 19 nt, Artificial Sequence
  Description of Artificial Sequence: Synthetic oligonucleotide
  Antisense strand to SEQ ID NO: 2500772
uucagugcugacauacaga

SEQ ID NO: 2500774 - RNA, 19 nt, Artificial Sequence
  Description of Artificial Sequence: Synthetic oligonucleotide
  Sense strand starting at position 3069 of SEQ ID NO: 1887966
guaugucagcacugaagac

SEQ ID NO: 2500775 - RNA, 19 nt, Artificial Sequence
  Description of Artificial Sequence: Synthetic oligonucleotide
  Antisense strand to SEQ ID NO: 2500774
gucuucagugcugacauac

SEQ ID NO: 2500776 - RNA, 19 nt, Artificial Sequence
  Description of Artificial Sequence: Synthetic oligonucleotide
  Sense strand starting at position 3239 of SEQ ID NO: 1887966
gaaggcggaugguucaaau

SEQ ID NO: 2500777 - RNA, 19 nt, Artificial Sequence
  Description of Artificial Sequence: Synthetic oligonucleotide
  Antisense strand to SEQ ID NO: 2500776
auuugaaccauccgccuuc

SEQ ID NO: 2500778 - RNA, 19 nt, Artificial Sequence
  Description of Artificial Sequence: Synthetic oligonucleotide
  Sense strand starting at position 3286 of SEQ ID NO: 1887966
uuuaaugaaugucugucaa

SEQ ID NO: 2500779 - RNA, 19 nt, Artificial Sequence
  Description of Artificial Sequence: Synthetic oligonucleotide
  Antisense strand to SEQ ID NO: 2500778
uugacagacauucauuaaa

SEQ ID NO: 2500780 - RNA, 19 nt, Artificial Sequence
  Description of Artificial Sequence: Synthetic oligonucleotide
  Sense strand starting at position 3300 of SEQ ID NO: 1887966
gucaaaucgccugcuucuu

SEQ ID NO: 2500781 - RNA, 19 nt, Artificial Sequence
  Description of Artificial Sequence: Synthetic oligonucleotide
  Antisense strand to SEQ ID NO: 2500780
aagaagcaggcgauuugac

SEQ ID NO: 2500782 - RNA, 19 nt, Artificial Sequence
  Description of Artificial Sequence: Synthetic oligonucleotide
  Sense strand starting at position 3394 of SEQ ID NO: 1887966
aggaguguguccuuccaca

SEQ ID NO: 2500783 - RNA, 19 nt, Artificial Sequence
  Description of Artificial Sequence: Synthetic oligonucleotide
  Antisense strand to SEQ ID NO: 2500782
uguggaaggacacacuccu

SEQ ID NO: 2500784 - RNA, 19 nt, Artificial Sequence
  Description of Artificial Sequence: Synthetic oligonucleotide
  Sense strand starting at position 3412 of SEQ ID NO: 1887966
accuuuauuuaagagguca

SEQ ID NO: 2500785 - RNA, 19 nt, Artificial Sequence
  Description of Artificial Sequence: Synthetic oligonucleotide
  Antisense strand to SEQ ID NO: 2500784
ugaccucuuaaauaaaggu

SEQ ID NO: 2500786 - RNA, 19 nt, Artificial Sequence
  Description of Artificial Sequence: Synthetic oligonucleotide
  Sense strand starting at position 3700 of SEQ ID NO: 1887966
gagggagacuccuccguuu

SEQ ID NO: 2500787 - RNA, 19 nt, Artificial Sequence
  Description of Artificial Sequence: Synthetic oligonucleotide
  Antisense strand to SEQ ID NO: 2500786
aaacggaggagucucccuc

SEQ ID NO: 2500788 - RNA, 19 nt, Artificial Sequence
  Description of Artificial Sequence: Synthetic oligonucleotide
  Sense strand starting at position 3702 of SEQ ID NO: 1887966
gggagacuccuccguuuca

SEQ ID NO: 2500789 - RNA, 19 nt, Artificial Sequence
  Description of Artificial Sequence: Synthetic oligonucleotide
  Antisense strand to SEQ ID NO: 2500788
ugaaacggaggagucuccc

SEQ ID NO: 2500790 - RNA, 19 nt, Artificial Sequence
  Description of Artificial Sequence: Synthetic oligonucleotide
  Sense strand starting at position 3811 of SEQ ID NO: 1887966
gugauaaaugggcaugcaa

SEQ ID NO: 2500791 - RNA, 19 nt, Artificial Sequence
  Description of Artificial Sequence: Synthetic oligonucleotide
  Antisense strand to SEQ ID NO: 2500790
uugcaugcccauuuaucac

SEQ ID NO: 2500792 - RNA, 19 nt, Artificial Sequence
  Description of Artificial Sequence: Synthetic oligonucleotide
  Sense strand starting at position 3813 of SEQ ID NO: 1887966
gauaaaugggcaugcaaga

SEQ ID NO: 2500793 - RNA, 19 nt, Artificial Sequence
  Description of Artificial Sequence: Synthetic oligonucleotide
  Antisense strand to SEQ ID NO: 2500792
ucuugcaugcccauuuauc

SEQ ID NO: 2500794 - RNA, 19 nt, Artificial Sequence
  Description of Artificial Sequence: Synthetic oligonucleotide
  Sense strand starting at position 3944 of SEQ ID NO: 1887966
gauggaaacuuggcugcaa

SEQ ID NO: 2500795 - RNA, 19 nt, Artificial Sequence
  Description of Artificial Sequence: Synthetic oligonucleotide
  Antisense strand to SEQ ID NO: 2500794
uugcagccaaguuuccauc

SEQ ID NO: 2500796 - RNA, 19 nt, Artificial Sequence
  Description of Artificial Sequence: Synthetic oligonucleotide
  Sense strand starting at position 3945 of SEQ ID NO: 1887966
auggaaacuuggcugcaaa

SEQ ID NO: 2500797 - RNA, 19 nt, Artificial Sequence
  Description of Artificial Sequence: Synthetic oligonucleotide
  Antisense strand to SEQ ID NO: 2500796
uuugcagccaaguuuccau

SEQ ID NO: 2500798 - RNA, 19 nt, Artificial Sequence
  Description of Artificial Sequence: Synthetic oligonucleotide
  Sense strand starting at position 3946 of SEQ ID NO: 1887966
uggaaacuuggcugcaaau

SEQ ID NO: 2500799 - RNA, 19 nt, Artificial Sequence
  Description of Artificial Sequence: Synthetic oligonucleotide
  Antisense strand to SEQ ID NO: 2500798
auuugcagccaaguuucca

SEQ ID NO: 2500800 - RNA, 19 nt, Artificial Sequence
  Description of Artificial Sequence: Synthetic oligonucleotide
  Sense strand starting at position 3948 of SEQ ID NO: 1887966
gaaacuuggcugcaaauga

SEQ ID NO: 2500801 - RNA, 19 nt, Artificial Sequence
  Description of Artificial Sequence: Synthetic oligonucleotide
  Antisense strand to SEQ ID NO: 2500800
ucauuugcagccaaguuuc

SEQ ID NO: 2500802 - RNA, 19 nt, Artificial Sequence
  Description of Artificial Sequence: Synthetic oligonucleotide
  Sense strand starting at position 3959 of SEQ ID NO: 1887966
gcaaaugagcagugggaaa

SEQ ID NO: 2500803 - RNA, 19 nt, Artificial Sequence
  Description of Artificial Sequence: Synthetic oligonucleotide
  Antisense strand to SEQ ID NO: 2500802
uuucccacugcucauuugc

SEQ ID NO: 2500804 - RNA, 19 nt, Artificial Sequence
  Description of Artificial Sequence: Synthetic oligonucleotide
  Sense strand starting at position 233 of SEQ ID NO: 1887967
ggacuccucucuuuagagu

SEQ ID NO: 2500805 - RNA, 19 nt, Artificial Sequence
  Description of Artificial Sequence: Synthetic oligonucleotide
  Antisense strand to SEQ ID NO: 2500804
acucuaaagagaggagucc

SEQ ID NO: 2500806 - RNA, 19 nt, Artificial Sequence
  Description of Artificial Sequence: Synthetic oligonucleotide
  Sense strand starting at position 242 of SEQ ID NO: 1887967
ucuuuagaguuaccaaggu

SEQ ID NO: 2500807 - RNA, 19 nt, Artificial Sequence
  Description of Artificial Sequence: Synthetic oligonucleotide
  Antisense strand to SEQ ID NO: 2500806
accuugguaacucuaaaga

SEQ ID NO: 2500808 - RNA, 19 nt, Artificial Sequence
  Description of Artificial Sequence: Synthetic oligonucleotide
  Sense strand starting at position 287 of SEQ ID NO: 1887967
cugagagcgucucccagaa

SEQ ID NO: 2500809 - RNA, 19 nt, Artificial Sequence
  Description of Artificial Sequence: Synthetic oligonucleotide
  Antisense strand to SEQ ID NO: 2500808
uucugggagacgcucucag

SEQ ID NO: 2500810 - RNA, 19 nt, Artificial Sequence
  Description of Artificial Sequence: Synthetic oligonucleotide
  Sense strand starting at position 289 of SEQ ID NO: 1887967
gagagcgucucccagaaau

SEQ ID NO: 2500811 - RNA, 19 nt, Artificial Sequence
  Description of Artificial Sequence: Synthetic oligonucleotide
  Antisense strand to SEQ ID NO: 2500810
auuucugggagacgcucuc

SEQ ID NO: 2500812 - RNA, 19 nt, Artificial Sequence
  Description of Artificial Sequence: Synthetic oligonucleotide
  Sense strand starting at position 291 of SEQ ID NO: 1887967
gagcgucucccagaaauca

SEQ ID NO: 2500813 - RNA, 19 nt, Artificial Sequence
  Description of Artificial Sequence: Synthetic oligonucleotide
  Antisense strand to SEQ ID NO: 2500812
ugauuucugggagacgcuc

SEQ ID NO: 2500814 - RNA, 19 nt, Artificial Sequence
  Description of Artificial Sequence: Synthetic oligonucleotide
  Sense strand starting at position 728 of SEQ ID NO: 1887967
ugaccauaagcuugugguu

SEQ ID NO: 2500815 - RNA, 19 nt, Artificial Sequence
  Description of Artificial Sequence: Synthetic oligonucleotide
  Antisense strand to SEQ ID NO: 2500814
aaccacaagcuuaugguca

SEQ ID NO: 2500816 - RNA, 19 nt, Artificial Sequence
  Description of Artificial Sequence: Synthetic oligonucleotide
  Sense strand starting at position 733 of SEQ ID NO: 1887967
auaagcuugugguugauca

SEQ ID NO: 2500817 - RNA, 19 nt, Artificial Sequence
  Description of Artificial Sequence: Synthetic oligonucleotide
  Antisense strand to SEQ ID NO: 2500816
ugaucaaccacaagcuuau

SEQ ID NO: 2500818 - RNA, 19 nt, Artificial Sequence
  Description of Artificial Sequence: Synthetic oligonucleotide
  Sense strand starting at position 734 of SEQ ID NO: 1887967
uaagcuugugguugaucau

SEQ ID NO: 2500819 - RNA, 19 nt, Artificial Sequence
  Description of Artificial Sequence: Synthetic oligonucleotide
  Antisense strand to SEQ ID NO: 2500818
augaucaaccacaagcuua

SEQ ID NO: 2500820 - RNA, 19 nt, Artificial Sequence
  Description of Artificial Sequence: Synthetic oligonucleotide
  Sense strand starting at position 735 of SEQ ID NO: 1887967
aagcuugugguugaucauu

SEQ ID NO: 2500821 - RNA, 19 nt, Artificial Sequence
  Description of Artificial Sequence: Synthetic oligonucleotide
  Antisense strand to SEQ ID NO: 2500820
aaugaucaaccacaagcuu

SEQ ID NO: 2500822 - RNA, 19 nt, Artificial Sequence
  Description of Artificial Sequence: Synthetic oligonucleotide
  Sense strand starting at position 925 of SEQ ID NO: 1887967
gucucagugauacgcuguu

SEQ ID NO: 2500823 - RNA, 19 nt, Artificial Sequence
  Description of Artificial Sequence: Synthetic oligonucleotide
  Antisense strand to SEQ ID NO: 2500822
aacagcguaucacugagac

SEQ ID NO: 2500824 - RNA, 19 nt, Artificial Sequence
  Description of Artificial Sequence: Synthetic oligonucleotide
  Sense strand starting at position 1047 of SEQ ID NO: 1887967
cccuuuggauguuugagau

SEQ ID NO: 2500825 - RNA, 19 nt, Artificial Sequence
  Description of Artificial Sequence: Synthetic oligonucleotide
  Antisense strand to SEQ ID NO: 2500824
aucucaaacauccaaaggg

SEQ ID NO: 2500826 - RNA, 19 nt, Artificial Sequence
  Description of Artificial Sequence: Synthetic oligonucleotide
  Sense strand starting at position 1055 of SEQ ID NO: 1887967
auguuugagaucugggagu

SEQ ID NO: 2500827 - RNA, 19 nt, Artificial Sequence
  Description of Artificial Sequence: Synthetic oligonucleotide
  Antisense strand to SEQ ID NO: 2500826
acucccagaucucaaacau

SEQ ID NO: 2500828 - RNA, 19 nt, Artificial Sequence
  Description of Artificial Sequence: Synthetic oligonucleotide
  Sense strand starting at position 1057 of SEQ ID NO: 1887967
guuugagaucugggaguuu

SEQ ID NO: 2500829 - RNA, 19 nt, Artificial Sequence
  Description of Artificial Sequence: Synthetic oligonucleotide
  Antisense strand to SEQ ID NO: 2500828
aaacucccagaucucaaac

SEQ ID NO: 2500830 - RNA, 19 nt, Artificial Sequence
  Description of Artificial Sequence: Synthetic oligonucleotide
  Sense strand starting at position 1096 of SEQ ID NO: 1887967
cuaggcaaguccucaggau

SEQ ID NO: 2500831 - RNA, 19 nt, Artificial Sequence
  Description of Artificial Sequence: Synthetic oligonucleotide
  Antisense strand to SEQ ID NO: 2500830
auccugaggacuugccuag

SEQ ID NO: 2500832 - RNA, 19 nt, Artificial Sequence
  Description of Artificial Sequence: Synthetic oligonucleotide
  Sense strand starting at position 1373 of SEQ ID NO: 1887967
gggaggucucugggaggua

SEQ ID NO: 2500833 - RNA, 19 nt, Artificial Sequence
  Description of Artificial Sequence: Synthetic oligonucleotide
  Antisense strand to SEQ ID NO: 2500832
uaccucccagagaccuccc

SEQ ID NO: 2500834 - RNA, 19 nt, Artificial Sequence
  Description of Artificial Sequence: Synthetic oligonucleotide
  Sense strand starting at position 1531 of SEQ ID NO: 1887967
gguggauccugacagccaa

SEQ ID NO: 2500835 - RNA, 19 nt, Artificial Sequence
  Description of Artificial Sequence: Synthetic oligonucleotide
  Antisense strand to SEQ ID NO: 2500834
uuggcugucaggauccacc

SEQ ID NO: 2500836 - RNA, 19 nt, Artificial Sequence
  Description of Artificial Sequence: Synthetic oligonucleotide
  Sense strand starting at position 1609 of SEQ ID NO: 1887967
cggacuaugugcguuacuu

SEQ ID NO: 2500837 - RNA, 19 nt, Artificial Sequence
  Description of Artificial Sequence: Synthetic oligonucleotide
  Antisense strand to SEQ ID NO: 2500836
aaguaacgcacauaguccg

SEQ ID NO: 2500838 - RNA, 19 nt, Artificial Sequence
  Description of Artificial Sequence: Synthetic oligonucleotide
  Sense strand starting at position 1611 of SEQ ID NO: 1887967
gacuaugugcguuacuucu

SEQ ID NO: 2500839 - RNA, 19 nt, Artificial Sequence
  Description of Artificial Sequence: Synthetic oligonucleotide
  Antisense strand to SEQ ID NO: 2500838
agaaguaacgcacauaguc

SEQ ID NO: 2500840 - RNA, 19 nt, Artificial Sequence
  Description of Artificial Sequence: Synthetic oligonucleotide
  Sense strand starting at position 1618 of SEQ ID NO: 1887967
ugcguuacuucugcacaac

SEQ ID NO: 2500841 - RNA, 19 nt, Artificial Sequence
  Description of Artificial Sequence: Synthetic oligonucleotide
  Antisense strand to SEQ ID NO: 2500840
guugugcagaaguaacgca

SEQ ID NO: 2500842 - RNA, 19 nt, Artificial Sequence
  Description of Artificial Sequence: Synthetic oligonucleotide
  Sense strand starting at position 1619 of SEQ ID NO: 1887967
gcguuacuucugcacaacu

SEQ ID NO: 2500843 - RNA, 19 nt, Artificial Sequence
  Description of Artificial Sequence: Synthetic oligonucleotide
  Antisense strand to SEQ ID NO: 2500842
aguugugcagaaguaacgc

SEQ ID NO: 2500844 - RNA, 19 nt, Artificial Sequence
  Description of Artificial Sequence: Synthetic oligonucleotide
  Sense strand starting at position 1633 of SEQ ID NO: 1887967
caacuuguccuguggcaac

SEQ ID NO: 2500845 - RNA, 19 nt, Artificial Sequence
  Description of Artificial Sequence: Synthetic oligonucleotide
  Antisense strand to SEQ ID NO: 2500844
guugccacaggacaaguug

SEQ ID NO: 2500846 - RNA, 19 nt, Artificial Sequence
  Description of Artificial Sequence: Synthetic oligonucleotide
  Sense strand starting at position 2210 of SEQ ID NO: 1887967
cuuccucuggcugauugaa

SEQ ID NO: 2500847 - RNA, 19 nt, Artificial Sequence
  Description of Artificial Sequence: Synthetic oligonucleotide
  Antisense strand to SEQ ID NO: 2500846
uucaaucagccagaggaag

SEQ ID NO: 2500848 - RNA, 19 nt, Artificial Sequence
  Description of Artificial Sequence: Synthetic oligonucleotide
  Sense strand starting at position 2252 of SEQ ID NO: 1887967
ggucaaccuugagugcaau

SEQ ID NO: 2500849 - RNA, 19 nt, Artificial Sequence
  Description of Artificial Sequence: Synthetic oligonucleotide
  Antisense strand to SEQ ID NO: 2500848
auugcacucaagguugacc

SEQ ID NO: 2500850 - RNA, 19 nt, Artificial Sequence
  Description of Artificial Sequence: Synthetic oligonucleotide
  Sense strand starting at position 2623 of SEQ ID NO: 1887967
gucugacccuugucagcuu

SEQ ID NO: 2500851 - RNA, 19 nt, Artificial Sequence
  Description of Artificial Sequence: Synthetic oligonucleotide
  Antisense strand to SEQ ID NO: 2500850
aagcugacaagggucagac

SEQ ID NO: 2500852 - RNA, 19 nt, Artificial Sequence
  Description of Artificial Sequence: Synthetic oligonucleotide
  Sense strand starting at position 2653 of SEQ ID NO: 1887967
cagcuaugaugaugauuau

SEQ ID NO: 2500853 - RNA, 19 nt, Artificial Sequence
  Description of Artificial Sequence: Synthetic oligonucleotide
  Antisense strand to SEQ ID NO: 2500852
auaaucaucaucauagcug

SEQ ID NO: 2500854 - RNA, 19 nt, Artificial Sequence
  Description of Artificial Sequence: Synthetic oligonucleotide
  Sense strand starting at position 2679 of SEQ ID NO: 1887967
ucagaaacuugugcuguuu

SEQ ID NO: 2500855 - RNA, 19 nt, Artificial Sequence
  Description of Artificial Sequence: Synthetic oligonucleotide
  Antisense strand to SEQ ID NO: 2500854
aaacagcacaaguuucuga

SEQ ID NO: 2500856 - RNA, 19 nt, Artificial Sequence
  Description of Artificial Sequence: Synthetic oligonucleotide
  Sense strand starting at position 2685 of SEQ ID NO: 1887967
acuugugcuguuuaaagga

SEQ ID NO: 2500857 - RNA, 19 nt, Artificial Sequence
  Description of Artificial Sequence: Synthetic oligonucleotide
  Antisense strand to SEQ ID NO: 2500856
uccuuuaaacagcacaagu

SEQ ID NO: 2500858 - RNA, 19 nt, Artificial Sequence
  Description of Artificial Sequence: Synthetic oligonucleotide
  Sense strand starting at position 2718 of SEQ ID NO: 1887967
gcagcaugugggcacuaau

SEQ ID NO: 2500859 - RNA, 19 nt, Artificial Sequence
  Description of Artificial Sequence: Synthetic oligonucleotide
  Antisense strand to SEQ ID NO: 2500858
auuagugcccacaugcugc

SEQ ID NO: 2500860 - RNA, 19 nt, Artificial Sequence
  Description of Artificial Sequence: Synthetic oligonucleotide
  Sense strand starting at position 2752 of SEQ ID NO: 1887967
ugucccaagcguuaaauca

SEQ ID NO: 2500861 - RNA, 19 nt, Artificial Sequence
  Description of Artificial Sequence: Synthetic oligonucleotide
  Antisense strand to SEQ ID NO: 2500860
ugauuuaacgcuugggaca

SEQ ID NO: 2500862 - RNA, 19 nt, Artificial Sequence
  Description of Artificial Sequence: Synthetic oligonucleotide
  Sense strand starting at position 2830 of SEQ ID NO: 1887967
gguagagacgcuugccuaa

SEQ ID NO: 2500863 - RNA, 19 nt, Artificial Sequence
  Description of Artificial Sequence: Synthetic oligonucleotide
  Antisense strand to SEQ ID NO: 2500862
uuaggcaagcgucucuacc

SEQ ID NO: 2500864 - RNA, 19 nt, Artificial Sequence
  Description of Artificial Sequence: Synthetic oligonucleotide
  Sense strand starting at position 2857 of SEQ ID NO: 1887967
agcaaaucaagguggaaau

SEQ ID NO: 2500865 - RNA, 19 nt, Artificial Sequence
  Description of Artificial Sequence: Synthetic oligonucleotide
  Antisense strand to SEQ ID NO: 2500864
auuuccaccuugauuugcu

SEQ ID NO: 2500866 - RNA, 19 nt, Artificial Sequence
  Description of Artificial Sequence: Synthetic oligonucleotide
  Sense strand starting at position 3644 of SEQ ID NO: 1887967
cugggauauuugugaggau

SEQ ID NO: 2500867 - RNA, 19 nt, Artificial Sequence
  Description of Artificial Sequence: Synthetic oligonucleotide
  Antisense strand to SEQ ID NO: 2500866
auccucacaaauaucccag

SEQ ID NO: 2500868 - RNA, 19 nt, Artificial Sequence
  Description of Artificial Sequence: Synthetic oligonucleotide
  Sense strand starting at position 3645 of SEQ ID NO: 1887967
ugggauauuugugaggaua

SEQ ID NO: 2500869 - RNA, 19 nt, Artificial Sequence
  Description of Artificial Sequence: Synthetic oligonucleotide
  Antisense strand to SEQ ID NO: 2500868
uauccucacaaauauccca

SEQ ID NO: 2500870 - RNA, 19 nt, Artificial Sequence
  Description of Artificial Sequence: Synthetic oligonucleotide
  Sense strand starting at position 3647 of SEQ ID NO: 1887967
ggauauuugugaggauauu

SEQ ID NO: 2500871 - RNA, 19 nt, Artificial Sequence
  Description of Artificial Sequence: Synthetic oligonucleotide
  Antisense strand to SEQ ID NO: 2500870
aauauccucacaaauaucc

SEQ ID NO: 2500872 - RNA, 19 nt, Artificial Sequence
  Description of Artificial Sequence: Synthetic oligonucleotide
  Sense strand starting at position 3656 of SEQ ID NO: 1887967
ugaggauauugugaggucu

SEQ ID NO: 2500873 - RNA, 19 nt, Artificial Sequence
  Description of Artificial Sequence: Synthetic oligonucleotide
  Antisense strand to SEQ ID NO: 2500872
agaccucacaauauccuca

SEQ ID NO: 2500874 - RNA, 19 nt, Artificial Sequence
  Description of Artificial Sequence: Synthetic oligonucleotide
  Sense strand starting at position 3662 of SEQ ID NO: 1887967
uauugugaggucuauuaga

SEQ ID NO: 2500875 - RNA, 19 nt, Artificial Sequence
  Description of Artificial Sequence: Synthetic oligonucleotide
  Antisense strand to SEQ ID NO: 2500874
ucuaauagaccucacaaua

SEQ ID NO: 2500876 - RNA, 19 nt, Artificial Sequence
  Description of Artificial Sequence: Synthetic oligonucleotide
  Sense strand starting at position 3667 of SEQ ID NO: 1887967
ugaggucuauuagaauaau

SEQ ID NO: 2500877 - RNA, 19 nt, Artificial Sequence
  Description of Artificial Sequence: Synthetic oligonucleotide
  Antisense strand to SEQ ID NO: 2500876
auuauucuaauagaccuca

SEQ ID NO: 2500878 - RNA, 19 nt, Artificial Sequence
  Description of Artificial Sequence: Synthetic oligonucleotide
  Sense strand starting at position 3677 of SEQ ID NO: 1887967
uagaauaaugccugguuga

SEQ ID NO: 2500879 - RNA, 19 nt, Artificial Sequence
  Description of Artificial Sequence: Synthetic oligonucleotide
  Antisense strand to SEQ ID NO: 2500878
ucaaccaggcauuauucua

SEQ ID NO: 2500880 - RNA, 19 nt, Artificial Sequence
  Description of Artificial Sequence: Synthetic oligonucleotide
  Sense strand starting at position 3678 of SEQ ID NO: 1887967
agaauaaugccugguugag

SEQ ID NO: 2500881 - RNA, 19 nt, Artificial Sequence
  Description of Artificial Sequence: Synthetic oligonucleotide
  Antisense strand to SEQ ID NO: 2500880
cucaaccaggcauuauucu

SEQ ID NO: 2500882 - RNA, 19 nt, Artificial Sequence
  Description of Artificial Sequence: Synthetic oligonucleotide
  Sense strand starting at position 3680 of SEQ ID NO: 1887967
aauaaugccugguugaguu

SEQ ID NO: 2500883 - RNA, 19 nt, Artificial Sequence
  Description of Artificial Sequence: Synthetic oligonucleotide
  Antisense strand to SEQ ID NO: 2500882
aacucaaccaggcauuauu

SEQ ID NO: 2500884 - RNA, 19 nt, Artificial Sequence
  Description of Artificial Sequence: Synthetic oligonucleotide
  Sense strand starting at position 295 of SEQ ID NO: 1887968
uaggguuaggcucaucuga

SEQ ID NO: 2500885 - RNA, 19 nt, Artificial Sequence
  Description of Artificial Sequence: Synthetic oligonucleotide
  Antisense strand to SEQ ID NO: 2500884
ucagaugagccuaacccua

SEQ ID NO: 2500886 - RNA, 19 nt, Artificial Sequence
  Description of Artificial Sequence: Synthetic oligonucleotide
  Sense strand starting at position 451 of SEQ ID NO: 1887968
cggguacauucccugcaua

SEQ ID NO: 2500887 - RNA, 19 nt, Artificial Sequence
  Description of Artificial Sequence: Synthetic oligonucleotide
  Antisense strand to SEQ ID NO: 2500886
uaugcagggaauguacccg

SEQ ID NO: 2500888 - RNA, 19 nt, Artificial Sequence
  Description of Artificial Sequence: Synthetic oligonucleotide
  Sense strand starting at position 454 of SEQ ID NO: 1887968
guacauucccugcauagag

SEQ ID NO: 2500889 - RNA, 19 nt, Artificial Sequence
  Description of Artificial Sequence: Synthetic oligonucleotide
  Antisense strand to SEQ ID NO: 2500888
cucuaugcagggaauguac

SEQ ID NO: 2500890 - RNA, 19 nt, Artificial Sequence
  Description of Artificial Sequence: Synthetic oligonucleotide
  Sense strand starting at position 484 of SEQ ID NO: 1887968
ggaggaagccauugucacu

SEQ ID NO: 2500891 - RNA, 19 nt, Artificial Sequence
  Description of Artificial Sequence: Synthetic oligonucleotide
  Antisense strand to SEQ ID NO: 2500890
agugacaauggcuuccucc

SEQ ID NO: 2500892 - RNA, 19 nt, Artificial Sequence
  Description of Artificial Sequence: Synthetic oligonucleotide
  Sense strand starting at position 590 of SEQ ID NO: 1887968
gcaugacucccggaaguca

SEQ ID NO: 2500893 - RNA, 19 nt, Artificial Sequence
  Description of Artificial Sequence: Synthetic oligonucleotide
  Antisense strand to SEQ ID NO: 2500892
ugacuuccgggagucaugc

SEQ ID NO: 2500894 - RNA, 19 nt, Artificial Sequence
  Description of Artificial Sequence: Synthetic oligonucleotide
  Sense strand starting at position 782 of SEQ ID NO: 1887968
uggauuuagugaugaaauu

SEQ ID NO: 2500895 - RNA, 19 nt, Artificial Sequence
  Description of Artificial Sequence: Synthetic oligonucleotide
  Antisense strand to SEQ ID NO: 2500894
aauuucaucacuaaaucca

SEQ ID NO: 2500896 - RNA, 19 nt, Artificial Sequence
  Description of Artificial Sequence: Synthetic oligonucleotide
  Sense strand starting at position 957 of SEQ ID NO: 1887968
uccugcaguucugugaaca

SEQ ID NO: 2500897 - RNA, 19 nt, Artificial Sequence
  Description of Artificial Sequence: Synthetic oligonucleotide
  Antisense strand to SEQ ID NO: 2500896
uguucacagaacugcagga

SEQ ID NO: 2500898 - RNA, 19 nt, Artificial Sequence
  Description of Artificial Sequence: Synthetic oligonucleotide
  Sense strand starting at position 971 of SEQ ID NO: 1887968
gaacaccuccuguggaaga

SEQ ID NO: 2500899 - RNA, 19 nt, Artificial Sequence
  Description of Artificial Sequence: Synthetic oligonucleotide
  Antisense strand to SEQ ID NO: 2500898
ucuuccacaggagguguuc

SEQ ID NO: 2500900 - RNA, 19 nt, Artificial Sequence
  Description of Artificial Sequence: Synthetic oligonucleotide
  Sense strand starting at position 1216 of SEQ ID NO: 1887968
uguggauuccgguacaggu

SEQ ID NO: 2500901 - RNA, 19 nt, Artificial Sequence
  Description of Artificial Sequence: Synthetic oligonucleotide
  Antisense strand to SEQ ID NO: 2500900
accuguaccggaauccaca

SEQ ID NO: 2500902 - RNA, 19 nt, Artificial Sequence
  Description of Artificial Sequence: Synthetic oligonucleotide
  Sense strand starting at position 1241 of SEQ ID NO: 1887968
gcacuauggucugcacaga

SEQ ID NO: 2500903 - RNA, 19 nt, Artificial Sequence
  Description of Artificial Sequence: Synthetic oligonucleotide
  Antisense strand to SEQ ID NO: 2500902
ucugugcagaccauagugc

SEQ ID NO: 2500904 - RNA, 19 nt, Artificial Sequence
  Description of Artificial Sequence: Synthetic oligonucleotide
  Sense strand starting at position 1242 of SEQ ID NO: 1887968
cacuauggucugcacagaa

SEQ ID NO: 2500905 - RNA, 19 nt, Artificial Sequence
  Description of Artificial Sequence: Synthetic oligonucleotide
  Antisense strand to SEQ ID NO: 2500904
uucugugcagaccauagug

SEQ ID NO: 2500906 - RNA, 19 nt, Artificial Sequence
  Description of Artificial Sequence: Synthetic oligonucleotide
  Sense strand starting at position 1348 of SEQ ID NO: 1887968
cagccuaagcaucaugagu

SEQ ID NO: 2500907 - RNA, 19 nt, Artificial Sequence
  Description of Artificial Sequence: Synthetic oligonucleotide
  Antisense strand to SEQ ID NO: 2500906
acucaugaugcuuaggcug

SEQ ID NO: 2500908 - RNA, 19 nt, Artificial Sequence
  Description of Artificial Sequence: Synthetic oligonucleotide
  Sense strand starting at position 1914 of SEQ ID NO: 1887968
cucagucccgaauaucgaa

SEQ ID NO: 2500909 - RNA, 19 nt, Artificial Sequence
  Description of Artificial Sequence: Synthetic oligonucleotide
  Antisense strand to SEQ ID NO: 2500908
uucgauauucgggacugag

SEQ ID NO: 2500910 - RNA, 19 nt, Artificial Sequence
  Description of Artificial Sequence: Synthetic oligonucleotide
  Sense strand starting at position 1983 of SEQ ID NO: 1887968
acgucacuuccguugcuua

SEQ ID NO: 2500911 - RNA, 19 nt, Artificial Sequence
  Description of Artificial Sequence: Synthetic oligonucleotide
  Antisense strand to SEQ ID NO: 2500910
uaagcaacggaagugacgu

SEQ ID NO: 2500912 - RNA, 19 nt, Artificial Sequence
  Description of Artificial Sequence: Synthetic oligonucleotide
  Sense strand starting at position 2366 of SEQ ID NO: 1887968
acauuuaucucugauuugu

SEQ ID NO: 2500913 - RNA, 19 nt, Artificial Sequence
  Description of Artificial Sequence: Synthetic oligonucleotide
  Antisense strand to SEQ ID NO: 2500912
acaaaucagagauaaaugu

SEQ ID NO: 2500914 - RNA, 19 nt, Artificial Sequence
  Description of Artificial Sequence: Synthetic oligonucleotide
  Sense strand starting at position 2375 of SEQ ID NO: 1887968
ucugauuuguucuaauagg

SEQ ID NO: 2500915 - RNA, 19 nt, Artificial Sequence
  Description of Artificial Sequence: Synthetic oligonucleotide
  Antisense strand to SEQ ID NO: 2500914
ccuauuagaacaaaucaga

SEQ ID NO: 2500916 - RNA, 19 nt, Artificial Sequence
  Description of Artificial Sequence: Synthetic oligonucleotide
  Sense strand starting at position 2535 of SEQ ID NO: 1887968
ggaaguacuaccuggguaa

SEQ ID NO: 2500917 - RNA, 19 nt, Artificial Sequence
  Description of Artificial Sequence: Synthetic oligonucleotide
  Antisense strand to SEQ ID NO: 2500916
uuacccagguaguacuucc

SEQ ID NO: 2500918 - RNA, 19 nt, Artificial Sequence
  Description of Artificial Sequence: Synthetic oligonucleotide
  Sense strand starting at position 2536 of SEQ ID NO: 1887968
gaaguacuaccuggguaag

SEQ ID NO: 2500919 - RNA, 19 nt, Artificial Sequence
  Description of Artificial Sequence: Synthetic oligonucleotide
  Antisense strand to SEQ ID NO: 2500918
cuuacccagguaguacuuc

SEQ ID NO: 2500920 - RNA, 19 nt, Artificial Sequence
  Description of Artificial Sequence: Synthetic oligonucleotide
  Sense strand starting at position 2727 of SEQ ID NO: 1887968
auuucuggaucccaagaga

SEQ ID NO: 2500921 - RNA, 19 nt, Artificial Sequence
  Description of Artificial Sequence: Synthetic oligonucleotide
  Antisense strand to SEQ ID NO: 2500920
ucucuugggauccagaaau

SEQ ID NO: 2500922 - RNA, 19 nt, Artificial Sequence
  Description of Artificial Sequence: Synthetic oligonucleotide
  Sense strand starting at position 2778 of SEQ ID NO: 1887968
cugugaaagagaugguuga

SEQ ID NO: 2500923 - RNA, 19 nt, Artificial Sequence
  Description of Artificial Sequence: Synthetic oligonucleotide
  Antisense strand to SEQ ID NO: 2500922
ucaaccaucucuuucacag

SEQ ID NO: 2500924 - RNA, 19 nt, Artificial Sequence
  Description of Artificial Sequence: Synthetic oligonucleotide
  Sense strand starting at position 2831 of SEQ ID NO: 1887968
auuccugagucccugacaa

SEQ ID NO: 2500925 - RNA, 19 nt, Artificial Sequence
  Description of Artificial Sequence: Synthetic oligonucleotide
  Antisense strand to SEQ ID NO: 2500924
uugucagggacucaggaau

SEQ ID NO: 2500926 - RNA, 19 nt, Artificial Sequence
  Description of Artificial Sequence: Synthetic oligonucleotide
  Sense strand starting at position 2833 of SEQ ID NO: 1887968
uccugagucccugacaaca

SEQ ID NO: 2500927 - RNA, 19 nt, Artificial Sequence
  Description of Artificial Sequence: Synthetic oligonucleotide
  Antisense strand to SEQ ID NO: 2500926
uguugucagggacucagga

SEQ ID NO: 2500928 - RNA, 19 nt, Artificial Sequence
  Description of Artificial Sequence: Synthetic oligonucleotide
  Sense strand starting at position 2875 of SEQ ID NO: 1887968
gugggagaguuucuuccaa

SEQ ID NO: 2500929 - RNA, 19 nt, Artificial Sequence
  Description of Artificial Sequence: Synthetic oligonucleotide
  Antisense strand to SEQ ID NO: 2500928
uuggaagaaacucucccac

SEQ ID NO: 2500930 - RNA, 19 nt, Artificial Sequence
  Description of Artificial Sequence: Synthetic oligonucleotide
  Sense strand starting at position 2877 of SEQ ID NO: 1887968
gggagaguuucuuccaaau

SEQ ID NO: 2500931 - RNA, 19 nt, Artificial Sequence
  Description of Artificial Sequence: Synthetic oligonucleotide
  Antisense strand to SEQ ID NO: 2500930
auuuggaagaaacucuccc

SEQ ID NO: 2500932 - RNA, 19 nt, Artificial Sequence
  Description of Artificial Sequence: Synthetic oligonucleotide
  Sense strand starting at position 2891 of SEQ ID NO: 1887968
caaauagaucucgguggga

SEQ ID NO: 2500933 - RNA, 19 nt, Artificial Sequence
  Description of Artificial Sequence: Synthetic oligonucleotide
  Antisense strand to SEQ ID NO: 2500932
ucccaccgagaucuauuug

SEQ ID NO: 2500934 - RNA, 19 nt, Artificial Sequence
  Description of Artificial Sequence: Synthetic oligonucleotide
  Sense strand starting at position 2893 of SEQ ID NO: 1887968
aauagaucucggugggagu

SEQ ID NO: 2500935 - RNA, 19 nt, Artificial Sequence
  Description of Artificial Sequence: Synthetic oligonucleotide
  Antisense strand to SEQ ID NO: 2500934
acucccaccgagaucuauu

SEQ ID NO: 2500936 - RNA, 19 nt, Artificial Sequence
  Description of Artificial Sequence: Synthetic oligonucleotide
  Sense strand starting at position 2894 of SEQ ID NO: 1887968
auagaucucggugggaguu

SEQ ID NO: 2500937 - RNA, 19 nt, Artificial Sequence
  Description of Artificial Sequence: Synthetic oligonucleotide
  Antisense strand to SEQ ID NO: 2500936
aacucccaccgagaucuau

SEQ ID NO: 2500938 - RNA, 19 nt, Artificial Sequence
  Description of Artificial Sequence: Synthetic oligonucleotide
  Sense strand starting at position 3248 of SEQ ID NO: 1887968
uucuguuucccaugacaga

SEQ ID NO: 2500939 - RNA, 19 nt, Artificial Sequence
  Description of Artificial Sequence: Synthetic oligonucleotide
  Antisense strand to SEQ ID NO: 2500938
ucugucaugggaaacagaa

SEQ ID NO: 2500940 - RNA, 19 nt, Artificial Sequence
  Description of Artificial Sequence: Synthetic oligonucleotide
  Sense strand starting at position 3249 of SEQ ID NO: 1887968
ucuguuucccaugacagau

SEQ ID NO: 2500941 - RNA, 19 nt, Artificial Sequence
  Description of Artificial Sequence: Synthetic oligonucleotide
  Antisense strand to SEQ ID NO: 2500940
aucugucaugggaaacaga

SEQ ID NO: 2500942 - RNA, 19 nt, Artificial Sequence
  Description of Artificial Sequence: Synthetic oligonucleotide
  Sense strand starting at position 3714 of SEQ ID NO: 1887968
uuuccugcucaggaaacua

SEQ ID NO: 2500943 - RNA, 19 nt, Artificial Sequence
  Description of Artificial Sequence: Synthetic oligonucleotide
  Antisense strand to SEQ ID NO: 2500942
uaguuuccugagcaggaaa

SEQ ID NO: 2500944 - RNA, 19 nt, Artificial Sequence
  Description of Artificial Sequence: Synthetic oligonucleotide
  Sense strand starting at position 3724 of SEQ ID NO: 1887968
aggaaacuauuagaugaga

SEQ ID NO: 2500945 - RNA, 19 nt, Artificial Sequence
  Description of Artificial Sequence: Synthetic oligonucleotide
  Antisense strand to SEQ ID NO: 2500944
ucucaucuaauaguuuccu

SEQ ID NO: 2500946 - RNA, 19 nt, Artificial Sequence
  Description of Artificial Sequence: Synthetic oligonucleotide
  Sense strand starting at position 3729 of SEQ ID NO: 1887968
acuauuagaugagaaacua

SEQ ID NO: 2500947 - RNA, 19 nt, Artificial Sequence
  Description of Artificial Sequence: Synthetic oligonucleotide
  Antisense strand to SEQ ID NO: 2500946
uaguuucucaucuaauagu

SEQ ID NO: 2500948 - RNA, 19 nt, Artificial Sequence
  Description of Artificial Sequence: Synthetic oligonucleotide
  Sense strand starting at position 3751 of SEQ ID NO: 1887968
aaggaauagugcuuccauu

SEQ ID NO: 2500949 - RNA, 19 nt, Artificial Sequence
  Description of Artificial Sequence: Synthetic oligonucleotide
  Antisense strand to SEQ ID NO: 2500948
aauggaagcacuauuccuu

SEQ ID NO: 2500950 - RNA, 19 nt, Artificial Sequence
  Description of Artificial Sequence: Synthetic oligonucleotide
  Sense strand starting at position 3876 of SEQ ID NO: 1887968
gcuguuauccuguacuggu

SEQ ID NO: 2500951 - RNA, 19 nt, Artificial Sequence
  Description of Artificial Sequence: Synthetic oligonucleotide
  Antisense strand to SEQ ID NO: 2500950
accaguacaggauaacagc

SEQ ID NO: 2500952 - RNA, 19 nt, Artificial Sequence
  Description of Artificial Sequence: Synthetic oligonucleotide
  Sense strand starting at position 3889 of SEQ ID NO: 1887968
acugguagucgugaauuca

SEQ ID NO: 2500953 - RNA, 19 nt, Artificial Sequence
  Description of Artificial Sequence: Synthetic oligonucleotide
  Antisense strand to SEQ ID NO: 2500952
ugaauucacgacuaccagu

SEQ ID NO: 2500954 - RNA, 19 nt, Artificial Sequence
  Description of Artificial Sequence: Synthetic oligonucleotide
  Sense strand starting at position 3934 of SEQ ID NO: 1887968
gcaguauucucaucagaag

SEQ ID NO: 2500955 - RNA, 19 nt, Artificial Sequence
  Description of Artificial Sequence: Synthetic oligonucleotide
  Antisense strand to SEQ ID NO: 2500954
cuucugaugagaauacugc

SEQ ID NO: 2500956 - RNA, 19 nt, Artificial Sequence
  Description of Artificial Sequence: Synthetic oligonucleotide
  Sense strand starting at position 3951 of SEQ ID NO: 1887968
aguguagaucacgaugcua

SEQ ID NO: 2500957 - RNA, 19 nt, Artificial Sequence
  Description of Artificial Sequence: Synthetic oligonucleotide
  Antisense strand to SEQ ID NO: 2500956
uagcaucgugaucuacacu

SEQ ID NO: 2500958 - RNA, 19 nt, Artificial Sequence
  Description of Artificial Sequence: Synthetic oligonucleotide
  Sense strand starting at position 3953 of SEQ ID NO: 1887968
uguagaucacgaugcuacu

SEQ ID NO: 2500959 - RNA, 19 nt, Artificial Sequence
  Description of Artificial Sequence: Synthetic oligonucleotide
  Antisense strand to SEQ ID NO: 2500958
aguagcaucgugaucuaca

SEQ ID NO: 2500960 - RNA, 19 nt, Artificial Sequence
  Description of Artificial Sequence: Synthetic oligonucleotide
  Sense strand starting at position 3966 of SEQ ID NO: 1887968
gcuacuuccugggauuuau

SEQ ID NO: 2500961 - RNA, 19 nt, Artificial Sequence
  Description of Artificial Sequence: Synthetic oligonucleotide
  Antisense strand to SEQ ID NO: 2500960
auaaaucccaggaaguagc

SEQ ID NO: 2500962 - RNA, 19 nt, Artificial Sequence
  Description of Artificial Sequence: Synthetic oligonucleotide
  Sense strand starting at position 3975 of SEQ ID NO: 1887968
ugggauuuaucuggaccaa

SEQ ID NO: 2500963 - RNA, 19 nt, Artificial Sequence
  Description of Artificial Sequence: Synthetic oligonucleotide
  Antisense strand to SEQ ID NO: 2500962
uugguccagauaaauccca

SEQ ID NO: 2500964 - RNA, 19 nt, Artificial Sequence
  Description of Artificial Sequence: Synthetic oligonucleotide
  Sense strand starting at position 44 of SEQ ID NO: 1887969
aggcgagauugauuaauuc

SEQ ID NO: 2500965 - RNA, 19 nt, Artificial Sequence
  Description of Artificial Sequence: Synthetic oligonucleotide
  Antisense strand to SEQ ID NO: 2500964
gaauuaaucaaucucgccu

SEQ ID NO: 2500966 - RNA, 19 nt, Artificial Sequence
  Description of Artificial Sequence: Synthetic oligonucleotide
  Sense strand starting at position 48 of SEQ ID NO: 1887969
gagauugauuaauuccugu

SEQ ID NO: 2500967 - RNA, 19 nt, Artificial Sequence
  Description of Artificial Sequence: Synthetic oligonucleotide
  Antisense strand to SEQ ID NO: 2500966
acaggaauuaaucaaucuc

SEQ ID NO: 2500968 - RNA, 19 nt, Artificial Sequence
  Description of Artificial Sequence: Synthetic oligonucleotide
  Sense strand starting at position 108 of SEQ ID NO: 1887969
uuguaaugucaggagcuga

SEQ ID NO: 2500969 - RNA, 19 nt, Artificial Sequence
  Description of Artificial Sequence: Synthetic oligonucleotide
  Antisense strand to SEQ ID NO: 2500968
ucagcuccugacauuacaa

SEQ ID NO: 2500970 - RNA, 19 nt, Artificial Sequence
  Description of Artificial Sequence: Synthetic oligonucleotide
  Sense strand starting at position 119 of SEQ ID NO: 1887969
ggagcugacugagugauaa

SEQ ID NO: 2500971 - RNA, 19 nt, Artificial Sequence
  Description of Artificial Sequence: Synthetic oligonucleotide
  Antisense strand to SEQ ID NO: 2500970
uuaucacucagucagcucc

SEQ ID NO: 2500972 - RNA, 19 nt, Artificial Sequence
  Description of Artificial Sequence: Synthetic oligonucleotide
  Sense strand starting at position 414 of SEQ ID NO: 1887969
ggaggucuggcucaugaug

SEQ ID NO: 2500973 - RNA, 19 nt, Artificial Sequence
  Description of Artificial Sequence: Synthetic oligonucleotide
  Antisense strand to SEQ ID NO: 2500972
caucaugagccagaccucc

SEQ ID NO: 2500974 - RNA, 19 nt, Artificial Sequence
  Description of Artificial Sequence: Synthetic oligonucleotide
  Sense strand starting at position 436 of SEQ ID NO: 1887969
gcggguguuagcgugagau

SEQ ID NO: 2500975 - RNA, 19 nt, Artificial Sequence
  Description of Artificial Sequence: Synthetic oligonucleotide
  Antisense strand to SEQ ID NO: 2500974
aucucacgcuaacacccgc

SEQ ID NO: 2500976 - RNA, 19 nt, Artificial Sequence
  Description of Artificial Sequence: Synthetic oligonucleotide
  Sense strand starting at position 529 of SEQ ID NO: 1887969
gguuaaaguguaggacuga

SEQ ID NO: 2500977 - RNA, 19 nt, Artificial Sequence
  Description of Artificial Sequence: Synthetic oligonucleotide
  Antisense strand to SEQ ID NO: 2500976
ucaguccuacacuuuaacc

SEQ ID NO: 2500978 - RNA, 19 nt, Artificial Sequence
  Description of Artificial Sequence: Synthetic oligonucleotide
  Sense strand starting at position 534 of SEQ ID NO: 1887969
aaguguaggacugagucaa

SEQ ID NO: 2500979 - RNA, 19 nt, Artificial Sequence
  Description of Artificial Sequence: Synthetic oligonucleotide
  Antisense strand to SEQ ID NO: 2500978
uugacucaguccuacacuu

SEQ ID NO: 2500980 - RNA, 19 nt, Artificial Sequence
  Description of Artificial Sequence: Synthetic oligonucleotide
  Sense strand starting at position 603 of SEQ ID NO: 1887969
gacgcugacugauugggaa

SEQ ID NO: 2500981 - RNA, 19 nt, Artificial Sequence
  Description of Artificial Sequence: Synthetic oligonucleotide
  Antisense strand to SEQ ID NO: 2500980
uucccaaucagucagcguc

SEQ ID NO: 2500982 - RNA, 19 nt, Artificial Sequence
  Description of Artificial Sequence: Synthetic oligonucleotide
  Sense strand starting at position 1149 of SEQ ID NO: 1887969
aaauaagacguuugaguuu

SEQ ID NO: 2500983 - RNA, 19 nt, Artificial Sequence
  Description of Artificial Sequence: Synthetic oligonucleotide
  Antisense strand to SEQ ID NO: 2500982
aaacucaaacgucuuauuu

SEQ ID NO: 2500984 - RNA, 19 nt, Artificial Sequence
  Description of Artificial Sequence: Synthetic oligonucleotide
  Sense strand starting at position 1178 of SEQ ID NO: 1887969
guuaguuuaagagaaguuu

SEQ ID NO: 2500985 - RNA, 19 nt, Artificial Sequence
  Description of Artificial Sequence: Synthetic oligonucleotide
  Antisense strand to SEQ ID NO: 2500984
aaacuucucuuaaacuaac

SEQ ID NO: 2500986 - RNA, 19 nt, Artificial Sequence
  Description of Artificial Sequence: Synthetic oligonucleotide
  Sense strand starting at position 1330 of SEQ ID NO: 1887969
gcaaaugacuugccaccau

SEQ ID NO: 2500987 - RNA, 19 nt, Artificial Sequence
  Description of Artificial Sequence: Synthetic oligonucleotide
  Antisense strand to SEQ ID NO: 2500986
augguggcaagucauuugc

SEQ ID NO: 2500988 - RNA, 19 nt, Artificial Sequence
  Description of Artificial Sequence: Synthetic oligonucleotide
  Sense strand starting at position 2542 of SEQ ID NO: 1887969
ggaaauaccucucugguca

SEQ ID NO: 2500989 - RNA, 19 nt, Artificial Sequence
  Description of Artificial Sequence: Synthetic oligonucleotide
  Antisense strand to SEQ ID NO: 2500988
ugaccagagagguauuucc

SEQ ID NO: 2500990 - RNA, 19 nt, Artificial Sequence
  Description of Artificial Sequence: Synthetic oligonucleotide
  Sense strand starting at position 2594 of SEQ ID NO: 1887969
uggaaugaucccuguccuu

SEQ ID NO: 2500991 - RNA, 19 nt, Artificial Sequence
  Description of Artificial Sequence: Synthetic oligonucleotide
  Antisense strand to SEQ ID NO: 2500990
aaggacagggaucauucca

SEQ ID NO: 2500992 - RNA, 19 nt, Artificial Sequence
  Description of Artificial Sequence: Synthetic oligonucleotide
  Sense strand starting at position 2599 of SEQ ID NO: 1887969
ugaucccuguccuuugaau

SEQ ID NO: 2500993 - RNA, 19 nt, Artificial Sequence
  Description of Artificial Sequence: Synthetic oligonucleotide
  Antisense strand to SEQ ID NO: 2500992
auucaaaggacagggauca

SEQ ID NO: 2500994 - RNA, 19 nt, Artificial Sequence
  Description of Artificial Sequence: Synthetic oligonucleotide
  Sense strand starting at position 2616 of SEQ ID NO: 1887969
auccucuuagccuagugaa

SEQ ID NO: 2500995 - RNA, 19 nt, Artificial Sequence
  Description of Artificial Sequence: Synthetic oligonucleotide
  Antisense strand to SEQ ID NO: 2500994
uucacuaggcuaagaggau

SEQ ID NO: 2500996 - RNA, 19 nt, Artificial Sequence
  Description of Artificial Sequence: Synthetic oligonucleotide
  Sense strand starting at position 2721 of SEQ ID NO: 1887969
ggaggguggucacugagua

SEQ ID NO: 2500997 - RNA, 19 nt, Artificial Sequence
  Description of Artificial Sequence: Synthetic oligonucleotide
  Antisense strand to SEQ ID NO: 2500996
uacucagugaccacccucc

SEQ ID NO: 2500998 - RNA, 19 nt, Artificial Sequence
  Description of Artificial Sequence: Synthetic oligonucleotide
  Sense strand starting at position 2722 of SEQ ID NO: 1887969
gaggguggucacugaguau

SEQ ID NO: 2500999 - RNA, 19 nt, Artificial Sequence
  Description of Artificial Sequence: Synthetic oligonucleotide
  Antisense strand to SEQ ID NO: 2500998
auacucagugaccacccuc

SEQ ID NO: 2501000 - RNA, 19 nt, Artificial Sequence
  Description of Artificial Sequence: Synthetic oligonucleotide
  Sense strand starting at position 2725 of SEQ ID NO: 1887969
gguggucacugaguauaua

SEQ ID NO: 2501001 - RNA, 19 nt, Artificial Sequence
  Description of Artificial Sequence: Synthetic oligonucleotide
  Antisense strand to SEQ ID NO: 2501000
uauauacucagugaccacc

SEQ ID NO: 2501002 - RNA, 19 nt, Artificial Sequence
  Description of Artificial Sequence: Synthetic oligonucleotide
  Sense strand starting at position 2726 of SEQ ID NO: 1887969
guggucacugaguauauau

SEQ ID NO: 2501003 - RNA, 19 nt, Artificial Sequence
  Description of Artificial Sequence: Synthetic oligonucleotide
  Antisense strand to SEQ ID NO: 2501002
auauauacucagugaccac

SEQ ID NO: 2501004 - RNA, 19 nt, Artificial Sequence
  Description of Artificial Sequence: Synthetic oligonucleotide
  Sense strand starting at position 2734 of SEQ ID NO: 1887969
ugaguauauaugugagcag

SEQ ID NO: 2501005 - RNA, 19 nt, Artificial Sequence
  Description of Artificial Sequence: Synthetic oligonucleotide
  Antisense strand to SEQ ID NO: 2501004
cugcucacauauauacuca

SEQ ID NO: 2501006 - RNA, 19 nt, Artificial Sequence
  Description of Artificial Sequence: Synthetic oligonucleotide
  Sense strand starting at position 2738 of SEQ ID NO: 1887969
uauauaugugagcagcaca

SEQ ID NO: 2501007 - RNA, 19 nt, Artificial Sequence
  Description of Artificial Sequence: Synthetic oligonucleotide
  Antisense strand to SEQ ID NO: 2501006
ugugcugcucacauauaua

SEQ ID NO: 2501008 - RNA, 19 nt, Artificial Sequence
  Description of Artificial Sequence: Synthetic oligonucleotide
  Sense strand starting at position 2810 of SEQ ID NO: 1887969
cagacuugccgguauucca

SEQ ID NO: 2501009 - RNA, 19 nt, Artificial Sequence
  Description of Artificial Sequence: Synthetic oligonucleotide
  Antisense strand to SEQ ID NO: 2501008
uggaauaccggcaagucug

SEQ ID NO: 2501010 - RNA, 19 nt, Artificial Sequence
  Description of Artificial Sequence: Synthetic oligonucleotide
  Sense strand starting at position 3052 of SEQ ID NO: 1887969
auuaguagaguuugauaga

SEQ ID NO: 2501011 - RNA, 19 nt, Artificial Sequence
  Description of Artificial Sequence: Synthetic oligonucleotide
  Antisense strand to SEQ ID NO: 2501010
ucuaucaaacucuacuaau

SEQ ID NO: 2501012 - RNA, 19 nt, Artificial Sequence
  Description of Artificial Sequence: Synthetic oligonucleotide
  Sense strand starting at position 3135 of SEQ ID NO: 1887969
agaaaugucuagccuuaua

SEQ ID NO: 2501013 - RNA, 19 nt, Artificial Sequence
  Description of Artificial Sequence: Synthetic oligonucleotide
  Antisense strand to SEQ ID NO: 2501012
uauaaggcuagacauuucu

SEQ ID NO: 2501014 - RNA, 19 nt, Artificial Sequence
  Description of Artificial Sequence: Synthetic oligonucleotide
  Sense strand starting at position 3449 of SEQ ID NO: 1887969
cccaucauccgauaaagcu

SEQ ID NO: 2501015 - RNA, 19 nt, Artificial Sequence
  Description of Artificial Sequence: Synthetic oligonucleotide
  Antisense strand to SEQ ID NO: 2501014
agcuuuaucggaugauggg

SEQ ID NO: 2501016 - RNA, 19 nt, Artificial Sequence
  Description of Artificial Sequence: Synthetic oligonucleotide
  Sense strand starting at position 3545 of SEQ ID NO: 1887969
aauggaauuccagggcuua

SEQ ID NO: 2501017 - RNA, 19 nt, Artificial Sequence
  Description of Artificial Sequence: Synthetic oligonucleotide
  Antisense strand to SEQ ID NO: 2501016
uaagcccuggaauuccauu

SEQ ID NO: 2501018 - RNA, 19 nt, Artificial Sequence
  Description of Artificial Sequence: Synthetic oligonucleotide
  Sense strand starting at position 3556 of SEQ ID NO: 1887969
agggcuuagccuugagaag

SEQ ID NO: 2501019 - RNA, 19 nt, Artificial Sequence
  Description of Artificial Sequence: Synthetic oligonucleotide
  Antisense strand to SEQ ID NO: 2501018
cuucucaaggcuaagcccu

SEQ ID NO: 2501020 - RNA, 19 nt, Artificial Sequence
  Description of Artificial Sequence: Synthetic oligonucleotide
  Sense strand starting at position 3714 of SEQ ID NO: 1887969
uccuuuccagagugagaac

SEQ ID NO: 2501021 - RNA, 19 nt, Artificial Sequence
  Description of Artificial Sequence: Synthetic oligonucleotide
  Antisense strand to SEQ ID NO: 2501020
guucucacucuggaaagga

SEQ ID NO: 2501022 - RNA, 19 nt, Artificial Sequence
  Description of Artificial Sequence: Synthetic oligonucleotide
  Sense strand starting at position 3728 of SEQ ID NO: 1887969
agaacuugugacggugaau

SEQ ID NO: 2501023 - RNA, 19 nt, Artificial Sequence
  Description of Artificial Sequence: Synthetic oligonucleotide
  Antisense strand to SEQ ID NO: 2501022
auucaccgucacaaguucu

SEQ ID NO: 2501024 - RNA, 19 nt, Artificial Sequence
  Description of Artificial Sequence: Synthetic oligonucleotide
  Sense strand starting at position 3731 of SEQ ID NO: 1887969
acuugugacggugaauaac

SEQ ID NO: 2501025 - RNA, 19 nt, Artificial Sequence
  Description of Artificial Sequence: Synthetic oligonucleotide
  Antisense strand to SEQ ID NO: 2501024
guuauucaccgucacaagu

SEQ ID NO: 2501026 - RNA, 19 nt, Artificial Sequence
  Description of Artificial Sequence: Synthetic oligonucleotide
  Sense strand starting at position 3849 of SEQ ID NO: 1887969
aacuguguauugucaugga

SEQ ID NO: 2501027 - RNA, 19 nt, Artificial Sequence
  Description of Artificial Sequence: Synthetic oligonucleotide
  Antisense strand to SEQ ID NO: 2501026
uccaugacaauacacaguu

SEQ ID NO: 2501028 - RNA, 19 nt, Artificial Sequence
  Description of Artificial Sequence: Synthetic oligonucleotide
  Sense strand starting at position 3853 of SEQ ID NO: 1887969
guguauugucauggaaaua

SEQ ID NO: 2501029 - RNA, 19 nt, Artificial Sequence
  Description of Artificial Sequence: Synthetic oligonucleotide
  Antisense strand to SEQ ID NO: 2501028
uauuuccaugacaauacac

SEQ ID NO: 2501030 - RNA, 19 nt, Artificial Sequence
  Description of Artificial Sequence: Synthetic oligonucleotide
  Sense strand starting at position 3885 of SEQ ID NO: 1887969
acaucuuuguugucugaaa

SEQ ID NO: 2501031 - RNA, 19 nt, Artificial Sequence
  Description of Artificial Sequence: Synthetic oligonucleotide
  Antisense strand to SEQ ID NO: 2501030
uuucagacaacaaagaugu

SEQ ID NO: 2501032 - RNA, 19 nt, Artificial Sequence
  Description of Artificial Sequence: Synthetic oligonucleotide
  Sense strand starting at position 3886 of SEQ ID NO: 1887969
caucuuuguugucugaaag

SEQ ID NO: 2501033 - RNA, 19 nt, Artificial Sequence
  Description of Artificial Sequence: Synthetic oligonucleotide
  Antisense strand to SEQ ID NO: 2501032
cuuucagacaacaaagaug

SEQ ID NO: 2501034 - RNA, 19 nt, Artificial Sequence
  Description of Artificial Sequence: Synthetic oligonucleotide
  Sense strand starting at position 3893 of SEQ ID NO: 1887969
guugucugaaagggauaga

SEQ ID NO: 2501035 - RNA, 19 nt, Artificial Sequence
  Description of Artificial Sequence: Synthetic oligonucleotide
  Antisense strand to SEQ ID NO: 2501034
ucuaucccuuucagacaac

SEQ ID NO: 2501036 - RNA, 19 nt, Artificial Sequence
  Description of Artificial Sequence: Synthetic oligonucleotide
  Sense strand starting at position 3904 of SEQ ID NO: 1887969
gggauagauacuugugcuu

SEQ ID NO: 2501037 - RNA, 19 nt, Artificial Sequence
  Description of Artificial Sequence: Synthetic oligonucleotide
  Antisense strand to SEQ ID NO: 2501036
aagcacaaguaucuauccc

SEQ ID NO: 2501038 - RNA, 19 nt, Artificial Sequence
  Description of Artificial Sequence: Synthetic oligonucleotide
  Sense strand starting at position 3943 of SEQ ID NO: 1887969
auacaagcgccuuacaauu

SEQ ID NO: 2501039 - RNA, 19 nt, Artificial Sequence
  Description of Artificial Sequence: Synthetic oligonucleotide
  Antisense strand to SEQ ID NO: 2501038
aauuguaaggcgcuuguau

SEQ ID NO: 2501040 - RNA, 19 nt, Artificial Sequence
  Description of Artificial Sequence: Synthetic oligonucleotide
  Sense strand starting at position 3959 of SEQ ID NO: 1887969
auuugucuucccugccuau

SEQ ID NO: 2501041 - RNA, 19 nt, Artificial Sequence
  Description of Artificial Sequence: Synthetic oligonucleotide
  Antisense strand to SEQ ID NO: 2501040
auaggcagggaagacaaau

SEQ ID NO: 2501042 - RNA, 19 nt, Artificial Sequence
  Description of Artificial Sequence: Synthetic oligonucleotide
  Sense strand starting at position 3978 of SEQ ID NO: 1887969
cuauauggacacugaguuu

SEQ ID NO: 2501043 - RNA, 19 nt, Artificial Sequence
  Description of Artificial Sequence: Synthetic oligonucleotide
  Antisense strand to SEQ ID NO: 2501042
aaacucaguguccauauag

SEQ ID NO: 2501044 - RNA, 19 nt, Artificial Sequence
  Description of Artificial Sequence: Synthetic oligonucleotide
  Sense strand starting at position 124 of SEQ ID NO: 1887970
cccauuaguuugucauuaa

SEQ ID NO: 2501045 - RNA, 19 nt, Artificial Sequence
  Description of Artificial Sequence: Synthetic oligonucleotide
  Antisense strand to SEQ ID NO: 2501044
uuaaugacaaacuaauggg

SEQ ID NO: 2501046 - RNA, 19 nt, Artificial Sequence
  Description of Artificial Sequence: Synthetic oligonucleotide
  Sense strand starting at position 125 of SEQ ID NO: 1887970
ccauuaguuugucauuaac

SEQ ID NO: 2501047 - RNA, 19 nt, Artificial Sequence
  Description of Artificial Sequence: Synthetic oligonucleotide
  Antisense strand to SEQ ID NO: 2501046
guuaaugacaaacuaaugg

SEQ ID NO: 2501048 - RNA, 19 nt, Artificial Sequence
  Description of Artificial Sequence: Synthetic oligonucleotide
  Sense strand starting at position 131 of SEQ ID NO: 1887970
guuugucauuaacuaagac

SEQ ID NO: 2501049 - RNA, 19 nt, Artificial Sequence
  Description of Artificial Sequence: Synthetic oligonucleotide
  Antisense strand to SEQ ID NO: 2501048
gucuuaguuaaugacaaac

SEQ ID NO: 2501050 - RNA, 19 nt, Artificial Sequence
  Description of Artificial Sequence: Synthetic oligonucleotide
  Sense strand starting at position 483 of SEQ ID NO: 1887970
acaggaaauuucuaaagua

SEQ ID NO: 2501051 - RNA, 19 nt, Artificial Sequence
  Description of Artificial Sequence: Synthetic oligonucleotide
  Antisense strand to SEQ ID NO: 2501050
uacuuuagaaauuuccugu

SEQ ID NO: 2501052 - RNA, 19 nt, Artificial Sequence
  Description of Artificial Sequence: Synthetic oligonucleotide
  Sense strand starting at position 501 of SEQ ID NO: 1887970
agacuagaguccgcaguau

SEQ ID NO: 2501053 - RNA, 19 nt, Artificial Sequence
  Description of Artificial Sequence: Synthetic oligonucleotide
  Antisense strand to SEQ ID NO: 2501052
auacugcggacucuagucu

SEQ ID NO: 2501054 - RNA, 19 nt, Artificial Sequence
  Description of Artificial Sequence: Synthetic oligonucleotide
  Sense strand starting at position 516 of SEQ ID NO: 1887970
guauuugagcccugcauac

SEQ ID NO: 2501055 - RNA, 19 nt, Artificial Sequence
  Description of Artificial Sequence: Synthetic oligonucleotide
  Antisense strand to SEQ ID NO: 2501054
guaugcagggcucaaauac

SEQ ID NO: 2501056 - RNA, 19 nt, Artificial Sequence
  Description of Artificial Sequence: Synthetic oligonucleotide
  Sense strand starting at position 572 of SEQ ID NO: 1887970
ccgacauugucuccucuau

SEQ ID NO: 2501057 - RNA, 19 nt, Artificial Sequence
  Description of Artificial Sequence: Synthetic oligonucleotide
  Antisense strand to SEQ ID NO: 2501056
auagaggagacaaugucgg

SEQ ID NO: 2501058 - RNA, 19 nt, Artificial Sequence
  Description of Artificial Sequence: Synthetic oligonucleotide
  Sense strand starting at position 643 of SEQ ID NO: 1887970
ccaagucacuugccuguaa

SEQ ID NO: 2501059 - RNA, 19 nt, Artificial Sequence
  Description of Artificial Sequence: Synthetic oligonucleotide
  Antisense strand to SEQ ID NO: 2501058
uuacaggcaagugacuugg

SEQ ID NO: 2501060 - RNA, 19 nt, Artificial Sequence
  Description of Artificial Sequence: Synthetic oligonucleotide
  Sense strand starting at position 647 of SEQ ID NO: 1887970
gucacuugccuguaaauac

SEQ ID NO: 2501061 - RNA, 19 nt, Artificial Sequence
  Description of Artificial Sequence: Synthetic oligonucleotide
  Antisense strand to SEQ ID NO: 2501060
guauuuacaggcaagugac

SEQ ID NO: 2501062 - RNA, 19 nt, Artificial Sequence
  Description of Artificial Sequence: Synthetic oligonucleotide
  Sense strand starting at position 672 of SEQ ID NO: 1887970
acacauuucucugagugau

SEQ ID NO: 2501063 - RNA, 19 nt, Artificial Sequence
  Description of Artificial Sequence: Synthetic oligonucleotide
  Antisense strand to SEQ ID NO: 2501062
aucacucagagaaaugugu

SEQ ID NO: 2501064 - RNA, 19 nt, Artificial Sequence
  Description of Artificial Sequence: Synthetic oligonucleotide
  Sense strand starting at position 684 of SEQ ID NO: 1887970
gagugauaagcacauuguu

SEQ ID NO: 2501065 - RNA, 19 nt, Artificial Sequence
  Description of Artificial Sequence: Synthetic oligonucleotide
  Antisense strand to SEQ ID NO: 2501064
aacaaugugcuuaucacuc

SEQ ID NO: 2501066 - RNA, 19 nt, Artificial Sequence
  Description of Artificial Sequence: Synthetic oligonucleotide
  Sense strand starting at position 716 of SEQ ID NO: 1887970
gagguugugcaaugucauc

SEQ ID NO: 2501067 - RNA, 19 nt, Artificial Sequence
  Description of Artificial Sequence: Synthetic oligonucleotide
  Antisense strand to SEQ ID NO: 2501066
gaugacauugcacaaccuc

SEQ ID NO: 2501068 - RNA, 19 nt, Artificial Sequence
  Description of Artificial Sequence: Synthetic oligonucleotide
  Sense strand starting at position 721 of SEQ ID NO: 1887970
ugugcaaugucauccaucu

SEQ ID NO: 2501069 - RNA, 19 nt, Artificial Sequence
  Description of Artificial Sequence: Synthetic oligonucleotide
  Antisense strand to SEQ ID NO: 2501068
agauggaugacauugcaca

SEQ ID NO: 2501070 - RNA, 19 nt, Artificial Sequence
  Description of Artificial Sequence: Synthetic oligonucleotide
  Sense strand starting at position 775 of SEQ ID NO: 1887970
ccugcugcuuuauagauga

SEQ ID NO: 2501071 - RNA, 19 nt, Artificial Sequence
  Description of Artificial Sequence: Synthetic oligonucleotide
  Antisense strand to SEQ ID NO: 2501070
ucaucuauaaagcagcagg

SEQ ID NO: 2501072 - RNA, 19 nt, Artificial Sequence
  Description of Artificial Sequence: Synthetic oligonucleotide
  Sense strand starting at position 779 of SEQ ID NO: 1887970
cugcuuuauagaugaaggu

SEQ ID NO: 2501073 - RNA, 19 nt, Artificial Sequence
  Description of Artificial Sequence: Synthetic oligonucleotide
  Antisense strand to SEQ ID NO: 2501072
accuucaucuauaaagcag

SEQ ID NO: 2501074 - RNA, 19 nt, Artificial Sequence
  Description of Artificial Sequence: Synthetic oligonucleotide
  Sense strand starting at position 920 of SEQ ID NO: 1887970
auacccagucugugucaaa

SEQ ID NO: 2501075 - RNA, 19 nt, Artificial Sequence
  Description of Artificial Sequence: Synthetic oligonucleotide
  Antisense strand to SEQ ID NO: 2501074
uuugacacagacuggguau

SEQ ID NO: 2501076 - RNA, 19 nt, Artificial Sequence
  Description of Artificial Sequence: Synthetic oligonucleotide
  Sense strand starting at position 927 of SEQ ID NO: 1887970
gucugugucaaaugucucu

SEQ ID NO: 2501077 - RNA, 19 nt, Artificial Sequence
  Description of Artificial Sequence: Synthetic oligonucleotide
  Antisense strand to SEQ ID NO: 2501076
agagacauuugacacagac

SEQ ID NO: 2501078 - RNA, 19 nt, Artificial Sequence
  Description of Artificial Sequence: Synthetic oligonucleotide
  Sense strand starting at position 930 of SEQ ID NO: 1887970
ugugucaaaugucucugau

SEQ ID NO: 2501079 - RNA, 19 nt, Artificial Sequence
  Description of Artificial Sequence: Synthetic oligonucleotide
  Antisense strand to SEQ ID NO: 2501078
aucagagacauuugacaca

SEQ ID NO: 2501080 - RNA, 19 nt, Artificial Sequence
  Description of Artificial Sequence: Synthetic oligonucleotide
  Sense strand starting at position 932 of SEQ ID NO: 1887970
ugucaaaugucucugauua

SEQ ID NO: 2501081 - RNA, 19 nt, Artificial Sequence
  Description of Artificial Sequence: Synthetic oligonucleotide
  Antisense strand to SEQ ID NO: 2501080
uaaucagagacauuugaca

SEQ ID NO: 2501082 - RNA, 19 nt, Artificial Sequence
  Description of Artificial Sequence: Synthetic oligonucleotide
  Sense strand starting at position 933 of SEQ ID NO: 1887970
gucaaaugucucugauuau

SEQ ID NO: 2501083 - RNA, 19 nt, Artificial Sequence
  Description of Artificial Sequence: Synthetic oligonucleotide
  Antisense strand to SEQ ID NO: 2501082
auaaucagagacauuugac

SEQ ID NO: 2501084 - RNA, 19 nt, Artificial Sequence
  Description of Artificial Sequence: Synthetic oligonucleotide
  Sense strand starting at position 939 of SEQ ID NO: 1887970
ugucucugauuaucugaga

SEQ ID NO: 2501085 - RNA, 19 nt, Artificial Sequence
  Description of Artificial Sequence: Synthetic oligonucleotide
  Antisense strand to SEQ ID NO: 2501084
ucucagauaaucagagaca

SEQ ID NO: 2501086 - RNA, 19 nt, Artificial Sequence
  Description of Artificial Sequence: Synthetic oligonucleotide
  Sense strand starting at position 942 of SEQ ID NO: 1887970
cucugauuaucugagaaca

SEQ ID NO: 2501087 - RNA, 19 nt, Artificial Sequence
  Description of Artificial Sequence: Synthetic oligonucleotide
  Antisense strand to SEQ ID NO: 2501086
uguucucagauaaucagag

SEQ ID NO: 2501088 - RNA, 19 nt, Artificial Sequence
  Description of Artificial Sequence: Synthetic oligonucleotide
  Sense strand starting at position 944 of SEQ ID NO: 1887970
cugauuaucugagaacauc

SEQ ID NO: 2501089 - RNA, 19 nt, Artificial Sequence
  Description of Artificial Sequence: Synthetic oligonucleotide
  Antisense strand to SEQ ID NO: 2501088
gauguucucagauaaucag

SEQ ID NO: 2501090 - RNA, 19 nt, Artificial Sequence
  Description of Artificial Sequence: Synthetic oligonucleotide
  Sense strand starting at position 1428 of SEQ ID NO: 1887970
aguaguaacuaugcuuaac

SEQ ID NO: 2501091 - RNA, 19 nt, Artificial Sequence
  Description of Artificial Sequence: Synthetic oligonucleotide
  Antisense strand to SEQ ID NO: 2501090
guuaagcauaguuacuacu

SEQ ID NO: 2501092 - RNA, 19 nt, Artificial Sequence
  Description of Artificial Sequence: Synthetic oligonucleotide
  Sense strand starting at position 2338 of SEQ ID NO: 1887970
aggagugagugccuuaaag

SEQ ID NO: 2501093 - RNA, 19 nt, Artificial Sequence
  Description of Artificial Sequence: Synthetic oligonucleotide
  Antisense strand to SEQ ID NO: 2501092
cuuuaaggcacucacuccu

SEQ ID NO: 2501094 - RNA, 19 nt, Artificial Sequence
  Description of Artificial Sequence: Synthetic oligonucleotide
  Sense strand starting at position 2340 of SEQ ID NO: 1887970
gagugagugccuuaaagac

SEQ ID NO: 2501095 - RNA, 19 nt, Artificial Sequence
  Description of Artificial Sequence: Synthetic oligonucleotide
  Antisense strand to SEQ ID NO: 2501094
gucuuuaaggcacucacuc

SEQ ID NO: 2501096 - RNA, 19 nt, Artificial Sequence
  Description of Artificial Sequence: Synthetic oligonucleotide
  Sense strand starting at position 2354 of SEQ ID NO: 1887970
aagacauccgcucaugaga

SEQ ID NO: 2501097 - RNA, 19 nt, Artificial Sequence
  Description of Artificial Sequence: Synthetic oligonucleotide
  Antisense strand to SEQ ID NO: 2501096
ucucaugagcggaugucuu

SEQ ID NO: 2501098 - RNA, 19 nt, Artificial Sequence
  Description of Artificial Sequence: Synthetic oligonucleotide
  Sense strand starting at position 2368 of SEQ ID NO: 1887970
ugagaucucuaggagagca

SEQ ID NO: 2501099 - RNA, 19 nt, Artificial Sequence
  Description of Artificial Sequence: Synthetic oligonucleotide
  Antisense strand to SEQ ID NO: 2501098
ugcucuccuagagaucuca

SEQ ID NO: 2501100 - RNA, 19 nt, Artificial Sequence
  Description of Artificial Sequence: Synthetic oligonucleotide
  Sense strand starting at position 2400 of SEQ ID NO: 1887970
caccguucugcggaugagu

SEQ ID NO: 2501101 - RNA, 19 nt, Artificial Sequence
  Description of Artificial Sequence: Synthetic oligonucleotide
  Antisense strand to SEQ ID NO: 2501100
acucauccgcagaacggug

SEQ ID NO: 2501102 - RNA, 19 nt, Artificial Sequence
  Description of Artificial Sequence: Synthetic oligonucleotide
  Sense strand starting at position 2402 of SEQ ID NO: 1887970
ccguucugcggaugaguaa

SEQ ID NO: 2501103 - RNA, 19 nt, Artificial Sequence
  Description of Artificial Sequence: Synthetic oligonucleotide
  Antisense strand to SEQ ID NO: 2501102
uuacucauccgcagaacgg

SEQ ID NO: 2501104 - RNA, 19 nt, Artificial Sequence
  Description of Artificial Sequence: Synthetic oligonucleotide
  Sense strand starting at position 2403 of SEQ ID NO: 1887970
cguucugcggaugaguaaa

SEQ ID NO: 2501105 - RNA, 19 nt, Artificial Sequence
  Description of Artificial Sequence: Synthetic oligonucleotide
  Antisense strand to SEQ ID NO: 2501104
uuuacucauccgcagaacg

SEQ ID NO: 2501106 - RNA, 19 nt, Artificial Sequence
  Description of Artificial Sequence: Synthetic oligonucleotide
  Sense strand starting at position 2845 of SEQ ID NO: 1887970
ucaggauuggagcgauucu

SEQ ID NO: 2501107 - RNA, 19 nt, Artificial Sequence
  Description of Artificial Sequence: Synthetic oligonucleotide
  Antisense strand to SEQ ID NO: 2501106
agaaucgcuccaauccuga

SEQ ID NO: 2501108 - RNA, 19 nt, Artificial Sequence
  Description of Artificial Sequence: Synthetic oligonucleotide
  Sense strand starting at position 2907 of SEQ ID NO: 1887970
acgagugccuggccucaaa

SEQ ID NO: 2501109 - RNA, 19 nt, Artificial Sequence
  Description of Artificial Sequence: Synthetic oligonucleotide
  Antisense strand to SEQ ID NO: 2501108
uuugaggccaggcacucgu

SEQ ID NO: 2501110 - RNA, 19 nt, Artificial Sequence
  Description of Artificial Sequence: Synthetic oligonucleotide
  Sense strand starting at position 3325 of SEQ ID NO: 1887970
aaagcaagagguugaauau

SEQ ID NO: 2501111 - RNA, 19 nt, Artificial Sequence
  Description of Artificial Sequence: Synthetic oligonucleotide
  Antisense strand to SEQ ID NO: 2501110
auauucaaccucuugcuuu

SEQ ID NO: 2501112 - RNA, 19 nt, Artificial Sequence
  Description of Artificial Sequence: Synthetic oligonucleotide
  Sense strand starting at position 3338 of SEQ ID NO: 1887970
gaauaucuugcaugagguc

SEQ ID NO: 2501113 - RNA, 19 nt, Artificial Sequence
  Description of Artificial Sequence: Synthetic oligonucleotide
  Antisense strand to SEQ ID NO: 2501112
gaccucaugcaagauauuc

SEQ ID NO: 2501114 - RNA, 19 nt, Artificial Sequence
  Description of Artificial Sequence: Synthetic oligonucleotide
  Sense strand starting at position 3362 of SEQ ID NO: 1887970
ccugguaggucacagaacu

SEQ ID NO: 2501115 - RNA, 19 nt, Artificial Sequence
  Description of Artificial Sequence: Synthetic oligonucleotide
  Antisense strand to SEQ ID NO: 2501114
aguucugugaccuaccagg

SEQ ID NO: 2501116 - RNA, 19 nt, Artificial Sequence
  Description of Artificial Sequence: Synthetic oligonucleotide
  Sense strand starting at position 3394 of SEQ ID NO: 1887970
cucagacuuccagguuuga

SEQ ID NO: 2501117 - RNA, 19 nt, Artificial Sequence
  Description of Artificial Sequence: Synthetic oligonucleotide
  Antisense strand to SEQ ID NO: 2501116
ucaaaccuggaagucugag

SEQ ID NO: 2501118 - RNA, 19 nt, Artificial Sequence
  Description of Artificial Sequence: Synthetic oligonucleotide
  Sense strand starting at position 3614 of SEQ ID NO: 1887970
aguagugugcgccugugau

SEQ ID NO: 2501119 - RNA, 19 nt, Artificial Sequence
  Description of Artificial Sequence: Synthetic oligonucleotide
  Antisense strand to SEQ ID NO: 2501118
aucacaggcgcacacuacu

SEQ ID NO: 2501120 - RNA, 19 nt, Artificial Sequence
  Description of Artificial Sequence: Synthetic oligonucleotide
  Sense strand starting at position 3771 of SEQ ID NO: 1887970
agaagaaauugaggacuca

SEQ ID NO: 2501121 - RNA, 19 nt, Artificial Sequence
  Description of Artificial Sequence: Synthetic oligonucleotide
  Antisense strand to SEQ ID NO: 2501120
ugaguccucaauuucuucu

SEQ ID NO: 2501122 - RNA, 19 nt, Artificial Sequence
  Description of Artificial Sequence: Synthetic oligonucleotide
  Sense strand starting at position 3963 of SEQ ID NO: 1887970
ucagcauaguuguugauaa

SEQ ID NO: 2501123 - RNA, 19 nt, Artificial Sequence
  Description of Artificial Sequence: Synthetic oligonucleotide
  Antisense strand to SEQ ID NO: 2501122
uuaucaacaacuaugcuga

SEQ ID NO: 2501124 - RNA, 19 nt, Artificial Sequence
  Description of Artificial Sequence: Synthetic oligonucleotide
  Sense strand starting at position 27 of SEQ ID NO: 1887971
acgccaaacuaguuaaguu

SEQ ID NO: 2501125 - RNA, 19 nt, Artificial Sequence
  Description of Artificial Sequence: Synthetic oligonucleotide
  Antisense strand to SEQ ID NO: 2501124
aacuuaacuaguuuggcgu

SEQ ID NO: 2501126 - RNA, 19 nt, Artificial Sequence
  Description of Artificial Sequence: Synthetic oligonucleotide
  Sense strand starting at position 134 of SEQ ID NO: 1887971
agugcaguugcaugaccau

SEQ ID NO: 2501127 - RNA, 19 nt, Artificial Sequence
  Description of Artificial Sequence: Synthetic oligonucleotide
  Antisense strand to SEQ ID NO: 2501126
auggucaugcaacugcacu

SEQ ID NO: 2501128 - RNA, 19 nt, Artificial Sequence
  Description of Artificial Sequence: Synthetic oligonucleotide
  Sense strand starting at position 430 of SEQ ID NO: 1887971
ccuaacaguugcguuauua

SEQ ID NO: 2501129 - RNA, 19 nt, Artificial Sequence
  Description of Artificial Sequence: Synthetic oligonucleotide
  Antisense strand to SEQ ID NO: 2501128
uaauaacgcaacuguuagg

SEQ ID NO: 2501130 - RNA, 19 nt, Artificial Sequence
  Description of Artificial Sequence: Synthetic oligonucleotide
  Sense strand starting at position 434 of SEQ ID NO: 1887971
acaguugcguuauuagaga

SEQ ID NO: 2501131 - RNA, 19 nt, Artificial Sequence
  Description of Artificial Sequence: Synthetic oligonucleotide
  Antisense strand to SEQ ID NO: 2501130
ucucuaauaacgcaacugu

SEQ ID NO: 2501132 - RNA, 19 nt, Artificial Sequence
  Description of Artificial Sequence: Synthetic oligonucleotide
  Sense strand starting at position 508 of SEQ ID NO: 1887971
aaagaaagauucccgcagu

SEQ ID NO: 2501133 - RNA, 19 nt, Artificial Sequence
  Description of Artificial Sequence: Synthetic oligonucleotide
  Antisense strand to SEQ ID NO: 2501132
acugcgggaaucuuucuuu

SEQ ID NO: 2501134 - RNA, 19 nt, Artificial Sequence
  Description of Artificial Sequence: Synthetic oligonucleotide
  Sense strand starting at position 535 of SEQ ID NO: 1887971
acaggugguuuccaagcaa

SEQ ID NO: 2501135 - RNA, 19 nt, Artificial Sequence
  Description of Artificial Sequence: Synthetic oligonucleotide
  Antisense strand to SEQ ID NO: 2501134
uugcuuggaaaccaccugu

SEQ ID NO: 2501136 - RNA, 19 nt, Artificial Sequence
  Description of Artificial Sequence: Synthetic oligonucleotide
  Sense strand starting at position 539 of SEQ ID NO: 1887971
gugguuuccaagcaaacga

SEQ ID NO: 2501137 - RNA, 19 nt, Artificial Sequence
  Description of Artificial Sequence: Synthetic oligonucleotide
  Antisense strand to SEQ ID NO: 2501136
ucguuugcuuggaaaccac

SEQ ID NO: 2501138 - RNA, 19 nt, Artificial Sequence
  Description of Artificial Sequence: Synthetic oligonucleotide
  Sense strand starting at position 618 of SEQ ID NO: 1887971
uguaaacagucguucuuau

SEQ ID NO: 2501139 - RNA, 19 nt, Artificial Sequence
  Description of Artificial Sequence: Synthetic oligonucleotide
  Antisense strand to SEQ ID NO: 2501138
auaagaacgacuguuuaca

SEQ ID NO: 2501140 - RNA, 19 nt, Artificial Sequence
  Description of Artificial Sequence: Synthetic oligonucleotide
  Sense strand starting at position 626 of SEQ ID NO: 1887971
gucguucuuauacaggaau

SEQ ID NO: 2501141 - RNA, 19 nt, Artificial Sequence
  Description of Artificial Sequence: Synthetic oligonucleotide
  Antisense strand to SEQ ID NO: 2501140
auuccuguauaagaacgac

SEQ ID NO: 2501142 - RNA, 19 nt, Artificial Sequence
  Description of Artificial Sequence: Synthetic oligonucleotide
  Sense strand starting at position 628 of SEQ ID NO: 1887971
cguucuuauacaggaaugu

SEQ ID NO: 2501143 - RNA, 19 nt, Artificial Sequence
  Description of Artificial Sequence: Synthetic oligonucleotide
  Antisense strand to SEQ ID NO: 2501142
acauuccuguauaagaacg

SEQ ID NO: 2501144 - RNA, 19 nt, Artificial Sequence
  Description of Artificial Sequence: Synthetic oligonucleotide
  Sense strand starting at position 629 of SEQ ID NO: 1887971
guucuuauacaggaauguu

SEQ ID NO: 2501145 - RNA, 19 nt, Artificial Sequence
  Description of Artificial Sequence: Synthetic oligonucleotide
  Antisense strand to SEQ ID NO: 2501144
aacauuccuguauaagaac

SEQ ID NO: 2501146 - RNA, 19 nt, Artificial Sequence
  Description of Artificial Sequence: Synthetic oligonucleotide
  Sense strand starting at position 676 of SEQ ID NO: 1887971
gcuuauaguguugaagcaa

SEQ ID NO: 2501147 - RNA, 19 nt, Artificial Sequence
  Description of Artificial Sequence: Synthetic oligonucleotide
  Antisense strand to SEQ ID NO: 2501146
uugcuucaacacuauaagc

SEQ ID NO: 2501148 - RNA, 19 nt, Artificial Sequence
  Description of Artificial Sequence: Synthetic oligonucleotide
  Sense strand starting at position 860 of SEQ ID NO: 1887971
uucuuaaauugggaauacu

SEQ ID NO: 2501149 - RNA, 19 nt, Artificial Sequence
  Description of Artificial Sequence: Synthetic oligonucleotide
  Antisense strand to SEQ ID NO: 2501148
aguauucccaauuuaagaa

SEQ ID NO: 2501150 - RNA, 19 nt, Artificial Sequence
  Description of Artificial Sequence: Synthetic oligonucleotide
  Sense strand starting at position 1129 of SEQ ID NO: 1887971
ggcauuauauugugacaaa

SEQ ID NO: 2501151 - RNA, 19 nt, Artificial Sequence
  Description of Artificial Sequence: Synthetic oligonucleotide
  Antisense strand to SEQ ID NO: 2501150
uuugucacaauauaaugcc

SEQ ID NO: 2501152 - RNA, 19 nt, Artificial Sequence
  Description of Artificial Sequence: Synthetic oligonucleotide
  Sense strand starting at position 1130 of SEQ ID NO: 1887971
gcauuauauugugacaaau

SEQ ID NO: 2501153 - RNA, 19 nt, Artificial Sequence
  Description of Artificial Sequence: Synthetic oligonucleotide
  Antisense strand to SEQ ID NO: 2501152
auuugucacaauauaaugc

SEQ ID NO: 2501154 - RNA, 19 nt, Artificial Sequence
  Description of Artificial Sequence: Synthetic oligonucleotide
  Sense strand starting at position 1244 of SEQ ID NO: 1887971
agcaauguuuaggucauua

SEQ ID NO: 2501155 - RNA, 19 nt, Artificial Sequence
  Description of Artificial Sequence: Synthetic oligonucleotide
  Antisense strand to SEQ ID NO: 2501154
uaaugaccuaaacauugcu

SEQ ID NO: 2501156 - RNA, 19 nt, Artificial Sequence
  Description of Artificial Sequence: Synthetic oligonucleotide
  Sense strand starting at position 1248 of SEQ ID NO: 1887971
auguuuaggucauuacaag

SEQ ID NO: 2501157 - RNA, 19 nt, Artificial Sequence
  Description of Artificial Sequence: Synthetic oligonucleotide
  Antisense strand to SEQ ID NO: 2501156
cuuguaaugaccuaaacau

SEQ ID NO: 2501158 - RNA, 19 nt, Artificial Sequence
  Description of Artificial Sequence: Synthetic oligonucleotide
  Sense strand starting at position 1281 of SEQ ID NO: 1887971
gcgaacgcuuccguugaca

SEQ ID NO: 2501159 - RNA, 19 nt, Artificial Sequence
  Description of Artificial Sequence: Synthetic oligonucleotide
  Antisense strand to SEQ ID NO: 2501158
ugucaacggaagcguucgc

SEQ ID NO: 2501160 - RNA, 19 nt, Artificial Sequence
  Description of Artificial Sequence: Synthetic oligonucleotide
  Sense strand starting at position 2140 of SEQ ID NO: 1887971
gcguuuguaucccucugga

SEQ ID NO: 2501161 - RNA, 19 nt, Artificial Sequence
  Description of Artificial Sequence: Synthetic oligonucleotide
  Antisense strand to SEQ ID NO: 2501160
uccagagggauacaaacgc

SEQ ID NO: 2501162 - RNA, 19 nt, Artificial Sequence
  Description of Artificial Sequence: Synthetic oligonucleotide
  Sense strand starting at position 2172 of SEQ ID NO: 1887971
ugccgauauuucuuucuuu

SEQ ID NO: 2501163 - RNA, 19 nt, Artificial Sequence
  Description of Artificial Sequence: Synthetic oligonucleotide
  Antisense strand to SEQ ID NO: 2501162
aaagaaagaaauaucggca

SEQ ID NO: 2501164 - RNA, 19 nt, Artificial Sequence
  Description of Artificial Sequence: Synthetic oligonucleotide
  Sense strand starting at position 2356 of SEQ ID NO: 1887971
aucuguaucuaggagcuua

SEQ ID NO: 2501165 - RNA, 19 nt, Artificial Sequence
  Description of Artificial Sequence: Synthetic oligonucleotide
  Antisense strand to SEQ ID NO: 2501164
uaagcuccuagauacagau

SEQ ID NO: 2501166 - RNA, 19 nt, Artificial Sequence
  Description of Artificial Sequence: Synthetic oligonucleotide
  Sense strand starting at position 2537 of SEQ ID NO: 1887971
uuaauaugcugcuaugaau

SEQ ID NO: 2501167 - RNA, 19 nt, Artificial Sequence
  Description of Artificial Sequence: Synthetic oligonucleotide
  Antisense strand to SEQ ID NO: 2501166
auucauagcagcauauuaa

SEQ ID NO: 2501168 - RNA, 19 nt, Artificial Sequence
  Description of Artificial Sequence: Synthetic oligonucleotide
  Sense strand starting at position 2810 of SEQ ID NO: 1887971
caggcuggucuugacauua

SEQ ID NO: 2501169 - RNA, 19 nt, Artificial Sequence
  Description of Artificial Sequence: Synthetic oligonucleotide
  Antisense strand to SEQ ID NO: 2501168
uaaugucaagaccagccug

SEQ ID NO: 2501170 - RNA, 19 nt, Artificial Sequence
  Description of Artificial Sequence: Synthetic oligonucleotide
  Sense strand starting at position 2815 of SEQ ID NO: 1887971
uggucuugacauuaagcga

SEQ ID NO: 2501171 - RNA, 19 nt, Artificial Sequence
  Description of Artificial Sequence: Synthetic oligonucleotide
  Antisense strand to SEQ ID NO: 2501170
ucgcuuaaugucaagacca

SEQ ID NO: 2501172 - RNA, 19 nt, Artificial Sequence
  Description of Artificial Sequence: Synthetic oligonucleotide
  Sense strand starting at position 2974 of SEQ ID NO: 1887971
uuaaccuaacugcgugaaa

SEQ ID NO: 2501173 - RNA, 19 nt, Artificial Sequence
  Description of Artificial Sequence: Synthetic oligonucleotide
  Antisense strand to SEQ ID NO: 2501172
uuucacgcaguuagguuaa

SEQ ID NO: 2501174 - RNA, 19 nt, Artificial Sequence
  Description of Artificial Sequence: Synthetic oligonucleotide
  Sense strand starting at position 2976 of SEQ ID NO: 1887971
aaccuaacugcgugaaagu

SEQ ID NO: 2501175 - RNA, 19 nt, Artificial Sequence
  Description of Artificial Sequence: Synthetic oligonucleotide
  Antisense strand to SEQ ID NO: 2501174
acuuucacgcaguuagguu

SEQ ID NO: 2501176 - RNA, 19 nt, Artificial Sequence
  Description of Artificial Sequence: Synthetic oligonucleotide
  Sense strand starting at position 3015 of SEQ ID NO: 1887971
agucgcuagcaguaaagau

SEQ ID NO: 2501177 - RNA, 19 nt, Artificial Sequence
  Description of Artificial Sequence: Synthetic oligonucleotide
  Antisense strand to SEQ ID NO: 2501176
aucuuuacugcuagcgacu

SEQ ID NO: 2501178 - RNA, 19 nt, Artificial Sequence
  Description of Artificial Sequence: Synthetic oligonucleotide
  Sense strand starting at position 3034 of SEQ ID NO: 1887971
gggucguguucguuccaca

SEQ ID NO: 2501179 - RNA, 19 nt, Artificial Sequence
  Description of Artificial Sequence: Synthetic oligonucleotide
  Antisense strand to SEQ ID NO: 2501178
uguggaacgaacacgaccc

SEQ ID NO: 2501180 - RNA, 19 nt, Artificial Sequence
  Description of Artificial Sequence: Synthetic oligonucleotide
  Sense strand starting at position 3035 of SEQ ID NO: 1887971
ggucguguucguuccacau

SEQ ID NO: 2501181 - RNA, 19 nt, Artificial Sequence
  Description of Artificial Sequence: Synthetic oligonucleotide
  Antisense strand to SEQ ID NO: 2501180
auguggaacgaacacgacc

SEQ ID NO: 2501182 - RNA, 19 nt, Artificial Sequence
  Description of Artificial Sequence: Synthetic oligonucleotide
  Sense strand starting at position 3059 of SEQ ID NO: 1887971
agacaagucuaggcagaga

SEQ ID NO: 2501183 - RNA, 19 nt, Artificial Sequence
  Description of Artificial Sequence: Synthetic oligonucleotide
  Antisense strand to SEQ ID NO: 2501182
ucucugccuagacuugucu

SEQ ID NO: 2501184 - RNA, 19 nt, Artificial Sequence
  Description of Artificial Sequence: Synthetic oligonucleotide
  Sense strand starting at position 3074 of SEQ ID NO: 1887971
gagagaugccugcagaguc

SEQ ID NO: 2501185 - RNA, 19 nt, Artificial Sequence
  Description of Artificial Sequence: Synthetic oligonucleotide
  Antisense strand to SEQ ID NO: 2501184
gacucugcaggcaucucuc

SEQ ID NO: 2501186 - RNA, 19 nt, Artificial Sequence
  Description of Artificial Sequence: Synthetic oligonucleotide
  Sense strand starting at position 3374 of SEQ ID NO: 1887971
cuacucuugucccuuguaa

SEQ ID NO: 2501187 - RNA, 19 nt, Artificial Sequence
  Description of Artificial Sequence: Synthetic oligonucleotide
  Antisense strand to SEQ ID NO: 2501186
uuacaagggacaagaguag

SEQ ID NO: 2501188 - RNA, 19 nt, Artificial Sequence
  Description of Artificial Sequence: Synthetic oligonucleotide
  Sense strand starting at position 3376 of SEQ ID NO: 1887971
acucuugucccuuguaaug

SEQ ID NO: 2501189 - RNA, 19 nt, Artificial Sequence
  Description of Artificial Sequence: Synthetic oligonucleotide
  Antisense strand to SEQ ID NO: 2501188
cauuacaagggacaagagu

SEQ ID NO: 2501190 - RNA, 19 nt, Artificial Sequence
  Description of Artificial Sequence: Synthetic oligonucleotide
  Sense strand starting at position 3382 of SEQ ID NO: 1887971
gucccuuguaauggagauc

SEQ ID NO: 2501191 - RNA, 19 nt, Artificial Sequence
  Description of Artificial Sequence: Synthetic oligonucleotide
  Antisense strand to SEQ ID NO: 2501190
gaucuccauuacaagggac

SEQ ID NO: 2501192 - RNA, 19 nt, Artificial Sequence
  Description of Artificial Sequence: Synthetic oligonucleotide
  Sense strand starting at position 3453 of SEQ ID NO: 1887971
uaguccugugccuguagga

SEQ ID NO: 2501193 - RNA, 19 nt, Artificial Sequence
  Description of Artificial Sequence: Synthetic oligonucleotide
  Antisense strand to SEQ ID NO: 2501192
uccuacaggcacaggacua

SEQ ID NO: 2501194 - RNA, 19 nt, Artificial Sequence
  Description of Artificial Sequence: Synthetic oligonucleotide
  Sense strand starting at position 3535 of SEQ ID NO: 1887971
caagaaugggugugcgaug

SEQ ID NO: 2501195 - RNA, 19 nt, Artificial Sequence
  Description of Artificial Sequence: Synthetic oligonucleotide
  Antisense strand to SEQ ID NO: 2501194
caucgcacacccauucuug

SEQ ID NO: 2501196 - RNA, 19 nt, Artificial Sequence
  Description of Artificial Sequence: Synthetic oligonucleotide
  Sense strand starting at position 3544 of SEQ ID NO: 1887971
gugugcgaugucguccaaa

SEQ ID NO: 2501197 - RNA, 19 nt, Artificial Sequence
  Description of Artificial Sequence: Synthetic oligonucleotide
  Antisense strand to SEQ ID NO: 2501196
uuuggacgacaucgcacac

SEQ ID NO: 2501198 - RNA, 19 nt, Artificial Sequence
  Description of Artificial Sequence: Synthetic oligonucleotide
  Sense strand starting at position 3546 of SEQ ID NO: 1887971
gugcgaugucguccaaaca

SEQ ID NO: 2501199 - RNA, 19 nt, Artificial Sequence
  Description of Artificial Sequence: Synthetic oligonucleotide
  Antisense strand to SEQ ID NO: 2501198
uguuuggacgacaucgcac

SEQ ID NO: 2501200 - RNA, 19 nt, Artificial Sequence
  Description of Artificial Sequence: Synthetic oligonucleotide
  Sense strand starting at position 3873 of SEQ ID NO: 1887971
cugagaagguucuuccuca

SEQ ID NO: 2501201 - RNA, 19 nt, Artificial Sequence
  Description of Artificial Sequence: Synthetic oligonucleotide
  Antisense strand to SEQ ID NO: 2501200
ugaggaagaaccuucucag

SEQ ID NO: 2501202 - RNA, 19 nt, Artificial Sequence
  Description of Artificial Sequence: Synthetic oligonucleotide
  Sense strand starting at position 3874 of SEQ ID NO: 1887971
ugagaagguucuuccucau

SEQ ID NO: 2501203 - RNA, 19 nt, Artificial Sequence
  Description of Artificial Sequence: Synthetic oligonucleotide
  Antisense strand to SEQ ID NO: 2501202
augaggaagaaccuucuca

SEQ ID NO: 2501204 - RNA, 19 nt, Artificial Sequence
  Description of Artificial Sequence: Synthetic oligonucleotide
  Sense strand starting at position 228 of SEQ ID NO: 1887972
gucagccaucacuagaaga

SEQ ID NO: 2501205 - RNA, 19 nt, Artificial Sequence
  Description of Artificial Sequence: Synthetic oligonucleotide
  Antisense strand to SEQ ID NO: 2501204
ucuucuagugauggcugac

SEQ ID NO: 2501206 - RNA, 19 nt, Artificial Sequence
  Description of Artificial Sequence: Synthetic oligonucleotide
  Sense strand starting at position 272 of SEQ ID NO: 1887972
uaguucucagaaggaauca

SEQ ID NO: 2501207 - RNA, 19 nt, Artificial Sequence
  Description of Artificial Sequence: Synthetic oligonucleotide
  Antisense strand to SEQ ID NO: 2501206
ugauuccuucugagaacua

SEQ ID NO: 2501208 - RNA, 19 nt, Artificial Sequence
  Description of Artificial Sequence: Synthetic oligonucleotide
  Sense strand starting at position 451 of SEQ ID NO: 1887972
uggguaugaacccgauagu

SEQ ID NO: 2501209 - RNA, 19 nt, Artificial Sequence
  Description of Artificial Sequence: Synthetic oligonucleotide
  Antisense strand to SEQ ID NO: 2501208
acuaucggguucauaccca

SEQ ID NO: 2501210 - RNA, 19 nt, Artificial Sequence
  Description of Artificial Sequence: Synthetic oligonucleotide
  Sense strand starting at position 454 of SEQ ID NO: 1887972
guaugaacccgauagucau

SEQ ID NO: 2501211 - RNA, 19 nt, Artificial Sequence
  Description of Artificial Sequence: Synthetic oligonucleotide
  Antisense strand to SEQ ID NO: 2501210
augacuaucggguucauac

SEQ ID NO: 2501212 - RNA, 19 nt, Artificial Sequence
  Description of Artificial Sequence: Synthetic oligonucleotide
  Sense strand starting at position 460 of SEQ ID NO: 1887972
acccgauagucaucucuaa

SEQ ID NO: 2501213 - RNA, 19 nt, Artificial Sequence
  Description of Artificial Sequence: Synthetic oligonucleotide
  Antisense strand to SEQ ID NO: 2501212
uuagagaugacuaucgggu

SEQ ID NO: 2501214 - RNA, 19 nt, Artificial Sequence
  Description of Artificial Sequence: Synthetic oligonucleotide
  Sense strand starting at position 464 of SEQ ID NO: 1887972
gauagucaucucuaaggca

SEQ ID NO: 2501215 - RNA, 19 nt, Artificial Sequence
  Description of Artificial Sequence: Synthetic oligonucleotide
  Antisense strand to SEQ ID NO: 2501214
ugccuuagagaugacuauc

SEQ ID NO: 2501216 - RNA, 19 nt, Artificial Sequence
  Description of Artificial Sequence: Synthetic oligonucleotide
  Sense strand starting at position 797 of SEQ ID NO: 1887972
ugcaaauguguguaggaga

SEQ ID NO: 2501217 - RNA, 19 nt, Artificial Sequence
  Description of Artificial Sequence: Synthetic oligonucleotide
  Antisense strand to SEQ ID NO: 2501216
ucuccuacacacauuugca

SEQ ID NO: 2501218 - RNA, 19 nt, Artificial Sequence
  Description of Artificial Sequence: Synthetic oligonucleotide
  Sense strand starting at position 948 of SEQ ID NO: 1887972
cugggucaagccuagaguu

SEQ ID NO: 2501219 - RNA, 19 nt, Artificial Sequence
  Description of Artificial Sequence: Synthetic oligonucleotide
  Antisense strand to SEQ ID NO: 2501218
aacucuaggcuugacccag

SEQ ID NO: 2501220 - RNA, 19 nt, Artificial Sequence
  Description of Artificial Sequence: Synthetic oligonucleotide
  Sense strand starting at position 956 of SEQ ID NO: 1887972
agccuagaguuucuaugua

SEQ ID NO: 2501221 - RNA, 19 nt, Artificial Sequence
  Description of Artificial Sequence: Synthetic oligonucleotide
  Antisense strand to SEQ ID NO: 2501220
uacauagaaacucuaggcu

SEQ ID NO: 2501222 - RNA, 19 nt, Artificial Sequence
  Description of Artificial Sequence: Synthetic oligonucleotide
  Sense strand starting at position 960 of SEQ ID NO: 1887972
uagaguuucuauguaguaa

SEQ ID NO: 2501223 - RNA, 19 nt, Artificial Sequence
  Description of Artificial Sequence: Synthetic oligonucleotide
  Antisense strand to SEQ ID NO: 2501222
uuacuacauagaaacucua

SEQ ID NO: 2501224 - RNA, 19 nt, Artificial Sequence
  Description of Artificial Sequence: Synthetic oligonucleotide
  Sense strand starting at position 961 of SEQ ID NO: 1887972
agaguuucuauguaguaaa

SEQ ID NO: 2501225 - RNA, 19 nt, Artificial Sequence
  Description of Artificial Sequence: Synthetic oligonucleotide
  Antisense strand to SEQ ID NO: 2501224
uuuacuacauagaaacucu

SEQ ID NO: 2501226 - RNA, 19 nt, Artificial Sequence
  Description of Artificial Sequence: Synthetic oligonucleotide
  Sense strand starting at position 971 of SEQ ID NO: 1887972
uguaguaaagccgagauua

SEQ ID NO: 2501227 - RNA, 19 nt, Artificial Sequence
  Description of Artificial Sequence: Synthetic oligonucleotide
  Antisense strand to SEQ ID NO: 2501226
uaaucucggcuuuacuaca

SEQ ID NO: 2501228 - RNA, 19 nt, Artificial Sequence
  Description of Artificial Sequence: Synthetic oligonucleotide
  Sense strand starting at position 973 of SEQ ID NO: 1887972
uaguaaagccgagauuaua

SEQ ID NO: 2501229 - RNA, 19 nt, Artificial Sequence
  Description of Artificial Sequence: Synthetic oligonucleotide
  Antisense strand to SEQ ID NO: 2501228
uauaaucucggcuuuacua

SEQ ID NO: 2501230 - RNA, 19 nt, Artificial Sequence
  Description of Artificial Sequence: Synthetic oligonucleotide
  Sense strand starting at position 1038 of SEQ ID NO: 1887972
gguucaauuggaggauggu

SEQ ID NO: 2501231 - RNA, 19 nt, Artificial Sequence
  Description of Artificial Sequence: Synthetic oligonucleotide
  Antisense strand to SEQ ID NO: 2501230
accauccuccaauugaacc

SEQ ID NO: 2501232 - RNA, 19 nt, Artificial Sequence
  Description of Artificial Sequence: Synthetic oligonucleotide
  Sense strand starting at position 1039 of SEQ ID NO: 1887972
guucaauuggaggaugguu

SEQ ID NO: 2501233 - RNA, 19 nt, Artificial Sequence
  Description of Artificial Sequence: Synthetic oligonucleotide
  Antisense strand to SEQ ID NO: 2501232
aaccauccuccaauugaac

SEQ ID NO: 2501234 - RNA, 19 nt, Artificial Sequence
  Description of Artificial Sequence: Synthetic oligonucleotide
  Sense strand starting at position 1069 of SEQ ID NO: 1887972
aagaaucgagcuggucaga

SEQ ID NO: 2501235 - RNA, 19 nt, Artificial Sequence
  Description of Artificial Sequence: Synthetic oligonucleotide
  Antisense strand to SEQ ID NO: 2501234
ucugaccagcucgauucuu

SEQ ID NO: 2501236 - RNA, 19 nt, Artificial Sequence
  Description of Artificial Sequence: Synthetic oligonucleotide
  Sense strand starting at position 1490 of SEQ ID NO: 1887972
ccucuauuccgacggagga

SEQ ID NO: 2501237 - RNA, 19 nt, Artificial Sequence
  Description of Artificial Sequence: Synthetic oligonucleotide
  Antisense strand to SEQ ID NO: 2501236
uccuccgucggaauagagg

SEQ ID NO: 2501238 - RNA, 19 nt, Artificial Sequence
  Description of Artificial Sequence: Synthetic oligonucleotide
  Sense strand starting at position 1491 of SEQ ID NO: 1887972
cucuauuccgacggaggau

SEQ ID NO: 2501239 - RNA, 19 nt, Artificial Sequence
  Description of Artificial Sequence: Synthetic oligonucleotide
  Antisense strand to SEQ ID NO: 2501238
auccuccgucggaauagag

SEQ ID NO: 2501240 - RNA, 19 nt, Artificial Sequence
  Description of Artificial Sequence: Synthetic oligonucleotide
  Sense strand starting at position 1514 of SEQ ID NO: 1887972
gcaguacugcgguauuuag

SEQ ID NO: 2501241 - RNA, 19 nt, Artificial Sequence
  Description of Artificial Sequence: Synthetic oligonucleotide
  Antisense strand to SEQ ID NO: 2501240
cuaaauaccgcaguacugc

SEQ ID NO: 2501242 - RNA, 19 nt, Artificial Sequence
  Description of Artificial Sequence: Synthetic oligonucleotide
  Sense strand starting at position 1688 of SEQ ID NO: 1887972
ggaagucauuacuuccaca

SEQ ID NO: 2501243 - RNA, 19 nt, Artificial Sequence
  Description of Artificial Sequence: Synthetic oligonucleotide
  Antisense strand to SEQ ID NO: 2501242
uguggaaguaaugacuucc

SEQ ID NO: 2501244 - RNA, 19 nt, Artificial Sequence
  Description of Artificial Sequence: Synthetic oligonucleotide
  Sense strand starting at position 1806 of SEQ ID NO: 1887972
agaggaauucugcggucau

SEQ ID NO: 2501245 - RNA, 19 nt, Artificial Sequence
  Description of Artificial Sequence: Synthetic oligonucleotide
  Antisense strand to SEQ ID NO: 2501244
augaccgcagaauuccucu

SEQ ID NO: 2501246 - RNA, 19 nt, Artificial Sequence
  Description of Artificial Sequence: Synthetic oligonucleotide
  Sense strand starting at position 2015 of SEQ ID NO: 1887972
acaagaagccgucgaugau

SEQ ID NO: 2501247 - RNA, 19 nt, Artificial Sequence
  Description of Artificial Sequence: Synthetic oligonucleotide
  Antisense strand to SEQ ID NO: 2501246
aucaucgacggcuucuugu

SEQ ID NO: 2501248 - RNA, 19 nt, Artificial Sequence
  Description of Artificial Sequence: Synthetic oligonucleotide
  Sense strand starting at position 2016 of SEQ ID NO: 1887972
caagaagccgucgaugaua

SEQ ID NO: 2501249 - RNA, 19 nt, Artificial Sequence
  Description of Artificial Sequence: Synthetic oligonucleotide
  Antisense strand to SEQ ID NO: 2501248
uaucaucgacggcuucuug

SEQ ID NO: 2501250 - RNA, 19 nt, Artificial Sequence
  Description of Artificial Sequence: Synthetic oligonucleotide
  Sense strand starting at position 2094 of SEQ ID NO: 1887972
aucugaaguucugccaaga

SEQ ID NO: 2501251 - RNA, 19 nt, Artificial Sequence
  Description of Artificial Sequence: Synthetic oligonucleotide
  Antisense strand to SEQ ID NO: 2501250
ucuuggcagaacuucagau

SEQ ID NO: 2501252 - RNA, 19 nt, Artificial Sequence
  Description of Artificial Sequence: Synthetic oligonucleotide
  Sense strand starting at position 2421 of SEQ ID NO: 1887972
cggugaaacugucucaaac

SEQ ID NO: 2501253 - RNA, 19 nt, Artificial Sequence
  Description of Artificial Sequence: Synthetic oligonucleotide
  Antisense strand to SEQ ID NO: 2501252
guuugagacaguuucaccg

SEQ ID NO: 2501254 - RNA, 19 nt, Artificial Sequence
  Description of Artificial Sequence: Synthetic oligonucleotide
  Sense strand starting at position 2469 of SEQ ID NO: 1887972
gcuuuauagcuuccgugua

SEQ ID NO: 2501255 - RNA, 19 nt, Artificial Sequence
  Description of Artificial Sequence: Synthetic oligonucleotide
  Antisense strand to SEQ ID NO: 2501254
uacacggaagcuauaaagc

SEQ ID NO: 2501256 - RNA, 19 nt, Artificial Sequence
  Description of Artificial Sequence: Synthetic oligonucleotide
  Sense strand starting at position 2604 of SEQ ID NO: 1887972
gccucauggguuuaaggau

SEQ ID NO: 2501257 - RNA, 19 nt, Artificial Sequence
  Description of Artificial Sequence: Synthetic oligonucleotide
  Antisense strand to SEQ ID NO: 2501256
auccuuaaacccaugaggc

SEQ ID NO: 2501258 - RNA, 19 nt, Artificial Sequence
  Description of Artificial Sequence: Synthetic oligonucleotide
  Sense strand starting at position 2805 of SEQ ID NO: 1887972
ggccaaugguaaucucuua

SEQ ID NO: 2501259 - RNA, 19 nt, Artificial Sequence
  Description of Artificial Sequence: Synthetic oligonucleotide
  Antisense strand to SEQ ID NO: 2501258
uaagagauuaccauuggcc

SEQ ID NO: 2501260 - RNA, 19 nt, Artificial Sequence
  Description of Artificial Sequence: Synthetic oligonucleotide
  Sense strand starting at position 3354 of SEQ ID NO: 1887972
ggguauaguucuguaacau

SEQ ID NO: 2501261 - RNA, 19 nt, Artificial Sequence
  Description of Artificial Sequence: Synthetic oligonucleotide
  Antisense strand to SEQ ID NO: 2501260
auguuacagaacuauaccc

SEQ ID NO: 2501262 - RNA, 19 nt, Artificial Sequence
  Description of Artificial Sequence: Synthetic oligonucleotide
  Sense strand starting at position 3355 of SEQ ID NO: 1887972
gguauaguucuguaacauu

SEQ ID NO: 2501263 - RNA, 19 nt, Artificial Sequence
  Description of Artificial Sequence: Synthetic oligonucleotide
  Antisense strand to SEQ ID NO: 2501262
aauguuacagaacuauacc

SEQ ID NO: 2501264 - RNA, 19 nt, Artificial Sequence
  Description of Artificial Sequence: Synthetic oligonucleotide
  Sense strand starting at position 3384 of SEQ ID NO: 1887972
uauguauggcuuuauagaa

SEQ ID NO: 2501265 - RNA, 19 nt, Artificial Sequence
  Description of Artificial Sequence: Synthetic oligonucleotide
  Antisense strand to SEQ ID NO: 2501264
uucuauaaagccauacaua

SEQ ID NO: 2501266 - RNA, 19 nt, Artificial Sequence
  Description of Artificial Sequence: Synthetic oligonucleotide
  Sense strand starting at position 3504 of SEQ ID NO: 1887972
guucuacgucucuaucacu

SEQ ID NO: 2501267 - RNA, 19 nt, Artificial Sequence
  Description of Artificial Sequence: Synthetic oligonucleotide
  Antisense strand to SEQ ID NO: 2501266
agugauagagacguagaac

SEQ ID NO: 2501268 - RNA, 19 nt, Artificial Sequence
  Description of Artificial Sequence: Synthetic oligonucleotide
  Sense strand starting at position 3594 of SEQ ID NO: 1887972
cagcacaaugccugugaga

SEQ ID NO: 2501269 - RNA, 19 nt, Artificial Sequence
  Description of Artificial Sequence: Synthetic oligonucleotide
  Antisense strand to SEQ ID NO: 2501268
ucucacaggcauugugcug

SEQ ID NO: 2501270 - RNA, 19 nt, Artificial Sequence
  Description of Artificial Sequence: Synthetic oligonucleotide
  Sense strand starting at position 3596 of SEQ ID NO: 1887972
gcacaaugccugugagauu

SEQ ID NO: 2501271 - RNA, 19 nt, Artificial Sequence
  Description of Artificial Sequence: Synthetic oligonucleotide
  Antisense strand to SEQ ID NO: 2501270
aaucucacaggcauugugc

SEQ ID NO: 2501272 - RNA, 19 nt, Artificial Sequence
  Description of Artificial Sequence: Synthetic oligonucleotide
  Sense strand starting at position 3628 of SEQ ID NO: 1887972
guguguuaugaugauggau

SEQ ID NO: 2501273 - RNA, 19 nt, Artificial Sequence
  Description of Artificial Sequence: Synthetic oligonucleotide
  Antisense strand to SEQ ID NO: 2501272
auccaucaucauaacacac

SEQ ID NO: 2501274 - RNA, 19 nt, Artificial Sequence
  Description of Artificial Sequence: Synthetic oligonucleotide
  Sense strand starting at position 3631 of SEQ ID NO: 1887972
uguuaugaugauggauaca

SEQ ID NO: 2501275 - RNA, 19 nt, Artificial Sequence
  Description of Artificial Sequence: Synthetic oligonucleotide
  Antisense strand to SEQ ID NO: 2501274
uguauccaucaucauaaca

SEQ ID NO: 2501276 - RNA, 19 nt, Artificial Sequence
  Description of Artificial Sequence: Synthetic oligonucleotide
  Sense strand starting at position 3818 of SEQ ID NO: 1887972
ggauacaaugugugucacu

SEQ ID NO: 2501277 - RNA, 19 nt, Artificial Sequence
  Description of Artificial Sequence: Synthetic oligonucleotide
  Antisense strand to SEQ ID NO: 2501276
agugacacacauuguaucc

SEQ ID NO: 2501278 - RNA, 19 nt, Artificial Sequence
  Description of Artificial Sequence: Synthetic oligonucleotide
  Sense strand starting at position 3873 of SEQ ID NO: 1887972
uuuggaaucuauccaugca

SEQ ID NO: 2501279 - RNA, 19 nt, Artificial Sequence
  Description of Artificial Sequence: Synthetic oligonucleotide
  Antisense strand to SEQ ID NO: 2501278
ugcauggauagauuccaaa

SEQ ID NO: 2501280 - RNA, 19 nt, Artificial Sequence
  Description of Artificial Sequence: Synthetic oligonucleotide
  Sense strand starting at position 3876 of SEQ ID NO: 1887972
ggaaucuauccaugcaaua

SEQ ID NO: 2501281 - RNA, 19 nt, Artificial Sequence
  Description of Artificial Sequence: Synthetic oligonucleotide
  Antisense strand to SEQ ID NO: 2501280
uauugcauggauagauucc

SEQ ID NO: 2501282 - RNA, 19 nt, Artificial Sequence
  Description of Artificial Sequence: Synthetic oligonucleotide
  Sense strand starting at position 3934 of SEQ ID NO: 1887972
auaaucgucugggcaugau

SEQ ID NO: 2501283 - RNA, 19 nt, Artificial Sequence
  Description of Artificial Sequence: Synthetic oligonucleotide
  Antisense strand to SEQ ID NO: 2501282
aucaugcccagacgauuau

SEQ ID NO: 2501284 - RNA, 19 nt, Artificial Sequence
  Description of Artificial Sequence: Synthetic oligonucleotide
  Sense strand starting at position 105 of SEQ ID NO: 1887974
augaucuggugucuggaaa

SEQ ID NO: 2501285 - RNA, 19 nt, Artificial Sequence
  Description of Artificial Sequence: Synthetic oligonucleotide
  Antisense strand to SEQ ID NO: 2501284
uuuccagacaccagaucau

SEQ ID NO: 2501286 - RNA, 19 nt, Artificial Sequence
  Description of Artificial Sequence: Synthetic oligonucleotide
  Sense strand starting at position 109 of SEQ ID NO: 1887974
ucuggugucuggaaaggug

SEQ ID NO: 2501287 - RNA, 19 nt, Artificial Sequence
  Description of Artificial Sequence: Synthetic oligonucleotide
  Antisense strand to SEQ ID NO: 2501286
caccuuuccagacaccaga

SEQ ID NO: 2501288 - RNA, 19 nt, Artificial Sequence
  Description of Artificial Sequence: Synthetic oligonucleotide
  Sense strand starting at position 284 of SEQ ID NO: 1887974
augugagacuugcccuaca

SEQ ID NO: 2501289 - RNA, 19 nt, Artificial Sequence
  Description of Artificial Sequence: Synthetic oligonucleotide
  Antisense strand to SEQ ID NO: 2501288
uguagggcaagucucacau

SEQ ID NO: 2501290 - RNA, 19 nt, Artificial Sequence
  Description of Artificial Sequence: Synthetic oligonucleotide
  Sense strand starting at position 401 of SEQ ID NO: 1887974
gauguccuaucugcagaau

SEQ ID NO: 2501291 - RNA, 19 nt, Artificial Sequence
  Description of Artificial Sequence: Synthetic oligonucleotide
  Antisense strand to SEQ ID NO: 2501290
auucugcagauaggacauc

SEQ ID NO: 2501292 - RNA, 19 nt, Artificial Sequence
  Description of Artificial Sequence: Synthetic oligonucleotide
  Sense strand starting at position 404 of SEQ ID NO: 1887974
guccuaucugcagaauccu

SEQ ID NO: 2501293 - RNA, 19 nt, Artificial Sequence
  Description of Artificial Sequence: Synthetic oligonucleotide
  Antisense strand to SEQ ID NO: 2501292
aggauucugcagauaggac

SEQ ID NO: 2501294 - RNA, 19 nt, Artificial Sequence
  Description of Artificial Sequence: Synthetic oligonucleotide
  Sense strand starting at position 413 of SEQ ID NO: 1887974
gcagaauccucagcccaug

SEQ ID NO: 2501295 - RNA, 19 nt, Artificial Sequence
  Description of Artificial Sequence: Synthetic oligonucleotide
  Antisense strand to SEQ ID NO: 2501294
caugggcugaggauucugc

SEQ ID NO: 2501296 - RNA, 19 nt, Artificial Sequence
  Description of Artificial Sequence: Synthetic oligonucleotide
  Sense strand starting at position 534 of SEQ ID NO: 1887974
ccuggacuucccugaauga

SEQ ID NO: 2501297 - RNA, 19 nt, Artificial Sequence
  Description of Artificial Sequence: Synthetic oligonucleotide
  Antisense strand to SEQ ID NO: 2501296
ucauucagggaaguccagg

SEQ ID NO: 2501298 - RNA, 19 nt, Artificial Sequence
  Description of Artificial Sequence: Synthetic oligonucleotide
  Sense strand starting at position 590 of SEQ ID NO: 1887974
ggcccuuuccuagggaaca

SEQ ID NO: 2501299 - RNA, 19 nt, Artificial Sequence
  Description of Artificial Sequence: Synthetic oligonucleotide
  Antisense strand to SEQ ID NO: 2501298
uguucccuaggaaagggcc

SEQ ID NO: 2501300 - RNA, 19 nt, Artificial Sequence
  Description of Artificial Sequence: Synthetic oligonucleotide
  Sense strand starting at position 655 of SEQ ID NO: 1887974
ggagaugcuguccauguuu

SEQ ID NO: 2501301 - RNA, 19 nt, Artificial Sequence
  Description of Artificial Sequence: Synthetic oligonucleotide
  Antisense strand to SEQ ID NO: 2501300
aaacauggacagcaucucc

SEQ ID NO: 2501302 - RNA, 19 nt, Artificial Sequence
  Description of Artificial Sequence: Synthetic oligonucleotide
  Sense strand starting at position 684 of SEQ ID NO: 1887974
ucauuugcuuucucguuga

SEQ ID NO: 2501303 - RNA, 19 nt, Artificial Sequence
  Description of Artificial Sequence: Synthetic oligonucleotide
  Antisense strand to SEQ ID NO: 2501302
ucaacgagaaagcaaauga

SEQ ID NO: 2501304 - RNA, 19 nt, Artificial Sequence
  Description of Artificial Sequence: Synthetic oligonucleotide
  Sense strand starting at position 700 of SEQ ID NO: 1887974
ugaaaccuguuguuaauaa

SEQ ID NO: 2501305 - RNA, 19 nt, Artificial Sequence
  Description of Artificial Sequence: Synthetic oligonucleotide
  Antisense strand to SEQ ID NO: 2501304
uuauuaacaacagguuuca

SEQ ID NO: 2501306 - RNA, 19 nt, Artificial Sequence
  Description of Artificial Sequence: Synthetic oligonucleotide
  Sense strand starting at position 926 of SEQ ID NO: 1887974
ccugcugaccuagauaauc

SEQ ID NO: 2501307 - RNA, 19 nt, Artificial Sequence
  Description of Artificial Sequence: Synthetic oligonucleotide
  Antisense strand to SEQ ID NO: 2501306
gauuaucuaggucagcagg

SEQ ID NO: 2501308 - RNA, 19 nt, Artificial Sequence
  Description of Artificial Sequence: Synthetic oligonucleotide
  Sense strand starting at position 1741 of SEQ ID NO: 1887974
cuggauucccauggacaca

SEQ ID NO: 2501309 - RNA, 19 nt, Artificial Sequence
  Description of Artificial Sequence: Synthetic oligonucleotide
  Antisense strand to SEQ ID NO: 2501308
uguguccaugggaauccag

SEQ ID NO: 2501310 - RNA, 19 nt, Artificial Sequence
  Description of Artificial Sequence: Synthetic oligonucleotide
  Sense strand starting at position 2397 of SEQ ID NO: 1887974
cuuugugucauugcgaggu

SEQ ID NO: 2501311 - RNA, 19 nt, Artificial Sequence
  Description of Artificial Sequence: Synthetic oligonucleotide
  Antisense strand to SEQ ID NO: 2501310
accucgcaaugacacaaag

SEQ ID NO: 2501312 - RNA, 19 nt, Artificial Sequence
  Description of Artificial Sequence: Synthetic oligonucleotide
  Sense strand starting at position 2418 of SEQ ID NO: 1887974
ggcugugcgcaucugagua

SEQ ID NO: 2501313 - RNA, 19 nt, Artificial Sequence
  Description of Artificial Sequence: Synthetic oligonucleotide
  Antisense strand to SEQ ID NO: 2501312
uacucagaugcgcacagcc

SEQ ID NO: 2501314 - RNA, 19 nt, Artificial Sequence
  Description of Artificial Sequence: Synthetic oligonucleotide
  Sense strand starting at position 2423 of SEQ ID NO: 1887974
ugcgcaucugaguauagga

SEQ ID NO: 2501315 - RNA, 19 nt, Artificial Sequence
  Description of Artificial Sequence: Synthetic oligonucleotide
  Antisense strand to SEQ ID NO: 2501314
uccuauacucagaugcgca

SEQ ID NO: 2501316 - RNA, 19 nt, Artificial Sequence
  Description of Artificial Sequence: Synthetic oligonucleotide
  Sense strand starting at position 2487 of SEQ ID NO: 1887974
agacuuugucugcacuuaa

SEQ ID NO: 2501317 - RNA, 19 nt, Artificial Sequence
  Description of Artificial Sequence: Synthetic oligonucleotide
  Antisense strand to SEQ ID NO: 2501316
uuaagugcagacaaagucu

SEQ ID NO: 2501318 - RNA, 19 nt, Artificial Sequence
  Description of Artificial Sequence: Synthetic oligonucleotide
  Sense strand starting at position 2497 of SEQ ID NO: 1887974
ugcacuuaacugugggauu

SEQ ID NO: 2501319 - RNA, 19 nt, Artificial Sequence
  Description of Artificial Sequence: Synthetic oligonucleotide
  Antisense strand to SEQ ID NO: 2501318
aaucccacaguuaagugca

SEQ ID NO: 2501320 - RNA, 19 nt, Artificial Sequence
  Description of Artificial Sequence: Synthetic oligonucleotide
  Sense strand starting at position 2585 of SEQ ID NO: 1887974
ucuggagucugccugaaau

SEQ ID NO: 2501321 - RNA, 19 nt, Artificial Sequence
  Description of Artificial Sequence: Synthetic oligonucleotide
  Antisense strand to SEQ ID NO: 2501320
auuucaggcagacuccaga

SEQ ID NO: 2501322 - RNA, 19 nt, Artificial Sequence
  Description of Artificial Sequence: Synthetic oligonucleotide
  Sense strand starting at position 2587 of SEQ ID NO: 1887974
uggagucugccugaaauuc

SEQ ID NO: 2501323 - RNA, 19 nt, Artificial Sequence
  Description of Artificial Sequence: Synthetic oligonucleotide
  Antisense strand to SEQ ID NO: 2501322
gaauuucaggcagacucca

SEQ ID NO: 2501324 - RNA, 19 nt, Artificial Sequence
  Description of Artificial Sequence: Synthetic oligonucleotide
  Sense strand starting at position 2732 of SEQ ID NO: 1887974
ucggcaaaugcugaacaaa

SEQ ID NO: 2501325 - RNA, 19 nt, Artificial Sequence
  Description of Artificial Sequence: Synthetic oligonucleotide
  Antisense strand to SEQ ID NO: 2501324
uuuguucagcauuugccga

SEQ ID NO: 2501326 - RNA, 19 nt, Artificial Sequence
  Description of Artificial Sequence: Synthetic oligonucleotide
  Sense strand starting at position 2818 of SEQ ID NO: 1887974
uggaguuguaucuaugagc

SEQ ID NO: 2501327 - RNA, 19 nt, Artificial Sequence
  Description of Artificial Sequence: Synthetic oligonucleotide
  Antisense strand to SEQ ID NO: 2501326
gcucauagauacaacucca

SEQ ID NO: 2501328 - RNA, 19 nt, Artificial Sequence
  Description of Artificial Sequence: Synthetic oligonucleotide
  Sense strand starting at position 2912 of SEQ ID NO: 1887974
gucacucaccucuagauca

SEQ ID NO: 2501329 - RNA, 19 nt, Artificial Sequence
  Description of Artificial Sequence: Synthetic oligonucleotide
  Antisense strand to SEQ ID NO: 2501328
ugaucuagaggugagugac

SEQ ID NO: 2501330 - RNA, 19 nt, Artificial Sequence
  Description of Artificial Sequence: Synthetic oligonucleotide
  Sense strand starting at position 2960 of SEQ ID NO: 1887974
gguuauugacaagguaugu

SEQ ID NO: 2501331 - RNA, 19 nt, Artificial Sequence
  Description of Artificial Sequence: Synthetic oligonucleotide
  Antisense strand to SEQ ID NO: 2501330
acauaccuugucaauaacc

SEQ ID NO: 2501332 - RNA, 19 nt, Artificial Sequence
  Description of Artificial Sequence: Synthetic oligonucleotide
  Sense strand starting at position 3191 of SEQ ID NO: 1887974
cccuaauauccaggguuug

SEQ ID NO: 2501333 - RNA, 19 nt, Artificial Sequence
  Description of Artificial Sequence: Synthetic oligonucleotide
  Antisense strand to SEQ ID NO: 2501332
caaacccuggauauuaggg

SEQ ID NO: 2501334 - RNA, 19 nt, Artificial Sequence
  Description of Artificial Sequence: Synthetic oligonucleotide
  Sense strand starting at position 3209 of SEQ ID NO: 1887974
gggcuccucugucuaggaa

SEQ ID NO: 2501335 - RNA, 19 nt, Artificial Sequence
  Description of Artificial Sequence: Synthetic oligonucleotide
  Antisense strand to SEQ ID NO: 2501334
uuccuagacagaggagccc

SEQ ID NO: 2501336 - RNA, 19 nt, Artificial Sequence
  Description of Artificial Sequence: Synthetic oligonucleotide
  Sense strand starting at position 3210 of SEQ ID NO: 1887974
ggcuccucugucuaggaau

SEQ ID NO: 2501337 - RNA, 19 nt, Artificial Sequence
  Description of Artificial Sequence: Synthetic oligonucleotide
  Antisense strand to SEQ ID NO: 2501336
auuccuagacagaggagcc

SEQ ID NO: 2501338 - RNA, 19 nt, Artificial Sequence
  Description of Artificial Sequence: Synthetic oligonucleotide
  Sense strand starting at position 3212 of SEQ ID NO: 1887974
cuccucugucuaggaauaa

SEQ ID NO: 2501339 - RNA, 19 nt, Artificial Sequence
  Description of Artificial Sequence: Synthetic oligonucleotide
  Antisense strand to SEQ ID NO: 2501338
uuauuccuagacagaggag

SEQ ID NO: 2501340 - RNA, 19 nt, Artificial Sequence
  Description of Artificial Sequence: Synthetic oligonucleotide
  Sense strand starting at position 3255 of SEQ ID NO: 1887974
agagccuuaucccuguuau

SEQ ID NO: 2501341 - RNA, 19 nt, Artificial Sequence
  Description of Artificial Sequence: Synthetic oligonucleotide
  Antisense strand to SEQ ID NO: 2501340
auaacagggauaaggcucu

SEQ ID NO: 2501342 - RNA, 19 nt, Artificial Sequence
  Description of Artificial Sequence: Synthetic oligonucleotide
  Sense strand starting at position 3265 of SEQ ID NO: 1887974
cccuguuauccacagucaa

SEQ ID NO: 2501343 - RNA, 19 nt, Artificial Sequence
  Description of Artificial Sequence: Synthetic oligonucleotide
  Antisense strand to SEQ ID NO: 2501342
uugacuguggauaacaggg

SEQ ID NO: 2501344 - RNA, 19 nt, Artificial Sequence
  Description of Artificial Sequence: Synthetic oligonucleotide
  Sense strand starting at position 3360 of SEQ ID NO: 1887974
cgcuucauuuacguggaga

SEQ ID NO: 2501345 - RNA, 19 nt, Artificial Sequence
  Description of Artificial Sequence: Synthetic oligonucleotide
  Antisense strand to SEQ ID NO: 2501344
ucuccacguaaaugaagcg

SEQ ID NO: 2501346 - RNA, 19 nt, Artificial Sequence
  Description of Artificial Sequence: Synthetic oligonucleotide
  Sense strand starting at position 3425 of SEQ ID NO: 1887974
ggaagucgugcgagaccuu

SEQ ID NO: 2501347 - RNA, 19 nt, Artificial Sequence
  Description of Artificial Sequence: Synthetic oligonucleotide
  Antisense strand to SEQ ID NO: 2501346
aaggucucgcacgacuucc

SEQ ID NO: 2501348 - RNA, 19 nt, Artificial Sequence
  Description of Artificial Sequence: Synthetic oligonucleotide
  Sense strand starting at position 3509 of SEQ ID NO: 1887974
caucucugguuucugagau

SEQ ID NO: 2501349 - RNA, 19 nt, Artificial Sequence
  Description of Artificial Sequence: Synthetic oligonucleotide
  Antisense strand to SEQ ID NO: 2501348
aucucagaaaccagagaug

SEQ ID NO: 2501350 - RNA, 19 nt, Artificial Sequence
  Description of Artificial Sequence: Synthetic oligonucleotide
  Sense strand starting at position 3540 of SEQ ID NO: 1887974
gugcaagcuguauaacaug

SEQ ID NO: 2501351 - RNA, 19 nt, Artificial Sequence
  Description of Artificial Sequence: Synthetic oligonucleotide
  Antisense strand to SEQ ID NO: 2501350
cauguuauacagcuugcac

SEQ ID NO: 2501352 - RNA, 19 nt, Artificial Sequence
  Description of Artificial Sequence: Synthetic oligonucleotide
  Sense strand starting at position 3666 of SEQ ID NO: 1887974
uucccauaucugggaacua

SEQ ID NO: 2501353 - RNA, 19 nt, Artificial Sequence
  Description of Artificial Sequence: Synthetic oligonucleotide
  Antisense strand to SEQ ID NO: 2501352
uaguucccagauaugggaa

SEQ ID NO: 2501354 - RNA, 19 nt, Artificial Sequence
  Description of Artificial Sequence: Synthetic oligonucleotide
  Sense strand starting at position 3705 of SEQ ID NO: 1887974
uuguccuuccgccagaaau

SEQ ID NO: 2501355 - RNA, 19 nt, Artificial Sequence
  Description of Artificial Sequence: Synthetic oligonucleotide
  Antisense strand to SEQ ID NO: 2501354
auuucuggcggaaggacaa

SEQ ID NO: 2501356 - RNA, 19 nt, Artificial Sequence
  Description of Artificial Sequence: Synthetic oligonucleotide
  Sense strand starting at position 3715 of SEQ ID NO: 1887974
gccagaaauguguacacag

SEQ ID NO: 2501357 - RNA, 19 nt, Artificial Sequence
  Description of Artificial Sequence: Synthetic oligonucleotide
  Antisense strand to SEQ ID NO: 2501356
cuguguacacauuucuggc

SEQ ID NO: 2501358 - RNA, 19 nt, Artificial Sequence
  Description of Artificial Sequence: Synthetic oligonucleotide
  Sense strand starting at position 3909 of SEQ ID NO: 1887974
cugcgcuuucuggaggaca

SEQ ID NO: 2501359 - RNA, 19 nt, Artificial Sequence
  Description of Artificial Sequence: Synthetic oligonucleotide
  Antisense strand to SEQ ID NO: 2501358
uguccuccagaaagcgcag

SEQ ID NO: 2501360 - RNA, 19 nt, Artificial Sequence
  Description of Artificial Sequence: Synthetic oligonucleotide
  Sense strand starting at position 3912 of SEQ ID NO: 1887974
cgcuuucuggaggacacau

SEQ ID NO: 2501361 - RNA, 19 nt, Artificial Sequence
  Description of Artificial Sequence: Synthetic oligonucleotide
  Antisense strand to SEQ ID NO: 2501360
auguguccuccagaaagcg

SEQ ID NO: 2501362 - RNA, 19 nt, Artificial Sequence
  Description of Artificial Sequence: Synthetic oligonucleotide
  Sense strand starting at position 3923 of SEQ ID NO: 1887974
ggacacauuuggcaaugau

SEQ ID NO: 2501363 - RNA, 19 nt, Artificial Sequence
  Description of Artificial Sequence: Synthetic oligonucleotide
  Antisense strand to SEQ ID NO: 2501362
aucauugccaaaugugucc

SEQ ID NO: 2501364 - RNA, 19 nt, Artificial Sequence
  Description of Artificial Sequence: Synthetic oligonucleotide
  Sense strand starting at position 77 of SEQ ID NO: 1887975
ucucuuccaugugcugaaa

SEQ ID NO: 2501365 - RNA, 19 nt, Artificial Sequence
  Description of Artificial Sequence: Synthetic oligonucleotide
  Antisense strand to SEQ ID NO: 2501364
uuucagcacauggaagaga

SEQ ID NO: 2501366 - RNA, 19 nt, Artificial Sequence
  Description of Artificial Sequence: Synthetic oligonucleotide
  Sense strand starting at position 79 of SEQ ID NO: 1887975
ucuuccaugugcugaaaug

SEQ ID NO: 2501367 - RNA, 19 nt, Artificial Sequence
  Description of Artificial Sequence: Synthetic oligonucleotide
  Antisense strand to SEQ ID NO: 2501366
cauuucagcacauggaaga

SEQ ID NO: 2501368 - RNA, 19 nt, Artificial Sequence
  Description of Artificial Sequence: Synthetic oligonucleotide
  Sense strand starting at position 246 of SEQ ID NO: 1887975
aagggugacacgcggaaau

SEQ ID NO: 2501369 - RNA, 19 nt, Artificial Sequence
  Description of Artificial Sequence: Synthetic oligonucleotide
  Antisense strand to SEQ ID NO: 2501368
auuuccgcgugucacccuu

SEQ ID NO: 2501370 - RNA, 19 nt, Artificial Sequence
  Description of Artificial Sequence: Synthetic oligonucleotide
  Sense strand starting at position 256 of SEQ ID NO: 1887975
cgcggaaaugaucaacugu

SEQ ID NO: 2501371 - RNA, 19 nt, Artificial Sequence
  Description of Artificial Sequence: Synthetic oligonucleotide
  Antisense strand to SEQ ID NO: 2501370
acaguugaucauuuccgcg

SEQ ID NO: 2501372 - RNA, 19 nt, Artificial Sequence
  Description of Artificial Sequence: Synthetic oligonucleotide
  Sense strand starting at position 354 of SEQ ID NO: 1887975
ggcugaagauagcagagau

SEQ ID NO: 2501373 - RNA, 19 nt, Artificial Sequence
  Description of Artificial Sequence: Synthetic oligonucleotide
  Antisense strand to SEQ ID NO: 2501372
aucucugcuaucuucagcc

SEQ ID NO: 2501374 - RNA, 19 nt, Artificial Sequence
  Description of Artificial Sequence: Synthetic oligonucleotide
  Sense strand starting at position 632 of SEQ ID NO: 1887975
ggucccaguucccuggaaa

SEQ ID NO: 2501375 - RNA, 19 nt, Artificial Sequence
  Description of Artificial Sequence: Synthetic oligonucleotide
  Antisense strand to SEQ ID NO: 2501374
uuuccagggaacugggacc

SEQ ID NO: 2501376 - RNA, 19 nt, Artificial Sequence
  Description of Artificial Sequence: Synthetic oligonucleotide
  Sense strand starting at position 633 of SEQ ID NO: 1887975
gucccaguucccuggaaac

SEQ ID NO: 2501377 - RNA, 19 nt, Artificial Sequence
  Description of Artificial Sequence: Synthetic oligonucleotide
  Antisense strand to SEQ ID NO: 2501376
guuuccagggaacugggac

SEQ ID NO: 2501378 - RNA, 19 nt, Artificial Sequence
  Description of Artificial Sequence: Synthetic oligonucleotide
  Sense strand starting at position 975 of SEQ ID NO: 1887975
cgggaaacuucccaggucu

SEQ ID NO: 2501379 - RNA, 19 nt, Artificial Sequence
  Description of Artificial Sequence: Synthetic oligonucleotide
  Antisense strand to SEQ ID NO: 2501378
agaccugggaaguuucccg

SEQ ID NO: 2501380 - RNA, 19 nt, Artificial Sequence
  Description of Artificial Sequence: Synthetic oligonucleotide
  Sense strand starting at position 977 of SEQ ID NO: 1887975
ggaaacuucccaggucucu

SEQ ID NO: 2501381 - RNA, 19 nt, Artificial Sequence
  Description of Artificial Sequence: Synthetic oligonucleotide
  Antisense strand to SEQ ID NO: 2501380
agagaccugggaaguuucc

SEQ ID NO: 2501382 - RNA, 19 nt, Artificial Sequence
  Description of Artificial Sequence: Synthetic oligonucleotide
  Sense strand starting at position 1155 of SEQ ID NO: 1887975
guuucugucuucucucuua

SEQ ID NO: 2501383 - RNA, 19 nt, Artificial Sequence
  Description of Artificial Sequence: Synthetic oligonucleotide
  Antisense strand to SEQ ID NO: 2501382
uaagagagaagacagaaac

SEQ ID NO: 2501384 - RNA, 19 nt, Artificial Sequence
  Description of Artificial Sequence: Synthetic oligonucleotide
  Sense strand starting at position 1958 of SEQ ID NO: 1887975
gcgcgaagucgaaauacug

SEQ ID NO: 2501385 - RNA, 19 nt, Artificial Sequence
  Description of Artificial Sequence: Synthetic oligonucleotide
  Antisense strand to SEQ ID NO: 2501384
caguauuucgacuucgcgc

SEQ ID NO: 2501386 - RNA, 19 nt, Artificial Sequence
  Description of Artificial Sequence: Synthetic oligonucleotide
  Sense strand starting at position 2112 of SEQ ID NO: 1887975
gcuuccuucucuuaggcua

SEQ ID NO: 2501387 - RNA, 19 nt, Artificial Sequence
  Description of Artificial Sequence: Synthetic oligonucleotide
  Antisense strand to SEQ ID NO: 2501386
uagccuaagagaaggaagc

SEQ ID NO: 2501388 - RNA, 19 nt, Artificial Sequence
  Description of Artificial Sequence: Synthetic oligonucleotide
  Sense strand starting at position 2212 of SEQ ID NO: 1887975
uguggaggucucugcucaa

SEQ ID NO: 2501389 - RNA, 19 nt, Artificial Sequence
  Description of Artificial Sequence: Synthetic oligonucleotide
  Antisense strand to SEQ ID NO: 2501388
uugagcagagaccuccaca

SEQ ID NO: 2501390 - RNA, 19 nt, Artificial Sequence
  Description of Artificial Sequence: Synthetic oligonucleotide
  Sense strand starting at position 2295 of SEQ ID NO: 1887975
uguggugguaucugaucaa

SEQ ID NO: 2501391 - RNA, 19 nt, Artificial Sequence
  Description of Artificial Sequence: Synthetic oligonucleotide
  Antisense strand to SEQ ID NO: 2501390
uugaucagauaccaccaca

SEQ ID NO: 2501392 - RNA, 19 nt, Artificial Sequence
  Description of Artificial Sequence: Synthetic oligonucleotide
  Sense strand starting at position 2298 of SEQ ID NO: 1887975
ggugguaucugaucaaguc

SEQ ID NO: 2501393 - RNA, 19 nt, Artificial Sequence
  Description of Artificial Sequence: Synthetic oligonucleotide
  Antisense strand to SEQ ID NO: 2501392
gacuugaucagauaccacc

SEQ ID NO: 2501394 - RNA, 19 nt, Artificial Sequence
  Description of Artificial Sequence: Synthetic oligonucleotide
  Sense strand starting at position 2375 of SEQ ID NO: 1887975
agaugugaucucugcucaa

SEQ ID NO: 2501395 - RNA, 19 nt, Artificial Sequence
  Description of Artificial Sequence: Synthetic oligonucleotide
  Antisense strand to SEQ ID NO: 2501394
uugagcagagaucacaucu

SEQ ID NO: 2501396 - RNA, 19 nt, Artificial Sequence
  Description of Artificial Sequence: Synthetic oligonucleotide
  Sense strand starting at position 2536 of SEQ ID NO: 1887975
cagauauggucucugcaca

SEQ ID NO: 2501397 - RNA, 19 nt, Artificial Sequence
  Description of Artificial Sequence: Synthetic oligonucleotide
  Antisense strand to SEQ ID NO: 2501396
ugugcagagaccauaucug

SEQ ID NO: 2501398 - RNA, 19 nt, Artificial Sequence
  Description of Artificial Sequence: Synthetic oligonucleotide
  Sense strand starting at position 2537 of SEQ ID NO: 1887975
agauauggucucugcacaa

SEQ ID NO: 2501399 - RNA, 19 nt, Artificial Sequence
  Description of Artificial Sequence: Synthetic oligonucleotide
  Antisense strand to SEQ ID NO: 2501398
uugugcagagaccauaucu

SEQ ID NO: 2501400 - RNA, 19 nt, Artificial Sequence
  Description of Artificial Sequence: Synthetic oligonucleotide
  Sense strand starting at position 2907 of SEQ ID NO: 1887975
gaucuugagcccuaggacu

SEQ ID NO: 2501401 - RNA, 19 nt, Artificial Sequence
  Description of Artificial Sequence: Synthetic oligonucleotide
  Antisense strand to SEQ ID NO: 2501400
aguccuagggcucaagauc

SEQ ID NO: 2501402 - RNA, 19 nt, Artificial Sequence
  Description of Artificial Sequence: Synthetic oligonucleotide
  Sense strand starting at position 2909 of SEQ ID NO: 1887975
ucuugagcccuaggacuuu

SEQ ID NO: 2501403 - RNA, 19 nt, Artificial Sequence
  Description of Artificial Sequence: Synthetic oligonucleotide
  Antisense strand to SEQ ID NO: 2501402
aaaguccuagggcucaaga

SEQ ID NO: 2501404 - RNA, 19 nt, Artificial Sequence
  Description of Artificial Sequence: Synthetic oligonucleotide
  Sense strand starting at position 2915 of SEQ ID NO: 1887975
gcccuaggacuuugagacu

SEQ ID NO: 2501405 - RNA, 19 nt, Artificial Sequence
  Description of Artificial Sequence: Synthetic oligonucleotide
  Antisense strand to SEQ ID NO: 2501404
agucucaaaguccuagggc

SEQ ID NO: 2501406 - RNA, 19 nt, Artificial Sequence
  Description of Artificial Sequence: Synthetic oligonucleotide
  Sense strand starting at position 3071 of SEQ ID NO: 1887975
gugaucugugacuguacca

SEQ ID NO: 2501407 - RNA, 19 nt, Artificial Sequence
  Description of Artificial Sequence: Synthetic oligonucleotide
  Antisense strand to SEQ ID NO: 2501406
ugguacagucacagaucac

SEQ ID NO: 2501408 - RNA, 19 nt, Artificial Sequence
  Description of Artificial Sequence: Synthetic oligonucleotide
  Sense strand starting at position 3580 of SEQ ID NO: 1887975
agacaaaucucuuaugcag

SEQ ID NO: 2501409 - RNA, 19 nt, Artificial Sequence
  Description of Artificial Sequence: Synthetic oligonucleotide
  Antisense strand to SEQ ID NO: 2501408
cugcauaagagauuugucu

SEQ ID NO: 2501410 - RNA, 19 nt, Artificial Sequence
  Description of Artificial Sequence: Synthetic oligonucleotide
  Sense strand starting at position 3604 of SEQ ID NO: 1887975
uuccuaauuuguguagcua

SEQ ID NO: 2501411 - RNA, 19 nt, Artificial Sequence
  Description of Artificial Sequence: Synthetic oligonucleotide
  Antisense strand to SEQ ID NO: 2501410
uagcuacacaaauuaggaa

SEQ ID NO: 2501412 - RNA, 19 nt, Artificial Sequence
  Description of Artificial Sequence: Synthetic oligonucleotide
  Sense strand starting at position 3721 of SEQ ID NO: 1887975
gggagagucacuugacagu

SEQ ID NO: 2501413 - RNA, 19 nt, Artificial Sequence
  Description of Artificial Sequence: Synthetic oligonucleotide
  Antisense strand to SEQ ID NO: 2501412
acugucaagugacucuccc

SEQ ID NO: 2501414 - RNA, 19 nt, Artificial Sequence
  Description of Artificial Sequence: Synthetic oligonucleotide
  Sense strand starting at position 3724 of SEQ ID NO: 1887975
agagucacuugacaguauu

SEQ ID NO: 2501415 - RNA, 19 nt, Artificial Sequence
  Description of Artificial Sequence: Synthetic oligonucleotide
  Antisense strand to SEQ ID NO: 2501414
aauacugucaagugacucu

SEQ ID NO: 2501416 - RNA, 19 nt, Artificial Sequence
  Description of Artificial Sequence: Synthetic oligonucleotide
  Sense strand starting at position 3727 of SEQ ID NO: 1887975
gucacuugacaguauugaa

SEQ ID NO: 2501417 - RNA, 19 nt, Artificial Sequence
  Description of Artificial Sequence: Synthetic oligonucleotide
  Antisense strand to SEQ ID NO: 2501416
uucaauacugucaagugac

SEQ ID NO: 2501418 - RNA, 19 nt, Artificial Sequence
  Description of Artificial Sequence: Synthetic oligonucleotide
  Sense strand starting at position 3981 of SEQ ID NO: 1887975
gaauuauuccaccgcggug

SEQ ID NO: 2501419 - RNA, 19 nt, Artificial Sequence
  Description of Artificial Sequence: Synthetic oligonucleotide
  Antisense strand to SEQ ID NO: 2501418
caccgcgguggaauaauuc

SEQ ID NO: 2501420 - RNA, 19 nt, Artificial Sequence
  Description of Artificial Sequence: Synthetic oligonucleotide
  Sense strand starting at position 18 of SEQ ID NO: 1887976
ugcugcaaaccaugaaaga

SEQ ID NO: 2501421 - RNA, 19 nt, Artificial Sequence
  Description of Artificial Sequence: Synthetic oligonucleotide
  Antisense strand to SEQ ID NO: 2501420
ucuuucaugguuugcagca

SEQ ID NO: 2501422 - RNA, 19 nt, Artificial Sequence
  Description of Artificial Sequence: Synthetic oligonucleotide
  Sense strand starting at position 19 of SEQ ID NO: 1887976
gcugcaaaccaugaaagau

SEQ ID NO: 2501423 - RNA, 19 nt, Artificial Sequence
  Description of Artificial Sequence: Synthetic oligonucleotide
  Antisense strand to SEQ ID NO: 2501422
aucuuucaugguuugcagc

SEQ ID NO: 2501424 - RNA, 19 nt, Artificial Sequence
  Description of Artificial Sequence: Synthetic oligonucleotide
  Sense strand starting at position 29 of SEQ ID NO: 1887976
augaaagauggcuggaucu

SEQ ID NO: 2501425 - RNA, 19 nt, Artificial Sequence
  Description of Artificial Sequence: Synthetic oligonucleotide
  Antisense strand to SEQ ID NO: 2501424
agauccagccaucuuucau

SEQ ID NO: 2501426 - RNA, 19 nt, Artificial Sequence
  Description of Artificial Sequence: Synthetic oligonucleotide
  Sense strand starting at position 234 of SEQ ID NO: 1887976
ugggacucauucuuacauu

SEQ ID NO: 2501427 - RNA, 19 nt, Artificial Sequence
  Description of Artificial Sequence: Synthetic oligonucleotide
  Antisense strand to SEQ ID NO: 2501426
aauguaagaaugaguccca

SEQ ID NO: 2501428 - RNA, 19 nt, Artificial Sequence
  Description of Artificial Sequence: Synthetic oligonucleotide
  Sense strand starting at position 302 of SEQ ID NO: 1887976
ggcucuuaaguuugaaaua

SEQ ID NO: 2501429 - RNA, 19 nt, Artificial Sequence
  Description of Artificial Sequence: Synthetic oligonucleotide
  Antisense strand to SEQ ID NO: 2501428
uauuucaaacuuaagagcc

SEQ ID NO: 2501430 - RNA, 19 nt, Artificial Sequence
  Description of Artificial Sequence: Synthetic oligonucleotide
  Sense strand starting at position 574 of SEQ ID NO: 1887976
ucuugaacuccagggucaa

SEQ ID NO: 2501431 - RNA, 19 nt, Artificial Sequence
  Description of Artificial Sequence: Synthetic oligonucleotide
  Antisense strand to SEQ ID NO: 2501430
uugacccuggaguucaaga

SEQ ID NO: 2501432 - RNA, 19 nt, Artificial Sequence
  Description of Artificial Sequence: Synthetic oligonucleotide
  Sense strand starting at position 733 of SEQ ID NO: 1887976
ugcaaaugaccucagacuu

SEQ ID NO: 2501433 - RNA, 19 nt, Artificial Sequence
  Description of Artificial Sequence: Synthetic oligonucleotide
  Antisense strand to SEQ ID NO: 2501432
aagucugaggucauuugca

SEQ ID NO: 2501434 - RNA, 19 nt, Artificial Sequence
  Description of Artificial Sequence: Synthetic oligonucleotide
  Sense strand starting at position 750 of SEQ ID NO: 1887976
uugccagucacggaaagaa

SEQ ID NO: 2501435 - RNA, 19 nt, Artificial Sequence
  Description of Artificial Sequence: Synthetic oligonucleotide
  Antisense strand to SEQ ID NO: 2501434
uucuuuccgugacuggcaa

SEQ ID NO: 2501436 - RNA, 19 nt, Artificial Sequence
  Description of Artificial Sequence: Synthetic oligonucleotide
  Sense strand starting at position 809 of SEQ ID NO: 1887976
uagggaugguccuuccaua

SEQ ID NO: 2501437 - RNA, 19 nt, Artificial Sequence
  Description of Artificial Sequence: Synthetic oligonucleotide
  Antisense strand to SEQ ID NO: 2501436
uauggaaggaccaucccua

SEQ ID NO: 2501438 - RNA, 19 nt, Artificial Sequence
  Description of Artificial Sequence: Synthetic oligonucleotide
  Sense strand starting at position 856 of SEQ ID NO: 1887976
caggaaagcugacuugauc

SEQ ID NO: 2501439 - RNA, 19 nt, Artificial Sequence
  Description of Artificial Sequence: Synthetic oligonucleotide
  Antisense strand to SEQ ID NO: 2501438
gaucaagucagcuuuccug

SEQ ID NO: 2501440 - RNA, 19 nt, Artificial Sequence
  Description of Artificial Sequence: Synthetic oligonucleotide
  Sense strand starting at position 934 of SEQ ID NO: 1887976
aguuguagauggguggaua

SEQ ID NO: 2501441 - RNA, 19 nt, Artificial Sequence
  Description of Artificial Sequence: Synthetic oligonucleotide
  Antisense strand to SEQ ID NO: 2501440
uauccacccaucuacaacu

SEQ ID NO: 2501442 - RNA, 19 nt, Artificial Sequence
  Description of Artificial Sequence: Synthetic oligonucleotide
  Sense strand starting at position 945 of SEQ ID NO: 1887976
gguggauauuaucuuccua

SEQ ID NO: 2501443 - RNA, 19 nt, Artificial Sequence
  Description of Artificial Sequence: Synthetic oligonucleotide
  Antisense strand to SEQ ID NO: 2501442
uaggaagauaauauccacc

SEQ ID NO: 2501444 - RNA, 19 nt, Artificial Sequence
  Description of Artificial Sequence: Synthetic oligonucleotide
  Sense strand starting at position 984 of SEQ ID NO: 1887976
gaggcuuagcuuggagaua

SEQ ID NO: 2501445 - RNA, 19 nt, Artificial Sequence
  Description of Artificial Sequence: Synthetic oligonucleotide
  Antisense strand to SEQ ID NO: 2501444
uaucuccaagcuaagccuc

SEQ ID NO: 2501446 - RNA, 19 nt, Artificial Sequence
  Description of Artificial Sequence: Synthetic oligonucleotide
  Sense strand starting at position 1018 of SEQ ID NO: 1887976
cggucauggccuuuagcga

SEQ ID NO: 2501447 - RNA, 19 nt, Artificial Sequence
  Description of Artificial Sequence: Synthetic oligonucleotide
  Antisense strand to SEQ ID NO: 2501446
ucgcuaaaggccaugaccg

SEQ ID NO: 2501448 - RNA, 19 nt, Artificial Sequence
  Description of Artificial Sequence: Synthetic oligonucleotide
  Sense strand starting at position 1025 of SEQ ID NO: 1887976
ggccuuuagcgacauacaa

SEQ ID NO: 2501449 - RNA, 19 nt, Artificial Sequence
  Description of Artificial Sequence: Synthetic oligonucleotide
  Antisense strand to SEQ ID NO: 2501448
uuguaugucgcuaaaggcc

SEQ ID NO: 2501450 - RNA, 19 nt, Artificial Sequence
  Description of Artificial Sequence: Synthetic oligonucleotide
  Sense strand starting at position 1273 of SEQ ID NO: 1887976
aggaaacuuucuuucuuag

SEQ ID NO: 2501451 - RNA, 19 nt, Artificial Sequence
  Description of Artificial Sequence: Synthetic oligonucleotide
  Antisense strand to SEQ ID NO: 2501450
cuaagaaagaaaguuuccu

SEQ ID NO: 2501452 - RNA, 19 nt, Artificial Sequence
  Description of Artificial Sequence: Synthetic oligonucleotide
  Sense strand starting at position 1315 of SEQ ID NO: 1887976
guuauagucagagggacag

SEQ ID NO: 2501453 - RNA, 19 nt, Artificial Sequence
  Description of Artificial Sequence: Synthetic oligonucleotide
  Antisense strand to SEQ ID NO: 2501452
cugucccucugacuauaac

SEQ ID NO: 2501454 - RNA, 19 nt, Artificial Sequence
  Description of Artificial Sequence: Synthetic oligonucleotide
  Sense strand starting at position 2017 of SEQ ID NO: 1887976
gcgcauucugggaguugua

SEQ ID NO: 2501455 - RNA, 19 nt, Artificial Sequence
  Description of Artificial Sequence: Synthetic oligonucleotide
  Antisense strand to SEQ ID NO: 2501454
uacaacucccagaaugcgc

SEQ ID NO: 2501456 - RNA, 19 nt, Artificial Sequence
  Description of Artificial Sequence: Synthetic oligonucleotide
  Sense strand starting at position 2293 of SEQ ID NO: 1887976
ggcggugaugcucagauuu

SEQ ID NO: 2501457 - RNA, 19 nt, Artificial Sequence
  Description of Artificial Sequence: Synthetic oligonucleotide
  Antisense strand to SEQ ID NO: 2501456
aaaucugagcaucaccgcc

SEQ ID NO: 2501458 - RNA, 19 nt, Artificial Sequence
  Description of Artificial Sequence: Synthetic oligonucleotide
  Sense strand starting at position 2363 of SEQ ID NO: 1887976
ggagaagaaugguuugcuu

SEQ ID NO: 2501459 - RNA, 19 nt, Artificial Sequence
  Description of Artificial Sequence: Synthetic oligonucleotide
  Antisense strand to SEQ ID NO: 2501458
aagcaaaccauucuucucc

SEQ ID NO: 2501460 - RNA, 19 nt, Artificial Sequence
  Description of Artificial Sequence: Synthetic oligonucleotide
  Sense strand starting at position 2365 of SEQ ID NO: 1887976
agaagaaugguuugcuuga

SEQ ID NO: 2501461 - RNA, 19 nt, Artificial Sequence
  Description of Artificial Sequence: Synthetic oligonucleotide
  Antisense strand to SEQ ID NO: 2501460
ucaagcaaaccauucuucu

SEQ ID NO: 2501462 - RNA, 19 nt, Artificial Sequence
  Description of Artificial Sequence: Synthetic oligonucleotide
  Sense strand starting at position 2366 of SEQ ID NO: 1887976
gaagaaugguuugcuugaa

SEQ ID NO: 2501463 - RNA, 19 nt, Artificial Sequence
  Description of Artificial Sequence: Synthetic oligonucleotide
  Antisense strand to SEQ ID NO: 2501462
uucaagcaaaccauucuuc

SEQ ID NO: 2501464 - RNA, 19 nt, Artificial Sequence
  Description of Artificial Sequence: Synthetic oligonucleotide
  Sense strand starting at position 2367 of SEQ ID NO: 1887976
aagaaugguuugcuugaag

SEQ ID NO: 2501465 - RNA, 19 nt, Artificial Sequence
  Description of Artificial Sequence: Synthetic oligonucleotide
  Antisense strand to SEQ ID NO: 2501464
cuucaagcaaaccauucuu

SEQ ID NO: 2501466 - RNA, 19 nt, Artificial Sequence
  Description of Artificial Sequence: Synthetic oligonucleotide
  Sense strand starting at position 2370 of SEQ ID NO: 1887976
aaugguuugcuugaagaac

SEQ ID NO: 2501467 - RNA, 19 nt, Artificial Sequence
  Description of Artificial Sequence: Synthetic oligonucleotide
  Antisense strand to SEQ ID NO: 2501466
guucuucaagcaaaccauu

SEQ ID NO: 2501468 - RNA, 19 nt, Artificial Sequence
  Description of Artificial Sequence: Synthetic oligonucleotide
  Sense strand starting at position 2399 of SEQ ID NO: 1887976
ccagcauagcugggaauaa

SEQ ID NO: 2501469 - RNA, 19 nt, Artificial Sequence
  Description of Artificial Sequence: Synthetic oligonucleotide
  Antisense strand to SEQ ID NO: 2501468
uuauucccagcuaugcugg

SEQ ID NO: 2501470 - RNA, 19 nt, Artificial Sequence
  Description of Artificial Sequence: Synthetic oligonucleotide
  Sense strand starting at position 2586 of SEQ ID NO: 1887976
ugagcuuugaaagguaaga

SEQ ID NO: 2501471 - RNA, 19 nt, Artificial Sequence
  Description of Artificial Sequence: Synthetic oligonucleotide
  Antisense strand to SEQ ID NO: 2501470
ucuuaccuuucaaagcuca

SEQ ID NO: 2501472 - RNA, 19 nt, Artificial Sequence
  Description of Artificial Sequence: Synthetic oligonucleotide
  Sense strand starting at position 2829 of SEQ ID NO: 1887976
gcagaugucagugcugcua

SEQ ID NO: 2501473 - RNA, 19 nt, Artificial Sequence
  Description of Artificial Sequence: Synthetic oligonucleotide
  Antisense strand to SEQ ID NO: 2501472
uagcagcacugacaucugc

SEQ ID NO: 2501474 - RNA, 19 nt, Artificial Sequence
  Description of Artificial Sequence: Synthetic oligonucleotide
  Sense strand starting at position 2990 of SEQ ID NO: 1887976
agccauuauuauguacaga

SEQ ID NO: 2501475 - RNA, 19 nt, Artificial Sequence
  Description of Artificial Sequence: Synthetic oligonucleotide
  Antisense strand to SEQ ID NO: 2501474
ucuguacauaauaauggcu

SEQ ID NO: 2501476 - RNA, 19 nt, Artificial Sequence
  Description of Artificial Sequence: Synthetic oligonucleotide
  Sense strand starting at position 3090 of SEQ ID NO: 1887976
uuggaaauaaguuguugaa

SEQ ID NO: 2501477 - RNA, 19 nt, Artificial Sequence
  Description of Artificial Sequence: Synthetic oligonucleotide
  Antisense strand to SEQ ID NO: 2501476
uucaacaacuuauuuccaa

SEQ ID NO: 2501478 - RNA, 19 nt, Artificial Sequence
  Description of Artificial Sequence: Synthetic oligonucleotide
  Sense strand starting at position 3092 of SEQ ID NO: 1887976
ggaaauaaguuguugaacu

SEQ ID NO: 2501479 - RNA, 19 nt, Artificial Sequence
  Description of Artificial Sequence: Synthetic oligonucleotide
  Antisense strand to SEQ ID NO: 2501478
aguucaacaacuuauuucc

SEQ ID NO: 2501480 - RNA, 19 nt, Artificial Sequence
  Description of Artificial Sequence: Synthetic oligonucleotide
  Sense strand starting at position 3125 of SEQ ID NO: 1887976
aucagcuguggugagaaua

SEQ ID NO: 2501481 - RNA, 19 nt, Artificial Sequence
  Description of Artificial Sequence: Synthetic oligonucleotide
  Antisense strand to SEQ ID NO: 2501480
uauucucaccacagcugau

SEQ ID NO: 2501482 - RNA, 19 nt, Artificial Sequence
  Description of Artificial Sequence: Synthetic oligonucleotide
  Sense strand starting at position 3215 of SEQ ID NO: 1887976
ggauaauaguaugcaagca

SEQ ID NO: 2501483 - RNA, 19 nt, Artificial Sequence
  Description of Artificial Sequence: Synthetic oligonucleotide
  Antisense strand to SEQ ID NO: 2501482
ugcuugcauacuauuaucc

SEQ ID NO: 2501484 - RNA, 19 nt, Artificial Sequence
  Description of Artificial Sequence: Synthetic oligonucleotide
  Sense strand starting at position 3325 of SEQ ID NO: 1887976
guucgcugagaguauagaa

SEQ ID NO: 2501485 - RNA, 19 nt, Artificial Sequence
  Description of Artificial Sequence: Synthetic oligonucleotide
  Antisense strand to SEQ ID NO: 2501484
uucuauacucucagcgaac

SEQ ID NO: 2501486 - RNA, 19 nt, Artificial Sequence
  Description of Artificial Sequence: Synthetic oligonucleotide
  Sense strand starting at position 3373 of SEQ ID NO: 1887976
gugaucaggaagugacauu

SEQ ID NO: 2501487 - RNA, 19 nt, Artificial Sequence
  Description of Artificial Sequence: Synthetic oligonucleotide
  Antisense strand to SEQ ID NO: 2501486
aaugucacuuccugaucac

SEQ ID NO: 2501488 - RNA, 19 nt, Artificial Sequence
  Description of Artificial Sequence: Synthetic oligonucleotide
  Sense strand starting at position 3490 of SEQ ID NO: 1887976
uucuuaauggaaugcaaga

SEQ ID NO: 2501489 - RNA, 19 nt, Artificial Sequence
  Description of Artificial Sequence: Synthetic oligonucleotide
  Antisense strand to SEQ ID NO: 2501488
ucuugcauuccauuaagaa

SEQ ID NO: 2501490 - RNA, 19 nt, Artificial Sequence
  Description of Artificial Sequence: Synthetic oligonucleotide
  Sense strand starting at position 3501 of SEQ ID NO: 1887976
augcaagauaguggaguau

SEQ ID NO: 2501491 - RNA, 19 nt, Artificial Sequence
  Description of Artificial Sequence: Synthetic oligonucleotide
  Antisense strand to SEQ ID NO: 2501490
auacuccacuaucuugcau

SEQ ID NO: 2501492 - RNA, 19 nt, Artificial Sequence
  Description of Artificial Sequence: Synthetic oligonucleotide
  Sense strand starting at position 3525 of SEQ ID NO: 1887976
aaucaauggugguuucuau

SEQ ID NO: 2501493 - RNA, 19 nt, Artificial Sequence
  Description of Artificial Sequence: Synthetic oligonucleotide
  Antisense strand to SEQ ID NO: 2501492
auagaaaccaccauugauu

SEQ ID NO: 2501494 - RNA, 19 nt, Artificial Sequence
  Description of Artificial Sequence: Synthetic oligonucleotide
  Sense strand starting at position 3554 of SEQ ID NO: 1887976
guauuaaucugauuagaga

SEQ ID NO: 2501495 - RNA, 19 nt, Artificial Sequence
  Description of Artificial Sequence: Synthetic oligonucleotide
  Antisense strand to SEQ ID NO: 2501494
ucucuaaucagauuaauac

SEQ ID NO: 2501496 - RNA, 19 nt, Artificial Sequence
  Description of Artificial Sequence: Synthetic oligonucleotide
  Sense strand starting at position 3590 of SEQ ID NO: 1887976
guuuguggagcucaaagau

SEQ ID NO: 2501497 - RNA, 19 nt, Artificial Sequence
  Description of Artificial Sequence: Synthetic oligonucleotide
  Antisense strand to SEQ ID NO: 2501496
aucuuugagcuccacaaac

SEQ ID NO: 2501498 - RNA, 19 nt, Artificial Sequence
  Description of Artificial Sequence: Synthetic oligonucleotide
  Sense strand starting at position 3805 of SEQ ID NO: 1887976
gggauacggcauugaagaa

SEQ ID NO: 2501499 - RNA, 19 nt, Artificial Sequence
  Description of Artificial Sequence: Synthetic oligonucleotide
  Antisense strand to SEQ ID NO: 2501498
uucuucaaugccguauccc

SEQ ID NO: 2501500 - RNA, 19 nt, Artificial Sequence
  Description of Artificial Sequence: Synthetic oligonucleotide
  Sense strand starting at position 729 of SEQ ID NO: 1887977
gaggcaucccugugauauu

SEQ ID NO: 2501501 - RNA, 19 nt, Artificial Sequence
  Description of Artificial Sequence: Synthetic oligonucleotide
  Antisense strand to SEQ ID NO: 2501500
aauaucacagggaugccuc

SEQ ID NO: 2501502 - RNA, 19 nt, Artificial Sequence
  Description of Artificial Sequence: Synthetic oligonucleotide
  Sense strand starting at position 750 of SEQ ID NO: 1887977
ggguaauaucacggcacau

SEQ ID NO: 2501503 - RNA, 19 nt, Artificial Sequence
  Description of Artificial Sequence: Synthetic oligonucleotide
  Antisense strand to SEQ ID NO: 2501502
augugccgugauauuaccc

SEQ ID NO: 2501504 - RNA, 19 nt, Artificial Sequence
  Description of Artificial Sequence: Synthetic oligonucleotide
  Sense strand starting at position 752 of SEQ ID NO: 1887977
guaauaucacggcacauca

SEQ ID NO: 2501505 - RNA, 19 nt, Artificial Sequence
  Description of Artificial Sequence: Synthetic oligonucleotide
  Antisense strand to SEQ ID NO: 2501504
ugaugugccgugauauuac

SEQ ID NO: 2501506 - RNA, 19 nt, Artificial Sequence
  Description of Artificial Sequence: Synthetic oligonucleotide
  Sense strand starting at position 781 of SEQ ID NO: 1887977
accaauuaguacccggaga

SEQ ID NO: 2501507 - RNA, 19 nt, Artificial Sequence
  Description of Artificial Sequence: Synthetic oligonucleotide
  Antisense strand to SEQ ID NO: 2501506
ucuccggguacuaauuggu

SEQ ID NO: 2501508 - RNA, 19 nt, Artificial Sequence
  Description of Artificial Sequence: Synthetic oligonucleotide
  Sense strand starting at position 782 of SEQ ID NO: 1887977
ccaauuaguacccggagaa

SEQ ID NO: 2501509 - RNA, 19 nt, Artificial Sequence
  Description of Artificial Sequence: Synthetic oligonucleotide
  Antisense strand to SEQ ID NO: 2501508
uucuccggguacuaauugg

SEQ ID NO: 2501510 - RNA, 19 nt, Artificial Sequence
  Description of Artificial Sequence: Synthetic oligonucleotide
  Sense strand starting at position 783 of SEQ ID NO: 1887977
caauuaguacccggagaau

SEQ ID NO: 2501511 - RNA, 19 nt, Artificial Sequence
  Description of Artificial Sequence: Synthetic oligonucleotide
  Antisense strand to SEQ ID NO: 2501510
auucuccggguacuaauug

SEQ ID NO: 2501512 - RNA, 19 nt, Artificial Sequence
  Description of Artificial Sequence: Synthetic oligonucleotide
  Sense strand starting at position 786 of SEQ ID NO: 1887977
uuaguacccggagaaucua

SEQ ID NO: 2501513 - RNA, 19 nt, Artificial Sequence
  Description of Artificial Sequence: Synthetic oligonucleotide
  Antisense strand to SEQ ID NO: 2501512
uagauucuccggguacuaa

SEQ ID NO: 2501514 - RNA, 19 nt, Artificial Sequence
  Description of Artificial Sequence: Synthetic oligonucleotide
  Sense strand starting at position 794 of SEQ ID NO: 1887977
cggagaaucuaguccugca

SEQ ID NO: 2501515 - RNA, 19 nt, Artificial Sequence
  Description of Artificial Sequence: Synthetic oligonucleotide
  Antisense strand to SEQ ID NO: 2501514
ugcaggacuagauucuccg

SEQ ID NO: 2501516 - RNA, 19 nt, Artificial Sequence
  Description of Artificial Sequence: Synthetic oligonucleotide
  Sense strand starting at position 2015 of SEQ ID NO: 1887977
gauguugugcaaggcauaa

SEQ ID NO: 2501517 - RNA, 19 nt, Artificial Sequence
  Description of Artificial Sequence: Synthetic oligonucleotide
  Antisense strand to SEQ ID NO: 2501516
uuaugccuugcacaacauc

SEQ ID NO: 2501518 - RNA, 19 nt, Artificial Sequence
  Description of Artificial Sequence: Synthetic oligonucleotide
  Sense strand starting at position 2017 of SEQ ID NO: 1887977
uguugugcaaggcauaaau

SEQ ID NO: 2501519 - RNA, 19 nt, Artificial Sequence
  Description of Artificial Sequence: Synthetic oligonucleotide
  Antisense strand to SEQ ID NO: 2501518
auuuaugccuugcacaaca

SEQ ID NO: 2501520 - RNA, 19 nt, Artificial Sequence
  Description of Artificial Sequence: Synthetic oligonucleotide
  Sense strand starting at position 2019 of SEQ ID NO: 1887977
uugugcaaggcauaaauca

SEQ ID NO: 2501521 - RNA, 19 nt, Artificial Sequence
  Description of Artificial Sequence: Synthetic oligonucleotide
  Antisense strand to SEQ ID NO: 2501520
ugauuuaugccuugcacaa

SEQ ID NO: 2501522 - RNA, 19 nt, Artificial Sequence
  Description of Artificial Sequence: Synthetic oligonucleotide
  Sense strand starting at position 2027 of SEQ ID NO: 1887977
ggcauaaaucaugguggaa

SEQ ID NO: 2501523 - RNA, 19 nt, Artificial Sequence
  Description of Artificial Sequence: Synthetic oligonucleotide
  Antisense strand to SEQ ID NO: 2501522
uuccaccaugauuuaugcc

SEQ ID NO: 2501524 - RNA, 19 nt, Artificial Sequence
  Description of Artificial Sequence: Synthetic oligonucleotide
  Sense strand starting at position 2086 of SEQ ID NO: 1887977
guaugaaguccaugaugug

SEQ ID NO: 2501525 - RNA, 19 nt, Artificial Sequence
  Description of Artificial Sequence: Synthetic oligonucleotide
  Antisense strand to SEQ ID NO: 2501524
cacaucauggacuucauac

SEQ ID NO: 2501526 - RNA, 19 nt, Artificial Sequence
  Description of Artificial Sequence: Synthetic oligonucleotide
  Sense strand starting at position 2138 of SEQ ID NO: 1887977
auucguuacauguguaaca

SEQ ID NO: 2501527 - RNA, 19 nt, Artificial Sequence
  Description of Artificial Sequence: Synthetic oligonucleotide
  Antisense strand to SEQ ID NO: 2501526
uguuacacauguaacgaau

SEQ ID NO: 2501528 - RNA, 19 nt, Artificial Sequence
  Description of Artificial Sequence: Synthetic oligonucleotide
  Sense strand starting at position 2140 of SEQ ID NO: 1887977
ucguuacauguguaacauu

SEQ ID NO: 2501529 - RNA, 19 nt, Artificial Sequence
  Description of Artificial Sequence: Synthetic oligonucleotide
  Antisense strand to SEQ ID NO: 2501528
aauguuacacauguaacga

SEQ ID NO: 2501530 - RNA, 19 nt, Artificial Sequence
  Description of Artificial Sequence: Synthetic oligonucleotide
  Sense strand starting at position 2171 of SEQ ID NO: 1887977
gaacucuuacggcaugaaa

SEQ ID NO: 2501531 - RNA, 19 nt, Artificial Sequence
  Description of Artificial Sequence: Synthetic oligonucleotide
  Antisense strand to SEQ ID NO: 2501530
uuucaugccguaagaguuc

SEQ ID NO: 2501532 - RNA, 19 nt, Artificial Sequence
  Description of Artificial Sequence: Synthetic oligonucleotide
  Sense strand starting at position 2180 of SEQ ID NO: 1887977
cggcaugaaaggcaugaau

SEQ ID NO: 2501533 - RNA, 19 nt, Artificial Sequence
  Description of Artificial Sequence: Synthetic oligonucleotide
  Antisense strand to SEQ ID NO: 2501532
auucaugccuuucaugccg

SEQ ID NO: 2501534 - RNA, 19 nt, Artificial Sequence
  Description of Artificial Sequence: Synthetic oligonucleotide
  Sense strand starting at position 2202 of SEQ ID NO: 1887977
cccagaaagccuugucaca

SEQ ID NO: 2501535 - RNA, 19 nt, Artificial Sequence
  Description of Artificial Sequence: Synthetic oligonucleotide
  Antisense strand to SEQ ID NO: 2501534
ugugacaaggcuuucuggg

SEQ ID NO: 2501536 - RNA, 19 nt, Artificial Sequence
  Description of Artificial Sequence: Synthetic oligonucleotide
  Sense strand starting at position 2273 of SEQ ID NO: 1887977
aguugugauccucaacucu

SEQ ID NO: 2501537 - RNA, 19 nt, Artificial Sequence
  Description of Artificial Sequence: Synthetic oligonucleotide
  Antisense strand to SEQ ID NO: 2501536
agaguugaggaucacaacu

SEQ ID NO: 2501538 - RNA, 19 nt, Artificial Sequence
  Description of Artificial Sequence: Synthetic oligonucleotide
  Sense strand starting at position 2314 of SEQ ID NO: 1887977
uuuguaauguuucuguaca

SEQ ID NO: 2501539 - RNA, 19 nt, Artificial Sequence
  Description of Artificial Sequence: Synthetic oligonucleotide
  Antisense strand to SEQ ID NO: 2501538
uguacagaaacauuacaaa

SEQ ID NO: 2501540 - RNA, 19 nt, Artificial Sequence
  Description of Artificial Sequence: Synthetic oligonucleotide
  Sense strand starting at position 2497 of SEQ ID NO: 1887977
uccugaauggguuacguga

SEQ ID NO: 2501541 - RNA, 19 nt, Artificial Sequence
  Description of Artificial Sequence: Synthetic oligonucleotide
  Antisense strand to SEQ ID NO: 2501540
ucacguaacccauucagga

SEQ ID NO: 2501542 - RNA, 19 nt, Artificial Sequence
  Description of Artificial Sequence: Synthetic oligonucleotide
  Sense strand starting at position 2511 of SEQ ID NO: 1887977
cgugaugucuccuuaaaca

SEQ ID NO: 2501543 - RNA, 19 nt, Artificial Sequence
  Description of Artificial Sequence: Synthetic oligonucleotide
  Antisense strand to SEQ ID NO: 2501542
uguuuaaggagacaucacg

SEQ ID NO: 2501544 - RNA, 19 nt, Artificial Sequence
  Description of Artificial Sequence: Synthetic oligonucleotide
  Sense strand starting at position 2521 of SEQ ID NO: 1887977
ccuuaaacaugagcuauga

SEQ ID NO: 2501545 - RNA, 19 nt, Artificial Sequence
  Description of Artificial Sequence: Synthetic oligonucleotide
  Antisense strand to SEQ ID NO: 2501544
ucauagcucauguuuaagg

SEQ ID NO: 2501546 - RNA, 19 nt, Artificial Sequence
  Description of Artificial Sequence: Synthetic oligonucleotide
  Sense strand starting at position 2591 of SEQ ID NO: 1887977
acuucuuguauuuguguga

SEQ ID NO: 2501547 - RNA, 19 nt, Artificial Sequence
  Description of Artificial Sequence: Synthetic oligonucleotide
  Antisense strand to SEQ ID NO: 2501546
ucacacaaauacaagaagu

SEQ ID NO: 2501548 - RNA, 19 nt, Artificial Sequence
  Description of Artificial Sequence: Synthetic oligonucleotide
  Sense strand starting at position 2592 of SEQ ID NO: 1887977
cuucuuguauuugugugaa

SEQ ID NO: 2501549 - RNA, 19 nt, Artificial Sequence
  Description of Artificial Sequence: Synthetic oligonucleotide
  Antisense strand to SEQ ID NO: 2501548
uucacacaaauacaagaag

SEQ ID NO: 2501550 - RNA, 19 nt, Artificial Sequence
  Description of Artificial Sequence: Synthetic oligonucleotide
  Sense strand starting at position 2594 of SEQ ID NO: 1887977
ucuuguauuugugugaaua

SEQ ID NO: 2501551 - RNA, 19 nt, Artificial Sequence
  Description of Artificial Sequence: Synthetic oligonucleotide
  Antisense strand to SEQ ID NO: 2501550
uauucacacaaauacaaga

SEQ ID NO: 2501552 - RNA, 19 nt, Artificial Sequence
  Description of Artificial Sequence: Synthetic oligonucleotide
  Sense strand starting at position 2667 of SEQ ID NO: 1887977
uacaaauuauuugggaugu

SEQ ID NO: 2501553 - RNA, 19 nt, Artificial Sequence
  Description of Artificial Sequence: Synthetic oligonucleotide
  Antisense strand to SEQ ID NO: 2501552
acaucccaaauaauuugua

SEQ ID NO: 2501554 - RNA, 19 nt, Artificial Sequence
  Description of Artificial Sequence: Synthetic oligonucleotide
  Sense strand starting at position 2816 of SEQ ID NO: 1887977
ccagcaugucuuugaucac

SEQ ID NO: 2501555 - RNA, 19 nt, Artificial Sequence
  Description of Artificial Sequence: Synthetic oligonucleotide
  Antisense strand to SEQ ID NO: 2501554
gugaucaaagacaugcugg

SEQ ID NO: 2501556 - RNA, 19 nt, Artificial Sequence
  Description of Artificial Sequence: Synthetic oligonucleotide
  Sense strand starting at position 2849 of SEQ ID NO: 1887977
ccugucaacucuuugguuu

SEQ ID NO: 2501557 - RNA, 19 nt, Artificial Sequence
  Description of Artificial Sequence: Synthetic oligonucleotide
  Antisense strand to SEQ ID NO: 2501556
aaaccaaagaguugacagg

SEQ ID NO: 2501558 - RNA, 19 nt, Artificial Sequence
  Description of Artificial Sequence: Synthetic oligonucleotide
  Sense strand starting at position 3261 of SEQ ID NO: 1887977
agugauaggugccuauagu

SEQ ID NO: 2501559 - RNA, 19 nt, Artificial Sequence
  Description of Artificial Sequence: Synthetic oligonucleotide
  Antisense strand to SEQ ID NO: 2501558
acuauaggcaccuaucacu

SEQ ID NO: 2501560 - RNA, 19 nt, Artificial Sequence
  Description of Artificial Sequence: Synthetic oligonucleotide
  Sense strand starting at position 3262 of SEQ ID NO: 1887977
gugauaggugccuauaguc

SEQ ID NO: 2501561 - RNA, 19 nt, Artificial Sequence
  Description of Artificial Sequence: Synthetic oligonucleotide
  Antisense strand to SEQ ID NO: 2501560
gacuauaggcaccuaucac

SEQ ID NO: 2501562 - RNA, 19 nt, Artificial Sequence
  Description of Artificial Sequence: Synthetic oligonucleotide
  Sense strand starting at position 3726 of SEQ ID NO: 1887977
ggcagugagccugaaugau

SEQ ID NO: 2501563 - RNA, 19 nt, Artificial Sequence
  Description of Artificial Sequence: Synthetic oligonucleotide
  Antisense strand to SEQ ID NO: 2501562
aucauucaggcucacugcc

SEQ ID NO: 2501564 - RNA, 19 nt, Artificial Sequence
  Description of Artificial Sequence: Synthetic oligonucleotide
  Sense strand starting at position 3739 of SEQ ID NO: 1887977
aaugauguccuccguagga

SEQ ID NO: 2501565 - RNA, 19 nt, Artificial Sequence
  Description of Artificial Sequence: Synthetic oligonucleotide
  Antisense strand to SEQ ID NO: 2501564
uccuacggaggacaucauu

SEQ ID NO: 2501566 - RNA, 19 nt, Artificial Sequence
  Description of Artificial Sequence: Synthetic oligonucleotide
  Sense strand starting at position 3772 of SEQ ID NO: 1887977
agugacugcugcuuagaga

SEQ ID NO: 2501567 - RNA, 19 nt, Artificial Sequence
  Description of Artificial Sequence: Synthetic oligonucleotide
  Antisense strand to SEQ ID NO: 2501566
ucucuaagcagcagucacu

SEQ ID NO: 2501568 - RNA, 19 nt, Artificial Sequence
  Description of Artificial Sequence: Synthetic oligonucleotide
  Sense strand starting at position 3773 of SEQ ID NO: 1887977
gugacugcugcuuagagaa

SEQ ID NO: 2501569 - RNA, 19 nt, Artificial Sequence
  Description of Artificial Sequence: Synthetic oligonucleotide
  Antisense strand to SEQ ID NO: 2501568
uucucuaagcagcagucac

SEQ ID NO: 2501570 - RNA, 19 nt, Artificial Sequence
  Description of Artificial Sequence: Synthetic oligonucleotide
  Sense strand starting at position 3792 of SEQ ID NO: 1887977
gaugaucauuaguuuaugu

SEQ ID NO: 2501571 - RNA, 19 nt, Artificial Sequence
  Description of Artificial Sequence: Synthetic oligonucleotide
  Antisense strand to SEQ ID NO: 2501570
acauaaacuaaugaucauc

SEQ ID NO: 2501572 - RNA, 19 nt, Artificial Sequence
  Description of Artificial Sequence: Synthetic oligonucleotide
  Sense strand starting at position 3794 of SEQ ID NO: 1887977
ugaucauuaguuuauguga

SEQ ID NO: 2501573 - RNA, 19 nt, Artificial Sequence
  Description of Artificial Sequence: Synthetic oligonucleotide
  Antisense strand to SEQ ID NO: 2501572
ucacauaaacuaaugauca

SEQ ID NO: 2501574 - RNA, 19 nt, Artificial Sequence
  Description of Artificial Sequence: Synthetic oligonucleotide
  Sense strand starting at position 3797 of SEQ ID NO: 1887977
ucauuaguuuaugugauga

SEQ ID NO: 2501575 - RNA, 19 nt, Artificial Sequence
  Description of Artificial Sequence: Synthetic oligonucleotide
  Antisense strand to SEQ ID NO: 2501574
ucaucacauaaacuaauga

SEQ ID NO: 2501576 - RNA, 19 nt, Artificial Sequence
  Description of Artificial Sequence: Synthetic oligonucleotide
  Sense strand starting at position 3802 of SEQ ID NO: 1887977
aguuuaugugaugaacacu

SEQ ID NO: 2501577 - RNA, 19 nt, Artificial Sequence
  Description of Artificial Sequence: Synthetic oligonucleotide
  Antisense strand to SEQ ID NO: 2501576
aguguucaucacauaaacu

SEQ ID NO: 2501578 - RNA, 19 nt, Artificial Sequence
  Description of Artificial Sequence: Synthetic oligonucleotide
  Sense strand starting at position 3808 of SEQ ID NO: 1887977
ugugaugaacacugucaca

SEQ ID NO: 2501579 - RNA, 19 nt, Artificial Sequence
  Description of Artificial Sequence: Synthetic oligonucleotide
  Antisense strand to SEQ ID NO: 2501578
ugugacaguguucaucaca

SEQ ID NO: 2501580 - RNA, 19 nt, Artificial Sequence
  Description of Artificial Sequence: Synthetic oligonucleotide
  Sense strand starting at position 109 of SEQ ID NO: 1887978
guugucuccagugaauauu

SEQ ID NO: 2501581 - RNA, 19 nt, Artificial Sequence
  Description of Artificial Sequence: Synthetic oligonucleotide
  Antisense strand to SEQ ID NO: 2501580
aauauucacuggagacaac

SEQ ID NO: 2501582 - RNA, 19 nt, Artificial Sequence
  Description of Artificial Sequence: Synthetic oligonucleotide
  Sense strand starting at position 112 of SEQ ID NO: 1887978
gucuccagugaauauuacu

SEQ ID NO: 2501583 - RNA, 19 nt, Artificial Sequence
  Description of Artificial Sequence: Synthetic oligonucleotide
  Antisense strand to SEQ ID NO: 2501582
aguaauauucacuggagac

SEQ ID NO: 2501584 - RNA, 19 nt, Artificial Sequence
  Description of Artificial Sequence: Synthetic oligonucleotide
  Sense strand starting at position 375 of SEQ ID NO: 1887978
cuguuaggacuuugguaag

SEQ ID NO: 2501585 - RNA, 19 nt, Artificial Sequence
  Description of Artificial Sequence: Synthetic oligonucleotide
  Antisense strand to SEQ ID NO: 2501584
cuuaccaaaguccuaacag

SEQ ID NO: 2501586 - RNA, 19 nt, Artificial Sequence
  Description of Artificial Sequence: Synthetic oligonucleotide
  Sense strand starting at position 509 of SEQ ID NO: 1887978
gaaacagaucuaugguuuc

SEQ ID NO: 2501587 - RNA, 19 nt, Artificial Sequence
  Description of Artificial Sequence: Synthetic oligonucleotide
  Antisense strand to SEQ ID NO: 2501586
gaaaccauagaucuguuuc

SEQ ID NO: 2501588 - RNA, 19 nt, Artificial Sequence
  Description of Artificial Sequence: Synthetic oligonucleotide
  Sense strand starting at position 556 of SEQ ID NO: 1887978
gcacuugcgccuccugaua

SEQ ID NO: 2501589 - RNA, 19 nt, Artificial Sequence
  Description of Artificial Sequence: Synthetic oligonucleotide
  Antisense strand to SEQ ID NO: 2501588
uaucaggaggcgcaagugc

SEQ ID NO: 2501590 - RNA, 19 nt, Artificial Sequence
  Description of Artificial Sequence: Synthetic oligonucleotide
  Sense strand starting at position 567 of SEQ ID NO: 1887978
uccugauaccagugccaga

SEQ ID NO: 2501591 - RNA, 19 nt, Artificial Sequence
  Description of Artificial Sequence: Synthetic oligonucleotide
  Antisense strand to SEQ ID NO: 2501590
ucuggcacugguaucagga

SEQ ID NO: 2501592 - RNA, 19 nt, Artificial Sequence
  Description of Artificial Sequence: Synthetic oligonucleotide
  Sense strand starting at position 597 of SEQ ID NO: 1887978
acaaguuuccacuggcuga

SEQ ID NO: 2501593 - RNA, 19 nt, Artificial Sequence
  Description of Artificial Sequence: Synthetic oligonucleotide
  Antisense strand to SEQ ID NO: 2501592
ucagccaguggaaacuugu

SEQ ID NO: 2501594 - RNA, 19 nt, Artificial Sequence
  Description of Artificial Sequence: Synthetic oligonucleotide
  Sense strand starting at position 601 of SEQ ID NO: 1887978
guuuccacuggcugacaaa

SEQ ID NO: 2501595 - RNA, 19 nt, Artificial Sequence
  Description of Artificial Sequence: Synthetic oligonucleotide
  Antisense strand to SEQ ID NO: 2501594
uuugucagccaguggaaac

SEQ ID NO: 2501596 - RNA, 19 nt, Artificial Sequence
  Description of Artificial Sequence: Synthetic oligonucleotide
  Sense strand starting at position 723 of SEQ ID NO: 1887978
acuuaagaauacuaggaaa

SEQ ID NO: 2501597 - RNA, 19 nt, Artificial Sequence
  Description of Artificial Sequence: Synthetic oligonucleotide
  Antisense strand to SEQ ID NO: 2501596
uuuccuaguauucuuaagu

SEQ ID NO: 2501598 - RNA, 19 nt, Artificial Sequence
  Description of Artificial Sequence: Synthetic oligonucleotide
  Sense strand starting at position 790 of SEQ ID NO: 1887978
ucuccacuucccuauguga

SEQ ID NO: 2501599 - RNA, 19 nt, Artificial Sequence
  Description of Artificial Sequence: Synthetic oligonucleotide
  Antisense strand to SEQ ID NO: 2501598
ucacauagggaaguggaga

SEQ ID NO: 2501600 - RNA, 19 nt, Artificial Sequence
  Description of Artificial Sequence: Synthetic oligonucleotide
  Sense strand starting at position 869 of SEQ ID NO: 1887978
gcuagaugagcucaagccu

SEQ ID NO: 2501601 - RNA, 19 nt, Artificial Sequence
  Description of Artificial Sequence: Synthetic oligonucleotide
  Antisense strand to SEQ ID NO: 2501600
aggcuugagcucaucuagc

SEQ ID NO: 2501602 - RNA, 19 nt, Artificial Sequence
  Description of Artificial Sequence: Synthetic oligonucleotide
  Sense strand starting at position 1036 of SEQ ID NO: 1887978
ugugaacagucuuuggaaa

SEQ ID NO: 2501603 - RNA, 19 nt, Artificial Sequence
  Description of Artificial Sequence: Synthetic oligonucleotide
  Antisense strand to SEQ ID NO: 2501602
uuuccaaagacuguucaca

SEQ ID NO: 2501604 - RNA, 19 nt, Artificial Sequence
  Description of Artificial Sequence: Synthetic oligonucleotide
  Sense strand starting at position 1425 of SEQ ID NO: 1887978
gcauccucacaaugacagu

SEQ ID NO: 2501605 - RNA, 19 nt, Artificial Sequence
  Description of Artificial Sequence: Synthetic oligonucleotide
  Antisense strand to SEQ ID NO: 2501604
acugucauugugaggaugc

SEQ ID NO: 2501606 - RNA, 19 nt, Artificial Sequence
  Description of Artificial Sequence: Synthetic oligonucleotide
  Sense strand starting at position 1441 of SEQ ID NO: 1887978
aguacaacccuaggaguaa

SEQ ID NO: 2501607 - RNA, 19 nt, Artificial Sequence
  Description of Artificial Sequence: Synthetic oligonucleotide
  Antisense strand to SEQ ID NO: 2501606
uuacuccuaggguuguacu

SEQ ID NO: 2501608 - RNA, 19 nt, Artificial Sequence
  Description of Artificial Sequence: Synthetic oligonucleotide
  Sense strand starting at position 1662 of SEQ ID NO: 1887978
ccucacugauggcuuuaga

SEQ ID NO: 2501609 - RNA, 19 nt, Artificial Sequence
  Description of Artificial Sequence: Synthetic oligonucleotide
  Antisense strand to SEQ ID NO: 2501608
ucuaaagccaucagugagg

SEQ ID NO: 2501610 - RNA, 19 nt, Artificial Sequence
  Description of Artificial Sequence: Synthetic oligonucleotide
  Sense strand starting at position 1944 of SEQ ID NO: 1887978
cuaucucugauccggugaa

SEQ ID NO: 2501611 - RNA, 19 nt, Artificial Sequence
  Description of Artificial Sequence: Synthetic oligonucleotide
  Antisense strand to SEQ ID NO: 2501610
uucaccggaucagagauag

SEQ ID NO: 2501612 - RNA, 19 nt, Artificial Sequence
  Description of Artificial Sequence: Synthetic oligonucleotide
  Sense strand starting at position 1948 of SEQ ID NO: 1887978
cucugauccggugaacaca

SEQ ID NO: 2501613 - RNA, 19 nt, Artificial Sequence
  Description of Artificial Sequence: Synthetic oligonucleotide
  Antisense strand to SEQ ID NO: 2501612
uguguucaccggaucagag

SEQ ID NO: 2501614 - RNA, 19 nt, Artificial Sequence
  Description of Artificial Sequence: Synthetic oligonucleotide
  Sense strand starting at position 2029 of SEQ ID NO: 1887978
ugugacucucaaggaaagu

SEQ ID NO: 2501615 - RNA, 19 nt, Artificial Sequence
  Description of Artificial Sequence: Synthetic oligonucleotide
  Antisense strand to SEQ ID NO: 2501614
acuuuccuugagagucaca

SEQ ID NO: 2501616 - RNA, 19 nt, Artificial Sequence
  Description of Artificial Sequence: Synthetic oligonucleotide
  Sense strand starting at position 2092 of SEQ ID NO: 1887978
cagagcauucuagguaaug

SEQ ID NO: 2501617 - RNA, 19 nt, Artificial Sequence
  Description of Artificial Sequence: Synthetic oligonucleotide
  Antisense strand to SEQ ID NO: 2501616
cauuaccuagaaugcucug

SEQ ID NO: 2501618 - RNA, 19 nt, Artificial Sequence
  Description of Artificial Sequence: Synthetic oligonucleotide
  Sense strand starting at position 2093 of SEQ ID NO: 1887978
agagcauucuagguaaugu

SEQ ID NO: 2501619 - RNA, 19 nt, Artificial Sequence
  Description of Artificial Sequence: Synthetic oligonucleotide
  Antisense strand to SEQ ID NO: 2501618
acauuaccuagaaugcucu

SEQ ID NO: 2501620 - RNA, 19 nt, Artificial Sequence
  Description of Artificial Sequence: Synthetic oligonucleotide
  Sense strand starting at position 2192 of SEQ ID NO: 1887978
ggcgaugagaaauggcuua

SEQ ID NO: 2501621 - RNA, 19 nt, Artificial Sequence
  Description of Artificial Sequence: Synthetic oligonucleotide
  Antisense strand to SEQ ID NO: 2501620
uaagccauuucucaucgcc

SEQ ID NO: 2501622 - RNA, 19 nt, Artificial Sequence
  Description of Artificial Sequence: Synthetic oligonucleotide
  Sense strand starting at position 2199 of SEQ ID NO: 1887978
agaaauggcuuauccaagu

SEQ ID NO: 2501623 - RNA, 19 nt, Artificial Sequence
  Description of Artificial Sequence: Synthetic oligonucleotide
  Antisense strand to SEQ ID NO: 2501622
acuuggauaagccauuucu

SEQ ID NO: 2501624 - RNA, 19 nt, Artificial Sequence
  Description of Artificial Sequence: Synthetic oligonucleotide
  Sense strand starting at position 2256 of SEQ ID NO: 1887978
gucguaaucagacagcaua

SEQ ID NO: 2501625 - RNA, 19 nt, Artificial Sequence
  Description of Artificial Sequence: Synthetic oligonucleotide
  Antisense strand to SEQ ID NO: 2501624
uaugcugucugauuacgac

SEQ ID NO: 2501626 - RNA, 19 nt, Artificial Sequence
  Description of Artificial Sequence: Synthetic oligonucleotide
  Sense strand starting at position 2259 of SEQ ID NO: 1887978
guaaucagacagcauauua

SEQ ID NO: 2501627 - RNA, 19 nt, Artificial Sequence
  Description of Artificial Sequence: Synthetic oligonucleotide
  Antisense strand to SEQ ID NO: 2501626
uaauaugcugucugauuac

SEQ ID NO: 2501628 - RNA, 19 nt, Artificial Sequence
  Description of Artificial Sequence: Synthetic oligonucleotide
  Sense strand starting at position 2680 of SEQ ID NO: 1887978
ucacuaugguggucccaaa

SEQ ID NO: 2501629 - RNA, 19 nt, Artificial Sequence
  Description of Artificial Sequence: Synthetic oligonucleotide
  Antisense strand to SEQ ID NO: 2501628
uuugggaccaccauaguga

SEQ ID NO: 2501630 - RNA, 19 nt, Artificial Sequence
  Description of Artificial Sequence: Synthetic oligonucleotide
  Sense strand starting at position 2766 of SEQ ID NO: 1887978
guacccagccucuaucaua

SEQ ID NO: 2501631 - RNA, 19 nt, Artificial Sequence
  Description of Artificial Sequence: Synthetic oligonucleotide
  Antisense strand to SEQ ID NO: 2501630
uaugauagaggcuggguac

SEQ ID NO: 2501632 - RNA, 19 nt, Artificial Sequence
  Description of Artificial Sequence: Synthetic oligonucleotide
  Sense strand starting at position 2864 of SEQ ID NO: 1887978
cagauaguggcaugauagu

SEQ ID NO: 2501633 - RNA, 19 nt, Artificial Sequence
  Description of Artificial Sequence: Synthetic oligonucleotide
  Antisense strand to SEQ ID NO: 2501632
acuaucaugccacuaucug

SEQ ID NO: 2501634 - RNA, 19 nt, Artificial Sequence
  Description of Artificial Sequence: Synthetic oligonucleotide
  Sense strand starting at position 2907 of SEQ ID NO: 1887978
guuagaucaccuugaaaca

SEQ ID NO: 2501635 - RNA, 19 nt, Artificial Sequence
  Description of Artificial Sequence: Synthetic oligonucleotide
  Antisense strand to SEQ ID NO: 2501634
uguuucaaggugaucuaac

SEQ ID NO: 2501636 - RNA, 19 nt, Artificial Sequence
  Description of Artificial Sequence: Synthetic oligonucleotide
  Sense strand starting at position 2937 of SEQ ID NO: 1887978
guagaauucugucugauuc

SEQ ID NO: 2501637 - RNA, 19 nt, Artificial Sequence
  Description of Artificial Sequence: Synthetic oligonucleotide
  Antisense strand to SEQ ID NO: 2501636
gaaucagacagaauucuac

SEQ ID NO: 2501638 - RNA, 19 nt, Artificial Sequence
  Description of Artificial Sequence: Synthetic oligonucleotide
  Sense strand starting at position 3006 of SEQ ID NO: 1887978
guguccagucaauaacugu

SEQ ID NO: 2501639 - RNA, 19 nt, Artificial Sequence
  Description of Artificial Sequence: Synthetic oligonucleotide
  Antisense strand to SEQ ID NO: 2501638
acaguuauugacuggacac

SEQ ID NO: 2501640 - RNA, 19 nt, Artificial Sequence
  Description of Artificial Sequence: Synthetic oligonucleotide
  Sense strand starting at position 3012 of SEQ ID NO: 1887978
agucaauaacuguguccaa

SEQ ID NO: 2501641 - RNA, 19 nt, Artificial Sequence
  Description of Artificial Sequence: Synthetic oligonucleotide
  Antisense strand to SEQ ID NO: 2501640
uuggacacaguuauugacu

SEQ ID NO: 2501642 - RNA, 19 nt, Artificial Sequence
  Description of Artificial Sequence: Synthetic oligonucleotide
  Sense strand starting at position 3013 of SEQ ID NO: 1887978
gucaauaacuguguccaau

SEQ ID NO: 2501643 - RNA, 19 nt, Artificial Sequence
  Description of Artificial Sequence: Synthetic oligonucleotide
  Antisense strand to SEQ ID NO: 2501642
auuggacacaguuauugac

SEQ ID NO: 2501644 - RNA, 19 nt, Artificial Sequence
  Description of Artificial Sequence: Synthetic oligonucleotide
  Sense strand starting at position 3065 of SEQ ID NO: 1887978
cuuacuugauaucugagau

SEQ ID NO: 2501645 - RNA, 19 nt, Artificial Sequence
  Description of Artificial Sequence: Synthetic oligonucleotide
  Antisense strand to SEQ ID NO: 2501644
aucucagauaucaaguaag

SEQ ID NO: 2501646 - RNA, 19 nt, Artificial Sequence
  Description of Artificial Sequence: Synthetic oligonucleotide
  Sense strand starting at position 3078 of SEQ ID NO: 1887978
ugagauauauuccuucuag

SEQ ID NO: 2501647 - RNA, 19 nt, Artificial Sequence
  Description of Artificial Sequence: Synthetic oligonucleotide
  Antisense strand to SEQ ID NO: 2501646
cuagaaggaauauaucuca

SEQ ID NO: 2501648 - RNA, 19 nt, Artificial Sequence
  Description of Artificial Sequence: Synthetic oligonucleotide
  Sense strand starting at position 3177 of SEQ ID NO: 1887978
ucagaaagccggugaaaug

SEQ ID NO: 2501649 - RNA, 19 nt, Artificial Sequence
  Description of Artificial Sequence: Synthetic oligonucleotide
  Antisense strand to SEQ ID NO: 2501648
cauuucaccggcuuucuga

SEQ ID NO: 2501650 - RNA, 19 nt, Artificial Sequence
  Description of Artificial Sequence: Synthetic oligonucleotide
  Sense strand starting at position 3188 of SEQ ID NO: 1887978
gugaaaugcacuugaagga

SEQ ID NO: 2501651 - RNA, 19 nt, Artificial Sequence
  Description of Artificial Sequence: Synthetic oligonucleotide
  Antisense strand to SEQ ID NO: 2501650
uccuucaagugcauuucac

SEQ ID NO: 2501652 - RNA, 19 nt, Artificial Sequence
  Description of Artificial Sequence: Synthetic oligonucleotide
  Sense strand starting at position 3211 of SEQ ID NO: 1887978
agaaaugagccaugugggu

SEQ ID NO: 2501653 - RNA, 19 nt, Artificial Sequence
  Description of Artificial Sequence: Synthetic oligonucleotide
  Antisense strand to SEQ ID NO: 2501652
acccacauggcucauuucu

SEQ ID NO: 2501654 - RNA, 19 nt, Artificial Sequence
  Description of Artificial Sequence: Synthetic oligonucleotide
  Sense strand starting at position 3213 of SEQ ID NO: 1887978
aaaugagccauguggguau

SEQ ID NO: 2501655 - RNA, 19 nt, Artificial Sequence
  Description of Artificial Sequence: Synthetic oligonucleotide
  Antisense strand to SEQ ID NO: 2501654
auacccacauggcucauuu

SEQ ID NO: 2501656 - RNA, 19 nt, Artificial Sequence
  Description of Artificial Sequence: Synthetic oligonucleotide
  Sense strand starting at position 3695 of SEQ ID NO: 1887978
ccgagccuggccgagaaau

SEQ ID NO: 2501657 - RNA, 19 nt, Artificial Sequence
  Description of Artificial Sequence: Synthetic oligonucleotide
  Antisense strand to SEQ ID NO: 2501656
auuucucggccaggcucgg

SEQ ID NO: 2501658 - RNA, 19 nt, Artificial Sequence
  Description of Artificial Sequence: Synthetic oligonucleotide
  Sense strand starting at position 3697 of SEQ ID NO: 1887978
gagccuggccgagaaaucu

SEQ ID NO: 2501659 - RNA, 19 nt, Artificial Sequence
  Description of Artificial Sequence: Synthetic oligonucleotide
  Antisense strand to SEQ ID NO: 2501658
agauuucucggccaggcuc

SEQ ID NO: 2501660 - RNA, 19 nt, Artificial Sequence
  Description of Artificial Sequence: Synthetic oligonucleotide
  Sense strand starting at position 20 of SEQ ID NO: 1887979
ggaaagguuggugguugaa

SEQ ID NO: 2501661 - RNA, 19 nt, Artificial Sequence
  Description of Artificial Sequence: Synthetic oligonucleotide
  Antisense strand to SEQ ID NO: 2501660
uucaaccaccaaccuuucc

SEQ ID NO: 2501662 - RNA, 19 nt, Artificial Sequence
  Description of Artificial Sequence: Synthetic oligonucleotide
  Sense strand starting at position 22 of SEQ ID NO: 1887979
aaagguuggugguugaaga

SEQ ID NO: 2501663 - RNA, 19 nt, Artificial Sequence
  Description of Artificial Sequence: Synthetic oligonucleotide
  Antisense strand to SEQ ID NO: 2501662
ucuucaaccaccaaccuuu

SEQ ID NO: 2501664 - RNA, 19 nt, Artificial Sequence
  Description of Artificial Sequence: Synthetic oligonucleotide
  Sense strand starting at position 23 of SEQ ID NO: 1887979
aagguuggugguugaagaa

SEQ ID NO: 2501665 - RNA, 19 nt, Artificial Sequence
  Description of Artificial Sequence: Synthetic oligonucleotide
  Antisense strand to SEQ ID NO: 2501664
uucuucaaccaccaaccuu

SEQ ID NO: 2501666 - RNA, 19 nt, Artificial Sequence
  Description of Artificial Sequence: Synthetic oligonucleotide
  Sense strand starting at position 35 of SEQ ID NO: 1887979
ugaagaacagucuguguaa

SEQ ID NO: 2501667 - RNA, 19 nt, Artificial Sequence
  Description of Artificial Sequence: Synthetic oligonucleotide
  Antisense strand to SEQ ID NO: 2501666
uuacacagacuguucuuca

SEQ ID NO: 2501668 - RNA, 19 nt, Artificial Sequence
  Description of Artificial Sequence: Synthetic oligonucleotide
  Sense strand starting at position 36 of SEQ ID NO: 1887979
gaagaacagucuguguaaa

SEQ ID NO: 2501669 - RNA, 19 nt, Artificial Sequence
  Description of Artificial Sequence: Synthetic oligonucleotide
  Antisense strand to SEQ ID NO: 2501668
uuuacacagacuguucuuc

SEQ ID NO: 2501670 - RNA, 19 nt, Artificial Sequence
  Description of Artificial Sequence: Synthetic oligonucleotide
  Sense strand starting at position 37 of SEQ ID NO: 1887979
aagaacagucuguguaaau

SEQ ID NO: 2501671 - RNA, 19 nt, Artificial Sequence
  Description of Artificial Sequence: Synthetic oligonucleotide
  Antisense strand to SEQ ID NO: 2501670
auuuacacagacuguucuu

SEQ ID NO: 2501672 - RNA, 19 nt, Artificial Sequence
  Description of Artificial Sequence: Synthetic oligonucleotide
  Sense strand starting at position 38 of SEQ ID NO: 1887979
agaacagucuguguaaaua

SEQ ID NO: 2501673 - RNA, 19 nt, Artificial Sequence
  Description of Artificial Sequence: Synthetic oligonucleotide
  Antisense strand to SEQ ID NO: 2501672
uauuuacacagacuguucu

SEQ ID NO: 2501674 - RNA, 19 nt, Artificial Sequence
  Description of Artificial Sequence: Synthetic oligonucleotide
  Sense strand starting at position 59 of SEQ ID NO: 1887979
ggcaaugucagugacuaca

SEQ ID NO: 2501675 - RNA, 19 nt, Artificial Sequence
  Description of Artificial Sequence: Synthetic oligonucleotide
  Antisense strand to SEQ ID NO: 2501674
uguagucacugacauugcc

SEQ ID NO: 2501676 - RNA, 19 nt, Artificial Sequence
  Description of Artificial Sequence: Synthetic oligonucleotide
  Sense strand starting at position 138 of SEQ ID NO: 1887979
gccauagaucuagaaaguc

SEQ ID NO: 2501677 - RNA, 19 nt, Artificial Sequence
  Description of Artificial Sequence: Synthetic oligonucleotide
  Antisense strand to SEQ ID NO: 2501676
gacuuucuagaucuauggc

SEQ ID NO: 2501678 - RNA, 19 nt, Artificial Sequence
  Description of Artificial Sequence: Synthetic oligonucleotide
  Sense strand starting at position 173 of SEQ ID NO: 1887979
gcaagucaggugggaucua

SEQ ID NO: 2501679 - RNA, 19 nt, Artificial Sequence
  Description of Artificial Sequence: Synthetic oligonucleotide
  Antisense strand to SEQ ID NO: 2501678
uagaucccaccugacuugc

SEQ ID NO: 2501680 - RNA, 19 nt, Artificial Sequence
  Description of Artificial Sequence: Synthetic oligonucleotide
  Sense strand starting at position 184 of SEQ ID NO: 1887979
gggaucuauuaggcuuacu

SEQ ID NO: 2501681 - RNA, 19 nt, Artificial Sequence
  Description of Artificial Sequence: Synthetic oligonucleotide
  Antisense strand to SEQ ID NO: 2501680
aguaagccuaauagauccc

SEQ ID NO: 2501682 - RNA, 19 nt, Artificial Sequence
  Description of Artificial Sequence: Synthetic oligonucleotide
  Sense strand starting at position 187 of SEQ ID NO: 1887979
aucuauuaggcuuacugua

SEQ ID NO: 2501683 - RNA, 19 nt, Artificial Sequence
  Description of Artificial Sequence: Synthetic oligonucleotide
  Antisense strand to SEQ ID NO: 2501682
uacaguaagccuaauagau

SEQ ID NO: 2501684 - RNA, 19 nt, Artificial Sequence
  Description of Artificial Sequence: Synthetic oligonucleotide
  Sense strand starting at position 192 of SEQ ID NO: 1887979
uuaggcuuacuguaagacu

SEQ ID NO: 2501685 - RNA, 19 nt, Artificial Sequence
  Description of Artificial Sequence: Synthetic oligonucleotide
  Antisense strand to SEQ ID NO: 2501684
agucuuacaguaagccuaa

SEQ ID NO: 2501686 - RNA, 19 nt, Artificial Sequence
  Description of Artificial Sequence: Synthetic oligonucleotide
  Sense strand starting at position 316 of SEQ ID NO: 1887979
gugccuauaguccagauau

SEQ ID NO: 2501687 - RNA, 19 nt, Artificial Sequence
  Description of Artificial Sequence: Synthetic oligonucleotide
  Antisense strand to SEQ ID NO: 2501686
auaucuggacuauaggcac

SEQ ID NO: 2501688 - RNA, 19 nt, Artificial Sequence
  Description of Artificial Sequence: Synthetic oligonucleotide
  Sense strand starting at position 318 of SEQ ID NO: 1887979
gccuauaguccagauauga

SEQ ID NO: 2501689 - RNA, 19 nt, Artificial Sequence
  Description of Artificial Sequence: Synthetic oligonucleotide
  Antisense strand to SEQ ID NO: 2501688
ucauaucuggacuauaggc

SEQ ID NO: 2501690 - RNA, 19 nt, Artificial Sequence
  Description of Artificial Sequence: Synthetic oligonucleotide
  Sense strand starting at position 341 of SEQ ID NO: 1887979
agagcugcuccugaggaaa

SEQ ID NO: 2501691 - RNA, 19 nt, Artificial Sequence
  Description of Artificial Sequence: Synthetic oligonucleotide
  Antisense strand to SEQ ID NO: 2501690
uuuccucaggagcagcucu

SEQ ID NO: 2501692 - RNA, 19 nt, Artificial Sequence
  Description of Artificial Sequence: Synthetic oligonucleotide
  Sense strand starting at position 529 of SEQ ID NO: 1887979
gucacacuucccuagcaua

SEQ ID NO: 2501693 - RNA, 19 nt, Artificial Sequence
  Description of Artificial Sequence: Synthetic oligonucleotide
  Antisense strand to SEQ ID NO: 2501692
uaugcuagggaagugugac

SEQ ID NO: 2501694 - RNA, 19 nt, Artificial Sequence
  Description of Artificial Sequence: Synthetic oligonucleotide
  Sense strand starting at position 572 of SEQ ID NO: 1887979
agucucaauuuggaagacu

SEQ ID NO: 2501695 - RNA, 19 nt, Artificial Sequence
  Description of Artificial Sequence: Synthetic oligonucleotide
  Antisense strand to SEQ ID NO: 2501694
agucuuccaaauugagacu

SEQ ID NO: 2501696 - RNA, 19 nt, Artificial Sequence
  Description of Artificial Sequence: Synthetic oligonucleotide
  Sense strand starting at position 730 of SEQ ID NO: 1887979
gucaacacuuggguuagau

SEQ ID NO: 2501697 - RNA, 19 nt, Artificial Sequence
  Description of Artificial Sequence: Synthetic oligonucleotide
  Antisense strand to SEQ ID NO: 2501696
aucuaacccaaguguugac

SEQ ID NO: 2501698 - RNA, 19 nt, Artificial Sequence
  Description of Artificial Sequence: Synthetic oligonucleotide
  Sense strand starting at position 932 of SEQ ID NO: 1887979
gaaacauuggccuggacuc

SEQ ID NO: 2501699 - RNA, 19 nt, Artificial Sequence
  Description of Artificial Sequence: Synthetic oligonucleotide
  Antisense strand to SEQ ID NO: 2501698
gaguccaggccaauguuuc

SEQ ID NO: 2501700 - RNA, 19 nt, Artificial Sequence
  Description of Artificial Sequence: Synthetic oligonucleotide
  Sense strand starting at position 997 of SEQ ID NO: 1887979
gagagaaugguaggugagu

SEQ ID NO: 2501701 - RNA, 19 nt, Artificial Sequence
  Description of Artificial Sequence: Synthetic oligonucleotide
  Antisense strand to SEQ ID NO: 2501700
acucaccuaccauucucuc

SEQ ID NO: 2501702 - RNA, 19 nt, Artificial Sequence
  Description of Artificial Sequence: Synthetic oligonucleotide
  Sense strand starting at position 1162 of SEQ ID NO: 1887979
gccucagaggaaugugauc

SEQ ID NO: 2501703 - RNA, 19 nt, Artificial Sequence
  Description of Artificial Sequence: Synthetic oligonucleotide
  Antisense strand to SEQ ID NO: 2501702
gaucacauuccucugaggc

SEQ ID NO: 2501704 - RNA, 19 nt, Artificial Sequence
  Description of Artificial Sequence: Synthetic oligonucleotide
  Sense strand starting at position 1164 of SEQ ID NO: 1887979
cucagaggaaugugaucau

SEQ ID NO: 2501705 - RNA, 19 nt, Artificial Sequence
  Description of Artificial Sequence: Synthetic oligonucleotide
  Antisense strand to SEQ ID NO: 2501704
augaucacauuccucugag

SEQ ID NO: 2501706 - RNA, 19 nt, Artificial Sequence
  Description of Artificial Sequence: Synthetic oligonucleotide
  Sense strand starting at position 1171 of SEQ ID NO: 1887979
gaaugugaucauggcagug

SEQ ID NO: 2501707 - RNA, 19 nt, Artificial Sequence
  Description of Artificial Sequence: Synthetic oligonucleotide
  Antisense strand to SEQ ID NO: 2501706
cacugccaugaucacauuc

SEQ ID NO: 2501708 - RNA, 19 nt, Artificial Sequence
  Description of Artificial Sequence: Synthetic oligonucleotide
  Sense strand starting at position 1445 of SEQ ID NO: 1887979
cucccacggcccuaagaau

SEQ ID NO: 2501709 - RNA, 19 nt, Artificial Sequence
  Description of Artificial Sequence: Synthetic oligonucleotide
  Antisense strand to SEQ ID NO: 2501708
auucuuagggccgugggag

SEQ ID NO: 2501710 - RNA, 19 nt, Artificial Sequence
  Description of Artificial Sequence: Synthetic oligonucleotide
  Sense strand starting at position 1487 of SEQ ID NO: 1887979
uguucccugcaguaacaau

SEQ ID NO: 2501711 - RNA, 19 nt, Artificial Sequence
  Description of Artificial Sequence: Synthetic oligonucleotide
  Antisense strand to SEQ ID NO: 2501710
auuguuacugcagggaaca

SEQ ID NO: 2501712 - RNA, 19 nt, Artificial Sequence
  Description of Artificial Sequence: Synthetic oligonucleotide
  Sense strand starting at position 2078 of SEQ ID NO: 1887979
caaggcuuucuggguaaug

SEQ ID NO: 2501713 - RNA, 19 nt, Artificial Sequence
  Description of Artificial Sequence: Synthetic oligonucleotide
  Antisense strand to SEQ ID NO: 2501712
cauuacccagaaagccuug

SEQ ID NO: 2501714 - RNA, 19 nt, Artificial Sequence
  Description of Artificial Sequence: Synthetic oligonucleotide
  Sense strand starting at position 2080 of SEQ ID NO: 1887979
aggcuuucuggguaaugua

SEQ ID NO: 2501715 - RNA, 19 nt, Artificial Sequence
  Description of Artificial Sequence: Synthetic oligonucleotide
  Antisense strand to SEQ ID NO: 2501714
uacauuacccagaaagccu

SEQ ID NO: 2501716 - RNA, 19 nt, Artificial Sequence
  Description of Artificial Sequence: Synthetic oligonucleotide
  Sense strand starting at position 2205 of SEQ ID NO: 1887979
ggucuuaaguagguugaca

SEQ ID NO: 2501717 - RNA, 19 nt, Artificial Sequence
  Description of Artificial Sequence: Synthetic oligonucleotide
  Antisense strand to SEQ ID NO: 2501716
ugucaaccuacuuaagacc

SEQ ID NO: 2501718 - RNA, 19 nt, Artificial Sequence
  Description of Artificial Sequence: Synthetic oligonucleotide
  Sense strand starting at position 2542 of SEQ ID NO: 1887979
guacaaguauaguucuuau

SEQ ID NO: 2501719 - RNA, 19 nt, Artificial Sequence
  Description of Artificial Sequence: Synthetic oligonucleotide
  Antisense strand to SEQ ID NO: 2501718
auaagaacuauacuuguac

SEQ ID NO: 2501720 - RNA, 19 nt, Artificial Sequence
  Description of Artificial Sequence: Synthetic oligonucleotide
  Sense strand starting at position 2646 of SEQ ID NO: 1887979
uguuaaucgacugggaguu

SEQ ID NO: 2501721 - RNA, 19 nt, Artificial Sequence
  Description of Artificial Sequence: Synthetic oligonucleotide
  Antisense strand to SEQ ID NO: 2501720
aacucccagucgauuaaca

SEQ ID NO: 2501722 - RNA, 19 nt, Artificial Sequence
  Description of Artificial Sequence: Synthetic oligonucleotide
  Sense strand starting at position 2656 of SEQ ID NO: 1887979
cugggaguuuauguaauuc

SEQ ID NO: 2501723 - RNA, 19 nt, Artificial Sequence
  Description of Artificial Sequence: Synthetic oligonucleotide
  Antisense strand to SEQ ID NO: 2501722
gaauuacauaaacucccag

SEQ ID NO: 2501724 - RNA, 19 nt, Artificial Sequence
  Description of Artificial Sequence: Synthetic oligonucleotide
  Sense strand starting at position 2718 of SEQ ID NO: 1887979
ggcuauuaguaguuaagac

SEQ ID NO: 2501725 - RNA, 19 nt, Artificial Sequence
  Description of Artificial Sequence: Synthetic oligonucleotide
  Antisense strand to SEQ ID NO: 2501724
gucuuaacuacuaauagcc

SEQ ID NO: 2501726 - RNA, 19 nt, Artificial Sequence
  Description of Artificial Sequence: Synthetic oligonucleotide
  Sense strand starting at position 2809 of SEQ ID NO: 1887979
aagggucagcuguauauca

SEQ ID NO: 2501727 - RNA, 19 nt, Artificial Sequence
  Description of Artificial Sequence: Synthetic oligonucleotide
  Antisense strand to SEQ ID NO: 2501726
ugauauacagcugacccuu

SEQ ID NO: 2501728 - RNA, 19 nt, Artificial Sequence
  Description of Artificial Sequence: Synthetic oligonucleotide
  Sense strand starting at position 2821 of SEQ ID NO: 1887979
uauaucagucucuagugua

SEQ ID NO: 2501729 - RNA, 19 nt, Artificial Sequence
  Description of Artificial Sequence: Synthetic oligonucleotide
  Antisense strand to SEQ ID NO: 2501728
uacacuagagacugauaua

SEQ ID NO: 2501730 - RNA, 19 nt, Artificial Sequence
  Description of Artificial Sequence: Synthetic oligonucleotide
  Sense strand starting at position 3025 of SEQ ID NO: 1887979
ggaagauaguggagggaua

SEQ ID NO: 2501731 - RNA, 19 nt, Artificial Sequence
  Description of Artificial Sequence: Synthetic oligonucleotide
  Antisense strand to SEQ ID NO: 2501730
uaucccuccacuaucuucc

SEQ ID NO: 2501732 - RNA, 19 nt, Artificial Sequence
  Description of Artificial Sequence: Synthetic oligonucleotide
  Sense strand starting at position 3147 of SEQ ID NO: 1887979
gcuuuaauacaugaauguu

SEQ ID NO: 2501733 - RNA, 19 nt, Artificial Sequence
  Description of Artificial Sequence: Synthetic oligonucleotide
  Antisense strand to SEQ ID NO: 2501732
aacauucauguauuaaagc

SEQ ID NO: 2501734 - RNA, 19 nt, Artificial Sequence
  Description of Artificial Sequence: Synthetic oligonucleotide
  Sense strand starting at position 3788 of SEQ ID NO: 1887979
uuguacaucugguuagauc

SEQ ID NO: 2501735 - RNA, 19 nt, Artificial Sequence
  Description of Artificial Sequence: Synthetic oligonucleotide
  Antisense strand to SEQ ID NO: 2501734
gaucuaaccagauguacaa

SEQ ID NO: 2501736 - RNA, 19 nt, Artificial Sequence
  Description of Artificial Sequence: Synthetic oligonucleotide
  Sense strand starting at position 3789 of SEQ ID NO: 1887979
uguacaucugguuagaucu

SEQ ID NO: 2501737 - RNA, 19 nt, Artificial Sequence
  Description of Artificial Sequence: Synthetic oligonucleotide
  Antisense strand to SEQ ID NO: 2501736
agaucuaaccagauguaca

SEQ ID NO: 2501738 - RNA, 19 nt, Artificial Sequence
  Description of Artificial Sequence: Synthetic oligonucleotide
  Sense strand starting at position 3850 of SEQ ID NO: 1887979
cuuggcugggccuauauua

SEQ ID NO: 2501739 - RNA, 19 nt, Artificial Sequence
  Description of Artificial Sequence: Synthetic oligonucleotide
  Antisense strand to SEQ ID NO: 2501738
uaauauaggcccagccaag

SEQ ID NO: 2501740 - RNA, 19 nt, Artificial Sequence
  Description of Artificial Sequence: Synthetic oligonucleotide
  Sense strand starting at position 47 of SEQ ID NO: 1887980
acacaugccuaugugaaua

SEQ ID NO: 2501741 - RNA, 19 nt, Artificial Sequence
  Description of Artificial Sequence: Synthetic oligonucleotide
  Antisense strand to SEQ ID NO: 2501740
uauucacauaggcaugugu

SEQ ID NO: 2501742 - RNA, 19 nt, Artificial Sequence
  Description of Artificial Sequence: Synthetic oligonucleotide
  Sense strand starting at position 52 of SEQ ID NO: 1887980
ugccuaugugaauaaacuu

SEQ ID NO: 2501743 - RNA, 19 nt, Artificial Sequence
  Description of Artificial Sequence: Synthetic oligonucleotide
  Antisense strand to SEQ ID NO: 2501742
aaguuuauucacauaggca

SEQ ID NO: 2501744 - RNA, 19 nt, Artificial Sequence
  Description of Artificial Sequence: Synthetic oligonucleotide
  Sense strand starting at position 131 of SEQ ID NO: 1887980
agcauuaaccuaggaauac

SEQ ID NO: 2501745 - RNA, 19 nt, Artificial Sequence
  Description of Artificial Sequence: Synthetic oligonucleotide
  Antisense strand to SEQ ID NO: 2501744
guauuccuagguuaaugcu

SEQ ID NO: 2501746 - RNA, 19 nt, Artificial Sequence
  Description of Artificial Sequence: Synthetic oligonucleotide
  Sense strand starting at position 241 of SEQ ID NO: 1887980
aaagguaauuguucucaug

SEQ ID NO: 2501747 - RNA, 19 nt, Artificial Sequence
  Description of Artificial Sequence: Synthetic oligonucleotide
  Antisense strand to SEQ ID NO: 2501746
caugagaacaauuaccuuu

SEQ ID NO: 2501748 - RNA, 19 nt, Artificial Sequence
  Description of Artificial Sequence: Synthetic oligonucleotide
  Sense strand starting at position 276 of SEQ ID NO: 1887980
ggguuaaucucucuacaaa

SEQ ID NO: 2501749 - RNA, 19 nt, Artificial Sequence
  Description of Artificial Sequence: Synthetic oligonucleotide
  Antisense strand to SEQ ID NO: 2501748
uuuguagagagauuaaccc

SEQ ID NO: 2501750 - RNA, 19 nt, Artificial Sequence
  Description of Artificial Sequence: Synthetic oligonucleotide
  Sense strand starting at position 365 of SEQ ID NO: 1887980
acaagaauguaggugcuau

SEQ ID NO: 2501751 - RNA, 19 nt, Artificial Sequence
  Description of Artificial Sequence: Synthetic oligonucleotide
  Antisense strand to SEQ ID NO: 2501750
auagcaccuacauucuugu

SEQ ID NO: 2501752 - RNA, 19 nt, Artificial Sequence
  Description of Artificial Sequence: Synthetic oligonucleotide
  Sense strand starting at position 377 of SEQ ID NO: 1887980
gugcuaucaggugaacaua

SEQ ID NO: 2501753 - RNA, 19 nt, Artificial Sequence
  Description of Artificial Sequence: Synthetic oligonucleotide
  Antisense strand to SEQ ID NO: 2501752
uauguucaccugauagcac

SEQ ID NO: 2501754 - RNA, 19 nt, Artificial Sequence
  Description of Artificial Sequence: Synthetic oligonucleotide
  Sense strand starting at position 950 of SEQ ID NO: 1887980
augaacauuugugauauca

SEQ ID NO: 2501755 - RNA, 19 nt, Artificial Sequence
  Description of Artificial Sequence: Synthetic oligonucleotide
  Antisense strand to SEQ ID NO: 2501754
ugauaucacaaauguucau

SEQ ID NO: 2501756 - RNA, 19 nt, Artificial Sequence
  Description of Artificial Sequence: Synthetic oligonucleotide
  Sense strand starting at position 958 of SEQ ID NO: 1887980
uugugauaucaaugggaug

SEQ ID NO: 2501757 - RNA, 19 nt, Artificial Sequence
  Description of Artificial Sequence: Synthetic oligonucleotide
  Antisense strand to SEQ ID NO: 2501756
caucccauugauaucacaa

SEQ ID NO: 2501758 - RNA, 19 nt, Artificial Sequence
  Description of Artificial Sequence: Synthetic oligonucleotide
  Sense strand starting at position 1082 of SEQ ID NO: 1887980
auacaauuaucuccgagaa

SEQ ID NO: 2501759 - RNA, 19 nt, Artificial Sequence
  Description of Artificial Sequence: Synthetic oligonucleotide
  Antisense strand to SEQ ID NO: 2501758
uucucggagauaauuguau

SEQ ID NO: 2501760 - RNA, 19 nt, Artificial Sequence
  Description of Artificial Sequence: Synthetic oligonucleotide
  Sense strand starting at position 1565 of SEQ ID NO: 1887980
ggaaucaacuuccuguuua

SEQ ID NO: 2501761 - RNA, 19 nt, Artificial Sequence
  Description of Artificial Sequence: Synthetic oligonucleotide
  Antisense strand to SEQ ID NO: 2501760
uaaacaggaaguugauucc

SEQ ID NO: 2501762 - RNA, 19 nt, Artificial Sequence
  Description of Artificial Sequence: Synthetic oligonucleotide
  Sense strand starting at position 1584 of SEQ ID NO: 1887980
cagaaaugacuucgcagaa

SEQ ID NO: 2501763 - RNA, 19 nt, Artificial Sequence
  Description of Artificial Sequence: Synthetic oligonucleotide
  Antisense strand to SEQ ID NO: 2501762
uucugcgaagucauuucug

SEQ ID NO: 2501764 - RNA, 19 nt, Artificial Sequence
  Description of Artificial Sequence: Synthetic oligonucleotide
  Sense strand starting at position 1585 of SEQ ID NO: 1887980
agaaaugacuucgcagaaa

SEQ ID NO: 2501765 - RNA, 19 nt, Artificial Sequence
  Description of Artificial Sequence: Synthetic oligonucleotide
  Antisense strand to SEQ ID NO: 2501764
uuucugcgaagucauuucu

SEQ ID NO: 2501766 - RNA, 19 nt, Artificial Sequence
  Description of Artificial Sequence: Synthetic oligonucleotide
  Sense strand starting at position 2036 of SEQ ID NO: 1887980
gggacuaccuuucccagaa

SEQ ID NO: 2501767 - RNA, 19 nt, Artificial Sequence
  Description of Artificial Sequence: Synthetic oligonucleotide
  Antisense strand to SEQ ID NO: 2501766
uucugggaaagguaguccc

SEQ ID NO: 2501768 - RNA, 19 nt, Artificial Sequence
  Description of Artificial Sequence: Synthetic oligonucleotide
  Sense strand starting at position 2176 of SEQ ID NO: 1887980
gucuuuacucaguacuaac

SEQ ID NO: 2501769 - RNA, 19 nt, Artificial Sequence
  Description of Artificial Sequence: Synthetic oligonucleotide
  Antisense strand to SEQ ID NO: 2501768
guuaguacugaguaaagac

SEQ ID NO: 2501770 - RNA, 19 nt, Artificial Sequence
  Description of Artificial Sequence: Synthetic oligonucleotide
  Sense strand starting at position 2194 of SEQ ID NO: 1887980
cauauucgcguuguagcaa

SEQ ID NO: 2501771 - RNA, 19 nt, Artificial Sequence
  Description of Artificial Sequence: Synthetic oligonucleotide
  Antisense strand to SEQ ID NO: 2501770
uugcuacaacgcgaauaug

SEQ ID NO: 2501772 - RNA, 19 nt, Artificial Sequence
  Description of Artificial Sequence: Synthetic oligonucleotide
  Sense strand starting at position 2205 of SEQ ID NO: 1887980
uguagcaaaccugacuaua

SEQ ID NO: 2501773 - RNA, 19 nt, Artificial Sequence
  Description of Artificial Sequence: Synthetic oligonucleotide
  Antisense strand to SEQ ID NO: 2501772
uauagucagguuugcuaca

SEQ ID NO: 2501774 - RNA, 19 nt, Artificial Sequence
  Description of Artificial Sequence: Synthetic oligonucleotide
  Sense strand starting at position 2242 of SEQ ID NO: 1887980
aucccaucaccagggauau

SEQ ID NO: 2501775 - RNA, 19 nt, Artificial Sequence
  Description of Artificial Sequence: Synthetic oligonucleotide
  Antisense strand to SEQ ID NO: 2501774
auaucccuggugaugggau

SEQ ID NO: 2501776 - RNA, 19 nt, Artificial Sequence
  Description of Artificial Sequence: Synthetic oligonucleotide
  Sense strand starting at position 2243 of SEQ ID NO: 1887980
ucccaucaccagggauaua

SEQ ID NO: 2501777 - RNA, 19 nt, Artificial Sequence
  Description of Artificial Sequence: Synthetic oligonucleotide
  Antisense strand to SEQ ID NO: 2501776
uauaucccuggugauggga

SEQ ID NO: 2501778 - RNA, 19 nt, Artificial Sequence
  Description of Artificial Sequence: Synthetic oligonucleotide
  Sense strand starting at position 2325 of SEQ ID NO: 1887980
acauguaaagaaugguuua

SEQ ID NO: 2501779 - RNA, 19 nt, Artificial Sequence
  Description of Artificial Sequence: Synthetic oligonucleotide
  Antisense strand to SEQ ID NO: 2501778
uaaaccauucuuuacaugu

SEQ ID NO: 2501780 - RNA, 19 nt, Artificial Sequence
  Description of Artificial Sequence: Synthetic oligonucleotide
  Sense strand starting at position 2366 of SEQ ID NO: 1887980
ugguuuaugugaguaaaua

SEQ ID NO: 2501781 - RNA, 19 nt, Artificial Sequence
  Description of Artificial Sequence: Synthetic oligonucleotide
  Antisense strand to SEQ ID NO: 2501780
uauuuacucacauaaacca

SEQ ID NO: 2501782 - RNA, 19 nt, Artificial Sequence
  Description of Artificial Sequence: Synthetic oligonucleotide
  Sense strand starting at position 2367 of SEQ ID NO: 1887980
gguuuaugugaguaaauau

SEQ ID NO: 2501783 - RNA, 19 nt, Artificial Sequence
  Description of Artificial Sequence: Synthetic oligonucleotide
  Antisense strand to SEQ ID NO: 2501782
auauuuacucacauaaacc

SEQ ID NO: 2501784 - RNA, 19 nt, Artificial Sequence
  Description of Artificial Sequence: Synthetic oligonucleotide
  Sense strand starting at position 2451 of SEQ ID NO: 1887980
ucauauaucguggauaguu

SEQ ID NO: 2501785 - RNA, 19 nt, Artificial Sequence
  Description of Artificial Sequence: Synthetic oligonucleotide
  Antisense strand to SEQ ID NO: 2501784
aacuauccacgauauauga

SEQ ID NO: 2501786 - RNA, 19 nt, Artificial Sequence
  Description of Artificial Sequence: Synthetic oligonucleotide
  Sense strand starting at position 2679 of SEQ ID NO: 1887980
uucccaauuugacagagua

SEQ ID NO: 2501787 - RNA, 19 nt, Artificial Sequence
  Description of Artificial Sequence: Synthetic oligonucleotide
  Antisense strand to SEQ ID NO: 2501786
uacucugucaaauugggaa

SEQ ID NO: 2501788 - RNA, 19 nt, Artificial Sequence
  Description of Artificial Sequence: Synthetic oligonucleotide
  Sense strand starting at position 2704 of SEQ ID NO: 1887980
cuuauuaccgauugcauuu

SEQ ID NO: 2501789 - RNA, 19 nt, Artificial Sequence
  Description of Artificial Sequence: Synthetic oligonucleotide
  Antisense strand to SEQ ID NO: 2501788
aaaugcaaucgguaauaag

SEQ ID NO: 2501790 - RNA, 19 nt, Artificial Sequence
  Description of Artificial Sequence: Synthetic oligonucleotide
  Sense strand starting at position 2745 of SEQ ID NO: 1887980
acacucucuguguaugaau

SEQ ID NO: 2501791 - RNA, 19 nt, Artificial Sequence
  Description of Artificial Sequence: Synthetic oligonucleotide
  Antisense strand to SEQ ID NO: 2501790
auucauacacagagagugu

SEQ ID NO: 2501792 - RNA, 19 nt, Artificial Sequence
  Description of Artificial Sequence: Synthetic oligonucleotide
  Sense strand starting at position 2747 of SEQ ID NO: 1887980
acucucuguguaugaauga

SEQ ID NO: 2501793 - RNA, 19 nt, Artificial Sequence
  Description of Artificial Sequence: Synthetic oligonucleotide
  Antisense strand to SEQ ID NO: 2501792
ucauucauacacagagagu

SEQ ID NO: 2501794 - RNA, 19 nt, Artificial Sequence
  Description of Artificial Sequence: Synthetic oligonucleotide
  Sense strand starting at position 2910 of SEQ ID NO: 1887980
agacauuccuuagccugau

SEQ ID NO: 2501795 - RNA, 19 nt, Artificial Sequence
  Description of Artificial Sequence: Synthetic oligonucleotide
  Antisense strand to SEQ ID NO: 2501794
aucaggcuaaggaaugucu

SEQ ID NO: 2501796 - RNA, 19 nt, Artificial Sequence
  Description of Artificial Sequence: Synthetic oligonucleotide
  Sense strand starting at position 3040 of SEQ ID NO: 1887980
accaaaggauugucuacuu

SEQ ID NO: 2501797 - RNA, 19 nt, Artificial Sequence
  Description of Artificial Sequence: Synthetic oligonucleotide
  Antisense strand to SEQ ID NO: 2501796
aaguagacaauccuuuggu

SEQ ID NO: 2501798 - RNA, 19 nt, Artificial Sequence
  Description of Artificial Sequence: Synthetic oligonucleotide
  Sense strand starting at position 3162 of SEQ ID NO: 1887980
auacaaguguguucugaag

SEQ ID NO: 2501799 - RNA, 19 nt, Artificial Sequence
  Description of Artificial Sequence: Synthetic oligonucleotide
  Antisense strand to SEQ ID NO: 2501798
cuucagaacacacuuguau

SEQ ID NO: 2501800 - RNA, 19 nt, Artificial Sequence
  Description of Artificial Sequence: Synthetic oligonucleotide
  Sense strand starting at position 3168 of SEQ ID NO: 1887980
guguguucugaagauagag

SEQ ID NO: 2501801 - RNA, 19 nt, Artificial Sequence
  Description of Artificial Sequence: Synthetic oligonucleotide
  Antisense strand to SEQ ID NO: 2501800
cucuaucuucagaacacac

SEQ ID NO: 2501802 - RNA, 19 nt, Artificial Sequence
  Description of Artificial Sequence: Synthetic oligonucleotide
  Sense strand starting at position 3346 of SEQ ID NO: 1887980
gccaauugacuccaaagca

SEQ ID NO: 2501803 - RNA, 19 nt, Artificial Sequence
  Description of Artificial Sequence: Synthetic oligonucleotide
  Antisense strand to SEQ ID NO: 2501802
ugcuuuggagucaauuggc

SEQ ID NO: 2501804 - RNA, 19 nt, Artificial Sequence
  Description of Artificial Sequence: Synthetic oligonucleotide
  Sense strand starting at position 3452 of SEQ ID NO: 1887980
uuacaaaugucugaauuug

SEQ ID NO: 2501805 - RNA, 19 nt, Artificial Sequence
  Description of Artificial Sequence: Synthetic oligonucleotide
  Antisense strand to SEQ ID NO: 2501804
caaauucagacauuuguaa

SEQ ID NO: 2501806 - RNA, 19 nt, Artificial Sequence
  Description of Artificial Sequence: Synthetic oligonucleotide
  Sense strand starting at position 3600 of SEQ ID NO: 1887980
aacagaucagucugugauu

SEQ ID NO: 2501807 - RNA, 19 nt, Artificial Sequence
  Description of Artificial Sequence: Synthetic oligonucleotide
  Antisense strand to SEQ ID NO: 2501806
aaucacagacugaucuguu

SEQ ID NO: 2501808 - RNA, 19 nt, Artificial Sequence
  Description of Artificial Sequence: Synthetic oligonucleotide
  Sense strand starting at position 3601 of SEQ ID NO: 1887980
acagaucagucugugauug

SEQ ID NO: 2501809 - RNA, 19 nt, Artificial Sequence
  Description of Artificial Sequence: Synthetic oligonucleotide
  Antisense strand to SEQ ID NO: 2501808
caaucacagacugaucugu

SEQ ID NO: 2501810 - RNA, 19 nt, Artificial Sequence
  Description of Artificial Sequence: Synthetic oligonucleotide
  Sense strand starting at position 3606 of SEQ ID NO: 1887980
ucagucugugauugggaga

SEQ ID NO: 2501811 - RNA, 19 nt, Artificial Sequence
  Description of Artificial Sequence: Synthetic oligonucleotide
  Antisense strand to SEQ ID NO: 2501810
ucucccaaucacagacuga

SEQ ID NO: 2501812 - RNA, 19 nt, Artificial Sequence
  Description of Artificial Sequence: Synthetic oligonucleotide
  Sense strand starting at position 3607 of SEQ ID NO: 1887980
cagucugugauugggagaa

SEQ ID NO: 2501813 - RNA, 19 nt, Artificial Sequence
  Description of Artificial Sequence: Synthetic oligonucleotide
  Antisense strand to SEQ ID NO: 2501812
uucucccaaucacagacug

SEQ ID NO: 2501814 - RNA, 19 nt, Artificial Sequence
  Description of Artificial Sequence: Synthetic oligonucleotide
  Sense strand starting at position 3695 of SEQ ID NO: 1887980
auuauauuacucugggauc

SEQ ID NO: 2501815 - RNA, 19 nt, Artificial Sequence
  Description of Artificial Sequence: Synthetic oligonucleotide
  Antisense strand to SEQ ID NO: 2501814
gaucccagaguaauauaau

SEQ ID NO: 2501816 - RNA, 19 nt, Artificial Sequence
  Description of Artificial Sequence: Synthetic oligonucleotide
  Sense strand starting at position 3715 of SEQ ID NO: 1887980
agcaacacaugguuuaaau

SEQ ID NO: 2501817 - RNA, 19 nt, Artificial Sequence
  Description of Artificial Sequence: Synthetic oligonucleotide
  Antisense strand to SEQ ID NO: 2501816
auuuaaaccauguguugcu

SEQ ID NO: 2501818 - RNA, 19 nt, Artificial Sequence
  Description of Artificial Sequence: Synthetic oligonucleotide
  Sense strand starting at position 3764 of SEQ ID NO: 1887980
uggucagaucucuaaguca

SEQ ID NO: 2501819 - RNA, 19 nt, Artificial Sequence
  Description of Artificial Sequence: Synthetic oligonucleotide
  Antisense strand to SEQ ID NO: 2501818
ugacuuagagaucugacca

SEQ ID NO: 2501820 - RNA, 19 nt, Artificial Sequence
  Description of Artificial Sequence: Synthetic oligonucleotide
  Sense strand starting at position 22 of SEQ ID NO: 1887981
augggauggacuggucuua

SEQ ID NO: 2501821 - RNA, 19 nt, Artificial Sequence
  Description of Artificial Sequence: Synthetic oligonucleotide
  Antisense strand to SEQ ID NO: 2501820
uaagaccaguccaucccau

SEQ ID NO: 2501822 - RNA, 19 nt, Artificial Sequence
  Description of Artificial Sequence: Synthetic oligonucleotide
  Sense strand starting at position 1273 of SEQ ID NO: 1887981
acacgaggguuuggaguaa

SEQ ID NO: 2501823 - RNA, 19 nt, Artificial Sequence
  Description of Artificial Sequence: Synthetic oligonucleotide
  Antisense strand to SEQ ID NO: 2501822
uuacuccaaacccucgugu

SEQ ID NO: 2501824 - RNA, 19 nt, Artificial Sequence
  Description of Artificial Sequence: Synthetic oligonucleotide
  Sense strand starting at position 1679 of SEQ ID NO: 1887981
cgagauaggaaguguauac

SEQ ID NO: 2501825 - RNA, 19 nt, Artificial Sequence
  Description of Artificial Sequence: Synthetic oligonucleotide
  Antisense strand to SEQ ID NO: 2501824
guauacacuuccuaucucg

SEQ ID NO: 2501826 - RNA, 19 nt, Artificial Sequence
  Description of Artificial Sequence: Synthetic oligonucleotide
  Sense strand starting at position 1695 of SEQ ID NO: 1887981
uacauugcccuguagcaga

SEQ ID NO: 2501827 - RNA, 19 nt, Artificial Sequence
  Description of Artificial Sequence: Synthetic oligonucleotide
  Antisense strand to SEQ ID NO: 2501826
ucugcuacagggcaaugua

SEQ ID NO: 2501828 - RNA, 19 nt, Artificial Sequence
  Description of Artificial Sequence: Synthetic oligonucleotide
  Sense strand starting at position 1795 of SEQ ID NO: 1887981
uuugcucugagugaacgaa

SEQ ID NO: 2501829 - RNA, 19 nt, Artificial Sequence
  Description of Artificial Sequence: Synthetic oligonucleotide
  Antisense strand to SEQ ID NO: 2501828
uucguucacucagagcaaa

SEQ ID NO: 2501830 - RNA, 19 nt, Artificial Sequence
  Description of Artificial Sequence: Synthetic oligonucleotide
  Sense strand starting at position 1820 of SEQ ID NO: 1887981
ggagaacuuccaggucuag

SEQ ID NO: 2501831 - RNA, 19 nt, Artificial Sequence
  Description of Artificial Sequence: Synthetic oligonucleotide
  Antisense strand to SEQ ID NO: 2501830
cuagaccuggaaguucucc

SEQ ID NO: 2501832 - RNA, 19 nt, Artificial Sequence
  Description of Artificial Sequence: Synthetic oligonucleotide
  Sense strand starting at position 2170 of SEQ ID NO: 1887981
cuugcauugggccgagauc

SEQ ID NO: 2501833 - RNA, 19 nt, Artificial Sequence
  Description of Artificial Sequence: Synthetic oligonucleotide
  Antisense strand to SEQ ID NO: 2501832
gaucucggcccaaugcaag

SEQ ID NO: 2501834 - RNA, 19 nt, Artificial Sequence
  Description of Artificial Sequence: Synthetic oligonucleotide
  Sense strand starting at position 2172 of SEQ ID NO: 1887981
ugcauugggccgagaucga

SEQ ID NO: 2501835 - RNA, 19 nt, Artificial Sequence
  Description of Artificial Sequence: Synthetic oligonucleotide
  Antisense strand to SEQ ID NO: 2501834
ucgaucucggcccaaugca

SEQ ID NO: 2501836 - RNA, 19 nt, Artificial Sequence
  Description of Artificial Sequence: Synthetic oligonucleotide
  Sense strand starting at position 2952 of SEQ ID NO: 1887981
aucaguccucagggaagau

SEQ ID NO: 2501837 - RNA, 19 nt, Artificial Sequence
  Description of Artificial Sequence: Synthetic oligonucleotide
  Antisense strand to SEQ ID NO: 2501836
aucuucccugaggacugau

SEQ ID NO: 2501838 - RNA, 19 nt, Artificial Sequence
  Description of Artificial Sequence: Synthetic oligonucleotide
  Sense strand starting at position 3005 of SEQ ID NO: 1887981
ccuggcuguacuugguaau

SEQ ID NO: 2501839 - RNA, 19 nt, Artificial Sequence
  Description of Artificial Sequence: Synthetic oligonucleotide
  Antisense strand to SEQ ID NO: 2501838
auuaccaaguacagccagg

SEQ ID NO: 2501840 - RNA, 19 nt, Artificial Sequence
  Description of Artificial Sequence: Synthetic oligonucleotide
  Sense strand starting at position 3008 of SEQ ID NO: 1887981
ggcuguacuugguaaugga

SEQ ID NO: 2501841 - RNA, 19 nt, Artificial Sequence
  Description of Artificial Sequence: Synthetic oligonucleotide
  Antisense strand to SEQ ID NO: 2501840
uccauuaccaaguacagcc

SEQ ID NO: 2501842 - RNA, 19 nt, Artificial Sequence
  Description of Artificial Sequence: Synthetic oligonucleotide
  Sense strand starting at position 3017 of SEQ ID NO: 1887981
ugguaauggaggugacuau

SEQ ID NO: 2501843 - RNA, 19 nt, Artificial Sequence
  Description of Artificial Sequence: Synthetic oligonucleotide
  Antisense strand to SEQ ID NO: 2501842
auagucaccuccauuacca

SEQ ID NO: 2501844 - RNA, 19 nt, Artificial Sequence
  Description of Artificial Sequence: Synthetic oligonucleotide
  Sense strand starting at position 3028 of SEQ ID NO: 1887981
gugacuaucugugucagcu

SEQ ID NO: 2501845 - RNA, 19 nt, Artificial Sequence
  Description of Artificial Sequence: Synthetic oligonucleotide
  Antisense strand to SEQ ID NO: 2501844
agcugacacagauagucac

SEQ ID NO: 2501846 - RNA, 19 nt, Artificial Sequence
  Description of Artificial Sequence: Synthetic oligonucleotide
  Sense strand starting at position 3032 of SEQ ID NO: 1887981
cuaucugugucagcuaguu

SEQ ID NO: 2501847 - RNA, 19 nt, Artificial Sequence
  Description of Artificial Sequence: Synthetic oligonucleotide
  Antisense strand to SEQ ID NO: 2501846
aacuagcugacacagauag

SEQ ID NO: 2501848 - RNA, 19 nt, Artificial Sequence
  Description of Artificial Sequence: Synthetic oligonucleotide
  Sense strand starting at position 3376 of SEQ ID NO: 1887981
gcagcaaauugauugguua

SEQ ID NO: 2501849 - RNA, 19 nt, Artificial Sequence
  Description of Artificial Sequence: Synthetic oligonucleotide
  Antisense strand to SEQ ID NO: 2501848
uaaccaaucaauuugcugc

SEQ ID NO: 2501850 - RNA, 19 nt, Artificial Sequence
  Description of Artificial Sequence: Synthetic oligonucleotide
  Sense strand starting at position 3377 of SEQ ID NO: 1887981
cagcaaauugauugguuau

SEQ ID NO: 2501851 - RNA, 19 nt, Artificial Sequence
  Description of Artificial Sequence: Synthetic oligonucleotide
  Antisense strand to SEQ ID NO: 2501850
auaaccaaucaauuugcug

SEQ ID NO: 2501852 - RNA, 19 nt, Artificial Sequence
  Description of Artificial Sequence: Synthetic oligonucleotide
  Sense strand starting at position 3378 of SEQ ID NO: 1887981
agcaaauugauugguuaug

SEQ ID NO: 2501853 - RNA, 19 nt, Artificial Sequence
  Description of Artificial Sequence: Synthetic oligonucleotide
  Antisense strand to SEQ ID NO: 2501852
cauaaccaaucaauuugcu

SEQ ID NO: 2501854 - RNA, 19 nt, Artificial Sequence
  Description of Artificial Sequence: Synthetic oligonucleotide
  Sense strand starting at position 3380 of SEQ ID NO: 1887981
caaauugauugguuaugga

SEQ ID NO: 2501855 - RNA, 19 nt, Artificial Sequence
  Description of Artificial Sequence: Synthetic oligonucleotide
  Antisense strand to SEQ ID NO: 2501854
uccauaaccaaucaauuug

SEQ ID NO: 2501856 - RNA, 19 nt, Artificial Sequence
  Description of Artificial Sequence: Synthetic oligonucleotide
  Sense strand starting at position 3445 of SEQ ID NO: 1887981
caaugaugccaacagguua

SEQ ID NO: 2501857 - RNA, 19 nt, Artificial Sequence
  Description of Artificial Sequence: Synthetic oligonucleotide
  Antisense strand to SEQ ID NO: 2501856
uaaccuguuggcaucauug

SEQ ID NO: 2501858 - RNA, 19 nt, Artificial Sequence
  Description of Artificial Sequence: Synthetic oligonucleotide
  Sense strand starting at position 3456 of SEQ ID NO: 1887981
acagguuagucuuccuaau

SEQ ID NO: 2501859 - RNA, 19 nt, Artificial Sequence
  Description of Artificial Sequence: Synthetic oligonucleotide
  Antisense strand to SEQ ID NO: 2501858
auuaggaagacuaaccugu

SEQ ID NO: 2501860 - RNA, 19 nt, Artificial Sequence
  Description of Artificial Sequence: Synthetic oligonucleotide
  Sense strand starting at position 3458 of SEQ ID NO: 1887981
agguuagucuuccuaauua

SEQ ID NO: 2501861 - RNA, 19 nt, Artificial Sequence
  Description of Artificial Sequence: Synthetic oligonucleotide
  Antisense strand to SEQ ID NO: 2501860
uaauuaggaagacuaaccu

SEQ ID NO: 2501862 - RNA, 19 nt, Artificial Sequence
  Description of Artificial Sequence: Synthetic oligonucleotide
  Sense strand starting at position 3896 of SEQ ID NO: 1887981
ugaccacguuccucucaaa

SEQ ID NO: 2501863 - RNA, 19 nt, Artificial Sequence
  Description of Artificial Sequence: Synthetic oligonucleotide
  Antisense strand to SEQ ID NO: 2501862
uuugagaggaacgugguca

SEQ ID NO: 2501864 - RNA, 19 nt, Artificial Sequence
  Description of Artificial Sequence: Synthetic oligonucleotide
  Sense strand starting at position 3899 of SEQ ID NO: 1887981
ccacguuccucucaaagcu

SEQ ID NO: 2501865 - RNA, 19 nt, Artificial Sequence
  Description of Artificial Sequence: Synthetic oligonucleotide
  Antisense strand to SEQ ID NO: 2501864
agcuuugagaggaacgugg

SEQ ID NO: 2501866 - RNA, 19 nt, Artificial Sequence
  Description of Artificial Sequence: Synthetic oligonucleotide
  Sense strand starting at position 3925 of SEQ ID NO: 1887981
auuuaaauguccguagcuu

SEQ ID NO: 2501867 - RNA, 19 nt, Artificial Sequence
  Description of Artificial Sequence: Synthetic oligonucleotide
  Antisense strand to SEQ ID NO: 2501866
aagcuacggacauuuaaau

SEQ ID NO: 2501868 - RNA, 19 nt, Artificial Sequence
  Description of Artificial Sequence: Synthetic oligonucleotide
  Sense strand starting at position 3926 of SEQ ID NO: 1887981
uuuaaauguccguagcuuu

SEQ ID NO: 2501869 - RNA, 19 nt, Artificial Sequence
  Description of Artificial Sequence: Synthetic oligonucleotide
  Antisense strand to SEQ ID NO: 2501868
aaagcuacggacauuuaaa

SEQ ID NO: 2501870 - RNA, 19 nt, Artificial Sequence
  Description of Artificial Sequence: Synthetic oligonucleotide
  Sense strand starting at position 3929 of SEQ ID NO: 1887981
aaauguccguagcuuuaaa

SEQ ID NO: 2501871 - RNA, 19 nt, Artificial Sequence
  Description of Artificial Sequence: Synthetic oligonucleotide
  Antisense strand to SEQ ID NO: 2501870
uuuaaagcuacggacauuu

SEQ ID NO: 2501872 - RNA, 19 nt, Artificial Sequence
  Description of Artificial Sequence: Synthetic oligonucleotide
  Sense strand starting at position 354 of SEQ ID NO: 1887982
accauaauugaguaauagc

SEQ ID NO: 2501873 - RNA, 19 nt, Artificial Sequence
  Description of Artificial Sequence: Synthetic oligonucleotide
  Antisense strand to SEQ ID NO: 2501872
gcuauuacucaauuauggu

SEQ ID NO: 2501874 - RNA, 19 nt, Artificial Sequence
  Description of Artificial Sequence: Synthetic oligonucleotide
  Sense strand starting at position 481 of SEQ ID NO: 1887982
ucagaucaugguugacuga

SEQ ID NO: 2501875 - RNA, 19 nt, Artificial Sequence
  Description of Artificial Sequence: Synthetic oligonucleotide
  Antisense strand to SEQ ID NO: 2501874
ucagucaaccaugaucuga

SEQ ID NO: 2501876 - RNA, 19 nt, Artificial Sequence
  Description of Artificial Sequence: Synthetic oligonucleotide
  Sense strand starting at position 518 of SEQ ID NO: 1887982
agugaaacugccgauuaag

SEQ ID NO: 2501877 - RNA, 19 nt, Artificial Sequence
  Description of Artificial Sequence: Synthetic oligonucleotide
  Antisense strand to SEQ ID NO: 2501876
cuuaaucggcaguuucacu

SEQ ID NO: 2501878 - RNA, 19 nt, Artificial Sequence
  Description of Artificial Sequence: Synthetic oligonucleotide
  Sense strand starting at position 540 of SEQ ID NO: 1887982
gcacuacugcauuggaguu

SEQ ID NO: 2501879 - RNA, 19 nt, Artificial Sequence
  Description of Artificial Sequence: Synthetic oligonucleotide
  Antisense strand to SEQ ID NO: 2501878
aacuccaaugcaguagugc

SEQ ID NO: 2501880 - RNA, 19 nt, Artificial Sequence
  Description of Artificial Sequence: Synthetic oligonucleotide
  Sense strand starting at position 552 of SEQ ID NO: 1887982
uggaguuauuacguaaaca

SEQ ID NO: 2501881 - RNA, 19 nt, Artificial Sequence
  Description of Artificial Sequence: Synthetic oligonucleotide
  Antisense strand to SEQ ID NO: 2501880
uguuuacguaauaacucca

SEQ ID NO: 2501882 - RNA, 19 nt, Artificial Sequence
  Description of Artificial Sequence: Synthetic oligonucleotide
  Sense strand starting at position 553 of SEQ ID NO: 1887982
ggaguuauuacguaaacau

SEQ ID NO: 2501883 - RNA, 19 nt, Artificial Sequence
  Description of Artificial Sequence: Synthetic oligonucleotide
  Antisense strand to SEQ ID NO: 2501882
auguuuacguaauaacucc

SEQ ID NO: 2501884 - RNA, 19 nt, Artificial Sequence
  Description of Artificial Sequence: Synthetic oligonucleotide
  Sense strand starting at position 888 of SEQ ID NO: 1887982
ccauguugguggucucgaa

SEQ ID NO: 2501885 - RNA, 19 nt, Artificial Sequence
  Description of Artificial Sequence: Synthetic oligonucleotide
  Antisense strand to SEQ ID NO: 2501884
uucgagaccaccaacaugg

SEQ ID NO: 2501886 - RNA, 19 nt, Artificial Sequence
  Description of Artificial Sequence: Synthetic oligonucleotide
  Sense strand starting at position 1004 of SEQ ID NO: 1887982
aacguaaguuucucuggca

SEQ ID NO: 2501887 - RNA, 19 nt, Artificial Sequence
  Description of Artificial Sequence: Synthetic oligonucleotide
  Antisense strand to SEQ ID NO: 2501886
ugccagagaaacuuacguu

SEQ ID NO: 2501888 - RNA, 19 nt, Artificial Sequence
  Description of Artificial Sequence: Synthetic oligonucleotide
  Sense strand starting at position 1005 of SEQ ID NO: 1887982
acguaaguuucucuggcau

SEQ ID NO: 2501889 - RNA, 19 nt, Artificial Sequence
  Description of Artificial Sequence: Synthetic oligonucleotide
  Antisense strand to SEQ ID NO: 2501888
augccagagaaacuuacgu

SEQ ID NO: 2501890 - RNA, 19 nt, Artificial Sequence
  Description of Artificial Sequence: Synthetic oligonucleotide
  Sense strand starting at position 1149 of SEQ ID NO: 1887982
gagcuacugcugugggaua

SEQ ID NO: 2501891 - RNA, 19 nt, Artificial Sequence
  Description of Artificial Sequence: Synthetic oligonucleotide
  Antisense strand to SEQ ID NO: 2501890
uaucccacagcaguagcuc

SEQ ID NO: 2501892 - RNA, 19 nt, Artificial Sequence
  Description of Artificial Sequence: Synthetic oligonucleotide
  Sense strand starting at position 1151 of SEQ ID NO: 1887982
gcuacugcugugggauaau

SEQ ID NO: 2501893 - RNA, 19 nt, Artificial Sequence
  Description of Artificial Sequence: Synthetic oligonucleotide
  Antisense strand to SEQ ID NO: 2501892
auuaucccacagcaguagc

SEQ ID NO: 2501894 - RNA, 19 nt, Artificial Sequence
  Description of Artificial Sequence: Synthetic oligonucleotide
  Sense strand starting at position 1200 of SEQ ID NO: 1887982
gguccuauuucugugcaau

SEQ ID NO: 2501895 - RNA, 19 nt, Artificial Sequence
  Description of Artificial Sequence: Synthetic oligonucleotide
  Antisense strand to SEQ ID NO: 2501894
auugcacagaaauaggacc

SEQ ID NO: 2501896 - RNA, 19 nt, Artificial Sequence
  Description of Artificial Sequence: Synthetic oligonucleotide
  Sense strand starting at position 1201 of SEQ ID NO: 1887982
guccuauuucugugcaaua

SEQ ID NO: 2501897 - RNA, 19 nt, Artificial Sequence
  Description of Artificial Sequence: Synthetic oligonucleotide
  Antisense strand to SEQ ID NO: 2501896
uauugcacagaaauaggac

SEQ ID NO: 2501898 - RNA, 19 nt, Artificial Sequence
  Description of Artificial Sequence: Synthetic oligonucleotide
  Sense strand starting at position 1218 of SEQ ID NO: 1887982
uauggagauugauggaaau

SEQ ID NO: 2501899 - RNA, 19 nt, Artificial Sequence
  Description of Artificial Sequence: Synthetic oligonucleotide
  Antisense strand to SEQ ID NO: 2501898
auuuccaucaaucuccaua

SEQ ID NO: 2501900 - RNA, 19 nt, Artificial Sequence
  Description of Artificial Sequence: Synthetic oligonucleotide
  Sense strand starting at position 1228 of SEQ ID NO: 1887982
gauggaaauguuuacagcu

SEQ ID NO: 2501901 - RNA, 19 nt, Artificial Sequence
  Description of Artificial Sequence: Synthetic oligonucleotide
  Antisense strand to SEQ ID NO: 2501900
agcuguaaacauuuccauc

SEQ ID NO: 2501902 - RNA, 19 nt, Artificial Sequence
  Description of Artificial Sequence: Synthetic oligonucleotide
  Sense strand starting at position 1278 of SEQ ID NO: 1887982
gucauuaguuaaguaaucu

SEQ ID NO: 2501903 - RNA, 19 nt, Artificial Sequence
  Description of Artificial Sequence: Synthetic oligonucleotide
  Antisense strand to SEQ ID NO: 2501902
agauuacuuaacuaaugac

SEQ ID NO: 2501904 - RNA, 19 nt, Artificial Sequence
  Description of Artificial Sequence: Synthetic oligonucleotide
  Sense strand starting at position 1343 of SEQ ID NO: 1887982
agaugacauugcucucauc

SEQ ID NO: 2501905 - RNA, 19 nt, Artificial Sequence
  Description of Artificial Sequence: Synthetic oligonucleotide
  Antisense strand to SEQ ID NO: 2501904
gaugagagcaaugucaucu

SEQ ID NO: 2501906 - RNA, 19 nt, Artificial Sequence
  Description of Artificial Sequence: Synthetic oligonucleotide
  Sense strand starting at position 1370 of SEQ ID NO: 1887982
guguaaauacuuuauacag

SEQ ID NO: 2501907 - RNA, 19 nt, Artificial Sequence
  Description of Artificial Sequence: Synthetic oligonucleotide
  Antisense strand to SEQ ID NO: 2501906
cuguauaaaguauuuacac

SEQ ID NO: 2501908 - RNA, 19 nt, Artificial Sequence
  Description of Artificial Sequence: Synthetic oligonucleotide
  Sense strand starting at position 1402 of SEQ ID NO: 1887982
agaagaggcuuccuggcaa

SEQ ID NO: 2501909 - RNA, 19 nt, Artificial Sequence
  Description of Artificial Sequence: Synthetic oligonucleotide
  Antisense strand to SEQ ID NO: 2501908
uugccaggaagccucuucu

SEQ ID NO: 2501910 - RNA, 19 nt, Artificial Sequence
  Description of Artificial Sequence: Synthetic oligonucleotide
  Sense strand starting at position 1477 of SEQ ID NO: 1887982
cugagaguugaagagucuu

SEQ ID NO: 2501911 - RNA, 19 nt, Artificial Sequence
  Description of Artificial Sequence: Synthetic oligonucleotide
  Antisense strand to SEQ ID NO: 2501910
aagacucuucaacucucag

SEQ ID NO: 2501912 - RNA, 19 nt, Artificial Sequence
  Description of Artificial Sequence: Synthetic oligonucleotide
  Sense strand starting at position 2070 of SEQ ID NO: 1887982
cgaguugcugggagccaua

SEQ ID NO: 2501913 - RNA, 19 nt, Artificial Sequence
  Description of Artificial Sequence: Synthetic oligonucleotide
  Antisense strand to SEQ ID NO: 2501912
uauggcucccagcaacucg

SEQ ID NO: 2501914 - RNA, 19 nt, Artificial Sequence
  Description of Artificial Sequence: Synthetic oligonucleotide
  Sense strand starting at position 2257 of SEQ ID NO: 1887982
aaacuagguguuugaaauu

SEQ ID NO: 2501915 - RNA, 19 nt, Artificial Sequence
  Description of Artificial Sequence: Synthetic oligonucleotide
  Antisense strand to SEQ ID NO: 2501914
aauuucaaacaccuaguuu

SEQ ID NO: 2501916 - RNA, 19 nt, Artificial Sequence
  Description of Artificial Sequence: Synthetic oligonucleotide
  Sense strand starting at position 2268 of SEQ ID NO: 1887982
uugaaauuaucuuuccgua

SEQ ID NO: 2501917 - RNA, 19 nt, Artificial Sequence
  Description of Artificial Sequence: Synthetic oligonucleotide
  Antisense strand to SEQ ID NO: 2501916
uacggaaagauaauuucaa

SEQ ID NO: 2501918 - RNA, 19 nt, Artificial Sequence
  Description of Artificial Sequence: Synthetic oligonucleotide
  Sense strand starting at position 2273 of SEQ ID NO: 1887982
auuaucuuuccguacuguu

SEQ ID NO: 2501919 - RNA, 19 nt, Artificial Sequence
  Description of Artificial Sequence: Synthetic oligonucleotide
  Antisense strand to SEQ ID NO: 2501918
aacaguacggaaagauaau

SEQ ID NO: 2501920 - RNA, 19 nt, Artificial Sequence
  Description of Artificial Sequence: Synthetic oligonucleotide
  Sense strand starting at position 2335 of SEQ ID NO: 1887982
aggauuaauaguggcaauu

SEQ ID NO: 2501921 - RNA, 19 nt, Artificial Sequence
  Description of Artificial Sequence: Synthetic oligonucleotide
  Antisense strand to SEQ ID NO: 2501920
aauugccacuauuaauccu

SEQ ID NO: 2501922 - RNA, 19 nt, Artificial Sequence
  Description of Artificial Sequence: Synthetic oligonucleotide
  Sense strand starting at position 2354 of SEQ ID NO: 1887982
agacuaaucacgugugaga

SEQ ID NO: 2501923 - RNA, 19 nt, Artificial Sequence
  Description of Artificial Sequence: Synthetic oligonucleotide
  Antisense strand to SEQ ID NO: 2501922
ucucacacgugauuagucu

SEQ ID NO: 2501924 - RNA, 19 nt, Artificial Sequence
  Description of Artificial Sequence: Synthetic oligonucleotide
  Sense strand starting at position 2356 of SEQ ID NO: 1887982
acuaaucacgugugagaaa

SEQ ID NO: 2501925 - RNA, 19 nt, Artificial Sequence
  Description of Artificial Sequence: Synthetic oligonucleotide
  Antisense strand to SEQ ID NO: 2501924
uuucucacacgugauuagu

SEQ ID NO: 2501926 - RNA, 19 nt, Artificial Sequence
  Description of Artificial Sequence: Synthetic oligonucleotide
  Sense strand starting at position 2433 of SEQ ID NO: 1887982
guggguucuaucuaagaug

SEQ ID NO: 2501927 - RNA, 19 nt, Artificial Sequence
  Description of Artificial Sequence: Synthetic oligonucleotide
  Antisense strand to SEQ ID NO: 2501926
caucuuagauagaacccac

SEQ ID NO: 2501928 - RNA, 19 nt, Artificial Sequence
  Description of Artificial Sequence: Synthetic oligonucleotide
  Sense strand starting at position 2540 of SEQ ID NO: 1887982
ccaucauacguuuaggaga

SEQ ID NO: 2501929 - RNA, 19 nt, Artificial Sequence
  Description of Artificial Sequence: Synthetic oligonucleotide
  Antisense strand to SEQ ID NO: 2501928
ucuccuaaacguaugaugg

SEQ ID NO: 2501930 - RNA, 19 nt, Artificial Sequence
  Description of Artificial Sequence: Synthetic oligonucleotide
  Sense strand starting at position 2585 of SEQ ID NO: 1887982
aguaacaccucucuguauu

SEQ ID NO: 2501931 - RNA, 19 nt, Artificial Sequence
  Description of Artificial Sequence: Synthetic oligonucleotide
  Antisense strand to SEQ ID NO: 2501930
aauacagagagguguuacu

SEQ ID NO: 2501932 - RNA, 19 nt, Artificial Sequence
  Description of Artificial Sequence: Synthetic oligonucleotide
  Sense strand starting at position 2586 of SEQ ID NO: 1887982
guaacaccucucuguauua

SEQ ID NO: 2501933 - RNA, 19 nt, Artificial Sequence
  Description of Artificial Sequence: Synthetic oligonucleotide
  Antisense strand to SEQ ID NO: 2501932
uaauacagagagguguuac

SEQ ID NO: 2501934 - RNA, 19 nt, Artificial Sequence
  Description of Artificial Sequence: Synthetic oligonucleotide
  Sense strand starting at position 2608 of SEQ ID NO: 1887982
gccuguagccuuuauggca

SEQ ID NO: 2501935 - RNA, 19 nt, Artificial Sequence
  Description of Artificial Sequence: Synthetic oligonucleotide
  Antisense strand to SEQ ID NO: 2501934
ugccauaaaggcuacaggc

SEQ ID NO: 2501936 - RNA, 19 nt, Artificial Sequence
  Description of Artificial Sequence: Synthetic oligonucleotide
  Sense strand starting at position 3013 of SEQ ID NO: 1887982
cgagcucuguucuuauuaa

SEQ ID NO: 2501937 - RNA, 19 nt, Artificial Sequence
  Description of Artificial Sequence: Synthetic oligonucleotide
  Antisense strand to SEQ ID NO: 2501936
uuaauaagaacagagcucg

SEQ ID NO: 2501938 - RNA, 19 nt, Artificial Sequence
  Description of Artificial Sequence: Synthetic oligonucleotide
  Sense strand starting at position 3053 of SEQ ID NO: 1887982
ggagucaguccagggugau

SEQ ID NO: 2501939 - RNA, 19 nt, Artificial Sequence
  Description of Artificial Sequence: Synthetic oligonucleotide
  Antisense strand to SEQ ID NO: 2501938
aucacccuggacugacucc

SEQ ID NO: 2501940 - RNA, 19 nt, Artificial Sequence
  Description of Artificial Sequence: Synthetic oligonucleotide
  Sense strand starting at position 3054 of SEQ ID NO: 1887982
gagucaguccagggugaug

SEQ ID NO: 2501941 - RNA, 19 nt, Artificial Sequence
  Description of Artificial Sequence: Synthetic oligonucleotide
  Antisense strand to SEQ ID NO: 2501940
caucacccuggacugacuc

SEQ ID NO: 2501942 - RNA, 19 nt, Artificial Sequence
  Description of Artificial Sequence: Synthetic oligonucleotide
  Sense strand starting at position 3379 of SEQ ID NO: 1887982
gaacauguuggcggaagaa

SEQ ID NO: 2501943 - RNA, 19 nt, Artificial Sequence
  Description of Artificial Sequence: Synthetic oligonucleotide
  Antisense strand to SEQ ID NO: 2501942
uucuuccgccaacauguuc

SEQ ID NO: 2501944 - RNA, 19 nt, Artificial Sequence
  Description of Artificial Sequence: Synthetic oligonucleotide
  Sense strand starting at position 3649 of SEQ ID NO: 1887982
gcgauaacgcagggaucua

SEQ ID NO: 2501945 - RNA, 19 nt, Artificial Sequence
  Description of Artificial Sequence: Synthetic oligonucleotide
  Antisense strand to SEQ ID NO: 2501944
uagaucccugcguuaucgc

SEQ ID NO: 2501946 - RNA, 19 nt, Artificial Sequence
  Description of Artificial Sequence: Synthetic oligonucleotide
  Sense strand starting at position 3650 of SEQ ID NO: 1887982
cgauaacgcagggaucuaa

SEQ ID NO: 2501947 - RNA, 19 nt, Artificial Sequence
  Description of Artificial Sequence: Synthetic oligonucleotide
  Antisense strand to SEQ ID NO: 2501946
uuagaucccugcguuaucg

SEQ ID NO: 2501948 - RNA, 19 nt, Artificial Sequence
  Description of Artificial Sequence: Synthetic oligonucleotide
  Sense strand starting at position 3928 of SEQ ID NO: 1887982
gcauuugacugucaauagu

SEQ ID NO: 2501949 - RNA, 19 nt, Artificial Sequence
  Description of Artificial Sequence: Synthetic oligonucleotide
  Antisense strand to SEQ ID NO: 2501948
acuauugacagucaaaugc

SEQ ID NO: 2501950 - RNA, 19 nt, Artificial Sequence
  Description of Artificial Sequence: Synthetic oligonucleotide
  Sense strand starting at position 3934 of SEQ ID NO: 1887982
gacugucaauaguuaggau

SEQ ID NO: 2501951 - RNA, 19 nt, Artificial Sequence
  Description of Artificial Sequence: Synthetic oligonucleotide
  Antisense strand to SEQ ID NO: 2501950
auccuaacuauugacaguc

SEQ ID NO: 2501952 - RNA, 19 nt, Artificial Sequence
  Description of Artificial Sequence: Synthetic oligonucleotide
  Sense strand starting at position 71 of SEQ ID NO: 1887983
aagaauauuccacguggau

SEQ ID NO: 2501953 - RNA, 19 nt, Artificial Sequence
  Description of Artificial Sequence: Synthetic oligonucleotide
  Antisense strand to SEQ ID NO: 2501952
auccacguggaauauucuu

SEQ ID NO: 2501954 - RNA, 19 nt, Artificial Sequence
  Description of Artificial Sequence: Synthetic oligonucleotide
  Sense strand starting at position 160 of SEQ ID NO: 1887983
gagguaauggccuaauugu

SEQ ID NO: 2501955 - RNA, 19 nt, Artificial Sequence
  Description of Artificial Sequence: Synthetic oligonucleotide
  Antisense strand to SEQ ID NO: 2501954
acaauuaggccauuaccuc

SEQ ID NO: 2501956 - RNA, 19 nt, Artificial Sequence
  Description of Artificial Sequence: Synthetic oligonucleotide
  Sense strand starting at position 195 of SEQ ID NO: 1887983
agaagugacucaguuagaa

SEQ ID NO: 2501957 - RNA, 19 nt, Artificial Sequence
  Description of Artificial Sequence: Synthetic oligonucleotide
  Antisense strand to SEQ ID NO: 2501956
uucuaacugagucacuucu

SEQ ID NO: 2501958 - RNA, 19 nt, Artificial Sequence
  Description of Artificial Sequence: Synthetic oligonucleotide
  Sense strand starting at position 392 of SEQ ID NO: 1887983
gggcuaacuaauggucaga

SEQ ID NO: 2501959 - RNA, 19 nt, Artificial Sequence
  Description of Artificial Sequence: Synthetic oligonucleotide
  Antisense strand to SEQ ID NO: 2501958
ucugaccauuaguuagccc

SEQ ID NO: 2501960 - RNA, 19 nt, Artificial Sequence
  Description of Artificial Sequence: Synthetic oligonucleotide
  Sense strand starting at position 394 of SEQ ID NO: 1887983
gcuaacuaauggucagaug

SEQ ID NO: 2501961 - RNA, 19 nt, Artificial Sequence
  Description of Artificial Sequence: Synthetic oligonucleotide
  Antisense strand to SEQ ID NO: 2501960
caucugaccauuaguuagc

SEQ ID NO: 2501962 - RNA, 19 nt, Artificial Sequence
  Description of Artificial Sequence: Synthetic oligonucleotide
  Sense strand starting at position 415 of SEQ ID NO: 1887983
guauacgguguaucguuua

SEQ ID NO: 2501963 - RNA, 19 nt, Artificial Sequence
  Description of Artificial Sequence: Synthetic oligonucleotide
  Antisense strand to SEQ ID NO: 2501962
uaaacgauacaccguauac

SEQ ID NO: 2501964 - RNA, 19 nt, Artificial Sequence
  Description of Artificial Sequence: Synthetic oligonucleotide
  Sense strand starting at position 603 of SEQ ID NO: 1887983
ucuagaaagucuucuagca

SEQ ID NO: 2501965 - RNA, 19 nt, Artificial Sequence
  Description of Artificial Sequence: Synthetic oligonucleotide
  Antisense strand to SEQ ID NO: 2501964
ugcuagaagacuuucuaga

SEQ ID NO: 2501966 - RNA, 19 nt, Artificial Sequence
  Description of Artificial Sequence: Synthetic oligonucleotide
  Sense strand starting at position 681 of SEQ ID NO: 1887983
gggcuccauucuuccuaua

SEQ ID NO: 2501967 - RNA, 19 nt, Artificial Sequence
  Description of Artificial Sequence: Synthetic oligonucleotide
  Antisense strand to SEQ ID NO: 2501966
uauaggaagaauggagccc

SEQ ID NO: 2501968 - RNA, 19 nt, Artificial Sequence
  Description of Artificial Sequence: Synthetic oligonucleotide
  Sense strand starting at position 683 of SEQ ID NO: 1887983
gcuccauucuuccuauagu

SEQ ID NO: 2501969 - RNA, 19 nt, Artificial Sequence
  Description of Artificial Sequence: Synthetic oligonucleotide
  Antisense strand to SEQ ID NO: 2501968
acuauaggaagaauggagc

SEQ ID NO: 2501970 - RNA, 19 nt, Artificial Sequence
  Description of Artificial Sequence: Synthetic oligonucleotide
  Sense strand starting at position 1055 of SEQ ID NO: 1887983
ggcuauuuaccaggugcca

SEQ ID NO: 2501971 - RNA, 19 nt, Artificial Sequence
  Description of Artificial Sequence: Synthetic oligonucleotide
  Antisense strand to SEQ ID NO: 2501970
uggcaccugguaaauagcc

SEQ ID NO: 2501972 - RNA, 19 nt, Artificial Sequence
  Description of Artificial Sequence: Synthetic oligonucleotide
  Sense strand starting at position 2199 of SEQ ID NO: 1887983
acagucguccucuggugaa

SEQ ID NO: 2501973 - RNA, 19 nt, Artificial Sequence
  Description of Artificial Sequence: Synthetic oligonucleotide
  Antisense strand to SEQ ID NO: 2501972
uucaccagaggacgacugu

SEQ ID NO: 2501974 - RNA, 19 nt, Artificial Sequence
  Description of Artificial Sequence: Synthetic oligonucleotide
  Sense strand starting at position 2311 of SEQ ID NO: 1887983
caaggucuuccgggucauu

SEQ ID NO: 2501975 - RNA, 19 nt, Artificial Sequence
  Description of Artificial Sequence: Synthetic oligonucleotide
  Antisense strand to SEQ ID NO: 2501974
aaugacccggaagaccuug

SEQ ID NO: 2501976 - RNA, 19 nt, Artificial Sequence
  Description of Artificial Sequence: Synthetic oligonucleotide
  Sense strand starting at position 2344 of SEQ ID NO: 1887983
aacguuucccuccgagaca

SEQ ID NO: 2501977 - RNA, 19 nt, Artificial Sequence
  Description of Artificial Sequence: Synthetic oligonucleotide
  Antisense strand to SEQ ID NO: 2501976
ugucucggagggaaacguu

SEQ ID NO: 2501978 - RNA, 19 nt, Artificial Sequence
  Description of Artificial Sequence: Synthetic oligonucleotide
  Sense strand starting at position 2412 of SEQ ID NO: 1887983
gggcuccucucaucccaaa

SEQ ID NO: 2501979 - RNA, 19 nt, Artificial Sequence
  Description of Artificial Sequence: Synthetic oligonucleotide
  Antisense strand to SEQ ID NO: 2501978
uuugggaugagaggagccc

SEQ ID NO: 2501980 - RNA, 19 nt, Artificial Sequence
  Description of Artificial Sequence: Synthetic oligonucleotide
  Sense strand starting at position 2527 of SEQ ID NO: 1887983
gacugucacgacuguaguu

SEQ ID NO: 2501981 - RNA, 19 nt, Artificial Sequence
  Description of Artificial Sequence: Synthetic oligonucleotide
  Antisense strand to SEQ ID NO: 2501980
aacuacagucgugacaguc

SEQ ID NO: 2501982 - RNA, 19 nt, Artificial Sequence
  Description of Artificial Sequence: Synthetic oligonucleotide
  Sense strand starting at position 2536 of SEQ ID NO: 1887983
gacuguaguucgccaacca

SEQ ID NO: 2501983 - RNA, 19 nt, Artificial Sequence
  Description of Artificial Sequence: Synthetic oligonucleotide
  Antisense strand to SEQ ID NO: 2501982
ugguuggcgaacuacaguc

SEQ ID NO: 2501984 - RNA, 19 nt, Artificial Sequence
  Description of Artificial Sequence: Synthetic oligonucleotide
  Sense strand starting at position 2537 of SEQ ID NO: 1887983
acuguaguucgccaaccaa

SEQ ID NO: 2501985 - RNA, 19 nt, Artificial Sequence
  Description of Artificial Sequence: Synthetic oligonucleotide
  Antisense strand to SEQ ID NO: 2501984
uugguuggcgaacuacagu

SEQ ID NO: 2501986 - RNA, 19 nt, Artificial Sequence
  Description of Artificial Sequence: Synthetic oligonucleotide
  Sense strand starting at position 2554 of SEQ ID NO: 1887983
aagggcauuuccuggaaau

SEQ ID NO: 2501987 - RNA, 19 nt, Artificial Sequence
  Description of Artificial Sequence: Synthetic oligonucleotide
  Antisense strand to SEQ ID NO: 2501986
auuuccaggaaaugcccuu

SEQ ID NO: 2501988 - RNA, 19 nt, Artificial Sequence
  Description of Artificial Sequence: Synthetic oligonucleotide
  Sense strand starting at position 2578 of SEQ ID NO: 1887983
gggacacguaucugugaca

SEQ ID NO: 2501989 - RNA, 19 nt, Artificial Sequence
  Description of Artificial Sequence: Synthetic oligonucleotide
  Antisense strand to SEQ ID NO: 2501988
ugucacagauacguguccc

SEQ ID NO: 2501990 - RNA, 19 nt, Artificial Sequence
  Description of Artificial Sequence: Synthetic oligonucleotide
  Sense strand starting at position 2772 of SEQ ID NO: 1887983
uggaccucucuguaugcaa

SEQ ID NO: 2501991 - RNA, 19 nt, Artificial Sequence
  Description of Artificial Sequence: Synthetic oligonucleotide
  Antisense strand to SEQ ID NO: 2501990
uugcauacagagaggucca

SEQ ID NO: 2501992 - RNA, 19 nt, Artificial Sequence
  Description of Artificial Sequence: Synthetic oligonucleotide
  Sense strand starting at position 2791 of SEQ ID NO: 1887983
gccagagcagucuacuguu

SEQ ID NO: 2501993 - RNA, 19 nt, Artificial Sequence
  Description of Artificial Sequence: Synthetic oligonucleotide
  Antisense strand to SEQ ID NO: 2501992
aacaguagacugcucuggc

SEQ ID NO: 2501994 - RNA, 19 nt, Artificial Sequence
  Description of Artificial Sequence: Synthetic oligonucleotide
  Sense strand starting at position 2799 of SEQ ID NO: 1887983
agucuacuguuuguguaua

SEQ ID NO: 2501995 - RNA, 19 nt, Artificial Sequence
  Description of Artificial Sequence: Synthetic oligonucleotide
  Antisense strand to SEQ ID NO: 2501994
uauacacaaacaguagacu

SEQ ID NO: 2501996 - RNA, 19 nt, Artificial Sequence
  Description of Artificial Sequence: Synthetic oligonucleotide
  Sense strand starting at position 2801 of SEQ ID NO: 1887983
ucuacuguuuguguauauu

SEQ ID NO: 2501997 - RNA, 19 nt, Artificial Sequence
  Description of Artificial Sequence: Synthetic oligonucleotide
  Antisense strand to SEQ ID NO: 2501996
aauauacacaaacaguaga

SEQ ID NO: 2501998 - RNA, 19 nt, Artificial Sequence
  Description of Artificial Sequence: Synthetic oligonucleotide
  Sense strand starting at position 2811 of SEQ ID NO: 1887983
guguauauuuggguuguuu

SEQ ID NO: 2501999 - RNA, 19 nt, Artificial Sequence
  Description of Artificial Sequence: Synthetic oligonucleotide
  Antisense strand to SEQ ID NO: 2501998
aaacaacccaaauauacac

SEQ ID NO: 2502000 - RNA, 19 nt, Artificial Sequence
  Description of Artificial Sequence: Synthetic oligonucleotide
  Sense strand starting at position 2813 of SEQ ID NO: 1887983
guauauuuggguuguuuac

SEQ ID NO: 2502001 - RNA, 19 nt, Artificial Sequence
  Description of Artificial Sequence: Synthetic oligonucleotide
  Antisense strand to SEQ ID NO: 2502000
guaaacaacccaaauauac

SEQ ID NO: 2502002 - RNA, 19 nt, Artificial Sequence
  Description of Artificial Sequence: Synthetic oligonucleotide
  Sense strand starting at position 2882 of SEQ ID NO: 1887983
uaaauagugucgcuauaga

SEQ ID NO: 2502003 - RNA, 19 nt, Artificial Sequence
  Description of Artificial Sequence: Synthetic oligonucleotide
  Antisense strand to SEQ ID NO: 2502002
ucuauagcgacacuauuua

SEQ ID NO: 2502004 - RNA, 19 nt, Artificial Sequence
  Description of Artificial Sequence: Synthetic oligonucleotide
  Sense strand starting at position 2907 of SEQ ID NO: 1887983
uguacuuauuaaguacuga

SEQ ID NO: 2502005 - RNA, 19 nt, Artificial Sequence
  Description of Artificial Sequence: Synthetic oligonucleotide
  Antisense strand to SEQ ID NO: 2502004
ucaguacuuaauaaguaca

SEQ ID NO: 2502006 - RNA, 19 nt, Artificial Sequence
  Description of Artificial Sequence: Synthetic oligonucleotide
  Sense strand starting at position 2926 of SEQ ID NO: 1887983
ccugcaugaucuucgugaa

SEQ ID NO: 2502007 - RNA, 19 nt, Artificial Sequence
  Description of Artificial Sequence: Synthetic oligonucleotide
  Antisense strand to SEQ ID NO: 2502006
uucacgaagaucaugcagg

SEQ ID NO: 2502008 - RNA, 19 nt, Artificial Sequence
  Description of Artificial Sequence: Synthetic oligonucleotide
  Sense strand starting at position 2927 of SEQ ID NO: 1887983
cugcaugaucuucgugaag

SEQ ID NO: 2502009 - RNA, 19 nt, Artificial Sequence
  Description of Artificial Sequence: Synthetic oligonucleotide
  Antisense strand to SEQ ID NO: 2502008
cuucacgaagaucaugcag

SEQ ID NO: 2502010 - RNA, 19 nt, Artificial Sequence
  Description of Artificial Sequence: Synthetic oligonucleotide
  Sense strand starting at position 2948 of SEQ ID NO: 1887983
gugcuucuguuaccagaaa

SEQ ID NO: 2502011 - RNA, 19 nt, Artificial Sequence
  Description of Artificial Sequence: Synthetic oligonucleotide
  Antisense strand to SEQ ID NO: 2502010
uuucugguaacagaagcac

SEQ ID NO: 2502012 - RNA, 19 nt, Artificial Sequence
  Description of Artificial Sequence: Synthetic oligonucleotide
  Sense strand starting at position 2994 of SEQ ID NO: 1887983
guucuuagagcucacgcaa

SEQ ID NO: 2502013 - RNA, 19 nt, Artificial Sequence
  Description of Artificial Sequence: Synthetic oligonucleotide
  Antisense strand to SEQ ID NO: 2502012
uugcgugagcucuaagaac

SEQ ID NO: 2502014 - RNA, 19 nt, Artificial Sequence
  Description of Artificial Sequence: Synthetic oligonucleotide
  Sense strand starting at position 3078 of SEQ ID NO: 1887983
uggguacuccauuguuaga

SEQ ID NO: 2502015 - RNA, 19 nt, Artificial Sequence
  Description of Artificial Sequence: Synthetic oligonucleotide
  Antisense strand to SEQ ID NO: 2502014
ucuaacaauggaguaccca

SEQ ID NO: 2502016 - RNA, 19 nt, Artificial Sequence
  Description of Artificial Sequence: Synthetic oligonucleotide
  Sense strand starting at position 3119 of SEQ ID NO: 1887983
uagggauacuuguauuuau

SEQ ID NO: 2502017 - RNA, 19 nt, Artificial Sequence
  Description of Artificial Sequence: Synthetic oligonucleotide
  Antisense strand to SEQ ID NO: 2502016
auaaauacaaguaucccua

SEQ ID NO: 2502018 - RNA, 19 nt, Artificial Sequence
  Description of Artificial Sequence: Synthetic oligonucleotide
  Sense strand starting at position 3139 of SEQ ID NO: 1887983
gcuugaugaugugcuaaac

SEQ ID NO: 2502019 - RNA, 19 nt, Artificial Sequence
  Description of Artificial Sequence: Synthetic oligonucleotide
  Antisense strand to SEQ ID NO: 2502018
guuuagcacaucaucaagc

SEQ ID NO: 2502020 - RNA, 19 nt, Artificial Sequence
  Description of Artificial Sequence: Synthetic oligonucleotide
  Sense strand starting at position 3303 of SEQ ID NO: 1887983
guuucucuuagcgugcuaa

SEQ ID NO: 2502021 - RNA, 19 nt, Artificial Sequence
  Description of Artificial Sequence: Synthetic oligonucleotide
  Antisense strand to SEQ ID NO: 2502020
uuagcacgcuaagagaaac

SEQ ID NO: 2502022 - RNA, 19 nt, Artificial Sequence
  Description of Artificial Sequence: Synthetic oligonucleotide
  Sense strand starting at position 3305 of SEQ ID NO: 1887983
uucucuuagcgugcuaaug

SEQ ID NO: 2502023 - RNA, 19 nt, Artificial Sequence
  Description of Artificial Sequence: Synthetic oligonucleotide
  Antisense strand to SEQ ID NO: 2502022
cauuagcacgcuaagagaa

SEQ ID NO: 2502024 - RNA, 19 nt, Artificial Sequence
  Description of Artificial Sequence: Synthetic oligonucleotide
  Sense strand starting at position 3314 of SEQ ID NO: 1887983
cgugcuaaugcauauaauu

SEQ ID NO: 2502025 - RNA, 19 nt, Artificial Sequence
  Description of Artificial Sequence: Synthetic oligonucleotide
  Antisense strand to SEQ ID NO: 2502024
aauuauaugcauuagcacg

SEQ ID NO: 2502026 - RNA, 19 nt, Artificial Sequence
  Description of Artificial Sequence: Synthetic oligonucleotide
  Sense strand starting at position 3334 of SEQ ID NO: 1887983
gcauauaaccgagagguga

SEQ ID NO: 2502027 - RNA, 19 nt, Artificial Sequence
  Description of Artificial Sequence: Synthetic oligonucleotide
  Antisense strand to SEQ ID NO: 2502026
ucaccucucgguuauaugc

SEQ ID NO: 2502028 - RNA, 19 nt, Artificial Sequence
  Description of Artificial Sequence: Synthetic oligonucleotide
  Sense strand starting at position 3395 of SEQ ID NO: 1887983
uucuguauagcugaaggau

SEQ ID NO: 2502029 - RNA, 19 nt, Artificial Sequence
  Description of Artificial Sequence: Synthetic oligonucleotide
  Antisense strand to SEQ ID NO: 2502028
auccuucagcuauacagaa

SEQ ID NO: 2502030 - RNA, 19 nt, Artificial Sequence
  Description of Artificial Sequence: Synthetic oligonucleotide
  Sense strand starting at position 3772 of SEQ ID NO: 1887983
gucuuuaggagcuguaaca

SEQ ID NO: 2502031 - RNA, 19 nt, Artificial Sequence
  Description of Artificial Sequence: Synthetic oligonucleotide
  Antisense strand to SEQ ID NO: 2502030
uguuacagcuccuaaagac

SEQ ID NO: 2502032 - RNA, 19 nt, Artificial Sequence
  Description of Artificial Sequence: Synthetic oligonucleotide
  Sense strand starting at position 74 of SEQ ID NO: 1887984
gcuggaaacuaauuccaau

SEQ ID NO: 2502033 - RNA, 19 nt, Artificial Sequence
  Description of Artificial Sequence: Synthetic oligonucleotide
  Antisense strand to SEQ ID NO: 2502032
auuggaauuaguuuccagc

SEQ ID NO: 2502034 - RNA, 19 nt, Artificial Sequence
  Description of Artificial Sequence: Synthetic oligonucleotide
  Sense strand starting at position 389 of SEQ ID NO: 1887984
ggcuuauguuagucaauuc

SEQ ID NO: 2502035 - RNA, 19 nt, Artificial Sequence
  Description of Artificial Sequence: Synthetic oligonucleotide
  Antisense strand to SEQ ID NO: 2502034
gaauugacuaacauaagcc

SEQ ID NO: 2502036 - RNA, 19 nt, Artificial Sequence
  Description of Artificial Sequence: Synthetic oligonucleotide
  Sense strand starting at position 407 of SEQ ID NO: 1887984
caauuagaucccugcguua

SEQ ID NO: 2502037 - RNA, 19 nt, Artificial Sequence
  Description of Artificial Sequence: Synthetic oligonucleotide
  Antisense strand to SEQ ID NO: 2502036
uaacgcagggaucuaauug

SEQ ID NO: 2502038 - RNA, 19 nt, Artificial Sequence
  Description of Artificial Sequence: Synthetic oligonucleotide
  Sense strand starting at position 419 of SEQ ID NO: 1887984
ugcguuaucgcaaggacag

SEQ ID NO: 2502039 - RNA, 19 nt, Artificial Sequence
  Description of Artificial Sequence: Synthetic oligonucleotide
  Antisense strand to SEQ ID NO: 2502038
cuguccuugcgauaacgca

SEQ ID NO: 2502040 - RNA, 19 nt, Artificial Sequence
  Description of Artificial Sequence: Synthetic oligonucleotide
  Sense strand starting at position 460 of SEQ ID NO: 1887984
ccugucuugguguaccaga

SEQ ID NO: 2502041 - RNA, 19 nt, Artificial Sequence
  Description of Artificial Sequence: Synthetic oligonucleotide
  Antisense strand to SEQ ID NO: 2502040
ucugguacaccaagacagg

SEQ ID NO: 2502042 - RNA, 19 nt, Artificial Sequence
  Description of Artificial Sequence: Synthetic oligonucleotide
  Sense strand starting at position 667 of SEQ ID NO: 1887984
gcgucugucaugucuucuu

SEQ ID NO: 2502043 - RNA, 19 nt, Artificial Sequence
  Description of Artificial Sequence: Synthetic oligonucleotide
  Antisense strand to SEQ ID NO: 2502042
aagaagacaugacagacgc

SEQ ID NO: 2502044 - RNA, 19 nt, Artificial Sequence
  Description of Artificial Sequence: Synthetic oligonucleotide
  Sense strand starting at position 689 of SEQ ID NO: 1887984
ccaacauguuccucuggau

SEQ ID NO: 2502045 - RNA, 19 nt, Artificial Sequence
  Description of Artificial Sequence: Synthetic oligonucleotide
  Antisense strand to SEQ ID NO: 2502044
auccagaggaacauguugg

SEQ ID NO: 2502046 - RNA, 19 nt, Artificial Sequence
  Description of Artificial Sequence: Synthetic oligonucleotide
  Sense strand starting at position 1032 of SEQ ID NO: 1887984
cacuguaaugugggcuuaa

SEQ ID NO: 2502047 - RNA, 19 nt, Artificial Sequence
  Description of Artificial Sequence: Synthetic oligonucleotide
  Antisense strand to SEQ ID NO: 2502046
uuaagcccacauuacagug

SEQ ID NO: 2502048 - RNA, 19 nt, Artificial Sequence
  Description of Artificial Sequence: Synthetic oligonucleotide
  Sense strand starting at position 1033 of SEQ ID NO: 1887984
acuguaaugugggcuuaau

SEQ ID NO: 2502049 - RNA, 19 nt, Artificial Sequence
  Description of Artificial Sequence: Synthetic oligonucleotide
  Antisense strand to SEQ ID NO: 2502048
auuaagcccacauuacagu

SEQ ID NO: 2502050 - RNA, 19 nt, Artificial Sequence
  Description of Artificial Sequence: Synthetic oligonucleotide
  Sense strand starting at position 1383 of SEQ ID NO: 1887984
gcugacagucaaggugaau

SEQ ID NO: 2502051 - RNA, 19 nt, Artificial Sequence
  Description of Artificial Sequence: Synthetic oligonucleotide
  Antisense strand to SEQ ID NO: 2502050
auucaccuugacugucagc

SEQ ID NO: 2502052 - RNA, 19 nt, Artificial Sequence
  Description of Artificial Sequence: Synthetic oligonucleotide
  Sense strand starting at position 1473 of SEQ ID NO: 1887984
cuaauacagagagguguua

SEQ ID NO: 2502053 - RNA, 19 nt, Artificial Sequence
  Description of Artificial Sequence: Synthetic oligonucleotide
  Antisense strand to SEQ ID NO: 2502052
uaacaccucucuguauuag

SEQ ID NO: 2502054 - RNA, 19 nt, Artificial Sequence
  Description of Artificial Sequence: Synthetic oligonucleotide
  Sense strand starting at position 1575 of SEQ ID NO: 1887984
ucuguuugauuagccuuau

SEQ ID NO: 2502055 - RNA, 19 nt, Artificial Sequence
  Description of Artificial Sequence: Synthetic oligonucleotide
  Antisense strand to SEQ ID NO: 2502054
auaaggcuaaucaaacaga

SEQ ID NO: 2502056 - RNA, 19 nt, Artificial Sequence
  Description of Artificial Sequence: Synthetic oligonucleotide
  Sense strand starting at position 1576 of SEQ ID NO: 1887984
cuguuugauuagccuuauu

SEQ ID NO: 2502057 - RNA, 19 nt, Artificial Sequence
  Description of Artificial Sequence: Synthetic oligonucleotide
  Antisense strand to SEQ ID NO: 2502056
aauaaggcuaaucaaacag

SEQ ID NO: 2502058 - RNA, 19 nt, Artificial Sequence
  Description of Artificial Sequence: Synthetic oligonucleotide
  Sense strand starting at position 1704 of SEQ ID NO: 1887984
uuucucacacgugauuagu

SEQ ID NO: 2502059 - RNA, 19 nt, Artificial Sequence
  Description of Artificial Sequence: Synthetic oligonucleotide
  Antisense strand to SEQ ID NO: 2502058
acuaaucacgugugagaaa

SEQ ID NO: 2502060 - RNA, 19 nt, Artificial Sequence
  Description of Artificial Sequence: Synthetic oligonucleotide
  Sense strand starting at position 1710 of SEQ ID NO: 1887984
acacgugauuagucuaauu

SEQ ID NO: 2502061 - RNA, 19 nt, Artificial Sequence
  Description of Artificial Sequence: Synthetic oligonucleotide
  Antisense strand to SEQ ID NO: 2502060
aauuagacuaaucacgugu

SEQ ID NO: 2502062 - RNA, 19 nt, Artificial Sequence
  Description of Artificial Sequence: Synthetic oligonucleotide
  Sense strand starting at position 1715 of SEQ ID NO: 1887984
ugauuagucuaauugccac

SEQ ID NO: 2502063 - RNA, 19 nt, Artificial Sequence
  Description of Artificial Sequence: Synthetic oligonucleotide
  Antisense strand to SEQ ID NO: 2502062
guggcaauuagacuaauca

SEQ ID NO: 2502064 - RNA, 19 nt, Artificial Sequence
  Description of Artificial Sequence: Synthetic oligonucleotide
  Sense strand starting at position 1762 of SEQ ID NO: 1887984
aauagcauuucuguagcga

SEQ ID NO: 2502065 - RNA, 19 nt, Artificial Sequence
  Description of Artificial Sequence: Synthetic oligonucleotide
  Antisense strand to SEQ ID NO: 2502064
ucgcuacagaaaugcuauu

SEQ ID NO: 2502066 - RNA, 19 nt, Artificial Sequence
  Description of Artificial Sequence: Synthetic oligonucleotide
  Sense strand starting at position 1897 of SEQ ID NO: 1887984
ucugaccugguguguuaau

SEQ ID NO: 2502067 - RNA, 19 nt, Artificial Sequence
  Description of Artificial Sequence: Synthetic oligonucleotide
  Antisense strand to SEQ ID NO: 2502066
auuaacacaccaggucaga

SEQ ID NO: 2502068 - RNA, 19 nt, Artificial Sequence
  Description of Artificial Sequence: Synthetic oligonucleotide
  Sense strand starting at position 2509 of SEQ ID NO: 1887984
augcgaaccugagcuauua

SEQ ID NO: 2502069 - RNA, 19 nt, Artificial Sequence
  Description of Artificial Sequence: Synthetic oligonucleotide
  Antisense strand to SEQ ID NO: 2502068
uaauagcucagguucgcau

SEQ ID NO: 2502070 - RNA, 19 nt, Artificial Sequence
  Description of Artificial Sequence: Synthetic oligonucleotide
  Sense strand starting at position 2609 of SEQ ID NO: 1887984
aggaaacgauaguuaugau

SEQ ID NO: 2502071 - RNA, 19 nt, Artificial Sequence
  Description of Artificial Sequence: Synthetic oligonucleotide
  Antisense strand to SEQ ID NO: 2502070
aucauaacuaucguuuccu

SEQ ID NO: 2502072 - RNA, 19 nt, Artificial Sequence
  Description of Artificial Sequence: Synthetic oligonucleotide
  Sense strand starting at position 2662 of SEQ ID NO: 1887984
caggaagccucuucuuguu

SEQ ID NO: 2502073 - RNA, 19 nt, Artificial Sequence
  Description of Artificial Sequence: Synthetic oligonucleotide
  Antisense strand to SEQ ID NO: 2502072
aacaagaagaggcuuccug

SEQ ID NO: 2502074 - RNA, 19 nt, Artificial Sequence
  Description of Artificial Sequence: Synthetic oligonucleotide
  Sense strand starting at position 2667 of SEQ ID NO: 1887984
agccucuucuuguuuggaa

SEQ ID NO: 2502075 - RNA, 19 nt, Artificial Sequence
  Description of Artificial Sequence: Synthetic oligonucleotide
  Antisense strand to SEQ ID NO: 2502074
uuccaaacaagaagaggcu

SEQ ID NO: 2502076 - RNA, 19 nt, Artificial Sequence
  Description of Artificial Sequence: Synthetic oligonucleotide
  Sense strand starting at position 2668 of SEQ ID NO: 1887984
gccucuucuuguuuggaaa

SEQ ID NO: 2502077 - RNA, 19 nt, Artificial Sequence
  Description of Artificial Sequence: Synthetic oligonucleotide
  Antisense strand to SEQ ID NO: 2502076
uuuccaaacaagaagaggc

SEQ ID NO: 2502078 - RNA, 19 nt, Artificial Sequence
  Description of Artificial Sequence: Synthetic oligonucleotide
  Sense strand starting at position 2716 of SEQ ID NO: 1887984
agaugagagcaaugucauc

SEQ ID NO: 2502079 - RNA, 19 nt, Artificial Sequence
  Description of Artificial Sequence: Synthetic oligonucleotide
  Antisense strand to SEQ ID NO: 2502078
gaugacauugcucucaucu

SEQ ID NO: 2502080 - RNA, 19 nt, Artificial Sequence
  Description of Artificial Sequence: Synthetic oligonucleotide
  Sense strand starting at position 2721 of SEQ ID NO: 1887984
agagcaaugucaucugaaa

SEQ ID NO: 2502081 - RNA, 19 nt, Artificial Sequence
  Description of Artificial Sequence: Synthetic oligonucleotide
  Antisense strand to SEQ ID NO: 2502080
uuucagaugacauugcucu

SEQ ID NO: 2502082 - RNA, 19 nt, Artificial Sequence
  Description of Artificial Sequence: Synthetic oligonucleotide
  Sense strand starting at position 2768 of SEQ ID NO: 1887984
aggaucuguugugcagauu

SEQ ID NO: 2502083 - RNA, 19 nt, Artificial Sequence
  Description of Artificial Sequence: Synthetic oligonucleotide
  Antisense strand to SEQ ID NO: 2502082
aaucugcacaacagauccu

SEQ ID NO: 2502084 - RNA, 19 nt, Artificial Sequence
  Description of Artificial Sequence: Synthetic oligonucleotide
  Sense strand starting at position 2769 of SEQ ID NO: 1887984
ggaucuguugugcagauua

SEQ ID NO: 2502085 - RNA, 19 nt, Artificial Sequence
  Description of Artificial Sequence: Synthetic oligonucleotide
  Antisense strand to SEQ ID NO: 2502084
uaaucugcacaacagaucc

SEQ ID NO: 2502086 - RNA, 19 nt, Artificial Sequence
  Description of Artificial Sequence: Synthetic oligonucleotide
  Sense strand starting at position 2771 of SEQ ID NO: 1887984
aucuguugugcagauuacu

SEQ ID NO: 2502087 - RNA, 19 nt, Artificial Sequence
  Description of Artificial Sequence: Synthetic oligonucleotide
  Antisense strand to SEQ ID NO: 2502086
aguaaucugcacaacagau

SEQ ID NO: 2502088 - RNA, 19 nt, Artificial Sequence
  Description of Artificial Sequence: Synthetic oligonucleotide
  Sense strand starting at position 2774 of SEQ ID NO: 1887984
uguugugcagauuacuuaa

SEQ ID NO: 2502089 - RNA, 19 nt, Artificial Sequence
  Description of Artificial Sequence: Synthetic oligonucleotide
  Antisense strand to SEQ ID NO: 2502088
uuaaguaaucugcacaaca

SEQ ID NO: 2502090 - RNA, 19 nt, Artificial Sequence
  Description of Artificial Sequence: Synthetic oligonucleotide
  Sense strand starting at position 2777 of SEQ ID NO: 1887984
ugugcagauuacuuaacua

SEQ ID NO: 2502091 - RNA, 19 nt, Artificial Sequence
  Description of Artificial Sequence: Synthetic oligonucleotide
  Antisense strand to SEQ ID NO: 2502090
uaguuaaguaaucugcaca

SEQ ID NO: 2502092 - RNA, 19 nt, Artificial Sequence
  Description of Artificial Sequence: Synthetic oligonucleotide
  Sense strand starting at position 2906 of SEQ ID NO: 1887984
ugcauuaucccacagcagu

SEQ ID NO: 2502093 - RNA, 19 nt, Artificial Sequence
  Description of Artificial Sequence: Synthetic oligonucleotide
  Antisense strand to SEQ ID NO: 2502092
acugcugugggauaaugca

SEQ ID NO: 2502094 - RNA, 19 nt, Artificial Sequence
  Description of Artificial Sequence: Synthetic oligonucleotide
  Sense strand starting at position 2960 of SEQ ID NO: 1887984
auugaaaugucagagaauc

SEQ ID NO: 2502095 - RNA, 19 nt, Artificial Sequence
  Description of Artificial Sequence: Synthetic oligonucleotide
  Antisense strand to SEQ ID NO: 2502094
gauucucugacauuucaau

SEQ ID NO: 2502096 - RNA, 19 nt, Artificial Sequence
  Description of Artificial Sequence: Synthetic oligonucleotide
  Sense strand starting at position 3057 of SEQ ID NO: 1887984
gccagagaaacuuacguuu

SEQ ID NO: 2502097 - RNA, 19 nt, Artificial Sequence
  Description of Artificial Sequence: Synthetic oligonucleotide
  Antisense strand to SEQ ID NO: 2502096
aaacguaaguuucucuggc

SEQ ID NO: 2502098 - RNA, 19 nt, Artificial Sequence
  Description of Artificial Sequence: Synthetic oligonucleotide
  Sense strand starting at position 3285 of SEQ ID NO: 1887984
gggagaagugcuugaagcu

SEQ ID NO: 2502099 - RNA, 19 nt, Artificial Sequence
  Description of Artificial Sequence: Synthetic oligonucleotide
  Antisense strand to SEQ ID NO: 2502098
agcuucaagcacuucuccc

SEQ ID NO: 2502100 - RNA, 19 nt, Artificial Sequence
  Description of Artificial Sequence: Synthetic oligonucleotide
  Sense strand starting at position 3464 of SEQ ID NO: 1887984
aguggaaacaaguguuuaa

SEQ ID NO: 2502101 - RNA, 19 nt, Artificial Sequence
  Description of Artificial Sequence: Synthetic oligonucleotide
  Antisense strand to SEQ ID NO: 2502100
uuaaacacuuguuuccacu

SEQ ID NO: 2502102 - RNA, 19 nt, Artificial Sequence
  Description of Artificial Sequence: Synthetic oligonucleotide
  Sense strand starting at position 3467 of SEQ ID NO: 1887984
ggaaacaaguguuuaauua

SEQ ID NO: 2502103 - RNA, 19 nt, Artificial Sequence
  Description of Artificial Sequence: Synthetic oligonucleotide
  Antisense strand to SEQ ID NO: 2502102
uaauuaaacacuuguuucc

SEQ ID NO: 2502104 - RNA, 19 nt, Artificial Sequence
  Description of Artificial Sequence: Synthetic oligonucleotide
  Sense strand starting at position 3499 of SEQ ID NO: 1887984
gauguauaauguuuacgua

SEQ ID NO: 2502105 - RNA, 19 nt, Artificial Sequence
  Description of Artificial Sequence: Synthetic oligonucleotide
  Antisense strand to SEQ ID NO: 2502104
uacguaaacauuauacauc

SEQ ID NO: 2502106 - RNA, 19 nt, Artificial Sequence
  Description of Artificial Sequence: Synthetic oligonucleotide
  Sense strand starting at position 3513 of SEQ ID NO: 1887984
acguaauaacuccaaugca

SEQ ID NO: 2502107 - RNA, 19 nt, Artificial Sequence
  Description of Artificial Sequence: Synthetic oligonucleotide
  Antisense strand to SEQ ID NO: 2502106
ugcauuggaguuauuacgu

SEQ ID NO: 2502108 - RNA, 19 nt, Artificial Sequence
  Description of Artificial Sequence: Synthetic oligonucleotide
  Sense strand starting at position 3568 of SEQ ID NO: 1887984
cuuuguuacccucagucaa

SEQ ID NO: 2502109 - RNA, 19 nt, Artificial Sequence
  Description of Artificial Sequence: Synthetic oligonucleotide
  Antisense strand to SEQ ID NO: 2502108
uugacugaggguaacaaag

SEQ ID NO: 2502110 - RNA, 19 nt, Artificial Sequence
  Description of Artificial Sequence: Synthetic oligonucleotide
  Sense strand starting at position 3769 of SEQ ID NO: 1887984
uacugagauggguggauca

SEQ ID NO: 2502111 - RNA, 19 nt, Artificial Sequence
  Description of Artificial Sequence: Synthetic oligonucleotide
  Antisense strand to SEQ ID NO: 2502110
ugauccacccaucucagua

SEQ ID NO: 2502112 - RNA, 19 nt, Artificial Sequence
  Description of Artificial Sequence: Synthetic oligonucleotide
  Sense strand starting at position 81 of SEQ ID NO: 1887985
gacaauuuaucgucuguau

SEQ ID NO: 2502113 - RNA, 19 nt, Artificial Sequence
  Description of Artificial Sequence: Synthetic oligonucleotide
  Antisense strand to SEQ ID NO: 2502112
auacagacgauaaauuguc

SEQ ID NO: 2502114 - RNA, 19 nt, Artificial Sequence
  Description of Artificial Sequence: Synthetic oligonucleotide
  Sense strand starting at position 139 of SEQ ID NO: 1887985
uuuccuugucuacgaagaa

SEQ ID NO: 2502115 - RNA, 19 nt, Artificial Sequence
  Description of Artificial Sequence: Synthetic oligonucleotide
  Antisense strand to SEQ ID NO: 2502114
uucuucguagacaaggaaa

SEQ ID NO: 2502116 - RNA, 19 nt, Artificial Sequence
  Description of Artificial Sequence: Synthetic oligonucleotide
  Sense strand starting at position 664 of SEQ ID NO: 1887985
acgacaauauucccaaagu

SEQ ID NO: 2502117 - RNA, 19 nt, Artificial Sequence
  Description of Artificial Sequence: Synthetic oligonucleotide
  Antisense strand to SEQ ID NO: 2502116
acuuugggaauauugucgu

SEQ ID NO: 2502118 - RNA, 19 nt, Artificial Sequence
  Description of Artificial Sequence: Synthetic oligonucleotide
  Sense strand starting at position 773 of SEQ ID NO: 1887985
aaagaauggcuagguguaa

SEQ ID NO: 2502119 - RNA, 19 nt, Artificial Sequence
  Description of Artificial Sequence: Synthetic oligonucleotide
  Antisense strand to SEQ ID NO: 2502118
uuacaccuagccauucuuu

SEQ ID NO: 2502120 - RNA, 19 nt, Artificial Sequence
  Description of Artificial Sequence: Synthetic oligonucleotide
  Sense strand starting at position 827 of SEQ ID NO: 1887985
uuacaaaggugugcuugaa

SEQ ID NO: 2502121 - RNA, 19 nt, Artificial Sequence
  Description of Artificial Sequence: Synthetic oligonucleotide
  Antisense strand to SEQ ID NO: 2502120
uucaagcacaccuuuguaa

SEQ ID NO: 2502122 - RNA, 19 nt, Artificial Sequence
  Description of Artificial Sequence: Synthetic oligonucleotide
  Sense strand starting at position 831 of SEQ ID NO: 1887985
aaaggugugcuugaaucaa

SEQ ID NO: 2502123 - RNA, 19 nt, Artificial Sequence
  Description of Artificial Sequence: Synthetic oligonucleotide
  Antisense strand to SEQ ID NO: 2502122
uugauucaagcacaccuuu

SEQ ID NO: 2502124 - RNA, 19 nt, Artificial Sequence
  Description of Artificial Sequence: Synthetic oligonucleotide
  Sense strand starting at position 1005 of SEQ ID NO: 1887985
gcacacagcuuucugagau

SEQ ID NO: 2502125 - RNA, 19 nt, Artificial Sequence
  Description of Artificial Sequence: Synthetic oligonucleotide
  Antisense strand to SEQ ID NO: 2502124
aucucagaaagcugugugc

SEQ ID NO: 2502126 - RNA, 19 nt, Artificial Sequence
  Description of Artificial Sequence: Synthetic oligonucleotide
  Sense strand starting at position 1009 of SEQ ID NO: 1887985
acagcuuucugagauuuaa

SEQ ID NO: 2502127 - RNA, 19 nt, Artificial Sequence
  Description of Artificial Sequence: Synthetic oligonucleotide
  Antisense strand to SEQ ID NO: 2502126
uuaaaucucagaaagcugu

SEQ ID NO: 2502128 - RNA, 19 nt, Artificial Sequence
  Description of Artificial Sequence: Synthetic oligonucleotide
  Sense strand starting at position 1119 of SEQ ID NO: 1887985
uugcauguauguccuauuu

SEQ ID NO: 2502129 - RNA, 19 nt, Artificial Sequence
  Description of Artificial Sequence: Synthetic oligonucleotide
  Antisense strand to SEQ ID NO: 2502128
aaauaggacauacaugcaa

SEQ ID NO: 2502130 - RNA, 19 nt, Artificial Sequence
  Description of Artificial Sequence: Synthetic oligonucleotide
  Sense strand starting at position 1218 of SEQ ID NO: 1887985
cgauaaguauaacuggacu

SEQ ID NO: 2502131 - RNA, 19 nt, Artificial Sequence
  Description of Artificial Sequence: Synthetic oligonucleotide
  Antisense strand to SEQ ID NO: 2502130
aguccaguuauacuuaucg

SEQ ID NO: 2502132 - RNA, 19 nt, Artificial Sequence
  Description of Artificial Sequence: Synthetic oligonucleotide
  Sense strand starting at position 1284 of SEQ ID NO: 1887985
auaggcuauuuacaagagu

SEQ ID NO: 2502133 - RNA, 19 nt, Artificial Sequence
  Description of Artificial Sequence: Synthetic oligonucleotide
  Antisense strand to SEQ ID NO: 2502132
acucuuguaaauagccuau

SEQ ID NO: 2502134 - RNA, 19 nt, Artificial Sequence
  Description of Artificial Sequence: Synthetic oligonucleotide
  Sense strand starting at position 1361 of SEQ ID NO: 1887985
aaagguacucaagguaagu

SEQ ID NO: 2502135 - RNA, 19 nt, Artificial Sequence
  Description of Artificial Sequence: Synthetic oligonucleotide
  Antisense strand to SEQ ID NO: 2502134
acuuaccuugaguaccuuu

SEQ ID NO: 2502136 - RNA, 19 nt, Artificial Sequence
  Description of Artificial Sequence: Synthetic oligonucleotide
  Sense strand starting at position 1442 of SEQ ID NO: 1887985
ggugauuucuccucgcgau

SEQ ID NO: 2502137 - RNA, 19 nt, Artificial Sequence
  Description of Artificial Sequence: Synthetic oligonucleotide
  Antisense strand to SEQ ID NO: 2502136
aucgcgaggagaaaucacc

SEQ ID NO: 2502138 - RNA, 19 nt, Artificial Sequence
  Description of Artificial Sequence: Synthetic oligonucleotide
  Sense strand starting at position 1443 of SEQ ID NO: 1887985
gugauuucuccucgcgaug

SEQ ID NO: 2502139 - RNA, 19 nt, Artificial Sequence
  Description of Artificial Sequence: Synthetic oligonucleotide
  Antisense strand to SEQ ID NO: 2502138
caucgcgaggagaaaucac

SEQ ID NO: 2502140 - RNA, 19 nt, Artificial Sequence
  Description of Artificial Sequence: Synthetic oligonucleotide
  Sense strand starting at position 1782 of SEQ ID NO: 1887985
ggcuuacacgacugggaau

SEQ ID NO: 2502141 - RNA, 19 nt, Artificial Sequence
  Description of Artificial Sequence: Synthetic oligonucleotide
  Antisense strand to SEQ ID NO: 2502140
auucccagucguguaagcc

SEQ ID NO: 2502142 - RNA, 19 nt, Artificial Sequence
  Description of Artificial Sequence: Synthetic oligonucleotide
  Sense strand starting at position 1783 of SEQ ID NO: 1887985
gcuuacacgacugggaaua

SEQ ID NO: 2502143 - RNA, 19 nt, Artificial Sequence
  Description of Artificial Sequence: Synthetic oligonucleotide
  Antisense strand to SEQ ID NO: 2502142
uauucccagucguguaagc

SEQ ID NO: 2502144 - RNA, 19 nt, Artificial Sequence
  Description of Artificial Sequence: Synthetic oligonucleotide
  Sense strand starting at position 2188 of SEQ ID NO: 1887985
agugguaaagguugaauca

SEQ ID NO: 2502145 - RNA, 19 nt, Artificial Sequence
  Description of Artificial Sequence: Synthetic oligonucleotide
  Antisense strand to SEQ ID NO: 2502144
ugauucaaccuuuaccacu

SEQ ID NO: 2502146 - RNA, 19 nt, Artificial Sequence
  Description of Artificial Sequence: Synthetic oligonucleotide
  Sense strand starting at position 2206 of SEQ ID NO: 1887985
aggcaagaauugucaucua

SEQ ID NO: 2502147 - RNA, 19 nt, Artificial Sequence
  Description of Artificial Sequence: Synthetic oligonucleotide
  Antisense strand to SEQ ID NO: 2502146
uagaugacaauucuugccu

SEQ ID NO: 2502148 - RNA, 19 nt, Artificial Sequence
  Description of Artificial Sequence: Synthetic oligonucleotide
  Sense strand starting at position 2246 of SEQ ID NO: 1887985
uugcaugacgagcagaaua

SEQ ID NO: 2502149 - RNA, 19 nt, Artificial Sequence
  Description of Artificial Sequence: Synthetic oligonucleotide
  Antisense strand to SEQ ID NO: 2502148
uauucugcucgucaugcaa

SEQ ID NO: 2502150 - RNA, 19 nt, Artificial Sequence
  Description of Artificial Sequence: Synthetic oligonucleotide
  Sense strand starting at position 2248 of SEQ ID NO: 1887985
gcaugacgagcagaauauu

SEQ ID NO: 2502151 - RNA, 19 nt, Artificial Sequence
  Description of Artificial Sequence: Synthetic oligonucleotide
  Antisense strand to SEQ ID NO: 2502150
aauauucugcucgucaugc

SEQ ID NO: 2502152 - RNA, 19 nt, Artificial Sequence
  Description of Artificial Sequence: Synthetic oligonucleotide
  Sense strand starting at position 2301 of SEQ ID NO: 1887985
guauguuggaauggagaaa

SEQ ID NO: 2502153 - RNA, 19 nt, Artificial Sequence
  Description of Artificial Sequence: Synthetic oligonucleotide
  Antisense strand to SEQ ID NO: 2502152
uuucuccauuccaacauac

SEQ ID NO: 2502154 - RNA, 19 nt, Artificial Sequence
  Description of Artificial Sequence: Synthetic oligonucleotide
  Sense strand starting at position 2325 of SEQ ID NO: 1887985
auagaaauuguacagcgaa

SEQ ID NO: 2502155 - RNA, 19 nt, Artificial Sequence
  Description of Artificial Sequence: Synthetic oligonucleotide
  Antisense strand to SEQ ID NO: 2502154
uucgcuguacaauuucuau

SEQ ID NO: 2502156 - RNA, 19 nt, Artificial Sequence
  Description of Artificial Sequence: Synthetic oligonucleotide
  Sense strand starting at position 2328 of SEQ ID NO: 1887985
gaaauuguacagcgaagaa

SEQ ID NO: 2502157 - RNA, 19 nt, Artificial Sequence
  Description of Artificial Sequence: Synthetic oligonucleotide
  Antisense strand to SEQ ID NO: 2502156
uucuucgcuguacaauuuc

SEQ ID NO: 2502158 - RNA, 19 nt, Artificial Sequence
  Description of Artificial Sequence: Synthetic oligonucleotide
  Sense strand starting at position 2378 of SEQ ID NO: 1887985
caauaucaccagugagggu

SEQ ID NO: 2502159 - RNA, 19 nt, Artificial Sequence
  Description of Artificial Sequence: Synthetic oligonucleotide
  Antisense strand to SEQ ID NO: 2502158
acccucacuggugauauug

SEQ ID NO: 2502160 - RNA, 19 nt, Artificial Sequence
  Description of Artificial Sequence: Synthetic oligonucleotide
  Sense strand starting at position 2546 of SEQ ID NO: 1887985
cuguguauuugagcugucu

SEQ ID NO: 2502161 - RNA, 19 nt, Artificial Sequence
  Description of Artificial Sequence: Synthetic oligonucleotide
  Antisense strand to SEQ ID NO: 2502160
agacagcucaaauacacag

SEQ ID NO: 2502162 - RNA, 19 nt, Artificial Sequence
  Description of Artificial Sequence: Synthetic oligonucleotide
  Sense strand starting at position 2548 of SEQ ID NO: 1887985
guguauuugagcugucucu

SEQ ID NO: 2502163 - RNA, 19 nt, Artificial Sequence
  Description of Artificial Sequence: Synthetic oligonucleotide
  Antisense strand to SEQ ID NO: 2502162
agagacagcucaaauacac

SEQ ID NO: 2502164 - RNA, 19 nt, Artificial Sequence
  Description of Artificial Sequence: Synthetic oligonucleotide
  Sense strand starting at position 2558 of SEQ ID NO: 1887985
gcugucucucuugauuaaa

SEQ ID NO: 2502165 - RNA, 19 nt, Artificial Sequence
  Description of Artificial Sequence: Synthetic oligonucleotide
  Antisense strand to SEQ ID NO: 2502164
uuuaaucaagagagacagc

SEQ ID NO: 2502166 - RNA, 19 nt, Artificial Sequence
  Description of Artificial Sequence: Synthetic oligonucleotide
  Sense strand starting at position 2593 of SEQ ID NO: 1887985
agugacgucaugcaauauu

SEQ ID NO: 2502167 - RNA, 19 nt, Artificial Sequence
  Description of Artificial Sequence: Synthetic oligonucleotide
  Antisense strand to SEQ ID NO: 2502166
aauauugcaugacgucacu

SEQ ID NO: 2502168 - RNA, 19 nt, Artificial Sequence
  Description of Artificial Sequence: Synthetic oligonucleotide
  Sense strand starting at position 2704 of SEQ ID NO: 1887985
guugaauaauauuccguua

SEQ ID NO: 2502169 - RNA, 19 nt, Artificial Sequence
  Description of Artificial Sequence: Synthetic oligonucleotide
  Antisense strand to SEQ ID NO: 2502168
uaacggaauauuauucaac

SEQ ID NO: 2502170 - RNA, 19 nt, Artificial Sequence
  Description of Artificial Sequence: Synthetic oligonucleotide
  Sense strand starting at position 3018 of SEQ ID NO: 1887985
agagacagaugguuaguau

SEQ ID NO: 2502171 - RNA, 19 nt, Artificial Sequence
  Description of Artificial Sequence: Synthetic oligonucleotide
  Antisense strand to SEQ ID NO: 2502170
auacuaaccaucugucucu

SEQ ID NO: 2502172 - RNA, 19 nt, Artificial Sequence
  Description of Artificial Sequence: Synthetic oligonucleotide
  Sense strand starting at position 3021 of SEQ ID NO: 1887985
gacagaugguuaguauuau

SEQ ID NO: 2502173 - RNA, 19 nt, Artificial Sequence
  Description of Artificial Sequence: Synthetic oligonucleotide
  Antisense strand to SEQ ID NO: 2502172
auaauacuaaccaucuguc

SEQ ID NO: 2502174 - RNA, 19 nt, Artificial Sequence
  Description of Artificial Sequence: Synthetic oligonucleotide
  Sense strand starting at position 3029 of SEQ ID NO: 1887985
guuaguauuauccagggca

SEQ ID NO: 2502175 - RNA, 19 nt, Artificial Sequence
  Description of Artificial Sequence: Synthetic oligonucleotide
  Antisense strand to SEQ ID NO: 2502174
ugcccuggauaauacuaac

SEQ ID NO: 2502176 - RNA, 19 nt, Artificial Sequence
  Description of Artificial Sequence: Synthetic oligonucleotide
  Sense strand starting at position 3111 of SEQ ID NO: 1887985
gaccauggugcguauauau

SEQ ID NO: 2502177 - RNA, 19 nt, Artificial Sequence
  Description of Artificial Sequence: Synthetic oligonucleotide
  Antisense strand to SEQ ID NO: 2502176
auauauacgcaccaugguc

SEQ ID NO: 2502178 - RNA, 19 nt, Artificial Sequence
  Description of Artificial Sequence: Synthetic oligonucleotide
  Sense strand starting at position 3538 of SEQ ID NO: 1887985
ucaugugagcaucaaugga

SEQ ID NO: 2502179 - RNA, 19 nt, Artificial Sequence
  Description of Artificial Sequence: Synthetic oligonucleotide
  Antisense strand to SEQ ID NO: 2502178
uccauugaugcucacauga

SEQ ID NO: 2502180 - RNA, 19 nt, Artificial Sequence
  Description of Artificial Sequence: Synthetic oligonucleotide
  Sense strand starting at position 3542 of SEQ ID NO: 1887985
gugagcaucaauggacauu

SEQ ID NO: 2502181 - RNA, 19 nt, Artificial Sequence
  Description of Artificial Sequence: Synthetic oligonucleotide
  Antisense strand to SEQ ID NO: 2502180
aauguccauugaugcucac

SEQ ID NO: 2502182 - RNA, 19 nt, Artificial Sequence
  Description of Artificial Sequence: Synthetic oligonucleotide
  Sense strand starting at position 3571 of SEQ ID NO: 1887985
ccguaacuuggauauugua

SEQ ID NO: 2502183 - RNA, 19 nt, Artificial Sequence
  Description of Artificial Sequence: Synthetic oligonucleotide
  Antisense strand to SEQ ID NO: 2502182
uacaauauccaaguuacgg

SEQ ID NO: 2502184 - RNA, 19 nt, Artificial Sequence
  Description of Artificial Sequence: Synthetic oligonucleotide
  Sense strand starting at position 3622 of SEQ ID NO: 1887985
aucguuaugaggugauuau

SEQ ID NO: 2502185 - RNA, 19 nt, Artificial Sequence
  Description of Artificial Sequence: Synthetic oligonucleotide
  Antisense strand to SEQ ID NO: 2502184
auaaucaccucauaacgau

SEQ ID NO: 2502186 - RNA, 19 nt, Artificial Sequence
  Description of Artificial Sequence: Synthetic oligonucleotide
  Sense strand starting at position 3623 of SEQ ID NO: 1887985
ucguuaugaggugauuauu

SEQ ID NO: 2502187 - RNA, 19 nt, Artificial Sequence
  Description of Artificial Sequence: Synthetic oligonucleotide
  Antisense strand to SEQ ID NO: 2502186
aauaaucaccucauaacga

SEQ ID NO: 2502188 - RNA, 19 nt, Artificial Sequence
  Description of Artificial Sequence: Synthetic oligonucleotide
  Sense strand starting at position 3708 of SEQ ID NO: 1887985
ucuuuaagagccugaauac

SEQ ID NO: 2502189 - RNA, 19 nt, Artificial Sequence
  Description of Artificial Sequence: Synthetic oligonucleotide
  Antisense strand to SEQ ID NO: 2502188
guauucaggcucuuaaaga

SEQ ID NO: 2502190 - RNA, 19 nt, Artificial Sequence
  Description of Artificial Sequence: Synthetic oligonucleotide
  Sense strand starting at position 3709 of SEQ ID NO: 1887985
cuuuaagagccugaauacu

SEQ ID NO: 2502191 - RNA, 19 nt, Artificial Sequence
  Description of Artificial Sequence: Synthetic oligonucleotide
  Antisense strand to SEQ ID NO: 2502190
aguauucaggcucuuaaag

SEQ ID NO: 2502192 - RNA, 19 nt, Artificial Sequence
  Description of Artificial Sequence: Synthetic oligonucleotide
  Sense strand starting at position 88 of SEQ ID NO: 1887986
ccuauuccauccugggaaa

SEQ ID NO: 2502193 - RNA, 19 nt, Artificial Sequence
  Description of Artificial Sequence: Synthetic oligonucleotide
  Antisense strand to SEQ ID NO: 2502192
uuucccaggauggaauagg

SEQ ID NO: 2502194 - RNA, 19 nt, Artificial Sequence
  Description of Artificial Sequence: Synthetic oligonucleotide
  Sense strand starting at position 113 of SEQ ID NO: 1887986
gagagugucuaacaaguga

SEQ ID NO: 2502195 - RNA, 19 nt, Artificial Sequence
  Description of Artificial Sequence: Synthetic oligonucleotide
  Antisense strand to SEQ ID NO: 2502194
ucacuuguuagacacucuc

SEQ ID NO: 2502196 - RNA, 19 nt, Artificial Sequence
  Description of Artificial Sequence: Synthetic oligonucleotide
  Sense strand starting at position 117 of SEQ ID NO: 1887986
gugucuaacaagugaauga

SEQ ID NO: 2502197 - RNA, 19 nt, Artificial Sequence
  Description of Artificial Sequence: Synthetic oligonucleotide
  Antisense strand to SEQ ID NO: 2502196
ucauucacuuguuagacac

SEQ ID NO: 2502198 - RNA, 19 nt, Artificial Sequence
  Description of Artificial Sequence: Synthetic oligonucleotide
  Sense strand starting at position 140 of SEQ ID NO: 1887986
acaacccucuggcugaaua

SEQ ID NO: 2502199 - RNA, 19 nt, Artificial Sequence
  Description of Artificial Sequence: Synthetic oligonucleotide
  Antisense strand to SEQ ID NO: 2502198
uauucagccagaggguugu

SEQ ID NO: 2502200 - RNA, 19 nt, Artificial Sequence
  Description of Artificial Sequence: Synthetic oligonucleotide
  Sense strand starting at position 203 of SEQ ID NO: 1887986
auguacaugucucauagau

SEQ ID NO: 2502201 - RNA, 19 nt, Artificial Sequence
  Description of Artificial Sequence: Synthetic oligonucleotide
  Antisense strand to SEQ ID NO: 2502200
aucuaugagacauguacau

SEQ ID NO: 2502202 - RNA, 19 nt, Artificial Sequence
  Description of Artificial Sequence: Synthetic oligonucleotide
  Sense strand starting at position 205 of SEQ ID NO: 1887986
guacaugucucauagauag

SEQ ID NO: 2502203 - RNA, 19 nt, Artificial Sequence
  Description of Artificial Sequence: Synthetic oligonucleotide
  Antisense strand to SEQ ID NO: 2502202
cuaucuaugagacauguac

SEQ ID NO: 2502204 - RNA, 19 nt, Artificial Sequence
  Description of Artificial Sequence: Synthetic oligonucleotide
  Sense strand starting at position 288 of SEQ ID NO: 1887986
cauagaagucagcauguca

SEQ ID NO: 2502205 - RNA, 19 nt, Artificial Sequence
  Description of Artificial Sequence: Synthetic oligonucleotide
  Antisense strand to SEQ ID NO: 2502204
ugacaugcugacuucuaug

SEQ ID NO: 2502206 - RNA, 19 nt, Artificial Sequence
  Description of Artificial Sequence: Synthetic oligonucleotide
  Sense strand starting at position 841 of SEQ ID NO: 1887986
ugcuccaucgucgcaaauu

SEQ ID NO: 2502207 - RNA, 19 nt, Artificial Sequence
  Description of Artificial Sequence: Synthetic oligonucleotide
  Antisense strand to SEQ ID NO: 2502206
aauuugcgacgauggagca

SEQ ID NO: 2502208 - RNA, 19 nt, Artificial Sequence
  Description of Artificial Sequence: Synthetic oligonucleotide
  Sense strand starting at position 850 of SEQ ID NO: 1887986
gucgcaaauucuuuaaccu

SEQ ID NO: 2502209 - RNA, 19 nt, Artificial Sequence
  Description of Artificial Sequence: Synthetic oligonucleotide
  Antisense strand to SEQ ID NO: 2502208
agguuaaagaauuugcgac

SEQ ID NO: 2502210 - RNA, 19 nt, Artificial Sequence
  Description of Artificial Sequence: Synthetic oligonucleotide
  Sense strand starting at position 1398 of SEQ ID NO: 1887986
acaggagggcuuugaagua

SEQ ID NO: 2502211 - RNA, 19 nt, Artificial Sequence
  Description of Artificial Sequence: Synthetic oligonucleotide
  Antisense strand to SEQ ID NO: 2502210
uacuucaaagcccuccugu

SEQ ID NO: 2502212 - RNA, 19 nt, Artificial Sequence
  Description of Artificial Sequence: Synthetic oligonucleotide
  Sense strand starting at position 1470 of SEQ ID NO: 1887986
aagaacacacggugucaua

SEQ ID NO: 2502213 - RNA, 19 nt, Artificial Sequence
  Description of Artificial Sequence: Synthetic oligonucleotide
  Antisense strand to SEQ ID NO: 2502212
uaugacaccguguguucuu

SEQ ID NO: 2502214 - RNA, 19 nt, Artificial Sequence
  Description of Artificial Sequence: Synthetic oligonucleotide
  Sense strand starting at position 1714 of SEQ ID NO: 1887986
augggaaguguauacguua

SEQ ID NO: 2502215 - RNA, 19 nt, Artificial Sequence
  Description of Artificial Sequence: Synthetic oligonucleotide
  Antisense strand to SEQ ID NO: 2502214
uaacguauacacuucccau

SEQ ID NO: 2502216 - RNA, 19 nt, Artificial Sequence
  Description of Artificial Sequence: Synthetic oligonucleotide
  Sense strand starting at position 1719 of SEQ ID NO: 1887986
aaguguauacguuacccua

SEQ ID NO: 2502217 - RNA, 19 nt, Artificial Sequence
  Description of Artificial Sequence: Synthetic oligonucleotide
  Antisense strand to SEQ ID NO: 2502216
uaggguaacguauacacuu

SEQ ID NO: 2502218 - RNA, 19 nt, Artificial Sequence
  Description of Artificial Sequence: Synthetic oligonucleotide
  Sense strand starting at position 1721 of SEQ ID NO: 1887986
guguauacguuacccuaua

SEQ ID NO: 2502219 - RNA, 19 nt, Artificial Sequence
  Description of Artificial Sequence: Synthetic oligonucleotide
  Antisense strand to SEQ ID NO: 2502218
uauaggguaacguauacac

SEQ ID NO: 2502220 - RNA, 19 nt, Artificial Sequence
  Description of Artificial Sequence: Synthetic oligonucleotide
  Sense strand starting at position 1726 of SEQ ID NO: 1887986
uacguuacccuauagcaga

SEQ ID NO: 2502221 - RNA, 19 nt, Artificial Sequence
  Description of Artificial Sequence: Synthetic oligonucleotide
  Antisense strand to SEQ ID NO: 2502220
ucugcuauaggguaacgua

SEQ ID NO: 2502222 - RNA, 19 nt, Artificial Sequence
  Description of Artificial Sequence: Synthetic oligonucleotide
  Sense strand starting at position 1761 of SEQ ID NO: 1887986
ccggucuauggugacuuua

SEQ ID NO: 2502223 - RNA, 19 nt, Artificial Sequence
  Description of Artificial Sequence: Synthetic oligonucleotide
  Antisense strand to SEQ ID NO: 2502222
uaaagucaccauagaccgg

SEQ ID NO: 2502224 - RNA, 19 nt, Artificial Sequence
  Description of Artificial Sequence: Synthetic oligonucleotide
  Sense strand starting at position 1763 of SEQ ID NO: 1887986
ggucuauggugacuuuaaa

SEQ ID NO: 2502225 - RNA, 19 nt, Artificial Sequence
  Description of Artificial Sequence: Synthetic oligonucleotide
  Antisense strand to SEQ ID NO: 2502224
uuuaaagucaccauagacc

SEQ ID NO: 2502226 - RNA, 19 nt, Artificial Sequence
  Description of Artificial Sequence: Synthetic oligonucleotide
  Sense strand starting at position 1821 of SEQ ID NO: 1887986
ucaauuugcucuggguaaa

SEQ ID NO: 2502227 - RNA, 19 nt, Artificial Sequence
  Description of Artificial Sequence: Synthetic oligonucleotide
  Antisense strand to SEQ ID NO: 2502226
uuuacccagagcaaauuga

SEQ ID NO: 2502228 - RNA, 19 nt, Artificial Sequence
  Description of Artificial Sequence: Synthetic oligonucleotide
  Sense strand starting at position 1850 of SEQ ID NO: 1887986
ggagaacuuccaggucuau

SEQ ID NO: 2502229 - RNA, 19 nt, Artificial Sequence
  Description of Artificial Sequence: Synthetic oligonucleotide
  Antisense strand to SEQ ID NO: 2502228
auagaccuggaaguucucc

SEQ ID NO: 2502230 - RNA, 19 nt, Artificial Sequence
  Description of Artificial Sequence: Synthetic oligonucleotide
  Sense strand starting at position 2687 of SEQ ID NO: 1887986
gggauccaacauuguuauu

SEQ ID NO: 2502231 - RNA, 19 nt, Artificial Sequence
  Description of Artificial Sequence: Synthetic oligonucleotide
  Antisense strand to SEQ ID NO: 2502230
aauaacaauguuggauccc

SEQ ID NO: 2502232 - RNA, 19 nt, Artificial Sequence
  Description of Artificial Sequence: Synthetic oligonucleotide
  Sense strand starting at position 2812 of SEQ ID NO: 1887986
guauuucucuguugaacag

SEQ ID NO: 2502233 - RNA, 19 nt, Artificial Sequence
  Description of Artificial Sequence: Synthetic oligonucleotide
  Antisense strand to SEQ ID NO: 2502232
cuguucaacagagaaauac

SEQ ID NO: 2502234 - RNA, 19 nt, Artificial Sequence
  Description of Artificial Sequence: Synthetic oligonucleotide
  Sense strand starting at position 2843 of SEQ ID NO: 1887986
cggcgagaucuccgccuua

SEQ ID NO: 2502235 - RNA, 19 nt, Artificial Sequence
  Description of Artificial Sequence: Synthetic oligonucleotide
  Antisense strand to SEQ ID NO: 2502234
uaaggcggagaucucgccg

SEQ ID NO: 2502236 - RNA, 19 nt, Artificial Sequence
  Description of Artificial Sequence: Synthetic oligonucleotide
  Sense strand starting at position 2845 of SEQ ID NO: 1887986
gcgagaucuccgccuuacu

SEQ ID NO: 2502237 - RNA, 19 nt, Artificial Sequence
  Description of Artificial Sequence: Synthetic oligonucleotide
  Antisense strand to SEQ ID NO: 2502236
aguaaggcggagaucucgc

SEQ ID NO: 2502238 - RNA, 19 nt, Artificial Sequence
  Description of Artificial Sequence: Synthetic oligonucleotide
  Sense strand starting at position 3260 of SEQ ID NO: 1887986
gugguggugcgugaaugua

SEQ ID NO: 2502239 - RNA, 19 nt, Artificial Sequence
  Description of Artificial Sequence: Synthetic oligonucleotide
  Antisense strand to SEQ ID NO: 2502238
uacauucacgcaccaccac

SEQ ID NO: 2502240 - RNA, 19 nt, Artificial Sequence
  Description of Artificial Sequence: Synthetic oligonucleotide
  Sense strand starting at position 3382 of SEQ ID NO: 1887986
uagugagacuacgucucaa

SEQ ID NO: 2502241 - RNA, 19 nt, Artificial Sequence
  Description of Artificial Sequence: Synthetic oligonucleotide
  Antisense strand to SEQ ID NO: 2502240
uugagacguagucucacua

SEQ ID NO: 2502242 - RNA, 19 nt, Artificial Sequence
  Description of Artificial Sequence: Synthetic oligonucleotide
  Sense strand starting at position 3417 of SEQ ID NO: 1887986
agaaguugcgucugcauac

SEQ ID NO: 2502243 - RNA, 19 nt, Artificial Sequence
  Description of Artificial Sequence: Synthetic oligonucleotide
  Antisense strand to SEQ ID NO: 2502242
guaugcagacgcaacuucu

SEQ ID NO: 2502244 - RNA, 19 nt, Artificial Sequence
  Description of Artificial Sequence: Synthetic oligonucleotide
  Sense strand starting at position 3490 of SEQ ID NO: 1887986
gguccauaccuuuaaauug

SEQ ID NO: 2502245 - RNA, 19 nt, Artificial Sequence
  Description of Artificial Sequence: Synthetic oligonucleotide
  Antisense strand to SEQ ID NO: 2502244
caauuuaaagguauggacc

SEQ ID NO: 2502246 - RNA, 19 nt, Artificial Sequence
  Description of Artificial Sequence: Synthetic oligonucleotide
  Sense strand starting at position 3538 of SEQ ID NO: 1887986
cguuuaauuuccuacugag

SEQ ID NO: 2502247 - RNA, 19 nt, Artificial Sequence
  Description of Artificial Sequence: Synthetic oligonucleotide
  Antisense strand to SEQ ID NO: 2502246
cucaguaggaaauuaaacg

SEQ ID NO: 2502248 - RNA, 19 nt, Artificial Sequence
  Description of Artificial Sequence: Synthetic oligonucleotide
  Sense strand starting at position 3614 of SEQ ID NO: 1887986
gaaauacauccauggguua

SEQ ID NO: 2502249 - RNA, 19 nt, Artificial Sequence
  Description of Artificial Sequence: Synthetic oligonucleotide
  Antisense strand to SEQ ID NO: 2502248
uaacccauggauguauuuc

SEQ ID NO: 2502250 - RNA, 19 nt, Artificial Sequence
  Description of Artificial Sequence: Synthetic oligonucleotide
  Sense strand starting at position 3617 of SEQ ID NO: 1887986
auacauccauggguuauua

SEQ ID NO: 2502251 - RNA, 19 nt, Artificial Sequence
  Description of Artificial Sequence: Synthetic oligonucleotide
  Antisense strand to SEQ ID NO: 2502250
uaauaacccauggauguau

SEQ ID NO: 2502252 - RNA, 19 nt, Artificial Sequence
  Description of Artificial Sequence: Synthetic oligonucleotide
  Sense strand starting at position 3625 of SEQ ID NO: 1887986
auggguuauuaagcugaaa

SEQ ID NO: 2502253 - RNA, 19 nt, Artificial Sequence
  Description of Artificial Sequence: Synthetic oligonucleotide
  Antisense strand to SEQ ID NO: 2502252
uuucagcuuaauaacccau

SEQ ID NO: 2502254 - RNA, 19 nt, Artificial Sequence
  Description of Artificial Sequence: Synthetic oligonucleotide
  Sense strand starting at position 3646 of SEQ ID NO: 1887986
aaguuuagguuguuucuaa

SEQ ID NO: 2502255 - RNA, 19 nt, Artificial Sequence
  Description of Artificial Sequence: Synthetic oligonucleotide
  Antisense strand to SEQ ID NO: 2502254
uuagaaacaaccuaaacuu

SEQ ID NO: 2502256 - RNA, 19 nt, Artificial Sequence
  Description of Artificial Sequence: Synthetic oligonucleotide
  Sense strand starting at position 3647 of SEQ ID NO: 1887986
aguuuagguuguuucuaaa

SEQ ID NO: 2502257 - RNA, 19 nt, Artificial Sequence
  Description of Artificial Sequence: Synthetic oligonucleotide
  Antisense strand to SEQ ID NO: 2502256
uuuagaaacaaccuaaacu

SEQ ID NO: 2502258 - RNA, 19 nt, Artificial Sequence
  Description of Artificial Sequence: Synthetic oligonucleotide
  Sense strand starting at position 3701 of SEQ ID NO: 1887986
cuguaaucccagugucaaa

SEQ ID NO: 2502259 - RNA, 19 nt, Artificial Sequence
  Description of Artificial Sequence: Synthetic oligonucleotide
  Antisense strand to SEQ ID NO: 2502258
uuugacacugggauuacag

SEQ ID NO: 2502260 - RNA, 19 nt, Artificial Sequence
  Description of Artificial Sequence: Synthetic oligonucleotide
  Sense strand starting at position 3731 of SEQ ID NO: 1887986
ggcagaacgccugagauca

SEQ ID NO: 2502261 - RNA, 19 nt, Artificial Sequence
  Description of Artificial Sequence: Synthetic oligonucleotide
  Antisense strand to SEQ ID NO: 2502260
ugaucucaggcguucugcc

SEQ ID NO: 2502262 - RNA, 19 nt, Artificial Sequence
  Description of Artificial Sequence: Synthetic oligonucleotide
  Sense strand starting at position 3864 of SEQ ID NO: 1887986
aggauaaucguuugaaacu

SEQ ID NO: 2502263 - RNA, 19 nt, Artificial Sequence
  Description of Artificial Sequence: Synthetic oligonucleotide
  Antisense strand to SEQ ID NO: 2502262
aguuucaaacgauuauccu

SEQ ID NO: 2502264 - RNA, 19 nt, Artificial Sequence
  Description of Artificial Sequence: Synthetic oligonucleotide
  Sense strand starting at position 3865 of SEQ ID NO: 1887986
ggauaaucguuugaaacug

SEQ ID NO: 2502265 - RNA, 19 nt, Artificial Sequence
  Description of Artificial Sequence: Synthetic oligonucleotide
  Antisense strand to SEQ ID NO: 2502264
caguuucaaacgauuaucc

SEQ ID NO: 2502266 - RNA, 19 nt, Artificial Sequence
  Description of Artificial Sequence: Synthetic oligonucleotide
  Sense strand starting at position 3870 of SEQ ID NO: 1887986
aucguuugaaacugggaga

SEQ ID NO: 2502267 - RNA, 19 nt, Artificial Sequence
  Description of Artificial Sequence: Synthetic oligonucleotide
  Antisense strand to SEQ ID NO: 2502266
ucucccaguuucaaacgau

SEQ ID NO: 2502268 - RNA, 19 nt, Artificial Sequence
  Description of Artificial Sequence: Synthetic oligonucleotide
  Sense strand starting at position 173 of SEQ ID NO: 1887987
uuguaaacugcuggcauaa

SEQ ID NO: 2502269 - RNA, 19 nt, Artificial Sequence
  Description of Artificial Sequence: Synthetic oligonucleotide
  Antisense strand to SEQ ID NO: 2502268
uuaugccagcaguuuacaa

SEQ ID NO: 2502270 - RNA, 19 nt, Artificial Sequence
  Description of Artificial Sequence: Synthetic oligonucleotide
  Sense strand starting at position 186 of SEQ ID NO: 1887987
gcauaaguacaguaucuuu

SEQ ID NO: 2502271 - RNA, 19 nt, Artificial Sequence
  Description of Artificial Sequence: Synthetic oligonucleotide
  Antisense strand to SEQ ID NO: 2502270
aaagauacuguacuuaugc

SEQ ID NO: 2502272 - RNA, 19 nt, Artificial Sequence
  Description of Artificial Sequence: Synthetic oligonucleotide
  Sense strand starting at position 191 of SEQ ID NO: 1887987
aguacaguaucuuuagaga

SEQ ID NO: 2502273 - RNA, 19 nt, Artificial Sequence
  Description of Artificial Sequence: Synthetic oligonucleotide
  Antisense strand to SEQ ID NO: 2502272
ucucuaaagauacuguacu

SEQ ID NO: 2502274 - RNA, 19 nt, Artificial Sequence
  Description of Artificial Sequence: Synthetic oligonucleotide
  Sense strand starting at position 194 of SEQ ID NO: 1887987
acaguaucuuuagagaaca

SEQ ID NO: 2502275 - RNA, 19 nt, Artificial Sequence
  Description of Artificial Sequence: Synthetic oligonucleotide
  Antisense strand to SEQ ID NO: 2502274
uguucucuaaagauacugu

SEQ ID NO: 2502276 - RNA, 19 nt, Artificial Sequence
  Description of Artificial Sequence: Synthetic oligonucleotide
  Sense strand starting at position 214 of SEQ ID NO: 1887987
uuuggcaauguuugguaaa

SEQ ID NO: 2502277 - RNA, 19 nt, Artificial Sequence
  Description of Artificial Sequence: Synthetic oligonucleotide
  Antisense strand to SEQ ID NO: 2502276
uuuaccaaacauugccaaa

SEQ ID NO: 2502278 - RNA, 19 nt, Artificial Sequence
  Description of Artificial Sequence: Synthetic oligonucleotide
  Sense strand starting at position 576 of SEQ ID NO: 1887987
cuagguauauauucuaaag

SEQ ID NO: 2502279 - RNA, 19 nt, Artificial Sequence
  Description of Artificial Sequence: Synthetic oligonucleotide
  Antisense strand to SEQ ID NO: 2502278
cuuuagaauauauaccuag

SEQ ID NO: 2502280 - RNA, 19 nt, Artificial Sequence
  Description of Artificial Sequence: Synthetic oligonucleotide
  Sense strand starting at position 640 of SEQ ID NO: 1887987
agucacacugccuguagua

SEQ ID NO: 2502281 - RNA, 19 nt, Artificial Sequence
  Description of Artificial Sequence: Synthetic oligonucleotide
  Antisense strand to SEQ ID NO: 2502280
uacuacaggcagugugacu

SEQ ID NO: 2502282 - RNA, 19 nt, Artificial Sequence
  Description of Artificial Sequence: Synthetic oligonucleotide
  Sense strand starting at position 723 of SEQ ID NO: 1887987
gccuguaauucugucucaa

SEQ ID NO: 2502283 - RNA, 19 nt, Artificial Sequence
  Description of Artificial Sequence: Synthetic oligonucleotide
  Antisense strand to SEQ ID NO: 2502282
uugagacagaauuacaggc

SEQ ID NO: 2502284 - RNA, 19 nt, Artificial Sequence
  Description of Artificial Sequence: Synthetic oligonucleotide
  Sense strand starting at position 878 of SEQ ID NO: 1887987
gggaucaggucaucucaua

SEQ ID NO: 2502285 - RNA, 19 nt, Artificial Sequence
  Description of Artificial Sequence: Synthetic oligonucleotide
  Antisense strand to SEQ ID NO: 2502284
uaugagaugaccugauccc

SEQ ID NO: 2502286 - RNA, 19 nt, Artificial Sequence
  Description of Artificial Sequence: Synthetic oligonucleotide
  Sense strand starting at position 885 of SEQ ID NO: 1887987
ggucaucucauaggcaaga

SEQ ID NO: 2502287 - RNA, 19 nt, Artificial Sequence
  Description of Artificial Sequence: Synthetic oligonucleotide
  Antisense strand to SEQ ID NO: 2502286
ucuugccuaugagaugacc

SEQ ID NO: 2502288 - RNA, 19 nt, Artificial Sequence
  Description of Artificial Sequence: Synthetic oligonucleotide
  Sense strand starting at position 1913 of SEQ ID NO: 1887987
acuuacgccuguucggaua

SEQ ID NO: 2502289 - RNA, 19 nt, Artificial Sequence
  Description of Artificial Sequence: Synthetic oligonucleotide
  Antisense strand to SEQ ID NO: 2502288
uauccgaacaggcguaagu

SEQ ID NO: 2502290 - RNA, 19 nt, Artificial Sequence
  Description of Artificial Sequence: Synthetic oligonucleotide
  Sense strand starting at position 2002 of SEQ ID NO: 1887987
gcccaaauccgcgggaaga

SEQ ID NO: 2502291 - RNA, 19 nt, Artificial Sequence
  Description of Artificial Sequence: Synthetic oligonucleotide
  Antisense strand to SEQ ID NO: 2502290
ucuucccgcggauuugggc

SEQ ID NO: 2502292 - RNA, 19 nt, Artificial Sequence
  Description of Artificial Sequence: Synthetic oligonucleotide
  Sense strand starting at position 2003 of SEQ ID NO: 1887987
cccaaauccgcgggaagau

SEQ ID NO: 2502293 - RNA, 19 nt, Artificial Sequence
  Description of Artificial Sequence: Synthetic oligonucleotide
  Antisense strand to SEQ ID NO: 2502292
aucuucccgcggauuuggg

SEQ ID NO: 2502294 - RNA, 19 nt, Artificial Sequence
  Description of Artificial Sequence: Synthetic oligonucleotide
  Sense strand starting at position 2045 of SEQ ID NO: 1887987
ucuaguuaucgcgggagag

SEQ ID NO: 2502295 - RNA, 19 nt, Artificial Sequence
  Description of Artificial Sequence: Synthetic oligonucleotide
  Antisense strand to SEQ ID NO: 2502294
cucucccgcgauaacuaga

SEQ ID NO: 2502296 - RNA, 19 nt, Artificial Sequence
  Description of Artificial Sequence: Synthetic oligonucleotide
  Sense strand starting at position 2046 of SEQ ID NO: 1887987
cuaguuaucgcgggagagu

SEQ ID NO: 2502297 - RNA, 19 nt, Artificial Sequence
  Description of Artificial Sequence: Synthetic oligonucleotide
  Antisense strand to SEQ ID NO: 2502296
acucucccgcgauaacuag

SEQ ID NO: 2502298 - RNA, 19 nt, Artificial Sequence
  Description of Artificial Sequence: Synthetic oligonucleotide
  Sense strand starting at position 2047 of SEQ ID NO: 1887987
uaguuaucgcgggagagug

SEQ ID NO: 2502299 - RNA, 19 nt, Artificial Sequence
  Description of Artificial Sequence: Synthetic oligonucleotide
  Antisense strand to SEQ ID NO: 2502298
cacucucccgcgauaacua

SEQ ID NO: 2502300 - RNA, 19 nt, Artificial Sequence
  Description of Artificial Sequence: Synthetic oligonucleotide
  Sense strand starting at position 2085 of SEQ ID NO: 1887987
ugggaaguguaguccagaa

SEQ ID NO: 2502301 - RNA, 19 nt, Artificial Sequence
  Description of Artificial Sequence: Synthetic oligonucleotide
  Antisense strand to SEQ ID NO: 2502300
uucuggacuacacuuccca

SEQ ID NO: 2502302 - RNA, 19 nt, Artificial Sequence
  Description of Artificial Sequence: Synthetic oligonucleotide
  Sense strand starting at position 2172 of SEQ ID NO: 1887987
aaacuaucucuuugaggug

SEQ ID NO: 2502303 - RNA, 19 nt, Artificial Sequence
  Description of Artificial Sequence: Synthetic oligonucleotide
  Antisense strand to SEQ ID NO: 2502302
caccucaaagagauaguuu

SEQ ID NO: 2502304 - RNA, 19 nt, Artificial Sequence
  Description of Artificial Sequence: Synthetic oligonucleotide
  Sense strand starting at position 2210 of SEQ ID NO: 1887987
ccgggagucucaccugaca

SEQ ID NO: 2502305 - RNA, 19 nt, Artificial Sequence
  Description of Artificial Sequence: Synthetic oligonucleotide
  Antisense strand to SEQ ID NO: 2502304
ugucaggugagacucccgg

SEQ ID NO: 2502306 - RNA, 19 nt, Artificial Sequence
  Description of Artificial Sequence: Synthetic oligonucleotide
  Sense strand starting at position 2212 of SEQ ID NO: 1887987
gggagucucaccugacaag

SEQ ID NO: 2502307 - RNA, 19 nt, Artificial Sequence
  Description of Artificial Sequence: Synthetic oligonucleotide
  Antisense strand to SEQ ID NO: 2502306
cuugucaggugagacuccc

SEQ ID NO: 2502308 - RNA, 19 nt, Artificial Sequence
  Description of Artificial Sequence: Synthetic oligonucleotide
  Sense strand starting at position 2708 of SEQ ID NO: 1887987
cccggaggcugcuuggaau

SEQ ID NO: 2502309 - RNA, 19 nt, Artificial Sequence
  Description of Artificial Sequence: Synthetic oligonucleotide
  Antisense strand to SEQ ID NO: 2502308
auuccaagcagccuccggg

SEQ ID NO: 2502310 - RNA, 19 nt, Artificial Sequence
  Description of Artificial Sequence: Synthetic oligonucleotide
  Sense strand starting at position 2858 of SEQ ID NO: 1887987
ggacaaauccgcgauccca

SEQ ID NO: 2502311 - RNA, 19 nt, Artificial Sequence
  Description of Artificial Sequence: Synthetic oligonucleotide
  Antisense strand to SEQ ID NO: 2502310
ugggaucgcggauuugucc

SEQ ID NO: 2502312 - RNA, 19 nt, Artificial Sequence
  Description of Artificial Sequence: Synthetic oligonucleotide
  Sense strand starting at position 2866 of SEQ ID NO: 1887987
ccgcgaucccagucaugca

SEQ ID NO: 2502313 - RNA, 19 nt, Artificial Sequence
  Description of Artificial Sequence: Synthetic oligonucleotide
  Antisense strand to SEQ ID NO: 2502312
ugcaugacugggaucgcgg

SEQ ID NO: 2502314 - RNA, 19 nt, Artificial Sequence
  Description of Artificial Sequence: Synthetic oligonucleotide
  Sense strand starting at position 2867 of SEQ ID NO: 1887987
cgcgaucccagucaugcau

SEQ ID NO: 2502315 - RNA, 19 nt, Artificial Sequence
  Description of Artificial Sequence: Synthetic oligonucleotide
  Antisense strand to SEQ ID NO: 2502314
augcaugacugggaucgcg

SEQ ID NO: 2502316 - RNA, 19 nt, Artificial Sequence
  Description of Artificial Sequence: Synthetic oligonucleotide
  Sense strand starting at position 2873 of SEQ ID NO: 1887987
cccagucaugcaugugaga

SEQ ID NO: 2502317 - RNA, 19 nt, Artificial Sequence
  Description of Artificial Sequence: Synthetic oligonucleotide
  Antisense strand to SEQ ID NO: 2502316
ucucacaugcaugacuggg

SEQ ID NO: 2502318 - RNA, 19 nt, Artificial Sequence
  Description of Artificial Sequence: Synthetic oligonucleotide
  Sense strand starting at position 2964 of SEQ ID NO: 1887987
uggguaguugagugaaaga

SEQ ID NO: 2502319 - RNA, 19 nt, Artificial Sequence
  Description of Artificial Sequence: Synthetic oligonucleotide
  Antisense strand to SEQ ID NO: 2502318
ucuuucacucaacuaccca

SEQ ID NO: 2502320 - RNA, 19 nt, Artificial Sequence
  Description of Artificial Sequence: Synthetic oligonucleotide
  Sense strand starting at position 3019 of SEQ ID NO: 1887987
aagugaggucaagaugugu

SEQ ID NO: 2502321 - RNA, 19 nt, Artificial Sequence
  Description of Artificial Sequence: Synthetic oligonucleotide
  Antisense strand to SEQ ID NO: 2502320
acacaucuugaccucacuu

SEQ ID NO: 2502322 - RNA, 19 nt, Artificial Sequence
  Description of Artificial Sequence: Synthetic oligonucleotide
  Sense strand starting at position 3027 of SEQ ID NO: 1887987
ucaagaugugugcagcuuu

SEQ ID NO: 2502323 - RNA, 19 nt, Artificial Sequence
  Description of Artificial Sequence: Synthetic oligonucleotide
  Antisense strand to SEQ ID NO: 2502322
aaagcugcacacaucuuga

SEQ ID NO: 2502324 - RNA, 19 nt, Artificial Sequence
  Description of Artificial Sequence: Synthetic oligonucleotide
  Sense strand starting at position 3094 of SEQ ID NO: 1887987
cguguauggaucuguguau

SEQ ID NO: 2502325 - RNA, 19 nt, Artificial Sequence
  Description of Artificial Sequence: Synthetic oligonucleotide
  Antisense strand to SEQ ID NO: 2502324
auacacagauccauacacg

SEQ ID NO: 2502326 - RNA, 19 nt, Artificial Sequence
  Description of Artificial Sequence: Synthetic oligonucleotide
  Sense strand starting at position 3098 of SEQ ID NO: 1887987
uauggaucuguguaugagu

SEQ ID NO: 2502327 - RNA, 19 nt, Artificial Sequence
  Description of Artificial Sequence: Synthetic oligonucleotide
  Antisense strand to SEQ ID NO: 2502326
acucauacacagauccaua

SEQ ID NO: 2502328 - RNA, 19 nt, Artificial Sequence
  Description of Artificial Sequence: Synthetic oligonucleotide
  Sense strand starting at position 3119 of SEQ ID NO: 1887987
guguaaucaccugaaugug

SEQ ID NO: 2502329 - RNA, 19 nt, Artificial Sequence
  Description of Artificial Sequence: Synthetic oligonucleotide
  Antisense strand to SEQ ID NO: 2502328
cacauucaggugauuacac

SEQ ID NO: 2502330 - RNA, 19 nt, Artificial Sequence
  Description of Artificial Sequence: Synthetic oligonucleotide
  Sense strand starting at position 3210 of SEQ ID NO: 1887987
uugugauaacaagguugua

SEQ ID NO: 2502331 - RNA, 19 nt, Artificial Sequence
  Description of Artificial Sequence: Synthetic oligonucleotide
  Antisense strand to SEQ ID NO: 2502330
uacaaccuuguuaucacaa

SEQ ID NO: 2502332 - RNA, 19 nt, Artificial Sequence
  Description of Artificial Sequence: Synthetic oligonucleotide
  Sense strand starting at position 3342 of SEQ ID NO: 1887987
aucaguuaugaguacucca

SEQ ID NO: 2502333 - RNA, 19 nt, Artificial Sequence
  Description of Artificial Sequence: Synthetic oligonucleotide
  Antisense strand to SEQ ID NO: 2502332
uggaguacucauaacugau

SEQ ID NO: 2502334 - RNA, 19 nt, Artificial Sequence
  Description of Artificial Sequence: Synthetic oligonucleotide
  Sense strand starting at position 3345 of SEQ ID NO: 1887987
aguuaugaguacuccaagu

SEQ ID NO: 2502335 - RNA, 19 nt, Artificial Sequence
  Description of Artificial Sequence: Synthetic oligonucleotide
  Antisense strand to SEQ ID NO: 2502334
acuuggaguacucauaacu

SEQ ID NO: 2502336 - RNA, 19 nt, Artificial Sequence
  Description of Artificial Sequence: Synthetic oligonucleotide
  Sense strand starting at position 3347 of SEQ ID NO: 1887987
uuaugaguacuccaaguag

SEQ ID NO: 2502337 - RNA, 19 nt, Artificial Sequence
  Description of Artificial Sequence: Synthetic oligonucleotide
  Antisense strand to SEQ ID NO: 2502336
cuacuuggaguacucauaa

SEQ ID NO: 2502338 - RNA, 19 nt, Artificial Sequence
  Description of Artificial Sequence: Synthetic oligonucleotide
  Sense strand starting at position 3374 of SEQ ID NO: 1887987
agaaacccgucauaauaga

SEQ ID NO: 2502339 - RNA, 19 nt, Artificial Sequence
  Description of Artificial Sequence: Synthetic oligonucleotide
  Antisense strand to SEQ ID NO: 2502338
ucuauuaugacggguuucu

SEQ ID NO: 2502340 - RNA, 19 nt, Artificial Sequence
  Description of Artificial Sequence: Synthetic oligonucleotide
  Sense strand starting at position 3459 of SEQ ID NO: 1887987
aaaucaaugugaggacuca

SEQ ID NO: 2502341 - RNA, 19 nt, Artificial Sequence
  Description of Artificial Sequence: Synthetic oligonucleotide
  Antisense strand to SEQ ID NO: 2502340
ugaguccucacauugauuu

SEQ ID NO: 2502342 - RNA, 19 nt, Artificial Sequence
  Description of Artificial Sequence: Synthetic oligonucleotide
  Sense strand starting at position 3551 of SEQ ID NO: 1887987
gaaacuuugggagguggua

SEQ ID NO: 2502343 - RNA, 19 nt, Artificial Sequence
  Description of Artificial Sequence: Synthetic oligonucleotide
  Antisense strand to SEQ ID NO: 2502342
uaccaccucccaaaguuuc

SEQ ID NO: 2502344 - RNA, 19 nt, Artificial Sequence
  Description of Artificial Sequence: Synthetic oligonucleotide
  Sense strand starting at position 3579 of SEQ ID NO: 1887987
gaaauaugauggcaggaag

SEQ ID NO: 2502345 - RNA, 19 nt, Artificial Sequence
  Description of Artificial Sequence: Synthetic oligonucleotide
  Antisense strand to SEQ ID NO: 2502344
cuuccugccaucauauuuc

SEQ ID NO: 2502346 - RNA, 19 nt, Artificial Sequence
  Description of Artificial Sequence: Synthetic oligonucleotide
  Sense strand starting at position 3590 of SEQ ID NO: 1887987
gcaggaaguguaugacaac

SEQ ID NO: 2502347 - RNA, 19 nt, Artificial Sequence
  Description of Artificial Sequence: Synthetic oligonucleotide
  Antisense strand to SEQ ID NO: 2502346
guugucauacacuuccugc

SEQ ID NO: 2502348 - RNA, 19 nt, Artificial Sequence
  Description of Artificial Sequence: Synthetic oligonucleotide
  Sense strand starting at position 272 of SEQ ID NO: 1887988
gcuacugaagugggagaau

SEQ ID NO: 2502349 - RNA, 19 nt, Artificial Sequence
  Description of Artificial Sequence: Synthetic oligonucleotide
  Antisense strand to SEQ ID NO: 2502348
auucucccacuucaguagc

SEQ ID NO: 2502350 - RNA, 19 nt, Artificial Sequence
  Description of Artificial Sequence: Synthetic oligonucleotide
  Sense strand starting at position 389 of SEQ ID NO: 1887988
augacuuccucuucuagag

SEQ ID NO: 2502351 - RNA, 19 nt, Artificial Sequence
  Description of Artificial Sequence: Synthetic oligonucleotide
  Antisense strand to SEQ ID NO: 2502350
cucuagaagaggaagucau

SEQ ID NO: 2502352 - RNA, 19 nt, Artificial Sequence
  Description of Artificial Sequence: Synthetic oligonucleotide
  Sense strand starting at position 432 of SEQ ID NO: 1887988
gccacuuaagaauaaaugu

SEQ ID NO: 2502353 - RNA, 19 nt, Artificial Sequence
  Description of Artificial Sequence: Synthetic oligonucleotide
  Antisense strand to SEQ ID NO: 2502352
acauuuauucuuaaguggc

SEQ ID NO: 2502354 - RNA, 19 nt, Artificial Sequence
  Description of Artificial Sequence: Synthetic oligonucleotide
  Sense strand starting at position 508 of SEQ ID NO: 1887988
gaacuugaguaauuggagu

SEQ ID NO: 2502355 - RNA, 19 nt, Artificial Sequence
  Description of Artificial Sequence: Synthetic oligonucleotide
  Antisense strand to SEQ ID NO: 2502354
acuccaauuacucaaguuc

SEQ ID NO: 2502356 - RNA, 19 nt, Artificial Sequence
  Description of Artificial Sequence: Synthetic oligonucleotide
  Sense strand starting at position 510 of SEQ ID NO: 1887988
acuugaguaauuggaguau

SEQ ID NO: 2502357 - RNA, 19 nt, Artificial Sequence
  Description of Artificial Sequence: Synthetic oligonucleotide
  Antisense strand to SEQ ID NO: 2502356
auacuccaauuacucaagu

SEQ ID NO: 2502358 - RNA, 19 nt, Artificial Sequence
  Description of Artificial Sequence: Synthetic oligonucleotide
  Sense strand starting at position 522 of SEQ ID NO: 1887988
ggaguaucagaauguuaua

SEQ ID NO: 2502359 - RNA, 19 nt, Artificial Sequence
  Description of Artificial Sequence: Synthetic oligonucleotide
  Antisense strand to SEQ ID NO: 2502358
uauaacauucugauacucc

SEQ ID NO: 2502360 - RNA, 19 nt, Artificial Sequence
  Description of Artificial Sequence: Synthetic oligonucleotide
  Sense strand starting at position 944 of SEQ ID NO: 1887988
uauguuugugaugagaauu

SEQ ID NO: 2502361 - RNA, 19 nt, Artificial Sequence
  Description of Artificial Sequence: Synthetic oligonucleotide
  Antisense strand to SEQ ID NO: 2502360
aauucucaucacaaacaua

SEQ ID NO: 2502362 - RNA, 19 nt, Artificial Sequence
  Description of Artificial Sequence: Synthetic oligonucleotide
  Sense strand starting at position 1049 of SEQ ID NO: 1887988
aaaucagaaguguggguaa

SEQ ID NO: 2502363 - RNA, 19 nt, Artificial Sequence
  Description of Artificial Sequence: Synthetic oligonucleotide
  Antisense strand to SEQ ID NO: 2502362
uuacccacacuucugauuu

SEQ ID NO: 2502364 - RNA, 19 nt, Artificial Sequence
  Description of Artificial Sequence: Synthetic oligonucleotide
  Sense strand starting at position 1051 of SEQ ID NO: 1887988
aucagaaguguggguaaca

SEQ ID NO: 2502365 - RNA, 19 nt, Artificial Sequence
  Description of Artificial Sequence: Synthetic oligonucleotide
  Antisense strand to SEQ ID NO: 2502364
uguuacccacacuucugau

SEQ ID NO: 2502366 - RNA, 19 nt, Artificial Sequence
  Description of Artificial Sequence: Synthetic oligonucleotide
  Sense strand starting at position 1088 of SEQ ID NO: 1887988
uggaauaaaucugaaagaa

SEQ ID NO: 2502367 - RNA, 19 nt, Artificial Sequence
  Description of Artificial Sequence: Synthetic oligonucleotide
  Antisense strand to SEQ ID NO: 2502366
uucuuucagauuuauucca

SEQ ID NO: 2502368 - RNA, 19 nt, Artificial Sequence
  Description of Artificial Sequence: Synthetic oligonucleotide
  Sense strand starting at position 1178 of SEQ ID NO: 1887988
guaauuuccucguccagaa

SEQ ID NO: 2502369 - RNA, 19 nt, Artificial Sequence
  Description of Artificial Sequence: Synthetic oligonucleotide
  Antisense strand to SEQ ID NO: 2502368
uucuggacgaggaaauuac

SEQ ID NO: 2502370 - RNA, 19 nt, Artificial Sequence
  Description of Artificial Sequence: Synthetic oligonucleotide
  Sense strand starting at position 1190 of SEQ ID NO: 1887988
uccagaaauuuguagacaa

SEQ ID NO: 2502371 - RNA, 19 nt, Artificial Sequence
  Description of Artificial Sequence: Synthetic oligonucleotide
  Antisense strand to SEQ ID NO: 2502370
uugucuacaaauuucugga

SEQ ID NO: 2502372 - RNA, 19 nt, Artificial Sequence
  Description of Artificial Sequence: Synthetic oligonucleotide
  Sense strand starting at position 1273 of SEQ ID NO: 1887988
aacugaacugcauguagau

SEQ ID NO: 2502373 - RNA, 19 nt, Artificial Sequence
  Description of Artificial Sequence: Synthetic oligonucleotide
  Antisense strand to SEQ ID NO: 2502372
aucuacaugcaguucaguu

SEQ ID NO: 2502374 - RNA, 19 nt, Artificial Sequence
  Description of Artificial Sequence: Synthetic oligonucleotide
  Sense strand starting at position 1286 of SEQ ID NO: 1887988
guagauccacuagguaaau

SEQ ID NO: 2502375 - RNA, 19 nt, Artificial Sequence
  Description of Artificial Sequence: Synthetic oligonucleotide
  Antisense strand to SEQ ID NO: 2502374
auuuaccuaguggaucuac

SEQ ID NO: 2502376 - RNA, 19 nt, Artificial Sequence
  Description of Artificial Sequence: Synthetic oligonucleotide
  Sense strand starting at position 1297 of SEQ ID NO: 1887988
agguaaauguaguuuaauc

SEQ ID NO: 2502377 - RNA, 19 nt, Artificial Sequence
  Description of Artificial Sequence: Synthetic oligonucleotide
  Antisense strand to SEQ ID NO: 2502376
gauuaaacuacauuuaccu

SEQ ID NO: 2502378 - RNA, 19 nt, Artificial Sequence
  Description of Artificial Sequence: Synthetic oligonucleotide
  Sense strand starting at position 1299 of SEQ ID NO: 1887988
guaaauguaguuuaaucac

SEQ ID NO: 2502379 - RNA, 19 nt, Artificial Sequence
  Description of Artificial Sequence: Synthetic oligonucleotide
  Antisense strand to SEQ ID NO: 2502378
gugauuaaacuacauuuac

SEQ ID NO: 2502380 - RNA, 19 nt, Artificial Sequence
  Description of Artificial Sequence: Synthetic oligonucleotide
  Sense strand starting at position 2071 of SEQ ID NO: 1887988
guuggaagacagugaauua

SEQ ID NO: 2502381 - RNA, 19 nt, Artificial Sequence
  Description of Artificial Sequence: Synthetic oligonucleotide
  Antisense strand to SEQ ID NO: 2502380
uaauucacugucuuccaac

SEQ ID NO: 2502382 - RNA, 19 nt, Artificial Sequence
  Description of Artificial Sequence: Synthetic oligonucleotide
  Sense strand starting at position 2110 of SEQ ID NO: 1887988
cugcgcaaacuggauaaau

SEQ ID NO: 2502383 - RNA, 19 nt, Artificial Sequence
  Description of Artificial Sequence: Synthetic oligonucleotide
  Antisense strand to SEQ ID NO: 2502382
auuuauccaguuugcgcag

SEQ ID NO: 2502384 - RNA, 19 nt, Artificial Sequence
  Description of Artificial Sequence: Synthetic oligonucleotide
  Sense strand starting at position 2112 of SEQ ID NO: 1887988
gcgcaaacuggauaaauug

SEQ ID NO: 2502385 - RNA, 19 nt, Artificial Sequence
  Description of Artificial Sequence: Synthetic oligonucleotide
  Antisense strand to SEQ ID NO: 2502384
caauuuauccaguuugcgc

SEQ ID NO: 2502386 - RNA, 19 nt, Artificial Sequence
  Description of Artificial Sequence: Synthetic oligonucleotide
  Sense strand starting at position 2269 of SEQ ID NO: 1887988
auacaaucuguugggaguu

SEQ ID NO: 2502387 - RNA, 19 nt, Artificial Sequence
  Description of Artificial Sequence: Synthetic oligonucleotide
  Antisense strand to SEQ ID NO: 2502386
aacucccaacagauuguau

SEQ ID NO: 2502388 - RNA, 19 nt, Artificial Sequence
  Description of Artificial Sequence: Synthetic oligonucleotide
  Sense strand starting at position 2290 of SEQ ID NO: 1887988
gggcggaauguggaguauu

SEQ ID NO: 2502389 - RNA, 19 nt, Artificial Sequence
  Description of Artificial Sequence: Synthetic oligonucleotide
  Antisense strand to SEQ ID NO: 2502388
aauacuccacauuccgccc

SEQ ID NO: 2502390 - RNA, 19 nt, Artificial Sequence
  Description of Artificial Sequence: Synthetic oligonucleotide
  Sense strand starting at position 2291 of SEQ ID NO: 1887988
ggcggaauguggaguauuu

SEQ ID NO: 2502391 - RNA, 19 nt, Artificial Sequence
  Description of Artificial Sequence: Synthetic oligonucleotide
  Antisense strand to SEQ ID NO: 2502390
aaauacuccacauuccgcc

SEQ ID NO: 2502392 - RNA, 19 nt, Artificial Sequence
  Description of Artificial Sequence: Synthetic oligonucleotide
  Sense strand starting at position 2461 of SEQ ID NO: 1887988
gagaauugucuugaggcca

SEQ ID NO: 2502393 - RNA, 19 nt, Artificial Sequence
  Description of Artificial Sequence: Synthetic oligonucleotide
  Antisense strand to SEQ ID NO: 2502392
uggccucaagacaauucuc

SEQ ID NO: 2502394 - RNA, 19 nt, Artificial Sequence
  Description of Artificial Sequence: Synthetic oligonucleotide
  Sense strand starting at position 2487 of SEQ ID NO: 1887988
gagcgaucucuaugaggac

SEQ ID NO: 2502395 - RNA, 19 nt, Artificial Sequence
  Description of Artificial Sequence: Synthetic oligonucleotide
  Antisense strand to SEQ ID NO: 2502394
guccucauagagaucgcuc

SEQ ID NO: 2502396 - RNA, 19 nt, Artificial Sequence
  Description of Artificial Sequence: Synthetic oligonucleotide
  Sense strand starting at position 2534 of SEQ ID NO: 1887988
ugugguuaccuguaauaag

SEQ ID NO: 2502397 - RNA, 19 nt, Artificial Sequence
  Description of Artificial Sequence: Synthetic oligonucleotide
  Antisense strand to SEQ ID NO: 2502396
cuuauuacagguaaccaca

SEQ ID NO: 2502398 - RNA, 19 nt, Artificial Sequence
  Description of Artificial Sequence: Synthetic oligonucleotide
  Sense strand starting at position 2617 of SEQ ID NO: 1887988
agcauauaagaguguuaaa

SEQ ID NO: 2502399 - RNA, 19 nt, Artificial Sequence
  Description of Artificial Sequence: Synthetic oligonucleotide
  Antisense strand to SEQ ID NO: 2502398
uuuaacacucuuauaugcu

SEQ ID NO: 2502400 - RNA, 19 nt, Artificial Sequence
  Description of Artificial Sequence: Synthetic oligonucleotide
  Sense strand starting at position 3020 of SEQ ID NO: 1887988
auaaaugucggcuaccauu

SEQ ID NO: 2502401 - RNA, 19 nt, Artificial Sequence
  Description of Artificial Sequence: Synthetic oligonucleotide
  Antisense strand to SEQ ID NO: 2502400
aaugguagccgacauuuau

SEQ ID NO: 2502402 - RNA, 19 nt, Artificial Sequence
  Description of Artificial Sequence: Synthetic oligonucleotide
  Sense strand starting at position 3083 of SEQ ID NO: 1887988
ggaacugaguauccaguua

SEQ ID NO: 2502403 - RNA, 19 nt, Artificial Sequence
  Description of Artificial Sequence: Synthetic oligonucleotide
  Antisense strand to SEQ ID NO: 2502402
uaacuggauacucaguucc

SEQ ID NO: 2502404 - RNA, 19 nt, Artificial Sequence
  Description of Artificial Sequence: Synthetic oligonucleotide
  Sense strand starting at position 3227 of SEQ ID NO: 1887988
augauaggaugugcagauu

SEQ ID NO: 2502405 - RNA, 19 nt, Artificial Sequence
  Description of Artificial Sequence: Synthetic oligonucleotide
  Antisense strand to SEQ ID NO: 2502404
aaucugcacauccuaucau

SEQ ID NO: 2502406 - RNA, 19 nt, Artificial Sequence
  Description of Artificial Sequence: Synthetic oligonucleotide
  Sense strand starting at position 3268 of SEQ ID NO: 1887988
aucugaaguccagguugaa

SEQ ID NO: 2502407 - RNA, 19 nt, Artificial Sequence
  Description of Artificial Sequence: Synthetic oligonucleotide
  Antisense strand to SEQ ID NO: 2502406
uucaaccuggacuucagau

SEQ ID NO: 2502408 - RNA, 19 nt, Artificial Sequence
  Description of Artificial Sequence: Synthetic oligonucleotide
  Sense strand starting at position 3271 of SEQ ID NO: 1887988
ugaaguccagguugaagaa

SEQ ID NO: 2502409 - RNA, 19 nt, Artificial Sequence
  Description of Artificial Sequence: Synthetic oligonucleotide
  Antisense strand to SEQ ID NO: 2502408
uucuucaaccuggacuuca

SEQ ID NO: 2502410 - RNA, 19 nt, Artificial Sequence
  Description of Artificial Sequence: Synthetic oligonucleotide
  Sense strand starting at position 3386 of SEQ ID NO: 1887988
uguacaagugucuaccaca

SEQ ID NO: 2502411 - RNA, 19 nt, Artificial Sequence
  Description of Artificial Sequence: Synthetic oligonucleotide
  Antisense strand to SEQ ID NO: 2502410
ugugguagacacuuguaca

SEQ ID NO: 2502412 - RNA, 19 nt, Artificial Sequence
  Description of Artificial Sequence: Synthetic oligonucleotide
  Sense strand starting at position 3431 of SEQ ID NO: 1887988
guaaucacccgauaaccca

SEQ ID NO: 2502413 - RNA, 19 nt, Artificial Sequence
  Description of Artificial Sequence: Synthetic oligonucleotide
  Antisense strand to SEQ ID NO: 2502412
uggguuaucgggugauuac

SEQ ID NO: 2502414 - RNA, 19 nt, Artificial Sequence
  Description of Artificial Sequence: Synthetic oligonucleotide
  Sense strand starting at position 3522 of SEQ ID NO: 1887988
uguuucuaacauggaugua

SEQ ID NO: 2502415 - RNA, 19 nt, Artificial Sequence
  Description of Artificial Sequence: Synthetic oligonucleotide
  Antisense strand to SEQ ID NO: 2502414
uacauccauguuagaaaca

SEQ ID NO: 2502416 - RNA, 19 nt, Artificial Sequence
  Description of Artificial Sequence: Synthetic oligonucleotide
  Sense strand starting at position 3532 of SEQ ID NO: 1887988
auggauguaucuuuauuag

SEQ ID NO: 2502417 - RNA, 19 nt, Artificial Sequence
  Description of Artificial Sequence: Synthetic oligonucleotide
  Antisense strand to SEQ ID NO: 2502416
cuaauaaagauacauccau

SEQ ID NO: 2502418 - RNA, 19 nt, Artificial Sequence
  Description of Artificial Sequence: Synthetic oligonucleotide
  Sense strand starting at position 3690 of SEQ ID NO: 1887988
aggugacaggucuguagau

SEQ ID NO: 2502419 - RNA, 19 nt, Artificial Sequence
  Description of Artificial Sequence: Synthetic oligonucleotide
  Antisense strand to SEQ ID NO: 2502418
aucuacagaccugucaccu

SEQ ID NO: 2502420 - RNA, 19 nt, Artificial Sequence
  Description of Artificial Sequence: Synthetic oligonucleotide
  Sense strand starting at position 3691 of SEQ ID NO: 1887988
ggugacaggucuguagaua

SEQ ID NO: 2502421 - RNA, 19 nt, Artificial Sequence
  Description of Artificial Sequence: Synthetic oligonucleotide
  Antisense strand to SEQ ID NO: 2502420
uaucuacagaccugucacc

SEQ ID NO: 2502422 - RNA, 19 nt, Artificial Sequence
  Description of Artificial Sequence: Synthetic oligonucleotide
  Sense strand starting at position 3692 of SEQ ID NO: 1887988
gugacaggucuguagauaa

SEQ ID NO: 2502423 - RNA, 19 nt, Artificial Sequence
  Description of Artificial Sequence: Synthetic oligonucleotide
  Antisense strand to SEQ ID NO: 2502422
uuaucuacagaccugucac

SEQ ID NO: 2502424 - RNA, 19 nt, Artificial Sequence
  Description of Artificial Sequence: Synthetic oligonucleotide
  Sense strand starting at position 3715 of SEQ ID NO: 1887988
aaggguucuuauccaagau

SEQ ID NO: 2502425 - RNA, 19 nt, Artificial Sequence
  Description of Artificial Sequence: Synthetic oligonucleotide
  Antisense strand to SEQ ID NO: 2502424
aucuuggauaagaacccuu

SEQ ID NO: 2502426 - RNA, 19 nt, Artificial Sequence
  Description of Artificial Sequence: Synthetic oligonucleotide
  Sense strand starting at position 3970 of SEQ ID NO: 1887988
auaauuguccacuggguua

SEQ ID NO: 2502427 - RNA, 19 nt, Artificial Sequence
  Description of Artificial Sequence: Synthetic oligonucleotide
  Antisense strand to SEQ ID NO: 2502426
uaacccaguggacaauuau

SEQ ID NO: 2502428 - RNA, 19 nt, Artificial Sequence
  Description of Artificial Sequence: Synthetic oligonucleotide
  Sense strand starting at position 386 of SEQ ID NO: 1887989
uggaauuaaugagucaagu

SEQ ID NO: 2502429 - RNA, 19 nt, Artificial Sequence
  Description of Artificial Sequence: Synthetic oligonucleotide
  Antisense strand to SEQ ID NO: 2502428
acuugacucauuaauucca

SEQ ID NO: 2502430 - RNA, 19 nt, Artificial Sequence
  Description of Artificial Sequence: Synthetic oligonucleotide
  Sense strand starting at position 415 of SEQ ID NO: 1887989
ugccuuaacagggauugca

SEQ ID NO: 2502431 - RNA, 19 nt, Artificial Sequence
  Description of Artificial Sequence: Synthetic oligonucleotide
  Antisense strand to SEQ ID NO: 2502430
ugcaaucccuguuaaggca

SEQ ID NO: 2502432 - RNA, 19 nt, Artificial Sequence
  Description of Artificial Sequence: Synthetic oligonucleotide
  Sense strand starting at position 468 of SEQ ID NO: 1887989
augcaccagccuuaauaga

SEQ ID NO: 2502433 - RNA, 19 nt, Artificial Sequence
  Description of Artificial Sequence: Synthetic oligonucleotide
  Antisense strand to SEQ ID NO: 2502432
ucuauuaaggcuggugcau

SEQ ID NO: 2502434 - RNA, 19 nt, Artificial Sequence
  Description of Artificial Sequence: Synthetic oligonucleotide
  Sense strand starting at position 501 of SEQ ID NO: 1887989
uucucaucaucugugcauu

SEQ ID NO: 2502435 - RNA, 19 nt, Artificial Sequence
  Description of Artificial Sequence: Synthetic oligonucleotide
  Antisense strand to SEQ ID NO: 2502434
aaugcacagaugaugagaa

SEQ ID NO: 2502436 - RNA, 19 nt, Artificial Sequence
  Description of Artificial Sequence: Synthetic oligonucleotide
  Sense strand starting at position 502 of SEQ ID NO: 1887989
ucucaucaucugugcauuu

SEQ ID NO: 2502437 - RNA, 19 nt, Artificial Sequence
  Description of Artificial Sequence: Synthetic oligonucleotide
  Antisense strand to SEQ ID NO: 2502436
aaaugcacagaugaugaga

SEQ ID NO: 2502438 - RNA, 19 nt, Artificial Sequence
  Description of Artificial Sequence: Synthetic oligonucleotide
  Sense strand starting at position 641 of SEQ ID NO: 1887989
uccguacaucgcucucauu

SEQ ID NO: 2502439 - RNA, 19 nt, Artificial Sequence
  Description of Artificial Sequence: Synthetic oligonucleotide
  Antisense strand to SEQ ID NO: 2502438
aaugagagcgauguacgga

SEQ ID NO: 2502440 - RNA, 19 nt, Artificial Sequence
  Description of Artificial Sequence: Synthetic oligonucleotide
  Sense strand starting at position 752 of SEQ ID NO: 1887989
ccgucuucccucuauucuu

SEQ ID NO: 2502441 - RNA, 19 nt, Artificial Sequence
  Description of Artificial Sequence: Synthetic oligonucleotide
  Antisense strand to SEQ ID NO: 2502440
aagaauagagggaagacgg

SEQ ID NO: 2502442 - RNA, 19 nt, Artificial Sequence
  Description of Artificial Sequence: Synthetic oligonucleotide
  Sense strand starting at position 1152 of SEQ ID NO: 1887989
cucgaaaugugucuaguua

SEQ ID NO: 2502443 - RNA, 19 nt, Artificial Sequence
  Description of Artificial Sequence: Synthetic oligonucleotide
  Antisense strand to SEQ ID NO: 2502442
uaacuagacacauuucgag

SEQ ID NO: 2502444 - RNA, 19 nt, Artificial Sequence
  Description of Artificial Sequence: Synthetic oligonucleotide
  Sense strand starting at position 1153 of SEQ ID NO: 1887989
ucgaaaugugucuaguuac

SEQ ID NO: 2502445 - RNA, 19 nt, Artificial Sequence
  Description of Artificial Sequence: Synthetic oligonucleotide
  Antisense strand to SEQ ID NO: 2502444
guaacuagacacauuucga

SEQ ID NO: 2502446 - RNA, 19 nt, Artificial Sequence
  Description of Artificial Sequence: Synthetic oligonucleotide
  Sense strand starting at position 1257 of SEQ ID NO: 1887989
uuuauugguuugccucauu

SEQ ID NO: 2502447 - RNA, 19 nt, Artificial Sequence
  Description of Artificial Sequence: Synthetic oligonucleotide
  Antisense strand to SEQ ID NO: 2502446
aaugaggcaaaccaauaaa

SEQ ID NO: 2502448 - RNA, 19 nt, Artificial Sequence
  Description of Artificial Sequence: Synthetic oligonucleotide
  Sense strand starting at position 1872 of SEQ ID NO: 1887989
ggacaucggcuguggaaau

SEQ ID NO: 2502449 - RNA, 19 nt, Artificial Sequence
  Description of Artificial Sequence: Synthetic oligonucleotide
  Antisense strand to SEQ ID NO: 2502448
auuuccacagccgaugucc

SEQ ID NO: 2502450 - RNA, 19 nt, Artificial Sequence
  Description of Artificial Sequence: Synthetic oligonucleotide
  Sense strand starting at position 2076 of SEQ ID NO: 1887989
agaguugugugggccacuu

SEQ ID NO: 2502451 - RNA, 19 nt, Artificial Sequence
  Description of Artificial Sequence: Synthetic oligonucleotide
  Antisense strand to SEQ ID NO: 2502450
aaguggcccacacaacucu

SEQ ID NO: 2502452 - RNA, 19 nt, Artificial Sequence
  Description of Artificial Sequence: Synthetic oligonucleotide
  Sense strand starting at position 2078 of SEQ ID NO: 1887989
aguugugugggccacuuau

SEQ ID NO: 2502453 - RNA, 19 nt, Artificial Sequence
  Description of Artificial Sequence: Synthetic oligonucleotide
  Antisense strand to SEQ ID NO: 2502452
auaaguggcccacacaacu

SEQ ID NO: 2502454 - RNA, 19 nt, Artificial Sequence
  Description of Artificial Sequence: Synthetic oligonucleotide
  Sense strand starting at position 2185 of SEQ ID NO: 1887989
gggagucuccugcagcuua

SEQ ID NO: 2502455 - RNA, 19 nt, Artificial Sequence
  Description of Artificial Sequence: Synthetic oligonucleotide
  Antisense strand to SEQ ID NO: 2502454
uaagcugcaggagacuccc

SEQ ID NO: 2502456 - RNA, 19 nt, Artificial Sequence
  Description of Artificial Sequence: Synthetic oligonucleotide
  Sense strand starting at position 2281 of SEQ ID NO: 1887989
aaaugaagugucuggaauc

SEQ ID NO: 2502457 - RNA, 19 nt, Artificial Sequence
  Description of Artificial Sequence: Synthetic oligonucleotide
  Antisense strand to SEQ ID NO: 2502456
gauuccagacacuucauuu

SEQ ID NO: 2502458 - RNA, 19 nt, Artificial Sequence
  Description of Artificial Sequence: Synthetic oligonucleotide
  Sense strand starting at position 2369 of SEQ ID NO: 1887989
agacauauggauugaugca

SEQ ID NO: 2502459 - RNA, 19 nt, Artificial Sequence
  Description of Artificial Sequence: Synthetic oligonucleotide
  Antisense strand to SEQ ID NO: 2502458
ugcaucaauccauaugucu

SEQ ID NO: 2502460 - RNA, 19 nt, Artificial Sequence
  Description of Artificial Sequence: Synthetic oligonucleotide
  Sense strand starting at position 2957 of SEQ ID NO: 1887989
cugugauaguuccuccuuu

SEQ ID NO: 2502461 - RNA, 19 nt, Artificial Sequence
  Description of Artificial Sequence: Synthetic oligonucleotide
  Antisense strand to SEQ ID NO: 2502460
aaaggaggaacuaucacag

SEQ ID NO: 2502462 - RNA, 19 nt, Artificial Sequence
  Description of Artificial Sequence: Synthetic oligonucleotide
  Sense strand starting at position 2958 of SEQ ID NO: 1887989
ugugauaguuccuccuuug

SEQ ID NO: 2502463 - RNA, 19 nt, Artificial Sequence
  Description of Artificial Sequence: Synthetic oligonucleotide
  Antisense strand to SEQ ID NO: 2502462
caaaggaggaacuaucaca

SEQ ID NO: 2502464 - RNA, 19 nt, Artificial Sequence
  Description of Artificial Sequence: Synthetic oligonucleotide
  Sense strand starting at position 3133 of SEQ ID NO: 1887989
ggguuuaggcagugugaaa

SEQ ID NO: 2502465 - RNA, 19 nt, Artificial Sequence
  Description of Artificial Sequence: Synthetic oligonucleotide
  Antisense strand to SEQ ID NO: 2502464
uuucacacugccuaaaccc

SEQ ID NO: 2502466 - RNA, 19 nt, Artificial Sequence
  Description of Artificial Sequence: Synthetic oligonucleotide
  Sense strand starting at position 3213 of SEQ ID NO: 1887989
ugguauguggaauguauaa

SEQ ID NO: 2502467 - RNA, 19 nt, Artificial Sequence
  Description of Artificial Sequence: Synthetic oligonucleotide
  Antisense strand to SEQ ID NO: 2502466
uuauacauuccacauacca

SEQ ID NO: 2502468 - RNA, 19 nt, Artificial Sequence
  Description of Artificial Sequence: Synthetic oligonucleotide
  Sense strand starting at position 3215 of SEQ ID NO: 1887989
guauguggaauguauaaag

SEQ ID NO: 2502469 - RNA, 19 nt, Artificial Sequence
  Description of Artificial Sequence: Synthetic oligonucleotide
  Antisense strand to SEQ ID NO: 2502468
cuuuauacauuccacauac

SEQ ID NO: 2502470 - RNA, 19 nt, Artificial Sequence
  Description of Artificial Sequence: Synthetic oligonucleotide
  Sense strand starting at position 3389 of SEQ ID NO: 1887989
uucugcuuucuccauguga

SEQ ID NO: 2502471 - RNA, 19 nt, Artificial Sequence
  Description of Artificial Sequence: Synthetic oligonucleotide
  Antisense strand to SEQ ID NO: 2502470
ucacauggagaaagcagaa

SEQ ID NO: 2502472 - RNA, 19 nt, Artificial Sequence
  Description of Artificial Sequence: Synthetic oligonucleotide
  Sense strand starting at position 3391 of SEQ ID NO: 1887989
cugcuuucuccaugugaac

SEQ ID NO: 2502473 - RNA, 19 nt, Artificial Sequence
  Description of Artificial Sequence: Synthetic oligonucleotide
  Antisense strand to SEQ ID NO: 2502472
guucacauggagaaagcag

SEQ ID NO: 2502474 - RNA, 19 nt, Artificial Sequence
  Description of Artificial Sequence: Synthetic oligonucleotide
  Sense strand starting at position 3443 of SEQ ID NO: 1887989
ggagcuucuacugaacagu

SEQ ID NO: 2502475 - RNA, 19 nt, Artificial Sequence
  Description of Artificial Sequence: Synthetic oligonucleotide
  Antisense strand to SEQ ID NO: 2502474
acuguucaguagaagcucc

SEQ ID NO: 2502476 - RNA, 19 nt, Artificial Sequence
  Description of Artificial Sequence: Synthetic oligonucleotide
  Sense strand starting at position 3547 of SEQ ID NO: 1887989
auaugcacuuugucauuau

SEQ ID NO: 2502477 - RNA, 19 nt, Artificial Sequence
  Description of Artificial Sequence: Synthetic oligonucleotide
  Antisense strand to SEQ ID NO: 2502476
auaaugacaaagugcauau

SEQ ID NO: 2502478 - RNA, 19 nt, Artificial Sequence
  Description of Artificial Sequence: Synthetic oligonucleotide
  Sense strand starting at position 3550 of SEQ ID NO: 1887989
ugcacuuugucauuauuag

SEQ ID NO: 2502479 - RNA, 19 nt, Artificial Sequence
  Description of Artificial Sequence: Synthetic oligonucleotide
  Antisense strand to SEQ ID NO: 2502478
cuaauaaugacaaagugca

SEQ ID NO: 2502480 - RNA, 19 nt, Artificial Sequence
  Description of Artificial Sequence: Synthetic oligonucleotide
  Sense strand starting at position 3551 of SEQ ID NO: 1887989
gcacuuugucauuauuagu

SEQ ID NO: 2502481 - RNA, 19 nt, Artificial Sequence
  Description of Artificial Sequence: Synthetic oligonucleotide
  Antisense strand to SEQ ID NO: 2502480
acuaauaaugacaaagugc

SEQ ID NO: 2502482 - RNA, 19 nt, Artificial Sequence
  Description of Artificial Sequence: Synthetic oligonucleotide
  Sense strand starting at position 3894 of SEQ ID NO: 1887989
cuggaugccuccuucgaaa

SEQ ID NO: 2502483 - RNA, 19 nt, Artificial Sequence
  Description of Artificial Sequence: Synthetic oligonucleotide
  Antisense strand to SEQ ID NO: 2502482
uuucgaaggaggcauccag

SEQ ID NO: 2502484 - RNA, 19 nt, Artificial Sequence
  Description of Artificial Sequence: Synthetic oligonucleotide
  Sense strand starting at position 3896 of SEQ ID NO: 1887989
ggaugccuccuucgaaaga

SEQ ID NO: 2502485 - RNA, 19 nt, Artificial Sequence
  Description of Artificial Sequence: Synthetic oligonucleotide
  Antisense strand to SEQ ID NO: 2502484
ucuuucgaaggaggcaucc

SEQ ID NO: 2502486 - RNA, 19 nt, Artificial Sequence
  Description of Artificial Sequence: Synthetic oligonucleotide
  Sense strand starting at position 3906 of SEQ ID NO: 1887989
uucgaaagauuggauaauc

SEQ ID NO: 2502487 - RNA, 19 nt, Artificial Sequence
  Description of Artificial Sequence: Synthetic oligonucleotide
  Antisense strand to SEQ ID NO: 2502486
gauuauccaaucuuucgaa

SEQ ID NO: 2502488 - RNA, 19 nt, Artificial Sequence
  Description of Artificial Sequence: Synthetic oligonucleotide
  Sense strand starting at position 3914 of SEQ ID NO: 1887989
auuggauaaucguucuuac

SEQ ID NO: 2502489 - RNA, 19 nt, Artificial Sequence
  Description of Artificial Sequence: Synthetic oligonucleotide
  Antisense strand to SEQ ID NO: 2502488
guaagaacgauuauccaau

SEQ ID NO: 2502490 - RNA, 19 nt, Artificial Sequence
  Description of Artificial Sequence: Synthetic oligonucleotide
  Sense strand starting at position 3917 of SEQ ID NO: 1887989
ggauaaucguucuuacagg

SEQ ID NO: 2502491 - RNA, 19 nt, Artificial Sequence
  Description of Artificial Sequence: Synthetic oligonucleotide
  Antisense strand to SEQ ID NO: 2502490
ccuguaagaacgauuaucc

SEQ ID NO: 2502492 - RNA, 19 nt, Artificial Sequence
  Description of Artificial Sequence: Synthetic oligonucleotide
  Sense strand starting at position 3940 of SEQ ID NO: 1887989
ugugguaaugagugucucu

SEQ ID NO: 2502493 - RNA, 19 nt, Artificial Sequence
  Description of Artificial Sequence: Synthetic oligonucleotide
  Antisense strand to SEQ ID NO: 2502492
agagacacucauuaccaca

SEQ ID NO: 2502494 - RNA, 19 nt, Artificial Sequence
  Description of Artificial Sequence: Synthetic oligonucleotide
  Sense strand starting at position 3945 of SEQ ID NO: 1887989
uaaugagugucucugucau

SEQ ID NO: 2502495 - RNA, 19 nt, Artificial Sequence
  Description of Artificial Sequence: Synthetic oligonucleotide
  Antisense strand to SEQ ID NO: 2502494
augacagagacacucauua

SEQ ID NO: 2502496 - RNA, 19 nt, Artificial Sequence
  Description of Artificial Sequence: Synthetic oligonucleotide
  Sense strand starting at position 3947 of SEQ ID NO: 1887989
augagugucucugucauuc

SEQ ID NO: 2502497 - RNA, 19 nt, Artificial Sequence
  Description of Artificial Sequence: Synthetic oligonucleotide
  Antisense strand to SEQ ID NO: 2502496
gaaugacagagacacucau

SEQ ID NO: 2502498 - RNA, 19 nt, Artificial Sequence
  Description of Artificial Sequence: Synthetic oligonucleotide
  Sense strand starting at position 3964 of SEQ ID NO: 1887989
ucauuuagguaagaugcau

SEQ ID NO: 2502499 - RNA, 19 nt, Artificial Sequence
  Description of Artificial Sequence: Synthetic oligonucleotide
  Antisense strand to SEQ ID NO: 2502498
augcaucuuaccuaaauga

SEQ ID NO: 2502500 - RNA, 19 nt, Artificial Sequence
  Description of Artificial Sequence: Synthetic oligonucleotide
  Sense strand starting at position 3970 of SEQ ID NO: 1887989
agguaagaugcauacgcaa

SEQ ID NO: 2502501 - RNA, 19 nt, Artificial Sequence
  Description of Artificial Sequence: Synthetic oligonucleotide
  Antisense strand to SEQ ID NO: 2502500
uugcguaugcaucuuaccu

SEQ ID NO: 2502502 - RNA, 19 nt, Artificial Sequence
  Description of Artificial Sequence: Synthetic oligonucleotide
  Sense strand starting at position 3972 of SEQ ID NO: 1887989
guaagaugcauacgcaaua

SEQ ID NO: 2502503 - RNA, 19 nt, Artificial Sequence
  Description of Artificial Sequence: Synthetic oligonucleotide
  Antisense strand to SEQ ID NO: 2502502
uauugcguaugcaucuuac

SEQ ID NO: 2502504 - RNA, 19 nt, Artificial Sequence
  Description of Artificial Sequence: Synthetic oligonucleotide
  Sense strand starting at position 3977 of SEQ ID NO: 1887989
augcauacgcaauagugau

SEQ ID NO: 2502505 - RNA, 19 nt, Artificial Sequence
  Description of Artificial Sequence: Synthetic oligonucleotide
  Antisense strand to SEQ ID NO: 2502504
aucacuauugcguaugcau

SEQ ID NO: 2502506 - RNA, 19 nt, Artificial Sequence
  Description of Artificial Sequence: Synthetic oligonucleotide
  Sense strand starting at position 3983 of SEQ ID NO: 1887989
acgcaauagugaucuauaa

SEQ ID NO: 2502507 - RNA, 19 nt, Artificial Sequence
  Description of Artificial Sequence: Synthetic oligonucleotide
  Antisense strand to SEQ ID NO: 2502506
uuauagaucacuauugcgu

SEQ ID NO: 2502508 - RNA, 19 nt, Artificial Sequence
  Description of Artificial Sequence: Synthetic oligonucleotide
  Sense strand starting at position 197 of SEQ ID NO: 1887990
agcccuucgucgcaaagau

SEQ ID NO: 2502509 - RNA, 19 nt, Artificial Sequence
  Description of Artificial Sequence: Synthetic oligonucleotide
  Antisense strand to SEQ ID NO: 2502508
aucuuugcgacgaagggcu

SEQ ID NO: 2502510 - RNA, 19 nt, Artificial Sequence
  Description of Artificial Sequence: Synthetic oligonucleotide
  Sense strand starting at position 332 of SEQ ID NO: 1887990
augggauggguuggucuua

SEQ ID NO: 2502511 - RNA, 19 nt, Artificial Sequence
  Description of Artificial Sequence: Synthetic oligonucleotide
  Antisense strand to SEQ ID NO: 2502510
uaagaccaacccaucccau

SEQ ID NO: 2502512 - RNA, 19 nt, Artificial Sequence
  Description of Artificial Sequence: Synthetic oligonucleotide
  Sense strand starting at position 333 of SEQ ID NO: 1887990
ugggauggguuggucuuau

SEQ ID NO: 2502513 - RNA, 19 nt, Artificial Sequence
  Description of Artificial Sequence: Synthetic oligonucleotide
  Antisense strand to SEQ ID NO: 2502512
auaagaccaacccauccca

SEQ ID NO: 2502514 - RNA, 19 nt, Artificial Sequence
  Description of Artificial Sequence: Synthetic oligonucleotide
  Sense strand starting at position 337 of SEQ ID NO: 1887990
auggguuggucuuaucauc

SEQ ID NO: 2502515 - RNA, 19 nt, Artificial Sequence
  Description of Artificial Sequence: Synthetic oligonucleotide
  Antisense strand to SEQ ID NO: 2502514
gaugauaagaccaacccau

SEQ ID NO: 2502516 - RNA, 19 nt, Artificial Sequence
  Description of Artificial Sequence: Synthetic oligonucleotide
  Sense strand starting at position 342 of SEQ ID NO: 1887990
uuggucuuaucaucccauu

SEQ ID NO: 2502517 - RNA, 19 nt, Artificial Sequence
  Description of Artificial Sequence: Synthetic oligonucleotide
  Antisense strand to SEQ ID NO: 2502516
aaugggaugauaagaccaa

SEQ ID NO: 2502518 - RNA, 19 nt, Artificial Sequence
  Description of Artificial Sequence: Synthetic oligonucleotide
  Sense strand starting at position 1279 of SEQ ID NO: 1887990
acaagaggguuuggaguaa

SEQ ID NO: 2502519 - RNA, 19 nt, Artificial Sequence
  Description of Artificial Sequence: Synthetic oligonucleotide
  Antisense strand to SEQ ID NO: 2502518
uuacuccaaacccucuugu

SEQ ID NO: 2502520 - RNA, 19 nt, Artificial Sequence
  Description of Artificial Sequence: Synthetic oligonucleotide
  Sense strand starting at position 1292 of SEQ ID NO: 1887990
gaguaagacgccugcaucu

SEQ ID NO: 2502521 - RNA, 19 nt, Artificial Sequence
  Description of Artificial Sequence: Synthetic oligonucleotide
  Antisense strand to SEQ ID NO: 2502520
agaugcaggcgucuuacuc

SEQ ID NO: 2502522 - RNA, 19 nt, Artificial Sequence
  Description of Artificial Sequence: Synthetic oligonucleotide
  Sense strand starting at position 1801 of SEQ ID NO: 1887990
uuugcucugagugaaggaa

SEQ ID NO: 2502523 - RNA, 19 nt, Artificial Sequence
  Description of Artificial Sequence: Synthetic oligonucleotide
  Antisense strand to SEQ ID NO: 2502522
uuccuucacucagagcaaa

SEQ ID NO: 2502524 - RNA, 19 nt, Artificial Sequence
  Description of Artificial Sequence: Synthetic oligonucleotide
  Sense strand starting at position 1826 of SEQ ID NO: 1887990
cgagaacuuccaggucuau

SEQ ID NO: 2502525 - RNA, 19 nt, Artificial Sequence
  Description of Artificial Sequence: Synthetic oligonucleotide
  Antisense strand to SEQ ID NO: 2502524
auagaccuggaaguucucg

SEQ ID NO: 2502526 - RNA, 19 nt, Artificial Sequence
  Description of Artificial Sequence: Synthetic oligonucleotide
  Sense strand starting at position 1941 of SEQ ID NO: 1887990
cgucauuccacgggaucca

SEQ ID NO: 2502527 - RNA, 19 nt, Artificial Sequence
  Description of Artificial Sequence: Synthetic oligonucleotide
  Antisense strand to SEQ ID NO: 2502526
uggaucccguggaaugacg

SEQ ID NO: 2502528 - RNA, 19 nt, Artificial Sequence
  Description of Artificial Sequence: Synthetic oligonucleotide
  Sense strand starting at position 2203 of SEQ ID NO: 1887990
cuggaauagucuggaagga

SEQ ID NO: 2502529 - RNA, 19 nt, Artificial Sequence
  Description of Artificial Sequence: Synthetic oligonucleotide
  Antisense strand to SEQ ID NO: 2502528
uccuuccagacuauuccag

SEQ ID NO: 2502530 - RNA, 19 nt, Artificial Sequence
  Description of Artificial Sequence: Synthetic oligonucleotide
  Sense strand starting at position 2800 of SEQ ID NO: 1887990
aggagaaugcggugaacau

SEQ ID NO: 2502531 - RNA, 19 nt, Artificial Sequence
  Description of Artificial Sequence: Synthetic oligonucleotide
  Antisense strand to SEQ ID NO: 2502530
auguucaccgcauucuccu

SEQ ID NO: 2502532 - RNA, 19 nt, Artificial Sequence
  Description of Artificial Sequence: Synthetic oligonucleotide
  Sense strand starting at position 2911 of SEQ ID NO: 1887990
acuaaauuugcuuguguga

SEQ ID NO: 2502533 - RNA, 19 nt, Artificial Sequence
  Description of Artificial Sequence: Synthetic oligonucleotide
  Antisense strand to SEQ ID NO: 2502532
ucacacaagcaaauuuagu

SEQ ID NO: 2502534 - RNA, 19 nt, Artificial Sequence
  Description of Artificial Sequence: Synthetic oligonucleotide
  Sense strand starting at position 2913 of SEQ ID NO: 1887990
uaaauuugcuugugugaga

SEQ ID NO: 2502535 - RNA, 19 nt, Artificial Sequence
  Description of Artificial Sequence: Synthetic oligonucleotide
  Antisense strand to SEQ ID NO: 2502534
ucucacacaagcaaauuua

SEQ ID NO: 2502536 - RNA, 19 nt, Artificial Sequence
  Description of Artificial Sequence: Synthetic oligonucleotide
  Sense strand starting at position 2918 of SEQ ID NO: 1887990
uugcuugugugagauagga

SEQ ID NO: 2502537 - RNA, 19 nt, Artificial Sequence
  Description of Artificial Sequence: Synthetic oligonucleotide
  Antisense strand to SEQ ID NO: 2502536
uccuaucucacacaagcaa

SEQ ID NO: 2502538 - RNA, 19 nt, Artificial Sequence
  Description of Artificial Sequence: Synthetic oligonucleotide
  Sense strand starting at position 2920 of SEQ ID NO: 1887990
gcuugugugagauaggaau

SEQ ID NO: 2502539 - RNA, 19 nt, Artificial Sequence
  Description of Artificial Sequence: Synthetic oligonucleotide
  Antisense strand to SEQ ID NO: 2502538
auuccuaucucacacaagc

SEQ ID NO: 2502540 - RNA, 19 nt, Artificial Sequence
  Description of Artificial Sequence: Synthetic oligonucleotide
  Sense strand starting at position 3475 of SEQ ID NO: 1887990
guaaauaagccuuagacca

SEQ ID NO: 2502541 - RNA, 19 nt, Artificial Sequence
  Description of Artificial Sequence: Synthetic oligonucleotide
  Antisense strand to SEQ ID NO: 2502540
uggucuaaggcuuauuuac

SEQ ID NO: 2502542 - RNA, 19 nt, Artificial Sequence
  Description of Artificial Sequence: Synthetic oligonucleotide
  Sense strand starting at position 3621 of SEQ ID NO: 1887990
acaagucuuuggucgcaca

SEQ ID NO: 2502543 - RNA, 19 nt, Artificial Sequence
  Description of Artificial Sequence: Synthetic oligonucleotide
  Antisense strand to SEQ ID NO: 2502542
ugugcgaccaaagacuugu

SEQ ID NO: 2502544 - RNA, 19 nt, Artificial Sequence
  Description of Artificial Sequence: Synthetic oligonucleotide
  Sense strand starting at position 3622 of SEQ ID NO: 1887990
caagucuuuggucgcacau

SEQ ID NO: 2502545 - RNA, 19 nt, Artificial Sequence
  Description of Artificial Sequence: Synthetic oligonucleotide
  Antisense strand to SEQ ID NO: 2502544
augugcgaccaaagacuug

SEQ ID NO: 2502546 - RNA, 19 nt, Artificial Sequence
  Description of Artificial Sequence: Synthetic oligonucleotide
  Sense strand starting at position 3790 of SEQ ID NO: 1887990
ccuacaaucugacggaaac

SEQ ID NO: 2502547 - RNA, 19 nt, Artificial Sequence
  Description of Artificial Sequence: Synthetic oligonucleotide
  Antisense strand to SEQ ID NO: 2502546
guuuccgucagauuguagg

SEQ ID NO: 2502548 - RNA, 19 nt, Artificial Sequence
  Description of Artificial Sequence: Synthetic oligonucleotide
  Sense strand starting at position 3791 of SEQ ID NO: 1887990
cuacaaucugacggaaacu

SEQ ID NO: 2502549 - RNA, 19 nt, Artificial Sequence
  Description of Artificial Sequence: Synthetic oligonucleotide
  Antisense strand to SEQ ID NO: 2502548
aguuuccgucagauuguag

SEQ ID NO: 2502550 - RNA, 19 nt, Artificial Sequence
  Description of Artificial Sequence: Synthetic oligonucleotide
  Sense strand starting at position 3842 of SEQ ID NO: 1887990
cacgauuaauuauagaguu

SEQ ID NO: 2502551 - RNA, 19 nt, Artificial Sequence
  Description of Artificial Sequence: Synthetic oligonucleotide
  Antisense strand to SEQ ID NO: 2502550
aacucuauaauuaaucgug

SEQ ID NO: 2502552 - RNA, 19 nt, Artificial Sequence
  Description of Artificial Sequence: Synthetic oligonucleotide
  Sense strand starting at position 3867 of SEQ ID NO: 1887990
aacacaaaguuugaggaua

SEQ ID NO: 2502553 - RNA, 19 nt, Artificial Sequence
  Description of Artificial Sequence: Synthetic oligonucleotide
  Antisense strand to SEQ ID NO: 2502552
uauccucaaacuuuguguu

SEQ ID NO: 2502554 - RNA, 19 nt, Artificial Sequence
  Description of Artificial Sequence: Synthetic oligonucleotide
  Sense strand starting at position 3880 of SEQ ID NO: 1887990
aggauagccaucuggaaac

SEQ ID NO: 2502555 - RNA, 19 nt, Artificial Sequence
  Description of Artificial Sequence: Synthetic oligonucleotide
  Antisense strand to SEQ ID NO: 2502554
guuuccagauggcuauccu

SEQ ID NO: 2502556 - RNA, 19 nt, Artificial Sequence
  Description of Artificial Sequence: Synthetic oligonucleotide
  Sense strand starting at position 3922 of SEQ ID NO: 1887990
cguguucccauguagagau

SEQ ID NO: 2502557 - RNA, 19 nt, Artificial Sequence
  Description of Artificial Sequence: Synthetic oligonucleotide
  Antisense strand to SEQ ID NO: 2502556
aucucuacaugggaacacg

SEQ ID NO: 2502558 - RNA, 19 nt, Artificial Sequence
  Description of Artificial Sequence: Synthetic oligonucleotide
  Sense strand starting at position 251 of SEQ ID NO: 1887991
agcuaauagcucuguauaa

SEQ ID NO: 2502559 - RNA, 19 nt, Artificial Sequence
  Description of Artificial Sequence: Synthetic oligonucleotide
  Antisense strand to SEQ ID NO: 2502558
uuauacagagcuauuagcu

SEQ ID NO: 2502560 - RNA, 19 nt, Artificial Sequence
  Description of Artificial Sequence: Synthetic oligonucleotide
  Sense strand starting at position 252 of SEQ ID NO: 1887991
gcuaauagcucuguauaaa

SEQ ID NO: 2502561 - RNA, 19 nt, Artificial Sequence
  Description of Artificial Sequence: Synthetic oligonucleotide
  Antisense strand to SEQ ID NO: 2502560
uuuauacagagcuauuagc

SEQ ID NO: 2502562 - RNA, 19 nt, Artificial Sequence
  Description of Artificial Sequence: Synthetic oligonucleotide
  Sense strand starting at position 318 of SEQ ID NO: 1887991
caguaauagugaugcuuuc

SEQ ID NO: 2502563 - RNA, 19 nt, Artificial Sequence
  Description of Artificial Sequence: Synthetic oligonucleotide
  Antisense strand to SEQ ID NO: 2502562
gaaagcaucacuauuacug

SEQ ID NO: 2502564 - RNA, 19 nt, Artificial Sequence
  Description of Artificial Sequence: Synthetic oligonucleotide
  Sense strand starting at position 492 of SEQ ID NO: 1887991
acaguuaugagacgcuguu

SEQ ID NO: 2502565 - RNA, 19 nt, Artificial Sequence
  Description of Artificial Sequence: Synthetic oligonucleotide
  Antisense strand to SEQ ID NO: 2502564
aacagcgucucauaacugu

SEQ ID NO: 2502566 - RNA, 19 nt, Artificial Sequence
  Description of Artificial Sequence: Synthetic oligonucleotide
  Sense strand starting at position 498 of SEQ ID NO: 1887991
augagacgcuguuugagaa

SEQ ID NO: 2502567 - RNA, 19 nt, Artificial Sequence
  Description of Artificial Sequence: Synthetic oligonucleotide
  Antisense strand to SEQ ID NO: 2502566
uucucaaacagcgucucau

SEQ ID NO: 2502568 - RNA, 19 nt, Artificial Sequence
  Description of Artificial Sequence: Synthetic oligonucleotide
  Sense strand starting at position 579 of SEQ ID NO: 1887991
aaaggacaaacguguguau

SEQ ID NO: 2502569 - RNA, 19 nt, Artificial Sequence
  Description of Artificial Sequence: Synthetic oligonucleotide
  Antisense strand to SEQ ID NO: 2502568
auacacacguuuguccuuu

SEQ ID NO: 2502570 - RNA, 19 nt, Artificial Sequence
  Description of Artificial Sequence: Synthetic oligonucleotide
  Sense strand starting at position 673 of SEQ ID NO: 1887991
uagauuacgugaccuauua

SEQ ID NO: 2502571 - RNA, 19 nt, Artificial Sequence
  Description of Artificial Sequence: Synthetic oligonucleotide
  Antisense strand to SEQ ID NO: 2502570
uaauaggucacguaaucua

SEQ ID NO: 2502572 - RNA, 19 nt, Artificial Sequence
  Description of Artificial Sequence: Synthetic oligonucleotide
  Sense strand starting at position 680 of SEQ ID NO: 1887991
cgugaccuauuauaugauu

SEQ ID NO: 2502573 - RNA, 19 nt, Artificial Sequence
  Description of Artificial Sequence: Synthetic oligonucleotide
  Antisense strand to SEQ ID NO: 2502572
aaucauauaauaggucacg

SEQ ID NO: 2502574 - RNA, 19 nt, Artificial Sequence
  Description of Artificial Sequence: Synthetic oligonucleotide
  Sense strand starting at position 735 of SEQ ID NO: 1887991
ccacucuguguuuguugaa

SEQ ID NO: 2502575 - RNA, 19 nt, Artificial Sequence
  Description of Artificial Sequence: Synthetic oligonucleotide
  Antisense strand to SEQ ID NO: 2502574
uucaacaaacacagagugg

SEQ ID NO: 2502576 - RNA, 19 nt, Artificial Sequence
  Description of Artificial Sequence: Synthetic oligonucleotide
  Sense strand starting at position 736 of SEQ ID NO: 1887991
cacucuguguuuguugaaa

SEQ ID NO: 2502577 - RNA, 19 nt, Artificial Sequence
  Description of Artificial Sequence: Synthetic oligonucleotide
  Antisense strand to SEQ ID NO: 2502576
uuucaacaaacacagagug

SEQ ID NO: 2502578 - RNA, 19 nt, Artificial Sequence
  Description of Artificial Sequence: Synthetic oligonucleotide
  Sense strand starting at position 785 of SEQ ID NO: 1887991
gccgcuguguaccuuaaau

SEQ ID NO: 2502579 - RNA, 19 nt, Artificial Sequence
  Description of Artificial Sequence: Synthetic oligonucleotide
  Antisense strand to SEQ ID NO: 2502578
auuuaagguacacagcggc

SEQ ID NO: 2502580 - RNA, 19 nt, Artificial Sequence
  Description of Artificial Sequence: Synthetic oligonucleotide
  Sense strand starting at position 787 of SEQ ID NO: 1887991
cgcuguguaccuuaaauaa

SEQ ID NO: 2502581 - RNA, 19 nt, Artificial Sequence
  Description of Artificial Sequence: Synthetic oligonucleotide
  Antisense strand to SEQ ID NO: 2502580
uuauuuaagguacacagcg

SEQ ID NO: 2502582 - RNA, 19 nt, Artificial Sequence
  Description of Artificial Sequence: Synthetic oligonucleotide
  Sense strand starting at position 1719 of SEQ ID NO: 1887991
cgcgauagaaaguguauau

SEQ ID NO: 2502583 - RNA, 19 nt, Artificial Sequence
  Description of Artificial Sequence: Synthetic oligonucleotide
  Antisense strand to SEQ ID NO: 2502582
auauacacuuucuaucgcg

SEQ ID NO: 2502584 - RNA, 19 nt, Artificial Sequence
  Description of Artificial Sequence: Synthetic oligonucleotide
  Sense strand starting at position 1730 of SEQ ID NO: 1887991
guguauauauugcccuaua

SEQ ID NO: 2502585 - RNA, 19 nt, Artificial Sequence
  Description of Artificial Sequence: Synthetic oligonucleotide
  Antisense strand to SEQ ID NO: 2502584
uauagggcaauauauacac

SEQ ID NO: 2502586 - RNA, 19 nt, Artificial Sequence
  Description of Artificial Sequence: Synthetic oligonucleotide
  Sense strand starting at position 1731 of SEQ ID NO: 1887991
uguauauauugcccuauag

SEQ ID NO: 2502587 - RNA, 19 nt, Artificial Sequence
  Description of Artificial Sequence: Synthetic oligonucleotide
  Antisense strand to SEQ ID NO: 2502586
cuauagggcaauauauaca

SEQ ID NO: 2502588 - RNA, 19 nt, Artificial Sequence
  Description of Artificial Sequence: Synthetic oligonucleotide
  Sense strand starting at position 2103 of SEQ ID NO: 1887991
gcccuuuaguaccggcaga

SEQ ID NO: 2502589 - RNA, 19 nt, Artificial Sequence
  Description of Artificial Sequence: Synthetic oligonucleotide
  Antisense strand to SEQ ID NO: 2502588
ucugccgguacuaaagggc

SEQ ID NO: 2502590 - RNA, 19 nt, Artificial Sequence
  Description of Artificial Sequence: Synthetic oligonucleotide
  Sense strand starting at position 2264 of SEQ ID NO: 1887991
ugcaaaguagaaugugaaa

SEQ ID NO: 2502591 - RNA, 19 nt, Artificial Sequence
  Description of Artificial Sequence: Synthetic oligonucleotide
  Antisense strand to SEQ ID NO: 2502590
uuucacauucuacuuugca

SEQ ID NO: 2502592 - RNA, 19 nt, Artificial Sequence
  Description of Artificial Sequence: Synthetic oligonucleotide
  Sense strand starting at position 2291 of SEQ ID NO: 1887991
ccugcuugggcagaacuua

SEQ ID NO: 2502593 - RNA, 19 nt, Artificial Sequence
  Description of Artificial Sequence: Synthetic oligonucleotide
  Antisense strand to SEQ ID NO: 2502592
uaaguucugcccaagcagg

SEQ ID NO: 2502594 - RNA, 19 nt, Artificial Sequence
  Description of Artificial Sequence: Synthetic oligonucleotide
  Sense strand starting at position 2319 of SEQ ID NO: 1887991
gcugacggcccagagaaua

SEQ ID NO: 2502595 - RNA, 19 nt, Artificial Sequence
  Description of Artificial Sequence: Synthetic oligonucleotide
  Antisense strand to SEQ ID NO: 2502594
uauucucugggccgucagc

SEQ ID NO: 2502596 - RNA, 19 nt, Artificial Sequence
  Description of Artificial Sequence: Synthetic oligonucleotide
  Sense strand starting at position 2404 of SEQ ID NO: 1887991
ugcagagacuucccuaaag

SEQ ID NO: 2502597 - RNA, 19 nt, Artificial Sequence
  Description of Artificial Sequence: Synthetic oligonucleotide
  Antisense strand to SEQ ID NO: 2502596
cuuuagggaagucucugca

SEQ ID NO: 2502598 - RNA, 19 nt, Artificial Sequence
  Description of Artificial Sequence: Synthetic oligonucleotide
  Sense strand starting at position 2682 of SEQ ID NO: 1887991
auaagagguugauuguaug

SEQ ID NO: 2502599 - RNA, 19 nt, Artificial Sequence
  Description of Artificial Sequence: Synthetic oligonucleotide
  Antisense strand to SEQ ID NO: 2502598
cauacaaucaaccucuuau

SEQ ID NO: 2502600 - RNA, 19 nt, Artificial Sequence
  Description of Artificial Sequence: Synthetic oligonucleotide
  Sense strand starting at position 2685 of SEQ ID NO: 1887991
agagguugauuguaugaga

SEQ ID NO: 2502601 - RNA, 19 nt, Artificial Sequence
  Description of Artificial Sequence: Synthetic oligonucleotide
  Antisense strand to SEQ ID NO: 2502600
ucucauacaaucaaccucu

SEQ ID NO: 2502602 - RNA, 19 nt, Artificial Sequence
  Description of Artificial Sequence: Synthetic oligonucleotide
  Sense strand starting at position 2688 of SEQ ID NO: 1887991
gguugauuguaugagauag

SEQ ID NO: 2502603 - RNA, 19 nt, Artificial Sequence
  Description of Artificial Sequence: Synthetic oligonucleotide
  Antisense strand to SEQ ID NO: 2502602
cuaucucauacaaucaacc

SEQ ID NO: 2502604 - RNA, 19 nt, Artificial Sequence
  Description of Artificial Sequence: Synthetic oligonucleotide
  Sense strand starting at position 2740 of SEQ ID NO: 1887991
caguuaguuguccauucca

SEQ ID NO: 2502605 - RNA, 19 nt, Artificial Sequence
  Description of Artificial Sequence: Synthetic oligonucleotide
  Antisense strand to SEQ ID NO: 2502604
uggaauggacaacuaacug

SEQ ID NO: 2502606 - RNA, 19 nt, Artificial Sequence
  Description of Artificial Sequence: Synthetic oligonucleotide
  Sense strand starting at position 2753 of SEQ ID NO: 1887991
auuccacauuuguggaaga

SEQ ID NO: 2502607 - RNA, 19 nt, Artificial Sequence
  Description of Artificial Sequence: Synthetic oligonucleotide
  Antisense strand to SEQ ID NO: 2502606
ucuuccacaaauguggaau

SEQ ID NO: 2502608 - RNA, 19 nt, Artificial Sequence
  Description of Artificial Sequence: Synthetic oligonucleotide
  Sense strand starting at position 2764 of SEQ ID NO: 1887991
guggaagagaucuguuacu

SEQ ID NO: 2502609 - RNA, 19 nt, Artificial Sequence
  Description of Artificial Sequence: Synthetic oligonucleotide
  Antisense strand to SEQ ID NO: 2502608
aguaacagaucucuuccac

SEQ ID NO: 2502610 - RNA, 19 nt, Artificial Sequence
  Description of Artificial Sequence: Synthetic oligonucleotide
  Sense strand starting at position 2769 of SEQ ID NO: 1887991
agagaucuguuacuuucuu

SEQ ID NO: 2502611 - RNA, 19 nt, Artificial Sequence
  Description of Artificial Sequence: Synthetic oligonucleotide
  Antisense strand to SEQ ID NO: 2502610
aagaaaguaacagaucucu

SEQ ID NO: 2502612 - RNA, 19 nt, Artificial Sequence
  Description of Artificial Sequence: Synthetic oligonucleotide
  Sense strand starting at position 3191 of SEQ ID NO: 1887991
aaaggaaucugugucauga

SEQ ID NO: 2502613 - RNA, 19 nt, Artificial Sequence
  Description of Artificial Sequence: Synthetic oligonucleotide
  Antisense strand to SEQ ID NO: 2502612
ucaugacacagauuccuuu

SEQ ID NO: 2502614 - RNA, 19 nt, Artificial Sequence
  Description of Artificial Sequence: Synthetic oligonucleotide
  Sense strand starting at position 3193 of SEQ ID NO: 1887991
aggaaucugugucaugaau

SEQ ID NO: 2502615 - RNA, 19 nt, Artificial Sequence
  Description of Artificial Sequence: Synthetic oligonucleotide
  Antisense strand to SEQ ID NO: 2502614
auucaugacacagauuccu

SEQ ID NO: 2502616 - RNA, 19 nt, Artificial Sequence
  Description of Artificial Sequence: Synthetic oligonucleotide
  Sense strand starting at position 3195 of SEQ ID NO: 1887991
gaaucugugucaugaauaa

SEQ ID NO: 2502617 - RNA, 19 nt, Artificial Sequence
  Description of Artificial Sequence: Synthetic oligonucleotide
  Antisense strand to SEQ ID NO: 2502616
uuauucaugacacagauuc

SEQ ID NO: 2502618 - RNA, 19 nt, Artificial Sequence
  Description of Artificial Sequence: Synthetic oligonucleotide
  Sense strand starting at position 3199 of SEQ ID NO: 1887991
cugugucaugaauaaguuc

SEQ ID NO: 2502619 - RNA, 19 nt, Artificial Sequence
  Description of Artificial Sequence: Synthetic oligonucleotide
  Antisense strand to SEQ ID NO: 2502618
gaacuuauucaugacacag

SEQ ID NO: 2502620 - RNA, 19 nt, Artificial Sequence
  Description of Artificial Sequence: Synthetic oligonucleotide
  Sense strand starting at position 3394 of SEQ ID NO: 1887991
ggcauuccauucccagaaa

SEQ ID NO: 2502621 - RNA, 19 nt, Artificial Sequence
  Description of Artificial Sequence: Synthetic oligonucleotide
  Antisense strand to SEQ ID NO: 2502620
uuucugggaauggaaugcc

SEQ ID NO: 2502622 - RNA, 19 nt, Artificial Sequence
  Description of Artificial Sequence: Synthetic oligonucleotide
  Sense strand starting at position 3676 of SEQ ID NO: 1887991
cgggcauacugccugcaaa

SEQ ID NO: 2502623 - RNA, 19 nt, Artificial Sequence
  Description of Artificial Sequence: Synthetic oligonucleotide
  Antisense strand to SEQ ID NO: 2502622
uuugcaggcaguaugcccg

SEQ ID NO: 2502624 - RNA, 19 nt, Artificial Sequence
  Description of Artificial Sequence: Synthetic oligonucleotide
  Sense strand starting at position 119 of SEQ ID NO: 1887992
ugagaagucagaugcaacu

SEQ ID NO: 2502625 - RNA, 19 nt, Artificial Sequence
  Description of Artificial Sequence: Synthetic oligonucleotide
  Antisense strand to SEQ ID NO: 2502624
aguugcaucugacuucuca

SEQ ID NO: 2502626 - RNA, 19 nt, Artificial Sequence
  Description of Artificial Sequence: Synthetic oligonucleotide
  Sense strand starting at position 627 of SEQ ID NO: 1887992
gggcaacaucauugaggua

SEQ ID NO: 2502627 - RNA, 19 nt, Artificial Sequence
  Description of Artificial Sequence: Synthetic oligonucleotide
  Antisense strand to SEQ ID NO: 2502626
uaccucaaugauguugccc

SEQ ID NO: 2502628 - RNA, 19 nt, Artificial Sequence
  Description of Artificial Sequence: Synthetic oligonucleotide
  Sense strand starting at position 727 of SEQ ID NO: 1887992
ccaggaucccagugaccua

SEQ ID NO: 2502629 - RNA, 19 nt, Artificial Sequence
  Description of Artificial Sequence: Synthetic oligonucleotide
  Antisense strand to SEQ ID NO: 2502628
uaggucacugggauccugg

SEQ ID NO: 2502630 - RNA, 19 nt, Artificial Sequence
  Description of Artificial Sequence: Synthetic oligonucleotide
  Sense strand starting at position 734 of SEQ ID NO: 1887992
cccagugaccuaggugaga

SEQ ID NO: 2502631 - RNA, 19 nt, Artificial Sequence
  Description of Artificial Sequence: Synthetic oligonucleotide
  Antisense strand to SEQ ID NO: 2502630
ucucaccuaggucacuggg

SEQ ID NO: 2502632 - RNA, 19 nt, Artificial Sequence
  Description of Artificial Sequence: Synthetic oligonucleotide
  Sense strand starting at position 750 of SEQ ID NO: 1887992
agaaguugguacucagauc

SEQ ID NO: 2502633 - RNA, 19 nt, Artificial Sequence
  Description of Artificial Sequence: Synthetic oligonucleotide
  Antisense strand to SEQ ID NO: 2502632
gaucugaguaccaacuucu

SEQ ID NO: 2502634 - RNA, 19 nt, Artificial Sequence
  Description of Artificial Sequence: Synthetic oligonucleotide
  Sense strand starting at position 816 of SEQ ID NO: 1887992
gcuugugggccuuauguau

SEQ ID NO: 2502635 - RNA, 19 nt, Artificial Sequence
  Description of Artificial Sequence: Synthetic oligonucleotide
  Antisense strand to SEQ ID NO: 2502634
auacauaaggcccacaagc

SEQ ID NO: 2502636 - RNA, 19 nt, Artificial Sequence
  Description of Artificial Sequence: Synthetic oligonucleotide
  Sense strand starting at position 823 of SEQ ID NO: 1887992
ggccuuauguauuuguguu

SEQ ID NO: 2502637 - RNA, 19 nt, Artificial Sequence
  Description of Artificial Sequence: Synthetic oligonucleotide
  Antisense strand to SEQ ID NO: 2502636
aacacaaauacauaaggcc

SEQ ID NO: 2502638 - RNA, 19 nt, Artificial Sequence
  Description of Artificial Sequence: Synthetic oligonucleotide
  Sense strand starting at position 824 of SEQ ID NO: 1887992
gccuuauguauuuguguuu

SEQ ID NO: 2502639 - RNA, 19 nt, Artificial Sequence
  Description of Artificial Sequence: Synthetic oligonucleotide
  Antisense strand to SEQ ID NO: 2502638
aaacacaaauacauaaggc

SEQ ID NO: 2502640 - RNA, 19 nt, Artificial Sequence
  Description of Artificial Sequence: Synthetic oligonucleotide
  Sense strand starting at position 1405 of SEQ ID NO: 1887992
uuuaaagaaucggugacuu

SEQ ID NO: 2502641 - RNA, 19 nt, Artificial Sequence
  Description of Artificial Sequence: Synthetic oligonucleotide
  Antisense strand to SEQ ID NO: 2502640
aagucaccgauucuuuaaa

SEQ ID NO: 2502642 - RNA, 19 nt, Artificial Sequence
  Description of Artificial Sequence: Synthetic oligonucleotide
  Sense strand starting at position 1467 of SEQ ID NO: 1887992
cuaggaaagucucuggaau

SEQ ID NO: 2502643 - RNA, 19 nt, Artificial Sequence
  Description of Artificial Sequence: Synthetic oligonucleotide
  Antisense strand to SEQ ID NO: 2502642
auuccagagacuuuccuag

SEQ ID NO: 2502644 - RNA, 19 nt, Artificial Sequence
  Description of Artificial Sequence: Synthetic oligonucleotide
  Sense strand starting at position 1468 of SEQ ID NO: 1887992
uaggaaagucucuggaauu

SEQ ID NO: 2502645 - RNA, 19 nt, Artificial Sequence
  Description of Artificial Sequence: Synthetic oligonucleotide
  Antisense strand to SEQ ID NO: 2502644
aauuccagagacuuuccua

SEQ ID NO: 2502646 - RNA, 19 nt, Artificial Sequence
  Description of Artificial Sequence: Synthetic oligonucleotide
  Sense strand starting at position 1554 of SEQ ID NO: 1887992
ugggcacuggcaugaaaua

SEQ ID NO: 2502647 - RNA, 19 nt, Artificial Sequence
  Description of Artificial Sequence: Synthetic oligonucleotide
  Antisense strand to SEQ ID NO: 2502646
uauuucaugccagugccca

SEQ ID NO: 2502648 - RNA, 19 nt, Artificial Sequence
  Description of Artificial Sequence: Synthetic oligonucleotide
  Sense strand starting at position 1638 of SEQ ID NO: 1887992
auuccaaaguguguuaauu

SEQ ID NO: 2502649 - RNA, 19 nt, Artificial Sequence
  Description of Artificial Sequence: Synthetic oligonucleotide
  Antisense strand to SEQ ID NO: 2502648
aauuaacacacuuuggaau

SEQ ID NO: 2502650 - RNA, 19 nt, Artificial Sequence
  Description of Artificial Sequence: Synthetic oligonucleotide
  Sense strand starting at position 1832 of SEQ ID NO: 1887992
guaggugggacuugaaauu

SEQ ID NO: 2502651 - RNA, 19 nt, Artificial Sequence
  Description of Artificial Sequence: Synthetic oligonucleotide
  Antisense strand to SEQ ID NO: 2502650
aauuucaagucccaccuac

SEQ ID NO: 2502652 - RNA, 19 nt, Artificial Sequence
  Description of Artificial Sequence: Synthetic oligonucleotide
  Sense strand starting at position 1897 of SEQ ID NO: 1887992
ugcucugcgcagguaagau

SEQ ID NO: 2502653 - RNA, 19 nt, Artificial Sequence
  Description of Artificial Sequence: Synthetic oligonucleotide
  Antisense strand to SEQ ID NO: 2502652
aucuuaccugcgcagagca

SEQ ID NO: 2502654 - RNA, 19 nt, Artificial Sequence
  Description of Artificial Sequence: Synthetic oligonucleotide
  Sense strand starting at position 2149 of SEQ ID NO: 1887992
ugaguuucccuuugucuau

SEQ ID NO: 2502655 - RNA, 19 nt, Artificial Sequence
  Description of Artificial Sequence: Synthetic oligonucleotide
  Antisense strand to SEQ ID NO: 2502654
auagacaaagggaaacuca

SEQ ID NO: 2502656 - RNA, 19 nt, Artificial Sequence
  Description of Artificial Sequence: Synthetic oligonucleotide
  Sense strand starting at position 2153 of SEQ ID NO: 1887992
uuucccuuugucuauguua

SEQ ID NO: 2502657 - RNA, 19 nt, Artificial Sequence
  Description of Artificial Sequence: Synthetic oligonucleotide
  Antisense strand to SEQ ID NO: 2502656
uaacauagacaaagggaaa

SEQ ID NO: 2502658 - RNA, 19 nt, Artificial Sequence
  Description of Artificial Sequence: Synthetic oligonucleotide
  Sense strand starting at position 2155 of SEQ ID NO: 1887992
ucccuuugucuauguuaag

SEQ ID NO: 2502659 - RNA, 19 nt, Artificial Sequence
  Description of Artificial Sequence: Synthetic oligonucleotide
  Antisense strand to SEQ ID NO: 2502658
cuuaacauagacaaaggga

SEQ ID NO: 2502660 - RNA, 19 nt, Artificial Sequence
  Description of Artificial Sequence: Synthetic oligonucleotide
  Sense strand starting at position 2156 of SEQ ID NO: 1887992
cccuuugucuauguuaagu

SEQ ID NO: 2502661 - RNA, 19 nt, Artificial Sequence
  Description of Artificial Sequence: Synthetic oligonucleotide
  Antisense strand to SEQ ID NO: 2502660
acuuaacauagacaaaggg

SEQ ID NO: 2502662 - RNA, 19 nt, Artificial Sequence
  Description of Artificial Sequence: Synthetic oligonucleotide
  Sense strand starting at position 2164 of SEQ ID NO: 1887992
cuauguuaagucuaggcua

SEQ ID NO: 2502663 - RNA, 19 nt, Artificial Sequence
  Description of Artificial Sequence: Synthetic oligonucleotide
  Antisense strand to SEQ ID NO: 2502662
uagccuagacuuaacauag

SEQ ID NO: 2502664 - RNA, 19 nt, Artificial Sequence
  Description of Artificial Sequence: Synthetic oligonucleotide
  Sense strand starting at position 2187 of SEQ ID NO: 1887992
guucuucucugcuucuaua

SEQ ID NO: 2502665 - RNA, 19 nt, Artificial Sequence
  Description of Artificial Sequence: Synthetic oligonucleotide
  Antisense strand to SEQ ID NO: 2502664
uauagaagcagagaagaac

SEQ ID NO: 2502666 - RNA, 19 nt, Artificial Sequence
  Description of Artificial Sequence: Synthetic oligonucleotide
  Sense strand starting at position 2221 of SEQ ID NO: 1887992
gcaugcagaccuugaaauc

SEQ ID NO: 2502667 - RNA, 19 nt, Artificial Sequence
  Description of Artificial Sequence: Synthetic oligonucleotide
  Antisense strand to SEQ ID NO: 2502666
gauuucaaggucugcaugc

SEQ ID NO: 2502668 - RNA, 19 nt, Artificial Sequence
  Description of Artificial Sequence: Synthetic oligonucleotide
  Sense strand starting at position 2270 of SEQ ID NO: 1887992
ucagacauccuuugagagu

SEQ ID NO: 2502669 - RNA, 19 nt, Artificial Sequence
  Description of Artificial Sequence: Synthetic oligonucleotide
  Antisense strand to SEQ ID NO: 2502668
acucucaaaggaugucuga

SEQ ID NO: 2502670 - RNA, 19 nt, Artificial Sequence
  Description of Artificial Sequence: Synthetic oligonucleotide
  Sense strand starting at position 2347 of SEQ ID NO: 1887992
uuugucauuuacccacgua

SEQ ID NO: 2502671 - RNA, 19 nt, Artificial Sequence
  Description of Artificial Sequence: Synthetic oligonucleotide
  Antisense strand to SEQ ID NO: 2502670
uacguggguaaaugacaaa

SEQ ID NO: 2502672 - RNA, 19 nt, Artificial Sequence
  Description of Artificial Sequence: Synthetic oligonucleotide
  Sense strand starting at position 2350 of SEQ ID NO: 1887992
gucauuuacccacguagac

SEQ ID NO: 2502673 - RNA, 19 nt, Artificial Sequence
  Description of Artificial Sequence: Synthetic oligonucleotide
  Antisense strand to SEQ ID NO: 2502672
gucuacguggguaaaugac

SEQ ID NO: 2502674 - RNA, 19 nt, Artificial Sequence
  Description of Artificial Sequence: Synthetic oligonucleotide
  Sense strand starting at position 2942 of SEQ ID NO: 1887992
agacaaaccugggucugua

SEQ ID NO: 2502675 - RNA, 19 nt, Artificial Sequence
  Description of Artificial Sequence: Synthetic oligonucleotide
  Antisense strand to SEQ ID NO: 2502674
uacagacccagguuugucu

SEQ ID NO: 2502676 - RNA, 19 nt, Artificial Sequence
  Description of Artificial Sequence: Synthetic oligonucleotide
  Sense strand starting at position 2945 of SEQ ID NO: 1887992
caaaccugggucuguagaa

SEQ ID NO: 2502677 - RNA, 19 nt, Artificial Sequence
  Description of Artificial Sequence: Synthetic oligonucleotide
  Antisense strand to SEQ ID NO: 2502676
uucuacagacccagguuug

SEQ ID NO: 2502678 - RNA, 19 nt, Artificial Sequence
  Description of Artificial Sequence: Synthetic oligonucleotide
  Sense strand starting at position 2946 of SEQ ID NO: 1887992
aaaccugggucuguagaaa

SEQ ID NO: 2502679 - RNA, 19 nt, Artificial Sequence
  Description of Artificial Sequence: Synthetic oligonucleotide
  Antisense strand to SEQ ID NO: 2502678
uuucuacagacccagguuu

SEQ ID NO: 2502680 - RNA, 19 nt, Artificial Sequence
  Description of Artificial Sequence: Synthetic oligonucleotide
  Sense strand starting at position 2983 of SEQ ID NO: 1887992
agggaaggcuucucagaca

SEQ ID NO: 2502681 - RNA, 19 nt, Artificial Sequence
  Description of Artificial Sequence: Synthetic oligonucleotide
  Antisense strand to SEQ ID NO: 2502680
ugucugagaagccuucccu

SEQ ID NO: 2502682 - RNA, 19 nt, Artificial Sequence
  Description of Artificial Sequence: Synthetic oligonucleotide
  Sense strand starting at position 2986 of SEQ ID NO: 1887992
gaaggcuucucagacagag

SEQ ID NO: 2502683 - RNA, 19 nt, Artificial Sequence
  Description of Artificial Sequence: Synthetic oligonucleotide
  Antisense strand to SEQ ID NO: 2502682
cucugucugagaagccuuc

SEQ ID NO: 2502684 - RNA, 19 nt, Artificial Sequence
  Description of Artificial Sequence: Synthetic oligonucleotide
  Sense strand starting at position 3154 of SEQ ID NO: 1887992
guguguaauaucgaagaug

SEQ ID NO: 2502685 - RNA, 19 nt, Artificial Sequence
  Description of Artificial Sequence: Synthetic oligonucleotide
  Antisense strand to SEQ ID NO: 2502684
caucuucgauauuacacac

SEQ ID NO: 2502686 - RNA, 19 nt, Artificial Sequence
  Description of Artificial Sequence: Synthetic oligonucleotide
  Sense strand starting at position 3199 of SEQ ID NO: 1887992
agcugagaugugggaggaa

SEQ ID NO: 2502687 - RNA, 19 nt, Artificial Sequence
  Description of Artificial Sequence: Synthetic oligonucleotide
  Antisense strand to SEQ ID NO: 2502686
uuccucccacaucucagcu

SEQ ID NO: 2502688 - RNA, 19 nt, Artificial Sequence
  Description of Artificial Sequence: Synthetic oligonucleotide
  Sense strand starting at position 3231 of SEQ ID NO: 1887992
uauggagauuagggacaau

SEQ ID NO: 2502689 - RNA, 19 nt, Artificial Sequence
  Description of Artificial Sequence: Synthetic oligonucleotide
  Antisense strand to SEQ ID NO: 2502688
auugucccuaaucuccaua

SEQ ID NO: 2502690 - RNA, 19 nt, Artificial Sequence
  Description of Artificial Sequence: Synthetic oligonucleotide
  Sense strand starting at position 3415 of SEQ ID NO: 1887992
agaugagaaugagagauau

SEQ ID NO: 2502691 - RNA, 19 nt, Artificial Sequence
  Description of Artificial Sequence: Synthetic oligonucleotide
  Antisense strand to SEQ ID NO: 2502690
auaucucucauucucaucu

SEQ ID NO: 2502692 - RNA, 19 nt, Artificial Sequence
  Description of Artificial Sequence: Synthetic oligonucleotide
  Sense strand starting at position 3494 of SEQ ID NO: 1887992
uggugaguugauuggaaau

SEQ ID NO: 2502693 - RNA, 19 nt, Artificial Sequence
  Description of Artificial Sequence: Synthetic oligonucleotide
  Antisense strand to SEQ ID NO: 2502692
auuuccaaucaacucacca

SEQ ID NO: 2502694 - RNA, 19 nt, Artificial Sequence
  Description of Artificial Sequence: Synthetic oligonucleotide
  Sense strand starting at position 3882 of SEQ ID NO: 1887992
agaugagaauuggaacacu

SEQ ID NO: 2502695 - RNA, 19 nt, Artificial Sequence
  Description of Artificial Sequence: Synthetic oligonucleotide
  Antisense strand to SEQ ID NO: 2502694
aguguuccaauucucaucu

SEQ ID NO: 2502696 - RNA, 19 nt, Artificial Sequence
  Description of Artificial Sequence: Synthetic oligonucleotide
  Sense strand starting at position 3938 of SEQ ID NO: 1887992
agggugugaguguauaagu

SEQ ID NO: 2502697 - RNA, 19 nt, Artificial Sequence
  Description of Artificial Sequence: Synthetic oligonucleotide
  Antisense strand to SEQ ID NO: 2502696
acuuauacacucacacccu

SEQ ID NO: 2502698 - RNA, 19 nt, Artificial Sequence
  Description of Artificial Sequence: Synthetic oligonucleotide
  Sense strand starting at position 3939 of SEQ ID NO: 1887992
gggugugaguguauaaguu

SEQ ID NO: 2502699 - RNA, 19 nt, Artificial Sequence
  Description of Artificial Sequence: Synthetic oligonucleotide
  Antisense strand to SEQ ID NO: 2502698
aacuuauacacucacaccc

SEQ ID NO: 2502700 - RNA, 19 nt, Artificial Sequence
  Description of Artificial Sequence: Synthetic oligonucleotide
  Sense strand starting at position 3941 of SEQ ID NO: 1887992
gugugaguguauaaguuag

SEQ ID NO: 2502701 - RNA, 19 nt, Artificial Sequence
  Description of Artificial Sequence: Synthetic oligonucleotide
  Antisense strand to SEQ ID NO: 2502700
cuaacuuauacacucacac

SEQ ID NO: 2502702 - RNA, 19 nt, Artificial Sequence
  Description of Artificial Sequence: Synthetic oligonucleotide
  Sense strand starting at position 3943 of SEQ ID NO: 1887992
gugaguguauaaguuagga

SEQ ID NO: 2502703 - RNA, 19 nt, Artificial Sequence
  Description of Artificial Sequence: Synthetic oligonucleotide
  Antisense strand to SEQ ID NO: 2502702
uccuaacuuauacacucac

SEQ ID NO: 2502704 - RNA, 19 nt, Artificial Sequence
  Description of Artificial Sequence: Synthetic oligonucleotide
  Sense strand starting at position 21 of SEQ ID NO: 1887993
acauacugucaagguguua

SEQ ID NO: 2502705 - RNA, 19 nt, Artificial Sequence
  Description of Artificial Sequence: Synthetic oligonucleotide
  Antisense strand to SEQ ID NO: 2502704
uaacaccuugacaguaugu

SEQ ID NO: 2502706 - RNA, 19 nt, Artificial Sequence
  Description of Artificial Sequence: Synthetic oligonucleotide
  Sense strand starting at position 100 of SEQ ID NO: 1887993
ucauaaugucaucaguaac

SEQ ID NO: 2502707 - RNA, 19 nt, Artificial Sequence
  Description of Artificial Sequence: Synthetic oligonucleotide
  Antisense strand to SEQ ID NO: 2502706
guuacugaugacauuauga

SEQ ID NO: 2502708 - RNA, 19 nt, Artificial Sequence
  Description of Artificial Sequence: Synthetic oligonucleotide
  Sense strand starting at position 110 of SEQ ID NO: 1887993
aucaguaacugggaagaga

SEQ ID NO: 2502709 - RNA, 19 nt, Artificial Sequence
  Description of Artificial Sequence: Synthetic oligonucleotide
  Antisense strand to SEQ ID NO: 2502708
ucucuucccaguuacugau

SEQ ID NO: 2502710 - RNA, 19 nt, Artificial Sequence
  Description of Artificial Sequence: Synthetic oligonucleotide
  Sense strand starting at position 144 of SEQ ID NO: 1887993
guaaauagauaagucacua

SEQ ID NO: 2502711 - RNA, 19 nt, Artificial Sequence
  Description of Artificial Sequence: Synthetic oligonucleotide
  Antisense strand to SEQ ID NO: 2502710
uagugacuuaucuauuuac

SEQ ID NO: 2502712 - RNA, 19 nt, Artificial Sequence
  Description of Artificial Sequence: Synthetic oligonucleotide
  Sense strand starting at position 297 of SEQ ID NO: 1887993
agcucuucucuuggaauac

SEQ ID NO: 2502713 - RNA, 19 nt, Artificial Sequence
  Description of Artificial Sequence: Synthetic oligonucleotide
  Antisense strand to SEQ ID NO: 2502712
guauuccaagagaagagcu

SEQ ID NO: 2502714 - RNA, 19 nt, Artificial Sequence
  Description of Artificial Sequence: Synthetic oligonucleotide
  Sense strand starting at position 458 of SEQ ID NO: 1887993
uggaauauuguugacucuu

SEQ ID NO: 2502715 - RNA, 19 nt, Artificial Sequence
  Description of Artificial Sequence: Synthetic oligonucleotide
  Antisense strand to SEQ ID NO: 2502714
aagagucaacaauauucca

SEQ ID NO: 2502716 - RNA, 19 nt, Artificial Sequence
  Description of Artificial Sequence: Synthetic oligonucleotide
  Sense strand starting at position 515 of SEQ ID NO: 1887993
acugaaauguuucuguauu

SEQ ID NO: 2502717 - RNA, 19 nt, Artificial Sequence
  Description of Artificial Sequence: Synthetic oligonucleotide
  Antisense strand to SEQ ID NO: 2502716
aauacagaaacauuucagu

SEQ ID NO: 2502718 - RNA, 19 nt, Artificial Sequence
  Description of Artificial Sequence: Synthetic oligonucleotide
  Sense strand starting at position 1021 of SEQ ID NO: 1887993
cgaggcugugcauaucaga

SEQ ID NO: 2502719 - RNA, 19 nt, Artificial Sequence
  Description of Artificial Sequence: Synthetic oligonucleotide
  Antisense strand to SEQ ID NO: 2502718
ucugauaugcacagccucg

SEQ ID NO: 2502720 - RNA, 19 nt, Artificial Sequence
  Description of Artificial Sequence: Synthetic oligonucleotide
  Sense strand starting at position 1155 of SEQ ID NO: 1887993
gugguuauaaggugaaaug

SEQ ID NO: 2502721 - RNA, 19 nt, Artificial Sequence
  Description of Artificial Sequence: Synthetic oligonucleotide
  Antisense strand to SEQ ID NO: 2502720
cauuucaccuuauaaccac

SEQ ID NO: 2502722 - RNA, 19 nt, Artificial Sequence
  Description of Artificial Sequence: Synthetic oligonucleotide
  Sense strand starting at position 1164 of SEQ ID NO: 1887993
aggugaaaugacugaggca

SEQ ID NO: 2502723 - RNA, 19 nt, Artificial Sequence
  Description of Artificial Sequence: Synthetic oligonucleotide
  Antisense strand to SEQ ID NO: 2502722
ugccucagucauuucaccu

SEQ ID NO: 2502724 - RNA, 19 nt, Artificial Sequence
  Description of Artificial Sequence: Synthetic oligonucleotide
  Sense strand starting at position 1461 of SEQ ID NO: 1887993
gucacaggaucacugauaa

SEQ ID NO: 2502725 - RNA, 19 nt, Artificial Sequence
  Description of Artificial Sequence: Synthetic oligonucleotide
  Antisense strand to SEQ ID NO: 2502724
uuaucagugauccugugac

SEQ ID NO: 2502726 - RNA, 19 nt, Artificial Sequence
  Description of Artificial Sequence: Synthetic oligonucleotide
  Sense strand starting at position 1806 of SEQ ID NO: 1887993
ccgugagcucuucucgcau

SEQ ID NO: 2502727 - RNA, 19 nt, Artificial Sequence
  Description of Artificial Sequence: Synthetic oligonucleotide
  Antisense strand to SEQ ID NO: 2502726
augcgagaagagcucacgg

SEQ ID NO: 2502728 - RNA, 19 nt, Artificial Sequence
  Description of Artificial Sequence: Synthetic oligonucleotide
  Sense strand starting at position 2555 of SEQ ID NO: 1887993
uuaggugugagucgcauuu

SEQ ID NO: 2502729 - RNA, 19 nt, Artificial Sequence
  Description of Artificial Sequence: Synthetic oligonucleotide
  Antisense strand to SEQ ID NO: 2502728
aaaugcgacucacaccuaa

SEQ ID NO: 2502730 - RNA, 19 nt, Artificial Sequence
  Description of Artificial Sequence: Synthetic oligonucleotide
  Sense strand starting at position 2561 of SEQ ID NO: 1887993
gugagucgcauuugagacu

SEQ ID NO: 2502731 - RNA, 19 nt, Artificial Sequence
  Description of Artificial Sequence: Synthetic oligonucleotide
  Antisense strand to SEQ ID NO: 2502730
agucucaaaugcgacucac

SEQ ID NO: 2502732 - RNA, 19 nt, Artificial Sequence
  Description of Artificial Sequence: Synthetic oligonucleotide
  Sense strand starting at position 2579 of SEQ ID NO: 1887993
ugccuuugaguguggagaa

SEQ ID NO: 2502733 - RNA, 19 nt, Artificial Sequence
  Description of Artificial Sequence: Synthetic oligonucleotide
  Antisense strand to SEQ ID NO: 2502732
uucuccacacucaaaggca

SEQ ID NO: 2502734 - RNA, 19 nt, Artificial Sequence
  Description of Artificial Sequence: Synthetic oligonucleotide
  Sense strand starting at position 2598 of SEQ ID NO: 1887993
uugcaagugauuuguaggu

SEQ ID NO: 2502735 - RNA, 19 nt, Artificial Sequence
  Description of Artificial Sequence: Synthetic oligonucleotide
  Antisense strand to SEQ ID NO: 2502734
accuacaaaucacuugcaa

SEQ ID NO: 2502736 - RNA, 19 nt, Artificial Sequence
  Description of Artificial Sequence: Synthetic oligonucleotide
  Sense strand starting at position 2604 of SEQ ID NO: 1887993
gugauuuguaggugugguu

SEQ ID NO: 2502737 - RNA, 19 nt, Artificial Sequence
  Description of Artificial Sequence: Synthetic oligonucleotide
  Antisense strand to SEQ ID NO: 2502736
aaccacaccuacaaaucac

SEQ ID NO: 2502738 - RNA, 19 nt, Artificial Sequence
  Description of Artificial Sequence: Synthetic oligonucleotide
  Sense strand starting at position 2630 of SEQ ID NO: 1887993
ccuggagucguguuagcug

SEQ ID NO: 2502739 - RNA, 19 nt, Artificial Sequence
  Description of Artificial Sequence: Synthetic oligonucleotide
  Antisense strand to SEQ ID NO: 2502738
cagcuaacacgacuccagg

SEQ ID NO: 2502740 - RNA, 19 nt, Artificial Sequence
  Description of Artificial Sequence: Synthetic oligonucleotide
  Sense strand starting at position 2654 of SEQ ID NO: 1887993
ugagguugugaaugacaag

SEQ ID NO: 2502741 - RNA, 19 nt, Artificial Sequence
  Description of Artificial Sequence: Synthetic oligonucleotide
  Antisense strand to SEQ ID NO: 2502740
cuugucauucacaaccuca

SEQ ID NO: 2502742 - RNA, 19 nt, Artificial Sequence
  Description of Artificial Sequence: Synthetic oligonucleotide
  Sense strand starting at position 2655 of SEQ ID NO: 1887993
gagguugugaaugacaagu

SEQ ID NO: 2502743 - RNA, 19 nt, Artificial Sequence
  Description of Artificial Sequence: Synthetic oligonucleotide
  Antisense strand to SEQ ID NO: 2502742
acuugucauucacaaccuc

SEQ ID NO: 2502744 - RNA, 19 nt, Artificial Sequence
  Description of Artificial Sequence: Synthetic oligonucleotide
  Sense strand starting at position 2690 of SEQ ID NO: 1887993
ugguucucugaaggauguu

SEQ ID NO: 2502745 - RNA, 19 nt, Artificial Sequence
  Description of Artificial Sequence: Synthetic oligonucleotide
  Antisense strand to SEQ ID NO: 2502744
aacauccuucagagaacca

SEQ ID NO: 2502746 - RNA, 19 nt, Artificial Sequence
  Description of Artificial Sequence: Synthetic oligonucleotide
  Sense strand starting at position 2691 of SEQ ID NO: 1887993
gguucucugaaggauguuu

SEQ ID NO: 2502747 - RNA, 19 nt, Artificial Sequence
  Description of Artificial Sequence: Synthetic oligonucleotide
  Antisense strand to SEQ ID NO: 2502746
aaacauccuucagagaacc

SEQ ID NO: 2502748 - RNA, 19 nt, Artificial Sequence
  Description of Artificial Sequence: Synthetic oligonucleotide
  Sense strand starting at position 2693 of SEQ ID NO: 1887993
uucucugaaggauguuuga

SEQ ID NO: 2502749 - RNA, 19 nt, Artificial Sequence
  Description of Artificial Sequence: Synthetic oligonucleotide
  Antisense strand to SEQ ID NO: 2502748
ucaaacauccuucagagaa

SEQ ID NO: 2502750 - RNA, 19 nt, Artificial Sequence
  Description of Artificial Sequence: Synthetic oligonucleotide
  Sense strand starting at position 2765 of SEQ ID NO: 1887993
uggccuuagugaccuaaau

SEQ ID NO: 2502751 - RNA, 19 nt, Artificial Sequence
  Description of Artificial Sequence: Synthetic oligonucleotide
  Antisense strand to SEQ ID NO: 2502750
auuuaggucacuaaggcca

SEQ ID NO: 2502752 - RNA, 19 nt, Artificial Sequence
  Description of Artificial Sequence: Synthetic oligonucleotide
  Sense strand starting at position 2804 of SEQ ID NO: 1887993
cuguuaugaccauggcuag

SEQ ID NO: 2502753 - RNA, 19 nt, Artificial Sequence
  Description of Artificial Sequence: Synthetic oligonucleotide
  Antisense strand to SEQ ID NO: 2502752
cuagccauggucauaacag

SEQ ID NO: 2502754 - RNA, 19 nt, Artificial Sequence
  Description of Artificial Sequence: Synthetic oligonucleotide
  Sense strand starting at position 2816 of SEQ ID NO: 1887993
uggcuaguugguuauguaa

SEQ ID NO: 2502755 - RNA, 19 nt, Artificial Sequence
  Description of Artificial Sequence: Synthetic oligonucleotide
  Antisense strand to SEQ ID NO: 2502754
uuacauaaccaacuagcca

SEQ ID NO: 2502756 - RNA, 19 nt, Artificial Sequence
  Description of Artificial Sequence: Synthetic oligonucleotide
  Sense strand starting at position 2845 of SEQ ID NO: 1887993
ucugaauaguagccauuaa

SEQ ID NO: 2502757 - RNA, 19 nt, Artificial Sequence
  Description of Artificial Sequence: Synthetic oligonucleotide
  Antisense strand to SEQ ID NO: 2502756
uuaauggcuacuauucaga

SEQ ID NO: 2502758 - RNA, 19 nt, Artificial Sequence
  Description of Artificial Sequence: Synthetic oligonucleotide
  Sense strand starting at position 2996 of SEQ ID NO: 1887993
uguugaaaugaauagcauu

SEQ ID NO: 2502759 - RNA, 19 nt, Artificial Sequence
  Description of Artificial Sequence: Synthetic oligonucleotide
  Antisense strand to SEQ ID NO: 2502758
aaugcuauucauuucaaca

SEQ ID NO: 2502760 - RNA, 19 nt, Artificial Sequence
  Description of Artificial Sequence: Synthetic oligonucleotide
  Sense strand starting at position 3400 of SEQ ID NO: 1887993
ucaacacuuguauaugagu

SEQ ID NO: 2502761 - RNA, 19 nt, Artificial Sequence
  Description of Artificial Sequence: Synthetic oligonucleotide
  Antisense strand to SEQ ID NO: 2502760
acucauauacaaguguuga

SEQ ID NO: 2502762 - RNA, 19 nt, Artificial Sequence
  Description of Artificial Sequence: Synthetic oligonucleotide
  Sense strand starting at position 3405 of SEQ ID NO: 1887993
acuuguauaugagugaggu

SEQ ID NO: 2502763 - RNA, 19 nt, Artificial Sequence
  Description of Artificial Sequence: Synthetic oligonucleotide
  Antisense strand to SEQ ID NO: 2502762
accucacucauauacaagu

SEQ ID NO: 2502764 - RNA, 19 nt, Artificial Sequence
  Description of Artificial Sequence: Synthetic oligonucleotide
  Sense strand starting at position 3406 of SEQ ID NO: 1887993
cuuguauaugagugagguu

SEQ ID NO: 2502765 - RNA, 19 nt, Artificial Sequence
  Description of Artificial Sequence: Synthetic oligonucleotide
  Antisense strand to SEQ ID NO: 2502764
aaccucacucauauacaag

SEQ ID NO: 2502766 - RNA, 19 nt, Artificial Sequence
  Description of Artificial Sequence: Synthetic oligonucleotide
  Sense strand starting at position 3407 of SEQ ID NO: 1887993
uuguauaugagugagguuu

SEQ ID NO: 2502767 - RNA, 19 nt, Artificial Sequence
  Description of Artificial Sequence: Synthetic oligonucleotide
  Antisense strand to SEQ ID NO: 2502766
aaaccucacucauauacaa

SEQ ID NO: 2502768 - RNA, 19 nt, Artificial Sequence
  Description of Artificial Sequence: Synthetic oligonucleotide
  Sense strand starting at position 3432 of SEQ ID NO: 1887993
cccuuaggcuugcuaagau

SEQ ID NO: 2502769 - RNA, 19 nt, Artificial Sequence
  Description of Artificial Sequence: Synthetic oligonucleotide
  Antisense strand to SEQ ID NO: 2502768
aucuuagcaagccuaaggg

SEQ ID NO: 2502770 - RNA, 19 nt, Artificial Sequence
  Description of Artificial Sequence: Synthetic oligonucleotide
  Sense strand starting at position 3483 of SEQ ID NO: 1887993
ccagucucacuguaguaau

SEQ ID NO: 2502771 - RNA, 19 nt, Artificial Sequence
  Description of Artificial Sequence: Synthetic oligonucleotide
  Antisense strand to SEQ ID NO: 2502770
auuacuacagugagacugg

SEQ ID NO: 2502772 - RNA, 19 nt, Artificial Sequence
  Description of Artificial Sequence: Synthetic oligonucleotide
  Sense strand starting at position 3733 of SEQ ID NO: 1887993
ggagguugcggucagucaa

SEQ ID NO: 2502773 - RNA, 19 nt, Artificial Sequence
  Description of Artificial Sequence: Synthetic oligonucleotide
  Antisense strand to SEQ ID NO: 2502772
uugacugaccgcaaccucc

SEQ ID NO: 2502774 - RNA, 19 nt, Artificial Sequence
  Description of Artificial Sequence: Synthetic oligonucleotide
  Sense strand starting at position 3890 of SEQ ID NO: 1887993
uugggaagguauucucauc

SEQ ID NO: 2502775 - RNA, 19 nt, Artificial Sequence
  Description of Artificial Sequence: Synthetic oligonucleotide
  Antisense strand to SEQ ID NO: 2502774
gaugagaauaccuucccaa

SEQ ID NO: 2502776 - RNA, 19 nt, Artificial Sequence
  Description of Artificial Sequence: Synthetic oligonucleotide
  Sense strand starting at position 3908 of SEQ ID NO: 1887993
ccacuacuaucaguguaaa

SEQ ID NO: 2502777 - RNA, 19 nt, Artificial Sequence
  Description of Artificial Sequence: Synthetic oligonucleotide
  Antisense strand to SEQ ID NO: 2502776
uuuacacugauaguagugg

SEQ ID NO: 2502778 - RNA, 19 nt, Artificial Sequence
  Description of Artificial Sequence: Synthetic oligonucleotide
  Sense strand starting at position 3911 of SEQ ID NO: 1887993
cuacuaucaguguaaauug

SEQ ID NO: 2502779 - RNA, 19 nt, Artificial Sequence
  Description of Artificial Sequence: Synthetic oligonucleotide
  Antisense strand to SEQ ID NO: 2502778
caauuuacacugauaguag

SEQ ID NO: 2502780 - RNA, 19 nt, Artificial Sequence
  Description of Artificial Sequence: Synthetic oligonucleotide
  Sense strand starting at position 3942 of SEQ ID NO: 1887993
agaagaaccguuuggaaau

SEQ ID NO: 2502781 - RNA, 19 nt, Artificial Sequence
  Description of Artificial Sequence: Synthetic oligonucleotide
  Antisense strand to SEQ ID NO: 2502780
auuuccaaacgguucuucu

SEQ ID NO: 2502782 - RNA, 19 nt, Artificial Sequence
  Description of Artificial Sequence: Synthetic oligonucleotide
  Sense strand starting at position 3963 of SEQ ID NO: 1887993
acaguaaaccugugguuag

SEQ ID NO: 2502783 - RNA, 19 nt, Artificial Sequence
  Description of Artificial Sequence: Synthetic oligonucleotide
  Antisense strand to SEQ ID NO: 2502782
cuaaccacagguuuacugu

SEQ ID NO: 2502784 - RNA, 19 nt, Artificial Sequence
  Description of Artificial Sequence: Synthetic oligonucleotide
  Sense strand starting at position 21 of SEQ ID NO: 1887994
cccuguugagcccaucuua

SEQ ID NO: 2502785 - RNA, 19 nt, Artificial Sequence
  Description of Artificial Sequence: Synthetic oligonucleotide
  Antisense strand to SEQ ID NO: 2502784
uaagaugggcucaacaggg

SEQ ID NO: 2502786 - RNA, 19 nt, Artificial Sequence
  Description of Artificial Sequence: Synthetic oligonucleotide
  Sense strand starting at position 135 of SEQ ID NO: 1887994
cuuaucagcuucuuggaaa

SEQ ID NO: 2502787 - RNA, 19 nt, Artificial Sequence
  Description of Artificial Sequence: Synthetic oligonucleotide
  Antisense strand to SEQ ID NO: 2502786
uuuccaagaagcugauaag

SEQ ID NO: 2502788 - RNA, 19 nt, Artificial Sequence
  Description of Artificial Sequence: Synthetic oligonucleotide
  Sense strand starting at position 298 of SEQ ID NO: 1887994
ugugguauauuugcacaau

SEQ ID NO: 2502789 - RNA, 19 nt, Artificial Sequence
  Description of Artificial Sequence: Synthetic oligonucleotide
  Antisense strand to SEQ ID NO: 2502788
auugugcaaauauaccaca

SEQ ID NO: 2502790 - RNA, 19 nt, Artificial Sequence
  Description of Artificial Sequence: Synthetic oligonucleotide
  Sense strand starting at position 485 of SEQ ID NO: 1887994
gguggugcugguguuguaa

SEQ ID NO: 2502791 - RNA, 19 nt, Artificial Sequence
  Description of Artificial Sequence: Synthetic oligonucleotide
  Antisense strand to SEQ ID NO: 2502790
uuacaacaccagcaccacc

SEQ ID NO: 2502792 - RNA, 19 nt, Artificial Sequence
  Description of Artificial Sequence: Synthetic oligonucleotide
  Sense strand starting at position 486 of SEQ ID NO: 1887994
guggugcugguguuguaaa

SEQ ID NO: 2502793 - RNA, 19 nt, Artificial Sequence
  Description of Artificial Sequence: Synthetic oligonucleotide
  Antisense strand to SEQ ID NO: 2502792
uuuacaacaccagcaccac

SEQ ID NO: 2502794 - RNA, 19 nt, Artificial Sequence
  Description of Artificial Sequence: Synthetic oligonucleotide
  Sense strand starting at position 564 of SEQ ID NO: 1887994
gggcauuccuaaccugaaa

SEQ ID NO: 2502795 - RNA, 19 nt, Artificial Sequence
  Description of Artificial Sequence: Synthetic oligonucleotide
  Antisense strand to SEQ ID NO: 2502794
uuucagguuaggaaugccc

SEQ ID NO: 2502796 - RNA, 19 nt, Artificial Sequence
  Description of Artificial Sequence: Synthetic oligonucleotide
  Sense strand starting at position 585 of SEQ ID NO: 1887994
cuaguaaagccaugaugga

SEQ ID NO: 2502797 - RNA, 19 nt, Artificial Sequence
  Description of Artificial Sequence: Synthetic oligonucleotide
  Antisense strand to SEQ ID NO: 2502796
uccaucauggcuuuacuag

SEQ ID NO: 2502798 - RNA, 19 nt, Artificial Sequence
  Description of Artificial Sequence: Synthetic oligonucleotide
  Sense strand starting at position 743 of SEQ ID NO: 1887994
gucuuacgucaauaacucu

SEQ ID NO: 2502799 - RNA, 19 nt, Artificial Sequence
  Description of Artificial Sequence: Synthetic oligonucleotide
  Antisense strand to SEQ ID NO: 2502798
agaguuauugacguaagac

SEQ ID NO: 2502800 - RNA, 19 nt, Artificial Sequence
  Description of Artificial Sequence: Synthetic oligonucleotide
  Sense strand starting at position 933 of SEQ ID NO: 1887994
gggcacagguucucaagau

SEQ ID NO: 2502801 - RNA, 19 nt, Artificial Sequence
  Description of Artificial Sequence: Synthetic oligonucleotide
  Antisense strand to SEQ ID NO: 2502800
aucuugagaaccugugccc

SEQ ID NO: 2502802 - RNA, 19 nt, Artificial Sequence
  Description of Artificial Sequence: Synthetic oligonucleotide
  Sense strand starting at position 1408 of SEQ ID NO: 1887994
cgguucuuuccagagguga

SEQ ID NO: 2502803 - RNA, 19 nt, Artificial Sequence
  Description of Artificial Sequence: Synthetic oligonucleotide
  Antisense strand to SEQ ID NO: 2502802
ucaccucuggaaagaaccg

SEQ ID NO: 2502804 - RNA, 19 nt, Artificial Sequence
  Description of Artificial Sequence: Synthetic oligonucleotide
  Sense strand starting at position 2220 of SEQ ID NO: 1887994
cugugaugucugugaugga

SEQ ID NO: 2502805 - RNA, 19 nt, Artificial Sequence
  Description of Artificial Sequence: Synthetic oligonucleotide
  Antisense strand to SEQ ID NO: 2502804
uccaucacagacaucacag

SEQ ID NO: 2502806 - RNA, 19 nt, Artificial Sequence
  Description of Artificial Sequence: Synthetic oligonucleotide
  Sense strand starting at position 2233 of SEQ ID NO: 1887994
gauggaaucucuucgugag

SEQ ID NO: 2502807 - RNA, 19 nt, Artificial Sequence
  Description of Artificial Sequence: Synthetic oligonucleotide
  Antisense strand to SEQ ID NO: 2502806
cucacgaagagauuccauc

SEQ ID NO: 2502808 - RNA, 19 nt, Artificial Sequence
  Description of Artificial Sequence: Synthetic oligonucleotide
  Sense strand starting at position 2237 of SEQ ID NO: 1887994
gaaucucuucgugaggucu

SEQ ID NO: 2502809 - RNA, 19 nt, Artificial Sequence
  Description of Artificial Sequence: Synthetic oligonucleotide
  Antisense strand to SEQ ID NO: 2502808
agaccucacgaagagauuc

SEQ ID NO: 2502810 - RNA, 19 nt, Artificial Sequence
  Description of Artificial Sequence: Synthetic oligonucleotide
  Sense strand starting at position 2364 of SEQ ID NO: 1887994
ugaaguuuccugggaagac

SEQ ID NO: 2502811 - RNA, 19 nt, Artificial Sequence
  Description of Artificial Sequence: Synthetic oligonucleotide
  Antisense strand to SEQ ID NO: 2502810
gucuucccaggaaacuuca

SEQ ID NO: 2502812 - RNA, 19 nt, Artificial Sequence
  Description of Artificial Sequence: Synthetic oligonucleotide
  Sense strand starting at position 2392 of SEQ ID NO: 1887994
agggcauagguguaguauu

SEQ ID NO: 2502813 - RNA, 19 nt, Artificial Sequence
  Description of Artificial Sequence: Synthetic oligonucleotide
  Antisense strand to SEQ ID NO: 2502812
aauacuacaccuaugcccu

SEQ ID NO: 2502814 - RNA, 19 nt, Artificial Sequence
  Description of Artificial Sequence: Synthetic oligonucleotide
  Sense strand starting at position 2443 of SEQ ID NO: 1887994
ggaggccauuuauacauua

SEQ ID NO: 2502815 - RNA, 19 nt, Artificial Sequence
  Description of Artificial Sequence: Synthetic oligonucleotide
  Antisense strand to SEQ ID NO: 2502814
uaauguauaaauggccucc

SEQ ID NO: 2502816 - RNA, 19 nt, Artificial Sequence
  Description of Artificial Sequence: Synthetic oligonucleotide
  Sense strand starting at position 2471 of SEQ ID NO: 1887994
aguauuuccugagcugugu

SEQ ID NO: 2502817 - RNA, 19 nt, Artificial Sequence
  Description of Artificial Sequence: Synthetic oligonucleotide
  Antisense strand to SEQ ID NO: 2502816
acacagcucaggaaauacu

SEQ ID NO: 2502818 - RNA, 19 nt, Artificial Sequence
  Description of Artificial Sequence: Synthetic oligonucleotide
  Sense strand starting at position 2482 of SEQ ID NO: 1887994
agcuguguucccuagaaac

SEQ ID NO: 2502819 - RNA, 19 nt, Artificial Sequence
  Description of Artificial Sequence: Synthetic oligonucleotide
  Antisense strand to SEQ ID NO: 2502818
guuucuagggaacacagcu

SEQ ID NO: 2502820 - RNA, 19 nt, Artificial Sequence
  Description of Artificial Sequence: Synthetic oligonucleotide
  Sense strand starting at position 2484 of SEQ ID NO: 1887994
cuguguucccuagaaacug

SEQ ID NO: 2502821 - RNA, 19 nt, Artificial Sequence
  Description of Artificial Sequence: Synthetic oligonucleotide
  Antisense strand to SEQ ID NO: 2502820
caguuucuagggaacacag

SEQ ID NO: 2502822 - RNA, 19 nt, Artificial Sequence
  Description of Artificial Sequence: Synthetic oligonucleotide
  Sense strand starting at position 2536 of SEQ ID NO: 1887994
gggaggagucgacaguauu

SEQ ID NO: 2502823 - RNA, 19 nt, Artificial Sequence
  Description of Artificial Sequence: Synthetic oligonucleotide
  Antisense strand to SEQ ID NO: 2502822
aauacugucgacuccuccc

SEQ ID NO: 2502824 - RNA, 19 nt, Artificial Sequence
  Description of Artificial Sequence: Synthetic oligonucleotide
  Sense strand starting at position 2539 of SEQ ID NO: 1887994
aggagucgacaguauucua

SEQ ID NO: 2502825 - RNA, 19 nt, Artificial Sequence
  Description of Artificial Sequence: Synthetic oligonucleotide
  Antisense strand to SEQ ID NO: 2502824
uagaauacugucgacuccu

SEQ ID NO: 2502826 - RNA, 19 nt, Artificial Sequence
  Description of Artificial Sequence: Synthetic oligonucleotide
  Sense strand starting at position 2612 of SEQ ID NO: 1887994
ugaacacuguguucuuauu

SEQ ID NO: 2502827 - RNA, 19 nt, Artificial Sequence
  Description of Artificial Sequence: Synthetic oligonucleotide
  Antisense strand to SEQ ID NO: 2502826
aauaagaacacaguguuca

SEQ ID NO: 2502828 - RNA, 19 nt, Artificial Sequence
  Description of Artificial Sequence: Synthetic oligonucleotide
  Sense strand starting at position 2672 of SEQ ID NO: 1887994
uauguaguucugcaaguga

SEQ ID NO: 2502829 - RNA, 19 nt, Artificial Sequence
  Description of Artificial Sequence: Synthetic oligonucleotide
  Antisense strand to SEQ ID NO: 2502828
ucacuugcagaacuacaua

SEQ ID NO: 2502830 - RNA, 19 nt, Artificial Sequence
  Description of Artificial Sequence: Synthetic oligonucleotide
  Sense strand starting at position 2705 of SEQ ID NO: 1887994
ggaagacagcauugguacu

SEQ ID NO: 2502831 - RNA, 19 nt, Artificial Sequence
  Description of Artificial Sequence: Synthetic oligonucleotide
  Antisense strand to SEQ ID NO: 2502830
aguaccaaugcugucuucc

SEQ ID NO: 2502832 - RNA, 19 nt, Artificial Sequence
  Description of Artificial Sequence: Synthetic oligonucleotide
  Sense strand starting at position 2869 of SEQ ID NO: 1887994
ucacauaugcauuagguaa

SEQ ID NO: 2502833 - RNA, 19 nt, Artificial Sequence
  Description of Artificial Sequence: Synthetic oligonucleotide
  Antisense strand to SEQ ID NO: 2502832
uuaccuaaugcauauguga

SEQ ID NO: 2502834 - RNA, 19 nt, Artificial Sequence
  Description of Artificial Sequence: Synthetic oligonucleotide
  Sense strand starting at position 2982 of SEQ ID NO: 1887994
aauguaauuuguuaaggag

SEQ ID NO: 2502835 - RNA, 19 nt, Artificial Sequence
  Description of Artificial Sequence: Synthetic oligonucleotide
  Antisense strand to SEQ ID NO: 2502834
cuccuuaacaaauuacauu

SEQ ID NO: 2502836 - RNA, 19 nt, Artificial Sequence
  Description of Artificial Sequence: Synthetic oligonucleotide
  Sense strand starting at position 3000 of SEQ ID NO: 1887994
ggagacgagugauuaagua

SEQ ID NO: 2502837 - RNA, 19 nt, Artificial Sequence
  Description of Artificial Sequence: Synthetic oligonucleotide
  Antisense strand to SEQ ID NO: 2502836
uacuuaaucacucgucucc

SEQ ID NO: 2502838 - RNA, 19 nt, Artificial Sequence
  Description of Artificial Sequence: Synthetic oligonucleotide
  Sense strand starting at position 3004 of SEQ ID NO: 1887994
acgagugauuaaguagaau

SEQ ID NO: 2502839 - RNA, 19 nt, Artificial Sequence
  Description of Artificial Sequence: Synthetic oligonucleotide
  Antisense strand to SEQ ID NO: 2502838
auucuacuuaaucacucgu

SEQ ID NO: 2502840 - RNA, 19 nt, Artificial Sequence
  Description of Artificial Sequence: Synthetic oligonucleotide
  Sense strand starting at position 3053 of SEQ ID NO: 1887994
agacuugauuugcaaacaa

SEQ ID NO: 2502841 - RNA, 19 nt, Artificial Sequence
  Description of Artificial Sequence: Synthetic oligonucleotide
  Antisense strand to SEQ ID NO: 2502840
uuguuugcaaaucaagucu

SEQ ID NO: 2502842 - RNA, 19 nt, Artificial Sequence
  Description of Artificial Sequence: Synthetic oligonucleotide
  Sense strand starting at position 3088 of SEQ ID NO: 1887994
guagguauuaaucaguaag

SEQ ID NO: 2502843 - RNA, 19 nt, Artificial Sequence
  Description of Artificial Sequence: Synthetic oligonucleotide
  Antisense strand to SEQ ID NO: 2502842
cuuacugauuaauaccuac

SEQ ID NO: 2502844 - RNA, 19 nt, Artificial Sequence
  Description of Artificial Sequence: Synthetic oligonucleotide
  Sense strand starting at position 3090 of SEQ ID NO: 1887994
agguauuaaucaguaagug

SEQ ID NO: 2502845 - RNA, 19 nt, Artificial Sequence
  Description of Artificial Sequence: Synthetic oligonucleotide
  Antisense strand to SEQ ID NO: 2502844
cacuuacugauuaauaccu

SEQ ID NO: 2502846 - RNA, 19 nt, Artificial Sequence
  Description of Artificial Sequence: Synthetic oligonucleotide
  Sense strand starting at position 3091 of SEQ ID NO: 1887994
gguauuaaucaguaaguga

SEQ ID NO: 2502847 - RNA, 19 nt, Artificial Sequence
  Description of Artificial Sequence: Synthetic oligonucleotide
  Antisense strand to SEQ ID NO: 2502846
ucacuuacugauuaauacc

SEQ ID NO: 2502848 - RNA, 19 nt, Artificial Sequence
  Description of Artificial Sequence: Synthetic oligonucleotide
  Sense strand starting at position 3094 of SEQ ID NO: 1887994
auuaaucaguaagugacaa

SEQ ID NO: 2502849 - RNA, 19 nt, Artificial Sequence
  Description of Artificial Sequence: Synthetic oligonucleotide
  Antisense strand to SEQ ID NO: 2502848
uugucacuuacugauuaau

SEQ ID NO: 2502850 - RNA, 19 nt, Artificial Sequence
  Description of Artificial Sequence: Synthetic oligonucleotide
  Sense strand starting at position 3162 of SEQ ID NO: 1887994
cagagaggcuaugucaaca

SEQ ID NO: 2502851 - RNA, 19 nt, Artificial Sequence
  Description of Artificial Sequence: Synthetic oligonucleotide
  Antisense strand to SEQ ID NO: 2502850
uguugacauagccucucug

SEQ ID NO: 2502852 - RNA, 19 nt, Artificial Sequence
  Description of Artificial Sequence: Synthetic oligonucleotide
  Sense strand starting at position 3241 of SEQ ID NO: 1887994
cuuugagauuuggcagugu

SEQ ID NO: 2502853 - RNA, 19 nt, Artificial Sequence
  Description of Artificial Sequence: Synthetic oligonucleotide
  Antisense strand to SEQ ID NO: 2502852
acacugccaaaucucaaag

SEQ ID NO: 2502854 - RNA, 19 nt, Artificial Sequence
  Description of Artificial Sequence: Synthetic oligonucleotide
  Sense strand starting at position 3258 of SEQ ID NO: 1887994
gugacauugguguagauug

SEQ ID NO: 2502855 - RNA, 19 nt, Artificial Sequence
  Description of Artificial Sequence: Synthetic oligonucleotide
  Antisense strand to SEQ ID NO: 2502854
caaucuacaccaaugucac

SEQ ID NO: 2502856 - RNA, 19 nt, Artificial Sequence
  Description of Artificial Sequence: Synthetic oligonucleotide
  Sense strand starting at position 3263 of SEQ ID NO: 1887994
auugguguagauugugaga

SEQ ID NO: 2502857 - RNA, 19 nt, Artificial Sequence
  Description of Artificial Sequence: Synthetic oligonucleotide
  Antisense strand to SEQ ID NO: 2502856
ucucacaaucuacaccaau

SEQ ID NO: 2502858 - RNA, 19 nt, Artificial Sequence
  Description of Artificial Sequence: Synthetic oligonucleotide
  Sense strand starting at position 3298 of SEQ ID NO: 1887994
ggugucugagucuaaagca

SEQ ID NO: 2502859 - RNA, 19 nt, Artificial Sequence
  Description of Artificial Sequence: Synthetic oligonucleotide
  Antisense strand to SEQ ID NO: 2502858
ugcuuuagacucagacacc

SEQ ID NO: 2502860 - RNA, 19 nt, Artificial Sequence
  Description of Artificial Sequence: Synthetic oligonucleotide
  Sense strand starting at position 3885 of SEQ ID NO: 1887994
caguguuuagggugaauua

SEQ ID NO: 2502861 - RNA, 19 nt, Artificial Sequence
  Description of Artificial Sequence: Synthetic oligonucleotide
  Antisense strand to SEQ ID NO: 2502860
uaauucacccuaaacacug

SEQ ID NO: 2502862 - RNA, 19 nt, Artificial Sequence
  Description of Artificial Sequence: Synthetic oligonucleotide
  Sense strand starting at position 3886 of SEQ ID NO: 1887994
aguguuuagggugaauuau

SEQ ID NO: 2502863 - RNA, 19 nt, Artificial Sequence
  Description of Artificial Sequence: Synthetic oligonucleotide
  Antisense strand to SEQ ID NO: 2502862
auaauucacccuaaacacu

SEQ ID NO: 2502864 - RNA, 19 nt, Artificial Sequence
  Description of Artificial Sequence: Synthetic oligonucleotide
  Sense strand starting at position 44 of SEQ ID NO: 1887995
ugcagaagugauggaaauc

SEQ ID NO: 2502865 - RNA, 19 nt, Artificial Sequence
  Description of Artificial Sequence: Synthetic oligonucleotide
  Antisense strand to SEQ ID NO: 2502864
gauuuccaucacuucugca

SEQ ID NO: 2502866 - RNA, 19 nt, Artificial Sequence
  Description of Artificial Sequence: Synthetic oligonucleotide
  Sense strand starting at position 60 of SEQ ID NO: 1887995
aucuaucuugauggugaaa

SEQ ID NO: 2502867 - RNA, 19 nt, Artificial Sequence
  Description of Artificial Sequence: Synthetic oligonucleotide
  Antisense strand to SEQ ID NO: 2502866
uuucaccaucaagauagau

SEQ ID NO: 2502868 - RNA, 19 nt, Artificial Sequence
  Description of Artificial Sequence: Synthetic oligonucleotide
  Sense strand starting at position 121 of SEQ ID NO: 1887995
gggauaagaacuggugguu

SEQ ID NO: 2502869 - RNA, 19 nt, Artificial Sequence
  Description of Artificial Sequence: Synthetic oligonucleotide
  Antisense strand to SEQ ID NO: 2502868
aaccaccaguucuuauccc

SEQ ID NO: 2502870 - RNA, 19 nt, Artificial Sequence
  Description of Artificial Sequence: Synthetic oligonucleotide
  Sense strand starting at position 124 of SEQ ID NO: 1887995
auaagaacuggugguuaaa

SEQ ID NO: 2502871 - RNA, 19 nt, Artificial Sequence
  Description of Artificial Sequence: Synthetic oligonucleotide
  Antisense strand to SEQ ID NO: 2502870
uuuaaccaccaguucuuau

SEQ ID NO: 2502872 - RNA, 19 nt, Artificial Sequence
  Description of Artificial Sequence: Synthetic oligonucleotide
  Sense strand starting at position 221 of SEQ ID NO: 1887995
uuauaugacgguugaaauu

SEQ ID NO: 2502873 - RNA, 19 nt, Artificial Sequence
  Description of Artificial Sequence: Synthetic oligonucleotide
  Antisense strand to SEQ ID NO: 2502872
aauuucaaccgucauauaa

SEQ ID NO: 2502874 - RNA, 19 nt, Artificial Sequence
  Description of Artificial Sequence: Synthetic oligonucleotide
  Sense strand starting at position 287 of SEQ ID NO: 1887995
ucaugaacagcuugaguca

SEQ ID NO: 2502875 - RNA, 19 nt, Artificial Sequence
  Description of Artificial Sequence: Synthetic oligonucleotide
  Antisense strand to SEQ ID NO: 2502874
ugacucaagcuguucauga

SEQ ID NO: 2502876 - RNA, 19 nt, Artificial Sequence
  Description of Artificial Sequence: Synthetic oligonucleotide
  Sense strand starting at position 400 of SEQ ID NO: 1887995
aaaugucuuggugacuaca

SEQ ID NO: 2502877 - RNA, 19 nt, Artificial Sequence
  Description of Artificial Sequence: Synthetic oligonucleotide
  Antisense strand to SEQ ID NO: 2502876
uguagucaccaagacauuu

SEQ ID NO: 2502878 - RNA, 19 nt, Artificial Sequence
  Description of Artificial Sequence: Synthetic oligonucleotide
  Sense strand starting at position 413 of SEQ ID NO: 1887995
acuacauuuagcgggcuaa

SEQ ID NO: 2502879 - RNA, 19 nt, Artificial Sequence
  Description of Artificial Sequence: Synthetic oligonucleotide
  Antisense strand to SEQ ID NO: 2502878
uuagcccgcuaaauguagu

SEQ ID NO: 2502880 - RNA, 19 nt, Artificial Sequence
  Description of Artificial Sequence: Synthetic oligonucleotide
  Sense strand starting at position 441 of SEQ ID NO: 1887995
cugguuguauuugcacaaa

SEQ ID NO: 2502881 - RNA, 19 nt, Artificial Sequence
  Description of Artificial Sequence: Synthetic oligonucleotide
  Antisense strand to SEQ ID NO: 2502880
uuugugcaaauacaaccag

SEQ ID NO: 2502882 - RNA, 19 nt, Artificial Sequence
  Description of Artificial Sequence: Synthetic oligonucleotide
  Sense strand starting at position 502 of SEQ ID NO: 1887995
gggaaauauagccagcuca

SEQ ID NO: 2502883 - RNA, 19 nt, Artificial Sequence
  Description of Artificial Sequence: Synthetic oligonucleotide
  Antisense strand to SEQ ID NO: 2502882
ugagcuggcuauauuuccc

SEQ ID NO: 2502884 - RNA, 19 nt, Artificial Sequence
  Description of Artificial Sequence: Synthetic oligonucleotide
  Sense strand starting at position 593 of SEQ ID NO: 1887995
acagaugaagccugugacu

SEQ ID NO: 2502885 - RNA, 19 nt, Artificial Sequence
  Description of Artificial Sequence: Synthetic oligonucleotide
  Antisense strand to SEQ ID NO: 2502884
agucacaggcuucaucugu

SEQ ID NO: 2502886 - RNA, 19 nt, Artificial Sequence
  Description of Artificial Sequence: Synthetic oligonucleotide
  Sense strand starting at position 595 of SEQ ID NO: 1887995
agaugaagccugugacuuu

SEQ ID NO: 2502887 - RNA, 19 nt, Artificial Sequence
  Description of Artificial Sequence: Synthetic oligonucleotide
  Antisense strand to SEQ ID NO: 2502886
aaagucacaggcuucaucu

SEQ ID NO: 2502888 - RNA, 19 nt, Artificial Sequence
  Description of Artificial Sequence: Synthetic oligonucleotide
  Sense strand starting at position 893 of SEQ ID NO: 1887995
ucuugucuucuccagggaa

SEQ ID NO: 2502889 - RNA, 19 nt, Artificial Sequence
  Description of Artificial Sequence: Synthetic oligonucleotide
  Antisense strand to SEQ ID NO: 2502888
uucccuggagaagacaaga

SEQ ID NO: 2502890 - RNA, 19 nt, Artificial Sequence
  Description of Artificial Sequence: Synthetic oligonucleotide
  Sense strand starting at position 895 of SEQ ID NO: 1887995
uugucuucuccagggaaug

SEQ ID NO: 2502891 - RNA, 19 nt, Artificial Sequence
  Description of Artificial Sequence: Synthetic oligonucleotide
  Antisense strand to SEQ ID NO: 2502890
cauucccuggagaagacaa

SEQ ID NO: 2502892 - RNA, 19 nt, Artificial Sequence
  Description of Artificial Sequence: Synthetic oligonucleotide
  Sense strand starting at position 1040 of SEQ ID NO: 1887995
gucccacguguugcugaau

SEQ ID NO: 2502893 - RNA, 19 nt, Artificial Sequence
  Description of Artificial Sequence: Synthetic oligonucleotide
  Antisense strand to SEQ ID NO: 2502892
auucagcaacacgugggac

SEQ ID NO: 2502894 - RNA, 19 nt, Artificial Sequence
  Description of Artificial Sequence: Synthetic oligonucleotide
  Sense strand starting at position 1112 of SEQ ID NO: 1887995
auuagaugugcccaggacu

SEQ ID NO: 2502895 - RNA, 19 nt, Artificial Sequence
  Description of Artificial Sequence: Synthetic oligonucleotide
  Antisense strand to SEQ ID NO: 2502894
aguccugggcacaucuaau

SEQ ID NO: 2502896 - RNA, 19 nt, Artificial Sequence
  Description of Artificial Sequence: Synthetic oligonucleotide
  Sense strand starting at position 1115 of SEQ ID NO: 1887995
agaugugcccaggacuuaa

SEQ ID NO: 2502897 - RNA, 19 nt, Artificial Sequence
  Description of Artificial Sequence: Synthetic oligonucleotide
  Antisense strand to SEQ ID NO: 2502896
uuaaguccugggcacaucu

SEQ ID NO: 2502898 - RNA, 19 nt, Artificial Sequence
  Description of Artificial Sequence: Synthetic oligonucleotide
  Sense strand starting at position 1138 of SEQ ID NO: 1887995
uaugauguugcaggacaaa

SEQ ID NO: 2502899 - RNA, 19 nt, Artificial Sequence
  Description of Artificial Sequence: Synthetic oligonucleotide
  Antisense strand to SEQ ID NO: 2502898
uuuguccugcaacaucaua

SEQ ID NO: 2502900 - RNA, 19 nt, Artificial Sequence
  Description of Artificial Sequence: Synthetic oligonucleotide
  Sense strand starting at position 1407 of SEQ ID NO: 1887995
uggccuacucugggauaga

SEQ ID NO: 2502901 - RNA, 19 nt, Artificial Sequence
  Description of Artificial Sequence: Synthetic oligonucleotide
  Antisense strand to SEQ ID NO: 2502900
ucuaucccagaguaggcca

SEQ ID NO: 2502902 - RNA, 19 nt, Artificial Sequence
  Description of Artificial Sequence: Synthetic oligonucleotide
  Sense strand starting at position 1488 of SEQ ID NO: 1887995
ucacgcgagcauucuugua

SEQ ID NO: 2502903 - RNA, 19 nt, Artificial Sequence
  Description of Artificial Sequence: Synthetic oligonucleotide
  Antisense strand to SEQ ID NO: 2502902
uacaagaaugcucgcguga

SEQ ID NO: 2502904 - RNA, 19 nt, Artificial Sequence
  Description of Artificial Sequence: Synthetic oligonucleotide
  Sense strand starting at position 2260 of SEQ ID NO: 1887995
ccgugagguuaugugauuu

SEQ ID NO: 2502905 - RNA, 19 nt, Artificial Sequence
  Description of Artificial Sequence: Synthetic oligonucleotide
  Antisense strand to SEQ ID NO: 2502904
aaaucacauaaccucacgg

SEQ ID NO: 2502906 - RNA, 19 nt, Artificial Sequence
  Description of Artificial Sequence: Synthetic oligonucleotide
  Sense strand starting at position 2276 of SEQ ID NO: 1887995
uuugauaugugacccuaua

SEQ ID NO: 2502907 - RNA, 19 nt, Artificial Sequence
  Description of Artificial Sequence: Synthetic oligonucleotide
  Antisense strand to SEQ ID NO: 2502906
uauagggucacauaucaaa

SEQ ID NO: 2502908 - RNA, 19 nt, Artificial Sequence
  Description of Artificial Sequence: Synthetic oligonucleotide
  Sense strand starting at position 2363 of SEQ ID NO: 1887995
uuguuuaaucuuuaugagc

SEQ ID NO: 2502909 - RNA, 19 nt, Artificial Sequence
  Description of Artificial Sequence: Synthetic oligonucleotide
  Antisense strand to SEQ ID NO: 2502908
gcucauaaagauuaaacaa

SEQ ID NO: 2502910 - RNA, 19 nt, Artificial Sequence
  Description of Artificial Sequence: Synthetic oligonucleotide
  Sense strand starting at position 2424 of SEQ ID NO: 1887995
uaguguugcgaggauuaag

SEQ ID NO: 2502911 - RNA, 19 nt, Artificial Sequence
  Description of Artificial Sequence: Synthetic oligonucleotide
  Antisense strand to SEQ ID NO: 2502910
cuuaauccucgcaacacua

SEQ ID NO: 2502912 - RNA, 19 nt, Artificial Sequence
  Description of Artificial Sequence: Synthetic oligonucleotide
  Sense strand starting at position 2434 of SEQ ID NO: 1887995
aggauuaagugcucauaaa

SEQ ID NO: 2502913 - RNA, 19 nt, Artificial Sequence
  Description of Artificial Sequence: Synthetic oligonucleotide
  Antisense strand to SEQ ID NO: 2502912
uuuaugagcacuuaauccu

SEQ ID NO: 2502914 - RNA, 19 nt, Artificial Sequence
  Description of Artificial Sequence: Synthetic oligonucleotide
  Sense strand starting at position 2435 of SEQ ID NO: 1887995
ggauuaagugcucauaaau

SEQ ID NO: 2502915 - RNA, 19 nt, Artificial Sequence
  Description of Artificial Sequence: Synthetic oligonucleotide
  Antisense strand to SEQ ID NO: 2502914
auuuaugagcacuuaaucc

SEQ ID NO: 2502916 - RNA, 19 nt, Artificial Sequence
  Description of Artificial Sequence: Synthetic oligonucleotide
  Sense strand starting at position 2600 of SEQ ID NO: 1887995
auuacuucuuguuuacaga

SEQ ID NO: 2502917 - RNA, 19 nt, Artificial Sequence
  Description of Artificial Sequence: Synthetic oligonucleotide
  Antisense strand to SEQ ID NO: 2502916
ucuguaaacaagaaguaau

SEQ ID NO: 2502918 - RNA, 19 nt, Artificial Sequence
  Description of Artificial Sequence: Synthetic oligonucleotide
  Sense strand starting at position 2810 of SEQ ID NO: 1887995
gcuugacauccuggauuga

SEQ ID NO: 2502919 - RNA, 19 nt, Artificial Sequence
  Description of Artificial Sequence: Synthetic oligonucleotide
  Antisense strand to SEQ ID NO: 2502918
ucaauccaggaugucaagc

SEQ ID NO: 2502920 - RNA, 19 nt, Artificial Sequence
  Description of Artificial Sequence: Synthetic oligonucleotide
  Sense strand starting at position 2910 of SEQ ID NO: 1887995
gugagaucucacuauguua

SEQ ID NO: 2502921 - RNA, 19 nt, Artificial Sequence
  Description of Artificial Sequence: Synthetic oligonucleotide
  Antisense strand to SEQ ID NO: 2502920
uaacauagugagaucucac

SEQ ID NO: 2502922 - RNA, 19 nt, Artificial Sequence
  Description of Artificial Sequence: Synthetic oligonucleotide
  Sense strand starting at position 3220 of SEQ ID NO: 1887995
caugauaggucuuuaguaa

SEQ ID NO: 2502923 - RNA, 19 nt, Artificial Sequence
  Description of Artificial Sequence: Synthetic oligonucleotide
  Antisense strand to SEQ ID NO: 2502922
uuacuaaagaccuaucaug

SEQ ID NO: 2502924 - RNA, 19 nt, Artificial Sequence
  Description of Artificial Sequence: Synthetic oligonucleotide
  Sense strand starting at position 3221 of SEQ ID NO: 1887995
augauaggucuuuaguaac

SEQ ID NO: 2502925 - RNA, 19 nt, Artificial Sequence
  Description of Artificial Sequence: Synthetic oligonucleotide
  Antisense strand to SEQ ID NO: 2502924
guuacuaaagaccuaucau

SEQ ID NO: 2502926 - RNA, 19 nt, Artificial Sequence
  Description of Artificial Sequence: Synthetic oligonucleotide
  Sense strand starting at position 3322 of SEQ ID NO: 1887995
uaaagaguuuaagcagaua

SEQ ID NO: 2502927 - RNA, 19 nt, Artificial Sequence
  Description of Artificial Sequence: Synthetic oligonucleotide
  Antisense strand to SEQ ID NO: 2502926
uaucugcuuaaacucuuua

SEQ ID NO: 2502928 - RNA, 19 nt, Artificial Sequence
  Description of Artificial Sequence: Synthetic oligonucleotide
  Sense strand starting at position 3325 of SEQ ID NO: 1887995
agaguuuaagcagauagca

SEQ ID NO: 2502929 - RNA, 19 nt, Artificial Sequence
  Description of Artificial Sequence: Synthetic oligonucleotide
  Antisense strand to SEQ ID NO: 2502928
ugcuaucugcuuaaacucu

SEQ ID NO: 2502930 - RNA, 19 nt, Artificial Sequence
  Description of Artificial Sequence: Synthetic oligonucleotide
  Sense strand starting at position 3349 of SEQ ID NO: 1887995
ugaauugggcauugccaga

SEQ ID NO: 2502931 - RNA, 19 nt, Artificial Sequence
  Description of Artificial Sequence: Synthetic oligonucleotide
  Antisense strand to SEQ ID NO: 2502930
ucuggcaaugcccaauuca

SEQ ID NO: 2502932 - RNA, 19 nt, Artificial Sequence
  Description of Artificial Sequence: Synthetic oligonucleotide
  Sense strand starting at position 3354 of SEQ ID NO: 1887995
ugggcauugccagaucaca

SEQ ID NO: 2502933 - RNA, 19 nt, Artificial Sequence
  Description of Artificial Sequence: Synthetic oligonucleotide
  Antisense strand to SEQ ID NO: 2502932
ugugaucuggcaaugccca

SEQ ID NO: 2502934 - RNA, 19 nt, Artificial Sequence
  Description of Artificial Sequence: Synthetic oligonucleotide
  Sense strand starting at position 3448 of SEQ ID NO: 1887995
auacuugauugguuagagu

SEQ ID NO: 2502935 - RNA, 19 nt, Artificial Sequence
  Description of Artificial Sequence: Synthetic oligonucleotide
  Antisense strand to SEQ ID NO: 2502934
acucuaaccaaucaaguau

SEQ ID NO: 2502936 - RNA, 19 nt, Artificial Sequence
  Description of Artificial Sequence: Synthetic oligonucleotide
  Sense strand starting at position 3479 of SEQ ID NO: 1887995
ggaucauuccagugggaag

SEQ ID NO: 2502937 - RNA, 19 nt, Artificial Sequence
  Description of Artificial Sequence: Synthetic oligonucleotide
  Antisense strand to SEQ ID NO: 2502936
cuucccacuggaaugaucc

SEQ ID NO: 2502938 - RNA, 19 nt, Artificial Sequence
  Description of Artificial Sequence: Synthetic oligonucleotide
  Sense strand starting at position 3480 of SEQ ID NO: 1887995
gaucauuccagugggaagu

SEQ ID NO: 2502939 - RNA, 19 nt, Artificial Sequence
  Description of Artificial Sequence: Synthetic oligonucleotide
  Antisense strand to SEQ ID NO: 2502938
acuucccacuggaaugauc

SEQ ID NO: 2502940 - RNA, 19 nt, Artificial Sequence
  Description of Artificial Sequence: Synthetic oligonucleotide
  Sense strand starting at position 3498 of SEQ ID NO: 1887995
ucaauaguaggagguuaau

SEQ ID NO: 2502941 - RNA, 19 nt, Artificial Sequence
  Description of Artificial Sequence: Synthetic oligonucleotide
  Antisense strand to SEQ ID NO: 2502940
auuaaccuccuacuauuga

SEQ ID NO: 2502942 - RNA, 19 nt, Artificial Sequence
  Description of Artificial Sequence: Synthetic oligonucleotide
  Sense strand starting at position 3564 of SEQ ID NO: 1887995
guuugcuuagguuaagaau

SEQ ID NO: 2502943 - RNA, 19 nt, Artificial Sequence
  Description of Artificial Sequence: Synthetic oligonucleotide
  Antisense strand to SEQ ID NO: 2502942
auucuuaaccuaagcaaac

SEQ ID NO: 2502944 - RNA, 19 nt, Artificial Sequence
  Description of Artificial Sequence: Synthetic oligonucleotide
  Sense strand starting at position 13 of SEQ ID NO: 1887996
agaaauuaguuuccucuga

SEQ ID NO: 2502945 - RNA, 19 nt, Artificial Sequence
  Description of Artificial Sequence: Synthetic oligonucleotide
  Antisense strand to SEQ ID NO: 2502944
ucagaggaaacuaauuucu

SEQ ID NO: 2502946 - RNA, 19 nt, Artificial Sequence
  Description of Artificial Sequence: Synthetic oligonucleotide
  Sense strand starting at position 14 of SEQ ID NO: 1887996
gaaauuaguuuccucugag

SEQ ID NO: 2502947 - RNA, 19 nt, Artificial Sequence
  Description of Artificial Sequence: Synthetic oligonucleotide
  Antisense strand to SEQ ID NO: 2502946
cucagaggaaacuaauuuc

SEQ ID NO: 2502948 - RNA, 19 nt, Artificial Sequence
  Description of Artificial Sequence: Synthetic oligonucleotide
  Sense strand starting at position 66 of SEQ ID NO: 1887996
ugcagaagugauggaaauc

SEQ ID NO: 2502949 - RNA, 19 nt, Artificial Sequence
  Description of Artificial Sequence: Synthetic oligonucleotide
  Antisense strand to SEQ ID NO: 2502948
gauuuccaucacuucugca

SEQ ID NO: 2502950 - RNA, 19 nt, Artificial Sequence
  Description of Artificial Sequence: Synthetic oligonucleotide
  Sense strand starting at position 82 of SEQ ID NO: 1887996
aucuaucuugauggugaaa

SEQ ID NO: 2502951 - RNA, 19 nt, Artificial Sequence
  Description of Artificial Sequence: Synthetic oligonucleotide
  Antisense strand to SEQ ID NO: 2502950
uuucaccaucaagauagau

SEQ ID NO: 2502952 - RNA, 19 nt, Artificial Sequence
  Description of Artificial Sequence: Synthetic oligonucleotide
  Sense strand starting at position 143 of SEQ ID NO: 1887996
gggauaagaacuggugguu

SEQ ID NO: 2502953 - RNA, 19 nt, Artificial Sequence
  Description of Artificial Sequence: Synthetic oligonucleotide
  Antisense strand to SEQ ID NO: 2502952
aaccaccaguucuuauccc

SEQ ID NO: 2502954 - RNA, 19 nt, Artificial Sequence
  Description of Artificial Sequence: Synthetic oligonucleotide
  Sense strand starting at position 146 of SEQ ID NO: 1887996
auaagaacuggugguuaaa

SEQ ID NO: 2502955 - RNA, 19 nt, Artificial Sequence
  Description of Artificial Sequence: Synthetic oligonucleotide
  Antisense strand to SEQ ID NO: 2502954
uuuaaccaccaguucuuau

SEQ ID NO: 2502956 - RNA, 19 nt, Artificial Sequence
  Description of Artificial Sequence: Synthetic oligonucleotide
  Sense strand starting at position 243 of SEQ ID NO: 1887996
uuauaugacgguugaaauu

SEQ ID NO: 2502957 - RNA, 19 nt, Artificial Sequence
  Description of Artificial Sequence: Synthetic oligonucleotide
  Antisense strand to SEQ ID NO: 2502956
aauuucaaccgucauauaa

SEQ ID NO: 2502958 - RNA, 19 nt, Artificial Sequence
  Description of Artificial Sequence: Synthetic oligonucleotide
  Sense strand starting at position 309 of SEQ ID NO: 1887996
ucaugaacagcuugaguca

SEQ ID NO: 2502959 - RNA, 19 nt, Artificial Sequence
  Description of Artificial Sequence: Synthetic oligonucleotide
  Antisense strand to SEQ ID NO: 2502958
ugacucaagcuguucauga

SEQ ID NO: 2502960 - RNA, 19 nt, Artificial Sequence
  Description of Artificial Sequence: Synthetic oligonucleotide
  Sense strand starting at position 422 of SEQ ID NO: 1887996
aaaugucuuggugacuaca

SEQ ID NO: 2502961 - RNA, 19 nt, Artificial Sequence
  Description of Artificial Sequence: Synthetic oligonucleotide
  Antisense strand to SEQ ID NO: 2502960
uguagucaccaagacauuu

SEQ ID NO: 2502962 - RNA, 19 nt, Artificial Sequence
  Description of Artificial Sequence: Synthetic oligonucleotide
  Sense strand starting at position 435 of SEQ ID NO: 1887996
acuacauuuagcgggcuaa

SEQ ID NO: 2502963 - RNA, 19 nt, Artificial Sequence
  Description of Artificial Sequence: Synthetic oligonucleotide
  Antisense strand to SEQ ID NO: 2502962
uuagcccgcuaaauguagu

SEQ ID NO: 2502964 - RNA, 19 nt, Artificial Sequence
  Description of Artificial Sequence: Synthetic oligonucleotide
  Sense strand starting at position 463 of SEQ ID NO: 1887996
cugguuguauuugcacaaa

SEQ ID NO: 2502965 - RNA, 19 nt, Artificial Sequence
  Description of Artificial Sequence: Synthetic oligonucleotide
  Antisense strand to SEQ ID NO: 2502964
uuugugcaaauacaaccag

SEQ ID NO: 2502966 - RNA, 19 nt, Artificial Sequence
  Description of Artificial Sequence: Synthetic oligonucleotide
  Sense strand starting at position 524 of SEQ ID NO: 1887996
gggaaauauagccagcuca

SEQ ID NO: 2502967 - RNA, 19 nt, Artificial Sequence
  Description of Artificial Sequence: Synthetic oligonucleotide
  Antisense strand to SEQ ID NO: 2502966
ugagcuggcuauauuuccc

SEQ ID NO: 2502968 - RNA, 19 nt, Artificial Sequence
  Description of Artificial Sequence: Synthetic oligonucleotide
  Sense strand starting at position 615 of SEQ ID NO: 1887996
acagaugaagccugugacu

SEQ ID NO: 2502969 - RNA, 19 nt, Artificial Sequence
  Description of Artificial Sequence: Synthetic oligonucleotide
  Antisense strand to SEQ ID NO: 2502968
agucacaggcuucaucugu

SEQ ID NO: 2502970 - RNA, 19 nt, Artificial Sequence
  Description of Artificial Sequence: Synthetic oligonucleotide
  Sense strand starting at position 915 of SEQ ID NO: 1887996
ucuugucuucuccagggaa

SEQ ID NO: 2502971 - RNA, 19 nt, Artificial Sequence
  Description of Artificial Sequence: Synthetic oligonucleotide
  Antisense strand to SEQ ID NO: 2502970
uucccuggagaagacaaga

SEQ ID NO: 2502972 - RNA, 19 nt, Artificial Sequence
  Description of Artificial Sequence: Synthetic oligonucleotide
  Sense strand starting at position 917 of SEQ ID NO: 1887996
uugucuucuccagggaaug

SEQ ID NO: 2502973 - RNA, 19 nt, Artificial Sequence
  Description of Artificial Sequence: Synthetic oligonucleotide
  Antisense strand to SEQ ID NO: 2502972
cauucccuggagaagacaa

SEQ ID NO: 2502974 - RNA, 19 nt, Artificial Sequence
  Description of Artificial Sequence: Synthetic oligonucleotide
  Sense strand starting at position 1062 of SEQ ID NO: 1887996
gucccacguguugcugaau

SEQ ID NO: 2502975 - RNA, 19 nt, Artificial Sequence
  Description of Artificial Sequence: Synthetic oligonucleotide
  Antisense strand to SEQ ID NO: 2502974
auucagcaacacgugggac

SEQ ID NO: 2502976 - RNA, 19 nt, Artificial Sequence
  Description of Artificial Sequence: Synthetic oligonucleotide
  Sense strand starting at position 1134 of SEQ ID NO: 1887996
auuagaugugcccaggacu

SEQ ID NO: 2502977 - RNA, 19 nt, Artificial Sequence
  Description of Artificial Sequence: Synthetic oligonucleotide
  Antisense strand to SEQ ID NO: 2502976
aguccugggcacaucuaau

SEQ ID NO: 2502978 - RNA, 19 nt, Artificial Sequence
  Description of Artificial Sequence: Synthetic oligonucleotide
  Sense strand starting at position 1137 of SEQ ID NO: 1887996
agaugugcccaggacuuaa

SEQ ID NO: 2502979 - RNA, 19 nt, Artificial Sequence
  Description of Artificial Sequence: Synthetic oligonucleotide
  Antisense strand to SEQ ID NO: 2502978
uuaaguccugggcacaucu

SEQ ID NO: 2502980 - RNA, 19 nt, Artificial Sequence
  Description of Artificial Sequence: Synthetic oligonucleotide
  Sense strand starting at position 1160 of SEQ ID NO: 1887996
uaugauguugcaggacaaa

SEQ ID NO: 2502981 - RNA, 19 nt, Artificial Sequence
  Description of Artificial Sequence: Synthetic oligonucleotide
  Antisense strand to SEQ ID NO: 2502980
uuuguccugcaacaucaua

SEQ ID NO: 2502982 - RNA, 19 nt, Artificial Sequence
  Description of Artificial Sequence: Synthetic oligonucleotide
  Sense strand starting at position 1429 of SEQ ID NO: 1887996
uggccuacucugggauaga

SEQ ID NO: 2502983 - RNA, 19 nt, Artificial Sequence
  Description of Artificial Sequence: Synthetic oligonucleotide
  Antisense strand to SEQ ID NO: 2502982
ucuaucccagaguaggcca

SEQ ID NO: 2502984 - RNA, 19 nt, Artificial Sequence
  Description of Artificial Sequence: Synthetic oligonucleotide
  Sense strand starting at position 1510 of SEQ ID NO: 1887996
ucacgcgagcauucuugua

SEQ ID NO: 2502985 - RNA, 19 nt, Artificial Sequence
  Description of Artificial Sequence: Synthetic oligonucleotide
  Antisense strand to SEQ ID NO: 2502984
uacaagaaugcucgcguga

SEQ ID NO: 2502986 - RNA, 19 nt, Artificial Sequence
  Description of Artificial Sequence: Synthetic oligonucleotide
  Sense strand starting at position 2282 of SEQ ID NO: 1887996
ccgugagguuaugugauuu

SEQ ID NO: 2502987 - RNA, 19 nt, Artificial Sequence
  Description of Artificial Sequence: Synthetic oligonucleotide
  Antisense strand to SEQ ID NO: 2502986
aaaucacauaaccucacgg

SEQ ID NO: 2502988 - RNA, 19 nt, Artificial Sequence
  Description of Artificial Sequence: Synthetic oligonucleotide
  Sense strand starting at position 2298 of SEQ ID NO: 1887996
uuugauaugugacccuaua

SEQ ID NO: 2502989 - RNA, 19 nt, Artificial Sequence
  Description of Artificial Sequence: Synthetic oligonucleotide
  Antisense strand to SEQ ID NO: 2502988
uauagggucacauaucaaa

SEQ ID NO: 2502990 - RNA, 19 nt, Artificial Sequence
  Description of Artificial Sequence: Synthetic oligonucleotide
  Sense strand starting at position 2385 of SEQ ID NO: 1887996
uuguuuaaucuuuaugagc

SEQ ID NO: 2502991 - RNA, 19 nt, Artificial Sequence
  Description of Artificial Sequence: Synthetic oligonucleotide
  Antisense strand to SEQ ID NO: 2502990
gcucauaaagauuaaacaa

SEQ ID NO: 2502992 - RNA, 19 nt, Artificial Sequence
  Description of Artificial Sequence: Synthetic oligonucleotide
  Sense strand starting at position 2446 of SEQ ID NO: 1887996
uaguguugcgaggauuaag

SEQ ID NO: 2502993 - RNA, 19 nt, Artificial Sequence
  Description of Artificial Sequence: Synthetic oligonucleotide
  Antisense strand to SEQ ID NO: 2502992
cuuaauccucgcaacacua

SEQ ID NO: 2502994 - RNA, 19 nt, Artificial Sequence
  Description of Artificial Sequence: Synthetic oligonucleotide
  Sense strand starting at position 2456 of SEQ ID NO: 1887996
aggauuaagugcucauaaa

SEQ ID NO: 2502995 - RNA, 19 nt, Artificial Sequence
  Description of Artificial Sequence: Synthetic oligonucleotide
  Antisense strand to SEQ ID NO: 2502994
uuuaugagcacuuaauccu

SEQ ID NO: 2502996 - RNA, 19 nt, Artificial Sequence
  Description of Artificial Sequence: Synthetic oligonucleotide
  Sense strand starting at position 2457 of SEQ ID NO: 1887996
ggauuaagugcucauaaau

SEQ ID NO: 2502997 - RNA, 19 nt, Artificial Sequence
  Description of Artificial Sequence: Synthetic oligonucleotide
  Antisense strand to SEQ ID NO: 2502996
auuuaugagcacuuaaucc

SEQ ID NO: 2502998 - RNA, 19 nt, Artificial Sequence
  Description of Artificial Sequence: Synthetic oligonucleotide
  Sense strand starting at position 2622 of SEQ ID NO: 1887996
auuacuucuuguuuacaga

SEQ ID NO: 2502999 - RNA, 19 nt, Artificial Sequence
  Description of Artificial Sequence: Synthetic oligonucleotide
  Antisense strand to SEQ ID NO: 2502998
ucuguaaacaagaaguaau

SEQ ID NO: 2503000 - RNA, 19 nt, Artificial Sequence
  Description of Artificial Sequence: Synthetic oligonucleotide
  Sense strand starting at position 2832 of SEQ ID NO: 1887996
gcuugacauccuggauuga

SEQ ID NO: 2503001 - RNA, 19 nt, Artificial Sequence
  Description of Artificial Sequence: Synthetic oligonucleotide
  Antisense strand to SEQ ID NO: 2503000
ucaauccaggaugucaagc

SEQ ID NO: 2503002 - RNA, 19 nt, Artificial Sequence
  Description of Artificial Sequence: Synthetic oligonucleotide
  Sense strand starting at position 2932 of SEQ ID NO: 1887996
gugagaucucacuauguua

SEQ ID NO: 2503003 - RNA, 19 nt, Artificial Sequence
  Description of Artificial Sequence: Synthetic oligonucleotide
  Antisense strand to SEQ ID NO: 2503002
uaacauagugagaucucac

SEQ ID NO: 2503004 - RNA, 19 nt, Artificial Sequence
  Description of Artificial Sequence: Synthetic oligonucleotide
  Sense strand starting at position 3242 of SEQ ID NO: 1887996
caugauaggucuuuaguaa

SEQ ID NO: 2503005 - RNA, 19 nt, Artificial Sequence
  Description of Artificial Sequence: Synthetic oligonucleotide
  Antisense strand to SEQ ID NO: 2503004
uuacuaaagaccuaucaug

SEQ ID NO: 2503006 - RNA, 19 nt, Artificial Sequence
  Description of Artificial Sequence: Synthetic oligonucleotide
  Sense strand starting at position 3243 of SEQ ID NO: 1887996
augauaggucuuuaguaac

SEQ ID NO: 2503007 - RNA, 19 nt, Artificial Sequence
  Description of Artificial Sequence: Synthetic oligonucleotide
  Antisense strand to SEQ ID NO: 2503006
guuacuaaagaccuaucau

SEQ ID NO: 2503008 - RNA, 19 nt, Artificial Sequence
  Description of Artificial Sequence: Synthetic oligonucleotide
  Sense strand starting at position 3344 of SEQ ID NO: 1887996
uaaagaguuuaagcagaua

SEQ ID NO: 2503009 - RNA, 19 nt, Artificial Sequence
  Description of Artificial Sequence: Synthetic oligonucleotide
  Antisense strand to SEQ ID NO: 2503008
uaucugcuuaaacucuuua

SEQ ID NO: 2503010 - RNA, 19 nt, Artificial Sequence
  Description of Artificial Sequence: Synthetic oligonucleotide
  Sense strand starting at position 3347 of SEQ ID NO: 1887996
agaguuuaagcagauagca

SEQ ID NO: 2503011 - RNA, 19 nt, Artificial Sequence
  Description of Artificial Sequence: Synthetic oligonucleotide
  Antisense strand to SEQ ID NO: 2503010
ugcuaucugcuuaaacucu

SEQ ID NO: 2503012 - RNA, 19 nt, Artificial Sequence
  Description of Artificial Sequence: Synthetic oligonucleotide
  Sense strand starting at position 3376 of SEQ ID NO: 1887996
ugggcauugccagaucaca

SEQ ID NO: 2503013 - RNA, 19 nt, Artificial Sequence
  Description of Artificial Sequence: Synthetic oligonucleotide
  Antisense strand to SEQ ID NO: 2503012
ugugaucuggcaaugccca

SEQ ID NO: 2503014 - RNA, 19 nt, Artificial Sequence
  Description of Artificial Sequence: Synthetic oligonucleotide
  Sense strand starting at position 3470 of SEQ ID NO: 1887996
auacuugauugguuagagu

SEQ ID NO: 2503015 - RNA, 19 nt, Artificial Sequence
  Description of Artificial Sequence: Synthetic oligonucleotide
  Antisense strand to SEQ ID NO: 2503014
acucuaaccaaucaaguau

SEQ ID NO: 2503016 - RNA, 19 nt, Artificial Sequence
  Description of Artificial Sequence: Synthetic oligonucleotide
  Sense strand starting at position 3501 of SEQ ID NO: 1887996
ggaucauuccagugggaag

SEQ ID NO: 2503017 - RNA, 19 nt, Artificial Sequence
  Description of Artificial Sequence: Synthetic oligonucleotide
  Antisense strand to SEQ ID NO: 2503016
cuucccacuggaaugaucc

SEQ ID NO: 2503018 - RNA, 19 nt, Artificial Sequence
  Description of Artificial Sequence: Synthetic oligonucleotide
  Sense strand starting at position 3502 of SEQ ID NO: 1887996
gaucauuccagugggaagu

SEQ ID NO: 2503019 - RNA, 19 nt, Artificial Sequence
  Description of Artificial Sequence: Synthetic oligonucleotide
  Antisense strand to SEQ ID NO: 2503018
acuucccacuggaaugauc

SEQ ID NO: 2503020 - RNA, 19 nt, Artificial Sequence
  Description of Artificial Sequence: Synthetic oligonucleotide
  Sense strand starting at position 3520 of SEQ ID NO: 1887996
ucaauaguaggagguuaau

SEQ ID NO: 2503021 - RNA, 19 nt, Artificial Sequence
  Description of Artificial Sequence: Synthetic oligonucleotide
  Antisense strand to SEQ ID NO: 2503020
auuaaccuccuacuauuga

SEQ ID NO: 2503022 - RNA, 19 nt, Artificial Sequence
  Description of Artificial Sequence: Synthetic oligonucleotide
  Sense strand starting at position 3586 of SEQ ID NO: 1887996
guuugcuuagguuaagaau

SEQ ID NO: 2503023 - RNA, 19 nt, Artificial Sequence
  Description of Artificial Sequence: Synthetic oligonucleotide
  Antisense strand to SEQ ID NO: 2503022
auucuuaaccuaagcaaac

SEQ ID NO: 2503024 - RNA, 19 nt, Artificial Sequence
  Description of Artificial Sequence: Synthetic oligonucleotide
  Sense strand starting at position 83 of SEQ ID NO: 1887997
ccuggucagucugcagaga

SEQ ID NO: 2503025 - RNA, 19 nt, Artificial Sequence
  Description of Artificial Sequence: Synthetic oligonucleotide
  Antisense strand to SEQ ID NO: 2503024
ucucugcagacugaccagg

SEQ ID NO: 2503026 - RNA, 19 nt, Artificial Sequence
  Description of Artificial Sequence: Synthetic oligonucleotide
  Sense strand starting at position 177 of SEQ ID NO: 1887997
cugagaagccuuggccaca

SEQ ID NO: 2503027 - RNA, 19 nt, Artificial Sequence
  Description of Artificial Sequence: Synthetic oligonucleotide
  Antisense strand to SEQ ID NO: 2503026
uguggccaaggcuucucag

SEQ ID NO: 2503028 - RNA, 19 nt, Artificial Sequence
  Description of Artificial Sequence: Synthetic oligonucleotide
  Sense strand starting at position 178 of SEQ ID NO: 1887997
ugagaagccuuggccacau

SEQ ID NO: 2503029 - RNA, 19 nt, Artificial Sequence
  Description of Artificial Sequence: Synthetic oligonucleotide
  Antisense strand to SEQ ID NO: 2503028
auguggccaaggcuucuca

SEQ ID NO: 2503030 - RNA, 19 nt, Artificial Sequence
  Description of Artificial Sequence: Synthetic oligonucleotide
  Sense strand starting at position 189 of SEQ ID NO: 1887997
ggccacaugcuagaucaua

SEQ ID NO: 2503031 - RNA, 19 nt, Artificial Sequence
  Description of Artificial Sequence: Synthetic oligonucleotide
  Antisense strand to SEQ ID NO: 2503030
uaugaucuagcauguggcc

SEQ ID NO: 2503032 - RNA, 19 nt, Artificial Sequence
  Description of Artificial Sequence: Synthetic oligonucleotide
  Sense strand starting at position 197 of SEQ ID NO: 1887997
gcuagaucauaaucucugu

SEQ ID NO: 2503033 - RNA, 19 nt, Artificial Sequence
  Description of Artificial Sequence: Synthetic oligonucleotide
  Antisense strand to SEQ ID NO: 2503032
acagagauuaugaucuagc

SEQ ID NO: 2503034 - RNA, 19 nt, Artificial Sequence
  Description of Artificial Sequence: Synthetic oligonucleotide
  Sense strand starting at position 201 of SEQ ID NO: 1887997
gaucauaaucucuguacga

SEQ ID NO: 2503035 - RNA, 19 nt, Artificial Sequence
  Description of Artificial Sequence: Synthetic oligonucleotide
  Antisense strand to SEQ ID NO: 2503034
ucguacagagauuaugauc

SEQ ID NO: 2503036 - RNA, 19 nt, Artificial Sequence
  Description of Artificial Sequence: Synthetic oligonucleotide
  Sense strand starting at position 202 of SEQ ID NO: 1887997
aucauaaucucuguacgac

SEQ ID NO: 2503037 - RNA, 19 nt, Artificial Sequence
  Description of Artificial Sequence: Synthetic oligonucleotide
  Antisense strand to SEQ ID NO: 2503036
gucguacagagauuaugau

SEQ ID NO: 2503038 - RNA, 19 nt, Artificial Sequence
  Description of Artificial Sequence: Synthetic oligonucleotide
  Sense strand starting at position 288 of SEQ ID NO: 1887997
gagaccuguccuugaccuu

SEQ ID NO: 2503039 - RNA, 19 nt, Artificial Sequence
  Description of Artificial Sequence: Synthetic oligonucleotide
  Antisense strand to SEQ ID NO: 2503038
aaggucaaggacaggucuc

SEQ ID NO: 2503040 - RNA, 19 nt, Artificial Sequence
  Description of Artificial Sequence: Synthetic oligonucleotide
  Sense strand starting at position 327 of SEQ ID NO: 1887997
cuauuauuaucauugugag

SEQ ID NO: 2503041 - RNA, 19 nt, Artificial Sequence
  Description of Artificial Sequence: Synthetic oligonucleotide
  Antisense strand to SEQ ID NO: 2503040
cucacaaugauaauaauag

SEQ ID NO: 2503042 - RNA, 19 nt, Artificial Sequence
  Description of Artificial Sequence: Synthetic oligonucleotide
  Sense strand starting at position 496 of SEQ ID NO: 1887997
auacucuuagcaggucaaa

SEQ ID NO: 2503043 - RNA, 19 nt, Artificial Sequence
  Description of Artificial Sequence: Synthetic oligonucleotide
  Antisense strand to SEQ ID NO: 2503042
uuugaccugcuaagaguau

SEQ ID NO: 2503044 - RNA, 19 nt, Artificial Sequence
  Description of Artificial Sequence: Synthetic oligonucleotide
  Sense strand starting at position 912 of SEQ ID NO: 1887997
ucaacuucucagggaacca

SEQ ID NO: 2503045 - RNA, 19 nt, Artificial Sequence
  Description of Artificial Sequence: Synthetic oligonucleotide
  Antisense strand to SEQ ID NO: 2503044
ugguucccugagaaguuga

SEQ ID NO: 2503046 - RNA, 19 nt, Artificial Sequence
  Description of Artificial Sequence: Synthetic oligonucleotide
  Sense strand starting at position 924 of SEQ ID NO: 1887997
ggaaccauuccgggucuga

SEQ ID NO: 2503047 - RNA, 19 nt, Artificial Sequence
  Description of Artificial Sequence: Synthetic oligonucleotide
  Antisense strand to SEQ ID NO: 2503046
ucagacccggaaugguucc

SEQ ID NO: 2503048 - RNA, 19 nt, Artificial Sequence
  Description of Artificial Sequence: Synthetic oligonucleotide
  Sense strand starting at position 982 of SEQ ID NO: 1887997
aauuguagguuccugaacu

SEQ ID NO: 2503049 - RNA, 19 nt, Artificial Sequence
  Description of Artificial Sequence: Synthetic oligonucleotide
  Antisense strand to SEQ ID NO: 2503048
aguucaggaaccuacaauu

SEQ ID NO: 2503050 - RNA, 19 nt, Artificial Sequence
  Description of Artificial Sequence: Synthetic oligonucleotide
  Sense strand starting at position 1035 of SEQ ID NO: 1887997
guaacuuugccuuggacaa

SEQ ID NO: 2503051 - RNA, 19 nt, Artificial Sequence
  Description of Artificial Sequence: Synthetic oligonucleotide
  Antisense strand to SEQ ID NO: 2503050
uuguccaaggcaaaguuac

SEQ ID NO: 2503052 - RNA, 19 nt, Artificial Sequence
  Description of Artificial Sequence: Synthetic oligonucleotide
  Sense strand starting at position 1107 of SEQ ID NO: 1887997
gacuuaagacucugggcuu

SEQ ID NO: 2503053 - RNA, 19 nt, Artificial Sequence
  Description of Artificial Sequence: Synthetic oligonucleotide
  Antisense strand to SEQ ID NO: 2503052
aagcccagagucuuaaguc

SEQ ID NO: 2503054 - RNA, 19 nt, Artificial Sequence
  Description of Artificial Sequence: Synthetic oligonucleotide
  Sense strand starting at position 1114 of SEQ ID NO: 1887997
gacucugggcuuuguauuu

SEQ ID NO: 2503055 - RNA, 19 nt, Artificial Sequence
  Description of Artificial Sequence: Synthetic oligonucleotide
  Antisense strand to SEQ ID NO: 2503054
aaauacaaagcccagaguc

SEQ ID NO: 2503056 - RNA, 19 nt, Artificial Sequence
  Description of Artificial Sequence: Synthetic oligonucleotide
  Sense strand starting at position 1120 of SEQ ID NO: 1887997
gggcuuuguauuugcucaa

SEQ ID NO: 2503057 - RNA, 19 nt, Artificial Sequence
  Description of Artificial Sequence: Synthetic oligonucleotide
  Antisense strand to SEQ ID NO: 2503056
uugagcaaauacaaagccc

SEQ ID NO: 2503058 - RNA, 19 nt, Artificial Sequence
  Description of Artificial Sequence: Synthetic oligonucleotide
  Sense strand starting at position 1121 of SEQ ID NO: 1887997
ggcuuuguauuugcucaaa

SEQ ID NO: 2503059 - RNA, 19 nt, Artificial Sequence
  Description of Artificial Sequence: Synthetic oligonucleotide
  Antisense strand to SEQ ID NO: 2503058
uuugagcaaauacaaagcc

SEQ ID NO: 2503060 - RNA, 19 nt, Artificial Sequence
  Description of Artificial Sequence: Synthetic oligonucleotide
  Sense strand starting at position 1123 of SEQ ID NO: 1887997
cuuuguauuugcucaaagu

SEQ ID NO: 2503061 - RNA, 19 nt, Artificial Sequence
  Description of Artificial Sequence: Synthetic oligonucleotide
  Antisense strand to SEQ ID NO: 2503060
acuuugagcaaauacaaag

SEQ ID NO: 2503062 - RNA, 19 nt, Artificial Sequence
  Description of Artificial Sequence: Synthetic oligonucleotide
  Sense strand starting at position 1248 of SEQ ID NO: 1887997
guucucagugcugacuuua

SEQ ID NO: 2503063 - RNA, 19 nt, Artificial Sequence
  Description of Artificial Sequence: Synthetic oligonucleotide
  Antisense strand to SEQ ID NO: 2503062
uaaagucagcacugagaac

SEQ ID NO: 2503064 - RNA, 19 nt, Artificial Sequence
  Description of Artificial Sequence: Synthetic oligonucleotide
  Sense strand starting at position 1558 of SEQ ID NO: 1887997
cgucacauuuccguacaca

SEQ ID NO: 2503065 - RNA, 19 nt, Artificial Sequence
  Description of Artificial Sequence: Synthetic oligonucleotide
  Antisense strand to SEQ ID NO: 2503064
uguguacggaaaugugacg

SEQ ID NO: 2503066 - RNA, 19 nt, Artificial Sequence
  Description of Artificial Sequence: Synthetic oligonucleotide
  Sense strand starting at position 2067 of SEQ ID NO: 1887997
gcgcucugcacucuggaua

SEQ ID NO: 2503067 - RNA, 19 nt, Artificial Sequence
  Description of Artificial Sequence: Synthetic oligonucleotide
  Antisense strand to SEQ ID NO: 2503066
uauccagagugcagagcgc

SEQ ID NO: 2503068 - RNA, 19 nt, Artificial Sequence
  Description of Artificial Sequence: Synthetic oligonucleotide
  Sense strand starting at position 2072 of SEQ ID NO: 1887997
cugcacucuggauaaugua

SEQ ID NO: 2503069 - RNA, 19 nt, Artificial Sequence
  Description of Artificial Sequence: Synthetic oligonucleotide
  Antisense strand to SEQ ID NO: 2503068
uacauuauccagagugcag

SEQ ID NO: 2503070 - RNA, 19 nt, Artificial Sequence
  Description of Artificial Sequence: Synthetic oligonucleotide
  Sense strand starting at position 2080 of SEQ ID NO: 1887997
uggauaauguaguuuccaa

SEQ ID NO: 2503071 - RNA, 19 nt, Artificial Sequence
  Description of Artificial Sequence: Synthetic oligonucleotide
  Antisense strand to SEQ ID NO: 2503070
uuggaaacuacauuaucca

SEQ ID NO: 2503072 - RNA, 19 nt, Artificial Sequence
  Description of Artificial Sequence: Synthetic oligonucleotide
  Sense strand starting at position 2107 of SEQ ID NO: 1887997
ggagcucuucggagugugu

SEQ ID NO: 2503073 - RNA, 19 nt, Artificial Sequence
  Description of Artificial Sequence: Synthetic oligonucleotide
  Antisense strand to SEQ ID NO: 2503072
acacacuccgaagagcucc

SEQ ID NO: 2503074 - RNA, 19 nt, Artificial Sequence
  Description of Artificial Sequence: Synthetic oligonucleotide
  Sense strand starting at position 2240 of SEQ ID NO: 1887997
uucccagauuucugggaag

SEQ ID NO: 2503075 - RNA, 19 nt, Artificial Sequence
  Description of Artificial Sequence: Synthetic oligonucleotide
  Antisense strand to SEQ ID NO: 2503074
cuucccagaaaucugggaa

SEQ ID NO: 2503076 - RNA, 19 nt, Artificial Sequence
  Description of Artificial Sequence: Synthetic oligonucleotide
  Sense strand starting at position 2243 of SEQ ID NO: 1887997
ccagauuucugggaagugu

SEQ ID NO: 2503077 - RNA, 19 nt, Artificial Sequence
  Description of Artificial Sequence: Synthetic oligonucleotide
  Antisense strand to SEQ ID NO: 2503076
acacuucccagaaaucugg

SEQ ID NO: 2503078 - RNA, 19 nt, Artificial Sequence
  Description of Artificial Sequence: Synthetic oligonucleotide
  Sense strand starting at position 2263 of SEQ ID NO: 1887997
uuccguaacugaucacuua

SEQ ID NO: 2503079 - RNA, 19 nt, Artificial Sequence
  Description of Artificial Sequence: Synthetic oligonucleotide
  Antisense strand to SEQ ID NO: 2503078
uaagugaucaguuacggaa

SEQ ID NO: 2503080 - RNA, 19 nt, Artificial Sequence
  Description of Artificial Sequence: Synthetic oligonucleotide
  Sense strand starting at position 2264 of SEQ ID NO: 1887997
uccguaacugaucacuuaa

SEQ ID NO: 2503081 - RNA, 19 nt, Artificial Sequence
  Description of Artificial Sequence: Synthetic oligonucleotide
  Antisense strand to SEQ ID NO: 2503080
uuaagugaucaguuacgga

SEQ ID NO: 2503082 - RNA, 19 nt, Artificial Sequence
  Description of Artificial Sequence: Synthetic oligonucleotide
  Sense strand starting at position 2266 of SEQ ID NO: 1887997
cguaacugaucacuuaagu

SEQ ID NO: 2503083 - RNA, 19 nt, Artificial Sequence
  Description of Artificial Sequence: Synthetic oligonucleotide
  Antisense strand to SEQ ID NO: 2503082
acuuaagugaucaguuacg

SEQ ID NO: 2503084 - RNA, 19 nt, Artificial Sequence
  Description of Artificial Sequence: Synthetic oligonucleotide
  Sense strand starting at position 2271 of SEQ ID NO: 1887997
cugaucacuuaaguguuua

SEQ ID NO: 2503085 - RNA, 19 nt, Artificial Sequence
  Description of Artificial Sequence: Synthetic oligonucleotide
  Antisense strand to SEQ ID NO: 2503084
uaaacacuuaagugaucag

SEQ ID NO: 2503086 - RNA, 19 nt, Artificial Sequence
  Description of Artificial Sequence: Synthetic oligonucleotide
  Sense strand starting at position 2275 of SEQ ID NO: 1887997
ucacuuaaguguuuagaga

SEQ ID NO: 2503087 - RNA, 19 nt, Artificial Sequence
  Description of Artificial Sequence: Synthetic oligonucleotide
  Antisense strand to SEQ ID NO: 2503086
ucucuaaacacuuaaguga

SEQ ID NO: 2503088 - RNA, 19 nt, Artificial Sequence
  Description of Artificial Sequence: Synthetic oligonucleotide
  Sense strand starting at position 2276 of SEQ ID NO: 1887997
cacuuaaguguuuagagac

SEQ ID NO: 2503089 - RNA, 19 nt, Artificial Sequence
  Description of Artificial Sequence: Synthetic oligonucleotide
  Antisense strand to SEQ ID NO: 2503088
gucucuaaacacuuaagug

SEQ ID NO: 2503090 - RNA, 19 nt, Artificial Sequence
  Description of Artificial Sequence: Synthetic oligonucleotide
  Sense strand starting at position 2932 of SEQ ID NO: 1887997
gaagucuaauuggucuauu

SEQ ID NO: 2503091 - RNA, 19 nt, Artificial Sequence
  Description of Artificial Sequence: Synthetic oligonucleotide
  Antisense strand to SEQ ID NO: 2503090
aauagaccaauuagacuuc

SEQ ID NO: 2503092 - RNA, 19 nt, Artificial Sequence
  Description of Artificial Sequence: Synthetic oligonucleotide
  Sense strand starting at position 3057 of SEQ ID NO: 1887997
gggucuuauguuuagguuu

SEQ ID NO: 2503093 - RNA, 19 nt, Artificial Sequence
  Description of Artificial Sequence: Synthetic oligonucleotide
  Antisense strand to SEQ ID NO: 2503092
aaaccuaaacauaagaccc

SEQ ID NO: 2503094 - RNA, 19 nt, Artificial Sequence
  Description of Artificial Sequence: Synthetic oligonucleotide
  Sense strand starting at position 3205 of SEQ ID NO: 1887997
uugguagccuuguugagau

SEQ ID NO: 2503095 - RNA, 19 nt, Artificial Sequence
  Description of Artificial Sequence: Synthetic oligonucleotide
  Antisense strand to SEQ ID NO: 2503094
aucucaacaaggcuaccaa

SEQ ID NO: 2503096 - RNA, 19 nt, Artificial Sequence
  Description of Artificial Sequence: Synthetic oligonucleotide
  Sense strand starting at position 3207 of SEQ ID NO: 1887997
gguagccuuguugagauca

SEQ ID NO: 2503097 - RNA, 19 nt, Artificial Sequence
  Description of Artificial Sequence: Synthetic oligonucleotide
  Antisense strand to SEQ ID NO: 2503096
ugaucucaacaaggcuacc

SEQ ID NO: 2503098 - RNA, 19 nt, Artificial Sequence
  Description of Artificial Sequence: Synthetic oligonucleotide
  Sense strand starting at position 3217 of SEQ ID NO: 1887997
uugagaucauuugaccaua

SEQ ID NO: 2503099 - RNA, 19 nt, Artificial Sequence
  Description of Artificial Sequence: Synthetic oligonucleotide
  Antisense strand to SEQ ID NO: 2503098
uauggucaaaugaucucaa

SEQ ID NO: 2503100 - RNA, 19 nt, Artificial Sequence
  Description of Artificial Sequence: Synthetic oligonucleotide
  Sense strand starting at position 3332 of SEQ ID NO: 1887997
uuugcauguugacuuugaa

SEQ ID NO: 2503101 - RNA, 19 nt, Artificial Sequence
  Description of Artificial Sequence: Synthetic oligonucleotide
  Antisense strand to SEQ ID NO: 2503100
uucaaagucaacaugcaaa

SEQ ID NO: 2503102 - RNA, 19 nt, Artificial Sequence
  Description of Artificial Sequence: Synthetic oligonucleotide
  Sense strand starting at position 3335 of SEQ ID NO: 1887997
gcauguugacuuugaauuc

SEQ ID NO: 2503103 - RNA, 19 nt, Artificial Sequence
  Description of Artificial Sequence: Synthetic oligonucleotide
  Antisense strand to SEQ ID NO: 2503102
gaauucaaagucaacaugc

SEQ ID NO: 2503104 - RNA, 19 nt, Artificial Sequence
  Description of Artificial Sequence: Synthetic oligonucleotide
  Sense strand starting at position 124 of SEQ ID NO: 1887998
gugaaaucguucucuacua

SEQ ID NO: 2503105 - RNA, 19 nt, Artificial Sequence
  Description of Artificial Sequence: Synthetic oligonucleotide
  Antisense strand to SEQ ID NO: 2503104
uaguagagaacgauuucac

SEQ ID NO: 2503106 - RNA, 19 nt, Artificial Sequence
  Description of Artificial Sequence: Synthetic oligonucleotide
  Sense strand starting at position 125 of SEQ ID NO: 1887998
ugaaaucguucucuacuaa

SEQ ID NO: 2503107 - RNA, 19 nt, Artificial Sequence
  Description of Artificial Sequence: Synthetic oligonucleotide
  Antisense strand to SEQ ID NO: 2503106
uuaguagagaacgauuuca

SEQ ID NO: 2503108 - RNA, 19 nt, Artificial Sequence
  Description of Artificial Sequence: Synthetic oligonucleotide
  Sense strand starting at position 280 of SEQ ID NO: 1887998
gucugauccagugagaucu

SEQ ID NO: 2503109 - RNA, 19 nt, Artificial Sequence
  Description of Artificial Sequence: Synthetic oligonucleotide
  Antisense strand to SEQ ID NO: 2503108
agaucucacuggaucagac

SEQ ID NO: 2503110 - RNA, 19 nt, Artificial Sequence
  Description of Artificial Sequence: Synthetic oligonucleotide
  Sense strand starting at position 411 of SEQ ID NO: 1887998
agggauagaccaugccauu

SEQ ID NO: 2503111 - RNA, 19 nt, Artificial Sequence
  Description of Artificial Sequence: Synthetic oligonucleotide
  Antisense strand to SEQ ID NO: 2503110
aauggcauggucuaucccu

SEQ ID NO: 2503112 - RNA, 19 nt, Artificial Sequence
  Description of Artificial Sequence: Synthetic oligonucleotide
  Sense strand starting at position 432 of SEQ ID NO: 1887998
uuggcagcuuuaucaauau

SEQ ID NO: 2503113 - RNA, 19 nt, Artificial Sequence
  Description of Artificial Sequence: Synthetic oligonucleotide
  Antisense strand to SEQ ID NO: 2503112
auauugauaaagcugccaa

SEQ ID NO: 2503114 - RNA, 19 nt, Artificial Sequence
  Description of Artificial Sequence: Synthetic oligonucleotide
  Sense strand starting at position 616 of SEQ ID NO: 1887998
gugcuaacauucucaagua

SEQ ID NO: 2503115 - RNA, 19 nt, Artificial Sequence
  Description of Artificial Sequence: Synthetic oligonucleotide
  Antisense strand to SEQ ID NO: 2503114
uacuugagaauguuagcac

SEQ ID NO: 2503116 - RNA, 19 nt, Artificial Sequence
  Description of Artificial Sequence: Synthetic oligonucleotide
  Sense strand starting at position 681 of SEQ ID NO: 1887998
cccacaguuuagucuacau

SEQ ID NO: 2503117 - RNA, 19 nt, Artificial Sequence
  Description of Artificial Sequence: Synthetic oligonucleotide
  Antisense strand to SEQ ID NO: 2503116
auguagacuaaacuguggg

SEQ ID NO: 2503118 - RNA, 19 nt, Artificial Sequence
  Description of Artificial Sequence: Synthetic oligonucleotide
  Sense strand starting at position 992 of SEQ ID NO: 1887998
ccguuucugcaggaaguaa

SEQ ID NO: 2503119 - RNA, 19 nt, Artificial Sequence
  Description of Artificial Sequence: Synthetic oligonucleotide
  Antisense strand to SEQ ID NO: 2503118
uuacuuccugcagaaacgg

SEQ ID NO: 2503120 - RNA, 19 nt, Artificial Sequence
  Description of Artificial Sequence: Synthetic oligonucleotide
  Sense strand starting at position 1277 of SEQ ID NO: 1887998
cucccagucugauugaaau

SEQ ID NO: 2503121 - RNA, 19 nt, Artificial Sequence
  Description of Artificial Sequence: Synthetic oligonucleotide
  Antisense strand to SEQ ID NO: 2503120
auuucaaucagacugggag

SEQ ID NO: 2503122 - RNA, 19 nt, Artificial Sequence
  Description of Artificial Sequence: Synthetic oligonucleotide
  Sense strand starting at position 1327 of SEQ ID NO: 1887998
cucaaagaccugugguaau

SEQ ID NO: 2503123 - RNA, 19 nt, Artificial Sequence
  Description of Artificial Sequence: Synthetic oligonucleotide
  Antisense strand to SEQ ID NO: 2503122
auuaccacaggucuuugag

SEQ ID NO: 2503124 - RNA, 19 nt, Artificial Sequence
  Description of Artificial Sequence: Synthetic oligonucleotide
  Sense strand starting at position 1355 of SEQ ID NO: 1887998
uucugccagccguaauaaa

SEQ ID NO: 2503125 - RNA, 19 nt, Artificial Sequence
  Description of Artificial Sequence: Synthetic oligonucleotide
  Antisense strand to SEQ ID NO: 2503124
uuuauuacggcuggcagaa

SEQ ID NO: 2503126 - RNA, 19 nt, Artificial Sequence
  Description of Artificial Sequence: Synthetic oligonucleotide
  Sense strand starting at position 1453 of SEQ ID NO: 1887998
cuauuaggucauggccuau

SEQ ID NO: 2503127 - RNA, 19 nt, Artificial Sequence
  Description of Artificial Sequence: Synthetic oligonucleotide
  Antisense strand to SEQ ID NO: 2503126
auaggccaugaccuaauag

SEQ ID NO: 2503128 - RNA, 19 nt, Artificial Sequence
  Description of Artificial Sequence: Synthetic oligonucleotide
  Sense strand starting at position 1504 of SEQ ID NO: 1887998
cucaacaguccacaaguua

SEQ ID NO: 2503129 - RNA, 19 nt, Artificial Sequence
  Description of Artificial Sequence: Synthetic oligonucleotide
  Antisense strand to SEQ ID NO: 2503128
uaacuuguggacuguugag

SEQ ID NO: 2503130 - RNA, 19 nt, Artificial Sequence
  Description of Artificial Sequence: Synthetic oligonucleotide
  Sense strand starting at position 1581 of SEQ ID NO: 1887998
uagccaauccagugaagua

SEQ ID NO: 2503131 - RNA, 19 nt, Artificial Sequence
  Description of Artificial Sequence: Synthetic oligonucleotide
  Antisense strand to SEQ ID NO: 2503130
uacuucacuggauuggcua

SEQ ID NO: 2503132 - RNA, 19 nt, Artificial Sequence
  Description of Artificial Sequence: Synthetic oligonucleotide
  Sense strand starting at position 1728 of SEQ ID NO: 1887998
acccauucugcagaaagua

SEQ ID NO: 2503133 - RNA, 19 nt, Artificial Sequence
  Description of Artificial Sequence: Synthetic oligonucleotide
  Antisense strand to SEQ ID NO: 2503132
uacuuucugcagaaugggu

SEQ ID NO: 2503134 - RNA, 19 nt, Artificial Sequence
  Description of Artificial Sequence: Synthetic oligonucleotide
  Sense strand starting at position 1760 of SEQ ID NO: 1887998
ugagauccuuugucucagu

SEQ ID NO: 2503135 - RNA, 19 nt, Artificial Sequence
  Description of Artificial Sequence: Synthetic oligonucleotide
  Antisense strand to SEQ ID NO: 2503134
acugagacaaaggaucuca

SEQ ID NO: 2503136 - RNA, 19 nt, Artificial Sequence
  Description of Artificial Sequence: Synthetic oligonucleotide
  Sense strand starting at position 1984 of SEQ ID NO: 1887998
gggucccuccucuaaauca

SEQ ID NO: 2503137 - RNA, 19 nt, Artificial Sequence
  Description of Artificial Sequence: Synthetic oligonucleotide
  Antisense strand to SEQ ID NO: 2503136
ugauuuagaggagggaccc

SEQ ID NO: 2503138 - RNA, 19 nt, Artificial Sequence
  Description of Artificial Sequence: Synthetic oligonucleotide
  Sense strand starting at position 2281 of SEQ ID NO: 1887998
gcgguuucgccuuuauggu

SEQ ID NO: 2503139 - RNA, 19 nt, Artificial Sequence
  Description of Artificial Sequence: Synthetic oligonucleotide
  Antisense strand to SEQ ID NO: 2503138
accauaaaggcgaaaccgc

SEQ ID NO: 2503140 - RNA, 19 nt, Artificial Sequence
  Description of Artificial Sequence: Synthetic oligonucleotide
  Sense strand starting at position 2753 of SEQ ID NO: 1887998
agucaucuuagguacguaa

SEQ ID NO: 2503141 - RNA, 19 nt, Artificial Sequence
  Description of Artificial Sequence: Synthetic oligonucleotide
  Antisense strand to SEQ ID NO: 2503140
uuacguaccuaagaugacu

SEQ ID NO: 2503142 - RNA, 19 nt, Artificial Sequence
  Description of Artificial Sequence: Synthetic oligonucleotide
  Sense strand starting at position 2756 of SEQ ID NO: 1887998
caucuuagguacguaauga

SEQ ID NO: 2503143 - RNA, 19 nt, Artificial Sequence
  Description of Artificial Sequence: Synthetic oligonucleotide
  Antisense strand to SEQ ID NO: 2503142
ucauuacguaccuaagaug

SEQ ID NO: 2503144 - RNA, 19 nt, Artificial Sequence
  Description of Artificial Sequence: Synthetic oligonucleotide
  Sense strand starting at position 2757 of SEQ ID NO: 1887998
aucuuagguacguaaugaa

SEQ ID NO: 2503145 - RNA, 19 nt, Artificial Sequence
  Description of Artificial Sequence: Synthetic oligonucleotide
  Antisense strand to SEQ ID NO: 2503144
uucauuacguaccuaagau

SEQ ID NO: 2503146 - RNA, 19 nt, Artificial Sequence
  Description of Artificial Sequence: Synthetic oligonucleotide
  Sense strand starting at position 2830 of SEQ ID NO: 1887998
acugucuucuggucauaug

SEQ ID NO: 2503147 - RNA, 19 nt, Artificial Sequence
  Description of Artificial Sequence: Synthetic oligonucleotide
  Antisense strand to SEQ ID NO: 2503146
cauaugaccagaagacagu

SEQ ID NO: 2503148 - RNA, 19 nt, Artificial Sequence
  Description of Artificial Sequence: Synthetic oligonucleotide
  Sense strand starting at position 2904 of SEQ ID NO: 1887998
gacuacuaggguuguuuga

SEQ ID NO: 2503149 - RNA, 19 nt, Artificial Sequence
  Description of Artificial Sequence: Synthetic oligonucleotide
  Antisense strand to SEQ ID NO: 2503148
ucaaacaacccuaguaguc

SEQ ID NO: 2503150 - RNA, 19 nt, Artificial Sequence
  Description of Artificial Sequence: Synthetic oligonucleotide
  Sense strand starting at position 2906 of SEQ ID NO: 1887998
cuacuaggguuguuugagu

SEQ ID NO: 2503151 - RNA, 19 nt, Artificial Sequence
  Description of Artificial Sequence: Synthetic oligonucleotide
  Antisense strand to SEQ ID NO: 2503150
acucaaacaacccuaguag

SEQ ID NO: 2503152 - RNA, 19 nt, Artificial Sequence
  Description of Artificial Sequence: Synthetic oligonucleotide
  Sense strand starting at position 2949 of SEQ ID NO: 1887998
gaaguaaugggccaggcau

SEQ ID NO: 2503153 - RNA, 19 nt, Artificial Sequence
  Description of Artificial Sequence: Synthetic oligonucleotide
  Antisense strand to SEQ ID NO: 2503152
augccuggcccauuacuuc

SEQ ID NO: 2503154 - RNA, 19 nt, Artificial Sequence
  Description of Artificial Sequence: Synthetic oligonucleotide
  Sense strand starting at position 3239 of SEQ ID NO: 1887998
gguagugcauaccugaaau

SEQ ID NO: 2503155 - RNA, 19 nt, Artificial Sequence
  Description of Artificial Sequence: Synthetic oligonucleotide
  Antisense strand to SEQ ID NO: 2503154
auuucagguaugcacuacc

SEQ ID NO: 2503156 - RNA, 19 nt, Artificial Sequence
  Description of Artificial Sequence: Synthetic oligonucleotide
  Sense strand starting at position 3396 of SEQ ID NO: 1887998
gagugaugauacgcaccua

SEQ ID NO: 2503157 - RNA, 19 nt, Artificial Sequence
  Description of Artificial Sequence: Synthetic oligonucleotide
  Antisense strand to SEQ ID NO: 2503156
uaggugcguaucaucacuc

SEQ ID NO: 2503158 - RNA, 19 nt, Artificial Sequence
  Description of Artificial Sequence: Synthetic oligonucleotide
  Sense strand starting at position 3397 of SEQ ID NO: 1887998
agugaugauacgcaccuau

SEQ ID NO: 2503159 - RNA, 19 nt, Artificial Sequence
  Description of Artificial Sequence: Synthetic oligonucleotide
  Antisense strand to SEQ ID NO: 2503158
auaggugcguaucaucacu

SEQ ID NO: 2503160 - RNA, 19 nt, Artificial Sequence
  Description of Artificial Sequence: Synthetic oligonucleotide
  Sense strand starting at position 3661 of SEQ ID NO: 1887998
ugggaaggauggcuaugau

SEQ ID NO: 2503161 - RNA, 19 nt, Artificial Sequence
  Description of Artificial Sequence: Synthetic oligonucleotide
  Antisense strand to SEQ ID NO: 2503160
aucauagccauccuuccca

SEQ ID NO: 2503162 - RNA, 19 nt, Artificial Sequence
  Description of Artificial Sequence: Synthetic oligonucleotide
  Sense strand starting at position 3678 of SEQ ID NO: 1887998
auaauuaacugagcaugua

SEQ ID NO: 2503163 - RNA, 19 nt, Artificial Sequence
  Description of Artificial Sequence: Synthetic oligonucleotide
  Antisense strand to SEQ ID NO: 2503162
uacaugcucaguuaauuau

SEQ ID NO: 2503164 - RNA, 19 nt, Artificial Sequence
  Description of Artificial Sequence: Synthetic oligonucleotide
  Sense strand starting at position 3681 of SEQ ID NO: 1887998
auuaacugagcauguauau

SEQ ID NO: 2503165 - RNA, 19 nt, Artificial Sequence
  Description of Artificial Sequence: Synthetic oligonucleotide
  Antisense strand to SEQ ID NO: 2503164
auauacaugcucaguuaau

SEQ ID NO: 2503166 - RNA, 19 nt, Artificial Sequence
  Description of Artificial Sequence: Synthetic oligonucleotide
  Sense strand starting at position 3724 of SEQ ID NO: 1887998
acauaucaguccucaguaa

SEQ ID NO: 2503167 - RNA, 19 nt, Artificial Sequence
  Description of Artificial Sequence: Synthetic oligonucleotide
  Antisense strand to SEQ ID NO: 2503166
uuacugaggacugauaugu

SEQ ID NO: 2503168 - RNA, 19 nt, Artificial Sequence
  Description of Artificial Sequence: Synthetic oligonucleotide
  Sense strand starting at position 3728 of SEQ ID NO: 1887998
aucaguccucaguaaaugu

SEQ ID NO: 2503169 - RNA, 19 nt, Artificial Sequence
  Description of Artificial Sequence: Synthetic oligonucleotide
  Antisense strand to SEQ ID NO: 2503168
acauuuacugaggacugau

SEQ ID NO: 2503170 - RNA, 19 nt, Artificial Sequence
  Description of Artificial Sequence: Synthetic oligonucleotide
  Sense strand starting at position 3739 of SEQ ID NO: 1887998
guaaaugucaguuacuguu

SEQ ID NO: 2503171 - RNA, 19 nt, Artificial Sequence
  Description of Artificial Sequence: Synthetic oligonucleotide
  Antisense strand to SEQ ID NO: 2503170
aacaguaacugacauuuac

SEQ ID NO: 2503172 - RNA, 19 nt, Artificial Sequence
  Description of Artificial Sequence: Synthetic oligonucleotide
  Sense strand starting at position 3835 of SEQ ID NO: 1887998
aaagcucaggcauaauguu

SEQ ID NO: 2503173 - RNA, 19 nt, Artificial Sequence
  Description of Artificial Sequence: Synthetic oligonucleotide
  Antisense strand to SEQ ID NO: 2503172
aacauuaugccugagcuuu

SEQ ID NO: 2503174 - RNA, 19 nt, Artificial Sequence
  Description of Artificial Sequence: Synthetic oligonucleotide
  Sense strand starting at position 3841 of SEQ ID NO: 1887998
caggcauaauguuugauga

SEQ ID NO: 2503175 - RNA, 19 nt, Artificial Sequence
  Description of Artificial Sequence: Synthetic oligonucleotide
  Antisense strand to SEQ ID NO: 2503174
ucaucaaacauuaugccug

SEQ ID NO: 2503176 - RNA, 19 nt, Artificial Sequence
  Description of Artificial Sequence: Synthetic oligonucleotide
  Sense strand starting at position 3849 of SEQ ID NO: 1887998
auguuugaugacugauguu

SEQ ID NO: 2503177 - RNA, 19 nt, Artificial Sequence
  Description of Artificial Sequence: Synthetic oligonucleotide
  Antisense strand to SEQ ID NO: 2503176
aacaucagucaucaaacau

SEQ ID NO: 2503178 - RNA, 19 nt, Artificial Sequence
  Description of Artificial Sequence: Synthetic oligonucleotide
  Sense strand starting at position 3904 of SEQ ID NO: 1887998
cgcaaauaacccuguacaa

SEQ ID NO: 2503179 - RNA, 19 nt, Artificial Sequence
  Description of Artificial Sequence: Synthetic oligonucleotide
  Antisense strand to SEQ ID NO: 2503178
uuguacaggguuauuugcg

SEQ ID NO: 2503180 - RNA, 19 nt, Artificial Sequence
  Description of Artificial Sequence: Synthetic oligonucleotide
  Sense strand starting at position 3931 of SEQ ID NO: 1887998
ggagauugccucuauccac

SEQ ID NO: 2503181 - RNA, 19 nt, Artificial Sequence
  Description of Artificial Sequence: Synthetic oligonucleotide
  Antisense strand to SEQ ID NO: 2503180
guggauagaggcaaucucc

SEQ ID NO: 2503182 - RNA, 19 nt, Artificial Sequence
  Description of Artificial Sequence: Synthetic oligonucleotide
  Sense strand starting at position 3969 of SEQ ID NO: 1887998
ugaggugaucuuggcauca

SEQ ID NO: 2503183 - RNA, 19 nt, Artificial Sequence
  Description of Artificial Sequence: Synthetic oligonucleotide
  Antisense strand to SEQ ID NO: 2503182
ugaugccaagaucaccuca

SEQ ID NO: 2503184 - RNA, 19 nt, Artificial Sequence
  Description of Artificial Sequence: Synthetic oligonucleotide
  Sense strand starting at position 657 of SEQ ID NO: 1887999
ccaagaguuuccuuauugg

SEQ ID NO: 2503185 - RNA, 19 nt, Artificial Sequence
  Description of Artificial Sequence: Synthetic oligonucleotide
  Antisense strand to SEQ ID NO: 2503184
ccaauaaggaaacucuugg

SEQ ID NO: 2503186 - RNA, 19 nt, Artificial Sequence
  Description of Artificial Sequence: Synthetic oligonucleotide
  Sense strand starting at position 714 of SEQ ID NO: 1887999
gcuacccagucauuaagaa

SEQ ID NO: 2503187 - RNA, 19 nt, Artificial Sequence
  Description of Artificial Sequence: Synthetic oligonucleotide
  Antisense strand to SEQ ID NO: 2503186
uucuuaaugacuggguagc

SEQ ID NO: 2503188 - RNA, 19 nt, Artificial Sequence
  Description of Artificial Sequence: Synthetic oligonucleotide
  Sense strand starting at position 722 of SEQ ID NO: 1887999
gucauuaagaaaugugagu

SEQ ID NO: 2503189 - RNA, 19 nt, Artificial Sequence
  Description of Artificial Sequence: Synthetic oligonucleotide
  Antisense strand to SEQ ID NO: 2503188
acucacauuucuuaaugac

SEQ ID NO: 2503190 - RNA, 19 nt, Artificial Sequence
  Description of Artificial Sequence: Synthetic oligonucleotide
  Sense strand starting at position 727 of SEQ ID NO: 1887999
uaagaaaugugaguguuga

SEQ ID NO: 2503191 - RNA, 19 nt, Artificial Sequence
  Description of Artificial Sequence: Synthetic oligonucleotide
  Antisense strand to SEQ ID NO: 2503190
ucaacacucacauuucuua

SEQ ID NO: 2503192 - RNA, 19 nt, Artificial Sequence
  Description of Artificial Sequence: Synthetic oligonucleotide
  Sense strand starting at position 728 of SEQ ID NO: 1887999
aagaaaugugaguguugag

SEQ ID NO: 2503193 - RNA, 19 nt, Artificial Sequence
  Description of Artificial Sequence: Synthetic oligonucleotide
  Antisense strand to SEQ ID NO: 2503192
cucaacacucacauuucuu

SEQ ID NO: 2503194 - RNA, 19 nt, Artificial Sequence
  Description of Artificial Sequence: Synthetic oligonucleotide
  Sense strand starting at position 733 of SEQ ID NO: 1887999
augugaguguugagaagga

SEQ ID NO: 2503195 - RNA, 19 nt, Artificial Sequence
  Description of Artificial Sequence: Synthetic oligonucleotide
  Antisense strand to SEQ ID NO: 2503194
uccuucucaacacucacau

SEQ ID NO: 2503196 - RNA, 19 nt, Artificial Sequence
  Description of Artificial Sequence: Synthetic oligonucleotide
  Sense strand starting at position 992 of SEQ ID NO: 1887999
cagucuucgguccaaaggu

SEQ ID NO: 2503197 - RNA, 19 nt, Artificial Sequence
  Description of Artificial Sequence: Synthetic oligonucleotide
  Antisense strand to SEQ ID NO: 2503196
accuuuggaccgaagacug

SEQ ID NO: 2503198 - RNA, 19 nt, Artificial Sequence
  Description of Artificial Sequence: Synthetic oligonucleotide
  Sense strand starting at position 1002 of SEQ ID NO: 1887999
uccaaagguucuccgaaca

SEQ ID NO: 2503199 - RNA, 19 nt, Artificial Sequence
  Description of Artificial Sequence: Synthetic oligonucleotide
  Antisense strand to SEQ ID NO: 2503198
uguucggagaaccuuugga

SEQ ID NO: 2503200 - RNA, 19 nt, Artificial Sequence
  Description of Artificial Sequence: Synthetic oligonucleotide
  Sense strand starting at position 1096 of SEQ ID NO: 1887999
ggaaacaguuucuuugaca

SEQ ID NO: 2503201 - RNA, 19 nt, Artificial Sequence
  Description of Artificial Sequence: Synthetic oligonucleotide
  Antisense strand to SEQ ID NO: 2503200
ugucaaagaaacuguuucc

SEQ ID NO: 2503202 - RNA, 19 nt, Artificial Sequence
  Description of Artificial Sequence: Synthetic oligonucleotide
  Sense strand starting at position 1291 of SEQ ID NO: 1887999
gaauuagaagugggcucaa

SEQ ID NO: 2503203 - RNA, 19 nt, Artificial Sequence
  Description of Artificial Sequence: Synthetic oligonucleotide
  Antisense strand to SEQ ID NO: 2503202
uugagcccacuucuaauuc

SEQ ID NO: 2503204 - RNA, 19 nt, Artificial Sequence
  Description of Artificial Sequence: Synthetic oligonucleotide
  Sense strand starting at position 1409 of SEQ ID NO: 1887999
gucuucuuucuggaagagu

SEQ ID NO: 2503205 - RNA, 19 nt, Artificial Sequence
  Description of Artificial Sequence: Synthetic oligonucleotide
  Antisense strand to SEQ ID NO: 2503204
acucuuccagaaagaagac

SEQ ID NO: 2503206 - RNA, 19 nt, Artificial Sequence
  Description of Artificial Sequence: Synthetic oligonucleotide
  Sense strand starting at position 2086 of SEQ ID NO: 1887999
cuggugaucgcgccuggua

SEQ ID NO: 2503207 - RNA, 19 nt, Artificial Sequence
  Description of Artificial Sequence: Synthetic oligonucleotide
  Antisense strand to SEQ ID NO: 2503206
uaccaggcgcgaucaccag

SEQ ID NO: 2503208 - RNA, 19 nt, Artificial Sequence
  Description of Artificial Sequence: Synthetic oligonucleotide
  Sense strand starting at position 2335 of SEQ ID NO: 1887999
uugcucuucugauuugauu

SEQ ID NO: 2503209 - RNA, 19 nt, Artificial Sequence
  Description of Artificial Sequence: Synthetic oligonucleotide
  Antisense strand to SEQ ID NO: 2503208
aaucaaaucagaagagcaa

SEQ ID NO: 2503210 - RNA, 19 nt, Artificial Sequence
  Description of Artificial Sequence: Synthetic oligonucleotide
  Sense strand starting at position 2361 of SEQ ID NO: 1887999
ggaaucaaauuggaauuga

SEQ ID NO: 2503211 - RNA, 19 nt, Artificial Sequence
  Description of Artificial Sequence: Synthetic oligonucleotide
  Antisense strand to SEQ ID NO: 2503210
ucaauuccaauuugauucc

SEQ ID NO: 2503212 - RNA, 19 nt, Artificial Sequence
  Description of Artificial Sequence: Synthetic oligonucleotide
  Sense strand starting at position 2370 of SEQ ID NO: 1887999
uuggaauugacccggaauu

SEQ ID NO: 2503213 - RNA, 19 nt, Artificial Sequence
  Description of Artificial Sequence: Synthetic oligonucleotide
  Antisense strand to SEQ ID NO: 2503212
aauuccgggucaauuccaa

SEQ ID NO: 2503214 - RNA, 19 nt, Artificial Sequence
  Description of Artificial Sequence: Synthetic oligonucleotide
  Sense strand starting at position 2678 of SEQ ID NO: 1887999
uguggagagugucccaauu

SEQ ID NO: 2503215 - RNA, 19 nt, Artificial Sequence
  Description of Artificial Sequence: Synthetic oligonucleotide
  Antisense strand to SEQ ID NO: 2503214
aauugggacacucuccaca

SEQ ID NO: 2503216 - RNA, 19 nt, Artificial Sequence
  Description of Artificial Sequence: Synthetic oligonucleotide
  Sense strand starting at position 2747 of SEQ ID NO: 1887999
cuacaaacuguguaucagu

SEQ ID NO: 2503217 - RNA, 19 nt, Artificial Sequence
  Description of Artificial Sequence: Synthetic oligonucleotide
  Antisense strand to SEQ ID NO: 2503216
acugauacacaguuuguag

SEQ ID NO: 2503218 - RNA, 19 nt, Artificial Sequence
  Description of Artificial Sequence: Synthetic oligonucleotide
  Sense strand starting at position 2754 of SEQ ID NO: 1887999
cuguguaucagucaggaca

SEQ ID NO: 2503219 - RNA, 19 nt, Artificial Sequence
  Description of Artificial Sequence: Synthetic oligonucleotide
  Antisense strand to SEQ ID NO: 2503218
uguccugacugauacacag

SEQ ID NO: 2503220 - RNA, 19 nt, Artificial Sequence
  Description of Artificial Sequence: Synthetic oligonucleotide
  Sense strand starting at position 2757 of SEQ ID NO: 1887999
uguaucagucaggacauca

SEQ ID NO: 2503221 - RNA, 19 nt, Artificial Sequence
  Description of Artificial Sequence: Synthetic oligonucleotide
  Antisense strand to SEQ ID NO: 2503220
ugauguccugacugauaca

SEQ ID NO: 2503222 - RNA, 19 nt, Artificial Sequence
  Description of Artificial Sequence: Synthetic oligonucleotide
  Sense strand starting at position 2790 of SEQ ID NO: 1887999
aggacuagaguuugguaau

SEQ ID NO: 2503223 - RNA, 19 nt, Artificial Sequence
  Description of Artificial Sequence: Synthetic oligonucleotide
  Antisense strand to SEQ ID NO: 2503222
auuaccaaacucuaguccu

SEQ ID NO: 2503224 - RNA, 19 nt, Artificial Sequence
  Description of Artificial Sequence: Synthetic oligonucleotide
  Sense strand starting at position 2796 of SEQ ID NO: 1887999
agaguuugguaaucaacua

SEQ ID NO: 2503225 - RNA, 19 nt, Artificial Sequence
  Description of Artificial Sequence: Synthetic oligonucleotide
  Antisense strand to SEQ ID NO: 2503224
uaguugauuaccaaacucu

SEQ ID NO: 2503226 - RNA, 19 nt, Artificial Sequence
  Description of Artificial Sequence: Synthetic oligonucleotide
  Sense strand starting at position 2873 of SEQ ID NO: 1887999
aagaaaugcugacugaguu

SEQ ID NO: 2503227 - RNA, 19 nt, Artificial Sequence
  Description of Artificial Sequence: Synthetic oligonucleotide
  Antisense strand to SEQ ID NO: 2503226
aacucagucagcauuucuu

SEQ ID NO: 2503228 - RNA, 19 nt, Artificial Sequence
  Description of Artificial Sequence: Synthetic oligonucleotide
  Sense strand starting at position 2902 of SEQ ID NO: 1887999
guuggacacuuucuuagaa

SEQ ID NO: 2503229 - RNA, 19 nt, Artificial Sequence
  Description of Artificial Sequence: Synthetic oligonucleotide
  Antisense strand to SEQ ID NO: 2503228
uucuaagaaaguguccaac

SEQ ID NO: 2503230 - RNA, 19 nt, Artificial Sequence
  Description of Artificial Sequence: Synthetic oligonucleotide
  Sense strand starting at position 2910 of SEQ ID NO: 1887999
cuuucuuagaagugggaca

SEQ ID NO: 2503231 - RNA, 19 nt, Artificial Sequence
  Description of Artificial Sequence: Synthetic oligonucleotide
  Antisense strand to SEQ ID NO: 2503230
ugucccacuucuaagaaag

SEQ ID NO: 2503232 - RNA, 19 nt, Artificial Sequence
  Description of Artificial Sequence: Synthetic oligonucleotide
  Sense strand starting at position 2968 of SEQ ID NO: 1887999
uuauguucuaguugaagag

SEQ ID NO: 2503233 - RNA, 19 nt, Artificial Sequence
  Description of Artificial Sequence: Synthetic oligonucleotide
  Antisense strand to SEQ ID NO: 2503232
cucuucaacuagaacauaa

SEQ ID NO: 2503234 - RNA, 19 nt, Artificial Sequence
  Description of Artificial Sequence: Synthetic oligonucleotide
  Sense strand starting at position 3135 of SEQ ID NO: 1887999
caaucaugagacugcaugu

SEQ ID NO: 2503235 - RNA, 19 nt, Artificial Sequence
  Description of Artificial Sequence: Synthetic oligonucleotide
  Antisense strand to SEQ ID NO: 2503234
acaugcagucucaugauug

SEQ ID NO: 2503236 - RNA, 19 nt, Artificial Sequence
  Description of Artificial Sequence: Synthetic oligonucleotide
  Sense strand starting at position 3157 of SEQ ID NO: 1887999
ccaguuucugcugcuguaa

SEQ ID NO: 2503237 - RNA, 19 nt, Artificial Sequence
  Description of Artificial Sequence: Synthetic oligonucleotide
  Antisense strand to SEQ ID NO: 2503236
uuacagcagcagaaacugg

SEQ ID NO: 2503238 - RNA, 19 nt, Artificial Sequence
  Description of Artificial Sequence: Synthetic oligonucleotide
  Sense strand starting at position 3188 of SEQ ID NO: 1887999
agguuacaucuuuacuauu

SEQ ID NO: 2503239 - RNA, 19 nt, Artificial Sequence
  Description of Artificial Sequence: Synthetic oligonucleotide
  Antisense strand to SEQ ID NO: 2503238
aauaguaaagauguaaccu

SEQ ID NO: 2503240 - RNA, 19 nt, Artificial Sequence
  Description of Artificial Sequence: Synthetic oligonucleotide
  Sense strand starting at position 3738 of SEQ ID NO: 1887999
auguaaauauggucaugca

SEQ ID NO: 2503241 - RNA, 19 nt, Artificial Sequence
  Description of Artificial Sequence: Synthetic oligonucleotide
  Antisense strand to SEQ ID NO: 2503240
ugcaugaccauauuuacau

SEQ ID NO: 2503242 - RNA, 19 nt, Artificial Sequence
  Description of Artificial Sequence: Synthetic oligonucleotide
  Sense strand starting at position 3739 of SEQ ID NO: 1887999
uguaaauauggucaugcau

SEQ ID NO: 2503243 - RNA, 19 nt, Artificial Sequence
  Description of Artificial Sequence: Synthetic oligonucleotide
  Antisense strand to SEQ ID NO: 2503242
augcaugaccauauuuaca

SEQ ID NO: 2503244 - RNA, 19 nt, Artificial Sequence
  Description of Artificial Sequence: Synthetic oligonucleotide
  Sense strand starting at position 3760 of SEQ ID NO: 1887999
uguaauucuguggauacuu

SEQ ID NO: 2503245 - RNA, 19 nt, Artificial Sequence
  Description of Artificial Sequence: Synthetic oligonucleotide
  Antisense strand to SEQ ID NO: 2503244
aaguauccacagaauuaca

SEQ ID NO: 2503246 - RNA, 19 nt, Artificial Sequence
  Description of Artificial Sequence: Synthetic oligonucleotide
  Sense strand starting at position 3768 of SEQ ID NO: 1887999
uguggauacuuucugagua

SEQ ID NO: 2503247 - RNA, 19 nt, Artificial Sequence
  Description of Artificial Sequence: Synthetic oligonucleotide
  Antisense strand to SEQ ID NO: 2503246
uacucagaaaguauccaca

SEQ ID NO: 2503248 - RNA, 19 nt, Artificial Sequence
  Description of Artificial Sequence: Synthetic oligonucleotide
  Sense strand starting at position 3772 of SEQ ID NO: 1887999
gauacuuucugaguaaugc

SEQ ID NO: 2503249 - RNA, 19 nt, Artificial Sequence
  Description of Artificial Sequence: Synthetic oligonucleotide
  Antisense strand to SEQ ID NO: 2503248
gcauuacucagaaaguauc

SEQ ID NO: 2503250 - RNA, 19 nt, Artificial Sequence
  Description of Artificial Sequence: Synthetic oligonucleotide
  Sense strand starting at position 3773 of SEQ ID NO: 1887999
auacuuucugaguaaugca

SEQ ID NO: 2503251 - RNA, 19 nt, Artificial Sequence
  Description of Artificial Sequence: Synthetic oligonucleotide
  Antisense strand to SEQ ID NO: 2503250
ugcauuacucagaaaguau

SEQ ID NO: 2503252 - RNA, 19 nt, Artificial Sequence
  Description of Artificial Sequence: Synthetic oligonucleotide
  Sense strand starting at position 3778 of SEQ ID NO: 1887999
uucugaguaaugcaugguu

SEQ ID NO: 2503253 - RNA, 19 nt, Artificial Sequence
  Description of Artificial Sequence: Synthetic oligonucleotide
  Antisense strand to SEQ ID NO: 2503252
aaccaugcauuacucagaa

SEQ ID NO: 2503254 - RNA, 19 nt, Artificial Sequence
  Description of Artificial Sequence: Synthetic oligonucleotide
  Sense strand starting at position 3780 of SEQ ID NO: 1887999
cugaguaaugcaugguuag

SEQ ID NO: 2503255 - RNA, 19 nt, Artificial Sequence
  Description of Artificial Sequence: Synthetic oligonucleotide
  Antisense strand to SEQ ID NO: 2503254
cuaaccaugcauuacucag

SEQ ID NO: 2503256 - RNA, 19 nt, Artificial Sequence
  Description of Artificial Sequence: Synthetic oligonucleotide
  Sense strand starting at position 3848 of SEQ ID NO: 1887999
gaugauguagccugauggu

SEQ ID NO: 2503257 - RNA, 19 nt, Artificial Sequence
  Description of Artificial Sequence: Synthetic oligonucleotide
  Antisense strand to SEQ ID NO: 2503256
accaucaggcuacaucauc

SEQ ID NO: 2503258 - RNA, 19 nt, Artificial Sequence
  Description of Artificial Sequence: Synthetic oligonucleotide
  Sense strand starting at position 3875 of SEQ ID NO: 1887999
ucacuucgaggcuacaaau

SEQ ID NO: 2503259 - RNA, 19 nt, Artificial Sequence
  Description of Artificial Sequence: Synthetic oligonucleotide
  Antisense strand to SEQ ID NO: 2503258
auuuguagccucgaaguga

SEQ ID NO: 2503260 - RNA, 19 nt, Artificial Sequence
  Description of Artificial Sequence: Synthetic oligonucleotide
  Sense strand starting at position 3893 of SEQ ID NO: 1887999
uccaaauugccuggauacu

SEQ ID NO: 2503261 - RNA, 19 nt, Artificial Sequence
  Description of Artificial Sequence: Synthetic oligonucleotide
  Antisense strand to SEQ ID NO: 2503260
aguauccaggcaauuugga

SEQ ID NO: 2503262 - RNA, 19 nt, Artificial Sequence
  Description of Artificial Sequence: Synthetic oligonucleotide
  Sense strand starting at position 3925 of SEQ ID NO: 1887999
cucaaugguauuuguguau

SEQ ID NO: 2503263 - RNA, 19 nt, Artificial Sequence
  Description of Artificial Sequence: Synthetic oligonucleotide
  Antisense strand to SEQ ID NO: 2503262
auacacaaauaccauugag

SEQ ID NO: 2503264 - RNA, 19 nt, Artificial Sequence
  Description of Artificial Sequence: Synthetic oligonucleotide
  Sense strand starting at position 289 of SEQ ID NO: 1888000
uaugaagacucggauuaaa

SEQ ID NO: 2503265 - RNA, 19 nt, Artificial Sequence
  Description of Artificial Sequence: Synthetic oligonucleotide
  Antisense strand to SEQ ID NO: 2503264
uuuaauccgagucuucaua

SEQ ID NO: 2503266 - RNA, 19 nt, Artificial Sequence
  Description of Artificial Sequence: Synthetic oligonucleotide
  Sense strand starting at position 780 of SEQ ID NO: 1888000
auagaaguguauugaccaa

SEQ ID NO: 2503267 - RNA, 19 nt, Artificial Sequence
  Description of Artificial Sequence: Synthetic oligonucleotide
  Antisense strand to SEQ ID NO: 2503266
uuggucaauacacuucuau

SEQ ID NO: 2503268 - RNA, 19 nt, Artificial Sequence
  Description of Artificial Sequence: Synthetic oligonucleotide
  Sense strand starting at position 827 of SEQ ID NO: 1888000
ugccuaguaccagaacuaa

SEQ ID NO: 2503269 - RNA, 19 nt, Artificial Sequence
  Description of Artificial Sequence: Synthetic oligonucleotide
  Antisense strand to SEQ ID NO: 2503268
uuaguucugguacuaggca

SEQ ID NO: 2503270 - RNA, 19 nt, Artificial Sequence
  Description of Artificial Sequence: Synthetic oligonucleotide
  Sense strand starting at position 965 of SEQ ID NO: 1888000
auaccugaacggugcuaau

SEQ ID NO: 2503271 - RNA, 19 nt, Artificial Sequence
  Description of Artificial Sequence: Synthetic oligonucleotide
  Antisense strand to SEQ ID NO: 2503270
auuagcaccguucagguau

SEQ ID NO: 2503272 - RNA, 19 nt, Artificial Sequence
  Description of Artificial Sequence: Synthetic oligonucleotide
  Sense strand starting at position 982 of SEQ ID NO: 1888000
auagccaacuuguuguaau

SEQ ID NO: 2503273 - RNA, 19 nt, Artificial Sequence
  Description of Artificial Sequence: Synthetic oligonucleotide
  Antisense strand to SEQ ID NO: 2503272
auuacaacaaguuggcuau

SEQ ID NO: 2503274 - RNA, 19 nt, Artificial Sequence
  Description of Artificial Sequence: Synthetic oligonucleotide
  Sense strand starting at position 1062 of SEQ ID NO: 1888000
uuagcaagcuuguuuauau

SEQ ID NO: 2503275 - RNA, 19 nt, Artificial Sequence
  Description of Artificial Sequence: Synthetic oligonucleotide
  Antisense strand to SEQ ID NO: 2503274
auauaaacaagcuugcuaa

SEQ ID NO: 2503276 - RNA, 19 nt, Artificial Sequence
  Description of Artificial Sequence: Synthetic oligonucleotide
  Sense strand starting at position 1156 of SEQ ID NO: 1888000
gccagaaauuaaugucaaa

SEQ ID NO: 2503277 - RNA, 19 nt, Artificial Sequence
  Description of Artificial Sequence: Synthetic oligonucleotide
  Antisense strand to SEQ ID NO: 2503276
uuugacauuaauuucuggc

SEQ ID NO: 2503278 - RNA, 19 nt, Artificial Sequence
  Description of Artificial Sequence: Synthetic oligonucleotide
  Sense strand starting at position 1326 of SEQ ID NO: 1888000
acauaucaaugguuuaagu

SEQ ID NO: 2503279 - RNA, 19 nt, Artificial Sequence
  Description of Artificial Sequence: Synthetic oligonucleotide
  Antisense strand to SEQ ID NO: 2503278
acuuaaaccauugauaugu

SEQ ID NO: 2503280 - RNA, 19 nt, Artificial Sequence
  Description of Artificial Sequence: Synthetic oligonucleotide
  Sense strand starting at position 1335 of SEQ ID NO: 1888000
ugguuuaaguucccacuua

SEQ ID NO: 2503281 - RNA, 19 nt, Artificial Sequence
  Description of Artificial Sequence: Synthetic oligonucleotide
  Antisense strand to SEQ ID NO: 2503280
uaagugggaacuuaaacca

SEQ ID NO: 2503282 - RNA, 19 nt, Artificial Sequence
  Description of Artificial Sequence: Synthetic oligonucleotide
  Sense strand starting at position 1377 of SEQ ID NO: 1888000
aggaauuaagcuuagagcu

SEQ ID NO: 2503283 - RNA, 19 nt, Artificial Sequence
  Description of Artificial Sequence: Synthetic oligonucleotide
  Antisense strand to SEQ ID NO: 2503282
agcucuaagcuuaauuccu

SEQ ID NO: 2503284 - RNA, 19 nt, Artificial Sequence
  Description of Artificial Sequence: Synthetic oligonucleotide
  Sense strand starting at position 1379 of SEQ ID NO: 1888000
gaauuaagcuuagagcuga

SEQ ID NO: 2503285 - RNA, 19 nt, Artificial Sequence
  Description of Artificial Sequence: Synthetic oligonucleotide
  Antisense strand to SEQ ID NO: 2503284
ucagcucuaagcuuaauuc

SEQ ID NO: 2503286 - RNA, 19 nt, Artificial Sequence
  Description of Artificial Sequence: Synthetic oligonucleotide
  Sense strand starting at position 1696 of SEQ ID NO: 1888000
gcgguaccuaccucgcaau

SEQ ID NO: 2503287 - RNA, 19 nt, Artificial Sequence
  Description of Artificial Sequence: Synthetic oligonucleotide
  Antisense strand to SEQ ID NO: 2503286
auugcgagguagguaccgc

SEQ ID NO: 2503288 - RNA, 19 nt, Artificial Sequence
  Description of Artificial Sequence: Synthetic oligonucleotide
  Sense strand starting at position 2138 of SEQ ID NO: 1888000
ggaagaaggcugcgugaga

SEQ ID NO: 2503289 - RNA, 19 nt, Artificial Sequence
  Description of Artificial Sequence: Synthetic oligonucleotide
  Antisense strand to SEQ ID NO: 2503288
ucucacgcagccuucuucc

SEQ ID NO: 2503290 - RNA, 19 nt, Artificial Sequence
  Description of Artificial Sequence: Synthetic oligonucleotide
  Sense strand starting at position 2264 of SEQ ID NO: 1888000
cgggacugcucucugauuu

SEQ ID NO: 2503291 - RNA, 19 nt, Artificial Sequence
  Description of Artificial Sequence: Synthetic oligonucleotide
  Antisense strand to SEQ ID NO: 2503290
aaaucagagagcagucccg

SEQ ID NO: 2503292 - RNA, 19 nt, Artificial Sequence
  Description of Artificial Sequence: Synthetic oligonucleotide
  Sense strand starting at position 2276 of SEQ ID NO: 1888000
cugauuugauucuagauug

SEQ ID NO: 2503293 - RNA, 19 nt, Artificial Sequence
  Description of Artificial Sequence: Synthetic oligonucleotide
  Antisense strand to SEQ ID NO: 2503292
caaucuagaaucaaaucag

SEQ ID NO: 2503294 - RNA, 19 nt, Artificial Sequence
  Description of Artificial Sequence: Synthetic oligonucleotide
  Sense strand starting at position 2332 of SEQ ID NO: 1888000
gauccaaucuggugaggag

SEQ ID NO: 2503295 - RNA, 19 nt, Artificial Sequence
  Description of Artificial Sequence: Synthetic oligonucleotide
  Antisense strand to SEQ ID NO: 2503294
cuccucaccagauuggauc

SEQ ID NO: 2503296 - RNA, 19 nt, Artificial Sequence
  Description of Artificial Sequence: Synthetic oligonucleotide
  Sense strand starting at position 2333 of SEQ ID NO: 1888000
auccaaucuggugaggagu

SEQ ID NO: 2503297 - RNA, 19 nt, Artificial Sequence
  Description of Artificial Sequence: Synthetic oligonucleotide
  Antisense strand to SEQ ID NO: 2503296
acuccucaccagauuggau

SEQ ID NO: 2503298 - RNA, 19 nt, Artificial Sequence
  Description of Artificial Sequence: Synthetic oligonucleotide
  Sense strand starting at position 2503 of SEQ ID NO: 1888000
cagcauugcuguccagaaa

SEQ ID NO: 2503299 - RNA, 19 nt, Artificial Sequence
  Description of Artificial Sequence: Synthetic oligonucleotide
  Antisense strand to SEQ ID NO: 2503298
uuucuggacagcaaugcug

SEQ ID NO: 2503300 - RNA, 19 nt, Artificial Sequence
  Description of Artificial Sequence: Synthetic oligonucleotide
  Sense strand starting at position 2540 of SEQ ID NO: 1888000
agucaagcccgaugugaag

SEQ ID NO: 2503301 - RNA, 19 nt, Artificial Sequence
  Description of Artificial Sequence: Synthetic oligonucleotide
  Antisense strand to SEQ ID NO: 2503300
cuucacaucgggcuugacu

SEQ ID NO: 2503302 - RNA, 19 nt, Artificial Sequence
  Description of Artificial Sequence: Synthetic oligonucleotide
  Sense strand starting at position 2767 of SEQ ID NO: 1888000
agggauuccugccagagga

SEQ ID NO: 2503303 - RNA, 19 nt, Artificial Sequence
  Description of Artificial Sequence: Synthetic oligonucleotide
  Antisense strand to SEQ ID NO: 2503302
uccucuggcaggaaucccu

SEQ ID NO: 2503304 - RNA, 19 nt, Artificial Sequence
  Description of Artificial Sequence: Synthetic oligonucleotide
  Sense strand starting at position 2879 of SEQ ID NO: 1888000
ccgugaaaucccuggcaac

SEQ ID NO: 2503305 - RNA, 19 nt, Artificial Sequence
  Description of Artificial Sequence: Synthetic oligonucleotide
  Antisense strand to SEQ ID NO: 2503304
guugccagggauuucacgg

SEQ ID NO: 2503306 - RNA, 19 nt, Artificial Sequence
  Description of Artificial Sequence: Synthetic oligonucleotide
  Sense strand starting at position 2882 of SEQ ID NO: 1888000
ugaaaucccuggcaacgaa

SEQ ID NO: 2503307 - RNA, 19 nt, Artificial Sequence
  Description of Artificial Sequence: Synthetic oligonucleotide
  Antisense strand to SEQ ID NO: 2503306
uucguugccagggauuuca

SEQ ID NO: 2503308 - RNA, 19 nt, Artificial Sequence
  Description of Artificial Sequence: Synthetic oligonucleotide
  Sense strand starting at position 3079 of SEQ ID NO: 1888000
ccaagaguuuccuuauugg

SEQ ID NO: 2503309 - RNA, 19 nt, Artificial Sequence
  Description of Artificial Sequence: Synthetic oligonucleotide
  Antisense strand to SEQ ID NO: 2503308
ccaauaaggaaacucuugg

SEQ ID NO: 2503310 - RNA, 19 nt, Artificial Sequence
  Description of Artificial Sequence: Synthetic oligonucleotide
  Sense strand starting at position 3136 of SEQ ID NO: 1888000
gcuacccagucauuaagaa

SEQ ID NO: 2503311 - RNA, 19 nt, Artificial Sequence
  Description of Artificial Sequence: Synthetic oligonucleotide
  Antisense strand to SEQ ID NO: 2503310
uucuuaaugacuggguagc

SEQ ID NO: 2503312 - RNA, 19 nt, Artificial Sequence
  Description of Artificial Sequence: Synthetic oligonucleotide
  Sense strand starting at position 3140 of SEQ ID NO: 1888000
cccagucauuaagaaaugu

SEQ ID NO: 2503313 - RNA, 19 nt, Artificial Sequence
  Description of Artificial Sequence: Synthetic oligonucleotide
  Antisense strand to SEQ ID NO: 2503312
acauuucuuaaugacuggg

SEQ ID NO: 2503314 - RNA, 19 nt, Artificial Sequence
  Description of Artificial Sequence: Synthetic oligonucleotide
  Sense strand starting at position 3144 of SEQ ID NO: 1888000
gucauuaagaaaugugagu

SEQ ID NO: 2503315 - RNA, 19 nt, Artificial Sequence
  Description of Artificial Sequence: Synthetic oligonucleotide
  Antisense strand to SEQ ID NO: 2503314
acucacauuucuuaaugac

SEQ ID NO: 2503316 - RNA, 19 nt, Artificial Sequence
  Description of Artificial Sequence: Synthetic oligonucleotide
  Sense strand starting at position 3149 of SEQ ID NO: 1888000
uaagaaaugugaguguuga

SEQ ID NO: 2503317 - RNA, 19 nt, Artificial Sequence
  Description of Artificial Sequence: Synthetic oligonucleotide
  Antisense strand to SEQ ID NO: 2503316
ucaacacucacauuucuua

SEQ ID NO: 2503318 - RNA, 19 nt, Artificial Sequence
  Description of Artificial Sequence: Synthetic oligonucleotide
  Sense strand starting at position 3150 of SEQ ID NO: 1888000
aagaaaugugaguguugag

SEQ ID NO: 2503319 - RNA, 19 nt, Artificial Sequence
  Description of Artificial Sequence: Synthetic oligonucleotide
  Antisense strand to SEQ ID NO: 2503318
cucaacacucacauuucuu

SEQ ID NO: 2503320 - RNA, 19 nt, Artificial Sequence
  Description of Artificial Sequence: Synthetic oligonucleotide
  Sense strand starting at position 3155 of SEQ ID NO: 1888000
augugaguguugagaagga

SEQ ID NO: 2503321 - RNA, 19 nt, Artificial Sequence
  Description of Artificial Sequence: Synthetic oligonucleotide
  Antisense strand to SEQ ID NO: 2503320
uccuucucaacacucacau

SEQ ID NO: 2503322 - RNA, 19 nt, Artificial Sequence
  Description of Artificial Sequence: Synthetic oligonucleotide
  Sense strand starting at position 3220 of SEQ ID NO: 1888000
ggaaacauuugcugugaag

SEQ ID NO: 2503323 - RNA, 19 nt, Artificial Sequence
  Description of Artificial Sequence: Synthetic oligonucleotide
  Antisense strand to SEQ ID NO: 2503322
cuucacagcaaauguuucc

SEQ ID NO: 2503324 - RNA, 19 nt, Artificial Sequence
  Description of Artificial Sequence: Synthetic oligonucleotide
  Sense strand starting at position 3414 of SEQ ID NO: 1888000
cagucuucgguccaaaggu

SEQ ID NO: 2503325 - RNA, 19 nt, Artificial Sequence
  Description of Artificial Sequence: Synthetic oligonucleotide
  Antisense strand to SEQ ID NO: 2503324
accuuuggaccgaagacug

SEQ ID NO: 2503326 - RNA, 19 nt, Artificial Sequence
  Description of Artificial Sequence: Synthetic oligonucleotide
  Sense strand starting at position 3424 of SEQ ID NO: 1888000
uccaaagguucuccgaaca

SEQ ID NO: 2503327 - RNA, 19 nt, Artificial Sequence
  Description of Artificial Sequence: Synthetic oligonucleotide
  Antisense strand to SEQ ID NO: 2503326
uguucggagaaccuuugga

SEQ ID NO: 2503328 - RNA, 19 nt, Artificial Sequence
  Description of Artificial Sequence: Synthetic oligonucleotide
  Sense strand starting at position 3438 of SEQ ID NO: 1888000
gaacacucgugucuucuau

SEQ ID NO: 2503329 - RNA, 19 nt, Artificial Sequence
  Description of Artificial Sequence: Synthetic oligonucleotide
  Antisense strand to SEQ ID NO: 2503328
auagaagacacgaguguuc

SEQ ID NO: 2503330 - RNA, 19 nt, Artificial Sequence
  Description of Artificial Sequence: Synthetic oligonucleotide
  Sense strand starting at position 3448 of SEQ ID NO: 1888000
gucuucuaucgccagcaca

SEQ ID NO: 2503331 - RNA, 19 nt, Artificial Sequence
  Description of Artificial Sequence: Synthetic oligonucleotide
  Antisense strand to SEQ ID NO: 2503330
ugugcuggcgauagaagac

SEQ ID NO: 2503332 - RNA, 19 nt, Artificial Sequence
  Description of Artificial Sequence: Synthetic oligonucleotide
  Sense strand starting at position 3518 of SEQ ID NO: 1888000
ggaaacaguuucuuugaca

SEQ ID NO: 2503333 - RNA, 19 nt, Artificial Sequence
  Description of Artificial Sequence: Synthetic oligonucleotide
  Antisense strand to SEQ ID NO: 2503332
ugucaaagaaacuguuucc

SEQ ID NO: 2503334 - RNA, 19 nt, Artificial Sequence
  Description of Artificial Sequence: Synthetic oligonucleotide
  Sense strand starting at position 3544 of SEQ ID NO: 1888000
gcaccuguucugcagguga

SEQ ID NO: 2503335 - RNA, 19 nt, Artificial Sequence
  Description of Artificial Sequence: Synthetic oligonucleotide
  Antisense strand to SEQ ID NO: 2503334
ucaccugcagaacaggugc

SEQ ID NO: 2503336 - RNA, 19 nt, Artificial Sequence
  Description of Artificial Sequence: Synthetic oligonucleotide
  Sense strand starting at position 3713 of SEQ ID NO: 1888000
gaauuagaagugggcucaa

SEQ ID NO: 2503337 - RNA, 19 nt, Artificial Sequence
  Description of Artificial Sequence: Synthetic oligonucleotide
  Antisense strand to SEQ ID NO: 2503336
uugagcccacuucuaauuc

SEQ ID NO: 2503338 - RNA, 19 nt, Artificial Sequence
  Description of Artificial Sequence: Synthetic oligonucleotide
  Sense strand starting at position 3803 of SEQ ID NO: 1888000
ggaauuuguucuugguugu

SEQ ID NO: 2503339 - RNA, 19 nt, Artificial Sequence
  Description of Artificial Sequence: Synthetic oligonucleotide
  Antisense strand to SEQ ID NO: 2503338
acaaccaagaacaaauucc

SEQ ID NO: 2503340 - RNA, 19 nt, Artificial Sequence
  Description of Artificial Sequence: Synthetic oligonucleotide
  Sense strand starting at position 3831 of SEQ ID NO: 1888000
gucuucuuucuggaagagu

SEQ ID NO: 2503341 - RNA, 19 nt, Artificial Sequence
  Description of Artificial Sequence: Synthetic oligonucleotide
  Antisense strand to SEQ ID NO: 2503340
acucuuccagaaagaagac

SEQ ID NO: 2503342 - RNA, 19 nt, Artificial Sequence
  Description of Artificial Sequence: Synthetic oligonucleotide
  Sense strand starting at position 3865 of SEQ ID NO: 1888000
ggaggugauuuggacguuu

SEQ ID NO: 2503343 - RNA, 19 nt, Artificial Sequence
  Description of Artificial Sequence: Synthetic oligonucleotide
  Antisense strand to SEQ ID NO: 2503342
aaacguccaaaucaccucc

SEQ ID NO: 2503344 - RNA, 19 nt, Artificial Sequence
  Description of Artificial Sequence: Synthetic oligonucleotide
  Sense strand starting at position 101 of SEQ ID NO: 1888001
aagaauguguaccuuagga

SEQ ID NO: 2503345 - RNA, 19 nt, Artificial Sequence
  Description of Artificial Sequence: Synthetic oligonucleotide
  Antisense strand to SEQ ID NO: 2503344
uccuaagguacacauucuu

SEQ ID NO: 2503346 - RNA, 19 nt, Artificial Sequence
  Description of Artificial Sequence: Synthetic oligonucleotide
  Sense strand starting at position 103 of SEQ ID NO: 1888001
gaauguguaccuuaggauu

SEQ ID NO: 2503347 - RNA, 19 nt, Artificial Sequence
  Description of Artificial Sequence: Synthetic oligonucleotide
  Antisense strand to SEQ ID NO: 2503346
aauccuaagguacacauuc

SEQ ID NO: 2503348 - RNA, 19 nt, Artificial Sequence
  Description of Artificial Sequence: Synthetic oligonucleotide
  Sense strand starting at position 293 of SEQ ID NO: 1888001
cuuauaaauguauaggcaa

SEQ ID NO: 2503349 - RNA, 19 nt, Artificial Sequence
  Description of Artificial Sequence: Synthetic oligonucleotide
  Antisense strand to SEQ ID NO: 2503348
uugccuauacauuuauaag

SEQ ID NO: 2503350 - RNA, 19 nt, Artificial Sequence
  Description of Artificial Sequence: Synthetic oligonucleotide
  Sense strand starting at position 447 of SEQ ID NO: 1888001
ccucuccagcaauggauua

SEQ ID NO: 2503351 - RNA, 19 nt, Artificial Sequence
  Description of Artificial Sequence: Synthetic oligonucleotide
  Antisense strand to SEQ ID NO: 2503350
uaauccauugcuggagagg

SEQ ID NO: 2503352 - RNA, 19 nt, Artificial Sequence
  Description of Artificial Sequence: Synthetic oligonucleotide
  Sense strand starting at position 461 of SEQ ID NO: 1888001
gauuauggauuauuccgaa

SEQ ID NO: 2503353 - RNA, 19 nt, Artificial Sequence
  Description of Artificial Sequence: Synthetic oligonucleotide
  Antisense strand to SEQ ID NO: 2503352
uucggaauaauccauaauc

SEQ ID NO: 2503354 - RNA, 19 nt, Artificial Sequence
  Description of Artificial Sequence: Synthetic oligonucleotide
  Sense strand starting at position 574 of SEQ ID NO: 1888001
uauugacaaguaugguuua

SEQ ID NO: 2503355 - RNA, 19 nt, Artificial Sequence
  Description of Artificial Sequence: Synthetic oligonucleotide
  Antisense strand to SEQ ID NO: 2503354
uaaaccauacuugucaaua

SEQ ID NO: 2503356 - RNA, 19 nt, Artificial Sequence
  Description of Artificial Sequence: Synthetic oligonucleotide
  Sense strand starting at position 585 of SEQ ID NO: 1888001
augguuuauucccucagga

SEQ ID NO: 2503357 - RNA, 19 nt, Artificial Sequence
  Description of Artificial Sequence: Synthetic oligonucleotide
  Antisense strand to SEQ ID NO: 2503356
uccugagggaauaaaccau

SEQ ID NO: 2503358 - RNA, 19 nt, Artificial Sequence
  Description of Artificial Sequence: Synthetic oligonucleotide
  Sense strand starting at position 587 of SEQ ID NO: 1888001
gguuuauucccucaggaau

SEQ ID NO: 2503359 - RNA, 19 nt, Artificial Sequence
  Description of Artificial Sequence: Synthetic oligonucleotide
  Antisense strand to SEQ ID NO: 2503358
auuccugagggaauaaacc

SEQ ID NO: 2503360 - RNA, 19 nt, Artificial Sequence
  Description of Artificial Sequence: Synthetic oligonucleotide
  Sense strand starting at position 1130 of SEQ ID NO: 1888001
agucacgauuuacaacaaa

SEQ ID NO: 2503361 - RNA, 19 nt, Artificial Sequence
  Description of Artificial Sequence: Synthetic oligonucleotide
  Antisense strand to SEQ ID NO: 2503360
uuuguuguaaaucgugacu

SEQ ID NO: 2503362 - RNA, 19 nt, Artificial Sequence
  Description of Artificial Sequence: Synthetic oligonucleotide
  Sense strand starting at position 1180 of SEQ ID NO: 1888001
agaaauguccaagauacgu

SEQ ID NO: 2503363 - RNA, 19 nt, Artificial Sequence
  Description of Artificial Sequence: Synthetic oligonucleotide
  Antisense strand to SEQ ID NO: 2503362
acguaucuuggacauuucu

SEQ ID NO: 2503364 - RNA, 19 nt, Artificial Sequence
  Description of Artificial Sequence: Synthetic oligonucleotide
  Sense strand starting at position 1186 of SEQ ID NO: 1888001
guccaagauacguauggaa

SEQ ID NO: 2503365 - RNA, 19 nt, Artificial Sequence
  Description of Artificial Sequence: Synthetic oligonucleotide
  Antisense strand to SEQ ID NO: 2503364
uuccauacguaucuuggac

SEQ ID NO: 2503366 - RNA, 19 nt, Artificial Sequence
  Description of Artificial Sequence: Synthetic oligonucleotide
  Sense strand starting at position 1348 of SEQ ID NO: 1888001
ucucaaagagcauguaaua

SEQ ID NO: 2503367 - RNA, 19 nt, Artificial Sequence
  Description of Artificial Sequence: Synthetic oligonucleotide
  Antisense strand to SEQ ID NO: 2503366
uauuacaugcucuuugaga

SEQ ID NO: 2503368 - RNA, 19 nt, Artificial Sequence
  Description of Artificial Sequence: Synthetic oligonucleotide
  Sense strand starting at position 1357 of SEQ ID NO: 1888001
gcauguaauaugggaauac

SEQ ID NO: 2503369 - RNA, 19 nt, Artificial Sequence
  Description of Artificial Sequence: Synthetic oligonucleotide
  Antisense strand to SEQ ID NO: 2503368
guauucccauauuacaugc

SEQ ID NO: 2503370 - RNA, 19 nt, Artificial Sequence
  Description of Artificial Sequence: Synthetic oligonucleotide
  Sense strand starting at position 1375 of SEQ ID NO: 1888001
cgaaguugacaagauguua

SEQ ID NO: 2503371 - RNA, 19 nt, Artificial Sequence
  Description of Artificial Sequence: Synthetic oligonucleotide
  Antisense strand to SEQ ID NO: 2503370
uaacaucuugucaacuucg

SEQ ID NO: 2503372 - RNA, 19 nt, Artificial Sequence
  Description of Artificial Sequence: Synthetic oligonucleotide
  Sense strand starting at position 1600 of SEQ ID NO: 1888001
gcaugugauaagcaaugaa

SEQ ID NO: 2503373 - RNA, 19 nt, Artificial Sequence
  Description of Artificial Sequence: Synthetic oligonucleotide
  Antisense strand to SEQ ID NO: 2503372
uucauugcuuaucacaugc

SEQ ID NO: 2503374 - RNA, 19 nt, Artificial Sequence
  Description of Artificial Sequence: Synthetic oligonucleotide
  Sense strand starting at position 2044 of SEQ ID NO: 1888001
gcgucuuuccggagacacg

SEQ ID NO: 2503375 - RNA, 19 nt, Artificial Sequence
  Description of Artificial Sequence: Synthetic oligonucleotide
  Antisense strand to SEQ ID NO: 2503374
cgugucuccggaaagacgc

SEQ ID NO: 2503376 - RNA, 19 nt, Artificial Sequence
  Description of Artificial Sequence: Synthetic oligonucleotide
  Sense strand starting at position 2191 of SEQ ID NO: 1888001
guagguucugacgaugaaa

SEQ ID NO: 2503377 - RNA, 19 nt, Artificial Sequence
  Description of Artificial Sequence: Synthetic oligonucleotide
  Antisense strand to SEQ ID NO: 2503376
uuucaucgucagaaccuac

SEQ ID NO: 2503378 - RNA, 19 nt, Artificial Sequence
  Description of Artificial Sequence: Synthetic oligonucleotide
  Sense strand starting at position 2331 of SEQ ID NO: 1888001
cccugaucugucuacagga

SEQ ID NO: 2503379 - RNA, 19 nt, Artificial Sequence
  Description of Artificial Sequence: Synthetic oligonucleotide
  Antisense strand to SEQ ID NO: 2503378
uccuguagacagaucaggg

SEQ ID NO: 2503380 - RNA, 19 nt, Artificial Sequence
  Description of Artificial Sequence: Synthetic oligonucleotide
  Sense strand starting at position 2485 of SEQ ID NO: 1888001
ggaugcaucuggcuggaga

SEQ ID NO: 2503381 - RNA, 19 nt, Artificial Sequence
  Description of Artificial Sequence: Synthetic oligonucleotide
  Antisense strand to SEQ ID NO: 2503380
ucuccagccagaugcaucc

SEQ ID NO: 2503382 - RNA, 19 nt, Artificial Sequence
  Description of Artificial Sequence: Synthetic oligonucleotide
  Sense strand starting at position 2486 of SEQ ID NO: 1888001
gaugcaucuggcuggagaa

SEQ ID NO: 2503383 - RNA, 19 nt, Artificial Sequence
  Description of Artificial Sequence: Synthetic oligonucleotide
  Antisense strand to SEQ ID NO: 2503382
uucuccagccagaugcauc

SEQ ID NO: 2503384 - RNA, 19 nt, Artificial Sequence
  Description of Artificial Sequence: Synthetic oligonucleotide
  Sense strand starting at position 2487 of SEQ ID NO: 1888001
augcaucuggcuggagaaa

SEQ ID NO: 2503385 - RNA, 19 nt, Artificial Sequence
  Description of Artificial Sequence: Synthetic oligonucleotide
  Antisense strand to SEQ ID NO: 2503384
uuucuccagccagaugcau

SEQ ID NO: 2503386 - RNA, 19 nt, Artificial Sequence
  Description of Artificial Sequence: Synthetic oligonucleotide
  Sense strand starting at position 2502 of SEQ ID NO: 1888001
gaaagcagccuuugagaac

SEQ ID NO: 2503387 - RNA, 19 nt, Artificial Sequence
  Description of Artificial Sequence: Synthetic oligonucleotide
  Antisense strand to SEQ ID NO: 2503386
guucucaaaggcugcuuuc

SEQ ID NO: 2503388 - RNA, 19 nt, Artificial Sequence
  Description of Artificial Sequence: Synthetic oligonucleotide
  Sense strand starting at position 2599 of SEQ ID NO: 1888001
gcguguuaaagcuuugguu

SEQ ID NO: 2503389 - RNA, 19 nt, Artificial Sequence
  Description of Artificial Sequence: Synthetic oligonucleotide
  Antisense strand to SEQ ID NO: 2503388
aaccaaagcuuuaacacgc

SEQ ID NO: 2503390 - RNA, 19 nt, Artificial Sequence
  Description of Artificial Sequence: Synthetic oligonucleotide
  Sense strand starting at position 2613 of SEQ ID NO: 1888001
ugguuauaauuggugugga

SEQ ID NO: 2503391 - RNA, 19 nt, Artificial Sequence
  Description of Artificial Sequence: Synthetic oligonucleotide
  Antisense strand to SEQ ID NO: 2503390
uccacaccaauuauaacca

SEQ ID NO: 2503392 - RNA, 19 nt, Artificial Sequence
  Description of Artificial Sequence: Synthetic oligonucleotide
  Sense strand starting at position 2616 of SEQ ID NO: 1888001
uuauaauugguguggagaa

SEQ ID NO: 2503393 - RNA, 19 nt, Artificial Sequence
  Description of Artificial Sequence: Synthetic oligonucleotide
  Antisense strand to SEQ ID NO: 2503392
uucuccacaccaauuauaa

SEQ ID NO: 2503394 - RNA, 19 nt, Artificial Sequence
  Description of Artificial Sequence: Synthetic oligonucleotide
  Sense strand starting at position 2743 of SEQ ID NO: 1888001
gugggagcaacuugaaauc

SEQ ID NO: 2503395 - RNA, 19 nt, Artificial Sequence
  Description of Artificial Sequence: Synthetic oligonucleotide
  Antisense strand to SEQ ID NO: 2503394
gauuucaaguugcucccac

SEQ ID NO: 2503396 - RNA, 19 nt, Artificial Sequence
  Description of Artificial Sequence: Synthetic oligonucleotide
  Sense strand starting at position 2899 of SEQ ID NO: 1888001
ucauuuauccagcgaaugu

SEQ ID NO: 2503397 - RNA, 19 nt, Artificial Sequence
  Description of Artificial Sequence: Synthetic oligonucleotide
  Antisense strand to SEQ ID NO: 2503396
acauucgcuggauaaauga

SEQ ID NO: 2503398 - RNA, 19 nt, Artificial Sequence
  Description of Artificial Sequence: Synthetic oligonucleotide
  Sense strand starting at position 2906 of SEQ ID NO: 1888001
uccagcgaauguuuauaaa

SEQ ID NO: 2503399 - RNA, 19 nt, Artificial Sequence
  Description of Artificial Sequence: Synthetic oligonucleotide
  Antisense strand to SEQ ID NO: 2503398
uuuauaaacauucgcugga

SEQ ID NO: 2503400 - RNA, 19 nt, Artificial Sequence
  Description of Artificial Sequence: Synthetic oligonucleotide
  Sense strand starting at position 3019 of SEQ ID NO: 1888001
uggcaauuucaguguguga

SEQ ID NO: 2503401 - RNA, 19 nt, Artificial Sequence
  Description of Artificial Sequence: Synthetic oligonucleotide
  Antisense strand to SEQ ID NO: 2503400
ucacacacugaaauugcca

SEQ ID NO: 2503402 - RNA, 19 nt, Artificial Sequence
  Description of Artificial Sequence: Synthetic oligonucleotide
  Sense strand starting at position 3028 of SEQ ID NO: 1888001
cagugugugagcuaaauug

SEQ ID NO: 2503403 - RNA, 19 nt, Artificial Sequence
  Description of Artificial Sequence: Synthetic oligonucleotide
  Antisense strand to SEQ ID NO: 2503402
caauuuagcucacacacug

SEQ ID NO: 2503404 - RNA, 19 nt, Artificial Sequence
  Description of Artificial Sequence: Synthetic oligonucleotide
  Sense strand starting at position 3166 of SEQ ID NO: 1888001
uggaguuuggaaugcuaga

SEQ ID NO: 2503405 - RNA, 19 nt, Artificial Sequence
  Description of Artificial Sequence: Synthetic oligonucleotide
  Antisense strand to SEQ ID NO: 2503404
ucuagcauuccaaacucca

SEQ ID NO: 2503406 - RNA, 19 nt, Artificial Sequence
  Description of Artificial Sequence: Synthetic oligonucleotide
  Sense strand starting at position 3221 of SEQ ID NO: 1888001
ucaaauauguauuccagua

SEQ ID NO: 2503407 - RNA, 19 nt, Artificial Sequence
  Description of Artificial Sequence: Synthetic oligonucleotide
  Antisense strand to SEQ ID NO: 2503406
uacuggaauacauauuuga

SEQ ID NO: 2503408 - RNA, 19 nt, Artificial Sequence
  Description of Artificial Sequence: Synthetic oligonucleotide
  Sense strand starting at position 3328 of SEQ ID NO: 1888001
gugauauaauguccuugaa

SEQ ID NO: 2503409 - RNA, 19 nt, Artificial Sequence
  Description of Artificial Sequence: Synthetic oligonucleotide
  Antisense strand to SEQ ID NO: 2503408
uucaaggacauuauaucac

SEQ ID NO: 2503410 - RNA, 19 nt, Artificial Sequence
  Description of Artificial Sequence: Synthetic oligonucleotide
  Sense strand starting at position 3330 of SEQ ID NO: 1888001
gauauaauguccuugaagu

SEQ ID NO: 2503411 - RNA, 19 nt, Artificial Sequence
  Description of Artificial Sequence: Synthetic oligonucleotide
  Antisense strand to SEQ ID NO: 2503410
acuucaaggacauuauauc

SEQ ID NO: 2503412 - RNA, 19 nt, Artificial Sequence
  Description of Artificial Sequence: Synthetic oligonucleotide
  Sense strand starting at position 3331 of SEQ ID NO: 1888001
auauaauguccuugaaguu

SEQ ID NO: 2503413 - RNA, 19 nt, Artificial Sequence
  Description of Artificial Sequence: Synthetic oligonucleotide
  Antisense strand to SEQ ID NO: 2503412
aacuucaaggacauuauau

SEQ ID NO: 2503414 - RNA, 19 nt, Artificial Sequence
  Description of Artificial Sequence: Synthetic oligonucleotide
  Sense strand starting at position 3337 of SEQ ID NO: 1888001
uguccuugaaguuagaaug

SEQ ID NO: 2503415 - RNA, 19 nt, Artificial Sequence
  Description of Artificial Sequence: Synthetic oligonucleotide
  Antisense strand to SEQ ID NO: 2503414
cauucuaacuucaaggaca

SEQ ID NO: 2503416 - RNA, 19 nt, Artificial Sequence
  Description of Artificial Sequence: Synthetic oligonucleotide
  Sense strand starting at position 3413 of SEQ ID NO: 1888001
cugacugacugccuuaaca

SEQ ID NO: 2503417 - RNA, 19 nt, Artificial Sequence
  Description of Artificial Sequence: Synthetic oligonucleotide
  Antisense strand to SEQ ID NO: 2503416
uguuaaggcagucagucag

SEQ ID NO: 2503418 - RNA, 19 nt, Artificial Sequence
  Description of Artificial Sequence: Synthetic oligonucleotide
  Sense strand starting at position 3525 of SEQ ID NO: 1888001
aguccauuuccugguuuau

SEQ ID NO: 2503419 - RNA, 19 nt, Artificial Sequence
  Description of Artificial Sequence: Synthetic oligonucleotide
  Antisense strand to SEQ ID NO: 2503418
auaaaccaggaaauggacu

SEQ ID NO: 2503420 - RNA, 19 nt, Artificial Sequence
  Description of Artificial Sequence: Synthetic oligonucleotide
  Sense strand starting at position 3720 of SEQ ID NO: 1888001
cauguaaauuuggagagga

SEQ ID NO: 2503421 - RNA, 19 nt, Artificial Sequence
  Description of Artificial Sequence: Synthetic oligonucleotide
  Antisense strand to SEQ ID NO: 2503420
uccucuccaaauuuacaug

SEQ ID NO: 2503422 - RNA, 19 nt, Artificial Sequence
  Description of Artificial Sequence: Synthetic oligonucleotide
  Sense strand starting at position 3785 of SEQ ID NO: 1888001
ggaaucaaaugacaaggau

SEQ ID NO: 2503423 - RNA, 19 nt, Artificial Sequence
  Description of Artificial Sequence: Synthetic oligonucleotide
  Antisense strand to SEQ ID NO: 2503422
auccuugucauuugauucc

SEQ ID NO: 2503424 - RNA, 19 nt, Artificial Sequence
  Description of Artificial Sequence: Synthetic oligonucleotide
  Sense strand starting at position 44 of SEQ ID NO: 1888002
gaauguguacugggaagug

SEQ ID NO: 2503425 - RNA, 19 nt, Artificial Sequence
  Description of Artificial Sequence: Synthetic oligonucleotide
  Antisense strand to SEQ ID NO: 2503424
cacuucccaguacacauuc

SEQ ID NO: 2503426 - RNA, 19 nt, Artificial Sequence
  Description of Artificial Sequence: Synthetic oligonucleotide
  Sense strand starting at position 53 of SEQ ID NO: 1888002
cugggaaguggcugacaaa

SEQ ID NO: 2503427 - RNA, 19 nt, Artificial Sequence
  Description of Artificial Sequence: Synthetic oligonucleotide
  Antisense strand to SEQ ID NO: 2503426
uuugucagccacuucccag

SEQ ID NO: 2503428 - RNA, 19 nt, Artificial Sequence
  Description of Artificial Sequence: Synthetic oligonucleotide
  Sense strand starting at position 245 of SEQ ID NO: 1888002
aguauaaugguguaugacu

SEQ ID NO: 2503429 - RNA, 19 nt, Artificial Sequence
  Description of Artificial Sequence: Synthetic oligonucleotide
  Antisense strand to SEQ ID NO: 2503428
agucauacaccauuauacu

SEQ ID NO: 2503430 - RNA, 19 nt, Artificial Sequence
  Description of Artificial Sequence: Synthetic oligonucleotide
  Sense strand starting at position 314 of SEQ ID NO: 1888002
uucucuuuggcagauuaau

SEQ ID NO: 2503431 - RNA, 19 nt, Artificial Sequence
  Description of Artificial Sequence: Synthetic oligonucleotide
  Antisense strand to SEQ ID NO: 2503430
auuaaucugccaaagagaa

SEQ ID NO: 2503432 - RNA, 19 nt, Artificial Sequence
  Description of Artificial Sequence: Synthetic oligonucleotide
  Sense strand starting at position 359 of SEQ ID NO: 1888002
gaagaaaguuagccugaga

SEQ ID NO: 2503433 - RNA, 19 nt, Artificial Sequence
  Description of Artificial Sequence: Synthetic oligonucleotide
  Antisense strand to SEQ ID NO: 2503432
ucucaggcuaacuuucuuc

SEQ ID NO: 2503434 - RNA, 19 nt, Artificial Sequence
  Description of Artificial Sequence: Synthetic oligonucleotide
  Sense strand starting at position 462 of SEQ ID NO: 1888002
aacacagugggauguuaaa

SEQ ID NO: 2503435 - RNA, 19 nt, Artificial Sequence
  Description of Artificial Sequence: Synthetic oligonucleotide
  Antisense strand to SEQ ID NO: 2503434
uuuaacaucccacuguguu

SEQ ID NO: 2503436 - RNA, 19 nt, Artificial Sequence
  Description of Artificial Sequence: Synthetic oligonucleotide
  Sense strand starting at position 468 of SEQ ID NO: 1888002
gugggauguuaaagggaaa

SEQ ID NO: 2503437 - RNA, 19 nt, Artificial Sequence
  Description of Artificial Sequence: Synthetic oligonucleotide
  Antisense strand to SEQ ID NO: 2503436
uuucccuuuaacaucccac

SEQ ID NO: 2503438 - RNA, 19 nt, Artificial Sequence
  Description of Artificial Sequence: Synthetic oligonucleotide
  Sense strand starting at position 740 of SEQ ID NO: 1888002
auuugacccucaggacaaa

SEQ ID NO: 2503439 - RNA, 19 nt, Artificial Sequence
  Description of Artificial Sequence: Synthetic oligonucleotide
  Antisense strand to SEQ ID NO: 2503438
uuuguccugagggucaaau

SEQ ID NO: 2503440 - RNA, 19 nt, Artificial Sequence
  Description of Artificial Sequence: Synthetic oligonucleotide
  Sense strand starting at position 819 of SEQ ID NO: 1888002
ccgagauaggcacgaagaa

SEQ ID NO: 2503441 - RNA, 19 nt, Artificial Sequence
  Description of Artificial Sequence: Synthetic oligonucleotide
  Antisense strand to SEQ ID NO: 2503440
uucuucgugccuaucucgg

SEQ ID NO: 2503442 - RNA, 19 nt, Artificial Sequence
  Description of Artificial Sequence: Synthetic oligonucleotide
  Sense strand starting at position 839 of SEQ ID NO: 1888002
cuaauaaauggcugaaaug

SEQ ID NO: 2503443 - RNA, 19 nt, Artificial Sequence
  Description of Artificial Sequence: Synthetic oligonucleotide
  Antisense strand to SEQ ID NO: 2503442
cauuucagccauuuauuag

SEQ ID NO: 2503444 - RNA, 19 nt, Artificial Sequence
  Description of Artificial Sequence: Synthetic oligonucleotide
  Sense strand starting at position 942 of SEQ ID NO: 1888002
ucuccugaagaauguguaa

SEQ ID NO: 2503445 - RNA, 19 nt, Artificial Sequence
  Description of Artificial Sequence: Synthetic oligonucleotide
  Antisense strand to SEQ ID NO: 2503444
uuacacauucuucaggaga

SEQ ID NO: 2503446 - RNA, 19 nt, Artificial Sequence
  Description of Artificial Sequence: Synthetic oligonucleotide
  Sense strand starting at position 944 of SEQ ID NO: 1888002
uccugaagaauguguaaag

SEQ ID NO: 2503447 - RNA, 19 nt, Artificial Sequence
  Description of Artificial Sequence: Synthetic oligonucleotide
  Antisense strand to SEQ ID NO: 2503446
cuuuacacauucuucagga

SEQ ID NO: 2503448 - RNA, 19 nt, Artificial Sequence
  Description of Artificial Sequence: Synthetic oligonucleotide
  Sense strand starting at position 945 of SEQ ID NO: 1888002
ccugaagaauguguaaaga

SEQ ID NO: 2503449 - RNA, 19 nt, Artificial Sequence
  Description of Artificial Sequence: Synthetic oligonucleotide
  Antisense strand to SEQ ID NO: 2503448
ucuuuacacauucuucagg

SEQ ID NO: 2503450 - RNA, 19 nt, Artificial Sequence
  Description of Artificial Sequence: Synthetic oligonucleotide
  Sense strand starting at position 1174 of SEQ ID NO: 1888002
uccagucuuagagaugguu

SEQ ID NO: 2503451 - RNA, 19 nt, Artificial Sequence
  Description of Artificial Sequence: Synthetic oligonucleotide
  Antisense strand to SEQ ID NO: 2503450
aaccaucucuaagacugga

SEQ ID NO: 2503452 - RNA, 19 nt, Artificial Sequence
  Description of Artificial Sequence: Synthetic oligonucleotide
  Sense strand starting at position 1177 of SEQ ID NO: 1888002
agucuuagagaugguuaag

SEQ ID NO: 2503453 - RNA, 19 nt, Artificial Sequence
  Description of Artificial Sequence: Synthetic oligonucleotide
  Antisense strand to SEQ ID NO: 2503452
cuuaaccaucucuaagacu

SEQ ID NO: 2503454 - RNA, 19 nt, Artificial Sequence
  Description of Artificial Sequence: Synthetic oligonucleotide
  Sense strand starting at position 1224 of SEQ ID NO: 1888002
cauagagcucaccagguuu

SEQ ID NO: 2503455 - RNA, 19 nt, Artificial Sequence
  Description of Artificial Sequence: Synthetic oligonucleotide
  Antisense strand to SEQ ID NO: 2503454
aaaccuggugagcucuaug

SEQ ID NO: 2503456 - RNA, 19 nt, Artificial Sequence
  Description of Artificial Sequence: Synthetic oligonucleotide
  Sense strand starting at position 1992 of SEQ ID NO: 1888002
ccggcucacccugaaacau

SEQ ID NO: 2503457 - RNA, 19 nt, Artificial Sequence
  Description of Artificial Sequence: Synthetic oligonucleotide
  Antisense strand to SEQ ID NO: 2503456
auguuucagggugagccgg

SEQ ID NO: 2503458 - RNA, 19 nt, Artificial Sequence
  Description of Artificial Sequence: Synthetic oligonucleotide
  Sense strand starting at position 2010 of SEQ ID NO: 1888002
ucgcgagauccggcuucaa

SEQ ID NO: 2503459 - RNA, 19 nt, Artificial Sequence
  Description of Artificial Sequence: Synthetic oligonucleotide
  Antisense strand to SEQ ID NO: 2503458
uugaagccggaucucgcga

SEQ ID NO: 2503460 - RNA, 19 nt, Artificial Sequence
  Description of Artificial Sequence: Synthetic oligonucleotide
  Sense strand starting at position 2054 of SEQ ID NO: 1888002
aagacuauguuucccggaa

SEQ ID NO: 2503461 - RNA, 19 nt, Artificial Sequence
  Description of Artificial Sequence: Synthetic oligonucleotide
  Antisense strand to SEQ ID NO: 2503460
uuccgggaaacauagucuu

SEQ ID NO: 2503462 - RNA, 19 nt, Artificial Sequence
  Description of Artificial Sequence: Synthetic oligonucleotide
  Sense strand starting at position 2055 of SEQ ID NO: 1888002
agacuauguuucccggaag

SEQ ID NO: 2503463 - RNA, 19 nt, Artificial Sequence
  Description of Artificial Sequence: Synthetic oligonucleotide
  Antisense strand to SEQ ID NO: 2503462
cuuccgggaaacauagucu

SEQ ID NO: 2503464 - RNA, 19 nt, Artificial Sequence
  Description of Artificial Sequence: Synthetic oligonucleotide
  Sense strand starting at position 2058 of SEQ ID NO: 1888002
cuauguuucccggaagaca

SEQ ID NO: 2503465 - RNA, 19 nt, Artificial Sequence
  Description of Artificial Sequence: Synthetic oligonucleotide
  Antisense strand to SEQ ID NO: 2503464
ugucuuccgggaaacauag

SEQ ID NO: 2503466 - RNA, 19 nt, Artificial Sequence
  Description of Artificial Sequence: Synthetic oligonucleotide
  Sense strand starting at position 2300 of SEQ ID NO: 1888002
gggucucaggccugagaag

SEQ ID NO: 2503467 - RNA, 19 nt, Artificial Sequence
  Description of Artificial Sequence: Synthetic oligonucleotide
  Antisense strand to SEQ ID NO: 2503466
cuucucaggccugagaccc

SEQ ID NO: 2503468 - RNA, 19 nt, Artificial Sequence
  Description of Artificial Sequence: Synthetic oligonucleotide
  Sense strand starting at position 2301 of SEQ ID NO: 1888002
ggucucaggccugagaaga

SEQ ID NO: 2503469 - RNA, 19 nt, Artificial Sequence
  Description of Artificial Sequence: Synthetic oligonucleotide
  Antisense strand to SEQ ID NO: 2503468
ucuucucaggccugagacc

SEQ ID NO: 2503470 - RNA, 19 nt, Artificial Sequence
  Description of Artificial Sequence: Synthetic oligonucleotide
  Sense strand starting at position 2483 of SEQ ID NO: 1888002
ccugaaauugcggauguuu

SEQ ID NO: 2503471 - RNA, 19 nt, Artificial Sequence
  Description of Artificial Sequence: Synthetic oligonucleotide
  Antisense strand to SEQ ID NO: 2503470
aaacauccgcaauuucagg

SEQ ID NO: 2503472 - RNA, 19 nt, Artificial Sequence
  Description of Artificial Sequence: Synthetic oligonucleotide
  Sense strand starting at position 2562 of SEQ ID NO: 1888002
gagguucucagagaguuac

SEQ ID NO: 2503473 - RNA, 19 nt, Artificial Sequence
  Description of Artificial Sequence: Synthetic oligonucleotide
  Antisense strand to SEQ ID NO: 2503472
guaacucucugagaaccuc

SEQ ID NO: 2503474 - RNA, 19 nt, Artificial Sequence
  Description of Artificial Sequence: Synthetic oligonucleotide
  Sense strand starting at position 2689 of SEQ ID NO: 1888002
aggccauccuuuguaaaua

SEQ ID NO: 2503475 - RNA, 19 nt, Artificial Sequence
  Description of Artificial Sequence: Synthetic oligonucleotide
  Antisense strand to SEQ ID NO: 2503474
uauuuacaaaggauggccu

SEQ ID NO: 2503476 - RNA, 19 nt, Artificial Sequence
  Description of Artificial Sequence: Synthetic oligonucleotide
  Sense strand starting at position 2706 of SEQ ID NO: 1888002
uaggauaucgugcaguuaa

SEQ ID NO: 2503477 - RNA, 19 nt, Artificial Sequence
  Description of Artificial Sequence: Synthetic oligonucleotide
  Antisense strand to SEQ ID NO: 2503476
uuaacugcacgauauccua

SEQ ID NO: 2503478 - RNA, 19 nt, Artificial Sequence
  Description of Artificial Sequence: Synthetic oligonucleotide
  Sense strand starting at position 2806 of SEQ ID NO: 1888002
acuuacacguuacuuagaa

SEQ ID NO: 2503479 - RNA, 19 nt, Artificial Sequence
  Description of Artificial Sequence: Synthetic oligonucleotide
  Antisense strand to SEQ ID NO: 2503478
uucuaaguaacguguaagu

SEQ ID NO: 2503480 - RNA, 19 nt, Artificial Sequence
  Description of Artificial Sequence: Synthetic oligonucleotide
  Sense strand starting at position 2821 of SEQ ID NO: 1888002
agaaccaaauguuuguaau

SEQ ID NO: 2503481 - RNA, 19 nt, Artificial Sequence
  Description of Artificial Sequence: Synthetic oligonucleotide
  Antisense strand to SEQ ID NO: 2503480
auuacaaacauuugguucu

SEQ ID NO: 2503482 - RNA, 19 nt, Artificial Sequence
  Description of Artificial Sequence: Synthetic oligonucleotide
  Sense strand starting at position 2822 of SEQ ID NO: 1888002
gaaccaaauguuuguaaug

SEQ ID NO: 2503483 - RNA, 19 nt, Artificial Sequence
  Description of Artificial Sequence: Synthetic oligonucleotide
  Antisense strand to SEQ ID NO: 2503482
cauuacaaacauuugguuc

SEQ ID NO: 2503484 - RNA, 19 nt, Artificial Sequence
  Description of Artificial Sequence: Synthetic oligonucleotide
  Sense strand starting at position 3002 of SEQ ID NO: 1888002
ugcugaauguucucaaagg

SEQ ID NO: 2503485 - RNA, 19 nt, Artificial Sequence
  Description of Artificial Sequence: Synthetic oligonucleotide
  Antisense strand to SEQ ID NO: 2503484
ccuuugagaacauucagca

SEQ ID NO: 2503486 - RNA, 19 nt, Artificial Sequence
  Description of Artificial Sequence: Synthetic oligonucleotide
  Sense strand starting at position 3264 of SEQ ID NO: 1888002
guguguaauuugucucuua

SEQ ID NO: 2503487 - RNA, 19 nt, Artificial Sequence
  Description of Artificial Sequence: Synthetic oligonucleotide
  Antisense strand to SEQ ID NO: 2503486
uaagagacaaauuacacac

SEQ ID NO: 2503488 - RNA, 19 nt, Artificial Sequence
  Description of Artificial Sequence: Synthetic oligonucleotide
  Sense strand starting at position 3265 of SEQ ID NO: 1888002
uguguaauuugucucuuac

SEQ ID NO: 2503489 - RNA, 19 nt, Artificial Sequence
  Description of Artificial Sequence: Synthetic oligonucleotide
  Antisense strand to SEQ ID NO: 2503488
guaagagacaaauuacaca

SEQ ID NO: 2503490 - RNA, 19 nt, Artificial Sequence
  Description of Artificial Sequence: Synthetic oligonucleotide
  Sense strand starting at position 3267 of SEQ ID NO: 1888002
uguaauuugucucuuacug

SEQ ID NO: 2503491 - RNA, 19 nt, Artificial Sequence
  Description of Artificial Sequence: Synthetic oligonucleotide
  Antisense strand to SEQ ID NO: 2503490
caguaagagacaaauuaca

SEQ ID NO: 2503492 - RNA, 19 nt, Artificial Sequence
  Description of Artificial Sequence: Synthetic oligonucleotide
  Sense strand starting at position 3416 of SEQ ID NO: 1888002
agguguuauauuugcugca

SEQ ID NO: 2503493 - RNA, 19 nt, Artificial Sequence
  Description of Artificial Sequence: Synthetic oligonucleotide
  Antisense strand to SEQ ID NO: 2503492
ugcagcaaauauaacaccu

SEQ ID NO: 2503494 - RNA, 19 nt, Artificial Sequence
  Description of Artificial Sequence: Synthetic oligonucleotide
  Sense strand starting at position 3441 of SEQ ID NO: 1888002
aguuaaauggccuaguccu

SEQ ID NO: 2503495 - RNA, 19 nt, Artificial Sequence
  Description of Artificial Sequence: Synthetic oligonucleotide
  Antisense strand to SEQ ID NO: 2503494
aggacuaggccauuuaacu

SEQ ID NO: 2503496 - RNA, 19 nt, Artificial Sequence
  Description of Artificial Sequence: Synthetic oligonucleotide
  Sense strand starting at position 3458 of SEQ ID NO: 1888002
cuggaaaggcuuuauucua

SEQ ID NO: 2503497 - RNA, 19 nt, Artificial Sequence
  Description of Artificial Sequence: Synthetic oligonucleotide
  Antisense strand to SEQ ID NO: 2503496
uagaauaaagccuuuccag

SEQ ID NO: 2503498 - RNA, 19 nt, Artificial Sequence
  Description of Artificial Sequence: Synthetic oligonucleotide
  Sense strand starting at position 3533 of SEQ ID NO: 1888002
cuccuuguccuugagguaa

SEQ ID NO: 2503499 - RNA, 19 nt, Artificial Sequence
  Description of Artificial Sequence: Synthetic oligonucleotide
  Antisense strand to SEQ ID NO: 2503498
uuaccucaaggacaaggag

SEQ ID NO: 2503500 - RNA, 19 nt, Artificial Sequence
  Description of Artificial Sequence: Synthetic oligonucleotide
  Sense strand starting at position 3555 of SEQ ID NO: 1888002
gugggucucagucacuaga

SEQ ID NO: 2503501 - RNA, 19 nt, Artificial Sequence
  Description of Artificial Sequence: Synthetic oligonucleotide
  Antisense strand to SEQ ID NO: 2503500
ucuagugacugagacccac

SEQ ID NO: 2503502 - RNA, 19 nt, Artificial Sequence
  Description of Artificial Sequence: Synthetic oligonucleotide
  Sense strand starting at position 3558 of SEQ ID NO: 1888002
ggucucagucacuagaaca

SEQ ID NO: 2503503 - RNA, 19 nt, Artificial Sequence
  Description of Artificial Sequence: Synthetic oligonucleotide
  Antisense strand to SEQ ID NO: 2503502
uguucuagugacugagacc

SEQ ID NO: 2503504 - RNA, 19 nt, Artificial Sequence
  Description of Artificial Sequence: Synthetic oligonucleotide
  Sense strand starting at position 305 of SEQ ID NO: 1888003
cauaaauggcagugauaua

SEQ ID NO: 2503505 - RNA, 19 nt, Artificial Sequence
  Description of Artificial Sequence: Synthetic oligonucleotide
  Antisense strand to SEQ ID NO: 2503504
uauaucacugccauuuaug

SEQ ID NO: 2503506 - RNA, 19 nt, Artificial Sequence
  Description of Artificial Sequence: Synthetic oligonucleotide
  Sense strand starting at position 315 of SEQ ID NO: 1888003
agugauauaaugcagugau

SEQ ID NO: 2503507 - RNA, 19 nt, Artificial Sequence
  Description of Artificial Sequence: Synthetic oligonucleotide
  Antisense strand to SEQ ID NO: 2503506
aucacugcauuauaucacu

SEQ ID NO: 2503508 - RNA, 19 nt, Artificial Sequence
  Description of Artificial Sequence: Synthetic oligonucleotide
  Sense strand starting at position 469 of SEQ ID NO: 1888003
aguauacauguguauaaca

SEQ ID NO: 2503509 - RNA, 19 nt, Artificial Sequence
  Description of Artificial Sequence: Synthetic oligonucleotide
  Antisense strand to SEQ ID NO: 2503508
uguuauacacauguauacu

SEQ ID NO: 2503510 - RNA, 19 nt, Artificial Sequence
  Description of Artificial Sequence: Synthetic oligonucleotide
  Sense strand starting at position 508 of SEQ ID NO: 1888003
ucuuauuacacgugagagg

SEQ ID NO: 2503511 - RNA, 19 nt, Artificial Sequence
  Description of Artificial Sequence: Synthetic oligonucleotide
  Antisense strand to SEQ ID NO: 2503510
ccucucacguguaauaaga

SEQ ID NO: 2503512 - RNA, 19 nt, Artificial Sequence
  Description of Artificial Sequence: Synthetic oligonucleotide
  Sense strand starting at position 808 of SEQ ID NO: 1888003
uugguauaagcuugaauug

SEQ ID NO: 2503513 - RNA, 19 nt, Artificial Sequence
  Description of Artificial Sequence: Synthetic oligonucleotide
  Antisense strand to SEQ ID NO: 2503512
caauucaagcuuauaccaa

SEQ ID NO: 2503514 - RNA, 19 nt, Artificial Sequence
  Description of Artificial Sequence: Synthetic oligonucleotide
  Sense strand starting at position 809 of SEQ ID NO: 1888003
ugguauaagcuugaauugu

SEQ ID NO: 2503515 - RNA, 19 nt, Artificial Sequence
  Description of Artificial Sequence: Synthetic oligonucleotide
  Antisense strand to SEQ ID NO: 2503514
acaauucaagcuuauacca

SEQ ID NO: 2503516 - RNA, 19 nt, Artificial Sequence
  Description of Artificial Sequence: Synthetic oligonucleotide
  Sense strand starting at position 1247 of SEQ ID NO: 1888003
uccagaguugaguacuuua

SEQ ID NO: 2503517 - RNA, 19 nt, Artificial Sequence
  Description of Artificial Sequence: Synthetic oligonucleotide
  Antisense strand to SEQ ID NO: 2503516
uaaaguacucaacucugga

SEQ ID NO: 2503518 - RNA, 19 nt, Artificial Sequence
  Description of Artificial Sequence: Synthetic oligonucleotide
  Sense strand starting at position 1250 of SEQ ID NO: 1888003
agaguugaguacuuuaccu

SEQ ID NO: 2503519 - RNA, 19 nt, Artificial Sequence
  Description of Artificial Sequence: Synthetic oligonucleotide
  Antisense strand to SEQ ID NO: 2503518
agguaaaguacucaacucu

SEQ ID NO: 2503520 - RNA, 19 nt, Artificial Sequence
  Description of Artificial Sequence: Synthetic oligonucleotide
  Sense strand starting at position 1271 of SEQ ID NO: 1888003
cucuguaauuaagcagaca

SEQ ID NO: 2503521 - RNA, 19 nt, Artificial Sequence
  Description of Artificial Sequence: Synthetic oligonucleotide
  Antisense strand to SEQ ID NO: 2503520
ugucugcuuaauuacagag

SEQ ID NO: 2503522 - RNA, 19 nt, Artificial Sequence
  Description of Artificial Sequence: Synthetic oligonucleotide
  Sense strand starting at position 1625 of SEQ ID NO: 1888003
ugauuacaguccucaccga

SEQ ID NO: 2503523 - RNA, 19 nt, Artificial Sequence
  Description of Artificial Sequence: Synthetic oligonucleotide
  Antisense strand to SEQ ID NO: 2503522
ucggugaggacuguaauca

SEQ ID NO: 2503524 - RNA, 19 nt, Artificial Sequence
  Description of Artificial Sequence: Synthetic oligonucleotide
  Sense strand starting at position 1626 of SEQ ID NO: 1888003
gauuacaguccucaccgau

SEQ ID NO: 2503525 - RNA, 19 nt, Artificial Sequence
  Description of Artificial Sequence: Synthetic oligonucleotide
  Antisense strand to SEQ ID NO: 2503524
aucggugaggacuguaauc

SEQ ID NO: 2503526 - RNA, 19 nt, Artificial Sequence
  Description of Artificial Sequence: Synthetic oligonucleotide
  Sense strand starting at position 1743 of SEQ ID NO: 1888003
ugagaaauccgucacaauc

SEQ ID NO: 2503527 - RNA, 19 nt, Artificial Sequence
  Description of Artificial Sequence: Synthetic oligonucleotide
  Antisense strand to SEQ ID NO: 2503526
gauugugacggauuucuca

SEQ ID NO: 2503528 - RNA, 19 nt, Artificial Sequence
  Description of Artificial Sequence: Synthetic oligonucleotide
  Sense strand starting at position 1861 of SEQ ID NO: 1888003
cccaaucgugaucaaccaa

SEQ ID NO: 2503529 - RNA, 19 nt, Artificial Sequence
  Description of Artificial Sequence: Synthetic oligonucleotide
  Antisense strand to SEQ ID NO: 2503528
uugguugaucacgauuggg

SEQ ID NO: 2503530 - RNA, 19 nt, Artificial Sequence
  Description of Artificial Sequence: Synthetic oligonucleotide
  Sense strand starting at position 1894 of SEQ ID NO: 1888003
uuuaucgguauuggaauau

SEQ ID NO: 2503531 - RNA, 19 nt, Artificial Sequence
  Description of Artificial Sequence: Synthetic oligonucleotide
  Antisense strand to SEQ ID NO: 2503530
auauuccaauaccgauaaa

SEQ ID NO: 2503532 - RNA, 19 nt, Artificial Sequence
  Description of Artificial Sequence: Synthetic oligonucleotide
  Sense strand starting at position 2012 of SEQ ID NO: 1888003
gcaugcucugaauaaacuu

SEQ ID NO: 2503533 - RNA, 19 nt, Artificial Sequence
  Description of Artificial Sequence: Synthetic oligonucleotide
  Antisense strand to SEQ ID NO: 2503532
aaguuuauucagagcaugc

SEQ ID NO: 2503534 - RNA, 19 nt, Artificial Sequence
  Description of Artificial Sequence: Synthetic oligonucleotide
  Sense strand starting at position 2038 of SEQ ID NO: 1888003
aguuuccucgaacagucaa

SEQ ID NO: 2503535 - RNA, 19 nt, Artificial Sequence
  Description of Artificial Sequence: Synthetic oligonucleotide
  Antisense strand to SEQ ID NO: 2503534
uugacuguucgaggaaacu

SEQ ID NO: 2503536 - RNA, 19 nt, Artificial Sequence
  Description of Artificial Sequence: Synthetic oligonucleotide
  Sense strand starting at position 2162 of SEQ ID NO: 1888003
auauccauuccguagagca

SEQ ID NO: 2503537 - RNA, 19 nt, Artificial Sequence
  Description of Artificial Sequence: Synthetic oligonucleotide
  Antisense strand to SEQ ID NO: 2503536
ugcucuacggaauggauau

SEQ ID NO: 2503538 - RNA, 19 nt, Artificial Sequence
  Description of Artificial Sequence: Synthetic oligonucleotide
  Sense strand starting at position 2518 of SEQ ID NO: 1888003
gagucaucucuugagugaa

SEQ ID NO: 2503539 - RNA, 19 nt, Artificial Sequence
  Description of Artificial Sequence: Synthetic oligonucleotide
  Antisense strand to SEQ ID NO: 2503538
uucacucaagagaugacuc

SEQ ID NO: 2503540 - RNA, 19 nt, Artificial Sequence
  Description of Artificial Sequence: Synthetic oligonucleotide
  Sense strand starting at position 2520 of SEQ ID NO: 1888003
gucaucucuugagugaaac

SEQ ID NO: 2503541 - RNA, 19 nt, Artificial Sequence
  Description of Artificial Sequence: Synthetic oligonucleotide
  Antisense strand to SEQ ID NO: 2503540
guuucacucaagagaugac

SEQ ID NO: 2503542 - RNA, 19 nt, Artificial Sequence
  Description of Artificial Sequence: Synthetic oligonucleotide
  Sense strand starting at position 2608 of SEQ ID NO: 1888003
gagaaaccgccuugggaaa

SEQ ID NO: 2503543 - RNA, 19 nt, Artificial Sequence
  Description of Artificial Sequence: Synthetic oligonucleotide
  Antisense strand to SEQ ID NO: 2503542
uuucccaaggcgguuucuc

SEQ ID NO: 2503544 - RNA, 19 nt, Artificial Sequence
  Description of Artificial Sequence: Synthetic oligonucleotide
  Sense strand starting at position 2628 of SEQ ID NO: 1888003
aggguagaaguccaauagu

SEQ ID NO: 2503545 - RNA, 19 nt, Artificial Sequence
  Description of Artificial Sequence: Synthetic oligonucleotide
  Antisense strand to SEQ ID NO: 2503544
acuauuggacuucuacccu

SEQ ID NO: 2503546 - RNA, 19 nt, Artificial Sequence
  Description of Artificial Sequence: Synthetic oligonucleotide
  Sense strand starting at position 2631 of SEQ ID NO: 1888003
guagaaguccaauaguauu

SEQ ID NO: 2503547 - RNA, 19 nt, Artificial Sequence
  Description of Artificial Sequence: Synthetic oligonucleotide
  Antisense strand to SEQ ID NO: 2503546
aauacuauuggacuucuac

SEQ ID NO: 2503548 - RNA, 19 nt, Artificial Sequence
  Description of Artificial Sequence: Synthetic oligonucleotide
  Sense strand starting at position 2792 of SEQ ID NO: 1888003
uauaguaggcagcaauaau

SEQ ID NO: 2503549 - RNA, 19 nt, Artificial Sequence
  Description of Artificial Sequence: Synthetic oligonucleotide
  Antisense strand to SEQ ID NO: 2503548
auuauugcugccuacuaua

SEQ ID NO: 2503550 - RNA, 19 nt, Artificial Sequence
  Description of Artificial Sequence: Synthetic oligonucleotide
  Sense strand starting at position 2817 of SEQ ID NO: 1888003
acuaauagucuuuaguaug

SEQ ID NO: 2503551 - RNA, 19 nt, Artificial Sequence
  Description of Artificial Sequence: Synthetic oligonucleotide
  Antisense strand to SEQ ID NO: 2503550
cauacuaaagacuauuagu

SEQ ID NO: 2503552 - RNA, 19 nt, Artificial Sequence
  Description of Artificial Sequence: Synthetic oligonucleotide
  Sense strand starting at position 2915 of SEQ ID NO: 1888003
uuaccaugucaaugaagcu

SEQ ID NO: 2503553 - RNA, 19 nt, Artificial Sequence
  Description of Artificial Sequence: Synthetic oligonucleotide
  Antisense strand to SEQ ID NO: 2503552
agcuucauugacaugguaa

SEQ ID NO: 2503554 - RNA, 19 nt, Artificial Sequence
  Description of Artificial Sequence: Synthetic oligonucleotide
  Sense strand starting at position 3087 of SEQ ID NO: 1888003
ggaaguucuaccugaacag

SEQ ID NO: 2503555 - RNA, 19 nt, Artificial Sequence
  Description of Artificial Sequence: Synthetic oligonucleotide
  Antisense strand to SEQ ID NO: 2503554
cuguucagguagaacuucc

SEQ ID NO: 2503556 - RNA, 19 nt, Artificial Sequence
  Description of Artificial Sequence: Synthetic oligonucleotide
  Sense strand starting at position 3088 of SEQ ID NO: 1888003
gaaguucuaccugaacagu

SEQ ID NO: 2503557 - RNA, 19 nt, Artificial Sequence
  Description of Artificial Sequence: Synthetic oligonucleotide
  Antisense strand to SEQ ID NO: 2503556
acuguucagguagaacuuc

SEQ ID NO: 2503558 - RNA, 19 nt, Artificial Sequence
  Description of Artificial Sequence: Synthetic oligonucleotide
  Sense strand starting at position 3111 of SEQ ID NO: 1888003
ggaaauuacuacccaaugu

SEQ ID NO: 2503559 - RNA, 19 nt, Artificial Sequence
  Description of Artificial Sequence: Synthetic oligonucleotide
  Antisense strand to SEQ ID NO: 2503558
acauuggguaguaauuucc

SEQ ID NO: 2503560 - RNA, 19 nt, Artificial Sequence
  Description of Artificial Sequence: Synthetic oligonucleotide
  Sense strand starting at position 3254 of SEQ ID NO: 1888003
agaauuagacucugcugau

SEQ ID NO: 2503561 - RNA, 19 nt, Artificial Sequence
  Description of Artificial Sequence: Synthetic oligonucleotide
  Antisense strand to SEQ ID NO: 2503560
aucagcagagucuaauucu

SEQ ID NO: 2503562 - RNA, 19 nt, Artificial Sequence
  Description of Artificial Sequence: Synthetic oligonucleotide
  Sense strand starting at position 3357 of SEQ ID NO: 1888003
ggcuaagaauuacuguuga

SEQ ID NO: 2503563 - RNA, 19 nt, Artificial Sequence
  Description of Artificial Sequence: Synthetic oligonucleotide
  Antisense strand to SEQ ID NO: 2503562
ucaacaguaauucuuagcc

SEQ ID NO: 2503564 - RNA, 19 nt, Artificial Sequence
  Description of Artificial Sequence: Synthetic oligonucleotide
  Sense strand starting at position 3422 of SEQ ID NO: 1888003
uagggauucguguggaaau

SEQ ID NO: 2503565 - RNA, 19 nt, Artificial Sequence
  Description of Artificial Sequence: Synthetic oligonucleotide
  Antisense strand to SEQ ID NO: 2503564
auuuccacacgaaucccua

SEQ ID NO: 2503566 - RNA, 19 nt, Artificial Sequence
  Description of Artificial Sequence: Synthetic oligonucleotide
  Sense strand starting at position 3424 of SEQ ID NO: 1888003
gggauucguguggaaauau

SEQ ID NO: 2503567 - RNA, 19 nt, Artificial Sequence
  Description of Artificial Sequence: Synthetic oligonucleotide
  Antisense strand to SEQ ID NO: 2503566
auauuuccacacgaauccc

SEQ ID NO: 2503568 - RNA, 19 nt, Artificial Sequence
  Description of Artificial Sequence: Synthetic oligonucleotide
  Sense strand starting at position 3435 of SEQ ID NO: 1888003
ggaaauauuuaugggugga

SEQ ID NO: 2503569 - RNA, 19 nt, Artificial Sequence
  Description of Artificial Sequence: Synthetic oligonucleotide
  Antisense strand to SEQ ID NO: 2503568
uccacccauaaauauuucc

SEQ ID NO: 2503570 - RNA, 19 nt, Artificial Sequence
  Description of Artificial Sequence: Synthetic oligonucleotide
  Sense strand starting at position 3539 of SEQ ID NO: 1888003
aauguuaaagcagagugau

SEQ ID NO: 2503571 - RNA, 19 nt, Artificial Sequence
  Description of Artificial Sequence: Synthetic oligonucleotide
  Antisense strand to SEQ ID NO: 2503570
aucacucugcuuuaacauu

SEQ ID NO: 2503572 - RNA, 19 nt, Artificial Sequence
  Description of Artificial Sequence: Synthetic oligonucleotide
  Sense strand starting at position 3542 of SEQ ID NO: 1888003
guuaaagcagagugauaag

SEQ ID NO: 2503573 - RNA, 19 nt, Artificial Sequence
  Description of Artificial Sequence: Synthetic oligonucleotide
  Antisense strand to SEQ ID NO: 2503572
cuuaucacucugcuuuaac

SEQ ID NO: 2503574 - RNA, 19 nt, Artificial Sequence
  Description of Artificial Sequence: Synthetic oligonucleotide
  Sense strand starting at position 3580 of SEQ ID NO: 1888003
uguucucuuccauaguauu

SEQ ID NO: 2503575 - RNA, 19 nt, Artificial Sequence
  Description of Artificial Sequence: Synthetic oligonucleotide
  Antisense strand to SEQ ID NO: 2503574
aauacuauggaagagaaca

SEQ ID NO: 2503576 - RNA, 19 nt, Artificial Sequence
  Description of Artificial Sequence: Synthetic oligonucleotide
  Sense strand starting at position 3587 of SEQ ID NO: 1888003
uuccauaguauuuguguga

SEQ ID NO: 2503577 - RNA, 19 nt, Artificial Sequence
  Description of Artificial Sequence: Synthetic oligonucleotide
  Antisense strand to SEQ ID NO: 2503576
ucacacaaauacuauggaa

SEQ ID NO: 2503578 - RNA, 19 nt, Artificial Sequence
  Description of Artificial Sequence: Synthetic oligonucleotide
  Sense strand starting at position 3680 of SEQ ID NO: 1888003
agguguggucauaguguua

SEQ ID NO: 2503579 - RNA, 19 nt, Artificial Sequence
  Description of Artificial Sequence: Synthetic oligonucleotide
  Antisense strand to SEQ ID NO: 2503578
uaacacuaugaccacaccu

SEQ ID NO: 2503580 - RNA, 19 nt, Artificial Sequence
  Description of Artificial Sequence: Synthetic oligonucleotide
  Sense strand starting at position 3803 of SEQ ID NO: 1888003
uguguuuacagcgaaggaa

SEQ ID NO: 2503581 - RNA, 19 nt, Artificial Sequence
  Description of Artificial Sequence: Synthetic oligonucleotide
  Antisense strand to SEQ ID NO: 2503580
uuccuucgcuguaaacaca

SEQ ID NO: 2503582 - RNA, 19 nt, Artificial Sequence
  Description of Artificial Sequence: Synthetic oligonucleotide
  Sense strand starting at position 3828 of SEQ ID NO: 1888003
cuguaaugccugcaaagac

SEQ ID NO: 2503583 - RNA, 19 nt, Artificial Sequence
  Description of Artificial Sequence: Synthetic oligonucleotide
  Antisense strand to SEQ ID NO: 2503582
gucuuugcaggcauuacag

SEQ ID NO: 2503584 - RNA, 19 nt, Artificial Sequence
  Description of Artificial Sequence: Synthetic oligonucleotide
  Sense strand starting at position 85 of SEQ ID NO: 1888004
accugaaaguucccaguua

SEQ ID NO: 2503585 - RNA, 19 nt, Artificial Sequence
  Description of Artificial Sequence: Synthetic oligonucleotide
  Antisense strand to SEQ ID NO: 2503584
uaacugggaacuuucaggu

SEQ ID NO: 2503586 - RNA, 19 nt, Artificial Sequence
  Description of Artificial Sequence: Synthetic oligonucleotide
  Sense strand starting at position 86 of SEQ ID NO: 1888004
ccugaaaguucccaguuac

SEQ ID NO: 2503587 - RNA, 19 nt, Artificial Sequence
  Description of Artificial Sequence: Synthetic oligonucleotide
  Antisense strand to SEQ ID NO: 2503586
guaacugggaacuuucagg

SEQ ID NO: 2503588 - RNA, 19 nt, Artificial Sequence
  Description of Artificial Sequence: Synthetic oligonucleotide
  Sense strand starting at position 98 of SEQ ID NO: 1888004
caguuacauuaguaaggga

SEQ ID NO: 2503589 - RNA, 19 nt, Artificial Sequence
  Description of Artificial Sequence: Synthetic oligonucleotide
  Antisense strand to SEQ ID NO: 2503588
ucccuuacuaauguaacug

SEQ ID NO: 2503590 - RNA, 19 nt, Artificial Sequence
  Description of Artificial Sequence: Synthetic oligonucleotide
  Sense strand starting at position 101 of SEQ ID NO: 1888004
uuacauuaguaagggagau

SEQ ID NO: 2503591 - RNA, 19 nt, Artificial Sequence
  Description of Artificial Sequence: Synthetic oligonucleotide
  Antisense strand to SEQ ID NO: 2503590
aucucccuuacuaauguaa

SEQ ID NO: 2503592 - RNA, 19 nt, Artificial Sequence
  Description of Artificial Sequence: Synthetic oligonucleotide
  Sense strand starting at position 580 of SEQ ID NO: 1888004
aaagucacgccuuagaauu

SEQ ID NO: 2503593 - RNA, 19 nt, Artificial Sequence
  Description of Artificial Sequence: Synthetic oligonucleotide
  Antisense strand to SEQ ID NO: 2503592
aauucuaaggcgugacuuu

SEQ ID NO: 2503594 - RNA, 19 nt, Artificial Sequence
  Description of Artificial Sequence: Synthetic oligonucleotide
  Sense strand starting at position 800 of SEQ ID NO: 1888004
ccuuccaugccuugauuga

SEQ ID NO: 2503595 - RNA, 19 nt, Artificial Sequence
  Description of Artificial Sequence: Synthetic oligonucleotide
  Antisense strand to SEQ ID NO: 2503594
ucaaucaaggcauggaagg

SEQ ID NO: 2503596 - RNA, 19 nt, Artificial Sequence
  Description of Artificial Sequence: Synthetic oligonucleotide
  Sense strand starting at position 801 of SEQ ID NO: 1888004
cuuccaugccuugauugau

SEQ ID NO: 2503597 - RNA, 19 nt, Artificial Sequence
  Description of Artificial Sequence: Synthetic oligonucleotide
  Antisense strand to SEQ ID NO: 2503596
aucaaucaaggcauggaag

SEQ ID NO: 2503598 - RNA, 19 nt, Artificial Sequence
  Description of Artificial Sequence: Synthetic oligonucleotide
  Sense strand starting at position 832 of SEQ ID NO: 1888004
auuccugucucgcugaaau

SEQ ID NO: 2503599 - RNA, 19 nt, Artificial Sequence
  Description of Artificial Sequence: Synthetic oligonucleotide
  Antisense strand to SEQ ID NO: 2503598
auuucagcgagacaggaau

SEQ ID NO: 2503600 - RNA, 19 nt, Artificial Sequence
  Description of Artificial Sequence: Synthetic oligonucleotide
  Sense strand starting at position 834 of SEQ ID NO: 1888004
uccugucucgcugaaauga

SEQ ID NO: 2503601 - RNA, 19 nt, Artificial Sequence
  Description of Artificial Sequence: Synthetic oligonucleotide
  Antisense strand to SEQ ID NO: 2503600
ucauuucagcgagacagga

SEQ ID NO: 2503602 - RNA, 19 nt, Artificial Sequence
  Description of Artificial Sequence: Synthetic oligonucleotide
  Sense strand starting at position 886 of SEQ ID NO: 1888004
ccacuuacucgaggcuaca

SEQ ID NO: 2503603 - RNA, 19 nt, Artificial Sequence
  Description of Artificial Sequence: Synthetic oligonucleotide
  Antisense strand to SEQ ID NO: 2503602
uguagccucgaguaagugg

SEQ ID NO: 2503604 - RNA, 19 nt, Artificial Sequence
  Description of Artificial Sequence: Synthetic oligonucleotide
  Sense strand starting at position 919 of SEQ ID NO: 1888004
uuggucacguucucucaua

SEQ ID NO: 2503605 - RNA, 19 nt, Artificial Sequence
  Description of Artificial Sequence: Synthetic oligonucleotide
  Antisense strand to SEQ ID NO: 2503604
uaugagagaacgugaccaa

SEQ ID NO: 2503606 - RNA, 19 nt, Artificial Sequence
  Description of Artificial Sequence: Synthetic oligonucleotide
  Sense strand starting at position 920 of SEQ ID NO: 1888004
uggucacguucucucauau

SEQ ID NO: 2503607 - RNA, 19 nt, Artificial Sequence
  Description of Artificial Sequence: Synthetic oligonucleotide
  Antisense strand to SEQ ID NO: 2503606
auaugagagaacgugacca

SEQ ID NO: 2503608 - RNA, 19 nt, Artificial Sequence
  Description of Artificial Sequence: Synthetic oligonucleotide
  Sense strand starting at position 930 of SEQ ID NO: 1888004
cucucauauucggcguaga

SEQ ID NO: 2503609 - RNA, 19 nt, Artificial Sequence
  Description of Artificial Sequence: Synthetic oligonucleotide
  Antisense strand to SEQ ID NO: 2503608
ucuacgccgaauaugagag

SEQ ID NO: 2503610 - RNA, 19 nt, Artificial Sequence
  Description of Artificial Sequence: Synthetic oligonucleotide
  Sense strand starting at position 931 of SEQ ID NO: 1888004
ucucauauucggcguagaa

SEQ ID NO: 2503611 - RNA, 19 nt, Artificial Sequence
  Description of Artificial Sequence: Synthetic oligonucleotide
  Antisense strand to SEQ ID NO: 2503610
uucuacgccgaauaugaga

SEQ ID NO: 2503612 - RNA, 19 nt, Artificial Sequence
  Description of Artificial Sequence: Synthetic oligonucleotide
  Sense strand starting at position 933 of SEQ ID NO: 1888004
ucauauucggcguagaaca

SEQ ID NO: 2503613 - RNA, 19 nt, Artificial Sequence
  Description of Artificial Sequence: Synthetic oligonucleotide
  Antisense strand to SEQ ID NO: 2503612
uguucuacgccgaauauga

SEQ ID NO: 2503614 - RNA, 19 nt, Artificial Sequence
  Description of Artificial Sequence: Synthetic oligonucleotide
  Sense strand starting at position 935 of SEQ ID NO: 1888004
auauucggcguagaacaua

SEQ ID NO: 2503615 - RNA, 19 nt, Artificial Sequence
  Description of Artificial Sequence: Synthetic oligonucleotide
  Antisense strand to SEQ ID NO: 2503614
uauguucuacgccgaauau

SEQ ID NO: 2503616 - RNA, 19 nt, Artificial Sequence
  Description of Artificial Sequence: Synthetic oligonucleotide
  Sense strand starting at position 975 of SEQ ID NO: 1888004
uuugcucuuuccguuauca

SEQ ID NO: 2503617 - RNA, 19 nt, Artificial Sequence
  Description of Artificial Sequence: Synthetic oligonucleotide
  Antisense strand to SEQ ID NO: 2503616
ugauaacggaaagagcaaa

SEQ ID NO: 2503618 - RNA, 19 nt, Artificial Sequence
  Description of Artificial Sequence: Synthetic oligonucleotide
  Sense strand starting at position 977 of SEQ ID NO: 1888004
ugcucuuuccguuaucaaa

SEQ ID NO: 2503619 - RNA, 19 nt, Artificial Sequence
  Description of Artificial Sequence: Synthetic oligonucleotide
  Antisense strand to SEQ ID NO: 2503618
uuugauaacggaaagagca

SEQ ID NO: 2503620 - RNA, 19 nt, Artificial Sequence
  Description of Artificial Sequence: Synthetic oligonucleotide
  Sense strand starting at position 1011 of SEQ ID NO: 1888004
ggguguuucucauucagga

SEQ ID NO: 2503621 - RNA, 19 nt, Artificial Sequence
  Description of Artificial Sequence: Synthetic oligonucleotide
  Antisense strand to SEQ ID NO: 2503620
uccugaaugagaaacaccc

SEQ ID NO: 2503622 - RNA, 19 nt, Artificial Sequence
  Description of Artificial Sequence: Synthetic oligonucleotide
  Sense strand starting at position 1056 of SEQ ID NO: 1888004
cuccuauucugagaagcaa

SEQ ID NO: 2503623 - RNA, 19 nt, Artificial Sequence
  Description of Artificial Sequence: Synthetic oligonucleotide
  Antisense strand to SEQ ID NO: 2503622
uugcuucucagaauaggag

SEQ ID NO: 2503624 - RNA, 19 nt, Artificial Sequence
  Description of Artificial Sequence: Synthetic oligonucleotide
  Sense strand starting at position 1860 of SEQ ID NO: 1888004
cacggaucccucuaacagu

SEQ ID NO: 2503625 - RNA, 19 nt, Artificial Sequence
  Description of Artificial Sequence: Synthetic oligonucleotide
  Antisense strand to SEQ ID NO: 2503624
acuguuagagggauccgug

SEQ ID NO: 2503626 - RNA, 19 nt, Artificial Sequence
  Description of Artificial Sequence: Synthetic oligonucleotide
  Sense strand starting at position 2160 of SEQ ID NO: 1888004
cagauuaucuaagcgagcu

SEQ ID NO: 2503627 - RNA, 19 nt, Artificial Sequence
  Description of Artificial Sequence: Synthetic oligonucleotide
  Antisense strand to SEQ ID NO: 2503626
agcucgcuuagauaaucug

SEQ ID NO: 2503628 - RNA, 19 nt, Artificial Sequence
  Description of Artificial Sequence: Synthetic oligonucleotide
  Sense strand starting at position 2161 of SEQ ID NO: 1888004
agauuaucuaagcgagcuc

SEQ ID NO: 2503629 - RNA, 19 nt, Artificial Sequence
  Description of Artificial Sequence: Synthetic oligonucleotide
  Antisense strand to SEQ ID NO: 2503628
gagcucgcuuagauaaucu

SEQ ID NO: 2503630 - RNA, 19 nt, Artificial Sequence
  Description of Artificial Sequence: Synthetic oligonucleotide
  Sense strand starting at position 2187 of SEQ ID NO: 1888004
gcgucuugcucuuugggua

SEQ ID NO: 2503631 - RNA, 19 nt, Artificial Sequence
  Description of Artificial Sequence: Synthetic oligonucleotide
  Antisense strand to SEQ ID NO: 2503630
uacccaaagagcaagacgc

SEQ ID NO: 2503632 - RNA, 19 nt, Artificial Sequence
  Description of Artificial Sequence: Synthetic oligonucleotide
  Sense strand starting at position 2216 of SEQ ID NO: 1888004
agccaaauuugcuccgaau

SEQ ID NO: 2503633 - RNA, 19 nt, Artificial Sequence
  Description of Artificial Sequence: Synthetic oligonucleotide
  Antisense strand to SEQ ID NO: 2503632
auucggagcaaauuuggcu

SEQ ID NO: 2503634 - RNA, 19 nt, Artificial Sequence
  Description of Artificial Sequence: Synthetic oligonucleotide
  Sense strand starting at position 2250 of SEQ ID NO: 1888004
cguugucuuccucacucaa

SEQ ID NO: 2503635 - RNA, 19 nt, Artificial Sequence
  Description of Artificial Sequence: Synthetic oligonucleotide
  Antisense strand to SEQ ID NO: 2503634
uugagugaggaagacaacg

SEQ ID NO: 2503636 - RNA, 19 nt, Artificial Sequence
  Description of Artificial Sequence: Synthetic oligonucleotide
  Sense strand starting at position 2285 of SEQ ID NO: 1888004
cuuugucuugcacaggaaa

SEQ ID NO: 2503637 - RNA, 19 nt, Artificial Sequence
  Description of Artificial Sequence: Synthetic oligonucleotide
  Antisense strand to SEQ ID NO: 2503636
uuuccugugcaagacaaag

SEQ ID NO: 2503638 - RNA, 19 nt, Artificial Sequence
  Description of Artificial Sequence: Synthetic oligonucleotide
  Sense strand starting at position 2452 of SEQ ID NO: 1888004
ugcagagaaucuccauuga

SEQ ID NO: 2503639 - RNA, 19 nt, Artificial Sequence
  Description of Artificial Sequence: Synthetic oligonucleotide
  Antisense strand to SEQ ID NO: 2503638
ucaauggagauucucugca

SEQ ID NO: 2503640 - RNA, 19 nt, Artificial Sequence
  Description of Artificial Sequence: Synthetic oligonucleotide
  Sense strand starting at position 2518 of SEQ ID NO: 1888004
agaagagauugugaccuga

SEQ ID NO: 2503641 - RNA, 19 nt, Artificial Sequence
  Description of Artificial Sequence: Synthetic oligonucleotide
  Antisense strand to SEQ ID NO: 2503640
ucaggucacaaucucuucu

SEQ ID NO: 2503642 - RNA, 19 nt, Artificial Sequence
  Description of Artificial Sequence: Synthetic oligonucleotide
  Sense strand starting at position 3181 of SEQ ID NO: 1888004
cugugaaggucagaauuag

SEQ ID NO: 2503643 - RNA, 19 nt, Artificial Sequence
  Description of Artificial Sequence: Synthetic oligonucleotide
  Antisense strand to SEQ ID NO: 2503642
cuaauucugaccuucacag

SEQ ID NO: 2503644 - RNA, 19 nt, Artificial Sequence
  Description of Artificial Sequence: Synthetic oligonucleotide
  Sense strand starting at position 3600 of SEQ ID NO: 1888004
agcuuaaacugacucaagu

SEQ ID NO: 2503645 - RNA, 19 nt, Artificial Sequence
  Description of Artificial Sequence: Synthetic oligonucleotide
  Antisense strand to SEQ ID NO: 2503644
acuugagucaguuuaagcu

SEQ ID NO: 2503646 - RNA, 19 nt, Artificial Sequence
  Description of Artificial Sequence: Synthetic oligonucleotide
  Sense strand starting at position 3622 of SEQ ID NO: 1888004
gagcuuccuguuggugaaa

SEQ ID NO: 2503647 - RNA, 19 nt, Artificial Sequence
  Description of Artificial Sequence: Synthetic oligonucleotide
  Antisense strand to SEQ ID NO: 2503646
uuucaccaacaggaagcuc

SEQ ID NO: 2503648 - RNA, 19 nt, Artificial Sequence
  Description of Artificial Sequence: Synthetic oligonucleotide
  Sense strand starting at position 3639 of SEQ ID NO: 1888004
aaaugaaggucuuaaagga

SEQ ID NO: 2503649 - RNA, 19 nt, Artificial Sequence
  Description of Artificial Sequence: Synthetic oligonucleotide
  Antisense strand to SEQ ID NO: 2503648
uccuuuaagaccuucauuu

SEQ ID NO: 2503650 - RNA, 19 nt, Artificial Sequence
  Description of Artificial Sequence: Synthetic oligonucleotide
  Sense strand starting at position 3777 of SEQ ID NO: 1888004
gucacaguuuggcuuccaa

SEQ ID NO: 2503651 - RNA, 19 nt, Artificial Sequence
  Description of Artificial Sequence: Synthetic oligonucleotide
  Antisense strand to SEQ ID NO: 2503650
uuggaagccaaacugugac

SEQ ID NO: 2503652 - RNA, 19 nt, Artificial Sequence
  Description of Artificial Sequence: Synthetic oligonucleotide
  Sense strand starting at position 3787 of SEQ ID NO: 1888004
ggcuuccaagcuuggaaau

SEQ ID NO: 2503653 - RNA, 19 nt, Artificial Sequence
  Description of Artificial Sequence: Synthetic oligonucleotide
  Antisense strand to SEQ ID NO: 2503652
auuuccaagcuuggaagcc

SEQ ID NO: 2503654 - RNA, 19 nt, Artificial Sequence
  Description of Artificial Sequence: Synthetic oligonucleotide
  Sense strand starting at position 3788 of SEQ ID NO: 1888004
gcuuccaagcuuggaaaua

SEQ ID NO: 2503655 - RNA, 19 nt, Artificial Sequence
  Description of Artificial Sequence: Synthetic oligonucleotide
  Antisense strand to SEQ ID NO: 2503654
uauuuccaagcuuggaagc

SEQ ID NO: 2503656 - RNA, 19 nt, Artificial Sequence
  Description of Artificial Sequence: Synthetic oligonucleotide
  Sense strand starting at position 3789 of SEQ ID NO: 1888004
cuuccaagcuuggaaauau

SEQ ID NO: 2503657 - RNA, 19 nt, Artificial Sequence
  Description of Artificial Sequence: Synthetic oligonucleotide
  Antisense strand to SEQ ID NO: 2503656
auauuuccaagcuuggaag

SEQ ID NO: 2503658 - RNA, 19 nt, Artificial Sequence
  Description of Artificial Sequence: Synthetic oligonucleotide
  Sense strand starting at position 3833 of SEQ ID NO: 1888004
ccuugugaacugugcauga

SEQ ID NO: 2503659 - RNA, 19 nt, Artificial Sequence
  Description of Artificial Sequence: Synthetic oligonucleotide
  Antisense strand to SEQ ID NO: 2503658
ucaugcacaguucacaagg

SEQ ID NO: 2503660 - RNA, 19 nt, Artificial Sequence
  Description of Artificial Sequence: Synthetic oligonucleotide
  Sense strand starting at position 3835 of SEQ ID NO: 1888004
uugugaacugugcaugaag

SEQ ID NO: 2503661 - RNA, 19 nt, Artificial Sequence
  Description of Artificial Sequence: Synthetic oligonucleotide
  Antisense strand to SEQ ID NO: 2503660
cuucaugcacaguucacaa

SEQ ID NO: 2503662 - RNA, 19 nt, Artificial Sequence
  Description of Artificial Sequence: Synthetic oligonucleotide
  Sense strand starting at position 3837 of SEQ ID NO: 1888004
gugaacugugcaugaagca

SEQ ID NO: 2503663 - RNA, 19 nt, Artificial Sequence
  Description of Artificial Sequence: Synthetic oligonucleotide
  Antisense strand to SEQ ID NO: 2503662
ugcuucaugcacaguucac

SEQ ID NO: 2503664 - RNA, 19 nt, Artificial Sequence
  Description of Artificial Sequence: Synthetic oligonucleotide
  Sense strand starting at position 85 of SEQ ID NO: 1888005
accugaaaguucccaguua

SEQ ID NO: 2503665 - RNA, 19 nt, Artificial Sequence
  Description of Artificial Sequence: Synthetic oligonucleotide
  Antisense strand to SEQ ID NO: 2503664
uaacugggaacuuucaggu

SEQ ID NO: 2503666 - RNA, 19 nt, Artificial Sequence
  Description of Artificial Sequence: Synthetic oligonucleotide
  Sense strand starting at position 86 of SEQ ID NO: 1888005
ccugaaaguucccaguuac

SEQ ID NO: 2503667 - RNA, 19 nt, Artificial Sequence
  Description of Artificial Sequence: Synthetic oligonucleotide
  Antisense strand to SEQ ID NO: 2503666
guaacugggaacuuucagg

SEQ ID NO: 2503668 - RNA, 19 nt, Artificial Sequence
  Description of Artificial Sequence: Synthetic oligonucleotide
  Sense strand starting at position 98 of SEQ ID NO: 1888005
caguuacauuaguaaggga

SEQ ID NO: 2503669 - RNA, 19 nt, Artificial Sequence
  Description of Artificial Sequence: Synthetic oligonucleotide
  Antisense strand to SEQ ID NO: 2503668
ucccuuacuaauguaacug

SEQ ID NO: 2503670 - RNA, 19 nt, Artificial Sequence
  Description of Artificial Sequence: Synthetic oligonucleotide
  Sense strand starting at position 101 of SEQ ID NO: 1888005
uuacauuaguaagggagau

SEQ ID NO: 2503671 - RNA, 19 nt, Artificial Sequence
  Description of Artificial Sequence: Synthetic oligonucleotide
  Antisense strand to SEQ ID NO: 2503670
aucucccuuacuaauguaa

SEQ ID NO: 2503672 - RNA, 19 nt, Artificial Sequence
  Description of Artificial Sequence: Synthetic oligonucleotide
  Sense strand starting at position 580 of SEQ ID NO: 1888005
aaagucacgccuuagaauu

SEQ ID NO: 2503673 - RNA, 19 nt, Artificial Sequence
  Description of Artificial Sequence: Synthetic oligonucleotide
  Antisense strand to SEQ ID NO: 2503672
aauucuaaggcgugacuuu

SEQ ID NO: 2503674 - RNA, 19 nt, Artificial Sequence
  Description of Artificial Sequence: Synthetic oligonucleotide
  Sense strand starting at position 800 of SEQ ID NO: 1888005
ccuuccaugccuugauuga

SEQ ID NO: 2503675 - RNA, 19 nt, Artificial Sequence
  Description of Artificial Sequence: Synthetic oligonucleotide
  Antisense strand to SEQ ID NO: 2503674
ucaaucaaggcauggaagg

SEQ ID NO: 2503676 - RNA, 19 nt, Artificial Sequence
  Description of Artificial Sequence: Synthetic oligonucleotide
  Sense strand starting at position 801 of SEQ ID NO: 1888005
cuuccaugccuugauugau

SEQ ID NO: 2503677 - RNA, 19 nt, Artificial Sequence
  Description of Artificial Sequence: Synthetic oligonucleotide
  Antisense strand to SEQ ID NO: 2503676
aucaaucaaggcauggaag

SEQ ID NO: 2503678 - RNA, 19 nt, Artificial Sequence
  Description of Artificial Sequence: Synthetic oligonucleotide
  Sense strand starting at position 832 of SEQ ID NO: 1888005
auuccugucucgcugaaau

SEQ ID NO: 2503679 - RNA, 19 nt, Artificial Sequence
  Description of Artificial Sequence: Synthetic oligonucleotide
  Antisense strand to SEQ ID NO: 2503678
auuucagcgagacaggaau

SEQ ID NO: 2503680 - RNA, 19 nt, Artificial Sequence
  Description of Artificial Sequence: Synthetic oligonucleotide
  Sense strand starting at position 834 of SEQ ID NO: 1888005
uccugucucgcugaaauga

SEQ ID NO: 2503681 - RNA, 19 nt, Artificial Sequence
  Description of Artificial Sequence: Synthetic oligonucleotide
  Antisense strand to SEQ ID NO: 2503680
ucauuucagcgagacagga

SEQ ID NO: 2503682 - RNA, 19 nt, Artificial Sequence
  Description of Artificial Sequence: Synthetic oligonucleotide
  Sense strand starting at position 886 of SEQ ID NO: 1888005
ccacuuacucgaggcuaca

SEQ ID NO: 2503683 - RNA, 19 nt, Artificial Sequence
  Description of Artificial Sequence: Synthetic oligonucleotide
  Antisense strand to SEQ ID NO: 2503682
uguagccucgaguaagugg

SEQ ID NO: 2503684 - RNA, 19 nt, Artificial Sequence
  Description of Artificial Sequence: Synthetic oligonucleotide
  Sense strand starting at position 919 of SEQ ID NO: 1888005
uuggucacguucucucaua

SEQ ID NO: 2503685 - RNA, 19 nt, Artificial Sequence
  Description of Artificial Sequence: Synthetic oligonucleotide
  Antisense strand to SEQ ID NO: 2503684
uaugagagaacgugaccaa

SEQ ID NO: 2503686 - RNA, 19 nt, Artificial Sequence
  Description of Artificial Sequence: Synthetic oligonucleotide
  Sense strand starting at position 920 of SEQ ID NO: 1888005
uggucacguucucucauau

SEQ ID NO: 2503687 - RNA, 19 nt, Artificial Sequence
  Description of Artificial Sequence: Synthetic oligonucleotide
  Antisense strand to SEQ ID NO: 2503686
auaugagagaacgugacca

SEQ ID NO: 2503688 - RNA, 19 nt, Artificial Sequence
  Description of Artificial Sequence: Synthetic oligonucleotide
  Sense strand starting at position 930 of SEQ ID NO: 1888005
cucucauauucggcguaga

SEQ ID NO: 2503689 - RNA, 19 nt, Artificial Sequence
  Description of Artificial Sequence: Synthetic oligonucleotide
  Antisense strand to SEQ ID NO: 2503688
ucuacgccgaauaugagag

SEQ ID NO: 2503690 - RNA, 19 nt, Artificial Sequence
  Description of Artificial Sequence: Synthetic oligonucleotide
  Sense strand starting at position 931 of SEQ ID NO: 1888005
ucucauauucggcguagaa

SEQ ID NO: 2503691 - RNA, 19 nt, Artificial Sequence
  Description of Artificial Sequence: Synthetic oligonucleotide
  Antisense strand to SEQ ID NO: 2503690
uucuacgccgaauaugaga

SEQ ID NO: 2503692 - RNA, 19 nt, Artificial Sequence
  Description of Artificial Sequence: Synthetic oligonucleotide
  Sense strand starting at position 933 of SEQ ID NO: 1888005
ucauauucggcguagaaca

SEQ ID NO: 2503693 - RNA, 19 nt, Artificial Sequence
  Description of Artificial Sequence: Synthetic oligonucleotide
  Antisense strand to SEQ ID NO: 2503692
uguucuacgccgaauauga

SEQ ID NO: 2503694 - RNA, 19 nt, Artificial Sequence
  Description of Artificial Sequence: Synthetic oligonucleotide
  Sense strand starting at position 935 of SEQ ID NO: 1888005
auauucggcguagaacaua

SEQ ID NO: 2503695 - RNA, 19 nt, Artificial Sequence
  Description of Artificial Sequence: Synthetic oligonucleotide
  Antisense strand to SEQ ID NO: 2503694
uauguucuacgccgaauau

SEQ ID NO: 2503696 - RNA, 19 nt, Artificial Sequence
  Description of Artificial Sequence: Synthetic oligonucleotide
  Sense strand starting at position 975 of SEQ ID NO: 1888005
uuugcucuuuccguuauca

SEQ ID NO: 2503697 - RNA, 19 nt, Artificial Sequence
  Description of Artificial Sequence: Synthetic oligonucleotide
  Antisense strand to SEQ ID NO: 2503696
ugauaacggaaagagcaaa

SEQ ID NO: 2503698 - RNA, 19 nt, Artificial Sequence
  Description of Artificial Sequence: Synthetic oligonucleotide
  Sense strand starting at position 977 of SEQ ID NO: 1888005
ugcucuuuccguuaucaaa

SEQ ID NO: 2503699 - RNA, 19 nt, Artificial Sequence
  Description of Artificial Sequence: Synthetic oligonucleotide
  Antisense strand to SEQ ID NO: 2503698
uuugauaacggaaagagca

SEQ ID NO: 2503700 - RNA, 19 nt, Artificial Sequence
  Description of Artificial Sequence: Synthetic oligonucleotide
  Sense strand starting at position 1011 of SEQ ID NO: 1888005
ggguguuucucauucagga

SEQ ID NO: 2503701 - RNA, 19 nt, Artificial Sequence
  Description of Artificial Sequence: Synthetic oligonucleotide
  Antisense strand to SEQ ID NO: 2503700
uccugaaugagaaacaccc

SEQ ID NO: 2503702 - RNA, 19 nt, Artificial Sequence
  Description of Artificial Sequence: Synthetic oligonucleotide
  Sense strand starting at position 1056 of SEQ ID NO: 1888005
cuccuauucugagaagcaa

SEQ ID NO: 2503703 - RNA, 19 nt, Artificial Sequence
  Description of Artificial Sequence: Synthetic oligonucleotide
  Antisense strand to SEQ ID NO: 2503702
uugcuucucagaauaggag

SEQ ID NO: 2503704 - RNA, 19 nt, Artificial Sequence
  Description of Artificial Sequence: Synthetic oligonucleotide
  Sense strand starting at position 1860 of SEQ ID NO: 1888005
cacggaucccucuaacagu

SEQ ID NO: 2503705 - RNA, 19 nt, Artificial Sequence
  Description of Artificial Sequence: Synthetic oligonucleotide
  Antisense strand to SEQ ID NO: 2503704
acuguuagagggauccgug

SEQ ID NO: 2503706 - RNA, 19 nt, Artificial Sequence
  Description of Artificial Sequence: Synthetic oligonucleotide
  Sense strand starting at position 2160 of SEQ ID NO: 1888005
cagauuaucuaagcgagcu

SEQ ID NO: 2503707 - RNA, 19 nt, Artificial Sequence
  Description of Artificial Sequence: Synthetic oligonucleotide
  Antisense strand to SEQ ID NO: 2503706
agcucgcuuagauaaucug

SEQ ID NO: 2503708 - RNA, 19 nt, Artificial Sequence
  Description of Artificial Sequence: Synthetic oligonucleotide
  Sense strand starting at position 2161 of SEQ ID NO: 1888005
agauuaucuaagcgagcuc

SEQ ID NO: 2503709 - RNA, 19 nt, Artificial Sequence
  Description of Artificial Sequence: Synthetic oligonucleotide
  Antisense strand to SEQ ID NO: 2503708
gagcucgcuuagauaaucu

SEQ ID NO: 2503710 - RNA, 19 nt, Artificial Sequence
  Description of Artificial Sequence: Synthetic oligonucleotide
  Sense strand starting at position 2187 of SEQ ID NO: 1888005
gcgucuugcucuuugggua

SEQ ID NO: 2503711 - RNA, 19 nt, Artificial Sequence
  Description of Artificial Sequence: Synthetic oligonucleotide
  Antisense strand to SEQ ID NO: 2503710
uacccaaagagcaagacgc

SEQ ID NO: 2503712 - RNA, 19 nt, Artificial Sequence
  Description of Artificial Sequence: Synthetic oligonucleotide
  Sense strand starting at position 2216 of SEQ ID NO: 1888005
agccaaauuugcuccgaau

SEQ ID NO: 2503713 - RNA, 19 nt, Artificial Sequence
  Description of Artificial Sequence: Synthetic oligonucleotide
  Antisense strand to SEQ ID NO: 2503712
auucggagcaaauuuggcu

SEQ ID NO: 2503714 - RNA, 19 nt, Artificial Sequence
  Description of Artificial Sequence: Synthetic oligonucleotide
  Sense strand starting at position 2250 of SEQ ID NO: 1888005
cguugucuuccucacucaa

SEQ ID NO: 2503715 - RNA, 19 nt, Artificial Sequence
  Description of Artificial Sequence: Synthetic oligonucleotide
  Antisense strand to SEQ ID NO: 2503714
uugagugaggaagacaacg

SEQ ID NO: 2503716 - RNA, 19 nt, Artificial Sequence
  Description of Artificial Sequence: Synthetic oligonucleotide
  Sense strand starting at position 2285 of SEQ ID NO: 1888005
cuuugucuugcacaggaaa

SEQ ID NO: 2503717 - RNA, 19 nt, Artificial Sequence
  Description of Artificial Sequence: Synthetic oligonucleotide
  Antisense strand to SEQ ID NO: 2503716
uuuccugugcaagacaaag

SEQ ID NO: 2503718 - RNA, 19 nt, Artificial Sequence
  Description of Artificial Sequence: Synthetic oligonucleotide
  Sense strand starting at position 2452 of SEQ ID NO: 1888005
ugcagagaaucuccauuga

SEQ ID NO: 2503719 - RNA, 19 nt, Artificial Sequence
  Description of Artificial Sequence: Synthetic oligonucleotide
  Antisense strand to SEQ ID NO: 2503718
ucaauggagauucucugca

SEQ ID NO: 2503720 - RNA, 19 nt, Artificial Sequence
  Description of Artificial Sequence: Synthetic oligonucleotide
  Sense strand starting at position 2518 of SEQ ID NO: 1888005
agaagagauugugaccuga

SEQ ID NO: 2503721 - RNA, 19 nt, Artificial Sequence
  Description of Artificial Sequence: Synthetic oligonucleotide
  Antisense strand to SEQ ID NO: 2503720
ucaggucacaaucucuucu

SEQ ID NO: 2503722 - RNA, 19 nt, Artificial Sequence
  Description of Artificial Sequence: Synthetic oligonucleotide
  Sense strand starting at position 3181 of SEQ ID NO: 1888005
cugugaaggucagaauuag

SEQ ID NO: 2503723 - RNA, 19 nt, Artificial Sequence
  Description of Artificial Sequence: Synthetic oligonucleotide
  Antisense strand to SEQ ID NO: 2503722
cuaauucugaccuucacag

SEQ ID NO: 2503724 - RNA, 19 nt, Artificial Sequence
  Description of Artificial Sequence: Synthetic oligonucleotide
  Sense strand starting at position 3600 of SEQ ID NO: 1888005
agcuuaaacugacucaagu

SEQ ID NO: 2503725 - RNA, 19 nt, Artificial Sequence
  Description of Artificial Sequence: Synthetic oligonucleotide
  Antisense strand to SEQ ID NO: 2503724
acuugagucaguuuaagcu

SEQ ID NO: 2503726 - RNA, 19 nt, Artificial Sequence
  Description of Artificial Sequence: Synthetic oligonucleotide
  Sense strand starting at position 3622 of SEQ ID NO: 1888005
gagcuuccuguuggugaaa

SEQ ID NO: 2503727 - RNA, 19 nt, Artificial Sequence
  Description of Artificial Sequence: Synthetic oligonucleotide
  Antisense strand to SEQ ID NO: 2503726
uuucaccaacaggaagcuc

SEQ ID NO: 2503728 - RNA, 19 nt, Artificial Sequence
  Description of Artificial Sequence: Synthetic oligonucleotide
  Sense strand starting at position 3639 of SEQ ID NO: 1888005
aaaugaaggucuuaaagga

SEQ ID NO: 2503729 - RNA, 19 nt, Artificial Sequence
  Description of Artificial Sequence: Synthetic oligonucleotide
  Antisense strand to SEQ ID NO: 2503728
uccuuuaagaccuucauuu

SEQ ID NO: 2503730 - RNA, 19 nt, Artificial Sequence
  Description of Artificial Sequence: Synthetic oligonucleotide
  Sense strand starting at position 3777 of SEQ ID NO: 1888005
gucacaguuuggcuuccaa

SEQ ID NO: 2503731 - RNA, 19 nt, Artificial Sequence
  Description of Artificial Sequence: Synthetic oligonucleotide
  Antisense strand to SEQ ID NO: 2503730
uuggaagccaaacugugac

SEQ ID NO: 2503732 - RNA, 19 nt, Artificial Sequence
  Description of Artificial Sequence: Synthetic oligonucleotide
  Sense strand starting at position 3787 of SEQ ID NO: 1888005
ggcuuccaagcuuggaaau

SEQ ID NO: 2503733 - RNA, 19 nt, Artificial Sequence
  Description of Artificial Sequence: Synthetic oligonucleotide
  Antisense strand to SEQ ID NO: 2503732
auuuccaagcuuggaagcc

SEQ ID NO: 2503734 - RNA, 19 nt, Artificial Sequence
  Description of Artificial Sequence: Synthetic oligonucleotide
  Sense strand starting at position 3788 of SEQ ID NO: 1888005
gcuuccaagcuuggaaaua

SEQ ID NO: 2503735 - RNA, 19 nt, Artificial Sequence
  Description of Artificial Sequence: Synthetic oligonucleotide
  Antisense strand to SEQ ID NO: 2503734
uauuuccaagcuuggaagc

SEQ ID NO: 2503736 - RNA, 19 nt, Artificial Sequence
  Description of Artificial Sequence: Synthetic oligonucleotide
  Sense strand starting at position 3789 of SEQ ID NO: 1888005
cuuccaagcuuggaaauau

SEQ ID NO: 2503737 - RNA, 19 nt, Artificial Sequence
  Description of Artificial Sequence: Synthetic oligonucleotide
  Antisense strand to SEQ ID NO: 2503736
auauuuccaagcuuggaag

SEQ ID NO: 2503738 - RNA, 19 nt, Artificial Sequence
  Description of Artificial Sequence: Synthetic oligonucleotide
  Sense strand starting at position 3833 of SEQ ID NO: 1888005
ccuugugaacugugcauga

SEQ ID NO: 2503739 - RNA, 19 nt, Artificial Sequence
  Description of Artificial Sequence: Synthetic oligonucleotide
  Antisense strand to SEQ ID NO: 2503738
ucaugcacaguucacaagg

SEQ ID NO: 2503740 - RNA, 19 nt, Artificial Sequence
  Description of Artificial Sequence: Synthetic oligonucleotide
  Sense strand starting at position 3835 of SEQ ID NO: 1888005
uugugaacugugcaugaag

SEQ ID NO: 2503741 - RNA, 19 nt, Artificial Sequence
  Description of Artificial Sequence: Synthetic oligonucleotide
  Antisense strand to SEQ ID NO: 2503740
cuucaugcacaguucacaa

SEQ ID NO: 2503742 - RNA, 19 nt, Artificial Sequence
  Description of Artificial Sequence: Synthetic oligonucleotide
  Sense strand starting at position 3837 of SEQ ID NO: 1888005
gugaacugugcaugaagca

SEQ ID NO: 2503743 - RNA, 19 nt, Artificial Sequence
  Description of Artificial Sequence: Synthetic oligonucleotide
  Antisense strand to SEQ ID NO: 2503742
ugcuucaugcacaguucac

SEQ ID NO: 2503744 - RNA, 19 nt, Artificial Sequence
  Description of Artificial Sequence: Synthetic oligonucleotide
  Sense strand starting at position 325 of SEQ ID NO: 1888006
aucauugugagggauugca

SEQ ID NO: 2503745 - RNA, 19 nt, Artificial Sequence
  Description of Artificial Sequence: Synthetic oligonucleotide
  Antisense strand to SEQ ID NO: 2503744
ugcaaucccucacaaugau

SEQ ID NO: 2503746 - RNA, 19 nt, Artificial Sequence
  Description of Artificial Sequence: Synthetic oligonucleotide
  Sense strand starting at position 383 of SEQ ID NO: 1888006
ucccuaagggauggcauua

SEQ ID NO: 2503747 - RNA, 19 nt, Artificial Sequence
  Description of Artificial Sequence: Synthetic oligonucleotide
  Antisense strand to SEQ ID NO: 2503746
uaaugccaucccuuaggga

SEQ ID NO: 2503748 - RNA, 19 nt, Artificial Sequence
  Description of Artificial Sequence: Synthetic oligonucleotide
  Sense strand starting at position 409 of SEQ ID NO: 1888006
ugaccuuuggaagguaauu

SEQ ID NO: 2503749 - RNA, 19 nt, Artificial Sequence
  Description of Artificial Sequence: Synthetic oligonucleotide
  Antisense strand to SEQ ID NO: 2503748
aauuaccuuccaaagguca

SEQ ID NO: 2503750 - RNA, 19 nt, Artificial Sequence
  Description of Artificial Sequence: Synthetic oligonucleotide
  Sense strand starting at position 448 of SEQ ID NO: 1888006
ucaugaugagauuaugugu

SEQ ID NO: 2503751 - RNA, 19 nt, Artificial Sequence
  Description of Artificial Sequence: Synthetic oligonucleotide
  Antisense strand to SEQ ID NO: 2503750
acacauaaucucaucauga

SEQ ID NO: 2503752 - RNA, 19 nt, Artificial Sequence
  Description of Artificial Sequence: Synthetic oligonucleotide
  Sense strand starting at position 532 of SEQ ID NO: 1888006
augagaugaccaugcauaa

SEQ ID NO: 2503753 - RNA, 19 nt, Artificial Sequence
  Description of Artificial Sequence: Synthetic oligonucleotide
  Antisense strand to SEQ ID NO: 2503752
uuaugcauggucaucucau

SEQ ID NO: 2503754 - RNA, 19 nt, Artificial Sequence
  Description of Artificial Sequence: Synthetic oligonucleotide
  Sense strand starting at position 639 of SEQ ID NO: 1888006
gaacgugagaaaugaaugu

SEQ ID NO: 2503755 - RNA, 19 nt, Artificial Sequence
  Description of Artificial Sequence: Synthetic oligonucleotide
  Antisense strand to SEQ ID NO: 2503754
acauucauuucucacguuc

SEQ ID NO: 2503756 - RNA, 19 nt, Artificial Sequence
  Description of Artificial Sequence: Synthetic oligonucleotide
  Sense strand starting at position 701 of SEQ ID NO: 1888006
gccugaacugacugaaaga

SEQ ID NO: 2503757 - RNA, 19 nt, Artificial Sequence
  Description of Artificial Sequence: Synthetic oligonucleotide
  Antisense strand to SEQ ID NO: 2503756
ucuuucagucaguucaggc

SEQ ID NO: 2503758 - RNA, 19 nt, Artificial Sequence
  Description of Artificial Sequence: Synthetic oligonucleotide
  Sense strand starting at position 817 of SEQ ID NO: 1888006
aucagugucagugaagaga

SEQ ID NO: 2503759 - RNA, 19 nt, Artificial Sequence
  Description of Artificial Sequence: Synthetic oligonucleotide
  Antisense strand to SEQ ID NO: 2503758
ucucuucacugacacugau

SEQ ID NO: 2503760 - RNA, 19 nt, Artificial Sequence
  Description of Artificial Sequence: Synthetic oligonucleotide
  Sense strand starting at position 828 of SEQ ID NO: 1888006
ugaagagauugucuucuag

SEQ ID NO: 2503761 - RNA, 19 nt, Artificial Sequence
  Description of Artificial Sequence: Synthetic oligonucleotide
  Antisense strand to SEQ ID NO: 2503760
cuagaagacaaucucuuca

SEQ ID NO: 2503762 - RNA, 19 nt, Artificial Sequence
  Description of Artificial Sequence: Synthetic oligonucleotide
  Sense strand starting at position 830 of SEQ ID NO: 1888006
aagagauugucuucuagau

SEQ ID NO: 2503763 - RNA, 19 nt, Artificial Sequence
  Description of Artificial Sequence: Synthetic oligonucleotide
  Antisense strand to SEQ ID NO: 2503762
aucuagaagacaaucucuu

SEQ ID NO: 2503764 - RNA, 19 nt, Artificial Sequence
  Description of Artificial Sequence: Synthetic oligonucleotide
  Sense strand starting at position 856 of SEQ ID NO: 1888006
gaauacauauuugagguau

SEQ ID NO: 2503765 - RNA, 19 nt, Artificial Sequence
  Description of Artificial Sequence: Synthetic oligonucleotide
  Antisense strand to SEQ ID NO: 2503764
auaccucaaauauguauuc

SEQ ID NO: 2503766 - RNA, 19 nt, Artificial Sequence
  Description of Artificial Sequence: Synthetic oligonucleotide
  Sense strand starting at position 869 of SEQ ID NO: 1888006
agguauggguaaucuugau

SEQ ID NO: 2503767 - RNA, 19 nt, Artificial Sequence
  Description of Artificial Sequence: Synthetic oligonucleotide
  Antisense strand to SEQ ID NO: 2503766
aucaagauuacccauaccu

SEQ ID NO: 2503768 - RNA, 19 nt, Artificial Sequence
  Description of Artificial Sequence: Synthetic oligonucleotide
  Sense strand starting at position 925 of SEQ ID NO: 1888006
uuuaucuuuggguacuuua

SEQ ID NO: 2503769 - RNA, 19 nt, Artificial Sequence
  Description of Artificial Sequence: Synthetic oligonucleotide
  Antisense strand to SEQ ID NO: 2503768
uaaaguacccaaagauaaa

SEQ ID NO: 2503770 - RNA, 19 nt, Artificial Sequence
  Description of Artificial Sequence: Synthetic oligonucleotide
  Sense strand starting at position 928 of SEQ ID NO: 1888006
aucuuuggguacuuuauaa

SEQ ID NO: 2503771 - RNA, 19 nt, Artificial Sequence
  Description of Artificial Sequence: Synthetic oligonucleotide
  Antisense strand to SEQ ID NO: 2503770
uuauaaaguacccaaagau

SEQ ID NO: 2503772 - RNA, 19 nt, Artificial Sequence
  Description of Artificial Sequence: Synthetic oligonucleotide
  Sense strand starting at position 1071 of SEQ ID NO: 1888006
aguagaauguaaucuccau

SEQ ID NO: 2503773 - RNA, 19 nt, Artificial Sequence
  Description of Artificial Sequence: Synthetic oligonucleotide
  Antisense strand to SEQ ID NO: 2503772
auggagauuacauucuacu

SEQ ID NO: 2503774 - RNA, 19 nt, Artificial Sequence
  Description of Artificial Sequence: Synthetic oligonucleotide
  Sense strand starting at position 1077 of SEQ ID NO: 1888006
auguaaucuccaugaauga

SEQ ID NO: 2503775 - RNA, 19 nt, Artificial Sequence
  Description of Artificial Sequence: Synthetic oligonucleotide
  Antisense strand to SEQ ID NO: 2503774
ucauucauggagauuacau

SEQ ID NO: 2503776 - RNA, 19 nt, Artificial Sequence
  Description of Artificial Sequence: Synthetic oligonucleotide
  Sense strand starting at position 1097 of SEQ ID NO: 1888006
agucuuugugccugaauuu

SEQ ID NO: 2503777 - RNA, 19 nt, Artificial Sequence
  Description of Artificial Sequence: Synthetic oligonucleotide
  Antisense strand to SEQ ID NO: 2503776
aaauucaggcacaaagacu

SEQ ID NO: 2503778 - RNA, 19 nt, Artificial Sequence
  Description of Artificial Sequence: Synthetic oligonucleotide
  Sense strand starting at position 1098 of SEQ ID NO: 1888006
gucuuugugccugaauuuc

SEQ ID NO: 2503779 - RNA, 19 nt, Artificial Sequence
  Description of Artificial Sequence: Synthetic oligonucleotide
  Antisense strand to SEQ ID NO: 2503778
gaaauucaggcacaaagac

SEQ ID NO: 2503780 - RNA, 19 nt, Artificial Sequence
  Description of Artificial Sequence: Synthetic oligonucleotide
  Sense strand starting at position 1122 of SEQ ID NO: 1888006
guuguauucccagcacgca

SEQ ID NO: 2503781 - RNA, 19 nt, Artificial Sequence
  Description of Artificial Sequence: Synthetic oligonucleotide
  Antisense strand to SEQ ID NO: 2503780
ugcgugcugggaauacaac

SEQ ID NO: 2503782 - RNA, 19 nt, Artificial Sequence
  Description of Artificial Sequence: Synthetic oligonucleotide
  Sense strand starting at position 1169 of SEQ ID NO: 1888006
auaaacauucgcuggauaa

SEQ ID NO: 2503783 - RNA, 19 nt, Artificial Sequence
  Description of Artificial Sequence: Synthetic oligonucleotide
  Antisense strand to SEQ ID NO: 2503782
uuauccagcgaauguuuau

SEQ ID NO: 2503784 - RNA, 19 nt, Artificial Sequence
  Description of Artificial Sequence: Synthetic oligonucleotide
  Sense strand starting at position 1173 of SEQ ID NO: 1888006
acauucgcuggauaaauga

SEQ ID NO: 2503785 - RNA, 19 nt, Artificial Sequence
  Description of Artificial Sequence: Synthetic oligonucleotide
  Antisense strand to SEQ ID NO: 2503784
ucauuuauccagcgaaugu

SEQ ID NO: 2503786 - RNA, 19 nt, Artificial Sequence
  Description of Artificial Sequence: Synthetic oligonucleotide
  Sense strand starting at position 1270 of SEQ ID NO: 1888006
caguuaauugaucagcuga

SEQ ID NO: 2503787 - RNA, 19 nt, Artificial Sequence
  Description of Artificial Sequence: Synthetic oligonucleotide
  Antisense strand to SEQ ID NO: 2503786
ucagcugaucaauuaacug

SEQ ID NO: 2503788 - RNA, 19 nt, Artificial Sequence
  Description of Artificial Sequence: Synthetic oligonucleotide
  Sense strand starting at position 1343 of SEQ ID NO: 1888006
cccaccuuccuggauguaa

SEQ ID NO: 2503789 - RNA, 19 nt, Artificial Sequence
  Description of Artificial Sequence: Synthetic oligonucleotide
  Antisense strand to SEQ ID NO: 2503788
uuacauccaggaagguggg

SEQ ID NO: 2503790 - RNA, 19 nt, Artificial Sequence
  Description of Artificial Sequence: Synthetic oligonucleotide
  Sense strand starting at position 1537 of SEQ ID NO: 1888006
aucugauguagauguaaag

SEQ ID NO: 2503791 - RNA, 19 nt, Artificial Sequence
  Description of Artificial Sequence: Synthetic oligonucleotide
  Antisense strand to SEQ ID NO: 2503790
cuuuacaucuacaucagau

SEQ ID NO: 2503792 - RNA, 19 nt, Artificial Sequence
  Description of Artificial Sequence: Synthetic oligonucleotide
  Sense strand starting at position 1598 of SEQ ID NO: 1888006
augcauccucaggaguaau

SEQ ID NO: 2503793 - RNA, 19 nt, Artificial Sequence
  Description of Artificial Sequence: Synthetic oligonucleotide
  Antisense strand to SEQ ID NO: 2503792
auuacuccugaggaugcau

SEQ ID NO: 2503794 - RNA, 19 nt, Artificial Sequence
  Description of Artificial Sequence: Synthetic oligonucleotide
  Sense strand starting at position 1703 of SEQ ID NO: 1888006
gaucaaagugccuaaaugu

SEQ ID NO: 2503795 - RNA, 19 nt, Artificial Sequence
  Description of Artificial Sequence: Synthetic oligonucleotide
  Antisense strand to SEQ ID NO: 2503794
acauuuaggcacuuugauc

SEQ ID NO: 2503796 - RNA, 19 nt, Artificial Sequence
  Description of Artificial Sequence: Synthetic oligonucleotide
  Sense strand starting at position 1773 of SEQ ID NO: 1888006
uugagaaacuaagcaguuu

SEQ ID NO: 2503797 - RNA, 19 nt, Artificial Sequence
  Description of Artificial Sequence: Synthetic oligonucleotide
  Antisense strand to SEQ ID NO: 2503796
aaacugcuuaguuucucaa

SEQ ID NO: 2503798 - RNA, 19 nt, Artificial Sequence
  Description of Artificial Sequence: Synthetic oligonucleotide
  Sense strand starting at position 2428 of SEQ ID NO: 1888006
aagcgaaucgugucagugu

SEQ ID NO: 2503799 - RNA, 19 nt, Artificial Sequence
  Description of Artificial Sequence: Synthetic oligonucleotide
  Antisense strand to SEQ ID NO: 2503798
acacugacacgauucgcuu

SEQ ID NO: 2503800 - RNA, 19 nt, Artificial Sequence
  Description of Artificial Sequence: Synthetic oligonucleotide
  Sense strand starting at position 2459 of SEQ ID NO: 1888006
ugggcaguucguguucauu

SEQ ID NO: 2503801 - RNA, 19 nt, Artificial Sequence
  Description of Artificial Sequence: Synthetic oligonucleotide
  Antisense strand to SEQ ID NO: 2503800
aaugaacacgaacugccca

SEQ ID NO: 2503802 - RNA, 19 nt, Artificial Sequence
  Description of Artificial Sequence: Synthetic oligonucleotide
  Sense strand starting at position 2626 of SEQ ID NO: 1888006
gguuuaguguauuucaugu

SEQ ID NO: 2503803 - RNA, 19 nt, Artificial Sequence
  Description of Artificial Sequence: Synthetic oligonucleotide
  Antisense strand to SEQ ID NO: 2503802
acaugaaauacacuaaacc

SEQ ID NO: 2503804 - RNA, 19 nt, Artificial Sequence
  Description of Artificial Sequence: Synthetic oligonucleotide
  Sense strand starting at position 2654 of SEQ ID NO: 1888006
ggaucaggugucuagguau

SEQ ID NO: 2503805 - RNA, 19 nt, Artificial Sequence
  Description of Artificial Sequence: Synthetic oligonucleotide
  Antisense strand to SEQ ID NO: 2503804
auaccuagacaccugaucc

SEQ ID NO: 2503806 - RNA, 19 nt, Artificial Sequence
  Description of Artificial Sequence: Synthetic oligonucleotide
  Sense strand starting at position 2725 of SEQ ID NO: 1888006
auuacaugcucuuugagag

SEQ ID NO: 2503807 - RNA, 19 nt, Artificial Sequence
  Description of Artificial Sequence: Synthetic oligonucleotide
  Antisense strand to SEQ ID NO: 2503806
cucucaaagagcauguaau

SEQ ID NO: 2503808 - RNA, 19 nt, Artificial Sequence
  Description of Artificial Sequence: Synthetic oligonucleotide
  Sense strand starting at position 2910 of SEQ ID NO: 1888006
ugguuaugcuuauuucuac

SEQ ID NO: 2503809 - RNA, 19 nt, Artificial Sequence
  Description of Artificial Sequence: Synthetic oligonucleotide
  Antisense strand to SEQ ID NO: 2503808
guagaaauaagcauaacca

SEQ ID NO: 2503810 - RNA, 19 nt, Artificial Sequence
  Description of Artificial Sequence: Synthetic oligonucleotide
  Sense strand starting at position 2911 of SEQ ID NO: 1888006
gguuaugcuuauuucuaca

SEQ ID NO: 2503811 - RNA, 19 nt, Artificial Sequence
  Description of Artificial Sequence: Synthetic oligonucleotide
  Antisense strand to SEQ ID NO: 2503810
uguagaaauaagcauaacc

SEQ ID NO: 2503812 - RNA, 19 nt, Artificial Sequence
  Description of Artificial Sequence: Synthetic oligonucleotide
  Sense strand starting at position 3219 of SEQ ID NO: 1888006
ugagucaguuuccuuauuu

SEQ ID NO: 2503813 - RNA, 19 nt, Artificial Sequence
  Description of Artificial Sequence: Synthetic oligonucleotide
  Antisense strand to SEQ ID NO: 2503812
aaauaaggaaacugacuca

SEQ ID NO: 2503814 - RNA, 19 nt, Artificial Sequence
  Description of Artificial Sequence: Synthetic oligonucleotide
  Sense strand starting at position 3283 of SEQ ID NO: 1888006
agauuaagugagcaaaugu

SEQ ID NO: 2503815 - RNA, 19 nt, Artificial Sequence
  Description of Artificial Sequence: Synthetic oligonucleotide
  Antisense strand to SEQ ID NO: 2503814
acauuugcucacuuaaucu

SEQ ID NO: 2503816 - RNA, 19 nt, Artificial Sequence
  Description of Artificial Sequence: Synthetic oligonucleotide
  Sense strand starting at position 3482 of SEQ ID NO: 1888006
uguauuccugagggaauaa

SEQ ID NO: 2503817 - RNA, 19 nt, Artificial Sequence
  Description of Artificial Sequence: Synthetic oligonucleotide
  Antisense strand to SEQ ID NO: 2503816
uuauucccucaggaauaca

SEQ ID NO: 2503818 - RNA, 19 nt, Artificial Sequence
  Description of Artificial Sequence: Synthetic oligonucleotide
  Sense strand starting at position 3606 of SEQ ID NO: 1888006
uuagcuucggaauaaucca

SEQ ID NO: 2503819 - RNA, 19 nt, Artificial Sequence
  Description of Artificial Sequence: Synthetic oligonucleotide
  Antisense strand to SEQ ID NO: 2503818
uggauuauuccgaagcuaa

SEQ ID NO: 2503820 - RNA, 19 nt, Artificial Sequence
  Description of Artificial Sequence: Synthetic oligonucleotide
  Sense strand starting at position 3795 of SEQ ID NO: 1888006
aagagaaauuggucucuua

SEQ ID NO: 2503821 - RNA, 19 nt, Artificial Sequence
  Description of Artificial Sequence: Synthetic oligonucleotide
  Antisense strand to SEQ ID NO: 2503820
uaagagaccaauuucucuu

SEQ ID NO: 2503822 - RNA, 19 nt, Artificial Sequence
  Description of Artificial Sequence: Synthetic oligonucleotide
  Sense strand starting at position 3946 of SEQ ID NO: 1888006
gguugucaucuuuauauaa

SEQ ID NO: 2503823 - RNA, 19 nt, Artificial Sequence
  Description of Artificial Sequence: Synthetic oligonucleotide
  Antisense strand to SEQ ID NO: 2503822
uuauauaaagaugacaacc

SEQ ID NO: 2503824 - RNA, 19 nt, Artificial Sequence
  Description of Artificial Sequence: Synthetic oligonucleotide
  Sense strand starting at position 45 of SEQ ID NO: 1888007
gcaucacgguccucucaau

SEQ ID NO: 2503825 - RNA, 19 nt, Artificial Sequence
  Description of Artificial Sequence: Synthetic oligonucleotide
  Antisense strand to SEQ ID NO: 2503824
auugagaggaccgugaugc

SEQ ID NO: 2503826 - RNA, 19 nt, Artificial Sequence
  Description of Artificial Sequence: Synthetic oligonucleotide
  Sense strand starting at position 151 of SEQ ID NO: 1888007
gugcuacuggccugguaaa

SEQ ID NO: 2503827 - RNA, 19 nt, Artificial Sequence
  Description of Artificial Sequence: Synthetic oligonucleotide
  Antisense strand to SEQ ID NO: 2503826
uuuaccaggccaguagcac

SEQ ID NO: 2503828 - RNA, 19 nt, Artificial Sequence
  Description of Artificial Sequence: Synthetic oligonucleotide
  Sense strand starting at position 152 of SEQ ID NO: 1888007
ugcuacuggccugguaaau

SEQ ID NO: 2503829 - RNA, 19 nt, Artificial Sequence
  Description of Artificial Sequence: Synthetic oligonucleotide
  Antisense strand to SEQ ID NO: 2503828
auuuaccaggccaguagca

SEQ ID NO: 2503830 - RNA, 19 nt, Artificial Sequence
  Description of Artificial Sequence: Synthetic oligonucleotide
  Sense strand starting at position 301 of SEQ ID NO: 1888007
uuuccagacccauguguua

SEQ ID NO: 2503831 - RNA, 19 nt, Artificial Sequence
  Description of Artificial Sequence: Synthetic oligonucleotide
  Antisense strand to SEQ ID NO: 2503830
uaacacaugggucuggaaa

SEQ ID NO: 2503832 - RNA, 19 nt, Artificial Sequence
  Description of Artificial Sequence: Synthetic oligonucleotide
  Sense strand starting at position 330 of SEQ ID NO: 1888007
ucccuuagucccugacacu

SEQ ID NO: 2503833 - RNA, 19 nt, Artificial Sequence
  Description of Artificial Sequence: Synthetic oligonucleotide
  Antisense strand to SEQ ID NO: 2503832
agugucagggacuaaggga

SEQ ID NO: 2503834 - RNA, 19 nt, Artificial Sequence
  Description of Artificial Sequence: Synthetic oligonucleotide
  Sense strand starting at position 331 of SEQ ID NO: 1888007
cccuuagucccugacacuu

SEQ ID NO: 2503835 - RNA, 19 nt, Artificial Sequence
  Description of Artificial Sequence: Synthetic oligonucleotide
  Antisense strand to SEQ ID NO: 2503834
aagugucagggacuaaggg

SEQ ID NO: 2503836 - RNA, 19 nt, Artificial Sequence
  Description of Artificial Sequence: Synthetic oligonucleotide
  Sense strand starting at position 395 of SEQ ID NO: 1888007
ucaggaagauccuuuguuc

SEQ ID NO: 2503837 - RNA, 19 nt, Artificial Sequence
  Description of Artificial Sequence: Synthetic oligonucleotide
  Antisense strand to SEQ ID NO: 2503836
gaacaaaggaucuuccuga

SEQ ID NO: 2503838 - RNA, 19 nt, Artificial Sequence
  Description of Artificial Sequence: Synthetic oligonucleotide
  Sense strand starting at position 398 of SEQ ID NO: 1888007
ggaagauccuuuguuccug

SEQ ID NO: 2503839 - RNA, 19 nt, Artificial Sequence
  Description of Artificial Sequence: Synthetic oligonucleotide
  Antisense strand to SEQ ID NO: 2503838
caggaacaaaggaucuucc

SEQ ID NO: 2503840 - RNA, 19 nt, Artificial Sequence
  Description of Artificial Sequence: Synthetic oligonucleotide
  Sense strand starting at position 399 of SEQ ID NO: 1888007
gaagauccuuuguuccuga

SEQ ID NO: 2503841 - RNA, 19 nt, Artificial Sequence
  Description of Artificial Sequence: Synthetic oligonucleotide
  Antisense strand to SEQ ID NO: 2503840
ucaggaacaaaggaucuuc

SEQ ID NO: 2503842 - RNA, 19 nt, Artificial Sequence
  Description of Artificial Sequence: Synthetic oligonucleotide
  Sense strand starting at position 485 of SEQ ID NO: 1888007
gaucuagacguccaaguua

SEQ ID NO: 2503843 - RNA, 19 nt, Artificial Sequence
  Description of Artificial Sequence: Synthetic oligonucleotide
  Antisense strand to SEQ ID NO: 2503842
uaacuuggacgucuagauc

SEQ ID NO: 2503844 - RNA, 19 nt, Artificial Sequence
  Description of Artificial Sequence: Synthetic oligonucleotide
  Sense strand starting at position 568 of SEQ ID NO: 1888007
uuauucuccagguguggga

SEQ ID NO: 2503845 - RNA, 19 nt, Artificial Sequence
  Description of Artificial Sequence: Synthetic oligonucleotide
  Antisense strand to SEQ ID NO: 2503844
ucccacaccuggagaauaa

SEQ ID NO: 2503846 - RNA, 19 nt, Artificial Sequence
  Description of Artificial Sequence: Synthetic oligonucleotide
  Sense strand starting at position 584 of SEQ ID NO: 1888007
ggacgccugcgguuauuau

SEQ ID NO: 2503847 - RNA, 19 nt, Artificial Sequence
  Description of Artificial Sequence: Synthetic oligonucleotide
  Antisense strand to SEQ ID NO: 2503846
auaauaaccgcaggcgucc

SEQ ID NO: 2503848 - RNA, 19 nt, Artificial Sequence
  Description of Artificial Sequence: Synthetic oligonucleotide
  Sense strand starting at position 591 of SEQ ID NO: 1888007
ugcgguuauuaugcuaaua

SEQ ID NO: 2503849 - RNA, 19 nt, Artificial Sequence
  Description of Artificial Sequence: Synthetic oligonucleotide
  Antisense strand to SEQ ID NO: 2503848
uauuagcauaauaaccgca

SEQ ID NO: 2503850 - RNA, 19 nt, Artificial Sequence
  Description of Artificial Sequence: Synthetic oligonucleotide
  Sense strand starting at position 613 of SEQ ID NO: 1888007
aaacgaugaucauugaugu

SEQ ID NO: 2503851 - RNA, 19 nt, Artificial Sequence
  Description of Artificial Sequence: Synthetic oligonucleotide
  Antisense strand to SEQ ID NO: 2503850
acaucaaugaucaucguuu

SEQ ID NO: 2503852 - RNA, 19 nt, Artificial Sequence
  Description of Artificial Sequence: Synthetic oligonucleotide
  Sense strand starting at position 619 of SEQ ID NO: 1888007
ugaucauugauguggcacu

SEQ ID NO: 2503853 - RNA, 19 nt, Artificial Sequence
  Description of Artificial Sequence: Synthetic oligonucleotide
  Antisense strand to SEQ ID NO: 2503852
agugccacaucaaugauca

SEQ ID NO: 2503854 - RNA, 19 nt, Artificial Sequence
  Description of Artificial Sequence: Synthetic oligonucleotide
  Sense strand starting at position 676 of SEQ ID NO: 1888007
gagguugguucuguuauua

SEQ ID NO: 2503855 - RNA, 19 nt, Artificial Sequence
  Description of Artificial Sequence: Synthetic oligonucleotide
  Antisense strand to SEQ ID NO: 2503854
uaauaacagaaccaaccuc

SEQ ID NO: 2503856 - RNA, 19 nt, Artificial Sequence
  Description of Artificial Sequence: Synthetic oligonucleotide
  Sense strand starting at position 714 of SEQ ID NO: 1888007
ccgaggagugguggacuua

SEQ ID NO: 2503857 - RNA, 19 nt, Artificial Sequence
  Description of Artificial Sequence: Synthetic oligonucleotide
  Antisense strand to SEQ ID NO: 2503856
uaaguccaccacuccucgg

SEQ ID NO: 2503858 - RNA, 19 nt, Artificial Sequence
  Description of Artificial Sequence: Synthetic oligonucleotide
  Sense strand starting at position 715 of SEQ ID NO: 1888007
cgaggagugguggacuuaa

SEQ ID NO: 2503859 - RNA, 19 nt, Artificial Sequence
  Description of Artificial Sequence: Synthetic oligonucleotide
  Antisense strand to SEQ ID NO: 2503858
uuaaguccaccacuccucg

SEQ ID NO: 2503860 - RNA, 19 nt, Artificial Sequence
  Description of Artificial Sequence: Synthetic oligonucleotide
  Sense strand starting at position 874 of SEQ ID NO: 1888007
ggcucuguccuccacucaa

SEQ ID NO: 2503861 - RNA, 19 nt, Artificial Sequence
  Description of Artificial Sequence: Synthetic oligonucleotide
  Antisense strand to SEQ ID NO: 2503860
uugaguggaggacagagcc

SEQ ID NO: 2503862 - RNA, 19 nt, Artificial Sequence
  Description of Artificial Sequence: Synthetic oligonucleotide
  Sense strand starting at position 1013 of SEQ ID NO: 1888007
gaugcaaaguccuccagua

SEQ ID NO: 2503863 - RNA, 19 nt, Artificial Sequence
  Description of Artificial Sequence: Synthetic oligonucleotide
  Antisense strand to SEQ ID NO: 2503862
uacuggaggacuuugcauc

SEQ ID NO: 2503864 - RNA, 19 nt, Artificial Sequence
  Description of Artificial Sequence: Synthetic oligonucleotide
  Sense strand starting at position 1015 of SEQ ID NO: 1888007
ugcaaaguccuccaguauu

SEQ ID NO: 2503865 - RNA, 19 nt, Artificial Sequence
  Description of Artificial Sequence: Synthetic oligonucleotide
  Antisense strand to SEQ ID NO: 2503864
aauacuggaggacuuugca

SEQ ID NO: 2503866 - RNA, 19 nt, Artificial Sequence
  Description of Artificial Sequence: Synthetic oligonucleotide
  Sense strand starting at position 1096 of SEQ ID NO: 1888007
ccuaaacacggugauuagu

SEQ ID NO: 2503867 - RNA, 19 nt, Artificial Sequence
  Description of Artificial Sequence: Synthetic oligonucleotide
  Antisense strand to SEQ ID NO: 2503866
acuaaucaccguguuuagg

SEQ ID NO: 2503868 - RNA, 19 nt, Artificial Sequence
  Description of Artificial Sequence: Synthetic oligonucleotide
  Sense strand starting at position 1098 of SEQ ID NO: 1888007
uaaacacggugauuaguau

SEQ ID NO: 2503869 - RNA, 19 nt, Artificial Sequence
  Description of Artificial Sequence: Synthetic oligonucleotide
  Antisense strand to SEQ ID NO: 2503868
auacuaaucaccguguuua

SEQ ID NO: 2503870 - RNA, 19 nt, Artificial Sequence
  Description of Artificial Sequence: Synthetic oligonucleotide
  Sense strand starting at position 1104 of SEQ ID NO: 1888007
cggugauuaguaugugaca

SEQ ID NO: 2503871 - RNA, 19 nt, Artificial Sequence
  Description of Artificial Sequence: Synthetic oligonucleotide
  Antisense strand to SEQ ID NO: 2503870
ugucacauacuaaucaccg

SEQ ID NO: 2503872 - RNA, 19 nt, Artificial Sequence
  Description of Artificial Sequence: Synthetic oligonucleotide
  Sense strand starting at position 1105 of SEQ ID NO: 1888007
ggugauuaguaugugacaa

SEQ ID NO: 2503873 - RNA, 19 nt, Artificial Sequence
  Description of Artificial Sequence: Synthetic oligonucleotide
  Antisense strand to SEQ ID NO: 2503872
uugucacauacuaaucacc

SEQ ID NO: 2503874 - RNA, 19 nt, Artificial Sequence
  Description of Artificial Sequence: Synthetic oligonucleotide
  Sense strand starting at position 1106 of SEQ ID NO: 1888007
gugauuaguaugugacaag

SEQ ID NO: 2503875 - RNA, 19 nt, Artificial Sequence
  Description of Artificial Sequence: Synthetic oligonucleotide
  Antisense strand to SEQ ID NO: 2503874
cuugucacauacuaaucac

SEQ ID NO: 2503876 - RNA, 19 nt, Artificial Sequence
  Description of Artificial Sequence: Synthetic oligonucleotide
  Sense strand starting at position 2268 of SEQ ID NO: 1888007
ccucgagcucuuuaaccaa

SEQ ID NO: 2503877 - RNA, 19 nt, Artificial Sequence
  Description of Artificial Sequence: Synthetic oligonucleotide
  Antisense strand to SEQ ID NO: 2503876
uugguuaaagagcucgagg

SEQ ID NO: 2503878 - RNA, 19 nt, Artificial Sequence
  Description of Artificial Sequence: Synthetic oligonucleotide
  Sense strand starting at position 2993 of SEQ ID NO: 1888007
uuguguuacccugaacaug

SEQ ID NO: 2503879 - RNA, 19 nt, Artificial Sequence
  Description of Artificial Sequence: Synthetic oligonucleotide
  Antisense strand to SEQ ID NO: 2503878
cauguucaggguaacacaa

SEQ ID NO: 2503880 - RNA, 19 nt, Artificial Sequence
  Description of Artificial Sequence: Synthetic oligonucleotide
  Sense strand starting at position 3275 of SEQ ID NO: 1888007
gaauauguauacuugugua

SEQ ID NO: 2503881 - RNA, 19 nt, Artificial Sequence
  Description of Artificial Sequence: Synthetic oligonucleotide
  Antisense strand to SEQ ID NO: 2503880
uacacaaguauacauauuc

SEQ ID NO: 2503882 - RNA, 19 nt, Artificial Sequence
  Description of Artificial Sequence: Synthetic oligonucleotide
  Sense strand starting at position 3289 of SEQ ID NO: 1888007
guguauauuuacgucuauu

SEQ ID NO: 2503883 - RNA, 19 nt, Artificial Sequence
  Description of Artificial Sequence: Synthetic oligonucleotide
  Antisense strand to SEQ ID NO: 2503882
aauagacguaaauauacac

SEQ ID NO: 2503884 - RNA, 19 nt, Artificial Sequence
  Description of Artificial Sequence: Synthetic oligonucleotide
  Sense strand starting at position 3352 of SEQ ID NO: 1888007
gagaucuuguggcccauaa

SEQ ID NO: 2503885 - RNA, 19 nt, Artificial Sequence
  Description of Artificial Sequence: Synthetic oligonucleotide
  Antisense strand to SEQ ID NO: 2503884
uuaugggccacaagaucuc

SEQ ID NO: 2503886 - RNA, 19 nt, Artificial Sequence
  Description of Artificial Sequence: Synthetic oligonucleotide
  Sense strand starting at position 3354 of SEQ ID NO: 1888007
gaucuuguggcccauaaag

SEQ ID NO: 2503887 - RNA, 19 nt, Artificial Sequence
  Description of Artificial Sequence: Synthetic oligonucleotide
  Antisense strand to SEQ ID NO: 2503886
cuuuaugggccacaagauc

SEQ ID NO: 2503888 - RNA, 19 nt, Artificial Sequence
  Description of Artificial Sequence: Synthetic oligonucleotide
  Sense strand starting at position 3379 of SEQ ID NO: 1888007
auacuauccgacuaagguu

SEQ ID NO: 2503889 - RNA, 19 nt, Artificial Sequence
  Description of Artificial Sequence: Synthetic oligonucleotide
  Antisense strand to SEQ ID NO: 2503888
aaccuuagucggauaguau

SEQ ID NO: 2503890 - RNA, 19 nt, Artificial Sequence
  Description of Artificial Sequence: Synthetic oligonucleotide
  Sense strand starting at position 3439 of SEQ ID NO: 1888007
gugggaagccagugauuga

SEQ ID NO: 2503891 - RNA, 19 nt, Artificial Sequence
  Description of Artificial Sequence: Synthetic oligonucleotide
  Antisense strand to SEQ ID NO: 2503890
ucaaucacuggcuucccac

SEQ ID NO: 2503892 - RNA, 19 nt, Artificial Sequence
  Description of Artificial Sequence: Synthetic oligonucleotide
  Sense strand starting at position 3440 of SEQ ID NO: 1888007
ugggaagccagugauugau

SEQ ID NO: 2503893 - RNA, 19 nt, Artificial Sequence
  Description of Artificial Sequence: Synthetic oligonucleotide
  Antisense strand to SEQ ID NO: 2503892
aucaaucacuggcuuccca

SEQ ID NO: 2503894 - RNA, 19 nt, Artificial Sequence
  Description of Artificial Sequence: Synthetic oligonucleotide
  Sense strand starting at position 3443 of SEQ ID NO: 1888007
gaagccagugauugauuga

SEQ ID NO: 2503895 - RNA, 19 nt, Artificial Sequence
  Description of Artificial Sequence: Synthetic oligonucleotide
  Antisense strand to SEQ ID NO: 2503894
ucaaucaaucacuggcuuc

SEQ ID NO: 2503896 - RNA, 19 nt, Artificial Sequence
  Description of Artificial Sequence: Synthetic oligonucleotide
  Sense strand starting at position 3466 of SEQ ID NO: 1888007
uugauugauuugggacgga

SEQ ID NO: 2503897 - RNA, 19 nt, Artificial Sequence
  Description of Artificial Sequence: Synthetic oligonucleotide
  Antisense strand to SEQ ID NO: 2503896
uccgucccaaaucaaucaa

SEQ ID NO: 2503898 - RNA, 19 nt, Artificial Sequence
  Description of Artificial Sequence: Synthetic oligonucleotide
  Sense strand starting at position 3809 of SEQ ID NO: 1888007
guugcauagguggguauau

SEQ ID NO: 2503899 - RNA, 19 nt, Artificial Sequence
  Description of Artificial Sequence: Synthetic oligonucleotide
  Antisense strand to SEQ ID NO: 2503898
auauacccaccuaugcaac

SEQ ID NO: 2503900 - RNA, 19 nt, Artificial Sequence
  Description of Artificial Sequence: Synthetic oligonucleotide
  Sense strand starting at position 3856 of SEQ ID NO: 1888007
ucuuucuucccaggugacu

SEQ ID NO: 2503901 - RNA, 19 nt, Artificial Sequence
  Description of Artificial Sequence: Synthetic oligonucleotide
  Antisense strand to SEQ ID NO: 2503900
agucaccugggaagaaaga

SEQ ID NO: 2503902 - RNA, 19 nt, Artificial Sequence
  Description of Artificial Sequence: Synthetic oligonucleotide
  Sense strand starting at position 3981 of SEQ ID NO: 1888007
agauacuacuauuaggacu

SEQ ID NO: 2503903 - RNA, 19 nt, Artificial Sequence
  Description of Artificial Sequence: Synthetic oligonucleotide
  Antisense strand to SEQ ID NO: 2503902
aguccuaauaguaguaucu

SEQ ID NO: 2503904 - RNA, 19 nt, Artificial Sequence
  Description of Artificial Sequence: Synthetic oligonucleotide
  Sense strand starting at position 34 of SEQ ID NO: 1888008
ggugucuugggagauaguu

SEQ ID NO: 2503905 - RNA, 19 nt, Artificial Sequence
  Description of Artificial Sequence: Synthetic oligonucleotide
  Antisense strand to SEQ ID NO: 2503904
aacuaucucccaagacacc

SEQ ID NO: 2503906 - RNA, 19 nt, Artificial Sequence
  Description of Artificial Sequence: Synthetic oligonucleotide
  Sense strand starting at position 40 of SEQ ID NO: 1888008
uugggagauaguugcuuua

SEQ ID NO: 2503907 - RNA, 19 nt, Artificial Sequence
  Description of Artificial Sequence: Synthetic oligonucleotide
  Antisense strand to SEQ ID NO: 2503906
uaaagcaacuaucucccaa

SEQ ID NO: 2503908 - RNA, 19 nt, Artificial Sequence
  Description of Artificial Sequence: Synthetic oligonucleotide
  Sense strand starting at position 42 of SEQ ID NO: 1888008
gggagauaguugcuuuauu

SEQ ID NO: 2503909 - RNA, 19 nt, Artificial Sequence
  Description of Artificial Sequence: Synthetic oligonucleotide
  Antisense strand to SEQ ID NO: 2503908
aauaaagcaacuaucuccc

SEQ ID NO: 2503910 - RNA, 19 nt, Artificial Sequence
  Description of Artificial Sequence: Synthetic oligonucleotide
  Sense strand starting at position 43 of SEQ ID NO: 1888008
ggagauaguugcuuuauuc

SEQ ID NO: 2503911 - RNA, 19 nt, Artificial Sequence
  Description of Artificial Sequence: Synthetic oligonucleotide
  Antisense strand to SEQ ID NO: 2503910
gaauaaagcaacuaucucc

SEQ ID NO: 2503912 - RNA, 19 nt, Artificial Sequence
  Description of Artificial Sequence: Synthetic oligonucleotide
  Sense strand starting at position 53 of SEQ ID NO: 1888008
gcuuuauucggagaauggg

SEQ ID NO: 2503913 - RNA, 19 nt, Artificial Sequence
  Description of Artificial Sequence: Synthetic oligonucleotide
  Antisense strand to SEQ ID NO: 2503912
cccauucuccgaauaaagc

SEQ ID NO: 2503914 - RNA, 19 nt, Artificial Sequence
  Description of Artificial Sequence: Synthetic oligonucleotide
  Sense strand starting at position 202 of SEQ ID NO: 1888008
augacauacuuucuuggga

SEQ ID NO: 2503915 - RNA, 19 nt, Artificial Sequence
  Description of Artificial Sequence: Synthetic oligonucleotide
  Antisense strand to SEQ ID NO: 2503914
ucccaagaaaguaugucau

SEQ ID NO: 2503916 - RNA, 19 nt, Artificial Sequence
  Description of Artificial Sequence: Synthetic oligonucleotide
  Sense strand starting at position 211 of SEQ ID NO: 1888008
uuucuugggaggugguuua

SEQ ID NO: 2503917 - RNA, 19 nt, Artificial Sequence
  Description of Artificial Sequence: Synthetic oligonucleotide
  Antisense strand to SEQ ID NO: 2503916
uaaaccaccucccaagaaa

SEQ ID NO: 2503918 - RNA, 19 nt, Artificial Sequence
  Description of Artificial Sequence: Synthetic oligonucleotide
  Sense strand starting at position 300 of SEQ ID NO: 1888008
auucuaguauuaccaggua

SEQ ID NO: 2503919 - RNA, 19 nt, Artificial Sequence
  Description of Artificial Sequence: Synthetic oligonucleotide
  Antisense strand to SEQ ID NO: 2503918
uaccugguaauacuagaau

SEQ ID NO: 2503920 - RNA, 19 nt, Artificial Sequence
  Description of Artificial Sequence: Synthetic oligonucleotide
  Sense strand starting at position 449 of SEQ ID NO: 1888008
cugcuagucacagagguaa

SEQ ID NO: 2503921 - RNA, 19 nt, Artificial Sequence
  Description of Artificial Sequence: Synthetic oligonucleotide
  Antisense strand to SEQ ID NO: 2503920
uuaccucugugacuagcag

SEQ ID NO: 2503922 - RNA, 19 nt, Artificial Sequence
  Description of Artificial Sequence: Synthetic oligonucleotide
  Sense strand starting at position 451 of SEQ ID NO: 1888008
gcuagucacagagguaaug

SEQ ID NO: 2503923 - RNA, 19 nt, Artificial Sequence
  Description of Artificial Sequence: Synthetic oligonucleotide
  Antisense strand to SEQ ID NO: 2503922
cauuaccucugugacuagc

SEQ ID NO: 2503924 - RNA, 19 nt, Artificial Sequence
  Description of Artificial Sequence: Synthetic oligonucleotide
  Sense strand starting at position 1073 of SEQ ID NO: 1888008
ucgaaaccuuagucggaua

SEQ ID NO: 2503925 - RNA, 19 nt, Artificial Sequence
  Description of Artificial Sequence: Synthetic oligonucleotide
  Antisense strand to SEQ ID NO: 2503924
uauccgacuaagguuucga

SEQ ID NO: 2503926 - RNA, 19 nt, Artificial Sequence
  Description of Artificial Sequence: Synthetic oligonucleotide
  Sense strand starting at position 1075 of SEQ ID NO: 1888008
gaaaccuuagucggauagu

SEQ ID NO: 2503927 - RNA, 19 nt, Artificial Sequence
  Description of Artificial Sequence: Synthetic oligonucleotide
  Antisense strand to SEQ ID NO: 2503926
acuauccgacuaagguuuc

SEQ ID NO: 2503928 - RNA, 19 nt, Artificial Sequence
  Description of Artificial Sequence: Synthetic oligonucleotide
  Sense strand starting at position 1078 of SEQ ID NO: 1888008
accuuagucggauaguauu

SEQ ID NO: 2503929 - RNA, 19 nt, Artificial Sequence
  Description of Artificial Sequence: Synthetic oligonucleotide
  Antisense strand to SEQ ID NO: 2503928
aauacuauccgacuaaggu

SEQ ID NO: 2503930 - RNA, 19 nt, Artificial Sequence
  Description of Artificial Sequence: Synthetic oligonucleotide
  Sense strand starting at position 1100 of SEQ ID NO: 1888008
ggcuuuaugggccacaaga

SEQ ID NO: 2503931 - RNA, 19 nt, Artificial Sequence
  Description of Artificial Sequence: Synthetic oligonucleotide
  Antisense strand to SEQ ID NO: 2503930
ucuuguggcccauaaagcc

SEQ ID NO: 2503932 - RNA, 19 nt, Artificial Sequence
  Description of Artificial Sequence: Synthetic oligonucleotide
  Sense strand starting at position 1243 of SEQ ID NO: 1888008
gggcucuagagucaacagu

SEQ ID NO: 2503933 - RNA, 19 nt, Artificial Sequence
  Description of Artificial Sequence: Synthetic oligonucleotide
  Antisense strand to SEQ ID NO: 2503932
acuguugacucuagagccc

SEQ ID NO: 2503934 - RNA, 19 nt, Artificial Sequence
  Description of Artificial Sequence: Synthetic oligonucleotide
  Sense strand starting at position 1447 of SEQ ID NO: 1888008
aagguucguccucacacau

SEQ ID NO: 2503935 - RNA, 19 nt, Artificial Sequence
  Description of Artificial Sequence: Synthetic oligonucleotide
  Antisense strand to SEQ ID NO: 2503934
augugugaggacgaaccuu

SEQ ID NO: 2503936 - RNA, 19 nt, Artificial Sequence
  Description of Artificial Sequence: Synthetic oligonucleotide
  Sense strand starting at position 2177 of SEQ ID NO: 1888008
ggagguuggguuugguuaa

SEQ ID NO: 2503937 - RNA, 19 nt, Artificial Sequence
  Description of Artificial Sequence: Synthetic oligonucleotide
  Antisense strand to SEQ ID NO: 2503936
uuaaccaaacccaaccucc

SEQ ID NO: 2503938 - RNA, 19 nt, Artificial Sequence
  Description of Artificial Sequence: Synthetic oligonucleotide
  Sense strand starting at position 2190 of SEQ ID NO: 1888008
gguuaaagagcucgaggaa

SEQ ID NO: 2503939 - RNA, 19 nt, Artificial Sequence
  Description of Artificial Sequence: Synthetic oligonucleotide
  Antisense strand to SEQ ID NO: 2503938
uuccucgagcucuuuaacc

SEQ ID NO: 2503940 - RNA, 19 nt, Artificial Sequence
  Description of Artificial Sequence: Synthetic oligonucleotide
  Sense strand starting at position 2225 of SEQ ID NO: 1888008
acgugaucuccugagagga

SEQ ID NO: 2503941 - RNA, 19 nt, Artificial Sequence
  Description of Artificial Sequence: Synthetic oligonucleotide
  Antisense strand to SEQ ID NO: 2503940
uccucucaggagaucacgu

SEQ ID NO: 2503942 - RNA, 19 nt, Artificial Sequence
  Description of Artificial Sequence: Synthetic oligonucleotide
  Sense strand starting at position 2580 of SEQ ID NO: 1888008
gggucugagcccgggaaga

SEQ ID NO: 2503943 - RNA, 19 nt, Artificial Sequence
  Description of Artificial Sequence: Synthetic oligonucleotide
  Antisense strand to SEQ ID NO: 2503942
ucuucccgggcucagaccc

SEQ ID NO: 2503944 - RNA, 19 nt, Artificial Sequence
  Description of Artificial Sequence: Synthetic oligonucleotide
  Sense strand starting at position 3027 of SEQ ID NO: 1888008
gcugaugugggcguuuauu

SEQ ID NO: 2503945 - RNA, 19 nt, Artificial Sequence
  Description of Artificial Sequence: Synthetic oligonucleotide
  Antisense strand to SEQ ID NO: 2503944
aauaaacgcccacaucagc

SEQ ID NO: 2503946 - RNA, 19 nt, Artificial Sequence
  Description of Artificial Sequence: Synthetic oligonucleotide
  Sense strand starting at position 3076 of SEQ ID NO: 1888008
ggcgucugucugccacuua

SEQ ID NO: 2503947 - RNA, 19 nt, Artificial Sequence
  Description of Artificial Sequence: Synthetic oligonucleotide
  Antisense strand to SEQ ID NO: 2503946
uaaguggcagacagacgcc

SEQ ID NO: 2503948 - RNA, 19 nt, Artificial Sequence
  Description of Artificial Sequence: Synthetic oligonucleotide
  Sense strand starting at position 3150 of SEQ ID NO: 1888008
cacuguaaccauggaaaug

SEQ ID NO: 2503949 - RNA, 19 nt, Artificial Sequence
  Description of Artificial Sequence: Synthetic oligonucleotide
  Antisense strand to SEQ ID NO: 2503948
cauuuccaugguuacagug

SEQ ID NO: 2503950 - RNA, 19 nt, Artificial Sequence
  Description of Artificial Sequence: Synthetic oligonucleotide
  Sense strand starting at position 3221 of SEQ ID NO: 1888008
uggaaaucuguggaacugu

SEQ ID NO: 2503951 - RNA, 19 nt, Artificial Sequence
  Description of Artificial Sequence: Synthetic oligonucleotide
  Antisense strand to SEQ ID NO: 2503950
acaguuccacagauuucca

SEQ ID NO: 2503952 - RNA, 19 nt, Artificial Sequence
  Description of Artificial Sequence: Synthetic oligonucleotide
  Sense strand starting at position 3229 of SEQ ID NO: 1888008
uguggaacuguuuaauugu

SEQ ID NO: 2503953 - RNA, 19 nt, Artificial Sequence
  Description of Artificial Sequence: Synthetic oligonucleotide
  Antisense strand to SEQ ID NO: 2503952
acaauuaaacaguuccaca

SEQ ID NO: 2503954 - RNA, 19 nt, Artificial Sequence
  Description of Artificial Sequence: Synthetic oligonucleotide
  Sense strand starting at position 3237 of SEQ ID NO: 1888008
uguuuaauugugcaugacu

SEQ ID NO: 2503955 - RNA, 19 nt, Artificial Sequence
  Description of Artificial Sequence: Synthetic oligonucleotide
  Antisense strand to SEQ ID NO: 2503954
agucaugcacaauuaaaca

SEQ ID NO: 2503956 - RNA, 19 nt, Artificial Sequence
  Description of Artificial Sequence: Synthetic oligonucleotide
  Sense strand starting at position 3251 of SEQ ID NO: 1888008
ugacuuuccuccuugguaa

SEQ ID NO: 2503957 - RNA, 19 nt, Artificial Sequence
  Description of Artificial Sequence: Synthetic oligonucleotide
  Antisense strand to SEQ ID NO: 2503956
uuaccaaggaggaaaguca

SEQ ID NO: 2503958 - RNA, 19 nt, Artificial Sequence
  Description of Artificial Sequence: Synthetic oligonucleotide
  Sense strand starting at position 3293 of SEQ ID NO: 1888008
cuggguguuauugggaaga

SEQ ID NO: 2503959 - RNA, 19 nt, Artificial Sequence
  Description of Artificial Sequence: Synthetic oligonucleotide
  Antisense strand to SEQ ID NO: 2503958
ucuucccaauaacacccag

SEQ ID NO: 2503960 - RNA, 19 nt, Artificial Sequence
  Description of Artificial Sequence: Synthetic oligonucleotide
  Sense strand starting at position 3310 of SEQ ID NO: 1888008
gauuaaaugggaugacgua

SEQ ID NO: 2503961 - RNA, 19 nt, Artificial Sequence
  Description of Artificial Sequence: Synthetic oligonucleotide
  Antisense strand to SEQ ID NO: 2503960
uacgucaucccauuuaauc

SEQ ID NO: 2503962 - RNA, 19 nt, Artificial Sequence
  Description of Artificial Sequence: Synthetic oligonucleotide
  Sense strand starting at position 3319 of SEQ ID NO: 1888008
ggaugacguagcugaaaca

SEQ ID NO: 2503963 - RNA, 19 nt, Artificial Sequence
  Description of Artificial Sequence: Synthetic oligonucleotide
  Antisense strand to SEQ ID NO: 2503962
uguuucagcuacgucaucc

SEQ ID NO: 2503964 - RNA, 19 nt, Artificial Sequence
  Description of Artificial Sequence: Synthetic oligonucleotide
  Sense strand starting at position 3369 of SEQ ID NO: 1888008
cguguuuagguguugguua

SEQ ID NO: 2503965 - RNA, 19 nt, Artificial Sequence
  Description of Artificial Sequence: Synthetic oligonucleotide
  Antisense strand to SEQ ID NO: 2503964
uaaccaacaccuaaacacg

SEQ ID NO: 2503966 - RNA, 19 nt, Artificial Sequence
  Description of Artificial Sequence: Synthetic oligonucleotide
  Sense strand starting at position 3428 of SEQ ID NO: 1888008
agagguaguggugaauacu

SEQ ID NO: 2503967 - RNA, 19 nt, Artificial Sequence
  Description of Artificial Sequence: Synthetic oligonucleotide
  Antisense strand to SEQ ID NO: 2503966
aguauucaccacuaccucu

SEQ ID NO: 2503968 - RNA, 19 nt, Artificial Sequence
  Description of Artificial Sequence: Synthetic oligonucleotide
  Sense strand starting at position 3438 of SEQ ID NO: 1888008
gugaauacuggaggacuuu

SEQ ID NO: 2503969 - RNA, 19 nt, Artificial Sequence
  Description of Artificial Sequence: Synthetic oligonucleotide
  Antisense strand to SEQ ID NO: 2503968
aaaguccuccaguauucac

SEQ ID NO: 2503970 - RNA, 19 nt, Artificial Sequence
  Description of Artificial Sequence: Synthetic oligonucleotide
  Sense strand starting at position 3721 of SEQ ID NO: 1888008
gugugacugagagagcuua

SEQ ID NO: 2503971 - RNA, 19 nt, Artificial Sequence
  Description of Artificial Sequence: Synthetic oligonucleotide
  Antisense strand to SEQ ID NO: 2503970
uaagcucucucagucacac

SEQ ID NO: 2503972 - RNA, 19 nt, Artificial Sequence
  Description of Artificial Sequence: Synthetic oligonucleotide
  Sense strand starting at position 3729 of SEQ ID NO: 1888008
gagagagcuuacuuaaguc

SEQ ID NO: 2503973 - RNA, 19 nt, Artificial Sequence
  Description of Artificial Sequence: Synthetic oligonucleotide
  Antisense strand to SEQ ID NO: 2503972
gacuuaaguaagcucucuc

SEQ ID NO: 2503974 - RNA, 19 nt, Artificial Sequence
  Description of Artificial Sequence: Synthetic oligonucleotide
  Sense strand starting at position 3798 of SEQ ID NO: 1888008
cagguuuauggugagcaua

SEQ ID NO: 2503975 - RNA, 19 nt, Artificial Sequence
  Description of Artificial Sequence: Synthetic oligonucleotide
  Antisense strand to SEQ ID NO: 2503974
uaugcucaccauaaaccug

SEQ ID NO: 2503976 - RNA, 19 nt, Artificial Sequence
  Description of Artificial Sequence: Synthetic oligonucleotide
  Sense strand starting at position 3800 of SEQ ID NO: 1888008
gguuuauggugagcauaag

SEQ ID NO: 2503977 - RNA, 19 nt, Artificial Sequence
  Description of Artificial Sequence: Synthetic oligonucleotide
  Antisense strand to SEQ ID NO: 2503976
cuuaugcucaccauaaacc

SEQ ID NO: 2503978 - RNA, 19 nt, Artificial Sequence
  Description of Artificial Sequence: Synthetic oligonucleotide
  Sense strand starting at position 3801 of SEQ ID NO: 1888008
guuuauggugagcauaagu

SEQ ID NO: 2503979 - RNA, 19 nt, Artificial Sequence
  Description of Artificial Sequence: Synthetic oligonucleotide
  Antisense strand to SEQ ID NO: 2503978
acuuaugcucaccauaaac

SEQ ID NO: 2503980 - RNA, 19 nt, Artificial Sequence
  Description of Artificial Sequence: Synthetic oligonucleotide
  Sense strand starting at position 3838 of SEQ ID NO: 1888008
gugccacaucaaugaucau

SEQ ID NO: 2503981 - RNA, 19 nt, Artificial Sequence
  Description of Artificial Sequence: Synthetic oligonucleotide
  Antisense strand to SEQ ID NO: 2503980
augaucauugauguggcac

SEQ ID NO: 2503982 - RNA, 19 nt, Artificial Sequence
  Description of Artificial Sequence: Synthetic oligonucleotide
  Sense strand starting at position 3950 of SEQ ID NO: 1888008
guugcagguccagagguaa

SEQ ID NO: 2503983 - RNA, 19 nt, Artificial Sequence
  Description of Artificial Sequence: Synthetic oligonucleotide
  Antisense strand to SEQ ID NO: 2503982
uuaccucuggaccugcaac

SEQ ID NO: 2503984 - RNA, 19 nt, Artificial Sequence
  Description of Artificial Sequence: Synthetic oligonucleotide
  Sense strand starting at position 107 of SEQ ID NO: 1888009
ggagcugucauaggaucag

SEQ ID NO: 2503985 - RNA, 19 nt, Artificial Sequence
  Description of Artificial Sequence: Synthetic oligonucleotide
  Antisense strand to SEQ ID NO: 2503984
cugauccuaugacagcucc

SEQ ID NO: 2503986 - RNA, 19 nt, Artificial Sequence
  Description of Artificial Sequence: Synthetic oligonucleotide
  Sense strand starting at position 111 of SEQ ID NO: 1888009
cugucauaggaucagguau

SEQ ID NO: 2503987 - RNA, 19 nt, Artificial Sequence
  Description of Artificial Sequence: Synthetic oligonucleotide
  Antisense strand to SEQ ID NO: 2503986
auaccugauccuaugacag

SEQ ID NO: 2503988 - RNA, 19 nt, Artificial Sequence
  Description of Artificial Sequence: Synthetic oligonucleotide
  Sense strand starting at position 184 of SEQ ID NO: 1888009
ggaguccugaggugagagu

SEQ ID NO: 2503989 - RNA, 19 nt, Artificial Sequence
  Description of Artificial Sequence: Synthetic oligonucleotide
  Antisense strand to SEQ ID NO: 2503988
acucucaccucaggacucc

SEQ ID NO: 2503990 - RNA, 19 nt, Artificial Sequence
  Description of Artificial Sequence: Synthetic oligonucleotide
  Sense strand starting at position 284 of SEQ ID NO: 1888009
ggugucuugggagauaguu

SEQ ID NO: 2503991 - RNA, 19 nt, Artificial Sequence
  Description of Artificial Sequence: Synthetic oligonucleotide
  Antisense strand to SEQ ID NO: 2503990
aacuaucucccaagacacc

SEQ ID NO: 2503992 - RNA, 19 nt, Artificial Sequence
  Description of Artificial Sequence: Synthetic oligonucleotide
  Sense strand starting at position 290 of SEQ ID NO: 1888009
uugggagauaguugcuuua

SEQ ID NO: 2503993 - RNA, 19 nt, Artificial Sequence
  Description of Artificial Sequence: Synthetic oligonucleotide
  Antisense strand to SEQ ID NO: 2503992
uaaagcaacuaucucccaa

SEQ ID NO: 2503994 - RNA, 19 nt, Artificial Sequence
  Description of Artificial Sequence: Synthetic oligonucleotide
  Sense strand starting at position 292 of SEQ ID NO: 1888009
gggagauaguugcuuuauu

SEQ ID NO: 2503995 - RNA, 19 nt, Artificial Sequence
  Description of Artificial Sequence: Synthetic oligonucleotide
  Antisense strand to SEQ ID NO: 2503994
aauaaagcaacuaucuccc

SEQ ID NO: 2503996 - RNA, 19 nt, Artificial Sequence
  Description of Artificial Sequence: Synthetic oligonucleotide
  Sense strand starting at position 293 of SEQ ID NO: 1888009
ggagauaguugcuuuauuc

SEQ ID NO: 2503997 - RNA, 19 nt, Artificial Sequence
  Description of Artificial Sequence: Synthetic oligonucleotide
  Antisense strand to SEQ ID NO: 2503996
gaauaaagcaacuaucucc

SEQ ID NO: 2503998 - RNA, 19 nt, Artificial Sequence
  Description of Artificial Sequence: Synthetic oligonucleotide
  Sense strand starting at position 303 of SEQ ID NO: 1888009
gcuuuauucggagaauggg

SEQ ID NO: 2503999 - RNA, 19 nt, Artificial Sequence
  Description of Artificial Sequence: Synthetic oligonucleotide
  Antisense strand to SEQ ID NO: 2503998
cccauucuccgaauaaagc

SEQ ID NO: 2504000 - RNA, 19 nt, Artificial Sequence
  Description of Artificial Sequence: Synthetic oligonucleotide
  Sense strand starting at position 452 of SEQ ID NO: 1888009
augacauacuuucuuggga

SEQ ID NO: 2504001 - RNA, 19 nt, Artificial Sequence
  Description of Artificial Sequence: Synthetic oligonucleotide
  Antisense strand to SEQ ID NO: 2504000
ucccaagaaaguaugucau

SEQ ID NO: 2504002 - RNA, 19 nt, Artificial Sequence
  Description of Artificial Sequence: Synthetic oligonucleotide
  Sense strand starting at position 461 of SEQ ID NO: 1888009
uuucuugggaggugguuua

SEQ ID NO: 2504003 - RNA, 19 nt, Artificial Sequence
  Description of Artificial Sequence: Synthetic oligonucleotide
  Antisense strand to SEQ ID NO: 2504002
uaaaccaccucccaagaaa

SEQ ID NO: 2504004 - RNA, 19 nt, Artificial Sequence
  Description of Artificial Sequence: Synthetic oligonucleotide
  Sense strand starting at position 550 of SEQ ID NO: 1888009
auucuaguauuaccaggua

SEQ ID NO: 2504005 - RNA, 19 nt, Artificial Sequence
  Description of Artificial Sequence: Synthetic oligonucleotide
  Antisense strand to SEQ ID NO: 2504004
uaccugguaauacuagaau

SEQ ID NO: 2504006 - RNA, 19 nt, Artificial Sequence
  Description of Artificial Sequence: Synthetic oligonucleotide
  Sense strand starting at position 699 of SEQ ID NO: 1888009
cugcuagucacagagguaa

SEQ ID NO: 2504007 - RNA, 19 nt, Artificial Sequence
  Description of Artificial Sequence: Synthetic oligonucleotide
  Antisense strand to SEQ ID NO: 2504006
uuaccucugugacuagcag

SEQ ID NO: 2504008 - RNA, 19 nt, Artificial Sequence
  Description of Artificial Sequence: Synthetic oligonucleotide
  Sense strand starting at position 701 of SEQ ID NO: 1888009
gcuagucacagagguaaug

SEQ ID NO: 2504009 - RNA, 19 nt, Artificial Sequence
  Description of Artificial Sequence: Synthetic oligonucleotide
  Antisense strand to SEQ ID NO: 2504008
cauuaccucugugacuagc

SEQ ID NO: 2504010 - RNA, 19 nt, Artificial Sequence
  Description of Artificial Sequence: Synthetic oligonucleotide
  Sense strand starting at position 1323 of SEQ ID NO: 1888009
ucgaaaccuuagucggaua

SEQ ID NO: 2504011 - RNA, 19 nt, Artificial Sequence
  Description of Artificial Sequence: Synthetic oligonucleotide
  Antisense strand to SEQ ID NO: 2504010
uauccgacuaagguuucga

SEQ ID NO: 2504012 - RNA, 19 nt, Artificial Sequence
  Description of Artificial Sequence: Synthetic oligonucleotide
  Sense strand starting at position 1325 of SEQ ID NO: 1888009
gaaaccuuagucggauagu

SEQ ID NO: 2504013 - RNA, 19 nt, Artificial Sequence
  Description of Artificial Sequence: Synthetic oligonucleotide
  Antisense strand to SEQ ID NO: 2504012
acuauccgacuaagguuuc

SEQ ID NO: 2504014 - RNA, 19 nt, Artificial Sequence
  Description of Artificial Sequence: Synthetic oligonucleotide
  Sense strand starting at position 1328 of SEQ ID NO: 1888009
accuuagucggauaguauu

SEQ ID NO: 2504015 - RNA, 19 nt, Artificial Sequence
  Description of Artificial Sequence: Synthetic oligonucleotide
  Antisense strand to SEQ ID NO: 2504014
aauacuauccgacuaaggu

SEQ ID NO: 2504016 - RNA, 19 nt, Artificial Sequence
  Description of Artificial Sequence: Synthetic oligonucleotide
  Sense strand starting at position 1350 of SEQ ID NO: 1888009
ggcuuuaugggccacaaga

SEQ ID NO: 2504017 - RNA, 19 nt, Artificial Sequence
  Description of Artificial Sequence: Synthetic oligonucleotide
  Antisense strand to SEQ ID NO: 2504016
ucuuguggcccauaaagcc

SEQ ID NO: 2504018 - RNA, 19 nt, Artificial Sequence
  Description of Artificial Sequence: Synthetic oligonucleotide
  Sense strand starting at position 1493 of SEQ ID NO: 1888009
gggcucuagagucaacagu

SEQ ID NO: 2504019 - RNA, 19 nt, Artificial Sequence
  Description of Artificial Sequence: Synthetic oligonucleotide
  Antisense strand to SEQ ID NO: 2504018
acuguugacucuagagccc

SEQ ID NO: 2504020 - RNA, 19 nt, Artificial Sequence
  Description of Artificial Sequence: Synthetic oligonucleotide
  Sense strand starting at position 1696 of SEQ ID NO: 1888009
aaagguucguccucacaca

SEQ ID NO: 2504021 - RNA, 19 nt, Artificial Sequence
  Description of Artificial Sequence: Synthetic oligonucleotide
  Antisense strand to SEQ ID NO: 2504020
ugugugaggacgaaccuuu

SEQ ID NO: 2504022 - RNA, 19 nt, Artificial Sequence
  Description of Artificial Sequence: Synthetic oligonucleotide
  Sense strand starting at position 1697 of SEQ ID NO: 1888009
aagguucguccucacacau

SEQ ID NO: 2504023 - RNA, 19 nt, Artificial Sequence
  Description of Artificial Sequence: Synthetic oligonucleotide
  Antisense strand to SEQ ID NO: 2504022
augugugaggacgaaccuu

SEQ ID NO: 2504024 - RNA, 19 nt, Artificial Sequence
  Description of Artificial Sequence: Synthetic oligonucleotide
  Sense strand starting at position 2427 of SEQ ID NO: 1888009
ggagguuggguuugguuaa

SEQ ID NO: 2504025 - RNA, 19 nt, Artificial Sequence
  Description of Artificial Sequence: Synthetic oligonucleotide
  Antisense strand to SEQ ID NO: 2504024
uuaaccaaacccaaccucc

SEQ ID NO: 2504026 - RNA, 19 nt, Artificial Sequence
  Description of Artificial Sequence: Synthetic oligonucleotide
  Sense strand starting at position 2440 of SEQ ID NO: 1888009
gguuaaagagcucgaggaa

SEQ ID NO: 2504027 - RNA, 19 nt, Artificial Sequence
  Description of Artificial Sequence: Synthetic oligonucleotide
  Antisense strand to SEQ ID NO: 2504026
uuccucgagcucuuuaacc

SEQ ID NO: 2504028 - RNA, 19 nt, Artificial Sequence
  Description of Artificial Sequence: Synthetic oligonucleotide
  Sense strand starting at position 2475 of SEQ ID NO: 1888009
acgugaucuccugagagga

SEQ ID NO: 2504029 - RNA, 19 nt, Artificial Sequence
  Description of Artificial Sequence: Synthetic oligonucleotide
  Antisense strand to SEQ ID NO: 2504028
uccucucaggagaucacgu

SEQ ID NO: 2504030 - RNA, 19 nt, Artificial Sequence
  Description of Artificial Sequence: Synthetic oligonucleotide
  Sense strand starting at position 2830 of SEQ ID NO: 1888009
gggucugagcccgggaaga

SEQ ID NO: 2504031 - RNA, 19 nt, Artificial Sequence
  Description of Artificial Sequence: Synthetic oligonucleotide
  Antisense strand to SEQ ID NO: 2504030
ucuucccgggcucagaccc

SEQ ID NO: 2504032 - RNA, 19 nt, Artificial Sequence
  Description of Artificial Sequence: Synthetic oligonucleotide
  Sense strand starting at position 3277 of SEQ ID NO: 1888009
gcugaugugggcguuuauu

SEQ ID NO: 2504033 - RNA, 19 nt, Artificial Sequence
  Description of Artificial Sequence: Synthetic oligonucleotide
  Antisense strand to SEQ ID NO: 2504032
aauaaacgcccacaucagc

SEQ ID NO: 2504034 - RNA, 19 nt, Artificial Sequence
  Description of Artificial Sequence: Synthetic oligonucleotide
  Sense strand starting at position 3326 of SEQ ID NO: 1888009
ggcgucugucugccacuua

SEQ ID NO: 2504035 - RNA, 19 nt, Artificial Sequence
  Description of Artificial Sequence: Synthetic oligonucleotide
  Antisense strand to SEQ ID NO: 2504034
uaaguggcagacagacgcc

SEQ ID NO: 2504036 - RNA, 19 nt, Artificial Sequence
  Description of Artificial Sequence: Synthetic oligonucleotide
  Sense strand starting at position 3400 of SEQ ID NO: 1888009
cacuguaaccauggaaaug

SEQ ID NO: 2504037 - RNA, 19 nt, Artificial Sequence
  Description of Artificial Sequence: Synthetic oligonucleotide
  Antisense strand to SEQ ID NO: 2504036
cauuuccaugguuacagug

SEQ ID NO: 2504038 - RNA, 19 nt, Artificial Sequence
  Description of Artificial Sequence: Synthetic oligonucleotide
  Sense strand starting at position 3471 of SEQ ID NO: 1888009
uggaaaucuguggaacugu

SEQ ID NO: 2504039 - RNA, 19 nt, Artificial Sequence
  Description of Artificial Sequence: Synthetic oligonucleotide
  Antisense strand to SEQ ID NO: 2504038
acaguuccacagauuucca

SEQ ID NO: 2504040 - RNA, 19 nt, Artificial Sequence
  Description of Artificial Sequence: Synthetic oligonucleotide
  Sense strand starting at position 3479 of SEQ ID NO: 1888009
uguggaacuguuuaauugu

SEQ ID NO: 2504041 - RNA, 19 nt, Artificial Sequence
  Description of Artificial Sequence: Synthetic oligonucleotide
  Antisense strand to SEQ ID NO: 2504040
acaauuaaacaguuccaca

SEQ ID NO: 2504042 - RNA, 19 nt, Artificial Sequence
  Description of Artificial Sequence: Synthetic oligonucleotide
  Sense strand starting at position 3487 of SEQ ID NO: 1888009
uguuuaauugugcaugacu

SEQ ID NO: 2504043 - RNA, 19 nt, Artificial Sequence
  Description of Artificial Sequence: Synthetic oligonucleotide
  Antisense strand to SEQ ID NO: 2504042
agucaugcacaauuaaaca

SEQ ID NO: 2504044 - RNA, 19 nt, Artificial Sequence
  Description of Artificial Sequence: Synthetic oligonucleotide
  Sense strand starting at position 3501 of SEQ ID NO: 1888009
ugacuuuccuccuugguaa

SEQ ID NO: 2504045 - RNA, 19 nt, Artificial Sequence
  Description of Artificial Sequence: Synthetic oligonucleotide
  Antisense strand to SEQ ID NO: 2504044
uuaccaaggaggaaaguca

SEQ ID NO: 2504046 - RNA, 19 nt, Artificial Sequence
  Description of Artificial Sequence: Synthetic oligonucleotide
  Sense strand starting at position 3543 of SEQ ID NO: 1888009
cuggguguuauugggaaga

SEQ ID NO: 2504047 - RNA, 19 nt, Artificial Sequence
  Description of Artificial Sequence: Synthetic oligonucleotide
  Antisense strand to SEQ ID NO: 2504046
ucuucccaauaacacccag

SEQ ID NO: 2504048 - RNA, 19 nt, Artificial Sequence
  Description of Artificial Sequence: Synthetic oligonucleotide
  Sense strand starting at position 3560 of SEQ ID NO: 1888009
gauuaaaugggaugacgua

SEQ ID NO: 2504049 - RNA, 19 nt, Artificial Sequence
  Description of Artificial Sequence: Synthetic oligonucleotide
  Antisense strand to SEQ ID NO: 2504048
uacgucaucccauuuaauc

SEQ ID NO: 2504050 - RNA, 19 nt, Artificial Sequence
  Description of Artificial Sequence: Synthetic oligonucleotide
  Sense strand starting at position 3569 of SEQ ID NO: 1888009
ggaugacguagcugaaaca

SEQ ID NO: 2504051 - RNA, 19 nt, Artificial Sequence
  Description of Artificial Sequence: Synthetic oligonucleotide
  Antisense strand to SEQ ID NO: 2504050
uguuucagcuacgucaucc

SEQ ID NO: 2504052 - RNA, 19 nt, Artificial Sequence
  Description of Artificial Sequence: Synthetic oligonucleotide
  Sense strand starting at position 3619 of SEQ ID NO: 1888009
cguguuuagguguugguua

SEQ ID NO: 2504053 - RNA, 19 nt, Artificial Sequence
  Description of Artificial Sequence: Synthetic oligonucleotide
  Antisense strand to SEQ ID NO: 2504052
uaaccaacaccuaaacacg

SEQ ID NO: 2504054 - RNA, 19 nt, Artificial Sequence
  Description of Artificial Sequence: Synthetic oligonucleotide
  Sense strand starting at position 3675 of SEQ ID NO: 1888009
ggcagagguaguggugaau

SEQ ID NO: 2504055 - RNA, 19 nt, Artificial Sequence
  Description of Artificial Sequence: Synthetic oligonucleotide
  Antisense strand to SEQ ID NO: 2504054
auucaccacuaccucugcc

SEQ ID NO: 2504056 - RNA, 19 nt, Artificial Sequence
  Description of Artificial Sequence: Synthetic oligonucleotide
  Sense strand starting at position 3678 of SEQ ID NO: 1888009
agagguaguggugaauacu

SEQ ID NO: 2504057 - RNA, 19 nt, Artificial Sequence
  Description of Artificial Sequence: Synthetic oligonucleotide
  Antisense strand to SEQ ID NO: 2504056
aguauucaccacuaccucu

SEQ ID NO: 2504058 - RNA, 19 nt, Artificial Sequence
  Description of Artificial Sequence: Synthetic oligonucleotide
  Sense strand starting at position 3688 of SEQ ID NO: 1888009
gugaauacuggaggacuuu

SEQ ID NO: 2504059 - RNA, 19 nt, Artificial Sequence
  Description of Artificial Sequence: Synthetic oligonucleotide
  Antisense strand to SEQ ID NO: 2504058
aaaguccuccaguauucac

SEQ ID NO: 2504060 - RNA, 19 nt, Artificial Sequence
  Description of Artificial Sequence: Synthetic oligonucleotide
  Sense strand starting at position 3971 of SEQ ID NO: 1888009
gugugacugagagagcuua

SEQ ID NO: 2504061 - RNA, 19 nt, Artificial Sequence
  Description of Artificial Sequence: Synthetic oligonucleotide
  Antisense strand to SEQ ID NO: 2504060
uaagcucucucagucacac

SEQ ID NO: 2504062 - RNA, 19 nt, Artificial Sequence
  Description of Artificial Sequence: Synthetic oligonucleotide
  Sense strand starting at position 3979 of SEQ ID NO: 1888009
gagagagcuuacuuaaguc

SEQ ID NO: 2504063 - RNA, 19 nt, Artificial Sequence
  Description of Artificial Sequence: Synthetic oligonucleotide
  Antisense strand to SEQ ID NO: 2504062
gacuuaaguaagcucucuc

SEQ ID NO: 2504064 - RNA, 19 nt, Artificial Sequence
  Description of Artificial Sequence: Synthetic oligonucleotide
  Sense strand starting at position 66 of SEQ ID NO: 1888010
agucacauguaauaacaga

SEQ ID NO: 2504065 - RNA, 19 nt, Artificial Sequence
  Description of Artificial Sequence: Synthetic oligonucleotide
  Antisense strand to SEQ ID NO: 2504064
ucuguuauuacaugugacu

SEQ ID NO: 2504066 - RNA, 19 nt, Artificial Sequence
  Description of Artificial Sequence: Synthetic oligonucleotide
  Sense strand starting at position 145 of SEQ ID NO: 1888010
gagagugacucacaacuga

SEQ ID NO: 2504067 - RNA, 19 nt, Artificial Sequence
  Description of Artificial Sequence: Synthetic oligonucleotide
  Antisense strand to SEQ ID NO: 2504066
ucaguugugagucacucuc

SEQ ID NO: 2504068 - RNA, 19 nt, Artificial Sequence
  Description of Artificial Sequence: Synthetic oligonucleotide
  Sense strand starting at position 236 of SEQ ID NO: 1888010
guacaugacucauagauag

SEQ ID NO: 2504069 - RNA, 19 nt, Artificial Sequence
  Description of Artificial Sequence: Synthetic oligonucleotide
  Antisense strand to SEQ ID NO: 2504068
cuaucuaugagucauguac

SEQ ID NO: 2504070 - RNA, 19 nt, Artificial Sequence
  Description of Artificial Sequence: Synthetic oligonucleotide
  Sense strand starting at position 326 of SEQ ID NO: 1888010
gucaacaugucacacuaau

SEQ ID NO: 2504071 - RNA, 19 nt, Artificial Sequence
  Description of Artificial Sequence: Synthetic oligonucleotide
  Antisense strand to SEQ ID NO: 2504070
auuagugugacauguugac

SEQ ID NO: 2504072 - RNA, 19 nt, Artificial Sequence
  Description of Artificial Sequence: Synthetic oligonucleotide
  Sense strand starting at position 625 of SEQ ID NO: 1888010
gucuuucgaucguccucaa

SEQ ID NO: 2504073 - RNA, 19 nt, Artificial Sequence
  Description of Artificial Sequence: Synthetic oligonucleotide
  Antisense strand to SEQ ID NO: 2504072
uugaggacgaucgaaagac

SEQ ID NO: 2504074 - RNA, 19 nt, Artificial Sequence
  Description of Artificial Sequence: Synthetic oligonucleotide
  Sense strand starting at position 628 of SEQ ID NO: 1888010
uuucgaucguccucaaucu

SEQ ID NO: 2504075 - RNA, 19 nt, Artificial Sequence
  Description of Artificial Sequence: Synthetic oligonucleotide
  Antisense strand to SEQ ID NO: 2504074
agauugaggacgaucgaaa

SEQ ID NO: 2504076 - RNA, 19 nt, Artificial Sequence
  Description of Artificial Sequence: Synthetic oligonucleotide
  Sense strand starting at position 979 of SEQ ID NO: 1888010
cuugcugucucuuggcaaa

SEQ ID NO: 2504077 - RNA, 19 nt, Artificial Sequence
  Description of Artificial Sequence: Synthetic oligonucleotide
  Antisense strand to SEQ ID NO: 2504076
uuugccaagagacagcaag

SEQ ID NO: 2504078 - RNA, 19 nt, Artificial Sequence
  Description of Artificial Sequence: Synthetic oligonucleotide
  Sense strand starting at position 1032 of SEQ ID NO: 1888010
gggccuuucucauuguucu

SEQ ID NO: 2504079 - RNA, 19 nt, Artificial Sequence
  Description of Artificial Sequence: Synthetic oligonucleotide
  Antisense strand to SEQ ID NO: 2504078
agaacaaugagaaaggccc

SEQ ID NO: 2504080 - RNA, 19 nt, Artificial Sequence
  Description of Artificial Sequence: Synthetic oligonucleotide
  Sense strand starting at position 1033 of SEQ ID NO: 1888010
ggccuuucucauuguucua

SEQ ID NO: 2504081 - RNA, 19 nt, Artificial Sequence
  Description of Artificial Sequence: Synthetic oligonucleotide
  Antisense strand to SEQ ID NO: 2504080
uagaacaaugagaaaggcc

SEQ ID NO: 2504082 - RNA, 19 nt, Artificial Sequence
  Description of Artificial Sequence: Synthetic oligonucleotide
  Sense strand starting at position 1046 of SEQ ID NO: 1888010
guucuauucucugucucga

SEQ ID NO: 2504083 - RNA, 19 nt, Artificial Sequence
  Description of Artificial Sequence: Synthetic oligonucleotide
  Antisense strand to SEQ ID NO: 2504082
ucgagacagagaauagaac

SEQ ID NO: 2504084 - RNA, 19 nt, Artificial Sequence
  Description of Artificial Sequence: Synthetic oligonucleotide
  Sense strand starting at position 1050 of SEQ ID NO: 1888010
uauucucugucucgaguuu

SEQ ID NO: 2504085 - RNA, 19 nt, Artificial Sequence
  Description of Artificial Sequence: Synthetic oligonucleotide
  Antisense strand to SEQ ID NO: 2504084
aaacucgagacagagaaua

SEQ ID NO: 2504086 - RNA, 19 nt, Artificial Sequence
  Description of Artificial Sequence: Synthetic oligonucleotide
  Sense strand starting at position 1137 of SEQ ID NO: 1888010
gccugcaucccagaggagu

SEQ ID NO: 2504087 - RNA, 19 nt, Artificial Sequence
  Description of Artificial Sequence: Synthetic oligonucleotide
  Antisense strand to SEQ ID NO: 2504086
acuccucugggaugcaggc

SEQ ID NO: 2504088 - RNA, 19 nt, Artificial Sequence
  Description of Artificial Sequence: Synthetic oligonucleotide
  Sense strand starting at position 1522 of SEQ ID NO: 1888010
cgagauacgaaguguauac

SEQ ID NO: 2504089 - RNA, 19 nt, Artificial Sequence
  Description of Artificial Sequence: Synthetic oligonucleotide
  Antisense strand to SEQ ID NO: 2504088
guauacacuucguaucucg

SEQ ID NO: 2504090 - RNA, 19 nt, Artificial Sequence
  Description of Artificial Sequence: Synthetic oligonucleotide
  Sense strand starting at position 1531 of SEQ ID NO: 1888010
aaguguauacguugcccua

SEQ ID NO: 2504091 - RNA, 19 nt, Artificial Sequence
  Description of Artificial Sequence: Synthetic oligonucleotide
  Antisense strand to SEQ ID NO: 2504090
uagggcaacguauacacuu

SEQ ID NO: 2504092 - RNA, 19 nt, Artificial Sequence
  Description of Artificial Sequence: Synthetic oligonucleotide
  Sense strand starting at position 1532 of SEQ ID NO: 1888010
aguguauacguugcccuau

SEQ ID NO: 2504093 - RNA, 19 nt, Artificial Sequence
  Description of Artificial Sequence: Synthetic oligonucleotide
  Antisense strand to SEQ ID NO: 2504092
auagggcaacguauacacu

SEQ ID NO: 2504094 - RNA, 19 nt, Artificial Sequence
  Description of Artificial Sequence: Synthetic oligonucleotide
  Sense strand starting at position 1533 of SEQ ID NO: 1888010
guguauacguugcccuaua

SEQ ID NO: 2504095 - RNA, 19 nt, Artificial Sequence
  Description of Artificial Sequence: Synthetic oligonucleotide
  Antisense strand to SEQ ID NO: 2504094
uauagggcaacguauacac

SEQ ID NO: 2504096 - RNA, 19 nt, Artificial Sequence
  Description of Artificial Sequence: Synthetic oligonucleotide
  Sense strand starting at position 1839 of SEQ ID NO: 1888010
aaggaagaaugguagaaau

SEQ ID NO: 2504097 - RNA, 19 nt, Artificial Sequence
  Description of Artificial Sequence: Synthetic oligonucleotide
  Antisense strand to SEQ ID NO: 2504096
auuucuaccauucuuccuu

SEQ ID NO: 2504098 - RNA, 19 nt, Artificial Sequence
  Description of Artificial Sequence: Synthetic oligonucleotide
  Sense strand starting at position 1849 of SEQ ID NO: 1888010
gguagaaauuuccagguau

SEQ ID NO: 2504099 - RNA, 19 nt, Artificial Sequence
  Description of Artificial Sequence: Synthetic oligonucleotide
  Antisense strand to SEQ ID NO: 2504098
auaccuggaaauuucuacc

SEQ ID NO: 2504100 - RNA, 19 nt, Artificial Sequence
  Description of Artificial Sequence: Synthetic oligonucleotide
  Sense strand starting at position 2215 of SEQ ID NO: 1888010
gcgggaucugugagucucu

SEQ ID NO: 2504101 - RNA, 19 nt, Artificial Sequence
  Description of Artificial Sequence: Synthetic oligonucleotide
  Antisense strand to SEQ ID NO: 2504100
agagacucacagaucccgc

SEQ ID NO: 2504102 - RNA, 19 nt, Artificial Sequence
  Description of Artificial Sequence: Synthetic oligonucleotide
  Sense strand starting at position 2325 of SEQ ID NO: 1888010
ugcaaaccagaaugugaaa

SEQ ID NO: 2504103 - RNA, 19 nt, Artificial Sequence
  Description of Artificial Sequence: Synthetic oligonucleotide
  Antisense strand to SEQ ID NO: 2504102
uuucacauucugguuugca

SEQ ID NO: 2504104 - RNA, 19 nt, Artificial Sequence
  Description of Artificial Sequence: Synthetic oligonucleotide
  Sense strand starting at position 2360 of SEQ ID NO: 1888010
ggcggaacguauuauuuca

SEQ ID NO: 2504105 - RNA, 19 nt, Artificial Sequence
  Description of Artificial Sequence: Synthetic oligonucleotide
  Antisense strand to SEQ ID NO: 2504104
ugaaauaauacguuccgcc

SEQ ID NO: 2504106 - RNA, 19 nt, Artificial Sequence
  Description of Artificial Sequence: Synthetic oligonucleotide
  Sense strand starting at position 2442 of SEQ ID NO: 1888010
gagaguccacccuguguca

SEQ ID NO: 2504107 - RNA, 19 nt, Artificial Sequence
  Description of Artificial Sequence: Synthetic oligonucleotide
  Antisense strand to SEQ ID NO: 2504106
ugacacaggguggacucuc

SEQ ID NO: 2504108 - RNA, 19 nt, Artificial Sequence
  Description of Artificial Sequence: Synthetic oligonucleotide
  Sense strand starting at position 2595 of SEQ ID NO: 1888010
gugggauccugaguuccca

SEQ ID NO: 2504109 - RNA, 19 nt, Artificial Sequence
  Description of Artificial Sequence: Synthetic oligonucleotide
  Antisense strand to SEQ ID NO: 2504108
ugggaacucaggaucccac

SEQ ID NO: 2504110 - RNA, 19 nt, Artificial Sequence
  Description of Artificial Sequence: Synthetic oligonucleotide
  Sense strand starting at position 2599 of SEQ ID NO: 1888010
gauccugaguucccagcua

SEQ ID NO: 2504111 - RNA, 19 nt, Artificial Sequence
  Description of Artificial Sequence: Synthetic oligonucleotide
  Antisense strand to SEQ ID NO: 2504110
uagcugggaacucaggauc

SEQ ID NO: 2504112 - RNA, 19 nt, Artificial Sequence
  Description of Artificial Sequence: Synthetic oligonucleotide
  Sense strand starting at position 2819 of SEQ ID NO: 1888010
ccaguuacuugucccagca

SEQ ID NO: 2504113 - RNA, 19 nt, Artificial Sequence
  Description of Artificial Sequence: Synthetic oligonucleotide
  Antisense strand to SEQ ID NO: 2504112
ugcugggacaaguaacugg

SEQ ID NO: 2504114 - RNA, 19 nt, Artificial Sequence
  Description of Artificial Sequence: Synthetic oligonucleotide
  Sense strand starting at position 2821 of SEQ ID NO: 1888010
aguuacuugucccagcaca

SEQ ID NO: 2504115 - RNA, 19 nt, Artificial Sequence
  Description of Artificial Sequence: Synthetic oligonucleotide
  Antisense strand to SEQ ID NO: 2504114
ugugcugggacaaguaacu

SEQ ID NO: 2504116 - RNA, 19 nt, Artificial Sequence
  Description of Artificial Sequence: Synthetic oligonucleotide
  Sense strand starting at position 2843 of SEQ ID NO: 1888010
guggaagagcucuauuacu

SEQ ID NO: 2504117 - RNA, 19 nt, Artificial Sequence
  Description of Artificial Sequence: Synthetic oligonucleotide
  Antisense strand to SEQ ID NO: 2504116
aguaauagagcucuuccac

SEQ ID NO: 2504118 - RNA, 19 nt, Artificial Sequence
  Description of Artificial Sequence: Synthetic oligonucleotide
  Sense strand starting at position 3175 of SEQ ID NO: 1888010
aguuuacaggcgugaguua

SEQ ID NO: 2504119 - RNA, 19 nt, Artificial Sequence
  Description of Artificial Sequence: Synthetic oligonucleotide
  Antisense strand to SEQ ID NO: 2504118
uaacucacgccuguaaacu

SEQ ID NO: 2504120 - RNA, 19 nt, Artificial Sequence
  Description of Artificial Sequence: Synthetic oligonucleotide
  Sense strand starting at position 3194 of SEQ ID NO: 1888010
ccgugccugucccaagaaa

SEQ ID NO: 2504121 - RNA, 19 nt, Artificial Sequence
  Description of Artificial Sequence: Synthetic oligonucleotide
  Antisense strand to SEQ ID NO: 2504120
uuucuugggacaggcacgg

SEQ ID NO: 2504122 - RNA, 19 nt, Artificial Sequence
  Description of Artificial Sequence: Synthetic oligonucleotide
  Sense strand starting at position 3240 of SEQ ID NO: 1888010
gacggagucucguauuguc

SEQ ID NO: 2504123 - RNA, 19 nt, Artificial Sequence
  Description of Artificial Sequence: Synthetic oligonucleotide
  Antisense strand to SEQ ID NO: 2504122
gacaauacgagacuccguc

SEQ ID NO: 2504124 - RNA, 19 nt, Artificial Sequence
  Description of Artificial Sequence: Synthetic oligonucleotide
  Sense strand starting at position 3672 of SEQ ID NO: 1888010
aauggauuaucggauguuu

SEQ ID NO: 2504125 - RNA, 19 nt, Artificial Sequence
  Description of Artificial Sequence: Synthetic oligonucleotide
  Antisense strand to SEQ ID NO: 2504124
aaacauccgauaauccauu

SEQ ID NO: 2504126 - RNA, 19 nt, Artificial Sequence
  Description of Artificial Sequence: Synthetic oligonucleotide
  Sense strand starting at position 3680 of SEQ ID NO: 1888010
aucggauguuuccuuaaga

SEQ ID NO: 2504127 - RNA, 19 nt, Artificial Sequence
  Description of Artificial Sequence: Synthetic oligonucleotide
  Antisense strand to SEQ ID NO: 2504126
ucuuaaggaaacauccgau

SEQ ID NO: 2504128 - RNA, 19 nt, Artificial Sequence
  Description of Artificial Sequence: Synthetic oligonucleotide
  Sense strand starting at position 3681 of SEQ ID NO: 1888010
ucggauguuuccuuaagag

SEQ ID NO: 2504129 - RNA, 19 nt, Artificial Sequence
  Description of Artificial Sequence: Synthetic oligonucleotide
  Antisense strand to SEQ ID NO: 2504128
cucuuaaggaaacauccga

SEQ ID NO: 2504130 - RNA, 19 nt, Artificial Sequence
  Description of Artificial Sequence: Synthetic oligonucleotide
  Sense strand starting at position 3727 of SEQ ID NO: 1888010
cucacuacauuggaaagau

SEQ ID NO: 2504131 - RNA, 19 nt, Artificial Sequence
  Description of Artificial Sequence: Synthetic oligonucleotide
  Antisense strand to SEQ ID NO: 2504130
aucuuuccaauguagugag

SEQ ID NO: 2504132 - RNA, 19 nt, Artificial Sequence
  Description of Artificial Sequence: Synthetic oligonucleotide
  Sense strand starting at position 25 of SEQ ID NO: 1888011
ccaggaggcagauguuauu

SEQ ID NO: 2504133 - RNA, 19 nt, Artificial Sequence
  Description of Artificial Sequence: Synthetic oligonucleotide
  Antisense strand to SEQ ID NO: 2504132
aauaacaucugccuccugg

SEQ ID NO: 2504134 - RNA, 19 nt, Artificial Sequence
  Description of Artificial Sequence: Synthetic oligonucleotide
  Sense strand starting at position 218 of SEQ ID NO: 1888011
cugacauaaccauggugga

SEQ ID NO: 2504135 - RNA, 19 nt, Artificial Sequence
  Description of Artificial Sequence: Synthetic oligonucleotide
  Antisense strand to SEQ ID NO: 2504134
uccaccaugguuaugucag

SEQ ID NO: 2504136 - RNA, 19 nt, Artificial Sequence
  Description of Artificial Sequence: Synthetic oligonucleotide
  Sense strand starting at position 219 of SEQ ID NO: 1888011
ugacauaaccaugguggau

SEQ ID NO: 2504137 - RNA, 19 nt, Artificial Sequence
  Description of Artificial Sequence: Synthetic oligonucleotide
  Antisense strand to SEQ ID NO: 2504136
auccaccaugguuauguca

SEQ ID NO: 2504138 - RNA, 19 nt, Artificial Sequence
  Description of Artificial Sequence: Synthetic oligonucleotide
  Sense strand starting at position 231 of SEQ ID NO: 1888011
gguggauaucuugguugau

SEQ ID NO: 2504139 - RNA, 19 nt, Artificial Sequence
  Description of Artificial Sequence: Synthetic oligonucleotide
  Antisense strand to SEQ ID NO: 2504138
aucaaccaagauauccacc

SEQ ID NO: 2504140 - RNA, 19 nt, Artificial Sequence
  Description of Artificial Sequence: Synthetic oligonucleotide
  Sense strand starting at position 232 of SEQ ID NO: 1888011
guggauaucuugguugauc

SEQ ID NO: 2504141 - RNA, 19 nt, Artificial Sequence
  Description of Artificial Sequence: Synthetic oligonucleotide
  Antisense strand to SEQ ID NO: 2504140
gaucaaccaagauauccac

SEQ ID NO: 2504142 - RNA, 19 nt, Artificial Sequence
  Description of Artificial Sequence: Synthetic oligonucleotide
  Sense strand starting at position 354 of SEQ ID NO: 1888011
ugacaagaucuuuguaccu

SEQ ID NO: 2504143 - RNA, 19 nt, Artificial Sequence
  Description of Artificial Sequence: Synthetic oligonucleotide
  Antisense strand to SEQ ID NO: 2504142
agguacaaagaucuuguca

SEQ ID NO: 2504144 - RNA, 19 nt, Artificial Sequence
  Description of Artificial Sequence: Synthetic oligonucleotide
  Sense strand starting at position 356 of SEQ ID NO: 1888011
acaagaucuuuguaccuag

SEQ ID NO: 2504145 - RNA, 19 nt, Artificial Sequence
  Description of Artificial Sequence: Synthetic oligonucleotide
  Antisense strand to SEQ ID NO: 2504144
cuagguacaaagaucuugu

SEQ ID NO: 2504146 - RNA, 19 nt, Artificial Sequence
  Description of Artificial Sequence: Synthetic oligonucleotide
  Sense strand starting at position 359 of SEQ ID NO: 1888011
agaucuuuguaccuagaga

SEQ ID NO: 2504147 - RNA, 19 nt, Artificial Sequence
  Description of Artificial Sequence: Synthetic oligonucleotide
  Antisense strand to SEQ ID NO: 2504146
ucucuagguacaaagaucu

SEQ ID NO: 2504148 - RNA, 19 nt, Artificial Sequence
  Description of Artificial Sequence: Synthetic oligonucleotide
  Sense strand starting at position 558 of SEQ ID NO: 1888011
aggugauaacgugaauuag

SEQ ID NO: 2504149 - RNA, 19 nt, Artificial Sequence
  Description of Artificial Sequence: Synthetic oligonucleotide
  Antisense strand to SEQ ID NO: 2504148
cuaauucacguuaucaccu

SEQ ID NO: 2504150 - RNA, 19 nt, Artificial Sequence
  Description of Artificial Sequence: Synthetic oligonucleotide
  Sense strand starting at position 640 of SEQ ID NO: 1888011
cagagugaggcuggagaua

SEQ ID NO: 2504151 - RNA, 19 nt, Artificial Sequence
  Description of Artificial Sequence: Synthetic oligonucleotide
  Antisense strand to SEQ ID NO: 2504150
uaucuccagccucacucug

SEQ ID NO: 2504152 - RNA, 19 nt, Artificial Sequence
  Description of Artificial Sequence: Synthetic oligonucleotide
  Sense strand starting at position 745 of SEQ ID NO: 1888011
auaauuaagcggcgggaaa

SEQ ID NO: 2504153 - RNA, 19 nt, Artificial Sequence
  Description of Artificial Sequence: Synthetic oligonucleotide
  Antisense strand to SEQ ID NO: 2504152
uuucccgccgcuuaauuau

SEQ ID NO: 2504154 - RNA, 19 nt, Artificial Sequence
  Description of Artificial Sequence: Synthetic oligonucleotide
  Sense strand starting at position 746 of SEQ ID NO: 1888011
uaauuaagcggcgggaaau

SEQ ID NO: 2504155 - RNA, 19 nt, Artificial Sequence
  Description of Artificial Sequence: Synthetic oligonucleotide
  Antisense strand to SEQ ID NO: 2504154
auuucccgccgcuuaauua

SEQ ID NO: 2504156 - RNA, 19 nt, Artificial Sequence
  Description of Artificial Sequence: Synthetic oligonucleotide
  Sense strand starting at position 747 of SEQ ID NO: 1888011
aauuaagcggcgggaaauu

SEQ ID NO: 2504157 - RNA, 19 nt, Artificial Sequence
  Description of Artificial Sequence: Synthetic oligonucleotide
  Antisense strand to SEQ ID NO: 2504156
aauuucccgccgcuuaauu

SEQ ID NO: 2504158 - RNA, 19 nt, Artificial Sequence
  Description of Artificial Sequence: Synthetic oligonucleotide
  Sense strand starting at position 995 of SEQ ID NO: 1888011
gaagcauuggaucgcuuga

SEQ ID NO: 2504159 - RNA, 19 nt, Artificial Sequence
  Description of Artificial Sequence: Synthetic oligonucleotide
  Antisense strand to SEQ ID NO: 2504158
ucaagcgauccaaugcuuc

SEQ ID NO: 2504160 - RNA, 19 nt, Artificial Sequence
  Description of Artificial Sequence: Synthetic oligonucleotide
  Sense strand starting at position 1367 of SEQ ID NO: 1888011
ugaaucacgcuuugauuaa

SEQ ID NO: 2504161 - RNA, 19 nt, Artificial Sequence
  Description of Artificial Sequence: Synthetic oligonucleotide
  Antisense strand to SEQ ID NO: 2504160
uuaaucaaagcgugauuca

SEQ ID NO: 2504162 - RNA, 19 nt, Artificial Sequence
  Description of Artificial Sequence: Synthetic oligonucleotide
  Sense strand starting at position 1380 of SEQ ID NO: 1888011
gauuaaaugcuuuaguguu

SEQ ID NO: 2504163 - RNA, 19 nt, Artificial Sequence
  Description of Artificial Sequence: Synthetic oligonucleotide
  Antisense strand to SEQ ID NO: 2504162
aacacuaaagcauuuaauc

SEQ ID NO: 2504164 - RNA, 19 nt, Artificial Sequence
  Description of Artificial Sequence: Synthetic oligonucleotide
  Sense strand starting at position 1500 of SEQ ID NO: 1888011
uccaguggucccugcacaa

SEQ ID NO: 2504165 - RNA, 19 nt, Artificial Sequence
  Description of Artificial Sequence: Synthetic oligonucleotide
  Antisense strand to SEQ ID NO: 2504164
uugugcagggaccacugga

SEQ ID NO: 2504166 - RNA, 19 nt, Artificial Sequence
  Description of Artificial Sequence: Synthetic oligonucleotide
  Sense strand starting at position 2069 of SEQ ID NO: 1888011
gacagaagaugugaucagu

SEQ ID NO: 2504167 - RNA, 19 nt, Artificial Sequence
  Description of Artificial Sequence: Synthetic oligonucleotide
  Antisense strand to SEQ ID NO: 2504166
acugaucacaucuucuguc

SEQ ID NO: 2504168 - RNA, 19 nt, Artificial Sequence
  Description of Artificial Sequence: Synthetic oligonucleotide
  Sense strand starting at position 2185 of SEQ ID NO: 1888011
ugccuuuaaacuugugugu

SEQ ID NO: 2504169 - RNA, 19 nt, Artificial Sequence
  Description of Artificial Sequence: Synthetic oligonucleotide
  Antisense strand to SEQ ID NO: 2504168
acacacaaguuuaaaggca

SEQ ID NO: 2504170 - RNA, 19 nt, Artificial Sequence
  Description of Artificial Sequence: Synthetic oligonucleotide
  Sense strand starting at position 2188 of SEQ ID NO: 1888011
cuuuaaacuuguguguaaa

SEQ ID NO: 2504171 - RNA, 19 nt, Artificial Sequence
  Description of Artificial Sequence: Synthetic oligonucleotide
  Antisense strand to SEQ ID NO: 2504170
uuuacacacaaguuuaaag

SEQ ID NO: 2504172 - RNA, 19 nt, Artificial Sequence
  Description of Artificial Sequence: Synthetic oligonucleotide
  Sense strand starting at position 2189 of SEQ ID NO: 1888011
uuuaaacuuguguguaaag

SEQ ID NO: 2504173 - RNA, 19 nt, Artificial Sequence
  Description of Artificial Sequence: Synthetic oligonucleotide
  Antisense strand to SEQ ID NO: 2504172
cuuuacacacaaguuuaaa

SEQ ID NO: 2504174 - RNA, 19 nt, Artificial Sequence
  Description of Artificial Sequence: Synthetic oligonucleotide
  Sense strand starting at position 2190 of SEQ ID NO: 1888011
uuaaacuuguguguaaagu

SEQ ID NO: 2504175 - RNA, 19 nt, Artificial Sequence
  Description of Artificial Sequence: Synthetic oligonucleotide
  Antisense strand to SEQ ID NO: 2504174
acuuuacacacaaguuuaa

SEQ ID NO: 2504176 - RNA, 19 nt, Artificial Sequence
  Description of Artificial Sequence: Synthetic oligonucleotide
  Sense strand starting at position 2191 of SEQ ID NO: 1888011
uaaacuuguguguaaaguc

SEQ ID NO: 2504177 - RNA, 19 nt, Artificial Sequence
  Description of Artificial Sequence: Synthetic oligonucleotide
  Antisense strand to SEQ ID NO: 2504176
gacuuuacacacaaguuua

SEQ ID NO: 2504178 - RNA, 19 nt, Artificial Sequence
  Description of Artificial Sequence: Synthetic oligonucleotide
  Sense strand starting at position 2307 of SEQ ID NO: 1888011
gcuucuuucuggucuuuga

SEQ ID NO: 2504179 - RNA, 19 nt, Artificial Sequence
  Description of Artificial Sequence: Synthetic oligonucleotide
  Antisense strand to SEQ ID NO: 2504178
ucaaagaccagaaagaagc

SEQ ID NO: 2504180 - RNA, 19 nt, Artificial Sequence
  Description of Artificial Sequence: Synthetic oligonucleotide
  Sense strand starting at position 2370 of SEQ ID NO: 1888011
aaaugugagccauauguga

SEQ ID NO: 2504181 - RNA, 19 nt, Artificial Sequence
  Description of Artificial Sequence: Synthetic oligonucleotide
  Antisense strand to SEQ ID NO: 2504180
ucacauauggcucacauuu

SEQ ID NO: 2504182 - RNA, 19 nt, Artificial Sequence
  Description of Artificial Sequence: Synthetic oligonucleotide
  Sense strand starting at position 2372 of SEQ ID NO: 1888011
augugagccauaugugaau

SEQ ID NO: 2504183 - RNA, 19 nt, Artificial Sequence
  Description of Artificial Sequence: Synthetic oligonucleotide
  Antisense strand to SEQ ID NO: 2504182
auucacauauggcucacau

SEQ ID NO: 2504184 - RNA, 19 nt, Artificial Sequence
  Description of Artificial Sequence: Synthetic oligonucleotide
  Sense strand starting at position 2494 of SEQ ID NO: 1888011
gugugagaaauauguaauu

SEQ ID NO: 2504185 - RNA, 19 nt, Artificial Sequence
  Description of Artificial Sequence: Synthetic oligonucleotide
  Antisense strand to SEQ ID NO: 2504184
aauuacauauuucucacac

SEQ ID NO: 2504186 - RNA, 19 nt, Artificial Sequence
  Description of Artificial Sequence: Synthetic oligonucleotide
  Sense strand starting at position 2639 of SEQ ID NO: 1888011
ugaugucagcggugugaag

SEQ ID NO: 2504187 - RNA, 19 nt, Artificial Sequence
  Description of Artificial Sequence: Synthetic oligonucleotide
  Antisense strand to SEQ ID NO: 2504186
cuucacaccgcugacauca

SEQ ID NO: 2504188 - RNA, 19 nt, Artificial Sequence
  Description of Artificial Sequence: Synthetic oligonucleotide
  Sense strand starting at position 2736 of SEQ ID NO: 1888011
aacagauaguggccaaaga

SEQ ID NO: 2504189 - RNA, 19 nt, Artificial Sequence
  Description of Artificial Sequence: Synthetic oligonucleotide
  Antisense strand to SEQ ID NO: 2504188
ucuuuggccacuaucuguu

SEQ ID NO: 2504190 - RNA, 19 nt, Artificial Sequence
  Description of Artificial Sequence: Synthetic oligonucleotide
  Sense strand starting at position 3070 of SEQ ID NO: 1888011
ggaacaauguuagcaucca

SEQ ID NO: 2504191 - RNA, 19 nt, Artificial Sequence
  Description of Artificial Sequence: Synthetic oligonucleotide
  Antisense strand to SEQ ID NO: 2504190
uggaugcuaacauuguucc

SEQ ID NO: 2504192 - RNA, 19 nt, Artificial Sequence
  Description of Artificial Sequence: Synthetic oligonucleotide
  Sense strand starting at position 3280 of SEQ ID NO: 1888011
uuauuauuguauccaaggu

SEQ ID NO: 2504193 - RNA, 19 nt, Artificial Sequence
  Description of Artificial Sequence: Synthetic oligonucleotide
  Antisense strand to SEQ ID NO: 2504192
accuuggauacaauaauaa

SEQ ID NO: 2504194 - RNA, 19 nt, Artificial Sequence
  Description of Artificial Sequence: Synthetic oligonucleotide
  Sense strand starting at position 3295 of SEQ ID NO: 1888011
agguuaacugaggagugua

SEQ ID NO: 2504195 - RNA, 19 nt, Artificial Sequence
  Description of Artificial Sequence: Synthetic oligonucleotide
  Antisense strand to SEQ ID NO: 2504194
uacacuccucaguuaaccu

SEQ ID NO: 2504196 - RNA, 19 nt, Artificial Sequence
  Description of Artificial Sequence: Synthetic oligonucleotide
  Sense strand starting at position 3347 of SEQ ID NO: 1888011
guauuugcauagcaccaaa

SEQ ID NO: 2504197 - RNA, 19 nt, Artificial Sequence
  Description of Artificial Sequence: Synthetic oligonucleotide
  Antisense strand to SEQ ID NO: 2504196
uuuggugcuaugcaaauac

SEQ ID NO: 2504198 - RNA, 19 nt, Artificial Sequence
  Description of Artificial Sequence: Synthetic oligonucleotide
  Sense strand starting at position 3358 of SEQ ID NO: 1888011
gcaccaaaguaucugacua

SEQ ID NO: 2504199 - RNA, 19 nt, Artificial Sequence
  Description of Artificial Sequence: Synthetic oligonucleotide
  Antisense strand to SEQ ID NO: 2504198
uagucagauacuuuggugc

SEQ ID NO: 2504200 - RNA, 19 nt, Artificial Sequence
  Description of Artificial Sequence: Synthetic oligonucleotide
  Sense strand starting at position 3430 of SEQ ID NO: 1888011
gacucuuuguuacuggauu

SEQ ID NO: 2504201 - RNA, 19 nt, Artificial Sequence
  Description of Artificial Sequence: Synthetic oligonucleotide
  Antisense strand to SEQ ID NO: 2504200
aauccaguaacaaagaguc

SEQ ID NO: 2504202 - RNA, 19 nt, Artificial Sequence
  Description of Artificial Sequence: Synthetic oligonucleotide
  Sense strand starting at position 3431 of SEQ ID NO: 1888011
acucuuuguuacuggauuu

SEQ ID NO: 2504203 - RNA, 19 nt, Artificial Sequence
  Description of Artificial Sequence: Synthetic oligonucleotide
  Antisense strand to SEQ ID NO: 2504202
aaauccaguaacaaagagu

SEQ ID NO: 2504204 - RNA, 19 nt, Artificial Sequence
  Description of Artificial Sequence: Synthetic oligonucleotide
  Sense strand starting at position 3638 of SEQ ID NO: 1888011
aaacuuaccugggugugau

SEQ ID NO: 2504205 - RNA, 19 nt, Artificial Sequence
  Description of Artificial Sequence: Synthetic oligonucleotide
  Antisense strand to SEQ ID NO: 2504204
aucacacccagguaaguuu

SEQ ID NO: 2504206 - RNA, 19 nt, Artificial Sequence
  Description of Artificial Sequence: Synthetic oligonucleotide
  Sense strand starting at position 3946 of SEQ ID NO: 1888011
guuugauugagcugcacuc

SEQ ID NO: 2504207 - RNA, 19 nt, Artificial Sequence
  Description of Artificial Sequence: Synthetic oligonucleotide
  Antisense strand to SEQ ID NO: 2504206
gagugcagcucaaucaaac

SEQ ID NO: 2504208 - RNA, 19 nt, Artificial Sequence
  Description of Artificial Sequence: Synthetic oligonucleotide
  Sense strand starting at position 3956 of SEQ ID NO: 1888011
gcugcacucuggccaagau

SEQ ID NO: 2504209 - RNA, 19 nt, Artificial Sequence
  Description of Artificial Sequence: Synthetic oligonucleotide
  Antisense strand to SEQ ID NO: 2504208
aucuuggccagagugcagc

SEQ ID NO: 2504210 - RNA, 19 nt, Artificial Sequence
  Description of Artificial Sequence: Synthetic oligonucleotide
  Sense strand starting at position 3975 of SEQ ID NO: 1888011
gacagagcugucuacaaau

SEQ ID NO: 2504211 - RNA, 19 nt, Artificial Sequence
  Description of Artificial Sequence: Synthetic oligonucleotide
  Antisense strand to SEQ ID NO: 2504210
auuuguagacagcucuguc

SEQ ID NO: 2504212 - RNA, 19 nt, Artificial Sequence
  Description of Artificial Sequence: Synthetic oligonucleotide
  Sense strand starting at position 25 of SEQ ID NO: 1888012
cagaguuaggcuggaggua

SEQ ID NO: 2504213 - RNA, 19 nt, Artificial Sequence
  Description of Artificial Sequence: Synthetic oligonucleotide
  Antisense strand to SEQ ID NO: 2504212
uaccuccagccuaacucug

SEQ ID NO: 2504214 - RNA, 19 nt, Artificial Sequence
  Description of Artificial Sequence: Synthetic oligonucleotide
  Sense strand starting at position 26 of SEQ ID NO: 1888012
agaguuaggcuggagguaa

SEQ ID NO: 2504215 - RNA, 19 nt, Artificial Sequence
  Description of Artificial Sequence: Synthetic oligonucleotide
  Antisense strand to SEQ ID NO: 2504214
uuaccuccagccuaacucu

SEQ ID NO: 2504216 - RNA, 19 nt, Artificial Sequence
  Description of Artificial Sequence: Synthetic oligonucleotide
  Sense strand starting at position 103 of SEQ ID NO: 1888012
aaaucaguccucuguggag

SEQ ID NO: 2504217 - RNA, 19 nt, Artificial Sequence
  Description of Artificial Sequence: Synthetic oligonucleotide
  Antisense strand to SEQ ID NO: 2504216
cuccacagaggacugauuu

SEQ ID NO: 2504218 - RNA, 19 nt, Artificial Sequence
  Description of Artificial Sequence: Synthetic oligonucleotide
  Sense strand starting at position 110 of SEQ ID NO: 1888012
uccucuguggagugugaaa

SEQ ID NO: 2504219 - RNA, 19 nt, Artificial Sequence
  Description of Artificial Sequence: Synthetic oligonucleotide
  Antisense strand to SEQ ID NO: 2504218
uuucacacuccacagagga

SEQ ID NO: 2504220 - RNA, 19 nt, Artificial Sequence
  Description of Artificial Sequence: Synthetic oligonucleotide
  Sense strand starting at position 129 of SEQ ID NO: 1888012
auaguuaagugccaggcaa

SEQ ID NO: 2504221 - RNA, 19 nt, Artificial Sequence
  Description of Artificial Sequence: Synthetic oligonucleotide
  Antisense strand to SEQ ID NO: 2504220
uugccuggcacuuaacuau

SEQ ID NO: 2504222 - RNA, 19 nt, Artificial Sequence
  Description of Artificial Sequence: Synthetic oligonucleotide
  Sense strand starting at position 131 of SEQ ID NO: 1888012
aguuaagugccaggcaauu

SEQ ID NO: 2504223 - RNA, 19 nt, Artificial Sequence
  Description of Artificial Sequence: Synthetic oligonucleotide
  Antisense strand to SEQ ID NO: 2504222
aauugccuggcacuuaacu

SEQ ID NO: 2504224 - RNA, 19 nt, Artificial Sequence
  Description of Artificial Sequence: Synthetic oligonucleotide
  Sense strand starting at position 142 of SEQ ID NO: 1888012
aggcaauuagucugaggug

SEQ ID NO: 2504225 - RNA, 19 nt, Artificial Sequence
  Description of Artificial Sequence: Synthetic oligonucleotide
  Antisense strand to SEQ ID NO: 2504224
caccucagacuaauugccu

SEQ ID NO: 2504226 - RNA, 19 nt, Artificial Sequence
  Description of Artificial Sequence: Synthetic oligonucleotide
  Sense strand starting at position 145 of SEQ ID NO: 1888012
caauuagucugagguggaa

SEQ ID NO: 2504227 - RNA, 19 nt, Artificial Sequence
  Description of Artificial Sequence: Synthetic oligonucleotide
  Antisense strand to SEQ ID NO: 2504226
uuccaccucagacuaauug

SEQ ID NO: 2504228 - RNA, 19 nt, Artificial Sequence
  Description of Artificial Sequence: Synthetic oligonucleotide
  Sense strand starting at position 147 of SEQ ID NO: 1888012
auuagucugagguggaaau

SEQ ID NO: 2504229 - RNA, 19 nt, Artificial Sequence
  Description of Artificial Sequence: Synthetic oligonucleotide
  Antisense strand to SEQ ID NO: 2504228
auuuccaccucagacuaau

SEQ ID NO: 2504230 - RNA, 19 nt, Artificial Sequence
  Description of Artificial Sequence: Synthetic oligonucleotide
  Sense strand starting at position 172 of SEQ ID NO: 1888012
ccuggauucuugcuuugaa

SEQ ID NO: 2504231 - RNA, 19 nt, Artificial Sequence
  Description of Artificial Sequence: Synthetic oligonucleotide
  Antisense strand to SEQ ID NO: 2504230
uucaaagcaagaauccagg

SEQ ID NO: 2504232 - RNA, 19 nt, Artificial Sequence
  Description of Artificial Sequence: Synthetic oligonucleotide
  Sense strand starting at position 173 of SEQ ID NO: 1888012
cuggauucuugcuuugaaa

SEQ ID NO: 2504233 - RNA, 19 nt, Artificial Sequence
  Description of Artificial Sequence: Synthetic oligonucleotide
  Antisense strand to SEQ ID NO: 2504232
uuucaaagcaagaauccag

SEQ ID NO: 2504234 - RNA, 19 nt, Artificial Sequence
  Description of Artificial Sequence: Synthetic oligonucleotide
  Sense strand starting at position 230 of SEQ ID NO: 1888012
auuacuacauuagaggaaa

SEQ ID NO: 2504235 - RNA, 19 nt, Artificial Sequence
  Description of Artificial Sequence: Synthetic oligonucleotide
  Antisense strand to SEQ ID NO: 2504234
uuuccucuaauguaguaau

SEQ ID NO: 2504236 - RNA, 19 nt, Artificial Sequence
  Description of Artificial Sequence: Synthetic oligonucleotide
  Sense strand starting at position 258 of SEQ ID NO: 1888012
ggcuuaaccgacuauaaac

SEQ ID NO: 2504237 - RNA, 19 nt, Artificial Sequence
  Description of Artificial Sequence: Synthetic oligonucleotide
  Antisense strand to SEQ ID NO: 2504236
guuuauagucgguuaagcc

SEQ ID NO: 2504238 - RNA, 19 nt, Artificial Sequence
  Description of Artificial Sequence: Synthetic oligonucleotide
  Sense strand starting at position 302 of SEQ ID NO: 1888012
ccaggaaauuuguacguuc

SEQ ID NO: 2504239 - RNA, 19 nt, Artificial Sequence
  Description of Artificial Sequence: Synthetic oligonucleotide
  Antisense strand to SEQ ID NO: 2504238
gaacguacaaauuuccugg

SEQ ID NO: 2504240 - RNA, 19 nt, Artificial Sequence
  Description of Artificial Sequence: Synthetic oligonucleotide
  Sense strand starting at position 1696 of SEQ ID NO: 1888012
cagcgaagccgccaucuua

SEQ ID NO: 2504241 - RNA, 19 nt, Artificial Sequence
  Description of Artificial Sequence: Synthetic oligonucleotide
  Antisense strand to SEQ ID NO: 2504240
uaagauggcggcuucgcug

SEQ ID NO: 2504242 - RNA, 19 nt, Artificial Sequence
  Description of Artificial Sequence: Synthetic oligonucleotide
  Sense strand starting at position 1759 of SEQ ID NO: 1888012
gcgcaguuuguggagauga

SEQ ID NO: 2504243 - RNA, 19 nt, Artificial Sequence
  Description of Artificial Sequence: Synthetic oligonucleotide
  Antisense strand to SEQ ID NO: 2504242
ucaucuccacaaacugcgc

SEQ ID NO: 2504244 - RNA, 19 nt, Artificial Sequence
  Description of Artificial Sequence: Synthetic oligonucleotide
  Sense strand starting at position 1761 of SEQ ID NO: 1888012
gcaguuuguggagaugacu

SEQ ID NO: 2504245 - RNA, 19 nt, Artificial Sequence
  Description of Artificial Sequence: Synthetic oligonucleotide
  Antisense strand to SEQ ID NO: 2504244
agucaucuccacaaacugc

SEQ ID NO: 2504246 - RNA, 19 nt, Artificial Sequence
  Description of Artificial Sequence: Synthetic oligonucleotide
  Sense strand starting at position 2056 of SEQ ID NO: 1888012
uccaguugcgugccugauu

SEQ ID NO: 2504247 - RNA, 19 nt, Artificial Sequence
  Description of Artificial Sequence: Synthetic oligonucleotide
  Antisense strand to SEQ ID NO: 2504246
aaucaggcacgcaacugga

SEQ ID NO: 2504248 - RNA, 19 nt, Artificial Sequence
  Description of Artificial Sequence: Synthetic oligonucleotide
  Sense strand starting at position 2090 of SEQ ID NO: 1888012
cagggucccugauuggaaa

SEQ ID NO: 2504249 - RNA, 19 nt, Artificial Sequence
  Description of Artificial Sequence: Synthetic oligonucleotide
  Antisense strand to SEQ ID NO: 2504248
uuuccaaucagggacccug

SEQ ID NO: 2504250 - RNA, 19 nt, Artificial Sequence
  Description of Artificial Sequence: Synthetic oligonucleotide
  Sense strand starting at position 2132 of SEQ ID NO: 1888012
ggccuuaagugacagaaga

SEQ ID NO: 2504251 - RNA, 19 nt, Artificial Sequence
  Description of Artificial Sequence: Synthetic oligonucleotide
  Antisense strand to SEQ ID NO: 2504250
ucuucugucacuuaaggcc

SEQ ID NO: 2504252 - RNA, 19 nt, Artificial Sequence
  Description of Artificial Sequence: Synthetic oligonucleotide
  Sense strand starting at position 2214 of SEQ ID NO: 1888012
gggcuuccucccugagcuu

SEQ ID NO: 2504253 - RNA, 19 nt, Artificial Sequence
  Description of Artificial Sequence: Synthetic oligonucleotide
  Antisense strand to SEQ ID NO: 2504252
aagcucagggaggaagccc

SEQ ID NO: 2504254 - RNA, 19 nt, Artificial Sequence
  Description of Artificial Sequence: Synthetic oligonucleotide
  Sense strand starting at position 2215 of SEQ ID NO: 1888012
ggcuuccucccugagcuua

SEQ ID NO: 2504255 - RNA, 19 nt, Artificial Sequence
  Description of Artificial Sequence: Synthetic oligonucleotide
  Antisense strand to SEQ ID NO: 2504254
uaagcucagggaggaagcc

SEQ ID NO: 2504256 - RNA, 19 nt, Artificial Sequence
  Description of Artificial Sequence: Synthetic oligonucleotide
  Sense strand starting at position 2253 of SEQ ID NO: 1888012
ugcauuugaccucguguau

SEQ ID NO: 2504257 - RNA, 19 nt, Artificial Sequence
  Description of Artificial Sequence: Synthetic oligonucleotide
  Antisense strand to SEQ ID NO: 2504256
auacacgaggucaaaugca

SEQ ID NO: 2504258 - RNA, 19 nt, Artificial Sequence
  Description of Artificial Sequence: Synthetic oligonucleotide
  Sense strand starting at position 2373 of SEQ ID NO: 1888012
gcuucuggcauuugagcaa

SEQ ID NO: 2504259 - RNA, 19 nt, Artificial Sequence
  Description of Artificial Sequence: Synthetic oligonucleotide
  Antisense strand to SEQ ID NO: 2504258
uugcucaaaugccagaagc

SEQ ID NO: 2504260 - RNA, 19 nt, Artificial Sequence
  Description of Artificial Sequence: Synthetic oligonucleotide
  Sense strand starting at position 2496 of SEQ ID NO: 1888012
gguggaguugauuguaaca

SEQ ID NO: 2504261 - RNA, 19 nt, Artificial Sequence
  Description of Artificial Sequence: Synthetic oligonucleotide
  Antisense strand to SEQ ID NO: 2504260
uguuacaaucaacuccacc

SEQ ID NO: 2504262 - RNA, 19 nt, Artificial Sequence
  Description of Artificial Sequence: Synthetic oligonucleotide
  Sense strand starting at position 2498 of SEQ ID NO: 1888012
uggaguugauuguaacaau

SEQ ID NO: 2504263 - RNA, 19 nt, Artificial Sequence
  Description of Artificial Sequence: Synthetic oligonucleotide
  Antisense strand to SEQ ID NO: 2504262
auuguuacaaucaacucca

SEQ ID NO: 2504264 - RNA, 19 nt, Artificial Sequence
  Description of Artificial Sequence: Synthetic oligonucleotide
  Sense strand starting at position 2546 of SEQ ID NO: 1888012
ucaguuuaauaugugagca

SEQ ID NO: 2504265 - RNA, 19 nt, Artificial Sequence
  Description of Artificial Sequence: Synthetic oligonucleotide
  Antisense strand to SEQ ID NO: 2504264
ugcucacauauuaaacuga

SEQ ID NO: 2504266 - RNA, 19 nt, Artificial Sequence
  Description of Artificial Sequence: Synthetic oligonucleotide
  Sense strand starting at position 2768 of SEQ ID NO: 1888012
aguuuagaccagcgacauu

SEQ ID NO: 2504267 - RNA, 19 nt, Artificial Sequence
  Description of Artificial Sequence: Synthetic oligonucleotide
  Antisense strand to SEQ ID NO: 2504266
aaugucgcuggucuaaacu

SEQ ID NO: 2504268 - RNA, 19 nt, Artificial Sequence
  Description of Artificial Sequence: Synthetic oligonucleotide
  Sense strand starting at position 2839 of SEQ ID NO: 1888012
ugcgaugucagcugaguga

SEQ ID NO: 2504269 - RNA, 19 nt, Artificial Sequence
  Description of Artificial Sequence: Synthetic oligonucleotide
  Antisense strand to SEQ ID NO: 2504268
ucacucagcugacaucgca

SEQ ID NO: 2504270 - RNA, 19 nt, Artificial Sequence
  Description of Artificial Sequence: Synthetic oligonucleotide
  Sense strand starting at position 2852 of SEQ ID NO: 1888012
gagugaagggccuggacau

SEQ ID NO: 2504271 - RNA, 19 nt, Artificial Sequence
  Description of Artificial Sequence: Synthetic oligonucleotide
  Antisense strand to SEQ ID NO: 2504270
auguccaggcccuucacuc

SEQ ID NO: 2504272 - RNA, 19 nt, Artificial Sequence
  Description of Artificial Sequence: Synthetic oligonucleotide
  Sense strand starting at position 2907 of SEQ ID NO: 1888012
uucaguucccaggguggaa

SEQ ID NO: 2504273 - RNA, 19 nt, Artificial Sequence
  Description of Artificial Sequence: Synthetic oligonucleotide
  Antisense strand to SEQ ID NO: 2504272
uuccacccugggaacugaa

SEQ ID NO: 2504274 - RNA, 19 nt, Artificial Sequence
  Description of Artificial Sequence: Synthetic oligonucleotide
  Sense strand starting at position 3800 of SEQ ID NO: 1888012
gggucuguguaaguacaaa

SEQ ID NO: 2504275 - RNA, 19 nt, Artificial Sequence
  Description of Artificial Sequence: Synthetic oligonucleotide
  Antisense strand to SEQ ID NO: 2504274
uuuguacuuacacagaccc

SEQ ID NO: 2504276 - RNA, 19 nt, Artificial Sequence
  Description of Artificial Sequence: Synthetic oligonucleotide
  Sense strand starting at position 3824 of SEQ ID NO: 1888012
ugcauaaaugucuacgugu

SEQ ID NO: 2504277 - RNA, 19 nt, Artificial Sequence
  Description of Artificial Sequence: Synthetic oligonucleotide
  Antisense strand to SEQ ID NO: 2504276
acacguagacauuuaugca

SEQ ID NO: 2504278 - RNA, 19 nt, Artificial Sequence
  Description of Artificial Sequence: Synthetic oligonucleotide
  Sense strand starting at position 3826 of SEQ ID NO: 1888012
cauaaaugucuacguguau

SEQ ID NO: 2504279 - RNA, 19 nt, Artificial Sequence
  Description of Artificial Sequence: Synthetic oligonucleotide
  Antisense strand to SEQ ID NO: 2504278
auacacguagacauuuaug

SEQ ID NO: 2504280 - RNA, 19 nt, Artificial Sequence
  Description of Artificial Sequence: Synthetic oligonucleotide
  Sense strand starting at position 3827 of SEQ ID NO: 1888012
auaaaugucuacguguauu

SEQ ID NO: 2504281 - RNA, 19 nt, Artificial Sequence
  Description of Artificial Sequence: Synthetic oligonucleotide
  Antisense strand to SEQ ID NO: 2504280
aauacacguagacauuuau

SEQ ID NO: 2504282 - RNA, 19 nt, Artificial Sequence
  Description of Artificial Sequence: Synthetic oligonucleotide
  Sense strand starting at position 48 of SEQ ID NO: 1888013
ccgagaaugugccuuugca

SEQ ID NO: 2504283 - RNA, 19 nt, Artificial Sequence
  Description of Artificial Sequence: Synthetic oligonucleotide
  Antisense strand to SEQ ID NO: 2504282
ugcaaaggcacauucucgg

SEQ ID NO: 2504284 - RNA, 19 nt, Artificial Sequence
  Description of Artificial Sequence: Synthetic oligonucleotide
  Sense strand starting at position 56 of SEQ ID NO: 1888013
gugccuuugcaacaagagu

SEQ ID NO: 2504285 - RNA, 19 nt, Artificial Sequence
  Description of Artificial Sequence: Synthetic oligonucleotide
  Antisense strand to SEQ ID NO: 2504284
acucuuguugcaaaggcac

SEQ ID NO: 2504286 - RNA, 19 nt, Artificial Sequence
  Description of Artificial Sequence: Synthetic oligonucleotide
  Sense strand starting at position 497 of SEQ ID NO: 1888013
acgugauaaugugaauuag

SEQ ID NO: 2504287 - RNA, 19 nt, Artificial Sequence
  Description of Artificial Sequence: Synthetic oligonucleotide
  Antisense strand to SEQ ID NO: 2504286
cuaauucacauuaucacgu

SEQ ID NO: 2504288 - RNA, 19 nt, Artificial Sequence
  Description of Artificial Sequence: Synthetic oligonucleotide
  Sense strand starting at position 562 of SEQ ID NO: 1888013
aguaucuuacugcaagcaa

SEQ ID NO: 2504289 - RNA, 19 nt, Artificial Sequence
  Description of Artificial Sequence: Synthetic oligonucleotide
  Antisense strand to SEQ ID NO: 2504288
uugcuugcaguaagauacu

SEQ ID NO: 2504290 - RNA, 19 nt, Artificial Sequence
  Description of Artificial Sequence: Synthetic oligonucleotide
  Sense strand starting at position 578 of SEQ ID NO: 1888013
caagaaugagguuggagua

SEQ ID NO: 2504291 - RNA, 19 nt, Artificial Sequence
  Description of Artificial Sequence: Synthetic oligonucleotide
  Antisense strand to SEQ ID NO: 2504290
uacuccaaccucauucuug

SEQ ID NO: 2504292 - RNA, 19 nt, Artificial Sequence
  Description of Artificial Sequence: Synthetic oligonucleotide
  Sense strand starting at position 696 of SEQ ID NO: 1888013
aggcaauuagacugagguu

SEQ ID NO: 2504293 - RNA, 19 nt, Artificial Sequence
  Description of Artificial Sequence: Synthetic oligonucleotide
  Antisense strand to SEQ ID NO: 2504292
aaccucagucuaauugccu

SEQ ID NO: 2504294 - RNA, 19 nt, Artificial Sequence
  Description of Artificial Sequence: Synthetic oligonucleotide
  Sense strand starting at position 697 of SEQ ID NO: 1888013
ggcaauuagacugagguuu

SEQ ID NO: 2504295 - RNA, 19 nt, Artificial Sequence
  Description of Artificial Sequence: Synthetic oligonucleotide
  Antisense strand to SEQ ID NO: 2504294
aaaccucagucuaauugcc

SEQ ID NO: 2504296 - RNA, 19 nt, Artificial Sequence
  Description of Artificial Sequence: Synthetic oligonucleotide
  Sense strand starting at position 699 of SEQ ID NO: 1888013
caauuagacugagguuucu

SEQ ID NO: 2504297 - RNA, 19 nt, Artificial Sequence
  Description of Artificial Sequence: Synthetic oligonucleotide
  Antisense strand to SEQ ID NO: 2504296
agaaaccucagucuaauug

SEQ ID NO: 2504298 - RNA, 19 nt, Artificial Sequence
  Description of Artificial Sequence: Synthetic oligonucleotide
  Sense strand starting at position 705 of SEQ ID NO: 1888013
gacugagguuucucuaguc

SEQ ID NO: 2504299 - RNA, 19 nt, Artificial Sequence
  Description of Artificial Sequence: Synthetic oligonucleotide
  Antisense strand to SEQ ID NO: 2504298
gacuagagaaaccucaguc

SEQ ID NO: 2504300 - RNA, 19 nt, Artificial Sequence
  Description of Artificial Sequence: Synthetic oligonucleotide
  Sense strand starting at position 752 of SEQ ID NO: 1888013
cuaacucaggcgcauuauu

SEQ ID NO: 2504301 - RNA, 19 nt, Artificial Sequence
  Description of Artificial Sequence: Synthetic oligonucleotide
  Antisense strand to SEQ ID NO: 2504300
aauaaugcgccugaguuag

SEQ ID NO: 2504302 - RNA, 19 nt, Artificial Sequence
  Description of Artificial Sequence: Synthetic oligonucleotide
  Sense strand starting at position 824 of SEQ ID NO: 1888013
ccaauugagcuccgauuac

SEQ ID NO: 2504303 - RNA, 19 nt, Artificial Sequence
  Description of Artificial Sequence: Synthetic oligonucleotide
  Antisense strand to SEQ ID NO: 2504302
guaaucggagcucaauugg

SEQ ID NO: 2504304 - RNA, 19 nt, Artificial Sequence
  Description of Artificial Sequence: Synthetic oligonucleotide
  Sense strand starting at position 828 of SEQ ID NO: 1888013
uugagcuccgauuacauaa

SEQ ID NO: 2504305 - RNA, 19 nt, Artificial Sequence
  Description of Artificial Sequence: Synthetic oligonucleotide
  Antisense strand to SEQ ID NO: 2504304
uuauguaaucggagcucaa

SEQ ID NO: 2504306 - RNA, 19 nt, Artificial Sequence
  Description of Artificial Sequence: Synthetic oligonucleotide
  Sense strand starting at position 988 of SEQ ID NO: 1888013
acagcuuggugcucuacaa

SEQ ID NO: 2504307 - RNA, 19 nt, Artificial Sequence
  Description of Artificial Sequence: Synthetic oligonucleotide
  Antisense strand to SEQ ID NO: 2504306
uuguagagcaccaagcugu

SEQ ID NO: 2504308 - RNA, 19 nt, Artificial Sequence
  Description of Artificial Sequence: Synthetic oligonucleotide
  Sense strand starting at position 1374 of SEQ ID NO: 1888013
ugcagugacucccauuaac

SEQ ID NO: 2504309 - RNA, 19 nt, Artificial Sequence
  Description of Artificial Sequence: Synthetic oligonucleotide
  Antisense strand to SEQ ID NO: 2504308
guuaaugggagucacugca

SEQ ID NO: 2504310 - RNA, 19 nt, Artificial Sequence
  Description of Artificial Sequence: Synthetic oligonucleotide
  Sense strand starting at position 1502 of SEQ ID NO: 1888013
ugcacaauccgguagagaa

SEQ ID NO: 2504311 - RNA, 19 nt, Artificial Sequence
  Description of Artificial Sequence: Synthetic oligonucleotide
  Antisense strand to SEQ ID NO: 2504310
uucucuaccggauugugca

SEQ ID NO: 2504312 - RNA, 19 nt, Artificial Sequence
  Description of Artificial Sequence: Synthetic oligonucleotide
  Sense strand starting at position 2081 of SEQ ID NO: 1888013
auuagaugcugggcugaau

SEQ ID NO: 2504313 - RNA, 19 nt, Artificial Sequence
  Description of Artificial Sequence: Synthetic oligonucleotide
  Antisense strand to SEQ ID NO: 2504312
auucagcccagcaucuaau

SEQ ID NO: 2504314 - RNA, 19 nt, Artificial Sequence
  Description of Artificial Sequence: Synthetic oligonucleotide
  Sense strand starting at position 2365 of SEQ ID NO: 1888013
aaaugugagccacgugaau

SEQ ID NO: 2504315 - RNA, 19 nt, Artificial Sequence
  Description of Artificial Sequence: Synthetic oligonucleotide
  Antisense strand to SEQ ID NO: 2504314
auucacguggcucacauuu

SEQ ID NO: 2504316 - RNA, 19 nt, Artificial Sequence
  Description of Artificial Sequence: Synthetic oligonucleotide
  Sense strand starting at position 2367 of SEQ ID NO: 1888013
augugagccacgugaauuu

SEQ ID NO: 2504317 - RNA, 19 nt, Artificial Sequence
  Description of Artificial Sequence: Synthetic oligonucleotide
  Antisense strand to SEQ ID NO: 2504316
aaauucacguggcucacau

SEQ ID NO: 2504318 - RNA, 19 nt, Artificial Sequence
  Description of Artificial Sequence: Synthetic oligonucleotide
  Sense strand starting at position 2818 of SEQ ID NO: 1888013
uugagacccuccuggcaau

SEQ ID NO: 2504319 - RNA, 19 nt, Artificial Sequence
  Description of Artificial Sequence: Synthetic oligonucleotide
  Antisense strand to SEQ ID NO: 2504318
auugccaggagggucucaa

SEQ ID NO: 2504320 - RNA, 19 nt, Artificial Sequence
  Description of Artificial Sequence: Synthetic oligonucleotide
  Sense strand starting at position 3101 of SEQ ID NO: 1888013
uuuaaugugugaggaauau

SEQ ID NO: 2504321 - RNA, 19 nt, Artificial Sequence
  Description of Artificial Sequence: Synthetic oligonucleotide
  Antisense strand to SEQ ID NO: 2504320
auauuccucacacauuaaa

SEQ ID NO: 2504322 - RNA, 19 nt, Artificial Sequence
  Description of Artificial Sequence: Synthetic oligonucleotide
  Sense strand starting at position 3105 of SEQ ID NO: 1888013
augugugaggaauauguaa

SEQ ID NO: 2504323 - RNA, 19 nt, Artificial Sequence
  Description of Artificial Sequence: Synthetic oligonucleotide
  Antisense strand to SEQ ID NO: 2504322
uuacauauuccucacacau

SEQ ID NO: 2504324 - RNA, 19 nt, Artificial Sequence
  Description of Artificial Sequence: Synthetic oligonucleotide
  Sense strand starting at position 3107 of SEQ ID NO: 1888013
gugugaggaauauguaauu

SEQ ID NO: 2504325 - RNA, 19 nt, Artificial Sequence
  Description of Artificial Sequence: Synthetic oligonucleotide
  Antisense strand to SEQ ID NO: 2504324
aauuacauauuccucacac

SEQ ID NO: 2504326 - RNA, 19 nt, Artificial Sequence
  Description of Artificial Sequence: Synthetic oligonucleotide
  Sense strand starting at position 3248 of SEQ ID NO: 1888013
ucugaugucaaugguguga

SEQ ID NO: 2504327 - RNA, 19 nt, Artificial Sequence
  Description of Artificial Sequence: Synthetic oligonucleotide
  Antisense strand to SEQ ID NO: 2504326
ucacaccauugacaucaga

SEQ ID NO: 2504328 - RNA, 19 nt, Artificial Sequence
  Description of Artificial Sequence: Synthetic oligonucleotide
  Sense strand starting at position 3250 of SEQ ID NO: 1888013
ugaugucaauggugugaag

SEQ ID NO: 2504329 - RNA, 19 nt, Artificial Sequence
  Description of Artificial Sequence: Synthetic oligonucleotide
  Antisense strand to SEQ ID NO: 2504328
cuucacaccauugacauca

SEQ ID NO: 2504330 - RNA, 19 nt, Artificial Sequence
  Description of Artificial Sequence: Synthetic oligonucleotide
  Sense strand starting at position 3313 of SEQ ID NO: 1888013
caguucugagguuggaaca

SEQ ID NO: 2504331 - RNA, 19 nt, Artificial Sequence
  Description of Artificial Sequence: Synthetic oligonucleotide
  Antisense strand to SEQ ID NO: 2504330
uguuccaaccucagaacug

SEQ ID NO: 2504332 - RNA, 19 nt, Artificial Sequence
  Description of Artificial Sequence: Synthetic oligonucleotide
  Sense strand starting at position 3418 of SEQ ID NO: 1888013
uuuagagauuaggcuguga

SEQ ID NO: 2504333 - RNA, 19 nt, Artificial Sequence
  Description of Artificial Sequence: Synthetic oligonucleotide
  Antisense strand to SEQ ID NO: 2504332
ucacagccuaaucucuaaa

SEQ ID NO: 2504334 - RNA, 19 nt, Artificial Sequence
  Description of Artificial Sequence: Synthetic oligonucleotide
  Sense strand starting at position 3420 of SEQ ID NO: 1888013
uagagauuaggcugugaac

SEQ ID NO: 2504335 - RNA, 19 nt, Artificial Sequence
  Description of Artificial Sequence: Synthetic oligonucleotide
  Antisense strand to SEQ ID NO: 2504334
guucacagccuaaucucua

SEQ ID NO: 2504336 - RNA, 19 nt, Artificial Sequence
  Description of Artificial Sequence: Synthetic oligonucleotide
  Sense strand starting at position 3422 of SEQ ID NO: 1888013
gagauuaggcugugaacau

SEQ ID NO: 2504337 - RNA, 19 nt, Artificial Sequence
  Description of Artificial Sequence: Synthetic oligonucleotide
  Antisense strand to SEQ ID NO: 2504336
auguucacagccuaaucuc

SEQ ID NO: 2504338 - RNA, 19 nt, Artificial Sequence
  Description of Artificial Sequence: Synthetic oligonucleotide
  Sense strand starting at position 3423 of SEQ ID NO: 1888013
agauuaggcugugaacaua

SEQ ID NO: 2504339 - RNA, 19 nt, Artificial Sequence
  Description of Artificial Sequence: Synthetic oligonucleotide
  Antisense strand to SEQ ID NO: 2504338
uauguucacagccuaaucu

SEQ ID NO: 2504340 - RNA, 19 nt, Artificial Sequence
  Description of Artificial Sequence: Synthetic oligonucleotide
  Sense strand starting at position 3495 of SEQ ID NO: 1888013
cuuggacuccaguguuuag

SEQ ID NO: 2504341 - RNA, 19 nt, Artificial Sequence
  Description of Artificial Sequence: Synthetic oligonucleotide
  Antisense strand to SEQ ID NO: 2504340
cuaaacacuggaguccaag

SEQ ID NO: 2504342 - RNA, 19 nt, Artificial Sequence
  Description of Artificial Sequence: Synthetic oligonucleotide
  Sense strand starting at position 3498 of SEQ ID NO: 1888013
ggacuccaguguuuagaua

SEQ ID NO: 2504343 - RNA, 19 nt, Artificial Sequence
  Description of Artificial Sequence: Synthetic oligonucleotide
  Antisense strand to SEQ ID NO: 2504342
uaucuaaacacuggagucc

SEQ ID NO: 2504344 - RNA, 19 nt, Artificial Sequence
  Description of Artificial Sequence: Synthetic oligonucleotide
  Sense strand starting at position 3639 of SEQ ID NO: 1888013
gcauacaugucucccagua

SEQ ID NO: 2504345 - RNA, 19 nt, Artificial Sequence
  Description of Artificial Sequence: Synthetic oligonucleotide
  Antisense strand to SEQ ID NO: 2504344
uacugggagacauguaugc

SEQ ID NO: 2504346 - RNA, 19 nt, Artificial Sequence
  Description of Artificial Sequence: Synthetic oligonucleotide
  Sense strand starting at position 3641 of SEQ ID NO: 1888013
auacaugucucccaguauu

SEQ ID NO: 2504347 - RNA, 19 nt, Artificial Sequence
  Description of Artificial Sequence: Synthetic oligonucleotide
  Antisense strand to SEQ ID NO: 2504346
aauacugggagacauguau

SEQ ID NO: 2504348 - RNA, 19 nt, Artificial Sequence
  Description of Artificial Sequence: Synthetic oligonucleotide
  Sense strand starting at position 3649 of SEQ ID NO: 1888013
cucccaguauuucugcauu

SEQ ID NO: 2504349 - RNA, 19 nt, Artificial Sequence
  Description of Artificial Sequence: Synthetic oligonucleotide
  Antisense strand to SEQ ID NO: 2504348
aaugcagaaauacugggag

SEQ ID NO: 2504350 - RNA, 19 nt, Artificial Sequence
  Description of Artificial Sequence: Synthetic oligonucleotide
  Sense strand starting at position 3651 of SEQ ID NO: 1888013
cccaguauuucugcauuac

SEQ ID NO: 2504351 - RNA, 19 nt, Artificial Sequence
  Description of Artificial Sequence: Synthetic oligonucleotide
  Antisense strand to SEQ ID NO: 2504350
guaaugcagaaauacuggg

SEQ ID NO: 2504352 - RNA, 19 nt, Artificial Sequence
  Description of Artificial Sequence: Synthetic oligonucleotide
  Sense strand starting at position 3726 of SEQ ID NO: 1888013
gagggugcccacuguuaga

SEQ ID NO: 2504353 - RNA, 19 nt, Artificial Sequence
  Description of Artificial Sequence: Synthetic oligonucleotide
  Antisense strand to SEQ ID NO: 2504352
ucuaacagugggcacccuc

SEQ ID NO: 2504354 - RNA, 19 nt, Artificial Sequence
  Description of Artificial Sequence: Synthetic oligonucleotide
  Sense strand starting at position 3768 of SEQ ID NO: 1888013
acugaauccuggcauccua

SEQ ID NO: 2504355 - RNA, 19 nt, Artificial Sequence
  Description of Artificial Sequence: Synthetic oligonucleotide
  Antisense strand to SEQ ID NO: 2504354
uaggaugccaggauucagu

SEQ ID NO: 2504356 - RNA, 19 nt, Artificial Sequence
  Description of Artificial Sequence: Synthetic oligonucleotide
  Sense strand starting at position 3789 of SEQ ID NO: 1888013
ugcacuggugcauguauua

SEQ ID NO: 2504357 - RNA, 19 nt, Artificial Sequence
  Description of Artificial Sequence: Synthetic oligonucleotide
  Antisense strand to SEQ ID NO: 2504356
uaauacaugcaccagugca

SEQ ID NO: 2504358 - RNA, 19 nt, Artificial Sequence
  Description of Artificial Sequence: Synthetic oligonucleotide
  Sense strand starting at position 3869 of SEQ ID NO: 1888013
ccauuuaggcugggugagu

SEQ ID NO: 2504359 - RNA, 19 nt, Artificial Sequence
  Description of Artificial Sequence: Synthetic oligonucleotide
  Antisense strand to SEQ ID NO: 2504358
acucacccagccuaaaugg

SEQ ID NO: 2504360 - RNA, 19 nt, Artificial Sequence
  Description of Artificial Sequence: Synthetic oligonucleotide
  Sense strand starting at position 3890 of SEQ ID NO: 1888013
ggccguucuucugguauca

SEQ ID NO: 2504361 - RNA, 19 nt, Artificial Sequence
  Description of Artificial Sequence: Synthetic oligonucleotide
  Antisense strand to SEQ ID NO: 2504360
ugauaccagaagaacggcc

SEQ ID NO: 2504362 - RNA, 19 nt, Artificial Sequence
  Description of Artificial Sequence: Synthetic oligonucleotide
  Sense strand starting at position 31 of SEQ ID NO: 1888014
ugacaauaggaaggcuauu

SEQ ID NO: 2504363 - RNA, 19 nt, Artificial Sequence
  Description of Artificial Sequence: Synthetic oligonucleotide
  Antisense strand to SEQ ID NO: 2504362
aauagccuuccuauuguca

SEQ ID NO: 2504364 - RNA, 19 nt, Artificial Sequence
  Description of Artificial Sequence: Synthetic oligonucleotide
  Sense strand starting at position 37 of SEQ ID NO: 1888014
uaggaaggcuauuaaagaa

SEQ ID NO: 2504365 - RNA, 19 nt, Artificial Sequence
  Description of Artificial Sequence: Synthetic oligonucleotide
  Antisense strand to SEQ ID NO: 2504364
uucuuuaauagccuuccua

SEQ ID NO: 2504366 - RNA, 19 nt, Artificial Sequence
  Description of Artificial Sequence: Synthetic oligonucleotide
  Sense strand starting at position 113 of SEQ ID NO: 1888014
acucuugaguccgucuuua

SEQ ID NO: 2504367 - RNA, 19 nt, Artificial Sequence
  Description of Artificial Sequence: Synthetic oligonucleotide
  Antisense strand to SEQ ID NO: 2504366
uaaagacggacucaagagu

SEQ ID NO: 2504368 - RNA, 19 nt, Artificial Sequence
  Description of Artificial Sequence: Synthetic oligonucleotide
  Sense strand starting at position 189 of SEQ ID NO: 1888014
uacuaagaauugguuugau

SEQ ID NO: 2504369 - RNA, 19 nt, Artificial Sequence
  Description of Artificial Sequence: Synthetic oligonucleotide
  Antisense strand to SEQ ID NO: 2504368
aucaaaccaauucuuagua

SEQ ID NO: 2504370 - RNA, 19 nt, Artificial Sequence
  Description of Artificial Sequence: Synthetic oligonucleotide
  Sense strand starting at position 192 of SEQ ID NO: 1888014
uaagaauugguuugauacu

SEQ ID NO: 2504371 - RNA, 19 nt, Artificial Sequence
  Description of Artificial Sequence: Synthetic oligonucleotide
  Antisense strand to SEQ ID NO: 2504370
aguaucaaaccaauucuua

SEQ ID NO: 2504372 - RNA, 19 nt, Artificial Sequence
  Description of Artificial Sequence: Synthetic oligonucleotide
  Sense strand starting at position 193 of SEQ ID NO: 1888014
aagaauugguuugauacuc

SEQ ID NO: 2504373 - RNA, 19 nt, Artificial Sequence
  Description of Artificial Sequence: Synthetic oligonucleotide
  Antisense strand to SEQ ID NO: 2504372
gaguaucaaaccaauucuu

SEQ ID NO: 2504374 - RNA, 19 nt, Artificial Sequence
  Description of Artificial Sequence: Synthetic oligonucleotide
  Sense strand starting at position 198 of SEQ ID NO: 1888014
uugguuugauacucccuua

SEQ ID NO: 2504375 - RNA, 19 nt, Artificial Sequence
  Description of Artificial Sequence: Synthetic oligonucleotide
  Antisense strand to SEQ ID NO: 2504374
uaagggaguaucaaaccaa

SEQ ID NO: 2504376 - RNA, 19 nt, Artificial Sequence
  Description of Artificial Sequence: Synthetic oligonucleotide
  Sense strand starting at position 201 of SEQ ID NO: 1888014
guuugauacucccuuaccu

SEQ ID NO: 2504377 - RNA, 19 nt, Artificial Sequence
  Description of Artificial Sequence: Synthetic oligonucleotide
  Antisense strand to SEQ ID NO: 2504376
agguaagggaguaucaaac

SEQ ID NO: 2504378 - RNA, 19 nt, Artificial Sequence
  Description of Artificial Sequence: Synthetic oligonucleotide
  Sense strand starting at position 218 of SEQ ID NO: 1888014
cucuuaccucuccguguua

SEQ ID NO: 2504379 - RNA, 19 nt, Artificial Sequence
  Description of Artificial Sequence: Synthetic oligonucleotide
  Antisense strand to SEQ ID NO: 2504378
uaacacggagagguaagag

SEQ ID NO: 2504380 - RNA, 19 nt, Artificial Sequence
  Description of Artificial Sequence: Synthetic oligonucleotide
  Sense strand starting at position 219 of SEQ ID NO: 1888014
ucuuaccucuccguguuaa

SEQ ID NO: 2504381 - RNA, 19 nt, Artificial Sequence
  Description of Artificial Sequence: Synthetic oligonucleotide
  Antisense strand to SEQ ID NO: 2504380
uuaacacggagagguaaga

SEQ ID NO: 2504382 - RNA, 19 nt, Artificial Sequence
  Description of Artificial Sequence: Synthetic oligonucleotide
  Sense strand starting at position 220 of SEQ ID NO: 1888014
cuuaccucuccguguuaag

SEQ ID NO: 2504383 - RNA, 19 nt, Artificial Sequence
  Description of Artificial Sequence: Synthetic oligonucleotide
  Antisense strand to SEQ ID NO: 2504382
cuuaacacggagagguaag

SEQ ID NO: 2504384 - RNA, 19 nt, Artificial Sequence
  Description of Artificial Sequence: Synthetic oligonucleotide
  Sense strand starting at position 288 of SEQ ID NO: 1888014
agcuaauagcccgauauaa

SEQ ID NO: 2504385 - RNA, 19 nt, Artificial Sequence
  Description of Artificial Sequence: Synthetic oligonucleotide
  Antisense strand to SEQ ID NO: 2504384
uuauaucgggcuauuagcu

SEQ ID NO: 2504386 - RNA, 19 nt, Artificial Sequence
  Description of Artificial Sequence: Synthetic oligonucleotide
  Sense strand starting at position 335 of SEQ ID NO: 1888014
uccaguaauagugaugucu

SEQ ID NO: 2504387 - RNA, 19 nt, Artificial Sequence
  Description of Artificial Sequence: Synthetic oligonucleotide
  Antisense strand to SEQ ID NO: 2504386
agacaucacuauuacugga

SEQ ID NO: 2504388 - RNA, 19 nt, Artificial Sequence
  Description of Artificial Sequence: Synthetic oligonucleotide
  Sense strand starting at position 344 of SEQ ID NO: 1888014
agugaugucuucuaguaaa

SEQ ID NO: 2504389 - RNA, 19 nt, Artificial Sequence
  Description of Artificial Sequence: Synthetic oligonucleotide
  Antisense strand to SEQ ID NO: 2504388
uuuacuagaagacaucacu

SEQ ID NO: 2504390 - RNA, 19 nt, Artificial Sequence
  Description of Artificial Sequence: Synthetic oligonucleotide
  Sense strand starting at position 507 of SEQ ID NO: 1888014
ucgacuuggcgaagucgaa

SEQ ID NO: 2504391 - RNA, 19 nt, Artificial Sequence
  Description of Artificial Sequence: Synthetic oligonucleotide
  Antisense strand to SEQ ID NO: 2504390
uucgacuucgccaagucga

SEQ ID NO: 2504392 - RNA, 19 nt, Artificial Sequence
  Description of Artificial Sequence: Synthetic oligonucleotide
  Sense strand starting at position 748 of SEQ ID NO: 1888014
cacuccgucuuuguugaaa

SEQ ID NO: 2504393 - RNA, 19 nt, Artificial Sequence
  Description of Artificial Sequence: Synthetic oligonucleotide
  Antisense strand to SEQ ID NO: 2504392
uuucaacaaagacggagug

SEQ ID NO: 2504394 - RNA, 19 nt, Artificial Sequence
  Description of Artificial Sequence: Synthetic oligonucleotide
  Sense strand starting at position 797 of SEQ ID NO: 1888014
gccggugcguaucuuaaau

SEQ ID NO: 2504395 - RNA, 19 nt, Artificial Sequence
  Description of Artificial Sequence: Synthetic oligonucleotide
  Antisense strand to SEQ ID NO: 2504394
auuuaagauacgcaccggc

SEQ ID NO: 2504396 - RNA, 19 nt, Artificial Sequence
  Description of Artificial Sequence: Synthetic oligonucleotide
  Sense strand starting at position 835 of SEQ ID NO: 1888014
ccauaucagucugucuagu

SEQ ID NO: 2504397 - RNA, 19 nt, Artificial Sequence
  Description of Artificial Sequence: Synthetic oligonucleotide
  Antisense strand to SEQ ID NO: 2504396
acuagacagacugauaugg

SEQ ID NO: 2504398 - RNA, 19 nt, Artificial Sequence
  Description of Artificial Sequence: Synthetic oligonucleotide
  Sense strand starting at position 844 of SEQ ID NO: 1888014
ucugucuaguccucaguuu

SEQ ID NO: 2504399 - RNA, 19 nt, Artificial Sequence
  Description of Artificial Sequence: Synthetic oligonucleotide
  Antisense strand to SEQ ID NO: 2504398
aaacugaggacuagacaga

SEQ ID NO: 2504400 - RNA, 19 nt, Artificial Sequence
  Description of Artificial Sequence: Synthetic oligonucleotide
  Sense strand starting at position 1237 of SEQ ID NO: 1888014
uguuauaggucuuucucau

SEQ ID NO: 2504401 - RNA, 19 nt, Artificial Sequence
  Description of Artificial Sequence: Synthetic oligonucleotide
  Antisense strand to SEQ ID NO: 2504400
augagaaagaccuauaaca

SEQ ID NO: 2504402 - RNA, 19 nt, Artificial Sequence
  Description of Artificial Sequence: Synthetic oligonucleotide
  Sense strand starting at position 1241 of SEQ ID NO: 1888014
auaggucuuucucauucuu

SEQ ID NO: 2504403 - RNA, 19 nt, Artificial Sequence
  Description of Artificial Sequence: Synthetic oligonucleotide
  Antisense strand to SEQ ID NO: 2504402
aagaaugagaaagaccuau

SEQ ID NO: 2504404 - RNA, 19 nt, Artificial Sequence
  Description of Artificial Sequence: Synthetic oligonucleotide
  Sense strand starting at position 1456 of SEQ ID NO: 1888014
cggugauuguggaggcgaa

SEQ ID NO: 2504405 - RNA, 19 nt, Artificial Sequence
  Description of Artificial Sequence: Synthetic oligonucleotide
  Antisense strand to SEQ ID NO: 2504404
uucgccuccacaaucaccg

SEQ ID NO: 2504406 - RNA, 19 nt, Artificial Sequence
  Description of Artificial Sequence: Synthetic oligonucleotide
  Sense strand starting at position 1457 of SEQ ID NO: 1888014
ggugauuguggaggcgaaa

SEQ ID NO: 2504407 - RNA, 19 nt, Artificial Sequence
  Description of Artificial Sequence: Synthetic oligonucleotide
  Antisense strand to SEQ ID NO: 2504406
uuucgccuccacaaucacc

SEQ ID NO: 2504408 - RNA, 19 nt, Artificial Sequence
  Description of Artificial Sequence: Synthetic oligonucleotide
  Sense strand starting at position 1726 of SEQ ID NO: 1888014
uacauugcccuguagcaga

SEQ ID NO: 2504409 - RNA, 19 nt, Artificial Sequence
  Description of Artificial Sequence: Synthetic oligonucleotide
  Antisense strand to SEQ ID NO: 2504408
ucugcuacagggcaaugua

SEQ ID NO: 2504410 - RNA, 19 nt, Artificial Sequence
  Description of Artificial Sequence: Synthetic oligonucleotide
  Sense strand starting at position 2098 of SEQ ID NO: 1888014
gcgcuuuagagccggcaga

SEQ ID NO: 2504411 - RNA, 19 nt, Artificial Sequence
  Description of Artificial Sequence: Synthetic oligonucleotide
  Antisense strand to SEQ ID NO: 2504410
ucugccggcucuaaagcgc

SEQ ID NO: 2504412 - RNA, 19 nt, Artificial Sequence
  Description of Artificial Sequence: Synthetic oligonucleotide
  Sense strand starting at position 2229 of SEQ ID NO: 1888014
ggaauugucuggaacggga

SEQ ID NO: 2504413 - RNA, 19 nt, Artificial Sequence
  Description of Artificial Sequence: Synthetic oligonucleotide
  Antisense strand to SEQ ID NO: 2504412
ucccguuccagacaauucc

SEQ ID NO: 2504414 - RNA, 19 nt, Artificial Sequence
  Description of Artificial Sequence: Synthetic oligonucleotide
  Sense strand starting at position 2231 of SEQ ID NO: 1888014
aauugucuggaacgggaua

SEQ ID NO: 2504415 - RNA, 19 nt, Artificial Sequence
  Description of Artificial Sequence: Synthetic oligonucleotide
  Antisense strand to SEQ ID NO: 2504414
uaucccguuccagacaauu

SEQ ID NO: 2504416 - RNA, 19 nt, Artificial Sequence
  Description of Artificial Sequence: Synthetic oligonucleotide
  Sense strand starting at position 2712 of SEQ ID NO: 1888014
ccagcacauuuguagaaga

SEQ ID NO: 2504417 - RNA, 19 nt, Artificial Sequence
  Description of Artificial Sequence: Synthetic oligonucleotide
  Antisense strand to SEQ ID NO: 2504416
ucuucuacaaaugugcugg

SEQ ID NO: 2504418 - RNA, 19 nt, Artificial Sequence
  Description of Artificial Sequence: Synthetic oligonucleotide
  Sense strand starting at position 3078 of SEQ ID NO: 1888014
acugucuaauuguugagaa

SEQ ID NO: 2504419 - RNA, 19 nt, Artificial Sequence
  Description of Artificial Sequence: Synthetic oligonucleotide
  Antisense strand to SEQ ID NO: 2504418
uucucaacaauuagacagu

SEQ ID NO: 2504420 - RNA, 19 nt, Artificial Sequence
  Description of Artificial Sequence: Synthetic oligonucleotide
  Sense strand starting at position 3147 of SEQ ID NO: 1888014
ccacgaugaucauagagaa

SEQ ID NO: 2504421 - RNA, 19 nt, Artificial Sequence
  Description of Artificial Sequence: Synthetic oligonucleotide
  Antisense strand to SEQ ID NO: 2504420
uucucuaugaucaucgugg

SEQ ID NO: 2504422 - RNA, 19 nt, Artificial Sequence
  Description of Artificial Sequence: Synthetic oligonucleotide
  Sense strand starting at position 3446 of SEQ ID NO: 1888014
ccaugucuuucugacaagu

SEQ ID NO: 2504423 - RNA, 19 nt, Artificial Sequence
  Description of Artificial Sequence: Synthetic oligonucleotide
  Antisense strand to SEQ ID NO: 2504422
acuugucagaaagacaugg

SEQ ID NO: 2504424 - RNA, 19 nt, Artificial Sequence
  Description of Artificial Sequence: Synthetic oligonucleotide
  Sense strand starting at position 3452 of SEQ ID NO: 1888014
cuuucugacaagugugagu

SEQ ID NO: 2504425 - RNA, 19 nt, Artificial Sequence
  Description of Artificial Sequence: Synthetic oligonucleotide
  Antisense strand to SEQ ID NO: 2504424
acucacacuugucagaaag

SEQ ID NO: 2504426 - RNA, 19 nt, Artificial Sequence
  Description of Artificial Sequence: Synthetic oligonucleotide
  Sense strand starting at position 3454 of SEQ ID NO: 1888014
uucugacaagugugaguuu

SEQ ID NO: 2504427 - RNA, 19 nt, Artificial Sequence
  Description of Artificial Sequence: Synthetic oligonucleotide
  Antisense strand to SEQ ID NO: 2504426
aaacucacacuugucagaa

SEQ ID NO: 2504428 - RNA, 19 nt, Artificial Sequence
  Description of Artificial Sequence: Synthetic oligonucleotide
  Sense strand starting at position 3507 of SEQ ID NO: 1888014
cuccuacagucugacagaa

SEQ ID NO: 2504429 - RNA, 19 nt, Artificial Sequence
  Description of Artificial Sequence: Synthetic oligonucleotide
  Antisense strand to SEQ ID NO: 2504428
uucugucagacuguaggag

SEQ ID NO: 2504430 - RNA, 19 nt, Artificial Sequence
  Description of Artificial Sequence: Synthetic oligonucleotide
  Sense strand starting at position 3561 of SEQ ID NO: 1888014
uaugauuaagcacagaguu

SEQ ID NO: 2504431 - RNA, 19 nt, Artificial Sequence
  Description of Artificial Sequence: Synthetic oligonucleotide
  Antisense strand to SEQ ID NO: 2504430
aacucugugcuuaaucaua

SEQ ID NO: 2504432 - RNA, 19 nt, Artificial Sequence
  Description of Artificial Sequence: Synthetic oligonucleotide
  Sense strand starting at position 3729 of SEQ ID NO: 1888014
gcagcaaggugauugguua

SEQ ID NO: 2504433 - RNA, 19 nt, Artificial Sequence
  Description of Artificial Sequence: Synthetic oligonucleotide
  Antisense strand to SEQ ID NO: 2504432
uaaccaaucaccuugcugc

SEQ ID NO: 2504434 - RNA, 19 nt, Artificial Sequence
  Description of Artificial Sequence: Synthetic oligonucleotide
  Sense strand starting at position 3730 of SEQ ID NO: 1888014
cagcaaggugauugguuau

SEQ ID NO: 2504435 - RNA, 19 nt, Artificial Sequence
  Description of Artificial Sequence: Synthetic oligonucleotide
  Antisense strand to SEQ ID NO: 2504434
auaaccaaucaccuugcug

SEQ ID NO: 2504436 - RNA, 19 nt, Artificial Sequence
  Description of Artificial Sequence: Synthetic oligonucleotide
  Sense strand starting at position 3733 of SEQ ID NO: 1888014
caaggugauugguuaugga

SEQ ID NO: 2504437 - RNA, 19 nt, Artificial Sequence
  Description of Artificial Sequence: Synthetic oligonucleotide
  Antisense strand to SEQ ID NO: 2504436
uccauaaccaaucaccuug

SEQ ID NO: 2504438 - RNA, 19 nt, Artificial Sequence
  Description of Artificial Sequence: Synthetic oligonucleotide
  Sense strand starting at position 3737 of SEQ ID NO: 1888014
gugauugguuauggauuga

SEQ ID NO: 2504439 - RNA, 19 nt, Artificial Sequence
  Description of Artificial Sequence: Synthetic oligonucleotide
  Antisense strand to SEQ ID NO: 2504438
ucaauccauaaccaaucac

SEQ ID NO: 2504440 - RNA, 19 nt, Artificial Sequence
  Description of Artificial Sequence: Synthetic oligonucleotide
  Sense strand starting at position 3741 of SEQ ID NO: 1888014
uugguuauggauugauaua

SEQ ID NO: 2504441 - RNA, 19 nt, Artificial Sequence
  Description of Artificial Sequence: Synthetic oligonucleotide
  Antisense strand to SEQ ID NO: 2504440
uauaucaauccauaaccaa

SEQ ID NO: 2504442 - RNA, 19 nt, Artificial Sequence
  Description of Artificial Sequence: Synthetic oligonucleotide
  Sense strand starting at position 250 of SEQ ID NO: 1888015
guauaugacauuuguguug

SEQ ID NO: 2504443 - RNA, 19 nt, Artificial Sequence
  Description of Artificial Sequence: Synthetic oligonucleotide
  Antisense strand to SEQ ID NO: 2504442
caacacaaaugucauauac

SEQ ID NO: 2504444 - RNA, 19 nt, Artificial Sequence
  Description of Artificial Sequence: Synthetic oligonucleotide
  Sense strand starting at position 253 of SEQ ID NO: 1888015
uaugacauuuguguuguca

SEQ ID NO: 2504445 - RNA, 19 nt, Artificial Sequence
  Description of Artificial Sequence: Synthetic oligonucleotide
  Antisense strand to SEQ ID NO: 2504444
ugacaacacaaaugucaua

SEQ ID NO: 2504446 - RNA, 19 nt, Artificial Sequence
  Description of Artificial Sequence: Synthetic oligonucleotide
  Sense strand starting at position 293 of SEQ ID NO: 1888015
cacugaugugcucaaugac

SEQ ID NO: 2504447 - RNA, 19 nt, Artificial Sequence
  Description of Artificial Sequence: Synthetic oligonucleotide
  Antisense strand to SEQ ID NO: 2504446
gucauugagcacaucagug

SEQ ID NO: 2504448 - RNA, 19 nt, Artificial Sequence
  Description of Artificial Sequence: Synthetic oligonucleotide
  Sense strand starting at position 296 of SEQ ID NO: 1888015
ugaugugcucaaugacagu

SEQ ID NO: 2504449 - RNA, 19 nt, Artificial Sequence
  Description of Artificial Sequence: Synthetic oligonucleotide
  Antisense strand to SEQ ID NO: 2504448
acugucauugagcacauca

SEQ ID NO: 2504450 - RNA, 19 nt, Artificial Sequence
  Description of Artificial Sequence: Synthetic oligonucleotide
  Sense strand starting at position 313 of SEQ ID NO: 1888015
guuucucaucaacacugua

SEQ ID NO: 2504451 - RNA, 19 nt, Artificial Sequence
  Description of Artificial Sequence: Synthetic oligonucleotide
  Antisense strand to SEQ ID NO: 2504450
uacaguguugaugagaaac

SEQ ID NO: 2504452 - RNA, 19 nt, Artificial Sequence
  Description of Artificial Sequence: Synthetic oligonucleotide
  Sense strand starting at position 404 of SEQ ID NO: 1888015
cauuguccuguggaaucau

SEQ ID NO: 2504453 - RNA, 19 nt, Artificial Sequence
  Description of Artificial Sequence: Synthetic oligonucleotide
  Antisense strand to SEQ ID NO: 2504452
augauuccacaggacaaug

SEQ ID NO: 2504454 - RNA, 19 nt, Artificial Sequence
  Description of Artificial Sequence: Synthetic oligonucleotide
  Sense strand starting at position 826 of SEQ ID NO: 1888015
uacugugaauuggagaaga

SEQ ID NO: 2504455 - RNA, 19 nt, Artificial Sequence
  Description of Artificial Sequence: Synthetic oligonucleotide
  Antisense strand to SEQ ID NO: 2504454
ucuucuccaauucacagua

SEQ ID NO: 2504456 - RNA, 19 nt, Artificial Sequence
  Description of Artificial Sequence: Synthetic oligonucleotide
  Sense strand starting at position 844 of SEQ ID NO: 1888015
aggaguuaauguuuggaaa

SEQ ID NO: 2504457 - RNA, 19 nt, Artificial Sequence
  Description of Artificial Sequence: Synthetic oligonucleotide
  Antisense strand to SEQ ID NO: 2504456
uuuccaaacauuaacuccu

SEQ ID NO: 2504458 - RNA, 19 nt, Artificial Sequence
  Description of Artificial Sequence: Synthetic oligonucleotide
  Sense strand starting at position 845 of SEQ ID NO: 1888015
ggaguuaauguuuggaaau

SEQ ID NO: 2504459 - RNA, 19 nt, Artificial Sequence
  Description of Artificial Sequence: Synthetic oligonucleotide
  Antisense strand to SEQ ID NO: 2504458
auuuccaaacauuaacucc

SEQ ID NO: 2504460 - RNA, 19 nt, Artificial Sequence
  Description of Artificial Sequence: Synthetic oligonucleotide
  Sense strand starting at position 851 of SEQ ID NO: 1888015
aauguuuggaaauguggga

SEQ ID NO: 2504461 - RNA, 19 nt, Artificial Sequence
  Description of Artificial Sequence: Synthetic oligonucleotide
  Antisense strand to SEQ ID NO: 2504460
ucccacauuuccaaacauu

SEQ ID NO: 2504462 - RNA, 19 nt, Artificial Sequence
  Description of Artificial Sequence: Synthetic oligonucleotide
  Sense strand starting at position 1093 of SEQ ID NO: 1888015
uuccaaauguuucugguaa

SEQ ID NO: 2504463 - RNA, 19 nt, Artificial Sequence
  Description of Artificial Sequence: Synthetic oligonucleotide
  Antisense strand to SEQ ID NO: 2504462
uuaccagaaacauuuggaa

SEQ ID NO: 2504464 - RNA, 19 nt, Artificial Sequence
  Description of Artificial Sequence: Synthetic oligonucleotide
  Sense strand starting at position 1120 of SEQ ID NO: 1888015
aaaccaugacugcgugauu

SEQ ID NO: 2504465 - RNA, 19 nt, Artificial Sequence
  Description of Artificial Sequence: Synthetic oligonucleotide
  Antisense strand to SEQ ID NO: 2504464
aaucacgcagucaugguuu

SEQ ID NO: 2504466 - RNA, 19 nt, Artificial Sequence
  Description of Artificial Sequence: Synthetic oligonucleotide
  Sense strand starting at position 2101 of SEQ ID NO: 1888015
gagccagacugguucuauu

SEQ ID NO: 2504467 - RNA, 19 nt, Artificial Sequence
  Description of Artificial Sequence: Synthetic oligonucleotide
  Antisense strand to SEQ ID NO: 2504466
aauagaaccagucuggcuc

SEQ ID NO: 2504468 - RNA, 19 nt, Artificial Sequence
  Description of Artificial Sequence: Synthetic oligonucleotide
  Sense strand starting at position 2151 of SEQ ID NO: 1888015
gugcccugauccuuggaua

SEQ ID NO: 2504469 - RNA, 19 nt, Artificial Sequence
  Description of Artificial Sequence: Synthetic oligonucleotide
  Antisense strand to SEQ ID NO: 2504468
uauccaaggaucagggcac

SEQ ID NO: 2504470 - RNA, 19 nt, Artificial Sequence
  Description of Artificial Sequence: Synthetic oligonucleotide
  Sense strand starting at position 2152 of SEQ ID NO: 1888015
ugcccugauccuuggauau

SEQ ID NO: 2504471 - RNA, 19 nt, Artificial Sequence
  Description of Artificial Sequence: Synthetic oligonucleotide
  Antisense strand to SEQ ID NO: 2504470
auauccaaggaucagggca

SEQ ID NO: 2504472 - RNA, 19 nt, Artificial Sequence
  Description of Artificial Sequence: Synthetic oligonucleotide
  Sense strand starting at position 2171 of SEQ ID NO: 1888015
cugcauuuccgccaaacuu

SEQ ID NO: 2504473 - RNA, 19 nt, Artificial Sequence
  Description of Artificial Sequence: Synthetic oligonucleotide
  Antisense strand to SEQ ID NO: 2504472
aaguuuggcggaaaugcag

SEQ ID NO: 2504474 - RNA, 19 nt, Artificial Sequence
  Description of Artificial Sequence: Synthetic oligonucleotide
  Sense strand starting at position 2180 of SEQ ID NO: 1888015
cgccaaacuuucuugaacu

SEQ ID NO: 2504475 - RNA, 19 nt, Artificial Sequence
  Description of Artificial Sequence: Synthetic oligonucleotide
  Antisense strand to SEQ ID NO: 2504474
aguucaagaaaguuuggcg

SEQ ID NO: 2504476 - RNA, 19 nt, Artificial Sequence
  Description of Artificial Sequence: Synthetic oligonucleotide
  Sense strand starting at position 2219 of SEQ ID NO: 1888015
uugguugauugauuaacua

SEQ ID NO: 2504477 - RNA, 19 nt, Artificial Sequence
  Description of Artificial Sequence: Synthetic oligonucleotide
  Antisense strand to SEQ ID NO: 2504476
uaguuaaucaaucaaccaa

SEQ ID NO: 2504478 - RNA, 19 nt, Artificial Sequence
  Description of Artificial Sequence: Synthetic oligonucleotide
  Sense strand starting at position 2234 of SEQ ID NO: 1888015
acuaauugagacggaguuu

SEQ ID NO: 2504479 - RNA, 19 nt, Artificial Sequence
  Description of Artificial Sequence: Synthetic oligonucleotide
  Antisense strand to SEQ ID NO: 2504478
aaacuccgucucaauuagu

SEQ ID NO: 2504480 - RNA, 19 nt, Artificial Sequence
  Description of Artificial Sequence: Synthetic oligonucleotide
  Sense strand starting at position 2646 of SEQ ID NO: 1888015
aucuguuugccucagagca

SEQ ID NO: 2504481 - RNA, 19 nt, Artificial Sequence
  Description of Artificial Sequence: Synthetic oligonucleotide
  Antisense strand to SEQ ID NO: 2504480
ugcucugaggcaaacagau

SEQ ID NO: 2504482 - RNA, 19 nt, Artificial Sequence
  Description of Artificial Sequence: Synthetic oligonucleotide
  Sense strand starting at position 2838 of SEQ ID NO: 1888015
gagacuaucccuuggaguc

SEQ ID NO: 2504483 - RNA, 19 nt, Artificial Sequence
  Description of Artificial Sequence: Synthetic oligonucleotide
  Antisense strand to SEQ ID NO: 2504482
gacuccaagggauagucuc

SEQ ID NO: 2504484 - RNA, 19 nt, Artificial Sequence
  Description of Artificial Sequence: Synthetic oligonucleotide
  Sense strand starting at position 2839 of SEQ ID NO: 1888015
agacuaucccuuggaguca

SEQ ID NO: 2504485 - RNA, 19 nt, Artificial Sequence
  Description of Artificial Sequence: Synthetic oligonucleotide
  Antisense strand to SEQ ID NO: 2504484
ugacuccaagggauagucu

SEQ ID NO: 2504486 - RNA, 19 nt, Artificial Sequence
  Description of Artificial Sequence: Synthetic oligonucleotide
  Sense strand starting at position 2852 of SEQ ID NO: 1888015
gagucaguuuaagcuucua

SEQ ID NO: 2504487 - RNA, 19 nt, Artificial Sequence
  Description of Artificial Sequence: Synthetic oligonucleotide
  Antisense strand to SEQ ID NO: 2504486
uagaagcuuaaacugacuc

SEQ ID NO: 2504488 - RNA, 19 nt, Artificial Sequence
  Description of Artificial Sequence: Synthetic oligonucleotide
  Sense strand starting at position 2986 of SEQ ID NO: 1888015
ugacccuaugcaugccaaa

SEQ ID NO: 2504489 - RNA, 19 nt, Artificial Sequence
  Description of Artificial Sequence: Synthetic oligonucleotide
  Antisense strand to SEQ ID NO: 2504488
uuuggcaugcauaggguca

SEQ ID NO: 2504490 - RNA, 19 nt, Artificial Sequence
  Description of Artificial Sequence: Synthetic oligonucleotide
  Sense strand starting at position 3303 of SEQ ID NO: 1888015
cuacaaucucacuguguga

SEQ ID NO: 2504491 - RNA, 19 nt, Artificial Sequence
  Description of Artificial Sequence: Synthetic oligonucleotide
  Antisense strand to SEQ ID NO: 2504490
ucacacagugagauuguag

SEQ ID NO: 2504492 - RNA, 19 nt, Artificial Sequence
  Description of Artificial Sequence: Synthetic oligonucleotide
  Sense strand starting at position 3305 of SEQ ID NO: 1888015
acaaucucacugugugaau

SEQ ID NO: 2504493 - RNA, 19 nt, Artificial Sequence
  Description of Artificial Sequence: Synthetic oligonucleotide
  Antisense strand to SEQ ID NO: 2504492
auucacacagugagauugu

SEQ ID NO: 2504494 - RNA, 19 nt, Artificial Sequence
  Description of Artificial Sequence: Synthetic oligonucleotide
  Sense strand starting at position 3362 of SEQ ID NO: 1888015
cauauaaacugggagagaa

SEQ ID NO: 2504495 - RNA, 19 nt, Artificial Sequence
  Description of Artificial Sequence: Synthetic oligonucleotide
  Antisense strand to SEQ ID NO: 2504494
uucucucccaguuuauaug

SEQ ID NO: 2504496 - RNA, 19 nt, Artificial Sequence
  Description of Artificial Sequence: Synthetic oligonucleotide
  Sense strand starting at position 3463 of SEQ ID NO: 1888015
uagagauaccaguggugga

SEQ ID NO: 2504497 - RNA, 19 nt, Artificial Sequence
  Description of Artificial Sequence: Synthetic oligonucleotide
  Antisense strand to SEQ ID NO: 2504496
uccaccacugguaucucua

SEQ ID NO: 2504498 - RNA, 19 nt, Artificial Sequence
  Description of Artificial Sequence: Synthetic oligonucleotide
  Sense strand starting at position 3624 of SEQ ID NO: 1888015
aggagucaggcuugaugga

SEQ ID NO: 2504499 - RNA, 19 nt, Artificial Sequence
  Description of Artificial Sequence: Synthetic oligonucleotide
  Antisense strand to SEQ ID NO: 2504498
uccaucaagccugacuccu

SEQ ID NO: 2504500 - RNA, 19 nt, Artificial Sequence
  Description of Artificial Sequence: Synthetic oligonucleotide
  Sense strand starting at position 3656 of SEQ ID NO: 1888015
ggagcugaugcagacuuau

SEQ ID NO: 2504501 - RNA, 19 nt, Artificial Sequence
  Description of Artificial Sequence: Synthetic oligonucleotide
  Antisense strand to SEQ ID NO: 2504500
auaagucugcaucagcucc

SEQ ID NO: 2504502 - RNA, 19 nt, Artificial Sequence
  Description of Artificial Sequence: Synthetic oligonucleotide
  Sense strand starting at position 3699 of SEQ ID NO: 1888015
gcccgauugagaugugaga

SEQ ID NO: 2504503 - RNA, 19 nt, Artificial Sequence
  Description of Artificial Sequence: Synthetic oligonucleotide
  Antisense strand to SEQ ID NO: 2504502
ucucacaucucaaucgggc

SEQ ID NO: 2504504 - RNA, 19 nt, Artificial Sequence
  Description of Artificial Sequence: Synthetic oligonucleotide
  Sense strand starting at position 3701 of SEQ ID NO: 1888015
ccgauugagaugugagaac

SEQ ID NO: 2504505 - RNA, 19 nt, Artificial Sequence
  Description of Artificial Sequence: Synthetic oligonucleotide
  Antisense strand to SEQ ID NO: 2504504
guucucacaucucaaucgg

SEQ ID NO: 2504506 - RNA, 19 nt, Artificial Sequence
  Description of Artificial Sequence: Synthetic oligonucleotide
  Sense strand starting at position 3721 of SEQ ID NO: 1888015
uggauuccuuggcaauuua

SEQ ID NO: 2504507 - RNA, 19 nt, Artificial Sequence
  Description of Artificial Sequence: Synthetic oligonucleotide
  Antisense strand to SEQ ID NO: 2504506
uaaauugccaaggaaucca

SEQ ID NO: 2504508 - RNA, 19 nt, Artificial Sequence
  Description of Artificial Sequence: Synthetic oligonucleotide
  Sense strand starting at position 3744 of SEQ ID NO: 1888015
gaggaagacugaugacaaa

SEQ ID NO: 2504509 - RNA, 19 nt, Artificial Sequence
  Description of Artificial Sequence: Synthetic oligonucleotide
  Antisense strand to SEQ ID NO: 2504508
uuugucaucagucuuccuc

SEQ ID NO: 2504510 - RNA, 19 nt, Artificial Sequence
  Description of Artificial Sequence: Synthetic oligonucleotide
  Sense strand starting at position 3747 of SEQ ID NO: 1888015
gaagacugaugacaaagaa

SEQ ID NO: 2504511 - RNA, 19 nt, Artificial Sequence
  Description of Artificial Sequence: Synthetic oligonucleotide
  Antisense strand to SEQ ID NO: 2504510
uucuuugucaucagucuuc

SEQ ID NO: 2504512 - RNA, 19 nt, Artificial Sequence
  Description of Artificial Sequence: Synthetic oligonucleotide
  Sense strand starting at position 3789 of SEQ ID NO: 1888015
ggaucauugacaugcuugu

SEQ ID NO: 2504513 - RNA, 19 nt, Artificial Sequence
  Description of Artificial Sequence: Synthetic oligonucleotide
  Antisense strand to SEQ ID NO: 2504512
acaagcaugucaaugaucc

SEQ ID NO: 2504514 - RNA, 19 nt, Artificial Sequence
  Description of Artificial Sequence: Synthetic oligonucleotide
  Sense strand starting at position 3796 of SEQ ID NO: 1888015
ugacaugcuugucccacua

SEQ ID NO: 2504515 - RNA, 19 nt, Artificial Sequence
  Description of Artificial Sequence: Synthetic oligonucleotide
  Antisense strand to SEQ ID NO: 2504514
uagugggacaagcauguca

SEQ ID NO: 2504516 - RNA, 19 nt, Artificial Sequence
  Description of Artificial Sequence: Synthetic oligonucleotide
  Sense strand starting at position 3835 of SEQ ID NO: 1888015
gcagcaacuucugcaacau

SEQ ID NO: 2504517 - RNA, 19 nt, Artificial Sequence
  Description of Artificial Sequence: Synthetic oligonucleotide
  Antisense strand to SEQ ID NO: 2504516
auguugcagaaguugcugc

SEQ ID NO: 2504518 - RNA, 19 nt, Artificial Sequence
  Description of Artificial Sequence: Synthetic oligonucleotide
  Sense strand starting at position 3872 of SEQ ID NO: 1888015
ggacucucauugucaggua

SEQ ID NO: 2504519 - RNA, 19 nt, Artificial Sequence
  Description of Artificial Sequence: Synthetic oligonucleotide
  Antisense strand to SEQ ID NO: 2504518
uaccugacaaugagagucc

SEQ ID NO: 2504520 - RNA, 19 nt, Artificial Sequence
  Description of Artificial Sequence: Synthetic oligonucleotide
  Sense strand starting at position 3903 of SEQ ID NO: 1888015
agaacaaucagagguugca

SEQ ID NO: 2504521 - RNA, 19 nt, Artificial Sequence
  Description of Artificial Sequence: Synthetic oligonucleotide
  Antisense strand to SEQ ID NO: 2504520
ugcaaccucugauuguucu

SEQ ID NO: 2504522 - RNA, 19 nt, Artificial Sequence
  Description of Artificial Sequence: Synthetic oligonucleotide
  Sense strand starting at position 41 of SEQ ID NO: 1888016
acccuugugccauaucuga

SEQ ID NO: 2504523 - RNA, 19 nt, Artificial Sequence
  Description of Artificial Sequence: Synthetic oligonucleotide
  Antisense strand to SEQ ID NO: 2504522
ucagauauggcacaagggu

SEQ ID NO: 2504524 - RNA, 19 nt, Artificial Sequence
  Description of Artificial Sequence: Synthetic oligonucleotide
  Sense strand starting at position 56 of SEQ ID NO: 1888016
cugaaauccugacugugag

SEQ ID NO: 2504525 - RNA, 19 nt, Artificial Sequence
  Description of Artificial Sequence: Synthetic oligonucleotide
  Antisense strand to SEQ ID NO: 2504524
cucacagucaggauuucag

SEQ ID NO: 2504526 - RNA, 19 nt, Artificial Sequence
  Description of Artificial Sequence: Synthetic oligonucleotide
  Sense strand starting at position 59 of SEQ ID NO: 1888016
aaauccugacugugagcau

SEQ ID NO: 2504527 - RNA, 19 nt, Artificial Sequence
  Description of Artificial Sequence: Synthetic oligonucleotide
  Antisense strand to SEQ ID NO: 2504526
augcucacagucaggauuu

SEQ ID NO: 2504528 - RNA, 19 nt, Artificial Sequence
  Description of Artificial Sequence: Synthetic oligonucleotide
  Sense strand starting at position 96 of SEQ ID NO: 1888016
augauuguuugagccacua

SEQ ID NO: 2504529 - RNA, 19 nt, Artificial Sequence
  Description of Artificial Sequence: Synthetic oligonucleotide
  Antisense strand to SEQ ID NO: 2504528
uaguggcucaaacaaucau

SEQ ID NO: 2504530 - RNA, 19 nt, Artificial Sequence
  Description of Artificial Sequence: Synthetic oligonucleotide
  Sense strand starting at position 120 of SEQ ID NO: 1888016
ugguguaauuucugacaua

SEQ ID NO: 2504531 - RNA, 19 nt, Artificial Sequence
  Description of Artificial Sequence: Synthetic oligonucleotide
  Antisense strand to SEQ ID NO: 2504530
uaugucagaaauuacacca

SEQ ID NO: 2504532 - RNA, 19 nt, Artificial Sequence
  Description of Artificial Sequence: Synthetic oligonucleotide
  Sense strand starting at position 121 of SEQ ID NO: 1888016
gguguaauuucugacauag

SEQ ID NO: 2504533 - RNA, 19 nt, Artificial Sequence
  Description of Artificial Sequence: Synthetic oligonucleotide
  Antisense strand to SEQ ID NO: 2504532
cuaugucagaaauuacacc

SEQ ID NO: 2504534 - RNA, 19 nt, Artificial Sequence
  Description of Artificial Sequence: Synthetic oligonucleotide
  Sense strand starting at position 123 of SEQ ID NO: 1888016
uguaauuucugacauagua

SEQ ID NO: 2504535 - RNA, 19 nt, Artificial Sequence
  Description of Artificial Sequence: Synthetic oligonucleotide
  Antisense strand to SEQ ID NO: 2504534
uacuaugucagaaauuaca

SEQ ID NO: 2504536 - RNA, 19 nt, Artificial Sequence
  Description of Artificial Sequence: Synthetic oligonucleotide
  Sense strand starting at position 138 of SEQ ID NO: 1888016
aguaauagugccuaugaca

SEQ ID NO: 2504537 - RNA, 19 nt, Artificial Sequence
  Description of Artificial Sequence: Synthetic oligonucleotide
  Antisense strand to SEQ ID NO: 2504536
ugucauaggcacuauuacu

SEQ ID NO: 2504538 - RNA, 19 nt, Artificial Sequence
  Description of Artificial Sequence: Synthetic oligonucleotide
  Sense strand starting at position 177 of SEQ ID NO: 1888016
aacaauagcgaguaguaaa

SEQ ID NO: 2504539 - RNA, 19 nt, Artificial Sequence
  Description of Artificial Sequence: Synthetic oligonucleotide
  Antisense strand to SEQ ID NO: 2504538
uuuacuacucgcuauuguu

SEQ ID NO: 2504540 - RNA, 19 nt, Artificial Sequence
  Description of Artificial Sequence: Synthetic oligonucleotide
  Sense strand starting at position 191 of SEQ ID NO: 1888016
guaaaucaucacugggaac

SEQ ID NO: 2504541 - RNA, 19 nt, Artificial Sequence
  Description of Artificial Sequence: Synthetic oligonucleotide
  Antisense strand to SEQ ID NO: 2504540
guucccagugaugauuuac

SEQ ID NO: 2504542 - RNA, 19 nt, Artificial Sequence
  Description of Artificial Sequence: Synthetic oligonucleotide
  Sense strand starting at position 205 of SEQ ID NO: 1888016
ggaacuguuacuuggaaau

SEQ ID NO: 2504543 - RNA, 19 nt, Artificial Sequence
  Description of Artificial Sequence: Synthetic oligonucleotide
  Antisense strand to SEQ ID NO: 2504542
auuuccaaguaacaguucc

SEQ ID NO: 2504544 - RNA, 19 nt, Artificial Sequence
  Description of Artificial Sequence: Synthetic oligonucleotide
  Sense strand starting at position 216 of SEQ ID NO: 1888016
uuggaaaugucuuggaaag

SEQ ID NO: 2504545 - RNA, 19 nt, Artificial Sequence
  Description of Artificial Sequence: Synthetic oligonucleotide
  Antisense strand to SEQ ID NO: 2504544
cuuuccaagacauuuccaa

SEQ ID NO: 2504546 - RNA, 19 nt, Artificial Sequence
  Description of Artificial Sequence: Synthetic oligonucleotide
  Sense strand starting at position 255 of SEQ ID NO: 1888016
auuuguagaugcugucaga

SEQ ID NO: 2504547 - RNA, 19 nt, Artificial Sequence
  Description of Artificial Sequence: Synthetic oligonucleotide
  Antisense strand to SEQ ID NO: 2504546
ucugacagcaucuacaaau

SEQ ID NO: 2504548 - RNA, 19 nt, Artificial Sequence
  Description of Artificial Sequence: Synthetic oligonucleotide
  Sense strand starting at position 425 of SEQ ID NO: 1888016
gauggaacuguggguaaua

SEQ ID NO: 2504549 - RNA, 19 nt, Artificial Sequence
  Description of Artificial Sequence: Synthetic oligonucleotide
  Antisense strand to SEQ ID NO: 2504548
uauuacccacaguuccauc

SEQ ID NO: 2504550 - RNA, 19 nt, Artificial Sequence
  Description of Artificial Sequence: Synthetic oligonucleotide
  Sense strand starting at position 426 of SEQ ID NO: 1888016
auggaacuguggguaauaa

SEQ ID NO: 2504551 - RNA, 19 nt, Artificial Sequence
  Description of Artificial Sequence: Synthetic oligonucleotide
  Antisense strand to SEQ ID NO: 2504550
uuauuacccacaguuccau

SEQ ID NO: 2504552 - RNA, 19 nt, Artificial Sequence
  Description of Artificial Sequence: Synthetic oligonucleotide
  Sense strand starting at position 438 of SEQ ID NO: 1888016
guaauaaacucagaaggag

SEQ ID NO: 2504553 - RNA, 19 nt, Artificial Sequence
  Description of Artificial Sequence: Synthetic oligonucleotide
  Antisense strand to SEQ ID NO: 2504552
cuccuucugaguuuauuac

SEQ ID NO: 2504554 - RNA, 19 nt, Artificial Sequence
  Description of Artificial Sequence: Synthetic oligonucleotide
  Sense strand starting at position 464 of SEQ ID NO: 1888016
caucaagguugcucaugaa

SEQ ID NO: 2504555 - RNA, 19 nt, Artificial Sequence
  Description of Artificial Sequence: Synthetic oligonucleotide
  Antisense strand to SEQ ID NO: 2504554
uucaugagcaaccuugaug

SEQ ID NO: 2504556 - RNA, 19 nt, Artificial Sequence
  Description of Artificial Sequence: Synthetic oligonucleotide
  Sense strand starting at position 567 of SEQ ID NO: 1888016
caggcuuaguuuccagaca

SEQ ID NO: 2504557 - RNA, 19 nt, Artificial Sequence
  Description of Artificial Sequence: Synthetic oligonucleotide
  Antisense strand to SEQ ID NO: 2504556
ugucuggaaacuaagccug

SEQ ID NO: 2504558 - RNA, 19 nt, Artificial Sequence
  Description of Artificial Sequence: Synthetic oligonucleotide
  Sense strand starting at position 607 of SEQ ID NO: 1888016
ugaguaauggauugagagu

SEQ ID NO: 2504559 - RNA, 19 nt, Artificial Sequence
  Description of Artificial Sequence: Synthetic oligonucleotide
  Antisense strand to SEQ ID NO: 2504558
acucucaauccauuacuca

SEQ ID NO: 2504560 - RNA, 19 nt, Artificial Sequence
  Description of Artificial Sequence: Synthetic oligonucleotide
  Sense strand starting at position 614 of SEQ ID NO: 1888016
uggauugagagucaguauu

SEQ ID NO: 2504561 - RNA, 19 nt, Artificial Sequence
  Description of Artificial Sequence: Synthetic oligonucleotide
  Antisense strand to SEQ ID NO: 2504560
aauacugacucucaaucca

SEQ ID NO: 2504562 - RNA, 19 nt, Artificial Sequence
  Description of Artificial Sequence: Synthetic oligonucleotide
  Sense strand starting at position 616 of SEQ ID NO: 1888016
gauugagagucaguauuaa

SEQ ID NO: 2504563 - RNA, 19 nt, Artificial Sequence
  Description of Artificial Sequence: Synthetic oligonucleotide
  Antisense strand to SEQ ID NO: 2504562
uuaauacugacucucaauc

SEQ ID NO: 2504564 - RNA, 19 nt, Artificial Sequence
  Description of Artificial Sequence: Synthetic oligonucleotide
  Sense strand starting at position 620 of SEQ ID NO: 1888016
gagagucaguauuaagaua

SEQ ID NO: 2504565 - RNA, 19 nt, Artificial Sequence
  Description of Artificial Sequence: Synthetic oligonucleotide
  Antisense strand to SEQ ID NO: 2504564
uaucuuaauacugacucuc

SEQ ID NO: 2504566 - RNA, 19 nt, Artificial Sequence
  Description of Artificial Sequence: Synthetic oligonucleotide
  Sense strand starting at position 628 of SEQ ID NO: 1888016
guauuaagauacggagaaa

SEQ ID NO: 2504567 - RNA, 19 nt, Artificial Sequence
  Description of Artificial Sequence: Synthetic oligonucleotide
  Antisense strand to SEQ ID NO: 2504566
uuucuccguaucuuaauac

SEQ ID NO: 2504568 - RNA, 19 nt, Artificial Sequence
  Description of Artificial Sequence: Synthetic oligonucleotide
  Sense strand starting at position 665 of SEQ ID NO: 1888016
guggcuaacgcuggacauu

SEQ ID NO: 2504569 - RNA, 19 nt, Artificial Sequence
  Description of Artificial Sequence: Synthetic oligonucleotide
  Antisense strand to SEQ ID NO: 2504568
aauguccagcguuagccac

SEQ ID NO: 2504570 - RNA, 19 nt, Artificial Sequence
  Description of Artificial Sequence: Synthetic oligonucleotide
  Sense strand starting at position 748 of SEQ ID NO: 1888016
cgugcugagaauuaagaac

SEQ ID NO: 2504571 - RNA, 19 nt, Artificial Sequence
  Description of Artificial Sequence: Synthetic oligonucleotide
  Antisense strand to SEQ ID NO: 2504570
guucuuaauucucagcacg

SEQ ID NO: 2504572 - RNA, 19 nt, Artificial Sequence
  Description of Artificial Sequence: Synthetic oligonucleotide
  Sense strand starting at position 1418 of SEQ ID NO: 1888016
uuuauaaagccugagaagu

SEQ ID NO: 2504573 - RNA, 19 nt, Artificial Sequence
  Description of Artificial Sequence: Synthetic oligonucleotide
  Antisense strand to SEQ ID NO: 2504572
acuucucaggcuuuauaaa

SEQ ID NO: 2504574 - RNA, 19 nt, Artificial Sequence
  Description of Artificial Sequence: Synthetic oligonucleotide
  Sense strand starting at position 1659 of SEQ ID NO: 1888016
cgaggcguucugcaacaga

SEQ ID NO: 2504575 - RNA, 19 nt, Artificial Sequence
  Description of Artificial Sequence: Synthetic oligonucleotide
  Antisense strand to SEQ ID NO: 2504574
ucuguugcagaacgccucg

SEQ ID NO: 2504576 - RNA, 19 nt, Artificial Sequence
  Description of Artificial Sequence: Synthetic oligonucleotide
  Sense strand starting at position 1662 of SEQ ID NO: 1888016
ggcguucugcaacagaaca

SEQ ID NO: 2504577 - RNA, 19 nt, Artificial Sequence
  Description of Artificial Sequence: Synthetic oligonucleotide
  Antisense strand to SEQ ID NO: 2504576
uguucuguugcagaacgcc

SEQ ID NO: 2504578 - RNA, 19 nt, Artificial Sequence
  Description of Artificial Sequence: Synthetic oligonucleotide
  Sense strand starting at position 1735 of SEQ ID NO: 1888016
uuuaccuuuaaucgcgaga

SEQ ID NO: 2504579 - RNA, 19 nt, Artificial Sequence
  Description of Artificial Sequence: Synthetic oligonucleotide
  Antisense strand to SEQ ID NO: 2504578
ucucgcgauuaaagguaaa

SEQ ID NO: 2504580 - RNA, 19 nt, Artificial Sequence
  Description of Artificial Sequence: Synthetic oligonucleotide
  Sense strand starting at position 2073 of SEQ ID NO: 1888016
ugggaaacgugaucagaug

SEQ ID NO: 2504581 - RNA, 19 nt, Artificial Sequence
  Description of Artificial Sequence: Synthetic oligonucleotide
  Antisense strand to SEQ ID NO: 2504580
caucugaucacguuuccca

SEQ ID NO: 2504582 - RNA, 19 nt, Artificial Sequence
  Description of Artificial Sequence: Synthetic oligonucleotide
  Sense strand starting at position 2074 of SEQ ID NO: 1888016
gggaaacgugaucagaugu

SEQ ID NO: 2504583 - RNA, 19 nt, Artificial Sequence
  Description of Artificial Sequence: Synthetic oligonucleotide
  Antisense strand to SEQ ID NO: 2504582
acaucugaucacguuuccc

SEQ ID NO: 2504584 - RNA, 19 nt, Artificial Sequence
  Description of Artificial Sequence: Synthetic oligonucleotide
  Sense strand starting at position 2087 of SEQ ID NO: 1888016
agauguuacuaggcgaaca

SEQ ID NO: 2504585 - RNA, 19 nt, Artificial Sequence
  Description of Artificial Sequence: Synthetic oligonucleotide
  Antisense strand to SEQ ID NO: 2504584
uguucgccuaguaacaucu

SEQ ID NO: 2504586 - RNA, 19 nt, Artificial Sequence
  Description of Artificial Sequence: Synthetic oligonucleotide
  Sense strand starting at position 2184 of SEQ ID NO: 1888016
gcagguuugcuccagauua

SEQ ID NO: 2504587 - RNA, 19 nt, Artificial Sequence
  Description of Artificial Sequence: Synthetic oligonucleotide
  Antisense strand to SEQ ID NO: 2504586
uaaucuggagcaaaccugc

SEQ ID NO: 2504588 - RNA, 19 nt, Artificial Sequence
  Description of Artificial Sequence: Synthetic oligonucleotide
  Sense strand starting at position 2192 of SEQ ID NO: 1888016
gcuccagauuagccaauaa

SEQ ID NO: 2504589 - RNA, 19 nt, Artificial Sequence
  Description of Artificial Sequence: Synthetic oligonucleotide
  Antisense strand to SEQ ID NO: 2504588
uuauuggcuaaucuggagc

SEQ ID NO: 2504590 - RNA, 19 nt, Artificial Sequence
  Description of Artificial Sequence: Synthetic oligonucleotide
  Sense strand starting at position 2637 of SEQ ID NO: 1888016
cugcacuuucuuggagauu

SEQ ID NO: 2504591 - RNA, 19 nt, Artificial Sequence
  Description of Artificial Sequence: Synthetic oligonucleotide
  Antisense strand to SEQ ID NO: 2504590
aaucuccaagaaagugcag

SEQ ID NO: 2504592 - RNA, 19 nt, Artificial Sequence
  Description of Artificial Sequence: Synthetic oligonucleotide
  Sense strand starting at position 2734 of SEQ ID NO: 1888016
ccagucuugugaucaacaa

SEQ ID NO: 2504593 - RNA, 19 nt, Artificial Sequence
  Description of Artificial Sequence: Synthetic oligonucleotide
  Antisense strand to SEQ ID NO: 2504592
uuguugaucacaagacugg

SEQ ID NO: 2504594 - RNA, 19 nt, Artificial Sequence
  Description of Artificial Sequence: Synthetic oligonucleotide
  Sense strand starting at position 2926 of SEQ ID NO: 1888016
cgaaacuccgucugaacau

SEQ ID NO: 2504595 - RNA, 19 nt, Artificial Sequence
  Description of Artificial Sequence: Synthetic oligonucleotide
  Antisense strand to SEQ ID NO: 2504594
auguucagacggaguuucg

SEQ ID NO: 2504596 - RNA, 19 nt, Artificial Sequence
  Description of Artificial Sequence: Synthetic oligonucleotide
  Sense strand starting at position 2927 of SEQ ID NO: 1888016
gaaacuccgucugaacaua

SEQ ID NO: 2504597 - RNA, 19 nt, Artificial Sequence
  Description of Artificial Sequence: Synthetic oligonucleotide
  Antisense strand to SEQ ID NO: 2504596
uauguucagacggaguuuc

SEQ ID NO: 2504598 - RNA, 19 nt, Artificial Sequence
  Description of Artificial Sequence: Synthetic oligonucleotide
  Sense strand starting at position 3168 of SEQ ID NO: 1888016
ucgcgugaaccggagaguu

SEQ ID NO: 2504599 - RNA, 19 nt, Artificial Sequence
  Description of Artificial Sequence: Synthetic oligonucleotide
  Antisense strand to SEQ ID NO: 2504598
aacucuccgguucacgcga

SEQ ID NO: 2504600 - RNA, 19 nt, Artificial Sequence
  Description of Artificial Sequence: Synthetic oligonucleotide
  Sense strand starting at position 3948 of SEQ ID NO: 1888016
aggaaacauuaaugcauga

SEQ ID NO: 2504601 - RNA, 19 nt, Artificial Sequence
  Description of Artificial Sequence: Synthetic oligonucleotide
  Antisense strand to SEQ ID NO: 2504600
ucaugcauuaauguuuccu

SEQ ID NO: 2504602 - RNA, 19 nt, Artificial Sequence
  Description of Artificial Sequence: Synthetic oligonucleotide
  Sense strand starting at position 3 of SEQ ID NO: 1888017
uugagucuuccgugcugag

SEQ ID NO: 2504603 - RNA, 19 nt, Artificial Sequence
  Description of Artificial Sequence: Synthetic oligonucleotide
  Antisense strand to SEQ ID NO: 2504602
cucagcacggaagacucaa

SEQ ID NO: 2504604 - RNA, 19 nt, Artificial Sequence
  Description of Artificial Sequence: Synthetic oligonucleotide
  Sense strand starting at position 54 of SEQ ID NO: 1888017
acccuugugccauaucuga

SEQ ID NO: 2504605 - RNA, 19 nt, Artificial Sequence
  Description of Artificial Sequence: Synthetic oligonucleotide
  Antisense strand to SEQ ID NO: 2504604
ucagauauggcacaagggu

SEQ ID NO: 2504606 - RNA, 19 nt, Artificial Sequence
  Description of Artificial Sequence: Synthetic oligonucleotide
  Sense strand starting at position 69 of SEQ ID NO: 1888017
cugaaauccugacugugag

SEQ ID NO: 2504607 - RNA, 19 nt, Artificial Sequence
  Description of Artificial Sequence: Synthetic oligonucleotide
  Antisense strand to SEQ ID NO: 2504606
cucacagucaggauuucag

SEQ ID NO: 2504608 - RNA, 19 nt, Artificial Sequence
  Description of Artificial Sequence: Synthetic oligonucleotide
  Sense strand starting at position 72 of SEQ ID NO: 1888017
aaauccugacugugagcau

SEQ ID NO: 2504609 - RNA, 19 nt, Artificial Sequence
  Description of Artificial Sequence: Synthetic oligonucleotide
  Antisense strand to SEQ ID NO: 2504608
augcucacagucaggauuu

SEQ ID NO: 2504610 - RNA, 19 nt, Artificial Sequence
  Description of Artificial Sequence: Synthetic oligonucleotide
  Sense strand starting at position 109 of SEQ ID NO: 1888017
augauuguuugagccacua

SEQ ID NO: 2504611 - RNA, 19 nt, Artificial Sequence
  Description of Artificial Sequence: Synthetic oligonucleotide
  Antisense strand to SEQ ID NO: 2504610
uaguggcucaaacaaucau

SEQ ID NO: 2504612 - RNA, 19 nt, Artificial Sequence
  Description of Artificial Sequence: Synthetic oligonucleotide
  Sense strand starting at position 133 of SEQ ID NO: 1888017
ugguguaauuucugacaua

SEQ ID NO: 2504613 - RNA, 19 nt, Artificial Sequence
  Description of Artificial Sequence: Synthetic oligonucleotide
  Antisense strand to SEQ ID NO: 2504612
uaugucagaaauuacacca

SEQ ID NO: 2504614 - RNA, 19 nt, Artificial Sequence
  Description of Artificial Sequence: Synthetic oligonucleotide
  Sense strand starting at position 134 of SEQ ID NO: 1888017
gguguaauuucugacauag

SEQ ID NO: 2504615 - RNA, 19 nt, Artificial Sequence
  Description of Artificial Sequence: Synthetic oligonucleotide
  Antisense strand to SEQ ID NO: 2504614
cuaugucagaaauuacacc

SEQ ID NO: 2504616 - RNA, 19 nt, Artificial Sequence
  Description of Artificial Sequence: Synthetic oligonucleotide
  Sense strand starting at position 136 of SEQ ID NO: 1888017
uguaauuucugacauagua

SEQ ID NO: 2504617 - RNA, 19 nt, Artificial Sequence
  Description of Artificial Sequence: Synthetic oligonucleotide
  Antisense strand to SEQ ID NO: 2504616
uacuaugucagaaauuaca

SEQ ID NO: 2504618 - RNA, 19 nt, Artificial Sequence
  Description of Artificial Sequence: Synthetic oligonucleotide
  Sense strand starting at position 151 of SEQ ID NO: 1888017
aguaauagugccuaugaca

SEQ ID NO: 2504619 - RNA, 19 nt, Artificial Sequence
  Description of Artificial Sequence: Synthetic oligonucleotide
  Antisense strand to SEQ ID NO: 2504618
ugucauaggcacuauuacu

SEQ ID NO: 2504620 - RNA, 19 nt, Artificial Sequence
  Description of Artificial Sequence: Synthetic oligonucleotide
  Sense strand starting at position 190 of SEQ ID NO: 1888017
aacaauagcgaguaguaaa

SEQ ID NO: 2504621 - RNA, 19 nt, Artificial Sequence
  Description of Artificial Sequence: Synthetic oligonucleotide
  Antisense strand to SEQ ID NO: 2504620
uuuacuacucgcuauuguu

SEQ ID NO: 2504622 - RNA, 19 nt, Artificial Sequence
  Description of Artificial Sequence: Synthetic oligonucleotide
  Sense strand starting at position 204 of SEQ ID NO: 1888017
guaaaucaucacugggaac

SEQ ID NO: 2504623 - RNA, 19 nt, Artificial Sequence
  Description of Artificial Sequence: Synthetic oligonucleotide
  Antisense strand to SEQ ID NO: 2504622
guucccagugaugauuuac

SEQ ID NO: 2504624 - RNA, 19 nt, Artificial Sequence
  Description of Artificial Sequence: Synthetic oligonucleotide
  Sense strand starting at position 218 of SEQ ID NO: 1888017
ggaacuguuacuuggaaau

SEQ ID NO: 2504625 - RNA, 19 nt, Artificial Sequence
  Description of Artificial Sequence: Synthetic oligonucleotide
  Antisense strand to SEQ ID NO: 2504624
auuuccaaguaacaguucc

SEQ ID NO: 2504626 - RNA, 19 nt, Artificial Sequence
  Description of Artificial Sequence: Synthetic oligonucleotide
  Sense strand starting at position 229 of SEQ ID NO: 1888017
uuggaaaugucuuggaaag

SEQ ID NO: 2504627 - RNA, 19 nt, Artificial Sequence
  Description of Artificial Sequence: Synthetic oligonucleotide
  Antisense strand to SEQ ID NO: 2504626
cuuuccaagacauuuccaa

SEQ ID NO: 2504628 - RNA, 19 nt, Artificial Sequence
  Description of Artificial Sequence: Synthetic oligonucleotide
  Sense strand starting at position 268 of SEQ ID NO: 1888017
auuuguagaugcugucaga

SEQ ID NO: 2504629 - RNA, 19 nt, Artificial Sequence
  Description of Artificial Sequence: Synthetic oligonucleotide
  Antisense strand to SEQ ID NO: 2504628
ucugacagcaucuacaaau

SEQ ID NO: 2504630 - RNA, 19 nt, Artificial Sequence
  Description of Artificial Sequence: Synthetic oligonucleotide
  Sense strand starting at position 438 of SEQ ID NO: 1888017
gauggaacuguggguaaua

SEQ ID NO: 2504631 - RNA, 19 nt, Artificial Sequence
  Description of Artificial Sequence: Synthetic oligonucleotide
  Antisense strand to SEQ ID NO: 2504630
uauuacccacaguuccauc

SEQ ID NO: 2504632 - RNA, 19 nt, Artificial Sequence
  Description of Artificial Sequence: Synthetic oligonucleotide
  Sense strand starting at position 439 of SEQ ID NO: 1888017
auggaacuguggguaauaa

SEQ ID NO: 2504633 - RNA, 19 nt, Artificial Sequence
  Description of Artificial Sequence: Synthetic oligonucleotide
  Antisense strand to SEQ ID NO: 2504632
uuauuacccacaguuccau

SEQ ID NO: 2504634 - RNA, 19 nt, Artificial Sequence
  Description of Artificial Sequence: Synthetic oligonucleotide
  Sense strand starting at position 451 of SEQ ID NO: 1888017
guaauaaacucagaaggag

SEQ ID NO: 2504635 - RNA, 19 nt, Artificial Sequence
  Description of Artificial Sequence: Synthetic oligonucleotide
  Antisense strand to SEQ ID NO: 2504634
cuccuucugaguuuauuac

SEQ ID NO: 2504636 - RNA, 19 nt, Artificial Sequence
  Description of Artificial Sequence: Synthetic oligonucleotide
  Sense strand starting at position 477 of SEQ ID NO: 1888017
caucaagguugcucaugaa

SEQ ID NO: 2504637 - RNA, 19 nt, Artificial Sequence
  Description of Artificial Sequence: Synthetic oligonucleotide
  Antisense strand to SEQ ID NO: 2504636
uucaugagcaaccuugaug

SEQ ID NO: 2504638 - RNA, 19 nt, Artificial Sequence
  Description of Artificial Sequence: Synthetic oligonucleotide
  Sense strand starting at position 580 of SEQ ID NO: 1888017
caggcuuaguuuccagaca

SEQ ID NO: 2504639 - RNA, 19 nt, Artificial Sequence
  Description of Artificial Sequence: Synthetic oligonucleotide
  Antisense strand to SEQ ID NO: 2504638
ugucuggaaacuaagccug

SEQ ID NO: 2504640 - RNA, 19 nt, Artificial Sequence
  Description of Artificial Sequence: Synthetic oligonucleotide
  Sense strand starting at position 620 of SEQ ID NO: 1888017
ugaguaauggauugagagu

SEQ ID NO: 2504641 - RNA, 19 nt, Artificial Sequence
  Description of Artificial Sequence: Synthetic oligonucleotide
  Antisense strand to SEQ ID NO: 2504640
acucucaauccauuacuca

SEQ ID NO: 2504642 - RNA, 19 nt, Artificial Sequence
  Description of Artificial Sequence: Synthetic oligonucleotide
  Sense strand starting at position 627 of SEQ ID NO: 1888017
uggauugagagucaguauu

SEQ ID NO: 2504643 - RNA, 19 nt, Artificial Sequence
  Description of Artificial Sequence: Synthetic oligonucleotide
  Antisense strand to SEQ ID NO: 2504642
aauacugacucucaaucca

SEQ ID NO: 2504644 - RNA, 19 nt, Artificial Sequence
  Description of Artificial Sequence: Synthetic oligonucleotide
  Sense strand starting at position 629 of SEQ ID NO: 1888017
gauugagagucaguauuaa

SEQ ID NO: 2504645 - RNA, 19 nt, Artificial Sequence
  Description of Artificial Sequence: Synthetic oligonucleotide
  Antisense strand to SEQ ID NO: 2504644
uuaauacugacucucaauc

SEQ ID NO: 2504646 - RNA, 19 nt, Artificial Sequence
  Description of Artificial Sequence: Synthetic oligonucleotide
  Sense strand starting at position 633 of SEQ ID NO: 1888017
gagagucaguauuaagaua

SEQ ID NO: 2504647 - RNA, 19 nt, Artificial Sequence
  Description of Artificial Sequence: Synthetic oligonucleotide
  Antisense strand to SEQ ID NO: 2504646
uaucuuaauacugacucuc

SEQ ID NO: 2504648 - RNA, 19 nt, Artificial Sequence
  Description of Artificial Sequence: Synthetic oligonucleotide
  Sense strand starting at position 641 of SEQ ID NO: 1888017
guauuaagauacggagaaa

SEQ ID NO: 2504649 - RNA, 19 nt, Artificial Sequence
  Description of Artificial Sequence: Synthetic oligonucleotide
  Antisense strand to SEQ ID NO: 2504648
uuucuccguaucuuaauac

SEQ ID NO: 2504650 - RNA, 19 nt, Artificial Sequence
  Description of Artificial Sequence: Synthetic oligonucleotide
  Sense strand starting at position 678 of SEQ ID NO: 1888017
guggcuaacgcuggacauu

SEQ ID NO: 2504651 - RNA, 19 nt, Artificial Sequence
  Description of Artificial Sequence: Synthetic oligonucleotide
  Antisense strand to SEQ ID NO: 2504650
aauguccagcguuagccac

SEQ ID NO: 2504652 - RNA, 19 nt, Artificial Sequence
  Description of Artificial Sequence: Synthetic oligonucleotide
  Sense strand starting at position 761 of SEQ ID NO: 1888017
cgugcugagaauuaagaac

SEQ ID NO: 2504653 - RNA, 19 nt, Artificial Sequence
  Description of Artificial Sequence: Synthetic oligonucleotide
  Antisense strand to SEQ ID NO: 2504652
guucuuaauucucagcacg

SEQ ID NO: 2504654 - RNA, 19 nt, Artificial Sequence
  Description of Artificial Sequence: Synthetic oligonucleotide
  Sense strand starting at position 1431 of SEQ ID NO: 1888017
uuuauaaagccugagaagu

SEQ ID NO: 2504655 - RNA, 19 nt, Artificial Sequence
  Description of Artificial Sequence: Synthetic oligonucleotide
  Antisense strand to SEQ ID NO: 2504654
acuucucaggcuuuauaaa

SEQ ID NO: 2504656 - RNA, 19 nt, Artificial Sequence
  Description of Artificial Sequence: Synthetic oligonucleotide
  Sense strand starting at position 1672 of SEQ ID NO: 1888017
cgaggcguucugcaacaga

SEQ ID NO: 2504657 - RNA, 19 nt, Artificial Sequence
  Description of Artificial Sequence: Synthetic oligonucleotide
  Antisense strand to SEQ ID NO: 2504656
ucuguugcagaacgccucg

SEQ ID NO: 2504658 - RNA, 19 nt, Artificial Sequence
  Description of Artificial Sequence: Synthetic oligonucleotide
  Sense strand starting at position 1675 of SEQ ID NO: 1888017
ggcguucugcaacagaaca

SEQ ID NO: 2504659 - RNA, 19 nt, Artificial Sequence
  Description of Artificial Sequence: Synthetic oligonucleotide
  Antisense strand to SEQ ID NO: 2504658
uguucuguugcagaacgcc

SEQ ID NO: 2504660 - RNA, 19 nt, Artificial Sequence
  Description of Artificial Sequence: Synthetic oligonucleotide
  Sense strand starting at position 1748 of SEQ ID NO: 1888017
uuuaccuuuaaucgcgaga

SEQ ID NO: 2504661 - RNA, 19 nt, Artificial Sequence
  Description of Artificial Sequence: Synthetic oligonucleotide
  Antisense strand to SEQ ID NO: 2504660
ucucgcgauuaaagguaaa

SEQ ID NO: 2504662 - RNA, 19 nt, Artificial Sequence
  Description of Artificial Sequence: Synthetic oligonucleotide
  Sense strand starting at position 2086 of SEQ ID NO: 1888017
ugggaaacgugaucagaug

SEQ ID NO: 2504663 - RNA, 19 nt, Artificial Sequence
  Description of Artificial Sequence: Synthetic oligonucleotide
  Antisense strand to SEQ ID NO: 2504662
caucugaucacguuuccca

SEQ ID NO: 2504664 - RNA, 19 nt, Artificial Sequence
  Description of Artificial Sequence: Synthetic oligonucleotide
  Sense strand starting at position 2087 of SEQ ID NO: 1888017
gggaaacgugaucagaugu

SEQ ID NO: 2504665 - RNA, 19 nt, Artificial Sequence
  Description of Artificial Sequence: Synthetic oligonucleotide
  Antisense strand to SEQ ID NO: 2504664
acaucugaucacguuuccc

SEQ ID NO: 2504666 - RNA, 19 nt, Artificial Sequence
  Description of Artificial Sequence: Synthetic oligonucleotide
  Sense strand starting at position 2100 of SEQ ID NO: 1888017
agauguuacuaggcgaaca

SEQ ID NO: 2504667 - RNA, 19 nt, Artificial Sequence
  Description of Artificial Sequence: Synthetic oligonucleotide
  Antisense strand to SEQ ID NO: 2504666
uguucgccuaguaacaucu

SEQ ID NO: 2504668 - RNA, 19 nt, Artificial Sequence
  Description of Artificial Sequence: Synthetic oligonucleotide
  Sense strand starting at position 2197 of SEQ ID NO: 1888017
gcagguuugcuccagauua

SEQ ID NO: 2504669 - RNA, 19 nt, Artificial Sequence
  Description of Artificial Sequence: Synthetic oligonucleotide
  Antisense strand to SEQ ID NO: 2504668
uaaucuggagcaaaccugc

SEQ ID NO: 2504670 - RNA, 19 nt, Artificial Sequence
  Description of Artificial Sequence: Synthetic oligonucleotide
  Sense strand starting at position 2205 of SEQ ID NO: 1888017
gcuccagauuagccaauaa

SEQ ID NO: 2504671 - RNA, 19 nt, Artificial Sequence
  Description of Artificial Sequence: Synthetic oligonucleotide
  Antisense strand to SEQ ID NO: 2504670
uuauuggcuaaucuggagc

SEQ ID NO: 2504672 - RNA, 19 nt, Artificial Sequence
  Description of Artificial Sequence: Synthetic oligonucleotide
  Sense strand starting at position 2650 of SEQ ID NO: 1888017
cugcacuuucuuggagauu

SEQ ID NO: 2504673 - RNA, 19 nt, Artificial Sequence
  Description of Artificial Sequence: Synthetic oligonucleotide
  Antisense strand to SEQ ID NO: 2504672
aaucuccaagaaagugcag

SEQ ID NO: 2504674 - RNA, 19 nt, Artificial Sequence
  Description of Artificial Sequence: Synthetic oligonucleotide
  Sense strand starting at position 2747 of SEQ ID NO: 1888017
ccagucuugugaucaacaa

SEQ ID NO: 2504675 - RNA, 19 nt, Artificial Sequence
  Description of Artificial Sequence: Synthetic oligonucleotide
  Antisense strand to SEQ ID NO: 2504674
uuguugaucacaagacugg

SEQ ID NO: 2504676 - RNA, 19 nt, Artificial Sequence
  Description of Artificial Sequence: Synthetic oligonucleotide
  Sense strand starting at position 2939 of SEQ ID NO: 1888017
cgaaacuccgucugaacau

SEQ ID NO: 2504677 - RNA, 19 nt, Artificial Sequence
  Description of Artificial Sequence: Synthetic oligonucleotide
  Antisense strand to SEQ ID NO: 2504676
auguucagacggaguuucg

SEQ ID NO: 2504678 - RNA, 19 nt, Artificial Sequence
  Description of Artificial Sequence: Synthetic oligonucleotide
  Sense strand starting at position 3181 of SEQ ID NO: 1888017
ucgcgugaaccggagaguu

SEQ ID NO: 2504679 - RNA, 19 nt, Artificial Sequence
  Description of Artificial Sequence: Synthetic oligonucleotide
  Antisense strand to SEQ ID NO: 2504678
aacucuccgguucacgcga

SEQ ID NO: 2504680 - RNA, 19 nt, Artificial Sequence
  Description of Artificial Sequence: Synthetic oligonucleotide
  Sense strand starting at position 3961 of SEQ ID NO: 1888017
aggaaacauuaaugcauga

SEQ ID NO: 2504681 - RNA, 19 nt, Artificial Sequence
  Description of Artificial Sequence: Synthetic oligonucleotide
  Antisense strand to SEQ ID NO: 2504680
ucaugcauuaauguuuccu

SEQ ID NO: 2504682 - RNA, 19 nt, Artificial Sequence
  Description of Artificial Sequence: Synthetic oligonucleotide
  Sense strand starting at position 132 of SEQ ID NO: 1888018
ucuacugaugcauagcaaa

SEQ ID NO: 2504683 - RNA, 19 nt, Artificial Sequence
  Description of Artificial Sequence: Synthetic oligonucleotide
  Antisense strand to SEQ ID NO: 2504682
uuugcuaugcaucaguaga

SEQ ID NO: 2504684 - RNA, 19 nt, Artificial Sequence
  Description of Artificial Sequence: Synthetic oligonucleotide
  Sense strand starting at position 340 of SEQ ID NO: 1888018
gugauacacuugguuauag

SEQ ID NO: 2504685 - RNA, 19 nt, Artificial Sequence
  Description of Artificial Sequence: Synthetic oligonucleotide
  Antisense strand to SEQ ID NO: 2504684
cuauaaccaaguguaucac

SEQ ID NO: 2504686 - RNA, 19 nt, Artificial Sequence
  Description of Artificial Sequence: Synthetic oligonucleotide
  Sense strand starting at position 504 of SEQ ID NO: 1888018
ggugccauuuauuauauuu

SEQ ID NO: 2504687 - RNA, 19 nt, Artificial Sequence
  Description of Artificial Sequence: Synthetic oligonucleotide
  Antisense strand to SEQ ID NO: 2504686
aaauauaauaaauggcacc

SEQ ID NO: 2504688 - RNA, 19 nt, Artificial Sequence
  Description of Artificial Sequence: Synthetic oligonucleotide
  Sense strand starting at position 601 of SEQ ID NO: 1888018
acuacauaagagugugaau

SEQ ID NO: 2504689 - RNA, 19 nt, Artificial Sequence
  Description of Artificial Sequence: Synthetic oligonucleotide
  Antisense strand to SEQ ID NO: 2504688
auucacacucuuauguagu

SEQ ID NO: 2504690 - RNA, 19 nt, Artificial Sequence
  Description of Artificial Sequence: Synthetic oligonucleotide
  Sense strand starting at position 603 of SEQ ID NO: 1888018
uacauaagagugugaauag

SEQ ID NO: 2504691 - RNA, 19 nt, Artificial Sequence
  Description of Artificial Sequence: Synthetic oligonucleotide
  Antisense strand to SEQ ID NO: 2504690
cuauucacacucuuaugua

SEQ ID NO: 2504692 - RNA, 19 nt, Artificial Sequence
  Description of Artificial Sequence: Synthetic oligonucleotide
  Sense strand starting at position 750 of SEQ ID NO: 1888018
uuccaauaccugugauaug

SEQ ID NO: 2504693 - RNA, 19 nt, Artificial Sequence
  Description of Artificial Sequence: Synthetic oligonucleotide
  Antisense strand to SEQ ID NO: 2504692
cauaucacagguauuggaa

SEQ ID NO: 2504694 - RNA, 19 nt, Artificial Sequence
  Description of Artificial Sequence: Synthetic oligonucleotide
  Sense strand starting at position 1072 of SEQ ID NO: 1888018
cucauugauccagagcuaa

SEQ ID NO: 2504695 - RNA, 19 nt, Artificial Sequence
  Description of Artificial Sequence: Synthetic oligonucleotide
  Antisense strand to SEQ ID NO: 2504694
uuagcucuggaucaaugag

SEQ ID NO: 2504696 - RNA, 19 nt, Artificial Sequence
  Description of Artificial Sequence: Synthetic oligonucleotide
  Sense strand starting at position 1450 of SEQ ID NO: 1888018
acccauugcacguaagaag

SEQ ID NO: 2504697 - RNA, 19 nt, Artificial Sequence
  Description of Artificial Sequence: Synthetic oligonucleotide
  Antisense strand to SEQ ID NO: 2504696
cuucuuacgugcaaugggu

SEQ ID NO: 2504698 - RNA, 19 nt, Artificial Sequence
  Description of Artificial Sequence: Synthetic oligonucleotide
  Sense strand starting at position 1569 of SEQ ID NO: 1888018
aucugagaugcugaguuaa

SEQ ID NO: 2504699 - RNA, 19 nt, Artificial Sequence
  Description of Artificial Sequence: Synthetic oligonucleotide
  Antisense strand to SEQ ID NO: 2504698
uuaacucagcaucucagau

SEQ ID NO: 2504700 - RNA, 19 nt, Artificial Sequence
  Description of Artificial Sequence: Synthetic oligonucleotide
  Sense strand starting at position 1571 of SEQ ID NO: 1888018
cugagaugcugaguuaaga

SEQ ID NO: 2504701 - RNA, 19 nt, Artificial Sequence
  Description of Artificial Sequence: Synthetic oligonucleotide
  Antisense strand to SEQ ID NO: 2504700
ucuuaacucagcaucucag

SEQ ID NO: 2504702 - RNA, 19 nt, Artificial Sequence
  Description of Artificial Sequence: Synthetic oligonucleotide
  Sense strand starting at position 1940 of SEQ ID NO: 1888018
gaaggcacgguuugagaaa

SEQ ID NO: 2504703 - RNA, 19 nt, Artificial Sequence
  Description of Artificial Sequence: Synthetic oligonucleotide
  Antisense strand to SEQ ID NO: 2504702
uuucucaaaccgugccuuc

SEQ ID NO: 2504704 - RNA, 19 nt, Artificial Sequence
  Description of Artificial Sequence: Synthetic oligonucleotide
  Sense strand starting at position 2112 of SEQ ID NO: 1888018
gagguuugcgggagucagu

SEQ ID NO: 2504705 - RNA, 19 nt, Artificial Sequence
  Description of Artificial Sequence: Synthetic oligonucleotide
  Antisense strand to SEQ ID NO: 2504704
acugacucccgcaaaccuc

SEQ ID NO: 2504706 - RNA, 19 nt, Artificial Sequence
  Description of Artificial Sequence: Synthetic oligonucleotide
  Sense strand starting at position 2161 of SEQ ID NO: 1888018
gugugugggaaucaauaaa

SEQ ID NO: 2504707 - RNA, 19 nt, Artificial Sequence
  Description of Artificial Sequence: Synthetic oligonucleotide
  Antisense strand to SEQ ID NO: 2504706
uuuauugauucccacacac

SEQ ID NO: 2504708 - RNA, 19 nt, Artificial Sequence
  Description of Artificial Sequence: Synthetic oligonucleotide
  Sense strand starting at position 2168 of SEQ ID NO: 1888018
ggaaucaauaaaugcgagu

SEQ ID NO: 2504709 - RNA, 19 nt, Artificial Sequence
  Description of Artificial Sequence: Synthetic oligonucleotide
  Antisense strand to SEQ ID NO: 2504708
acucgcauuuauugauucc

SEQ ID NO: 2504710 - RNA, 19 nt, Artificial Sequence
  Description of Artificial Sequence: Synthetic oligonucleotide
  Sense strand starting at position 2306 of SEQ ID NO: 1888018
gcccgagaggaucagugau

SEQ ID NO: 2504711 - RNA, 19 nt, Artificial Sequence
  Description of Artificial Sequence: Synthetic oligonucleotide
  Antisense strand to SEQ ID NO: 2504710
aucacugauccucucgggc

SEQ ID NO: 2504712 - RNA, 19 nt, Artificial Sequence
  Description of Artificial Sequence: Synthetic oligonucleotide
  Sense strand starting at position 2360 of SEQ ID NO: 1888018
gguacuggaauuggugauu

SEQ ID NO: 2504713 - RNA, 19 nt, Artificial Sequence
  Description of Artificial Sequence: Synthetic oligonucleotide
  Antisense strand to SEQ ID NO: 2504712
aaucaccaauuccaguacc

SEQ ID NO: 2504714 - RNA, 19 nt, Artificial Sequence
  Description of Artificial Sequence: Synthetic oligonucleotide
  Sense strand starting at position 2365 of SEQ ID NO: 1888018
uggaauuggugauugugga

SEQ ID NO: 2504715 - RNA, 19 nt, Artificial Sequence
  Description of Artificial Sequence: Synthetic oligonucleotide
  Antisense strand to SEQ ID NO: 2504714
uccacaaucaccaauucca

SEQ ID NO: 2504716 - RNA, 19 nt, Artificial Sequence
  Description of Artificial Sequence: Synthetic oligonucleotide
  Sense strand starting at position 2366 of SEQ ID NO: 1888018
ggaauuggugauuguggaa

SEQ ID NO: 2504717 - RNA, 19 nt, Artificial Sequence
  Description of Artificial Sequence: Synthetic oligonucleotide
  Antisense strand to SEQ ID NO: 2504716
uuccacaaucaccaauucc

SEQ ID NO: 2504718 - RNA, 19 nt, Artificial Sequence
  Description of Artificial Sequence: Synthetic oligonucleotide
  Sense strand starting at position 2401 of SEQ ID NO: 1888018
gagggaggucaguggugau

SEQ ID NO: 2504719 - RNA, 19 nt, Artificial Sequence
  Description of Artificial Sequence: Synthetic oligonucleotide
  Antisense strand to SEQ ID NO: 2504718
aucaccacugaccucccuc

SEQ ID NO: 2504720 - RNA, 19 nt, Artificial Sequence
  Description of Artificial Sequence: Synthetic oligonucleotide
  Sense strand starting at position 2405 of SEQ ID NO: 1888018
gaggucaguggugaugaau

SEQ ID NO: 2504721 - RNA, 19 nt, Artificial Sequence
  Description of Artificial Sequence: Synthetic oligonucleotide
  Antisense strand to SEQ ID NO: 2504720
auucaucaccacugaccuc

SEQ ID NO: 2504722 - RNA, 19 nt, Artificial Sequence
  Description of Artificial Sequence: Synthetic oligonucleotide
  Sense strand starting at position 2414 of SEQ ID NO: 1888018
ggugaugaauguuuggaga

SEQ ID NO: 2504723 - RNA, 19 nt, Artificial Sequence
  Description of Artificial Sequence: Synthetic oligonucleotide
  Antisense strand to SEQ ID NO: 2504722
ucuccaaacauucaucacc

SEQ ID NO: 2504724 - RNA, 19 nt, Artificial Sequence
  Description of Artificial Sequence: Synthetic oligonucleotide
  Sense strand starting at position 2466 of SEQ ID NO: 1888018
ucauaucaucgguggagga

SEQ ID NO: 2504725 - RNA, 19 nt, Artificial Sequence
  Description of Artificial Sequence: Synthetic oligonucleotide
  Antisense strand to SEQ ID NO: 2504724
uccuccaccgaugauauga

SEQ ID NO: 2504726 - RNA, 19 nt, Artificial Sequence
  Description of Artificial Sequence: Synthetic oligonucleotide
  Sense strand starting at position 2467 of SEQ ID NO: 1888018
cauaucaucgguggaggau

SEQ ID NO: 2504727 - RNA, 19 nt, Artificial Sequence
  Description of Artificial Sequence: Synthetic oligonucleotide
  Antisense strand to SEQ ID NO: 2504726
auccuccaccgaugauaug

SEQ ID NO: 2504728 - RNA, 19 nt, Artificial Sequence
  Description of Artificial Sequence: Synthetic oligonucleotide
  Sense strand starting at position 2491 of SEQ ID NO: 1888018
aguauuaacgauuggacuu

SEQ ID NO: 2504729 - RNA, 19 nt, Artificial Sequence
  Description of Artificial Sequence: Synthetic oligonucleotide
  Antisense strand to SEQ ID NO: 2504728
aaguccaaucguuaauacu

SEQ ID NO: 2504730 - RNA, 19 nt, Artificial Sequence
  Description of Artificial Sequence: Synthetic oligonucleotide
  Sense strand starting at position 2564 of SEQ ID NO: 1888018
cucaaugaggcucagugau

SEQ ID NO: 2504731 - RNA, 19 nt, Artificial Sequence
  Description of Artificial Sequence: Synthetic oligonucleotide
  Antisense strand to SEQ ID NO: 2504730
aucacugagccucauugag

SEQ ID NO: 2504732 - RNA, 19 nt, Artificial Sequence
  Description of Artificial Sequence: Synthetic oligonucleotide
  Sense strand starting at position 2604 of SEQ ID NO: 1888018
ggagugggacugugagaau

SEQ ID NO: 2504733 - RNA, 19 nt, Artificial Sequence
  Description of Artificial Sequence: Synthetic oligonucleotide
  Antisense strand to SEQ ID NO: 2504732
auucucacagucccacucc

SEQ ID NO: 2504734 - RNA, 19 nt, Artificial Sequence
  Description of Artificial Sequence: Synthetic oligonucleotide
  Sense strand starting at position 2643 of SEQ ID NO: 1888018
uugggauaucauuggcaau

SEQ ID NO: 2504735 - RNA, 19 nt, Artificial Sequence
  Description of Artificial Sequence: Synthetic oligonucleotide
  Antisense strand to SEQ ID NO: 2504734
auugccaaugauaucccaa

SEQ ID NO: 2504736 - RNA, 19 nt, Artificial Sequence
  Description of Artificial Sequence: Synthetic oligonucleotide
  Sense strand starting at position 2644 of SEQ ID NO: 1888018
ugggauaucauuggcaauc

SEQ ID NO: 2504737 - RNA, 19 nt, Artificial Sequence
  Description of Artificial Sequence: Synthetic oligonucleotide
  Antisense strand to SEQ ID NO: 2504736
gauugccaaugauauccca

SEQ ID NO: 2504738 - RNA, 19 nt, Artificial Sequence
  Description of Artificial Sequence: Synthetic oligonucleotide
  Sense strand starting at position 2645 of SEQ ID NO: 1888018
gggauaucauuggcaauca

SEQ ID NO: 2504739 - RNA, 19 nt, Artificial Sequence
  Description of Artificial Sequence: Synthetic oligonucleotide
  Antisense strand to SEQ ID NO: 2504738
ugauugccaaugauauccc

SEQ ID NO: 2504740 - RNA, 19 nt, Artificial Sequence
  Description of Artificial Sequence: Synthetic oligonucleotide
  Sense strand starting at position 2711 of SEQ ID NO: 1888018
cggaucgguguucuuugua

SEQ ID NO: 2504741 - RNA, 19 nt, Artificial Sequence
  Description of Artificial Sequence: Synthetic oligonucleotide
  Antisense strand to SEQ ID NO: 2504740
uacaaagaacaccgauccg

SEQ ID NO: 2504742 - RNA, 19 nt, Artificial Sequence
  Description of Artificial Sequence: Synthetic oligonucleotide
  Sense strand starting at position 2793 of SEQ ID NO: 1888018
accucugaggguuggagau

SEQ ID NO: 2504743 - RNA, 19 nt, Artificial Sequence
  Description of Artificial Sequence: Synthetic oligonucleotide
  Antisense strand to SEQ ID NO: 2504742
aucuccaacccucagaggu

SEQ ID NO: 2504744 - RNA, 19 nt, Artificial Sequence
  Description of Artificial Sequence: Synthetic oligonucleotide
  Sense strand starting at position 2830 of SEQ ID NO: 1888018
ggcacuaugcgugucugau

SEQ ID NO: 2504745 - RNA, 19 nt, Artificial Sequence
  Description of Artificial Sequence: Synthetic oligonucleotide
  Antisense strand to SEQ ID NO: 2504744
aucagacacgcauagugcc

SEQ ID NO: 2504746 - RNA, 19 nt, Artificial Sequence
  Description of Artificial Sequence: Synthetic oligonucleotide
  Sense strand starting at position 2831 of SEQ ID NO: 1888018
gcacuaugcgugucugauu

SEQ ID NO: 2504747 - RNA, 19 nt, Artificial Sequence
  Description of Artificial Sequence: Synthetic oligonucleotide
  Antisense strand to SEQ ID NO: 2504746
aaucagacacgcauagugc

SEQ ID NO: 2504748 - RNA, 19 nt, Artificial Sequence
  Description of Artificial Sequence: Synthetic oligonucleotide
  Sense strand starting at position 2877 of SEQ ID NO: 1888018
gguccugaaauguggagau

SEQ ID NO: 2504749 - RNA, 19 nt, Artificial Sequence
  Description of Artificial Sequence: Synthetic oligonucleotide
  Antisense strand to SEQ ID NO: 2504748
aucuccacauuucaggacc

SEQ ID NO: 2504750 - RNA, 19 nt, Artificial Sequence
  Description of Artificial Sequence: Synthetic oligonucleotide
  Sense strand starting at position 3100 of SEQ ID NO: 1888018
aguaacauguuacuaaaga

SEQ ID NO: 2504751 - RNA, 19 nt, Artificial Sequence
  Description of Artificial Sequence: Synthetic oligonucleotide
  Antisense strand to SEQ ID NO: 2504750
ucuuuaguaacauguuacu

SEQ ID NO: 2504752 - RNA, 19 nt, Artificial Sequence
  Description of Artificial Sequence: Synthetic oligonucleotide
  Sense strand starting at position 3133 of SEQ ID NO: 1888018
uuguuagggaucuaaugca

SEQ ID NO: 2504753 - RNA, 19 nt, Artificial Sequence
  Description of Artificial Sequence: Synthetic oligonucleotide
  Antisense strand to SEQ ID NO: 2504752
ugcauuagaucccuaacaa

SEQ ID NO: 2504754 - RNA, 19 nt, Artificial Sequence
  Description of Artificial Sequence: Synthetic oligonucleotide
  Sense strand starting at position 3551 of SEQ ID NO: 1888018
ggagauugcagugaaacga

SEQ ID NO: 2504755 - RNA, 19 nt, Artificial Sequence
  Description of Artificial Sequence: Synthetic oligonucleotide
  Antisense strand to SEQ ID NO: 2504754
ucguuucacugcaaucucc

SEQ ID NO: 2504756 - RNA, 19 nt, Artificial Sequence
  Description of Artificial Sequence: Synthetic oligonucleotide
  Sense strand starting at position 3844 of SEQ ID NO: 1888018
uuauaaaguccuggcagaa

SEQ ID NO: 2504757 - RNA, 19 nt, Artificial Sequence
  Description of Artificial Sequence: Synthetic oligonucleotide
  Antisense strand to SEQ ID NO: 2504756
uucugccaggacuuuauaa

SEQ ID NO: 2504758 - RNA, 19 nt, Artificial Sequence
  Description of Artificial Sequence: Synthetic oligonucleotide
  Sense strand starting at position 3919 of SEQ ID NO: 1888018
agaaacuguuccucacuga

SEQ ID NO: 2504759 - RNA, 19 nt, Artificial Sequence
  Description of Artificial Sequence: Synthetic oligonucleotide
  Antisense strand to SEQ ID NO: 2504758
ucagugaggaacaguuucu

SEQ ID NO: 2504760 - RNA, 19 nt, Artificial Sequence
  Description of Artificial Sequence: Synthetic oligonucleotide
  Sense strand starting at position 3970 of SEQ ID NO: 1888018
cugagaugggauugcaaau

SEQ ID NO: 2504761 - RNA, 19 nt, Artificial Sequence
  Description of Artificial Sequence: Synthetic oligonucleotide
  Antisense strand to SEQ ID NO: 2504760
auuugcaaucccaucucag

SEQ ID NO: 2504762 - RNA, 19 nt, Artificial Sequence
  Description of Artificial Sequence: Synthetic oligonucleotide
  Sense strand starting at position 2045 of SEQ ID NO: 1888019
uuugaauacucucaugaug

SEQ ID NO: 2504763 - RNA, 19 nt, Artificial Sequence
  Description of Artificial Sequence: Synthetic oligonucleotide
  Antisense strand to SEQ ID NO: 2504762
caucaugagaguauucaaa

SEQ ID NO: 2504764 - RNA, 19 nt, Artificial Sequence
  Description of Artificial Sequence: Synthetic oligonucleotide
  Sense strand starting at position 2047 of SEQ ID NO: 1888019
ugaauacucucaugauguc

SEQ ID NO: 2504765 - RNA, 19 nt, Artificial Sequence
  Description of Artificial Sequence: Synthetic oligonucleotide
  Antisense strand to SEQ ID NO: 2504764
gacaucaugagaguauuca

SEQ ID NO: 2504766 - RNA, 19 nt, Artificial Sequence
  Description of Artificial Sequence: Synthetic oligonucleotide
  Sense strand starting at position 2134 of SEQ ID NO: 1888019
auuaccugaugguuaguua

SEQ ID NO: 2504767 - RNA, 19 nt, Artificial Sequence
  Description of Artificial Sequence: Synthetic oligonucleotide
  Antisense strand to SEQ ID NO: 2504766
uaacuaaccaucagguaau

SEQ ID NO: 2504768 - RNA, 19 nt, Artificial Sequence
  Description of Artificial Sequence: Synthetic oligonucleotide
  Sense strand starting at position 2282 of SEQ ID NO: 1888019
uuuguuucucuccagaaug

SEQ ID NO: 2504769 - RNA, 19 nt, Artificial Sequence
  Description of Artificial Sequence: Synthetic oligonucleotide
  Antisense strand to SEQ ID NO: 2504768
cauucuggagagaaacaaa

SEQ ID NO: 2504770 - RNA, 19 nt, Artificial Sequence
  Description of Artificial Sequence: Synthetic oligonucleotide
  Sense strand starting at position 2296 of SEQ ID NO: 1888019
gaaugaauccugugauguu

SEQ ID NO: 2504771 - RNA, 19 nt, Artificial Sequence
  Description of Artificial Sequence: Synthetic oligonucleotide
  Antisense strand to SEQ ID NO: 2504770
aacaucacaggauucauuc

SEQ ID NO: 2504772 - RNA, 19 nt, Artificial Sequence
  Description of Artificial Sequence: Synthetic oligonucleotide
  Sense strand starting at position 2297 of SEQ ID NO: 1888019
aaugaauccugugauguuu

SEQ ID NO: 2504773 - RNA, 19 nt, Artificial Sequence
  Description of Artificial Sequence: Synthetic oligonucleotide
  Antisense strand to SEQ ID NO: 2504772
aaacaucacaggauucauu

SEQ ID NO: 2504774 - RNA, 19 nt, Artificial Sequence
  Description of Artificial Sequence: Synthetic oligonucleotide
  Sense strand starting at position 2389 of SEQ ID NO: 1888019
accugauguuuaguuaggu

SEQ ID NO: 2504775 - RNA, 19 nt, Artificial Sequence
  Description of Artificial Sequence: Synthetic oligonucleotide
  Antisense strand to SEQ ID NO: 2504774
accuaacuaaacaucaggu

SEQ ID NO: 2504776 - RNA, 19 nt, Artificial Sequence
  Description of Artificial Sequence: Synthetic oligonucleotide
  Sense strand starting at position 2390 of SEQ ID NO: 1888019
ccugauguuuaguuagguu

SEQ ID NO: 2504777 - RNA, 19 nt, Artificial Sequence
  Description of Artificial Sequence: Synthetic oligonucleotide
  Antisense strand to SEQ ID NO: 2504776
aaccuaacuaaacaucagg

SEQ ID NO: 2504778 - RNA, 19 nt, Artificial Sequence
  Description of Artificial Sequence: Synthetic oligonucleotide
  Sense strand starting at position 2574 of SEQ ID NO: 1888019
gguggaacauccuauugaa

SEQ ID NO: 2504779 - RNA, 19 nt, Artificial Sequence
  Description of Artificial Sequence: Synthetic oligonucleotide
  Antisense strand to SEQ ID NO: 2504778
uucaauaggauguuccacc

SEQ ID NO: 2504780 - RNA, 19 nt, Artificial Sequence
  Description of Artificial Sequence: Synthetic oligonucleotide
  Sense strand starting at position 2577 of SEQ ID NO: 1888019
ggaacauccuauugaaggu

SEQ ID NO: 2504781 - RNA, 19 nt, Artificial Sequence
  Description of Artificial Sequence: Synthetic oligonucleotide
  Antisense strand to SEQ ID NO: 2504780
accuucaauaggauguucc

SEQ ID NO: 2504782 - RNA, 19 nt, Artificial Sequence
  Description of Artificial Sequence: Synthetic oligonucleotide
  Sense strand starting at position 2639 of SEQ ID NO: 1888019
auucuaugaugacuugcua

SEQ ID NO: 2504783 - RNA, 19 nt, Artificial Sequence
  Description of Artificial Sequence: Synthetic oligonucleotide
  Antisense strand to SEQ ID NO: 2504782
uagcaagucaucauagaau

SEQ ID NO: 2504784 - RNA, 19 nt, Artificial Sequence
  Description of Artificial Sequence: Synthetic oligonucleotide
  Sense strand starting at position 2651 of SEQ ID NO: 1888019
cuugcuagguuuccaauuu

SEQ ID NO: 2504785 - RNA, 19 nt, Artificial Sequence
  Description of Artificial Sequence: Synthetic oligonucleotide
  Antisense strand to SEQ ID NO: 2504784
aaauuggaaaccuagcaag

SEQ ID NO: 2504786 - RNA, 19 nt, Artificial Sequence
  Description of Artificial Sequence: Synthetic oligonucleotide
  Sense strand starting at position 2735 of SEQ ID NO: 1888019
guaguaagguuggucaucu

SEQ ID NO: 2504787 - RNA, 19 nt, Artificial Sequence
  Description of Artificial Sequence: Synthetic oligonucleotide
  Antisense strand to SEQ ID NO: 2504786
agaugaccaaccuuacuac

SEQ ID NO: 2504788 - RNA, 19 nt, Artificial Sequence
  Description of Artificial Sequence: Synthetic oligonucleotide
  Sense strand starting at position 2736 of SEQ ID NO: 1888019
uaguaagguuggucaucuu

SEQ ID NO: 2504789 - RNA, 19 nt, Artificial Sequence
  Description of Artificial Sequence: Synthetic oligonucleotide
  Antisense strand to SEQ ID NO: 2504788
aagaugaccaaccuuacua

SEQ ID NO: 2504790 - RNA, 19 nt, Artificial Sequence
  Description of Artificial Sequence: Synthetic oligonucleotide
  Sense strand starting at position 2739 of SEQ ID NO: 1888019
uaagguuggucaucuuauu

SEQ ID NO: 2504791 - RNA, 19 nt, Artificial Sequence
  Description of Artificial Sequence: Synthetic oligonucleotide
  Antisense strand to SEQ ID NO: 2504790
aauaagaugaccaaccuua

SEQ ID NO: 2504792 - RNA, 19 nt, Artificial Sequence
  Description of Artificial Sequence: Synthetic oligonucleotide
  Sense strand starting at position 2745 of SEQ ID NO: 1888019
uggucaucuuauuaaaggu

SEQ ID NO: 2504793 - RNA, 19 nt, Artificial Sequence
  Description of Artificial Sequence: Synthetic oligonucleotide
  Antisense strand to SEQ ID NO: 2504792
accuuuaauaagaugacca

SEQ ID NO: 2504794 - RNA, 19 nt, Artificial Sequence
  Description of Artificial Sequence: Synthetic oligonucleotide
  Sense strand starting at position 2840 of SEQ ID NO: 1888019
cugaaaucuuugccacaug

SEQ ID NO: 2504795 - RNA, 19 nt, Artificial Sequence
  Description of Artificial Sequence: Synthetic oligonucleotide
  Antisense strand to SEQ ID NO: 2504794
cauguggcaaagauuucag

SEQ ID NO: 2504796 - RNA, 19 nt, Artificial Sequence
  Description of Artificial Sequence: Synthetic oligonucleotide
  Sense strand starting at position 2995 of SEQ ID NO: 1888019
guuugcaauuugccugaaa

SEQ ID NO: 2504797 - RNA, 19 nt, Artificial Sequence
  Description of Artificial Sequence: Synthetic oligonucleotide
  Antisense strand to SEQ ID NO: 2504796
uuucaggcaaauugcaaac

SEQ ID NO: 2504798 - RNA, 19 nt, Artificial Sequence
  Description of Artificial Sequence: Synthetic oligonucleotide
  Sense strand starting at position 2997 of SEQ ID NO: 1888019
uugcaauuugccugaaacc

SEQ ID NO: 2504799 - RNA, 19 nt, Artificial Sequence
  Description of Artificial Sequence: Synthetic oligonucleotide
  Antisense strand to SEQ ID NO: 2504798
gguuucaggcaaauugcaa

SEQ ID NO: 2504800 - RNA, 19 nt, Artificial Sequence
  Description of Artificial Sequence: Synthetic oligonucleotide
  Sense strand starting at position 3078 of SEQ ID NO: 1888019
gguggaacauccuguuaaa

SEQ ID NO: 2504801 - RNA, 19 nt, Artificial Sequence
  Description of Artificial Sequence: Synthetic oligonucleotide
  Antisense strand to SEQ ID NO: 2504800
uuuaacaggauguuccacc

SEQ ID NO: 2504802 - RNA, 19 nt, Artificial Sequence
  Description of Artificial Sequence: Synthetic oligonucleotide
  Sense strand starting at position 3081 of SEQ ID NO: 1888019
ggaacauccuguuaaaggu

SEQ ID NO: 2504803 - RNA, 19 nt, Artificial Sequence
  Description of Artificial Sequence: Synthetic oligonucleotide
  Antisense strand to SEQ ID NO: 2504802
accuuuaacaggauguucc

SEQ ID NO: 2504804 - RNA, 19 nt, Artificial Sequence
  Description of Artificial Sequence: Synthetic oligonucleotide
  Sense strand starting at position 3246 of SEQ ID NO: 1888019
gguugaacgucugauugaa

SEQ ID NO: 2504805 - RNA, 19 nt, Artificial Sequence
  Description of Artificial Sequence: Synthetic oligonucleotide
  Antisense strand to SEQ ID NO: 2504804
uucaaucagacguucaacc

SEQ ID NO: 2504806 - RNA, 19 nt, Artificial Sequence
  Description of Artificial Sequence: Synthetic oligonucleotide
  Sense strand starting at position 3331 of SEQ ID NO: 1888019
guuugcaauucgccugaaa

SEQ ID NO: 2504807 - RNA, 19 nt, Artificial Sequence
  Description of Artificial Sequence: Synthetic oligonucleotide
  Antisense strand to SEQ ID NO: 2504806
uuucaggcgaauugcaaac

SEQ ID NO: 2504808 - RNA, 19 nt, Artificial Sequence
  Description of Artificial Sequence: Synthetic oligonucleotide
  Sense strand starting at position 3333 of SEQ ID NO: 1888019
uugcaauucgccugaaacc

SEQ ID NO: 2504809 - RNA, 19 nt, Artificial Sequence
  Description of Artificial Sequence: Synthetic oligonucleotide
  Antisense strand to SEQ ID NO: 2504808
gguuucaggcgaauugcaa

SEQ ID NO: 2504810 - RNA, 19 nt, Artificial Sequence
  Description of Artificial Sequence: Synthetic oligonucleotide
  Sense strand starting at position 3334 of SEQ ID NO: 1888019
ugcaauucgccugaaaccu

SEQ ID NO: 2504811 - RNA, 19 nt, Artificial Sequence
  Description of Artificial Sequence: Synthetic oligonucleotide
  Antisense strand to SEQ ID NO: 2504810
agguuucaggcgaauugca

SEQ ID NO: 2504812 - RNA, 19 nt, Artificial Sequence
  Description of Artificial Sequence: Synthetic oligonucleotide
  Sense strand starting at position 3494 of SEQ ID NO: 1888019
gugaguaaugaaggaugca

SEQ ID NO: 2504813 - RNA, 19 nt, Artificial Sequence
  Description of Artificial Sequence: Synthetic oligonucleotide
  Antisense strand to SEQ ID NO: 2504812
ugcauccuucauuacucac

SEQ ID NO: 2504814 - RNA, 19 nt, Artificial Sequence
  Description of Artificial Sequence: Synthetic oligonucleotide
  Sense strand starting at position 3497 of SEQ ID NO: 1888019
aguaaugaaggaugcauaa

SEQ ID NO: 2504815 - RNA, 19 nt, Artificial Sequence
  Description of Artificial Sequence: Synthetic oligonucleotide
  Antisense strand to SEQ ID NO: 2504814
uuaugcauccuucauuacu

SEQ ID NO: 2504816 - RNA, 19 nt, Artificial Sequence
  Description of Artificial Sequence: Synthetic oligonucleotide
  Sense strand starting at position 3558 of SEQ ID NO: 1888019
gaagauuuguuugaaguaa

SEQ ID NO: 2504817 - RNA, 19 nt, Artificial Sequence
  Description of Artificial Sequence: Synthetic oligonucleotide
  Antisense strand to SEQ ID NO: 2504816
uuacuucaaacaaaucuuc

SEQ ID NO: 2504818 - RNA, 19 nt, Artificial Sequence
  Description of Artificial Sequence: Synthetic oligonucleotide
  Sense strand starting at position 3702 of SEQ ID NO: 1888019
cuggcuuauuuccugcauu

SEQ ID NO: 2504819 - RNA, 19 nt, Artificial Sequence
  Description of Artificial Sequence: Synthetic oligonucleotide
  Antisense strand to SEQ ID NO: 2504818
aaugcaggaaauaagccag

SEQ ID NO: 2504820 - RNA, 19 nt, Artificial Sequence
  Description of Artificial Sequence: Synthetic oligonucleotide
  Sense strand starting at position 3703 of SEQ ID NO: 1888019
uggcuuauuuccugcauuc

SEQ ID NO: 2504821 - RNA, 19 nt, Artificial Sequence
  Description of Artificial Sequence: Synthetic oligonucleotide
  Antisense strand to SEQ ID NO: 2504820
gaaugcaggaaauaagcca

SEQ ID NO: 2504822 - RNA, 19 nt, Artificial Sequence
  Description of Artificial Sequence: Synthetic oligonucleotide
  Sense strand starting at position 3738 of SEQ ID NO: 1888019
cucuucuuccagugauguu

SEQ ID NO: 2504823 - RNA, 19 nt, Artificial Sequence
  Description of Artificial Sequence: Synthetic oligonucleotide
  Antisense strand to SEQ ID NO: 2504822
aacaucacuggaagaagag

SEQ ID NO: 2504824 - RNA, 19 nt, Artificial Sequence
  Description of Artificial Sequence: Synthetic oligonucleotide
  Sense strand starting at position 3770 of SEQ ID NO: 1888019
gcagguauuucucuguaau

SEQ ID NO: 2504825 - RNA, 19 nt, Artificial Sequence
  Description of Artificial Sequence: Synthetic oligonucleotide
  Antisense strand to SEQ ID NO: 2504824
auuacagagaaauaccugc

SEQ ID NO: 2504826 - RNA, 19 nt, Artificial Sequence
  Description of Artificial Sequence: Synthetic oligonucleotide
  Sense strand starting at position 3789 of SEQ ID NO: 1888019
uucucucaucauugugaca

SEQ ID NO: 2504827 - RNA, 19 nt, Artificial Sequence
  Description of Artificial Sequence: Synthetic oligonucleotide
  Antisense strand to SEQ ID NO: 2504826
ugucacaaugaugagagaa

SEQ ID NO: 2504828 - RNA, 19 nt, Artificial Sequence
  Description of Artificial Sequence: Synthetic oligonucleotide
  Sense strand starting at position 3833 of SEQ ID NO: 1888019
ugcugcauuucucugaagu

SEQ ID NO: 2504829 - RNA, 19 nt, Artificial Sequence
  Description of Artificial Sequence: Synthetic oligonucleotide
  Antisense strand to SEQ ID NO: 2504828
acuucagagaaaugcagca

SEQ ID NO: 2504830 - RNA, 19 nt, Artificial Sequence
  Description of Artificial Sequence: Synthetic oligonucleotide
  Sense strand starting at position 3834 of SEQ ID NO: 1888019
gcugcauuucucugaagua

SEQ ID NO: 2504831 - RNA, 19 nt, Artificial Sequence
  Description of Artificial Sequence: Synthetic oligonucleotide
  Antisense strand to SEQ ID NO: 2504830
uacuucagagaaaugcagc

SEQ ID NO: 2504832 - RNA, 19 nt, Artificial Sequence
  Description of Artificial Sequence: Synthetic oligonucleotide
  Sense strand starting at position 3835 of SEQ ID NO: 1888019
cugcauuucucugaaguaa

SEQ ID NO: 2504833 - RNA, 19 nt, Artificial Sequence
  Description of Artificial Sequence: Synthetic oligonucleotide
  Antisense strand to SEQ ID NO: 2504832
uuacuucagagaaaugcag

SEQ ID NO: 2504834 - RNA, 19 nt, Artificial Sequence
  Description of Artificial Sequence: Synthetic oligonucleotide
  Sense strand starting at position 3855 of SEQ ID NO: 1888019
aaucuuggaugucauggau

SEQ ID NO: 2504835 - RNA, 19 nt, Artificial Sequence
  Description of Artificial Sequence: Synthetic oligonucleotide
  Antisense strand to SEQ ID NO: 2504834
auccaugacauccaagauu

SEQ ID NO: 2504836 - RNA, 19 nt, Artificial Sequence
  Description of Artificial Sequence: Synthetic oligonucleotide
  Sense strand starting at position 3936 of SEQ ID NO: 1888019
guaauuccuugaucauaug

SEQ ID NO: 2504837 - RNA, 19 nt, Artificial Sequence
  Description of Artificial Sequence: Synthetic oligonucleotide
  Antisense strand to SEQ ID NO: 2504836
cauaugaucaaggaauuac

SEQ ID NO: 2504838 - RNA, 19 nt, Artificial Sequence
  Description of Artificial Sequence: Synthetic oligonucleotide
  Sense strand starting at position 3943 of SEQ ID NO: 1888019
cuugaucauauguguagga

SEQ ID NO: 2504839 - RNA, 19 nt, Artificial Sequence
  Description of Artificial Sequence: Synthetic oligonucleotide
  Antisense strand to SEQ ID NO: 2504838
uccuacacauaugaucaag

SEQ ID NO: 2504840 - RNA, 19 nt, Artificial Sequence
  Description of Artificial Sequence: Synthetic oligonucleotide
  Sense strand starting at position 3947 of SEQ ID NO: 1888019
aucauauguguaggagaga

SEQ ID NO: 2504841 - RNA, 19 nt, Artificial Sequence
  Description of Artificial Sequence: Synthetic oligonucleotide
  Antisense strand to SEQ ID NO: 2504840
ucucuccuacacauaugau

SEQ ID NO: 2504842 - RNA, 19 nt, Artificial Sequence
  Description of Artificial Sequence: Synthetic oligonucleotide
  Sense strand starting at position 248 of SEQ ID NO: 1888020
uuagccuuagcuuggaauu

SEQ ID NO: 2504843 - RNA, 19 nt, Artificial Sequence
  Description of Artificial Sequence: Synthetic oligonucleotide
  Antisense strand to SEQ ID NO: 2504842
aauuccaagcuaaggcuaa

SEQ ID NO: 2504844 - RNA, 19 nt, Artificial Sequence
  Description of Artificial Sequence: Synthetic oligonucleotide
  Sense strand starting at position 285 of SEQ ID NO: 1888020
uuuccaugucaguguuauu

SEQ ID NO: 2504845 - RNA, 19 nt, Artificial Sequence
  Description of Artificial Sequence: Synthetic oligonucleotide
  Antisense strand to SEQ ID NO: 2504844
aauaacacugacauggaaa

SEQ ID NO: 2504846 - RNA, 19 nt, Artificial Sequence
  Description of Artificial Sequence: Synthetic oligonucleotide
  Sense strand starting at position 360 of SEQ ID NO: 1888020
uguuuacauaaacggagau

SEQ ID NO: 2504847 - RNA, 19 nt, Artificial Sequence
  Description of Artificial Sequence: Synthetic oligonucleotide
  Antisense strand to SEQ ID NO: 2504846
aucuccguuuauguaaaca

SEQ ID NO: 2504848 - RNA, 19 nt, Artificial Sequence
  Description of Artificial Sequence: Synthetic oligonucleotide
  Sense strand starting at position 361 of SEQ ID NO: 1888020
guuuacauaaacggagauu

SEQ ID NO: 2504849 - RNA, 19 nt, Artificial Sequence
  Description of Artificial Sequence: Synthetic oligonucleotide
  Antisense strand to SEQ ID NO: 2504848
aaucuccguuuauguaaac

SEQ ID NO: 2504850 - RNA, 19 nt, Artificial Sequence
  Description of Artificial Sequence: Synthetic oligonucleotide
  Sense strand starting at position 539 of SEQ ID NO: 1888020
ucgcucugucgcgcauauu

SEQ ID NO: 2504851 - RNA, 19 nt, Artificial Sequence
  Description of Artificial Sequence: Synthetic oligonucleotide
  Antisense strand to SEQ ID NO: 2504850
aauaugcgcgacagagcga

SEQ ID NO: 2504852 - RNA, 19 nt, Artificial Sequence
  Description of Artificial Sequence: Synthetic oligonucleotide
  Sense strand starting at position 749 of SEQ ID NO: 1888020
ccgccuugcucuuugaaag

SEQ ID NO: 2504853 - RNA, 19 nt, Artificial Sequence
  Description of Artificial Sequence: Synthetic oligonucleotide
  Antisense strand to SEQ ID NO: 2504852
cuuucaaagagcaaggcgg

SEQ ID NO: 2504854 - RNA, 19 nt, Artificial Sequence
  Description of Artificial Sequence: Synthetic oligonucleotide
  Sense strand starting at position 1234 of SEQ ID NO: 1888020
cugcacaaucugggagaua

SEQ ID NO: 2504855 - RNA, 19 nt, Artificial Sequence
  Description of Artificial Sequence: Synthetic oligonucleotide
  Antisense strand to SEQ ID NO: 2504854
uaucucccagauugugcag

SEQ ID NO: 2504856 - RNA, 19 nt, Artificial Sequence
  Description of Artificial Sequence: Synthetic oligonucleotide
  Sense strand starting at position 1245 of SEQ ID NO: 1888020
gggagauacccggagcugu

SEQ ID NO: 2504857 - RNA, 19 nt, Artificial Sequence
  Description of Artificial Sequence: Synthetic oligonucleotide
  Antisense strand to SEQ ID NO: 2504856
acagcuccggguaucuccc

SEQ ID NO: 2504858 - RNA, 19 nt, Artificial Sequence
  Description of Artificial Sequence: Synthetic oligonucleotide
  Sense strand starting at position 1853 of SEQ ID NO: 1888020
ggcuguggaucucccaaua

SEQ ID NO: 2504859 - RNA, 19 nt, Artificial Sequence
  Description of Artificial Sequence: Synthetic oligonucleotide
  Antisense strand to SEQ ID NO: 2504858
uauugggagauccacagcc

SEQ ID NO: 2504860 - RNA, 19 nt, Artificial Sequence
  Description of Artificial Sequence: Synthetic oligonucleotide
  Sense strand starting at position 1866 of SEQ ID NO: 1888020
ccaauaccugcaggucaaa

SEQ ID NO: 2504861 - RNA, 19 nt, Artificial Sequence
  Description of Artificial Sequence: Synthetic oligonucleotide
  Antisense strand to SEQ ID NO: 2504860
uuugaccugcagguauugg

SEQ ID NO: 2504862 - RNA, 19 nt, Artificial Sequence
  Description of Artificial Sequence: Synthetic oligonucleotide
  Sense strand starting at position 1900 of SEQ ID NO: 1888020
ggccucuaugagcagagaa

SEQ ID NO: 2504863 - RNA, 19 nt, Artificial Sequence
  Description of Artificial Sequence: Synthetic oligonucleotide
  Antisense strand to SEQ ID NO: 2504862
uucucugcucauagaggcc

SEQ ID NO: 2504864 - RNA, 19 nt, Artificial Sequence
  Description of Artificial Sequence: Synthetic oligonucleotide
  Sense strand starting at position 2037 of SEQ ID NO: 1888020
cagccucccugauuggauu

SEQ ID NO: 2504865 - RNA, 19 nt, Artificial Sequence
  Description of Artificial Sequence: Synthetic oligonucleotide
  Antisense strand to SEQ ID NO: 2504864
aauccaaucagggaggcug

SEQ ID NO: 2504866 - RNA, 19 nt, Artificial Sequence
  Description of Artificial Sequence: Synthetic oligonucleotide
  Sense strand starting at position 2043 of SEQ ID NO: 1888020
cccugauuggauuaugcuu

SEQ ID NO: 2504867 - RNA, 19 nt, Artificial Sequence
  Description of Artificial Sequence: Synthetic oligonucleotide
  Antisense strand to SEQ ID NO: 2504866
aagcauaauccaaucaggg

SEQ ID NO: 2504868 - RNA, 19 nt, Artificial Sequence
  Description of Artificial Sequence: Synthetic oligonucleotide
  Sense strand starting at position 2102 of SEQ ID NO: 1888020
aucagauucugggcugagu

SEQ ID NO: 2504869 - RNA, 19 nt, Artificial Sequence
  Description of Artificial Sequence: Synthetic oligonucleotide
  Antisense strand to SEQ ID NO: 2504868
acucagcccagaaucugau

SEQ ID NO: 2504870 - RNA, 19 nt, Artificial Sequence
  Description of Artificial Sequence: Synthetic oligonucleotide
  Sense strand starting at position 2104 of SEQ ID NO: 1888020
cagauucugggcugaguga

SEQ ID NO: 2504871 - RNA, 19 nt, Artificial Sequence
  Description of Artificial Sequence: Synthetic oligonucleotide
  Antisense strand to SEQ ID NO: 2504870
ucacucagcccagaaucug

SEQ ID NO: 2504872 - RNA, 19 nt, Artificial Sequence
  Description of Artificial Sequence: Synthetic oligonucleotide
  Sense strand starting at position 2105 of SEQ ID NO: 1888020
agauucugggcugagugaa

SEQ ID NO: 2504873 - RNA, 19 nt, Artificial Sequence
  Description of Artificial Sequence: Synthetic oligonucleotide
  Antisense strand to SEQ ID NO: 2504872
uucacucagcccagaaucu

SEQ ID NO: 2504874 - RNA, 19 nt, Artificial Sequence
  Description of Artificial Sequence: Synthetic oligonucleotide
  Sense strand starting at position 2198 of SEQ ID NO: 1888020
gggaacaauucuguaucuu

SEQ ID NO: 2504875 - RNA, 19 nt, Artificial Sequence
  Description of Artificial Sequence: Synthetic oligonucleotide
  Antisense strand to SEQ ID NO: 2504874
aagauacagaauuguuccc

SEQ ID NO: 2504876 - RNA, 19 nt, Artificial Sequence
  Description of Artificial Sequence: Synthetic oligonucleotide
  Sense strand starting at position 2199 of SEQ ID NO: 1888020
ggaacaauucuguaucuuu

SEQ ID NO: 2504877 - RNA, 19 nt, Artificial Sequence
  Description of Artificial Sequence: Synthetic oligonucleotide
  Antisense strand to SEQ ID NO: 2504876
aaagauacagaauuguucc

SEQ ID NO: 2504878 - RNA, 19 nt, Artificial Sequence
  Description of Artificial Sequence: Synthetic oligonucleotide
  Sense strand starting at position 2247 of SEQ ID NO: 1888020
aaaggugagcaggaguauu

SEQ ID NO: 2504879 - RNA, 19 nt, Artificial Sequence
  Description of Artificial Sequence: Synthetic oligonucleotide
  Antisense strand to SEQ ID NO: 2504878
aauacuccugcucaccuuu

SEQ ID NO: 2504880 - RNA, 19 nt, Artificial Sequence
  Description of Artificial Sequence: Synthetic oligonucleotide
  Sense strand starting at position 2401 of SEQ ID NO: 1888020
ucucgagauuuacacauau

SEQ ID NO: 2504881 - RNA, 19 nt, Artificial Sequence
  Description of Artificial Sequence: Synthetic oligonucleotide
  Antisense strand to SEQ ID NO: 2504880
auauguguaaaucucgaga

SEQ ID NO: 2504882 - RNA, 19 nt, Artificial Sequence
  Description of Artificial Sequence: Synthetic oligonucleotide
  Sense strand starting at position 2512 of SEQ ID NO: 1888020
caaauuguuguaggagaua

SEQ ID NO: 2504883 - RNA, 19 nt, Artificial Sequence
  Description of Artificial Sequence: Synthetic oligonucleotide
  Antisense strand to SEQ ID NO: 2504882
uaucuccuacaacaauuug

SEQ ID NO: 2504884 - RNA, 19 nt, Artificial Sequence
  Description of Artificial Sequence: Synthetic oligonucleotide
  Sense strand starting at position 2800 of SEQ ID NO: 1888020
uugguuuagacagagcuga

SEQ ID NO: 2504885 - RNA, 19 nt, Artificial Sequence
  Description of Artificial Sequence: Synthetic oligonucleotide
  Antisense strand to SEQ ID NO: 2504884
ucagcucugucuaaaccaa

SEQ ID NO: 2504886 - RNA, 19 nt, Artificial Sequence
  Description of Artificial Sequence: Synthetic oligonucleotide
  Sense strand starting at position 2851 of SEQ ID NO: 1888020
ccuauuaauuaagacagga

SEQ ID NO: 2504887 - RNA, 19 nt, Artificial Sequence
  Description of Artificial Sequence: Synthetic oligonucleotide
  Antisense strand to SEQ ID NO: 2504886
uccugucuuaauuaauagg

SEQ ID NO: 2504888 - RNA, 19 nt, Artificial Sequence
  Description of Artificial Sequence: Synthetic oligonucleotide
  Sense strand starting at position 2866 of SEQ ID NO: 1888020
aggagaauuuguggaggaa

SEQ ID NO: 2504889 - RNA, 19 nt, Artificial Sequence
  Description of Artificial Sequence: Synthetic oligonucleotide
  Antisense strand to SEQ ID NO: 2504888
uuccuccacaaauucuccu

SEQ ID NO: 2504890 - RNA, 19 nt, Artificial Sequence
  Description of Artificial Sequence: Synthetic oligonucleotide
  Sense strand starting at position 2925 of SEQ ID NO: 1888020
agacaauggucacuaaguc

SEQ ID NO: 2504891 - RNA, 19 nt, Artificial Sequence
  Description of Artificial Sequence: Synthetic oligonucleotide
  Antisense strand to SEQ ID NO: 2504890
gacuuagugaccauugucu

SEQ ID NO: 2504892 - RNA, 19 nt, Artificial Sequence
  Description of Artificial Sequence: Synthetic oligonucleotide
  Sense strand starting at position 2972 of SEQ ID NO: 1888020
gcauuuauccagugcugua

SEQ ID NO: 2504893 - RNA, 19 nt, Artificial Sequence
  Description of Artificial Sequence: Synthetic oligonucleotide
  Antisense strand to SEQ ID NO: 2504892
uacagcacuggauaaaugc

SEQ ID NO: 2504894 - RNA, 19 nt, Artificial Sequence
  Description of Artificial Sequence: Synthetic oligonucleotide
  Sense strand starting at position 2981 of SEQ ID NO: 1888020
cagugcuguauuggagaaa

SEQ ID NO: 2504895 - RNA, 19 nt, Artificial Sequence
  Description of Artificial Sequence: Synthetic oligonucleotide
  Antisense strand to SEQ ID NO: 2504894
uuucuccaauacagcacug

SEQ ID NO: 2504896 - RNA, 19 nt, Artificial Sequence
  Description of Artificial Sequence: Synthetic oligonucleotide
  Sense strand starting at position 2984 of SEQ ID NO: 1888020
ugcuguauuggagaaaucu

SEQ ID NO: 2504897 - RNA, 19 nt, Artificial Sequence
  Description of Artificial Sequence: Synthetic oligonucleotide
  Antisense strand to SEQ ID NO: 2504896
agauuucuccaauacagca

SEQ ID NO: 2504898 - RNA, 19 nt, Artificial Sequence
  Description of Artificial Sequence: Synthetic oligonucleotide
  Sense strand starting at position 3102 of SEQ ID NO: 1888020
cugucauaacugggccuua

SEQ ID NO: 2504899 - RNA, 19 nt, Artificial Sequence
  Description of Artificial Sequence: Synthetic oligonucleotide
  Antisense strand to SEQ ID NO: 2504898
uaaggcccaguuaugacag

SEQ ID NO: 2504900 - RNA, 19 nt, Artificial Sequence
  Description of Artificial Sequence: Synthetic oligonucleotide
  Sense strand starting at position 3103 of SEQ ID NO: 1888020
ugucauaacugggccuuau

SEQ ID NO: 2504901 - RNA, 19 nt, Artificial Sequence
  Description of Artificial Sequence: Synthetic oligonucleotide
  Antisense strand to SEQ ID NO: 2504900
auaaggcccaguuaugaca

SEQ ID NO: 2504902 - RNA, 19 nt, Artificial Sequence
  Description of Artificial Sequence: Synthetic oligonucleotide
  Sense strand starting at position 3341 of SEQ ID NO: 1888020
ugagcaaucaaggguuaca

SEQ ID NO: 2504903 - RNA, 19 nt, Artificial Sequence
  Description of Artificial Sequence: Synthetic oligonucleotide
  Antisense strand to SEQ ID NO: 2504902
uguaacccuugauugcuca

SEQ ID NO: 2504904 - RNA, 19 nt, Artificial Sequence
  Description of Artificial Sequence: Synthetic oligonucleotide
  Sense strand starting at position 3435 of SEQ ID NO: 1888020
augucuggaaucuacgaau

SEQ ID NO: 2504905 - RNA, 19 nt, Artificial Sequence
  Description of Artificial Sequence: Synthetic oligonucleotide
  Antisense strand to SEQ ID NO: 2504904
auucguagauuccagacau

SEQ ID NO: 2504906 - RNA, 19 nt, Artificial Sequence
  Description of Artificial Sequence: Synthetic oligonucleotide
  Sense strand starting at position 3438 of SEQ ID NO: 1888020
ucuggaaucuacgaauaaa

SEQ ID NO: 2504907 - RNA, 19 nt, Artificial Sequence
  Description of Artificial Sequence: Synthetic oligonucleotide
  Antisense strand to SEQ ID NO: 2504906
uuuauucguagauuccaga

SEQ ID NO: 2504908 - RNA, 19 nt, Artificial Sequence
  Description of Artificial Sequence: Synthetic oligonucleotide
  Sense strand starting at position 3700 of SEQ ID NO: 1888020
gauagugauuuauacagua

SEQ ID NO: 2504909 - RNA, 19 nt, Artificial Sequence
  Description of Artificial Sequence: Synthetic oligonucleotide
  Antisense strand to SEQ ID NO: 2504908
uacuguauaaaucacuauc

SEQ ID NO: 2504910 - RNA, 19 nt, Artificial Sequence
  Description of Artificial Sequence: Synthetic oligonucleotide
  Sense strand starting at position 3717 of SEQ ID NO: 1888020
uaugcuugugcugaaguau

SEQ ID NO: 2504911 - RNA, 19 nt, Artificial Sequence
  Description of Artificial Sequence: Synthetic oligonucleotide
  Antisense strand to SEQ ID NO: 2504910
auacuucagcacaagcaua

SEQ ID NO: 2504912 - RNA, 19 nt, Artificial Sequence
  Description of Artificial Sequence: Synthetic oligonucleotide
  Sense strand starting at position 3971 of SEQ ID NO: 1888020
cccugaucaucugugugua

SEQ ID NO: 2504913 - RNA, 19 nt, Artificial Sequence
  Description of Artificial Sequence: Synthetic oligonucleotide
  Antisense strand to SEQ ID NO: 2504912
uacacacagaugaucaggg

SEQ ID NO: 2504914 - RNA, 19 nt, Artificial Sequence
  Description of Artificial Sequence: Synthetic oligonucleotide
  Sense strand starting at position 3973 of SEQ ID NO: 1888020
cugaucaucuguguguaga

SEQ ID NO: 2504915 - RNA, 19 nt, Artificial Sequence
  Description of Artificial Sequence: Synthetic oligonucleotide
  Antisense strand to SEQ ID NO: 2504914
ucuacacacagaugaucag

SEQ ID NO: 2504916 - RNA, 19 nt, Artificial Sequence
  Description of Artificial Sequence: Synthetic oligonucleotide
  Sense strand starting at position 3974 of SEQ ID NO: 1888020
ugaucaucuguguguagac

SEQ ID NO: 2504917 - RNA, 19 nt, Artificial Sequence
  Description of Artificial Sequence: Synthetic oligonucleotide
  Antisense strand to SEQ ID NO: 2504916
gucuacacacagaugauca

SEQ ID NO: 2504918 - RNA, 19 nt, Artificial Sequence
  Description of Artificial Sequence: Synthetic oligonucleotide
  Sense strand starting at position 3975 of SEQ ID NO: 1888020
gaucaucuguguguagaca

SEQ ID NO: 2504919 - RNA, 19 nt, Artificial Sequence
  Description of Artificial Sequence: Synthetic oligonucleotide
  Antisense strand to SEQ ID NO: 2504918
ugucuacacacagaugauc

SEQ ID NO: 2504920 - RNA, 19 nt, Artificial Sequence
  Description of Artificial Sequence: Synthetic oligonucleotide
  Sense strand starting at position 3976 of SEQ ID NO: 1888020
aucaucuguguguagacaa

SEQ ID NO: 2504921 - RNA, 19 nt, Artificial Sequence
  Description of Artificial Sequence: Synthetic oligonucleotide
  Antisense strand to SEQ ID NO: 2504920
uugucuacacacagaugau

SEQ ID NO: 2504922 - RNA, 19 nt, Artificial Sequence
  Description of Artificial Sequence: Synthetic oligonucleotide
  Sense strand starting at position 189 of SEQ ID NO: 1888021
acucaagugucugacucaa

SEQ ID NO: 2504923 - RNA, 19 nt, Artificial Sequence
  Description of Artificial Sequence: Synthetic oligonucleotide
  Antisense strand to SEQ ID NO: 2504922
uugagucagacacuugagu

SEQ ID NO: 2504924 - RNA, 19 nt, Artificial Sequence
  Description of Artificial Sequence: Synthetic oligonucleotide
  Sense strand starting at position 191 of SEQ ID NO: 1888021
ucaagugucugacucaagu

SEQ ID NO: 2504925 - RNA, 19 nt, Artificial Sequence
  Description of Artificial Sequence: Synthetic oligonucleotide
  Antisense strand to SEQ ID NO: 2504924
acuugagucagacacuuga

SEQ ID NO: 2504926 - RNA, 19 nt, Artificial Sequence
  Description of Artificial Sequence: Synthetic oligonucleotide
  Sense strand starting at position 223 of SEQ ID NO: 1888021
auccuaucacuugggacau

SEQ ID NO: 2504927 - RNA, 19 nt, Artificial Sequence
  Description of Artificial Sequence: Synthetic oligonucleotide
  Antisense strand to SEQ ID NO: 2504926
augucccaagugauaggau

SEQ ID NO: 2504928 - RNA, 19 nt, Artificial Sequence
  Description of Artificial Sequence: Synthetic oligonucleotide
  Sense strand starting at position 355 of SEQ ID NO: 1888021
ucacuagacugagagaauc

SEQ ID NO: 2504929 - RNA, 19 nt, Artificial Sequence
  Description of Artificial Sequence: Synthetic oligonucleotide
  Antisense strand to SEQ ID NO: 2504928
gauucucucagucuaguga

SEQ ID NO: 2504930 - RNA, 19 nt, Artificial Sequence
  Description of Artificial Sequence: Synthetic oligonucleotide
  Sense strand starting at position 684 of SEQ ID NO: 1888021
uuugguuuccuccauacca

SEQ ID NO: 2504931 - RNA, 19 nt, Artificial Sequence
  Description of Artificial Sequence: Synthetic oligonucleotide
  Antisense strand to SEQ ID NO: 2504930
ugguauggaggaaaccaaa

SEQ ID NO: 2504932 - RNA, 19 nt, Artificial Sequence
  Description of Artificial Sequence: Synthetic oligonucleotide
  Sense strand starting at position 686 of SEQ ID NO: 1888021
ugguuuccuccauaccaga

SEQ ID NO: 2504933 - RNA, 19 nt, Artificial Sequence
  Description of Artificial Sequence: Synthetic oligonucleotide
  Antisense strand to SEQ ID NO: 2504932
ucugguauggaggaaacca

SEQ ID NO: 2504934 - RNA, 19 nt, Artificial Sequence
  Description of Artificial Sequence: Synthetic oligonucleotide
  Sense strand starting at position 903 of SEQ ID NO: 1888021
acuagacuuucccaagaga

SEQ ID NO: 2504935 - RNA, 19 nt, Artificial Sequence
  Description of Artificial Sequence: Synthetic oligonucleotide
  Antisense strand to SEQ ID NO: 2504934
ucucuugggaaagucuagu

SEQ ID NO: 2504936 - RNA, 19 nt, Artificial Sequence
  Description of Artificial Sequence: Synthetic oligonucleotide
  Sense strand starting at position 999 of SEQ ID NO: 1888021
gaggucgcaucacuguaaa

SEQ ID NO: 2504937 - RNA, 19 nt, Artificial Sequence
  Description of Artificial Sequence: Synthetic oligonucleotide
  Antisense strand to SEQ ID NO: 2504936
uuuacagugaugcgaccuc

SEQ ID NO: 2504938 - RNA, 19 nt, Artificial Sequence
  Description of Artificial Sequence: Synthetic oligonucleotide
  Sense strand starting at position 1002 of SEQ ID NO: 1888021
gucgcaucacuguaaaguu

SEQ ID NO: 2504939 - RNA, 19 nt, Artificial Sequence
  Description of Artificial Sequence: Synthetic oligonucleotide
  Antisense strand to SEQ ID NO: 2504938
aacuuuacagugaugcgac

SEQ ID NO: 2504940 - RNA, 19 nt, Artificial Sequence
  Description of Artificial Sequence: Synthetic oligonucleotide
  Sense strand starting at position 1201 of SEQ ID NO: 1888021
aaauacugccuguguuuga

SEQ ID NO: 2504941 - RNA, 19 nt, Artificial Sequence
  Description of Artificial Sequence: Synthetic oligonucleotide
  Antisense strand to SEQ ID NO: 2504940
ucaaacacaggcaguauuu

SEQ ID NO: 2504942 - RNA, 19 nt, Artificial Sequence
  Description of Artificial Sequence: Synthetic oligonucleotide
  Sense strand starting at position 1202 of SEQ ID NO: 1888021
aauacugccuguguuugaa

SEQ ID NO: 2504943 - RNA, 19 nt, Artificial Sequence
  Description of Artificial Sequence: Synthetic oligonucleotide
  Antisense strand to SEQ ID NO: 2504942
uucaaacacaggcaguauu

SEQ ID NO: 2504944 - RNA, 19 nt, Artificial Sequence
  Description of Artificial Sequence: Synthetic oligonucleotide
  Sense strand starting at position 1205 of SEQ ID NO: 1888021
acugccuguguuugaaaca

SEQ ID NO: 2504945 - RNA, 19 nt, Artificial Sequence
  Description of Artificial Sequence: Synthetic oligonucleotide
  Antisense strand to SEQ ID NO: 2504944
uguuucaaacacaggcagu

SEQ ID NO: 2504946 - RNA, 19 nt, Artificial Sequence
  Description of Artificial Sequence: Synthetic oligonucleotide
  Sense strand starting at position 1241 of SEQ ID NO: 1888021
aagugauacuguugugaac

SEQ ID NO: 2504947 - RNA, 19 nt, Artificial Sequence
  Description of Artificial Sequence: Synthetic oligonucleotide
  Antisense strand to SEQ ID NO: 2504946
guucacaacaguaucacuu

SEQ ID NO: 2504948 - RNA, 19 nt, Artificial Sequence
  Description of Artificial Sequence: Synthetic oligonucleotide
  Sense strand starting at position 1244 of SEQ ID NO: 1888021
ugauacuguugugaacuaa

SEQ ID NO: 2504949 - RNA, 19 nt, Artificial Sequence
  Description of Artificial Sequence: Synthetic oligonucleotide
  Antisense strand to SEQ ID NO: 2504948
uuaguucacaacaguauca

SEQ ID NO: 2504950 - RNA, 19 nt, Artificial Sequence
  Description of Artificial Sequence: Synthetic oligonucleotide
  Sense strand starting at position 1261 of SEQ ID NO: 1888021
aaaggaaauccguguuaua

SEQ ID NO: 2504951 - RNA, 19 nt, Artificial Sequence
  Description of Artificial Sequence: Synthetic oligonucleotide
  Antisense strand to SEQ ID NO: 2504950
uauaacacggauuuccuuu

SEQ ID NO: 2504952 - RNA, 19 nt, Artificial Sequence
  Description of Artificial Sequence: Synthetic oligonucleotide
  Sense strand starting at position 1365 of SEQ ID NO: 1888021
cccugcuucgcguauauuu

SEQ ID NO: 2504953 - RNA, 19 nt, Artificial Sequence
  Description of Artificial Sequence: Synthetic oligonucleotide
  Antisense strand to SEQ ID NO: 2504952
aaauauacgcgaagcaggg

SEQ ID NO: 2504954 - RNA, 19 nt, Artificial Sequence
  Description of Artificial Sequence: Synthetic oligonucleotide
  Sense strand starting at position 1373 of SEQ ID NO: 1888021
cgcguauauuugggaaacu

SEQ ID NO: 2504955 - RNA, 19 nt, Artificial Sequence
  Description of Artificial Sequence: Synthetic oligonucleotide
  Antisense strand to SEQ ID NO: 2504954
aguuucccaaauauacgcg

SEQ ID NO: 2504956 - RNA, 19 nt, Artificial Sequence
  Description of Artificial Sequence: Synthetic oligonucleotide
  Sense strand starting at position 1374 of SEQ ID NO: 1888021
gcguauauuugggaaacuc

SEQ ID NO: 2504957 - RNA, 19 nt, Artificial Sequence
  Description of Artificial Sequence: Synthetic oligonucleotide
  Antisense strand to SEQ ID NO: 2504956
gaguuucccaaauauacgc

SEQ ID NO: 2504958 - RNA, 19 nt, Artificial Sequence
  Description of Artificial Sequence: Synthetic oligonucleotide
  Sense strand starting at position 1469 of SEQ ID NO: 1888021
ccauacucgaggcaggauu

SEQ ID NO: 2504959 - RNA, 19 nt, Artificial Sequence
  Description of Artificial Sequence: Synthetic oligonucleotide
  Antisense strand to SEQ ID NO: 2504958
aauccugccucgaguaugg

SEQ ID NO: 2504960 - RNA, 19 nt, Artificial Sequence
  Description of Artificial Sequence: Synthetic oligonucleotide
  Sense strand starting at position 2195 of SEQ ID NO: 1888021
agcagaauuuccugacuga

SEQ ID NO: 2504961 - RNA, 19 nt, Artificial Sequence
  Description of Artificial Sequence: Synthetic oligonucleotide
  Antisense strand to SEQ ID NO: 2504960
ucagucaggaaauucugcu

SEQ ID NO: 2504962 - RNA, 19 nt, Artificial Sequence
  Description of Artificial Sequence: Synthetic oligonucleotide
  Sense strand starting at position 2205 of SEQ ID NO: 1888021
ccugacugauuguacuaau

SEQ ID NO: 2504963 - RNA, 19 nt, Artificial Sequence
  Description of Artificial Sequence: Synthetic oligonucleotide
  Antisense strand to SEQ ID NO: 2504962
auuaguacaaucagucagg

SEQ ID NO: 2504964 - RNA, 19 nt, Artificial Sequence
  Description of Artificial Sequence: Synthetic oligonucleotide
  Sense strand starting at position 2254 of SEQ ID NO: 1888021
caaucacaagugugugcua

SEQ ID NO: 2504965 - RNA, 19 nt, Artificial Sequence
  Description of Artificial Sequence: Synthetic oligonucleotide
  Antisense strand to SEQ ID NO: 2504964
uagcacacacuugugauug

SEQ ID NO: 2504966 - RNA, 19 nt, Artificial Sequence
  Description of Artificial Sequence: Synthetic oligonucleotide
  Sense strand starting at position 2259 of SEQ ID NO: 1888021
acaagugugugcuaggaau

SEQ ID NO: 2504967 - RNA, 19 nt, Artificial Sequence
  Description of Artificial Sequence: Synthetic oligonucleotide
  Antisense strand to SEQ ID NO: 2504966
auuccuagcacacacuugu

SEQ ID NO: 2504968 - RNA, 19 nt, Artificial Sequence
  Description of Artificial Sequence: Synthetic oligonucleotide
  Sense strand starting at position 2331 of SEQ ID NO: 1888021
cucuguccuccaggaauca

SEQ ID NO: 2504969 - RNA, 19 nt, Artificial Sequence
  Description of Artificial Sequence: Synthetic oligonucleotide
  Antisense strand to SEQ ID NO: 2504968
ugauuccuggaggacagag

SEQ ID NO: 2504970 - RNA, 19 nt, Artificial Sequence
  Description of Artificial Sequence: Synthetic oligonucleotide
  Sense strand starting at position 2435 of SEQ ID NO: 1888021
acacaucgauaacaggaua

SEQ ID NO: 2504971 - RNA, 19 nt, Artificial Sequence
  Description of Artificial Sequence: Synthetic oligonucleotide
  Antisense strand to SEQ ID NO: 2504970
uauccuguuaucgaugugu

SEQ ID NO: 2504972 - RNA, 19 nt, Artificial Sequence
  Description of Artificial Sequence: Synthetic oligonucleotide
  Sense strand starting at position 2479 of SEQ ID NO: 1888021
ggacuuauaugacagcaau

SEQ ID NO: 2504973 - RNA, 19 nt, Artificial Sequence
  Description of Artificial Sequence: Synthetic oligonucleotide
  Antisense strand to SEQ ID NO: 2504972
auugcugucauauaagucc

SEQ ID NO: 2504974 - RNA, 19 nt, Artificial Sequence
  Description of Artificial Sequence: Synthetic oligonucleotide
  Sense strand starting at position 2729 of SEQ ID NO: 1888021
cgagacaaaccuugccaau

SEQ ID NO: 2504975 - RNA, 19 nt, Artificial Sequence
  Description of Artificial Sequence: Synthetic oligonucleotide
  Antisense strand to SEQ ID NO: 2504974
auuggcaagguuugucucg

SEQ ID NO: 2504976 - RNA, 19 nt, Artificial Sequence
  Description of Artificial Sequence: Synthetic oligonucleotide
  Sense strand starting at position 3038 of SEQ ID NO: 1888021
aggauucagcucugggagu

SEQ ID NO: 2504977 - RNA, 19 nt, Artificial Sequence
  Description of Artificial Sequence: Synthetic oligonucleotide
  Antisense strand to SEQ ID NO: 2504976
acucccagagcugaauccu

SEQ ID NO: 2504978 - RNA, 19 nt, Artificial Sequence
  Description of Artificial Sequence: Synthetic oligonucleotide
  Sense strand starting at position 3198 of SEQ ID NO: 1888021
agcuauuagucauacagaa

SEQ ID NO: 2504979 - RNA, 19 nt, Artificial Sequence
  Description of Artificial Sequence: Synthetic oligonucleotide
  Antisense strand to SEQ ID NO: 2504978
uucuguaugacuaauagcu

SEQ ID NO: 2504980 - RNA, 19 nt, Artificial Sequence
  Description of Artificial Sequence: Synthetic oligonucleotide
  Sense strand starting at position 3219 of SEQ ID NO: 1888021
cgaauaguacaauggcaga

SEQ ID NO: 2504981 - RNA, 19 nt, Artificial Sequence
  Description of Artificial Sequence: Synthetic oligonucleotide
  Antisense strand to SEQ ID NO: 2504980
ucugccauuguacuauucg

SEQ ID NO: 2504982 - RNA, 19 nt, Artificial Sequence
  Description of Artificial Sequence: Synthetic oligonucleotide
  Sense strand starting at position 3234 of SEQ ID NO: 1888021
cagacauaaugccuucguu

SEQ ID NO: 2504983 - RNA, 19 nt, Artificial Sequence
  Description of Artificial Sequence: Synthetic oligonucleotide
  Antisense strand to SEQ ID NO: 2504982
aacgaaggcauuaugucug

SEQ ID NO: 2504984 - RNA, 19 nt, Artificial Sequence
  Description of Artificial Sequence: Synthetic oligonucleotide
  Sense strand starting at position 3237 of SEQ ID NO: 1888021
acauaaugccuucguuauc

SEQ ID NO: 2504985 - RNA, 19 nt, Artificial Sequence
  Description of Artificial Sequence: Synthetic oligonucleotide
  Antisense strand to SEQ ID NO: 2504984
gauaacgaaggcauuaugu

SEQ ID NO: 2504986 - RNA, 19 nt, Artificial Sequence
  Description of Artificial Sequence: Synthetic oligonucleotide
  Sense strand starting at position 3242 of SEQ ID NO: 1888021
augccuucguuaucgguaa

SEQ ID NO: 2504987 - RNA, 19 nt, Artificial Sequence
  Description of Artificial Sequence: Synthetic oligonucleotide
  Antisense strand to SEQ ID NO: 2504986
uuaccgauaacgaaggcau

SEQ ID NO: 2504988 - RNA, 19 nt, Artificial Sequence
  Description of Artificial Sequence: Synthetic oligonucleotide
  Sense strand starting at position 3244 of SEQ ID NO: 1888021
gccuucguuaucgguaauu

SEQ ID NO: 2504989 - RNA, 19 nt, Artificial Sequence
  Description of Artificial Sequence: Synthetic oligonucleotide
  Antisense strand to SEQ ID NO: 2504988
aauuaccgauaacgaaggc

SEQ ID NO: 2504990 - RNA, 19 nt, Artificial Sequence
  Description of Artificial Sequence: Synthetic oligonucleotide
  Sense strand starting at position 3246 of SEQ ID NO: 1888021
cuucguuaucgguaauuaa

SEQ ID NO: 2504991 - RNA, 19 nt, Artificial Sequence
  Description of Artificial Sequence: Synthetic oligonucleotide
  Antisense strand to SEQ ID NO: 2504990
uuaauuaccgauaacgaag

SEQ ID NO: 2504992 - RNA, 19 nt, Artificial Sequence
  Description of Artificial Sequence: Synthetic oligonucleotide
  Sense strand starting at position 3249 of SEQ ID NO: 1888021
cguuaucgguaauuaaaug

SEQ ID NO: 2504993 - RNA, 19 nt, Artificial Sequence
  Description of Artificial Sequence: Synthetic oligonucleotide
  Antisense strand to SEQ ID NO: 2504992
cauuuaauuaccgauaacg

SEQ ID NO: 2504994 - RNA, 19 nt, Artificial Sequence
  Description of Artificial Sequence: Synthetic oligonucleotide
  Sense strand starting at position 3254 of SEQ ID NO: 1888021
ucgguaauuaaauggaaua

SEQ ID NO: 2504995 - RNA, 19 nt, Artificial Sequence
  Description of Artificial Sequence: Synthetic oligonucleotide
  Antisense strand to SEQ ID NO: 2504994
uauuccauuuaauuaccga

SEQ ID NO: 2504996 - RNA, 19 nt, Artificial Sequence
  Description of Artificial Sequence: Synthetic oligonucleotide
  Sense strand starting at position 3366 of SEQ ID NO: 1888021
auacccaagucaguugaaa

SEQ ID NO: 2504997 - RNA, 19 nt, Artificial Sequence
  Description of Artificial Sequence: Synthetic oligonucleotide
  Antisense strand to SEQ ID NO: 2504996
uuucaacugacuuggguau

SEQ ID NO: 2504998 - RNA, 19 nt, Artificial Sequence
  Description of Artificial Sequence: Synthetic oligonucleotide
  Sense strand starting at position 3407 of SEQ ID NO: 1888021
ccaugcaaauaguaaugua

SEQ ID NO: 2504999 - RNA, 19 nt, Artificial Sequence
  Description of Artificial Sequence: Synthetic oligonucleotide
  Antisense strand to SEQ ID NO: 2504998
uacauuacuauuugcaugg

SEQ ID NO: 2505000 - RNA, 19 nt, Artificial Sequence
  Description of Artificial Sequence: Synthetic oligonucleotide
  Sense strand starting at position 3511 of SEQ ID NO: 1888021
aggcucaaaucauacagaa

SEQ ID NO: 2505001 - RNA, 19 nt, Artificial Sequence
  Description of Artificial Sequence: Synthetic oligonucleotide
  Antisense strand to SEQ ID NO: 2505000
uucuguaugauuugagccu

SEQ ID NO: 2505002 - RNA, 19 nt, Artificial Sequence
  Description of Artificial Sequence: Synthetic oligonucleotide
  Sense strand starting at position 8 of SEQ ID NO: 1888022
guuugugguaguguguuau

SEQ ID NO: 2505003 - RNA, 19 nt, Artificial Sequence
  Description of Artificial Sequence: Synthetic oligonucleotide
  Antisense strand to SEQ ID NO: 2505002
auaacacacuaccacaaac

SEQ ID NO: 2505004 - RNA, 19 nt, Artificial Sequence
  Description of Artificial Sequence: Synthetic oligonucleotide
  Sense strand starting at position 40 of SEQ ID NO: 1888022
acuaauagagacuggucua

SEQ ID NO: 2505005 - RNA, 19 nt, Artificial Sequence
  Description of Artificial Sequence: Synthetic oligonucleotide
  Antisense strand to SEQ ID NO: 2505004
uagaccagucucuauuagu

SEQ ID NO: 2505006 - RNA, 19 nt, Artificial Sequence
  Description of Artificial Sequence: Synthetic oligonucleotide
  Sense strand starting at position 43 of SEQ ID NO: 1888022
aauagagacuggucuagca

SEQ ID NO: 2505007 - RNA, 19 nt, Artificial Sequence
  Description of Artificial Sequence: Synthetic oligonucleotide
  Antisense strand to SEQ ID NO: 2505006
ugcuagaccagucucuauu

SEQ ID NO: 2505008 - RNA, 19 nt, Artificial Sequence
  Description of Artificial Sequence: Synthetic oligonucleotide
  Sense strand starting at position 125 of SEQ ID NO: 1888022
acugcuuagugucugaaca

SEQ ID NO: 2505009 - RNA, 19 nt, Artificial Sequence
  Description of Artificial Sequence: Synthetic oligonucleotide
  Antisense strand to SEQ ID NO: 2505008
uguucagacacuaagcagu

SEQ ID NO: 2505010 - RNA, 19 nt, Artificial Sequence
  Description of Artificial Sequence: Synthetic oligonucleotide
  Sense strand starting at position 127 of SEQ ID NO: 1888022
ugcuuagugucugaacaga

SEQ ID NO: 2505011 - RNA, 19 nt, Artificial Sequence
  Description of Artificial Sequence: Synthetic oligonucleotide
  Antisense strand to SEQ ID NO: 2505010
ucuguucagacacuaagca

SEQ ID NO: 2505012 - RNA, 19 nt, Artificial Sequence
  Description of Artificial Sequence: Synthetic oligonucleotide
  Sense strand starting at position 158 of SEQ ID NO: 1888022
cuggguuguccugaagaac

SEQ ID NO: 2505013 - RNA, 19 nt, Artificial Sequence
  Description of Artificial Sequence: Synthetic oligonucleotide
  Antisense strand to SEQ ID NO: 2505012
guucuucaggacaacccag

SEQ ID NO: 2505014 - RNA, 19 nt, Artificial Sequence
  Description of Artificial Sequence: Synthetic oligonucleotide
  Sense strand starting at position 253 of SEQ ID NO: 1888022
cuaacagcaucuucggauu

SEQ ID NO: 2505015 - RNA, 19 nt, Artificial Sequence
  Description of Artificial Sequence: Synthetic oligonucleotide
  Antisense strand to SEQ ID NO: 2505014
aauccgaagaugcuguuag

SEQ ID NO: 2505016 - RNA, 19 nt, Artificial Sequence
  Description of Artificial Sequence: Synthetic oligonucleotide
  Sense strand starting at position 373 of SEQ ID NO: 1888022
gucucuucgucuccuugau

SEQ ID NO: 2505017 - RNA, 19 nt, Artificial Sequence
  Description of Artificial Sequence: Synthetic oligonucleotide
  Antisense strand to SEQ ID NO: 2505016
aucaaggagacgaagagac

SEQ ID NO: 2505018 - RNA, 19 nt, Artificial Sequence
  Description of Artificial Sequence: Synthetic oligonucleotide
  Sense strand starting at position 401 of SEQ ID NO: 1888022
ggaugcacuguccaacuau

SEQ ID NO: 2505019 - RNA, 19 nt, Artificial Sequence
  Description of Artificial Sequence: Synthetic oligonucleotide
  Antisense strand to SEQ ID NO: 2505018
auaguuggacagugcaucc

SEQ ID NO: 2505020 - RNA, 19 nt, Artificial Sequence
  Description of Artificial Sequence: Synthetic oligonucleotide
  Sense strand starting at position 807 of SEQ ID NO: 1888022
agagaaugugcagggaagu

SEQ ID NO: 2505021 - RNA, 19 nt, Artificial Sequence
  Description of Artificial Sequence: Synthetic oligonucleotide
  Antisense strand to SEQ ID NO: 2505020
acuucccugcacauucucu

SEQ ID NO: 2505022 - RNA, 19 nt, Artificial Sequence
  Description of Artificial Sequence: Synthetic oligonucleotide
  Sense strand starting at position 1004 of SEQ ID NO: 1888022
acagaaugugcagggaagu

SEQ ID NO: 2505023 - RNA, 19 nt, Artificial Sequence
  Description of Artificial Sequence: Synthetic oligonucleotide
  Antisense strand to SEQ ID NO: 2505022
acuucccugcacauucugu

SEQ ID NO: 2505024 - RNA, 19 nt, Artificial Sequence
  Description of Artificial Sequence: Synthetic oligonucleotide
  Sense strand starting at position 1210 of SEQ ID NO: 1888022
gaagaaauguccucugagu

SEQ ID NO: 2505025 - RNA, 19 nt, Artificial Sequence
  Description of Artificial Sequence: Synthetic oligonucleotide
  Antisense strand to SEQ ID NO: 2505024
acucagaggacauuucuuc

SEQ ID NO: 2505026 - RNA, 19 nt, Artificial Sequence
  Description of Artificial Sequence: Synthetic oligonucleotide
  Sense strand starting at position 1212 of SEQ ID NO: 1888022
agaaauguccucugagugc

SEQ ID NO: 2505027 - RNA, 19 nt, Artificial Sequence
  Description of Artificial Sequence: Synthetic oligonucleotide
  Antisense strand to SEQ ID NO: 2505026
gcacucagaggacauuucu

SEQ ID NO: 2505028 - RNA, 19 nt, Artificial Sequence
  Description of Artificial Sequence: Synthetic oligonucleotide
  Sense strand starting at position 1336 of SEQ ID NO: 1888022
gcugcauccugcucuaaua

SEQ ID NO: 2505029 - RNA, 19 nt, Artificial Sequence
  Description of Artificial Sequence: Synthetic oligonucleotide
  Antisense strand to SEQ ID NO: 2505028
uauuagagcaggaugcagc

SEQ ID NO: 2505030 - RNA, 19 nt, Artificial Sequence
  Description of Artificial Sequence: Synthetic oligonucleotide
  Sense strand starting at position 1338 of SEQ ID NO: 1888022
ugcauccugcucuaauagu

SEQ ID NO: 2505031 - RNA, 19 nt, Artificial Sequence
  Description of Artificial Sequence: Synthetic oligonucleotide
  Antisense strand to SEQ ID NO: 2505030
acuauuagagcaggaugca

SEQ ID NO: 2505032 - RNA, 19 nt, Artificial Sequence
  Description of Artificial Sequence: Synthetic oligonucleotide
  Sense strand starting at position 1345 of SEQ ID NO: 1888022
ugcucuaauagugagugaa

SEQ ID NO: 2505033 - RNA, 19 nt, Artificial Sequence
  Description of Artificial Sequence: Synthetic oligonucleotide
  Antisense strand to SEQ ID NO: 2505032
uucacucacuauuagagca

SEQ ID NO: 2505034 - RNA, 19 nt, Artificial Sequence
  Description of Artificial Sequence: Synthetic oligonucleotide
  Sense strand starting at position 1348 of SEQ ID NO: 1888022
ucuaauagugagugaagga

SEQ ID NO: 2505035 - RNA, 19 nt, Artificial Sequence
  Description of Artificial Sequence: Synthetic oligonucleotide
  Antisense strand to SEQ ID NO: 2505034
uccuucacucacuauuaga

SEQ ID NO: 2505036 - RNA, 19 nt, Artificial Sequence
  Description of Artificial Sequence: Synthetic oligonucleotide
  Sense strand starting at position 1389 of SEQ ID NO: 1888022
ugaacaagagaccguuuaa

SEQ ID NO: 2505037 - RNA, 19 nt, Artificial Sequence
  Description of Artificial Sequence: Synthetic oligonucleotide
  Antisense strand to SEQ ID NO: 2505036
uuaaacggucucuuguuca

SEQ ID NO: 2505038 - RNA, 19 nt, Artificial Sequence
  Description of Artificial Sequence: Synthetic oligonucleotide
  Sense strand starting at position 2063 of SEQ ID NO: 1888022
aaacguagucccgucaugu

SEQ ID NO: 2505039 - RNA, 19 nt, Artificial Sequence
  Description of Artificial Sequence: Synthetic oligonucleotide
  Antisense strand to SEQ ID NO: 2505038
acaugacgggacuacguuu

SEQ ID NO: 2505040 - RNA, 19 nt, Artificial Sequence
  Description of Artificial Sequence: Synthetic oligonucleotide
  Sense strand starting at position 2073 of SEQ ID NO: 1888022
ccgucaugucccgcuuuga

SEQ ID NO: 2505041 - RNA, 19 nt, Artificial Sequence
  Description of Artificial Sequence: Synthetic oligonucleotide
  Antisense strand to SEQ ID NO: 2505040
ucaaagcgggacaugacgg

SEQ ID NO: 2505042 - RNA, 19 nt, Artificial Sequence
  Description of Artificial Sequence: Synthetic oligonucleotide
  Sense strand starting at position 2122 of SEQ ID NO: 1888022
uugggcuucgguuaucaua

SEQ ID NO: 2505043 - RNA, 19 nt, Artificial Sequence
  Description of Artificial Sequence: Synthetic oligonucleotide
  Antisense strand to SEQ ID NO: 2505042
uaugauaaccgaagcccaa

SEQ ID NO: 2505044 - RNA, 19 nt, Artificial Sequence
  Description of Artificial Sequence: Synthetic oligonucleotide
  Sense strand starting at position 2124 of SEQ ID NO: 1888022
gggcuucgguuaucauaga

SEQ ID NO: 2505045 - RNA, 19 nt, Artificial Sequence
  Description of Artificial Sequence: Synthetic oligonucleotide
  Antisense strand to SEQ ID NO: 2505044
ucuaugauaaccgaagccc

SEQ ID NO: 2505046 - RNA, 19 nt, Artificial Sequence
  Description of Artificial Sequence: Synthetic oligonucleotide
  Sense strand starting at position 2177 of SEQ ID NO: 1888022
ggaccuaagucgucgccaa

SEQ ID NO: 2505047 - RNA, 19 nt, Artificial Sequence
  Description of Artificial Sequence: Synthetic oligonucleotide
  Antisense strand to SEQ ID NO: 2505046
uuggcgacgacuuaggucc

SEQ ID NO: 2505048 - RNA, 19 nt, Artificial Sequence
  Description of Artificial Sequence: Synthetic oligonucleotide
  Sense strand starting at position 2178 of SEQ ID NO: 1888022
gaccuaagucgucgccaaa

SEQ ID NO: 2505049 - RNA, 19 nt, Artificial Sequence
  Description of Artificial Sequence: Synthetic oligonucleotide
  Antisense strand to SEQ ID NO: 2505048
uuuggcgacgacuuagguc

SEQ ID NO: 2505050 - RNA, 19 nt, Artificial Sequence
  Description of Artificial Sequence: Synthetic oligonucleotide
  Sense strand starting at position 2181 of SEQ ID NO: 1888022
cuaagucgucgccaaagaa

SEQ ID NO: 2505051 - RNA, 19 nt, Artificial Sequence
  Description of Artificial Sequence: Synthetic oligonucleotide
  Antisense strand to SEQ ID NO: 2505050
uucuuuggcgacgacuuag

SEQ ID NO: 2505052 - RNA, 19 nt, Artificial Sequence
  Description of Artificial Sequence: Synthetic oligonucleotide
  Sense strand starting at position 2230 of SEQ ID NO: 1888022
gcccauuccuucucgugaa

SEQ ID NO: 2505053 - RNA, 19 nt, Artificial Sequence
  Description of Artificial Sequence: Synthetic oligonucleotide
  Antisense strand to SEQ ID NO: 2505052
uucacgagaaggaaugggc

SEQ ID NO: 2505054 - RNA, 19 nt, Artificial Sequence
  Description of Artificial Sequence: Synthetic oligonucleotide
  Sense strand starting at position 2250 of SEQ ID NO: 1888022
gcgggugacuggucaugau

SEQ ID NO: 2505055 - RNA, 19 nt, Artificial Sequence
  Description of Artificial Sequence: Synthetic oligonucleotide
  Antisense strand to SEQ ID NO: 2505054
aucaugaccagucacccgc

SEQ ID NO: 2505056 - RNA, 19 nt, Artificial Sequence
  Description of Artificial Sequence: Synthetic oligonucleotide
  Sense strand starting at position 2254 of SEQ ID NO: 1888022
gugacuggucaugauuaug

SEQ ID NO: 2505057 - RNA, 19 nt, Artificial Sequence
  Description of Artificial Sequence: Synthetic oligonucleotide
  Antisense strand to SEQ ID NO: 2505056
cauaaucaugaccagucac

SEQ ID NO: 2505058 - RNA, 19 nt, Artificial Sequence
  Description of Artificial Sequence: Synthetic oligonucleotide
  Sense strand starting at position 2259 of SEQ ID NO: 1888022
uggucaugauuaugauuga

SEQ ID NO: 2505059 - RNA, 19 nt, Artificial Sequence
  Description of Artificial Sequence: Synthetic oligonucleotide
  Antisense strand to SEQ ID NO: 2505058
ucaaucauaaucaugacca

SEQ ID NO: 2505060 - RNA, 19 nt, Artificial Sequence
  Description of Artificial Sequence: Synthetic oligonucleotide
  Sense strand starting at position 2260 of SEQ ID NO: 1888022
ggucaugauuaugauugau

SEQ ID NO: 2505061 - RNA, 19 nt, Artificial Sequence
  Description of Artificial Sequence: Synthetic oligonucleotide
  Antisense strand to SEQ ID NO: 2505060
aucaaucauaaucaugacc

SEQ ID NO: 2505062 - RNA, 19 nt, Artificial Sequence
  Description of Artificial Sequence: Synthetic oligonucleotide
  Sense strand starting at position 2411 of SEQ ID NO: 1888022
gcgagucagaccgauaaca

SEQ ID NO: 2505063 - RNA, 19 nt, Artificial Sequence
  Description of Artificial Sequence: Synthetic oligonucleotide
  Antisense strand to SEQ ID NO: 2505062
uguuaucggucugacucgc

SEQ ID NO: 2505064 - RNA, 19 nt, Artificial Sequence
  Description of Artificial Sequence: Synthetic oligonucleotide
  Sense strand starting at position 2450 of SEQ ID NO: 1888022
cgagcauaugcgcgucaaa

SEQ ID NO: 2505065 - RNA, 19 nt, Artificial Sequence
  Description of Artificial Sequence: Synthetic oligonucleotide
  Antisense strand to SEQ ID NO: 2505064
uuugacgcgcauaugcucg

SEQ ID NO: 2505066 - RNA, 19 nt, Artificial Sequence
  Description of Artificial Sequence: Synthetic oligonucleotide
  Sense strand starting at position 2852 of SEQ ID NO: 1888022
gagauagggucuccauaug

SEQ ID NO: 2505067 - RNA, 19 nt, Artificial Sequence
  Description of Artificial Sequence: Synthetic oligonucleotide
  Antisense strand to SEQ ID NO: 2505066
cauauggagacccuaucuc

SEQ ID NO: 2505068 - RNA, 19 nt, Artificial Sequence
  Description of Artificial Sequence: Synthetic oligonucleotide
  Sense strand starting at position 3314 of SEQ ID NO: 1888022
ggucuaucucccugcccaa

SEQ ID NO: 2505069 - RNA, 19 nt, Artificial Sequence
  Description of Artificial Sequence: Synthetic oligonucleotide
  Antisense strand to SEQ ID NO: 2505068
uugggcagggagauagacc

SEQ ID NO: 2505070 - RNA, 19 nt, Artificial Sequence
  Description of Artificial Sequence: Synthetic oligonucleotide
  Sense strand starting at position 3439 of SEQ ID NO: 1888022
acaggaaggccuugacaau

SEQ ID NO: 2505071 - RNA, 19 nt, Artificial Sequence
  Description of Artificial Sequence: Synthetic oligonucleotide
  Antisense strand to SEQ ID NO: 2505070
auugucaaggccuuccugu

SEQ ID NO: 2505072 - RNA, 19 nt, Artificial Sequence
  Description of Artificial Sequence: Synthetic oligonucleotide
  Sense strand starting at position 3448 of SEQ ID NO: 1888022
ccuugacaauugucacaga

SEQ ID NO: 2505073 - RNA, 19 nt, Artificial Sequence
  Description of Artificial Sequence: Synthetic oligonucleotide
  Antisense strand to SEQ ID NO: 2505072
ucugugacaauugucaagg

SEQ ID NO: 2505074 - RNA, 19 nt, Artificial Sequence
  Description of Artificial Sequence: Synthetic oligonucleotide
  Sense strand starting at position 3451 of SEQ ID NO: 1888022
ugacaauugucacagagaa

SEQ ID NO: 2505075 - RNA, 19 nt, Artificial Sequence
  Description of Artificial Sequence: Synthetic oligonucleotide
  Antisense strand to SEQ ID NO: 2505074
uucucugugacaauuguca

SEQ ID NO: 2505076 - RNA, 19 nt, Artificial Sequence
  Description of Artificial Sequence: Synthetic oligonucleotide
  Sense strand starting at position 3848 of SEQ ID NO: 1888022
gccugacacaaguaggauu

SEQ ID NO: 2505077 - RNA, 19 nt, Artificial Sequence
  Description of Artificial Sequence: Synthetic oligonucleotide
  Antisense strand to SEQ ID NO: 2505076
aauccuacuugugucaggc

SEQ ID NO: 2505078 - RNA, 19 nt, Artificial Sequence
  Description of Artificial Sequence: Synthetic oligonucleotide
  Sense strand starting at position 3949 of SEQ ID NO: 1888022
cucccucuggagugaagau

SEQ ID NO: 2505079 - RNA, 19 nt, Artificial Sequence
  Description of Artificial Sequence: Synthetic oligonucleotide
  Antisense strand to SEQ ID NO: 2505078
aucuucacuccagagggag

SEQ ID NO: 2505080 - RNA, 19 nt, Artificial Sequence
  Description of Artificial Sequence: Synthetic oligonucleotide
  Sense strand starting at position 3962 of SEQ ID NO: 1888022
gaagauucuggugguacca

SEQ ID NO: 2505081 - RNA, 19 nt, Artificial Sequence
  Description of Artificial Sequence: Synthetic oligonucleotide
  Antisense strand to SEQ ID NO: 2505080
ugguaccaccagaaucuuc

SEQ ID NO: 2505082 - RNA, 19 nt, Artificial Sequence
  Description of Artificial Sequence: Synthetic oligonucleotide
  Sense strand starting at position 97 of SEQ ID NO: 1888023
gucucaaggaguuagcuuu

SEQ ID NO: 2505083 - RNA, 19 nt, Artificial Sequence
  Description of Artificial Sequence: Synthetic oligonucleotide
  Antisense strand to SEQ ID NO: 2505082
aaagcuaacuccuugagac

SEQ ID NO: 2505084 - RNA, 19 nt, Artificial Sequence
  Description of Artificial Sequence: Synthetic oligonucleotide
  Sense strand starting at position 392 of SEQ ID NO: 1888023
ugauaagaacucugugccu

SEQ ID NO: 2505085 - RNA, 19 nt, Artificial Sequence
  Description of Artificial Sequence: Synthetic oligonucleotide
  Antisense strand to SEQ ID NO: 2505084
aggcacagaguucuuauca

SEQ ID NO: 2505086 - RNA, 19 nt, Artificial Sequence
  Description of Artificial Sequence: Synthetic oligonucleotide
  Sense strand starting at position 398 of SEQ ID NO: 1888023
gaacucugugccuagggaa

SEQ ID NO: 2505087 - RNA, 19 nt, Artificial Sequence
  Description of Artificial Sequence: Synthetic oligonucleotide
  Antisense strand to SEQ ID NO: 2505086
uucccuaggcacagaguuc

SEQ ID NO: 2505088 - RNA, 19 nt, Artificial Sequence
  Description of Artificial Sequence: Synthetic oligonucleotide
  Sense strand starting at position 453 of SEQ ID NO: 1888023
uauggugucagggauuauu

SEQ ID NO: 2505089 - RNA, 19 nt, Artificial Sequence
  Description of Artificial Sequence: Synthetic oligonucleotide
  Antisense strand to SEQ ID NO: 2505088
aauaaucccugacaccaua

SEQ ID NO: 2505090 - RNA, 19 nt, Artificial Sequence
  Description of Artificial Sequence: Synthetic oligonucleotide
  Sense strand starting at position 456 of SEQ ID NO: 1888023
ggugucagggauuauuauu

SEQ ID NO: 2505091 - RNA, 19 nt, Artificial Sequence
  Description of Artificial Sequence: Synthetic oligonucleotide
  Antisense strand to SEQ ID NO: 2505090
aauaauaaucccugacacc

SEQ ID NO: 2505092 - RNA, 19 nt, Artificial Sequence
  Description of Artificial Sequence: Synthetic oligonucleotide
  Sense strand starting at position 595 of SEQ ID NO: 1888023
gauaauguguaucagagag

SEQ ID NO: 2505093 - RNA, 19 nt, Artificial Sequence
  Description of Artificial Sequence: Synthetic oligonucleotide
  Antisense strand to SEQ ID NO: 2505092
cucucugauacacauuauc

SEQ ID NO: 2505094 - RNA, 19 nt, Artificial Sequence
  Description of Artificial Sequence: Synthetic oligonucleotide
  Sense strand starting at position 628 of SEQ ID NO: 1888023
ugggaaugucaaugacacu

SEQ ID NO: 2505095 - RNA, 19 nt, Artificial Sequence
  Description of Artificial Sequence: Synthetic oligonucleotide
  Antisense strand to SEQ ID NO: 2505094
agugucauugacauuccca

SEQ ID NO: 2505096 - RNA, 19 nt, Artificial Sequence
  Description of Artificial Sequence: Synthetic oligonucleotide
  Sense strand starting at position 634 of SEQ ID NO: 1888023
ugucaaugacacuggaaau

SEQ ID NO: 2505097 - RNA, 19 nt, Artificial Sequence
  Description of Artificial Sequence: Synthetic oligonucleotide
  Antisense strand to SEQ ID NO: 2505096
auuuccagugucauugaca

SEQ ID NO: 2505098 - RNA, 19 nt, Artificial Sequence
  Description of Artificial Sequence: Synthetic oligonucleotide
  Sense strand starting at position 672 of SEQ ID NO: 1888023
cagaguuaaucuggaagaa

SEQ ID NO: 2505099 - RNA, 19 nt, Artificial Sequence
  Description of Artificial Sequence: Synthetic oligonucleotide
  Antisense strand to SEQ ID NO: 2505098
uucuuccagauuaacucug

SEQ ID NO: 2505100 - RNA, 19 nt, Artificial Sequence
  Description of Artificial Sequence: Synthetic oligonucleotide
  Sense strand starting at position 718 of SEQ ID NO: 1888023
cugcuugagacauauguga

SEQ ID NO: 2505101 - RNA, 19 nt, Artificial Sequence
  Description of Artificial Sequence: Synthetic oligonucleotide
  Antisense strand to SEQ ID NO: 2505100
ucacauaugucucaagcag

SEQ ID NO: 2505102 - RNA, 19 nt, Artificial Sequence
  Description of Artificial Sequence: Synthetic oligonucleotide
  Sense strand starting at position 720 of SEQ ID NO: 1888023
gcuugagacauaugugaaa

SEQ ID NO: 2505103 - RNA, 19 nt, Artificial Sequence
  Description of Artificial Sequence: Synthetic oligonucleotide
  Antisense strand to SEQ ID NO: 2505102
uuucacauaugucucaagc

SEQ ID NO: 2505104 - RNA, 19 nt, Artificial Sequence
  Description of Artificial Sequence: Synthetic oligonucleotide
  Sense strand starting at position 962 of SEQ ID NO: 1888023
cguacaaauuaagagacua

SEQ ID NO: 2505105 - RNA, 19 nt, Artificial Sequence
  Description of Artificial Sequence: Synthetic oligonucleotide
  Antisense strand to SEQ ID NO: 2505104
uagucucuuaauuuguacg

SEQ ID NO: 2505106 - RNA, 19 nt, Artificial Sequence
  Description of Artificial Sequence: Synthetic oligonucleotide
  Sense strand starting at position 1077 of SEQ ID NO: 1888023
accauagcugagugcucua

SEQ ID NO: 2505107 - RNA, 19 nt, Artificial Sequence
  Description of Artificial Sequence: Synthetic oligonucleotide
  Antisense strand to SEQ ID NO: 2505106
uagagcacucagcuauggu

SEQ ID NO: 2505108 - RNA, 19 nt, Artificial Sequence
  Description of Artificial Sequence: Synthetic oligonucleotide
  Sense strand starting at position 1080 of SEQ ID NO: 1888023
auagcugagugcucuacaa

SEQ ID NO: 2505109 - RNA, 19 nt, Artificial Sequence
  Description of Artificial Sequence: Synthetic oligonucleotide
  Antisense strand to SEQ ID NO: 2505108
uuguagagcacucagcuau

SEQ ID NO: 2505110 - RNA, 19 nt, Artificial Sequence
  Description of Artificial Sequence: Synthetic oligonucleotide
  Sense strand starting at position 1082 of SEQ ID NO: 1888023
agcugagugcucuacaaua

SEQ ID NO: 2505111 - RNA, 19 nt, Artificial Sequence
  Description of Artificial Sequence: Synthetic oligonucleotide
  Antisense strand to SEQ ID NO: 2505110
uauuguagagcacucagcu

SEQ ID NO: 2505112 - RNA, 19 nt, Artificial Sequence
  Description of Artificial Sequence: Synthetic oligonucleotide
  Sense strand starting at position 1084 of SEQ ID NO: 1888023
cugagugcucuacaauacu

SEQ ID NO: 2505113 - RNA, 19 nt, Artificial Sequence
  Description of Artificial Sequence: Synthetic oligonucleotide
  Antisense strand to SEQ ID NO: 2505112
aguauuguagagcacucag

SEQ ID NO: 2505114 - RNA, 19 nt, Artificial Sequence
  Description of Artificial Sequence: Synthetic oligonucleotide
  Sense strand starting at position 1135 of SEQ ID NO: 1888023
cggugacuccuauacaucu

SEQ ID NO: 2505115 - RNA, 19 nt, Artificial Sequence
  Description of Artificial Sequence: Synthetic oligonucleotide
  Antisense strand to SEQ ID NO: 2505114
agauguauaggagucaccg

SEQ ID NO: 2505116 - RNA, 19 nt, Artificial Sequence
  Description of Artificial Sequence: Synthetic oligonucleotide
  Sense strand starting at position 1568 of SEQ ID NO: 1888023
cugcucaaucugggagaga

SEQ ID NO: 2505117 - RNA, 19 nt, Artificial Sequence
  Description of Artificial Sequence: Synthetic oligonucleotide
  Antisense strand to SEQ ID NO: 2505116
ucucucccagauugagcag

SEQ ID NO: 2505118 - RNA, 19 nt, Artificial Sequence
  Description of Artificial Sequence: Synthetic oligonucleotide
  Sense strand starting at position 1691 of SEQ ID NO: 1888023
ccaucuuauggcuggagga

SEQ ID NO: 2505119 - RNA, 19 nt, Artificial Sequence
  Description of Artificial Sequence: Synthetic oligonucleotide
  Antisense strand to SEQ ID NO: 2505118
uccuccagccauaagaugg

SEQ ID NO: 2505120 - RNA, 19 nt, Artificial Sequence
  Description of Artificial Sequence: Synthetic oligonucleotide
  Sense strand starting at position 1692 of SEQ ID NO: 1888023
caucuuauggcuggaggaa

SEQ ID NO: 2505121 - RNA, 19 nt, Artificial Sequence
  Description of Artificial Sequence: Synthetic oligonucleotide
  Antisense strand to SEQ ID NO: 2505120
uuccuccagccauaagaug

SEQ ID NO: 2505122 - RNA, 19 nt, Artificial Sequence
  Description of Artificial Sequence: Synthetic oligonucleotide
  Sense strand starting at position 2070 of SEQ ID NO: 1888023
agcgucucugauuggauga

SEQ ID NO: 2505123 - RNA, 19 nt, Artificial Sequence
  Description of Artificial Sequence: Synthetic oligonucleotide
  Antisense strand to SEQ ID NO: 2505122
ucauccaaucagagacgcu

SEQ ID NO: 2505124 - RNA, 19 nt, Artificial Sequence
  Description of Artificial Sequence: Synthetic oligonucleotide
  Sense strand starting at position 2071 of SEQ ID NO: 1888023
gcgucucugauuggaugau

SEQ ID NO: 2505125 - RNA, 19 nt, Artificial Sequence
  Description of Artificial Sequence: Synthetic oligonucleotide
  Antisense strand to SEQ ID NO: 2505124
aucauccaaucagagacgc

SEQ ID NO: 2505126 - RNA, 19 nt, Artificial Sequence
  Description of Artificial Sequence: Synthetic oligonucleotide
  Sense strand starting at position 2077 of SEQ ID NO: 1888023
cugauuggaugauauuuaa

SEQ ID NO: 2505127 - RNA, 19 nt, Artificial Sequence
  Description of Artificial Sequence: Synthetic oligonucleotide
  Antisense strand to SEQ ID NO: 2505126
uuaaauaucauccaaucag

SEQ ID NO: 2505128 - RNA, 19 nt, Artificial Sequence
  Description of Artificial Sequence: Synthetic oligonucleotide
  Sense strand starting at position 2134 of SEQ ID NO: 1888023
aucagaugcugggcugaaa

SEQ ID NO: 2505129 - RNA, 19 nt, Artificial Sequence
  Description of Artificial Sequence: Synthetic oligonucleotide
  Antisense strand to SEQ ID NO: 2505128
uuucagcccagcaucugau

SEQ ID NO: 2505130 - RNA, 19 nt, Artificial Sequence
  Description of Artificial Sequence: Synthetic oligonucleotide
  Sense strand starting at position 2239 of SEQ ID NO: 1888023
cccuuaccuuguguaucaa

SEQ ID NO: 2505131 - RNA, 19 nt, Artificial Sequence
  Description of Artificial Sequence: Synthetic oligonucleotide
  Antisense strand to SEQ ID NO: 2505130
uugauacacaagguaaggg

SEQ ID NO: 2505132 - RNA, 19 nt, Artificial Sequence
  Description of Artificial Sequence: Synthetic oligonucleotide
  Sense strand starting at position 2240 of SEQ ID NO: 1888023
ccuuaccuuguguaucaau

SEQ ID NO: 2505133 - RNA, 19 nt, Artificial Sequence
  Description of Artificial Sequence: Synthetic oligonucleotide
  Antisense strand to SEQ ID NO: 2505132
auugauacacaagguaagg

SEQ ID NO: 2505134 - RNA, 19 nt, Artificial Sequence
  Description of Artificial Sequence: Synthetic oligonucleotide
  Sense strand starting at position 2355 of SEQ ID NO: 1888023
guauucugguccuuugaac

SEQ ID NO: 2505135 - RNA, 19 nt, Artificial Sequence
  Description of Artificial Sequence: Synthetic oligonucleotide
  Antisense strand to SEQ ID NO: 2505134
guucaaaggaccagaauac

SEQ ID NO: 2505136 - RNA, 19 nt, Artificial Sequence
  Description of Artificial Sequence: Synthetic oligonucleotide
  Sense strand starting at position 2394 of SEQ ID NO: 1888023
augugagucacaggugaau

SEQ ID NO: 2505137 - RNA, 19 nt, Artificial Sequence
  Description of Artificial Sequence: Synthetic oligonucleotide
  Antisense strand to SEQ ID NO: 2505136
auucaccugugacucacau

SEQ ID NO: 2505138 - RNA, 19 nt, Artificial Sequence
  Description of Artificial Sequence: Synthetic oligonucleotide
  Sense strand starting at position 2457 of SEQ ID NO: 1888023
aguggaauugauuguagca

SEQ ID NO: 2505139 - RNA, 19 nt, Artificial Sequence
  Description of Artificial Sequence: Synthetic oligonucleotide
  Antisense strand to SEQ ID NO: 2505138
ugcuacaaucaauuccacu

SEQ ID NO: 2505140 - RNA, 19 nt, Artificial Sequence
  Description of Artificial Sequence: Synthetic oligonucleotide
  Sense strand starting at position 2764 of SEQ ID NO: 1888023
uucaguuccgagggugaaa

SEQ ID NO: 2505141 - RNA, 19 nt, Artificial Sequence
  Description of Artificial Sequence: Synthetic oligonucleotide
  Antisense strand to SEQ ID NO: 2505140
uuucacccucggaacugaa

SEQ ID NO: 2505142 - RNA, 19 nt, Artificial Sequence
  Description of Artificial Sequence: Synthetic oligonucleotide
  Sense strand starting at position 2781 of SEQ ID NO: 1888023
aacaaauaguggcuauaga

SEQ ID NO: 2505143 - RNA, 19 nt, Artificial Sequence
  Description of Artificial Sequence: Synthetic oligonucleotide
  Antisense strand to SEQ ID NO: 2505142
ucuauagccacuauuuguu

SEQ ID NO: 2505144 - RNA, 19 nt, Artificial Sequence
  Description of Artificial Sequence: Synthetic oligonucleotide
  Sense strand starting at position 2816 of SEQ ID NO: 1888023
aggaauaaaucacagguaa

SEQ ID NO: 2505145 - RNA, 19 nt, Artificial Sequence
  Description of Artificial Sequence: Synthetic oligonucleotide
  Antisense strand to SEQ ID NO: 2505144
uuaccugugauuuauuccu

SEQ ID NO: 2505146 - RNA, 19 nt, Artificial Sequence
  Description of Artificial Sequence: Synthetic oligonucleotide
  Sense strand starting at position 2940 of SEQ ID NO: 1888023
agucuugaccuuuaauguu

SEQ ID NO: 2505147 - RNA, 19 nt, Artificial Sequence
  Description of Artificial Sequence: Synthetic oligonucleotide
  Antisense strand to SEQ ID NO: 2505146
aacauuaaaggucaagacu

SEQ ID NO: 2505148 - RNA, 19 nt, Artificial Sequence
  Description of Artificial Sequence: Synthetic oligonucleotide
  Sense strand starting at position 2954 of SEQ ID NO: 1888023
auguuuacauaggaagaaa

SEQ ID NO: 2505149 - RNA, 19 nt, Artificial Sequence
  Description of Artificial Sequence: Synthetic oligonucleotide
  Antisense strand to SEQ ID NO: 2505148
uuucuuccuauguaaacau

SEQ ID NO: 2505150 - RNA, 19 nt, Artificial Sequence
  Description of Artificial Sequence: Synthetic oligonucleotide
  Sense strand starting at position 2997 of SEQ ID NO: 1888023
gcuauuugaccucgacucu

SEQ ID NO: 2505151 - RNA, 19 nt, Artificial Sequence
  Description of Artificial Sequence: Synthetic oligonucleotide
  Antisense strand to SEQ ID NO: 2505150
agagucgaggucaaauagc

SEQ ID NO: 2505152 - RNA, 19 nt, Artificial Sequence
  Description of Artificial Sequence: Synthetic oligonucleotide
  Sense strand starting at position 3003 of SEQ ID NO: 1888023
ugaccucgacucuaauguu

SEQ ID NO: 2505153 - RNA, 19 nt, Artificial Sequence
  Description of Artificial Sequence: Synthetic oligonucleotide
  Antisense strand to SEQ ID NO: 2505152
aacauuagagucgagguca

SEQ ID NO: 2505154 - RNA, 19 nt, Artificial Sequence
  Description of Artificial Sequence: Synthetic oligonucleotide
  Sense strand starting at position 3042 of SEQ ID NO: 1888023
ucuucuguggugugggaaa

SEQ ID NO: 2505155 - RNA, 19 nt, Artificial Sequence
  Description of Artificial Sequence: Synthetic oligonucleotide
  Antisense strand to SEQ ID NO: 2505154
uuucccacaccacagaaga

SEQ ID NO: 2505156 - RNA, 19 nt, Artificial Sequence
  Description of Artificial Sequence: Synthetic oligonucleotide
  Sense strand starting at position 3405 of SEQ ID NO: 1888023
uggccauauuucugcauuu

SEQ ID NO: 2505157 - RNA, 19 nt, Artificial Sequence
  Description of Artificial Sequence: Synthetic oligonucleotide
  Antisense strand to SEQ ID NO: 2505156
aaaugcagaaauauggcca

SEQ ID NO: 2505158 - RNA, 19 nt, Artificial Sequence
  Description of Artificial Sequence: Synthetic oligonucleotide
  Sense strand starting at position 3480 of SEQ ID NO: 1888023
uauggugcccaauguuaga

SEQ ID NO: 2505159 - RNA, 19 nt, Artificial Sequence
  Description of Artificial Sequence: Synthetic oligonucleotide
  Antisense strand to SEQ ID NO: 2505158
ucuaacauugggcaccaua

SEQ ID NO: 2505160 - RNA, 19 nt, Artificial Sequence
  Description of Artificial Sequence: Synthetic oligonucleotide
  Sense strand starting at position 3596 of SEQ ID NO: 1888023
cugauuugcucauaauuga

SEQ ID NO: 2505161 - RNA, 19 nt, Artificial Sequence
  Description of Artificial Sequence: Synthetic oligonucleotide
  Antisense strand to SEQ ID NO: 2505160
ucaauuaugagcaaaucag

SEQ ID NO: 2505162 - RNA, 19 nt, Artificial Sequence
  Description of Artificial Sequence: Synthetic oligonucleotide
  Sense strand starting at position 14 of SEQ ID NO: 1888024
ggcauucugguaugggaau

SEQ ID NO: 2505163 - RNA, 19 nt, Artificial Sequence
  Description of Artificial Sequence: Synthetic oligonucleotide
  Antisense strand to SEQ ID NO: 2505162
auucccauaccagaaugcc

SEQ ID NO: 2505164 - RNA, 19 nt, Artificial Sequence
  Description of Artificial Sequence: Synthetic oligonucleotide
  Sense strand starting at position 42 of SEQ ID NO: 1888024
acugcagaaucugucacua

SEQ ID NO: 2505165 - RNA, 19 nt, Artificial Sequence
  Description of Artificial Sequence: Synthetic oligonucleotide
  Antisense strand to SEQ ID NO: 2505164
uagugacagauucugcagu

SEQ ID NO: 2505166 - RNA, 19 nt, Artificial Sequence
  Description of Artificial Sequence: Synthetic oligonucleotide
  Sense strand starting at position 99 of SEQ ID NO: 1888024
uccaguuucugaguuacag

SEQ ID NO: 2505167 - RNA, 19 nt, Artificial Sequence
  Description of Artificial Sequence: Synthetic oligonucleotide
  Antisense strand to SEQ ID NO: 2505166
cuguaacucagaaacugga

SEQ ID NO: 2505168 - RNA, 19 nt, Artificial Sequence
  Description of Artificial Sequence: Synthetic oligonucleotide
  Sense strand starting at position 263 of SEQ ID NO: 1888024
gcaaacaguccuuagccua

SEQ ID NO: 2505169 - RNA, 19 nt, Artificial Sequence
  Description of Artificial Sequence: Synthetic oligonucleotide
  Antisense strand to SEQ ID NO: 2505168
uaggcuaaggacuguuugc

SEQ ID NO: 2505170 - RNA, 19 nt, Artificial Sequence
  Description of Artificial Sequence: Synthetic oligonucleotide
  Sense strand starting at position 314 of SEQ ID NO: 1888024
gccuguuacugaguaagga

SEQ ID NO: 2505171 - RNA, 19 nt, Artificial Sequence
  Description of Artificial Sequence: Synthetic oligonucleotide
  Antisense strand to SEQ ID NO: 2505170
uccuuacucaguaacaggc

SEQ ID NO: 2505172 - RNA, 19 nt, Artificial Sequence
  Description of Artificial Sequence: Synthetic oligonucleotide
  Sense strand starting at position 335 of SEQ ID NO: 1888024
guguuuagaggacagaugu

SEQ ID NO: 2505173 - RNA, 19 nt, Artificial Sequence
  Description of Artificial Sequence: Synthetic oligonucleotide
  Antisense strand to SEQ ID NO: 2505172
acaucuguccucuaaacac

SEQ ID NO: 2505174 - RNA, 19 nt, Artificial Sequence
  Description of Artificial Sequence: Synthetic oligonucleotide
  Sense strand starting at position 404 of SEQ ID NO: 1888024
aggagaugcccguaccaga

SEQ ID NO: 2505175 - RNA, 19 nt, Artificial Sequence
  Description of Artificial Sequence: Synthetic oligonucleotide
  Antisense strand to SEQ ID NO: 2505174
ucugguacgggcaucuccu

SEQ ID NO: 2505176 - RNA, 19 nt, Artificial Sequence
  Description of Artificial Sequence: Synthetic oligonucleotide
  Sense strand starting at position 422 of SEQ ID NO: 1888024
agaguagagguguggugau

SEQ ID NO: 2505177 - RNA, 19 nt, Artificial Sequence
  Description of Artificial Sequence: Synthetic oligonucleotide
  Antisense strand to SEQ ID NO: 2505176
aucaccacaccucuacucu

SEQ ID NO: 2505178 - RNA, 19 nt, Artificial Sequence
  Description of Artificial Sequence: Synthetic oligonucleotide
  Sense strand starting at position 434 of SEQ ID NO: 1888024
uggugauguggcuaaauuc

SEQ ID NO: 2505179 - RNA, 19 nt, Artificial Sequence
  Description of Artificial Sequence: Synthetic oligonucleotide
  Antisense strand to SEQ ID NO: 2505178
gaauuuagccacaucacca

SEQ ID NO: 2505180 - RNA, 19 nt, Artificial Sequence
  Description of Artificial Sequence: Synthetic oligonucleotide
  Sense strand starting at position 707 of SEQ ID NO: 1888024
aagguuaagccaugggauu

SEQ ID NO: 2505181 - RNA, 19 nt, Artificial Sequence
  Description of Artificial Sequence: Synthetic oligonucleotide
  Antisense strand to SEQ ID NO: 2505180
aaucccauggcuuaaccuu

SEQ ID NO: 2505182 - RNA, 19 nt, Artificial Sequence
  Description of Artificial Sequence: Synthetic oligonucleotide
  Sense strand starting at position 892 of SEQ ID NO: 1888024
ucagcauucgggcaucaga

SEQ ID NO: 2505183 - RNA, 19 nt, Artificial Sequence
  Description of Artificial Sequence: Synthetic oligonucleotide
  Antisense strand to SEQ ID NO: 2505182
ucugaugcccgaaugcuga

SEQ ID NO: 2505184 - RNA, 19 nt, Artificial Sequence
  Description of Artificial Sequence: Synthetic oligonucleotide
  Sense strand starting at position 1141 of SEQ ID NO: 1888024
cguccuugggaguaagaca

SEQ ID NO: 2505185 - RNA, 19 nt, Artificial Sequence
  Description of Artificial Sequence: Synthetic oligonucleotide
  Antisense strand to SEQ ID NO: 2505184
ugucuuacucccaaggacg

SEQ ID NO: 2505186 - RNA, 19 nt, Artificial Sequence
  Description of Artificial Sequence: Synthetic oligonucleotide
  Sense strand starting at position 2155 of SEQ ID NO: 1888024
guaggugagguuuaacaga

SEQ ID NO: 2505187 - RNA, 19 nt, Artificial Sequence
  Description of Artificial Sequence: Synthetic oligonucleotide
  Antisense strand to SEQ ID NO: 2505186
ucuguuaaaccucaccuac

SEQ ID NO: 2505188 - RNA, 19 nt, Artificial Sequence
  Description of Artificial Sequence: Synthetic oligonucleotide
  Sense strand starting at position 2288 of SEQ ID NO: 1888024
cguggucucggcagaaucu

SEQ ID NO: 2505189 - RNA, 19 nt, Artificial Sequence
  Description of Artificial Sequence: Synthetic oligonucleotide
  Antisense strand to SEQ ID NO: 2505188
agauucugccgagaccacg

SEQ ID NO: 2505190 - RNA, 19 nt, Artificial Sequence
  Description of Artificial Sequence: Synthetic oligonucleotide
  Sense strand starting at position 2422 of SEQ ID NO: 1888024
accuucaugcggucguuua

SEQ ID NO: 2505191 - RNA, 19 nt, Artificial Sequence
  Description of Artificial Sequence: Synthetic oligonucleotide
  Antisense strand to SEQ ID NO: 2505190
uaaacgaccgcaugaaggu

SEQ ID NO: 2505192 - RNA, 19 nt, Artificial Sequence
  Description of Artificial Sequence: Synthetic oligonucleotide
  Sense strand starting at position 2553 of SEQ ID NO: 1888024
guaagacuccauggcacaa

SEQ ID NO: 2505193 - RNA, 19 nt, Artificial Sequence
  Description of Artificial Sequence: Synthetic oligonucleotide
  Antisense strand to SEQ ID NO: 2505192
uugugccauggagucuuac

SEQ ID NO: 2505194 - RNA, 19 nt, Artificial Sequence
  Description of Artificial Sequence: Synthetic oligonucleotide
  Sense strand starting at position 2576 of SEQ ID NO: 1888024
cccuucaugcgguugugua

SEQ ID NO: 2505195 - RNA, 19 nt, Artificial Sequence
  Description of Artificial Sequence: Synthetic oligonucleotide
  Antisense strand to SEQ ID NO: 2505194
uacacaaccgcaugaaggg

SEQ ID NO: 2505196 - RNA, 19 nt, Artificial Sequence
  Description of Artificial Sequence: Synthetic oligonucleotide
  Sense strand starting at position 2589 of SEQ ID NO: 1888024
uguguaacucuccauggca

SEQ ID NO: 2505197 - RNA, 19 nt, Artificial Sequence
  Description of Artificial Sequence: Synthetic oligonucleotide
  Antisense strand to SEQ ID NO: 2505196
ugccauggagaguuacaca

SEQ ID NO: 2505198 - RNA, 19 nt, Artificial Sequence
  Description of Artificial Sequence: Synthetic oligonucleotide
  Sense strand starting at position 2591 of SEQ ID NO: 1888024
uguaacucuccauggcaca

SEQ ID NO: 2505199 - RNA, 19 nt, Artificial Sequence
  Description of Artificial Sequence: Synthetic oligonucleotide
  Antisense strand to SEQ ID NO: 2505198
ugugccauggagaguuaca

SEQ ID NO: 2505200 - RNA, 19 nt, Artificial Sequence
  Description of Artificial Sequence: Synthetic oligonucleotide
  Sense strand starting at position 2592 of SEQ ID NO: 1888024
guaacucuccauggcacaa

SEQ ID NO: 2505201 - RNA, 19 nt, Artificial Sequence
  Description of Artificial Sequence: Synthetic oligonucleotide
  Antisense strand to SEQ ID NO: 2505200
uugugccauggagaguuac

SEQ ID NO: 2505202 - RNA, 19 nt, Artificial Sequence
  Description of Artificial Sequence: Synthetic oligonucleotide
  Sense strand starting at position 2780 of SEQ ID NO: 1888024
uguguaauccuccagggca

SEQ ID NO: 2505203 - RNA, 19 nt, Artificial Sequence
  Description of Artificial Sequence: Synthetic oligonucleotide
  Antisense strand to SEQ ID NO: 2505202
ugcccuggaggauuacaca

SEQ ID NO: 2505204 - RNA, 19 nt, Artificial Sequence
  Description of Artificial Sequence: Synthetic oligonucleotide
  Sense strand starting at position 2782 of SEQ ID NO: 1888024
uguaauccuccagggcaca

SEQ ID NO: 2505205 - RNA, 19 nt, Artificial Sequence
  Description of Artificial Sequence: Synthetic oligonucleotide
  Antisense strand to SEQ ID NO: 2505204
ugugcccuggaggauuaca

SEQ ID NO: 2505206 - RNA, 19 nt, Artificial Sequence
  Description of Artificial Sequence: Synthetic oligonucleotide
  Sense strand starting at position 2891 of SEQ ID NO: 1888024
ccaguugggaguuacuaca

SEQ ID NO: 2505207 - RNA, 19 nt, Artificial Sequence
  Description of Artificial Sequence: Synthetic oligonucleotide
  Antisense strand to SEQ ID NO: 2505206
uguaguaacucccaacugg

SEQ ID NO: 2505208 - RNA, 19 nt, Artificial Sequence
  Description of Artificial Sequence: Synthetic oligonucleotide
  Sense strand starting at position 2951 of SEQ ID NO: 1888024
gcagguuuguauuucuguu

SEQ ID NO: 2505209 - RNA, 19 nt, Artificial Sequence
  Description of Artificial Sequence: Synthetic oligonucleotide
  Antisense strand to SEQ ID NO: 2505208
aacagaaauacaaaccugc

SEQ ID NO: 2505210 - RNA, 19 nt, Artificial Sequence
  Description of Artificial Sequence: Synthetic oligonucleotide
  Sense strand starting at position 2958 of SEQ ID NO: 1888024
uguauuucuguugggugaa

SEQ ID NO: 2505211 - RNA, 19 nt, Artificial Sequence
  Description of Artificial Sequence: Synthetic oligonucleotide
  Antisense strand to SEQ ID NO: 2505210
uucacccaacagaaauaca

SEQ ID NO: 2505212 - RNA, 19 nt, Artificial Sequence
  Description of Artificial Sequence: Synthetic oligonucleotide
  Sense strand starting at position 3010 of SEQ ID NO: 1888024
accuguucagguuaggaga

SEQ ID NO: 2505213 - RNA, 19 nt, Artificial Sequence
  Description of Artificial Sequence: Synthetic oligonucleotide
  Antisense strand to SEQ ID NO: 2505212
ucuccuaaccugaacaggu

SEQ ID NO: 2505214 - RNA, 19 nt, Artificial Sequence
  Description of Artificial Sequence: Synthetic oligonucleotide
  Sense strand starting at position 3050 of SEQ ID NO: 1888024
ccugcagugguguauaaga

SEQ ID NO: 2505215 - RNA, 19 nt, Artificial Sequence
  Description of Artificial Sequence: Synthetic oligonucleotide
  Antisense strand to SEQ ID NO: 2505214
ucuuauacaccacugcagg

SEQ ID NO: 2505216 - RNA, 19 nt, Artificial Sequence
  Description of Artificial Sequence: Synthetic oligonucleotide
  Sense strand starting at position 3052 of SEQ ID NO: 1888024
ugcagugguguauaagauu

SEQ ID NO: 2505217 - RNA, 19 nt, Artificial Sequence
  Description of Artificial Sequence: Synthetic oligonucleotide
  Antisense strand to SEQ ID NO: 2505216
aaucuuauacaccacugca

SEQ ID NO: 2505218 - RNA, 19 nt, Artificial Sequence
  Description of Artificial Sequence: Synthetic oligonucleotide
  Sense strand starting at position 3129 of SEQ ID NO: 1888024
auuagugugaugugaagua

SEQ ID NO: 2505219 - RNA, 19 nt, Artificial Sequence
  Description of Artificial Sequence: Synthetic oligonucleotide
  Antisense strand to SEQ ID NO: 2505218
uacuucacaucacacuaau

SEQ ID NO: 2505220 - RNA, 19 nt, Artificial Sequence
  Description of Artificial Sequence: Synthetic oligonucleotide
  Sense strand starting at position 3159 of SEQ ID NO: 1888024
ugguuucucugauuaguag

SEQ ID NO: 2505221 - RNA, 19 nt, Artificial Sequence
  Description of Artificial Sequence: Synthetic oligonucleotide
  Antisense strand to SEQ ID NO: 2505220
cuacuaaucagagaaacca

SEQ ID NO: 2505222 - RNA, 19 nt, Artificial Sequence
  Description of Artificial Sequence: Synthetic oligonucleotide
  Sense strand starting at position 3160 of SEQ ID NO: 1888024
gguuucucugauuaguagu

SEQ ID NO: 2505223 - RNA, 19 nt, Artificial Sequence
  Description of Artificial Sequence: Synthetic oligonucleotide
  Antisense strand to SEQ ID NO: 2505222
acuacuaaucagagaaacc

SEQ ID NO: 2505224 - RNA, 19 nt, Artificial Sequence
  Description of Artificial Sequence: Synthetic oligonucleotide
  Sense strand starting at position 3162 of SEQ ID NO: 1888024
uuucucugauuaguaguaa

SEQ ID NO: 2505225 - RNA, 19 nt, Artificial Sequence
  Description of Artificial Sequence: Synthetic oligonucleotide
  Antisense strand to SEQ ID NO: 2505224
uuacuacuaaucagagaaa

SEQ ID NO: 2505226 - RNA, 19 nt, Artificial Sequence
  Description of Artificial Sequence: Synthetic oligonucleotide
  Sense strand starting at position 3274 of SEQ ID NO: 1888024
guugcauucuuauugagau

SEQ ID NO: 2505227 - RNA, 19 nt, Artificial Sequence
  Description of Artificial Sequence: Synthetic oligonucleotide
  Antisense strand to SEQ ID NO: 2505226
aucucaauaagaaugcaac

SEQ ID NO: 2505228 - RNA, 19 nt, Artificial Sequence
  Description of Artificial Sequence: Synthetic oligonucleotide
  Sense strand starting at position 3280 of SEQ ID NO: 1888024
uucuuauugagaugcugag

SEQ ID NO: 2505229 - RNA, 19 nt, Artificial Sequence
  Description of Artificial Sequence: Synthetic oligonucleotide
  Antisense strand to SEQ ID NO: 2505228
cucagcaucucaauaagaa

SEQ ID NO: 2505230 - RNA, 19 nt, Artificial Sequence
  Description of Artificial Sequence: Synthetic oligonucleotide
  Sense strand starting at position 3290 of SEQ ID NO: 1888024
gaugcugaguucuuuauau

SEQ ID NO: 2505231 - RNA, 19 nt, Artificial Sequence
  Description of Artificial Sequence: Synthetic oligonucleotide
  Antisense strand to SEQ ID NO: 2505230
auauaaagaacucagcauc

SEQ ID NO: 2505232 - RNA, 19 nt, Artificial Sequence
  Description of Artificial Sequence: Synthetic oligonucleotide
  Sense strand starting at position 3292 of SEQ ID NO: 1888024
ugcugaguucuuuauauau

SEQ ID NO: 2505233 - RNA, 19 nt, Artificial Sequence
  Description of Artificial Sequence: Synthetic oligonucleotide
  Antisense strand to SEQ ID NO: 2505232
auauauaaagaacucagca

SEQ ID NO: 2505234 - RNA, 19 nt, Artificial Sequence
  Description of Artificial Sequence: Synthetic oligonucleotide
  Sense strand starting at position 3385 of SEQ ID NO: 1888024
uugcuuucugaugaacaua

SEQ ID NO: 2505235 - RNA, 19 nt, Artificial Sequence
  Description of Artificial Sequence: Synthetic oligonucleotide
  Antisense strand to SEQ ID NO: 2505234
uauguucaucagaaagcaa

SEQ ID NO: 2505236 - RNA, 19 nt, Artificial Sequence
  Description of Artificial Sequence: Synthetic oligonucleotide
  Sense strand starting at position 3745 of SEQ ID NO: 1888024
ggaguagauuccucacacu

SEQ ID NO: 2505237 - RNA, 19 nt, Artificial Sequence
  Description of Artificial Sequence: Synthetic oligonucleotide
  Antisense strand to SEQ ID NO: 2505236
agugugaggaaucuacucc

SEQ ID NO: 2505238 - RNA, 19 nt, Artificial Sequence
  Description of Artificial Sequence: Synthetic oligonucleotide
  Sense strand starting at position 3960 of SEQ ID NO: 1888024
cucauauucucuuugguca

SEQ ID NO: 2505239 - RNA, 19 nt, Artificial Sequence
  Description of Artificial Sequence: Synthetic oligonucleotide
  Antisense strand to SEQ ID NO: 2505238
ugaccaaagagaauaugag

SEQ ID NO: 2505240 - RNA, 19 nt, Artificial Sequence
  Description of Artificial Sequence: Synthetic oligonucleotide
  Sense strand starting at position 3983 of SEQ ID NO: 1888024
uuucuauccucugugauug

SEQ ID NO: 2505241 - RNA, 19 nt, Artificial Sequence
  Description of Artificial Sequence: Synthetic oligonucleotide
  Antisense strand to SEQ ID NO: 2505240
caaucacagaggauagaaa

SEQ ID NO: 2505242 - RNA, 19 nt, Artificial Sequence
  Description of Artificial Sequence: Synthetic oligonucleotide
  Sense strand starting at position 9 of SEQ ID NO: 1888025
ucccuuguauuuguauuau

SEQ ID NO: 2505243 - RNA, 19 nt, Artificial Sequence
  Description of Artificial Sequence: Synthetic oligonucleotide
  Antisense strand to SEQ ID NO: 2505242
auaauacaaauacaaggga

SEQ ID NO: 2505244 - RNA, 19 nt, Artificial Sequence
  Description of Artificial Sequence: Synthetic oligonucleotide
  Sense strand starting at position 103 of SEQ ID NO: 1888025
cugucuucugcagugugua

SEQ ID NO: 2505245 - RNA, 19 nt, Artificial Sequence
  Description of Artificial Sequence: Synthetic oligonucleotide
  Antisense strand to SEQ ID NO: 2505244
uacacacugcagaagacag

SEQ ID NO: 2505246 - RNA, 19 nt, Artificial Sequence
  Description of Artificial Sequence: Synthetic oligonucleotide
  Sense strand starting at position 105 of SEQ ID NO: 1888025
gucuucugcaguguguaau

SEQ ID NO: 2505247 - RNA, 19 nt, Artificial Sequence
  Description of Artificial Sequence: Synthetic oligonucleotide
  Antisense strand to SEQ ID NO: 2505246
auuacacacugcagaagac

SEQ ID NO: 2505248 - RNA, 19 nt, Artificial Sequence
  Description of Artificial Sequence: Synthetic oligonucleotide
  Sense strand starting at position 233 of SEQ ID NO: 1888025
aucacaauugcagaaaugu

SEQ ID NO: 2505249 - RNA, 19 nt, Artificial Sequence
  Description of Artificial Sequence: Synthetic oligonucleotide
  Antisense strand to SEQ ID NO: 2505248
acauuucugcaauugugau

SEQ ID NO: 2505250 - RNA, 19 nt, Artificial Sequence
  Description of Artificial Sequence: Synthetic oligonucleotide
  Sense strand starting at position 283 of SEQ ID NO: 1888025
ugaagucuuagauguugaa

SEQ ID NO: 2505251 - RNA, 19 nt, Artificial Sequence
  Description of Artificial Sequence: Synthetic oligonucleotide
  Antisense strand to SEQ ID NO: 2505250
uucaacaucuaagacuuca

SEQ ID NO: 2505252 - RNA, 19 nt, Artificial Sequence
  Description of Artificial Sequence: Synthetic oligonucleotide
  Sense strand starting at position 360 of SEQ ID NO: 1888025
uuaaguauggcuugaaacu

SEQ ID NO: 2505253 - RNA, 19 nt, Artificial Sequence
  Description of Artificial Sequence: Synthetic oligonucleotide
  Antisense strand to SEQ ID NO: 2505252
aguuucaagccauacuuaa

SEQ ID NO: 2505254 - RNA, 19 nt, Artificial Sequence
  Description of Artificial Sequence: Synthetic oligonucleotide
  Sense strand starting at position 361 of SEQ ID NO: 1888025
uaaguauggcuugaaacua

SEQ ID NO: 2505255 - RNA, 19 nt, Artificial Sequence
  Description of Artificial Sequence: Synthetic oligonucleotide
  Antisense strand to SEQ ID NO: 2505254
uaguuucaagccauacuua

SEQ ID NO: 2505256 - RNA, 19 nt, Artificial Sequence
  Description of Artificial Sequence: Synthetic oligonucleotide
  Sense strand starting at position 369 of SEQ ID NO: 1888025
gcuugaaacuauguuaacu

SEQ ID NO: 2505257 - RNA, 19 nt, Artificial Sequence
  Description of Artificial Sequence: Synthetic oligonucleotide
  Antisense strand to SEQ ID NO: 2505256
aguuaacauaguuucaagc

SEQ ID NO: 2505258 - RNA, 19 nt, Artificial Sequence
  Description of Artificial Sequence: Synthetic oligonucleotide
  Sense strand starting at position 377 of SEQ ID NO: 1888025
cuauguuaacuugaaaugu

SEQ ID NO: 2505259 - RNA, 19 nt, Artificial Sequence
  Description of Artificial Sequence: Synthetic oligonucleotide
  Antisense strand to SEQ ID NO: 2505258
acauuucaaguuaacauag

SEQ ID NO: 2505260 - RNA, 19 nt, Artificial Sequence
  Description of Artificial Sequence: Synthetic oligonucleotide
  Sense strand starting at position 443 of SEQ ID NO: 1888025
aggaaacaggcuugguuaa

SEQ ID NO: 2505261 - RNA, 19 nt, Artificial Sequence
  Description of Artificial Sequence: Synthetic oligonucleotide
  Antisense strand to SEQ ID NO: 2505260
uuaaccaagccuguuuccu

SEQ ID NO: 2505262 - RNA, 19 nt, Artificial Sequence
  Description of Artificial Sequence: Synthetic oligonucleotide
  Sense strand starting at position 444 of SEQ ID NO: 1888025
ggaaacaggcuugguuaau

SEQ ID NO: 2505263 - RNA, 19 nt, Artificial Sequence
  Description of Artificial Sequence: Synthetic oligonucleotide
  Antisense strand to SEQ ID NO: 2505262
auuaaccaagccuguuucc

SEQ ID NO: 2505264 - RNA, 19 nt, Artificial Sequence
  Description of Artificial Sequence: Synthetic oligonucleotide
  Sense strand starting at position 445 of SEQ ID NO: 1888025
gaaacaggcuugguuaauu

SEQ ID NO: 2505265 - RNA, 19 nt, Artificial Sequence
  Description of Artificial Sequence: Synthetic oligonucleotide
  Antisense strand to SEQ ID NO: 2505264
aauuaaccaagccuguuuc

SEQ ID NO: 2505266 - RNA, 19 nt, Artificial Sequence
  Description of Artificial Sequence: Synthetic oligonucleotide
  Sense strand starting at position 578 of SEQ ID NO: 1888025
gauaauguauugguuggga

SEQ ID NO: 2505267 - RNA, 19 nt, Artificial Sequence
  Description of Artificial Sequence: Synthetic oligonucleotide
  Antisense strand to SEQ ID NO: 2505266
ucccaaccaauacauuauc

SEQ ID NO: 2505268 - RNA, 19 nt, Artificial Sequence
  Description of Artificial Sequence: Synthetic oligonucleotide
  Sense strand starting at position 580 of SEQ ID NO: 1888025
uaauguauugguugggauu

SEQ ID NO: 2505269 - RNA, 19 nt, Artificial Sequence
  Description of Artificial Sequence: Synthetic oligonucleotide
  Antisense strand to SEQ ID NO: 2505268
aaucccaaccaauacauua

SEQ ID NO: 2505270 - RNA, 19 nt, Artificial Sequence
  Description of Artificial Sequence: Synthetic oligonucleotide
  Sense strand starting at position 586 of SEQ ID NO: 1888025
auugguugggauugaccua

SEQ ID NO: 2505271 - RNA, 19 nt, Artificial Sequence
  Description of Artificial Sequence: Synthetic oligonucleotide
  Antisense strand to SEQ ID NO: 2505270
uaggucaaucccaaccaau

SEQ ID NO: 2505272 - RNA, 19 nt, Artificial Sequence
  Description of Artificial Sequence: Synthetic oligonucleotide
  Sense strand starting at position 660 of SEQ ID NO: 1888025
aagcuaugucccuaggacu

SEQ ID NO: 2505273 - RNA, 19 nt, Artificial Sequence
  Description of Artificial Sequence: Synthetic oligonucleotide
  Antisense strand to SEQ ID NO: 2505272
aguccuagggacauagcuu

SEQ ID NO: 2505274 - RNA, 19 nt, Artificial Sequence
  Description of Artificial Sequence: Synthetic oligonucleotide
  Sense strand starting at position 682 of SEQ ID NO: 1888025
aaguguguuguuuaaggau

SEQ ID NO: 2505275 - RNA, 19 nt, Artificial Sequence
  Description of Artificial Sequence: Synthetic oligonucleotide
  Antisense strand to SEQ ID NO: 2505274
auccuuaaacaacacacuu

SEQ ID NO: 2505276 - RNA, 19 nt, Artificial Sequence
  Description of Artificial Sequence: Synthetic oligonucleotide
  Sense strand starting at position 697 of SEQ ID NO: 1888025
ggaucuugcagagagccaa

SEQ ID NO: 2505277 - RNA, 19 nt, Artificial Sequence
  Description of Artificial Sequence: Synthetic oligonucleotide
  Antisense strand to SEQ ID NO: 2505276
uuggcucucugcaagaucc

SEQ ID NO: 2505278 - RNA, 19 nt, Artificial Sequence
  Description of Artificial Sequence: Synthetic oligonucleotide
  Sense strand starting at position 767 of SEQ ID NO: 1888025
gccucaaggcacuaggauu

SEQ ID NO: 2505279 - RNA, 19 nt, Artificial Sequence
  Description of Artificial Sequence: Synthetic oligonucleotide
  Antisense strand to SEQ ID NO: 2505278
aauccuagugccuugaggc

SEQ ID NO: 2505280 - RNA, 19 nt, Artificial Sequence
  Description of Artificial Sequence: Synthetic oligonucleotide
  Sense strand starting at position 1501 of SEQ ID NO: 1888025
gacaaugaguccucuuaug

SEQ ID NO: 2505281 - RNA, 19 nt, Artificial Sequence
  Description of Artificial Sequence: Synthetic oligonucleotide
  Antisense strand to SEQ ID NO: 2505280
cauaagaggacucauuguc

SEQ ID NO: 2505282 - RNA, 19 nt, Artificial Sequence
  Description of Artificial Sequence: Synthetic oligonucleotide
  Sense strand starting at position 2710 of SEQ ID NO: 1888025
cucuuauccugaccacagu

SEQ ID NO: 2505283 - RNA, 19 nt, Artificial Sequence
  Description of Artificial Sequence: Synthetic oligonucleotide
  Antisense strand to SEQ ID NO: 2505282
acuguggucaggauaagag

SEQ ID NO: 2505284 - RNA, 19 nt, Artificial Sequence
  Description of Artificial Sequence: Synthetic oligonucleotide
  Sense strand starting at position 3005 of SEQ ID NO: 1888025
ccaagacucuaggucugau

SEQ ID NO: 2505285 - RNA, 19 nt, Artificial Sequence
  Description of Artificial Sequence: Synthetic oligonucleotide
  Antisense strand to SEQ ID NO: 2505284
aucagaccuagagucuugg

SEQ ID NO: 2505286 - RNA, 19 nt, Artificial Sequence
  Description of Artificial Sequence: Synthetic oligonucleotide
  Sense strand starting at position 3008 of SEQ ID NO: 1888025
agacucuaggucugauauc

SEQ ID NO: 2505287 - RNA, 19 nt, Artificial Sequence
  Description of Artificial Sequence: Synthetic oligonucleotide
  Antisense strand to SEQ ID NO: 2505286
gauaucagaccuagagucu

SEQ ID NO: 2505288 - RNA, 19 nt, Artificial Sequence
  Description of Artificial Sequence: Synthetic oligonucleotide
  Sense strand starting at position 3087 of SEQ ID NO: 1888025
ccaguuacucuggacacuu

SEQ ID NO: 2505289 - RNA, 19 nt, Artificial Sequence
  Description of Artificial Sequence: Synthetic oligonucleotide
  Antisense strand to SEQ ID NO: 2505288
aaguguccagaguaacugg

SEQ ID NO: 2505290 - RNA, 19 nt, Artificial Sequence
  Description of Artificial Sequence: Synthetic oligonucleotide
  Sense strand starting at position 3098 of SEQ ID NO: 1888025
ggacacuucuugccauaac

SEQ ID NO: 2505291 - RNA, 19 nt, Artificial Sequence
  Description of Artificial Sequence: Synthetic oligonucleotide
  Antisense strand to SEQ ID NO: 2505290
guuauggcaagaagugucc

SEQ ID NO: 2505292 - RNA, 19 nt, Artificial Sequence
  Description of Artificial Sequence: Synthetic oligonucleotide
  Sense strand starting at position 3268 of SEQ ID NO: 1888025
ucucuuggauagcuugaua

SEQ ID NO: 2505293 - RNA, 19 nt, Artificial Sequence
  Description of Artificial Sequence: Synthetic oligonucleotide
  Antisense strand to SEQ ID NO: 2505292
uaucaagcuauccaagaga

SEQ ID NO: 2505294 - RNA, 19 nt, Artificial Sequence
  Description of Artificial Sequence: Synthetic oligonucleotide
  Sense strand starting at position 3281 of SEQ ID NO: 1888025
uugauacaguuucuuuaga

SEQ ID NO: 2505295 - RNA, 19 nt, Artificial Sequence
  Description of Artificial Sequence: Synthetic oligonucleotide
  Antisense strand to SEQ ID NO: 2505294
ucuaaagaaacuguaucaa

SEQ ID NO: 2505296 - RNA, 19 nt, Artificial Sequence
  Description of Artificial Sequence: Synthetic oligonucleotide
  Sense strand starting at position 3282 of SEQ ID NO: 1888025
ugauacaguuucuuuagaa

SEQ ID NO: 2505297 - RNA, 19 nt, Artificial Sequence
  Description of Artificial Sequence: Synthetic oligonucleotide
  Antisense strand to SEQ ID NO: 2505296
uucuaaagaaacuguauca

SEQ ID NO: 2505298 - RNA, 19 nt, Artificial Sequence
  Description of Artificial Sequence: Synthetic oligonucleotide
  Sense strand starting at position 3294 of SEQ ID NO: 1888025
uuuagaaaucugcauuguu

SEQ ID NO: 2505299 - RNA, 19 nt, Artificial Sequence
  Description of Artificial Sequence: Synthetic oligonucleotide
  Antisense strand to SEQ ID NO: 2505298
aacaaugcagauuucuaaa

SEQ ID NO: 2505300 - RNA, 19 nt, Artificial Sequence
  Description of Artificial Sequence: Synthetic oligonucleotide
  Sense strand starting at position 3319 of SEQ ID NO: 1888025
gguuuauggccauggagaa

SEQ ID NO: 2505301 - RNA, 19 nt, Artificial Sequence
  Description of Artificial Sequence: Synthetic oligonucleotide
  Antisense strand to SEQ ID NO: 2505300
uucuccauggccauaaacc

SEQ ID NO: 2505302 - RNA, 19 nt, Artificial Sequence
  Description of Artificial Sequence: Synthetic oligonucleotide
  Sense strand starting at position 3320 of SEQ ID NO: 1888025
guuuauggccauggagaaa

SEQ ID NO: 2505303 - RNA, 19 nt, Artificial Sequence
  Description of Artificial Sequence: Synthetic oligonucleotide
  Antisense strand to SEQ ID NO: 2505302
uuucuccauggccauaaac

SEQ ID NO: 2505304 - RNA, 19 nt, Artificial Sequence
  Description of Artificial Sequence: Synthetic oligonucleotide
  Sense strand starting at position 3553 of SEQ ID NO: 1888025
caacauggcgaaggauuaa

SEQ ID NO: 2505305 - RNA, 19 nt, Artificial Sequence
  Description of Artificial Sequence: Synthetic oligonucleotide
  Antisense strand to SEQ ID NO: 2505304
uuaauccuucgccauguug

SEQ ID NO: 2505306 - RNA, 19 nt, Artificial Sequence
  Description of Artificial Sequence: Synthetic oligonucleotide
  Sense strand starting at position 3666 of SEQ ID NO: 1888025
guccauauuuguucuugac

SEQ ID NO: 2505307 - RNA, 19 nt, Artificial Sequence
  Description of Artificial Sequence: Synthetic oligonucleotide
  Antisense strand to SEQ ID NO: 2505306
gucaagaacaaauauggac

SEQ ID NO: 2505308 - RNA, 19 nt, Artificial Sequence
  Description of Artificial Sequence: Synthetic oligonucleotide
  Sense strand starting at position 3682 of SEQ ID NO: 1888025
gacgaaucaccuuggcaca

SEQ ID NO: 2505309 - RNA, 19 nt, Artificial Sequence
  Description of Artificial Sequence: Synthetic oligonucleotide
  Antisense strand to SEQ ID NO: 2505308
ugugccaaggugauucguc

SEQ ID NO: 2505310 - RNA, 19 nt, Artificial Sequence
  Description of Artificial Sequence: Synthetic oligonucleotide
  Sense strand starting at position 3747 of SEQ ID NO: 1888025
uugaaugugucaccauauc

SEQ ID NO: 2505311 - RNA, 19 nt, Artificial Sequence
  Description of Artificial Sequence: Synthetic oligonucleotide
  Antisense strand to SEQ ID NO: 2505310
gauauggugacacauucaa

SEQ ID NO: 2505312 - RNA, 19 nt, Artificial Sequence
  Description of Artificial Sequence: Synthetic oligonucleotide
  Sense strand starting at position 3858 of SEQ ID NO: 1888025
uuuccaauucuuugagagu

SEQ ID NO: 2505313 - RNA, 19 nt, Artificial Sequence
  Description of Artificial Sequence: Synthetic oligonucleotide
  Antisense strand to SEQ ID NO: 2505312
acucucaaagaauuggaaa

SEQ ID NO: 2505314 - RNA, 19 nt, Artificial Sequence
  Description of Artificial Sequence: Synthetic oligonucleotide
  Sense strand starting at position 3885 of SEQ ID NO: 1888025
auucuugagagauguugga

SEQ ID NO: 2505315 - RNA, 19 nt, Artificial Sequence
  Description of Artificial Sequence: Synthetic oligonucleotide
  Antisense strand to SEQ ID NO: 2505314
uccaacaucucucaagaau

SEQ ID NO: 2505316 - RNA, 19 nt, Artificial Sequence
  Description of Artificial Sequence: Synthetic oligonucleotide
  Sense strand starting at position 3900 of SEQ ID NO: 1888025
uggauuaaguguguagaug

SEQ ID NO: 2505317 - RNA, 19 nt, Artificial Sequence
  Description of Artificial Sequence: Synthetic oligonucleotide
  Antisense strand to SEQ ID NO: 2505316
caucuacacacuuaaucca

SEQ ID NO: 2505318 - RNA, 19 nt, Artificial Sequence
  Description of Artificial Sequence: Synthetic oligonucleotide
  Sense strand starting at position 3934 of SEQ ID NO: 1888025
aaagccuuguugguaaaca

SEQ ID NO: 2505319 - RNA, 19 nt, Artificial Sequence
  Description of Artificial Sequence: Synthetic oligonucleotide
  Antisense strand to SEQ ID NO: 2505318
uguuuaccaacaaggcuuu

SEQ ID NO: 2505320 - RNA, 19 nt, Artificial Sequence
  Description of Artificial Sequence: Synthetic oligonucleotide
  Sense strand starting at position 3982 of SEQ ID NO: 1888025
aacucaaguguugauugua

SEQ ID NO: 2505321 - RNA, 19 nt, Artificial Sequence
  Description of Artificial Sequence: Synthetic oligonucleotide
  Antisense strand to SEQ ID NO: 2505320
uacaaucaacacuugaguu

SEQ ID NO: 2505322 - RNA, 19 nt, Artificial Sequence
  Description of Artificial Sequence: Synthetic oligonucleotide
  Sense strand starting at position 77 of SEQ ID NO: 1888026
agcaucauacuuuguggaa

SEQ ID NO: 2505323 - RNA, 19 nt, Artificial Sequence
  Description of Artificial Sequence: Synthetic oligonucleotide
  Antisense strand to SEQ ID NO: 2505322
uuccacaaaguaugaugcu

SEQ ID NO: 2505324 - RNA, 19 nt, Artificial Sequence
  Description of Artificial Sequence: Synthetic oligonucleotide
  Sense strand starting at position 78 of SEQ ID NO: 1888026
gcaucauacuuuguggaaa

SEQ ID NO: 2505325 - RNA, 19 nt, Artificial Sequence
  Description of Artificial Sequence: Synthetic oligonucleotide
  Antisense strand to SEQ ID NO: 2505324
uuuccacaaaguaugaugc

SEQ ID NO: 2505326 - RNA, 19 nt, Artificial Sequence
  Description of Artificial Sequence: Synthetic oligonucleotide
  Sense strand starting at position 155 of SEQ ID NO: 1888026
guaggacaucaauguaaca

SEQ ID NO: 2505327 - RNA, 19 nt, Artificial Sequence
  Description of Artificial Sequence: Synthetic oligonucleotide
  Antisense strand to SEQ ID NO: 2505326
uguuacauugauguccuac

SEQ ID NO: 2505328 - RNA, 19 nt, Artificial Sequence
  Description of Artificial Sequence: Synthetic oligonucleotide
  Sense strand starting at position 270 of SEQ ID NO: 1888026
ucaaaugauuauggccaga

SEQ ID NO: 2505329 - RNA, 19 nt, Artificial Sequence
  Description of Artificial Sequence: Synthetic oligonucleotide
  Antisense strand to SEQ ID NO: 2505328
ucuggccauaaucauuuga

SEQ ID NO: 2505330 - RNA, 19 nt, Artificial Sequence
  Description of Artificial Sequence: Synthetic oligonucleotide
  Sense strand starting at position 283 of SEQ ID NO: 1888026
gccagaauagcauguaguu

SEQ ID NO: 2505331 - RNA, 19 nt, Artificial Sequence
  Description of Artificial Sequence: Synthetic oligonucleotide
  Antisense strand to SEQ ID NO: 2505330
aacuacaugcuauucuggc

SEQ ID NO: 2505332 - RNA, 19 nt, Artificial Sequence
  Description of Artificial Sequence: Synthetic oligonucleotide
  Sense strand starting at position 431 of SEQ ID NO: 1888026
uggaguagcuaggauuacu

SEQ ID NO: 2505333 - RNA, 19 nt, Artificial Sequence
  Description of Artificial Sequence: Synthetic oligonucleotide
  Antisense strand to SEQ ID NO: 2505332
aguaauccuagcuacucca

SEQ ID NO: 2505334 - RNA, 19 nt, Artificial Sequence
  Description of Artificial Sequence: Synthetic oligonucleotide
  Sense strand starting at position 773 of SEQ ID NO: 1888026
gccauugucugccagggaa

SEQ ID NO: 2505335 - RNA, 19 nt, Artificial Sequence
  Description of Artificial Sequence: Synthetic oligonucleotide
  Antisense strand to SEQ ID NO: 2505334
uucccuggcagacaauggc

SEQ ID NO: 2505336 - RNA, 19 nt, Artificial Sequence
  Description of Artificial Sequence: Synthetic oligonucleotide
  Sense strand starting at position 775 of SEQ ID NO: 1888026
cauugucugccagggaaag

SEQ ID NO: 2505337 - RNA, 19 nt, Artificial Sequence
  Description of Artificial Sequence: Synthetic oligonucleotide
  Antisense strand to SEQ ID NO: 2505336
cuuucccuggcagacaaug

SEQ ID NO: 2505338 - RNA, 19 nt, Artificial Sequence
  Description of Artificial Sequence: Synthetic oligonucleotide
  Sense strand starting at position 786 of SEQ ID NO: 1888026
agggaaagcucauaccgau

SEQ ID NO: 2505339 - RNA, 19 nt, Artificial Sequence
  Description of Artificial Sequence: Synthetic oligonucleotide
  Antisense strand to SEQ ID NO: 2505338
aucgguaugagcuuucccu

SEQ ID NO: 2505340 - RNA, 19 nt, Artificial Sequence
  Description of Artificial Sequence: Synthetic oligonucleotide
  Sense strand starting at position 822 of SEQ ID NO: 1888026
caccucgagucucauagaa

SEQ ID NO: 2505341 - RNA, 19 nt, Artificial Sequence
  Description of Artificial Sequence: Synthetic oligonucleotide
  Antisense strand to SEQ ID NO: 2505340
uucuaugagacucgaggug

SEQ ID NO: 2505342 - RNA, 19 nt, Artificial Sequence
  Description of Artificial Sequence: Synthetic oligonucleotide
  Sense strand starting at position 824 of SEQ ID NO: 1888026
ccucgagucucauagaaac

SEQ ID NO: 2505343 - RNA, 19 nt, Artificial Sequence
  Description of Artificial Sequence: Synthetic oligonucleotide
  Antisense strand to SEQ ID NO: 2505342
guuucuaugagacucgagg

SEQ ID NO: 2505344 - RNA, 19 nt, Artificial Sequence
  Description of Artificial Sequence: Synthetic oligonucleotide
  Sense strand starting at position 903 of SEQ ID NO: 1888026
gcguuaagaucauggugug

SEQ ID NO: 2505345 - RNA, 19 nt, Artificial Sequence
  Description of Artificial Sequence: Synthetic oligonucleotide
  Antisense strand to SEQ ID NO: 2505344
cacaccaugaucuuaacgc

SEQ ID NO: 2505346 - RNA, 19 nt, Artificial Sequence
  Description of Artificial Sequence: Synthetic oligonucleotide
  Sense strand starting at position 1048 of SEQ ID NO: 1888026
gcccaaguuucugguaaga

SEQ ID NO: 2505347 - RNA, 19 nt, Artificial Sequence
  Description of Artificial Sequence: Synthetic oligonucleotide
  Antisense strand to SEQ ID NO: 2505346
ucuuaccagaaacuugggc

SEQ ID NO: 2505348 - RNA, 19 nt, Artificial Sequence
  Description of Artificial Sequence: Synthetic oligonucleotide
  Sense strand starting at position 1050 of SEQ ID NO: 1888026
ccaaguuucugguaagaaa

SEQ ID NO: 2505349 - RNA, 19 nt, Artificial Sequence
  Description of Artificial Sequence: Synthetic oligonucleotide
  Antisense strand to SEQ ID NO: 2505348
uuucuuaccagaaacuugg

SEQ ID NO: 2505350 - RNA, 19 nt, Artificial Sequence
  Description of Artificial Sequence: Synthetic oligonucleotide
  Sense strand starting at position 1053 of SEQ ID NO: 1888026
aguuucugguaagaaauca

SEQ ID NO: 2505351 - RNA, 19 nt, Artificial Sequence
  Description of Artificial Sequence: Synthetic oligonucleotide
  Antisense strand to SEQ ID NO: 2505350
ugauuucuuaccagaaacu

SEQ ID NO: 2505352 - RNA, 19 nt, Artificial Sequence
  Description of Artificial Sequence: Synthetic oligonucleotide
  Sense strand starting at position 1101 of SEQ ID NO: 1888026
gugggaugaucagcccaca

SEQ ID NO: 2505353 - RNA, 19 nt, Artificial Sequence
  Description of Artificial Sequence: Synthetic oligonucleotide
  Antisense strand to SEQ ID NO: 2505352
ugugggcugaucaucccac

SEQ ID NO: 2505354 - RNA, 19 nt, Artificial Sequence
  Description of Artificial Sequence: Synthetic oligonucleotide
  Sense strand starting at position 1173 of SEQ ID NO: 1888026
acucgugagucccgggaaa

SEQ ID NO: 2505355 - RNA, 19 nt, Artificial Sequence
  Description of Artificial Sequence: Synthetic oligonucleotide
  Antisense strand to SEQ ID NO: 2505354
uuucccgggacucacgagu

SEQ ID NO: 2505356 - RNA, 19 nt, Artificial Sequence
  Description of Artificial Sequence: Synthetic oligonucleotide
  Sense strand starting at position 1175 of SEQ ID NO: 1888026
ucgugagucccgggaaaca

SEQ ID NO: 2505357 - RNA, 19 nt, Artificial Sequence
  Description of Artificial Sequence: Synthetic oligonucleotide
  Antisense strand to SEQ ID NO: 2505356
uguuucccgggacucacga

SEQ ID NO: 2505358 - RNA, 19 nt, Artificial Sequence
  Description of Artificial Sequence: Synthetic oligonucleotide
  Sense strand starting at position 1632 of SEQ ID NO: 1888026
gcaguuacccggugaucca

SEQ ID NO: 2505359 - RNA, 19 nt, Artificial Sequence
  Description of Artificial Sequence: Synthetic oligonucleotide
  Antisense strand to SEQ ID NO: 2505358
uggaucaccggguaacugc

SEQ ID NO: 2505360 - RNA, 19 nt, Artificial Sequence
  Description of Artificial Sequence: Synthetic oligonucleotide
  Sense strand starting at position 1633 of SEQ ID NO: 1888026
caguuacccggugauccau

SEQ ID NO: 2505361 - RNA, 19 nt, Artificial Sequence
  Description of Artificial Sequence: Synthetic oligonucleotide
  Antisense strand to SEQ ID NO: 2505360
auggaucaccggguaacug

SEQ ID NO: 2505362 - RNA, 19 nt, Artificial Sequence
  Description of Artificial Sequence: Synthetic oligonucleotide
  Sense strand starting at position 2094 of SEQ ID NO: 1888026
uggguuugcugggauccaa

SEQ ID NO: 2505363 - RNA, 19 nt, Artificial Sequence
  Description of Artificial Sequence: Synthetic oligonucleotide
  Antisense strand to SEQ ID NO: 2505362
uuggaucccagcaaaccca

SEQ ID NO: 2505364 - RNA, 19 nt, Artificial Sequence
  Description of Artificial Sequence: Synthetic oligonucleotide
  Sense strand starting at position 2454 of SEQ ID NO: 1888026
gcaaguuggaccuaugagu

SEQ ID NO: 2505365 - RNA, 19 nt, Artificial Sequence
  Description of Artificial Sequence: Synthetic oligonucleotide
  Antisense strand to SEQ ID NO: 2505364
acucauagguccaacuugc

SEQ ID NO: 2505366 - RNA, 19 nt, Artificial Sequence
  Description of Artificial Sequence: Synthetic oligonucleotide
  Sense strand starting at position 2549 of SEQ ID NO: 1888026
gcaacuucuucgcaggacu

SEQ ID NO: 2505367 - RNA, 19 nt, Artificial Sequence
  Description of Artificial Sequence: Synthetic oligonucleotide
  Antisense strand to SEQ ID NO: 2505366
aguccugcgaagaaguugc

SEQ ID NO: 2505368 - RNA, 19 nt, Artificial Sequence
  Description of Artificial Sequence: Synthetic oligonucleotide
  Sense strand starting at position 2769 of SEQ ID NO: 1888026
gagggagcucgccgucuaa

SEQ ID NO: 2505369 - RNA, 19 nt, Artificial Sequence
  Description of Artificial Sequence: Synthetic oligonucleotide
  Antisense strand to SEQ ID NO: 2505368
uuagacggcgagcucccuc

SEQ ID NO: 2505370 - RNA, 19 nt, Artificial Sequence
  Description of Artificial Sequence: Synthetic oligonucleotide
  Sense strand starting at position 2772 of SEQ ID NO: 1888026
ggagcucgccgucuaaugu

SEQ ID NO: 2505371 - RNA, 19 nt, Artificial Sequence
  Description of Artificial Sequence: Synthetic oligonucleotide
  Antisense strand to SEQ ID NO: 2505370
acauuagacggcgagcucc

SEQ ID NO: 2505372 - RNA, 19 nt, Artificial Sequence
  Description of Artificial Sequence: Synthetic oligonucleotide
  Sense strand starting at position 2928 of SEQ ID NO: 1888026
ucgcgucaccucgcaauau

SEQ ID NO: 2505373 - RNA, 19 nt, Artificial Sequence
  Description of Artificial Sequence: Synthetic oligonucleotide
  Antisense strand to SEQ ID NO: 2505372
auauugcgaggugacgcga

SEQ ID NO: 2505374 - RNA, 19 nt, Artificial Sequence
  Description of Artificial Sequence: Synthetic oligonucleotide
  Sense strand starting at position 2932 of SEQ ID NO: 1888026
gucaccucgcaauaugaga

SEQ ID NO: 2505375 - RNA, 19 nt, Artificial Sequence
  Description of Artificial Sequence: Synthetic oligonucleotide
  Antisense strand to SEQ ID NO: 2505374
ucucauauugcgaggugac

SEQ ID NO: 2505376 - RNA, 19 nt, Artificial Sequence
  Description of Artificial Sequence: Synthetic oligonucleotide
  Sense strand starting at position 3287 of SEQ ID NO: 1888026
augccuucuccaggacuaa

SEQ ID NO: 2505377 - RNA, 19 nt, Artificial Sequence
  Description of Artificial Sequence: Synthetic oligonucleotide
  Antisense strand to SEQ ID NO: 2505376
uuaguccuggagaaggcau

SEQ ID NO: 2505378 - RNA, 19 nt, Artificial Sequence
  Description of Artificial Sequence: Synthetic oligonucleotide
  Sense strand starting at position 3471 of SEQ ID NO: 1888026
ucacauuaugaauggcuga

SEQ ID NO: 2505379 - RNA, 19 nt, Artificial Sequence
  Description of Artificial Sequence: Synthetic oligonucleotide
  Antisense strand to SEQ ID NO: 2505378
ucagccauucauaauguga

SEQ ID NO: 2505380 - RNA, 19 nt, Artificial Sequence
  Description of Artificial Sequence: Synthetic oligonucleotide
  Sense strand starting at position 3474 of SEQ ID NO: 1888026
cauuaugaauggcugagaa

SEQ ID NO: 2505381 - RNA, 19 nt, Artificial Sequence
  Description of Artificial Sequence: Synthetic oligonucleotide
  Antisense strand to SEQ ID NO: 2505380
uucucagccauucauaaug

SEQ ID NO: 2505382 - RNA, 19 nt, Artificial Sequence
  Description of Artificial Sequence: Synthetic oligonucleotide
  Sense strand starting at position 3487 of SEQ ID NO: 1888026
ugagaauucuggcccugga

SEQ ID NO: 2505383 - RNA, 19 nt, Artificial Sequence
  Description of Artificial Sequence: Synthetic oligonucleotide
  Antisense strand to SEQ ID NO: 2505382
uccagggccagaauucuca

SEQ ID NO: 2505384 - RNA, 19 nt, Artificial Sequence
  Description of Artificial Sequence: Synthetic oligonucleotide
  Sense strand starting at position 3490 of SEQ ID NO: 1888026
gaauucuggcccuggaguu

SEQ ID NO: 2505385 - RNA, 19 nt, Artificial Sequence
  Description of Artificial Sequence: Synthetic oligonucleotide
  Antisense strand to SEQ ID NO: 2505384
aacuccagggccagaauuc

SEQ ID NO: 2505386 - RNA, 19 nt, Artificial Sequence
  Description of Artificial Sequence: Synthetic oligonucleotide
  Sense strand starting at position 3491 of SEQ ID NO: 1888026
aauucuggcccuggaguua

SEQ ID NO: 2505387 - RNA, 19 nt, Artificial Sequence
  Description of Artificial Sequence: Synthetic oligonucleotide
  Antisense strand to SEQ ID NO: 2505386
uaacuccagggccagaauu

SEQ ID NO: 2505388 - RNA, 19 nt, Artificial Sequence
  Description of Artificial Sequence: Synthetic oligonucleotide
  Sense strand starting at position 3631 of SEQ ID NO: 1888026
uccuccgucugggaugauu

SEQ ID NO: 2505389 - RNA, 19 nt, Artificial Sequence
  Description of Artificial Sequence: Synthetic oligonucleotide
  Antisense strand to SEQ ID NO: 2505388
aaucaucccagacggagga

SEQ ID NO: 2505390 - RNA, 19 nt, Artificial Sequence
  Description of Artificial Sequence: Synthetic oligonucleotide
  Sense strand starting at position 3639 of SEQ ID NO: 1888026
cugggaugauugugaagau

SEQ ID NO: 2505391 - RNA, 19 nt, Artificial Sequence
  Description of Artificial Sequence: Synthetic oligonucleotide
  Antisense strand to SEQ ID NO: 2505390
aucuucacaaucaucccag

SEQ ID NO: 2505392 - RNA, 19 nt, Artificial Sequence
  Description of Artificial Sequence: Synthetic oligonucleotide
  Sense strand starting at position 3640 of SEQ ID NO: 1888026
ugggaugauugugaagauu

SEQ ID NO: 2505393 - RNA, 19 nt, Artificial Sequence
  Description of Artificial Sequence: Synthetic oligonucleotide
  Antisense strand to SEQ ID NO: 2505392
aaucuucacaaucauccca

SEQ ID NO: 2505394 - RNA, 19 nt, Artificial Sequence
  Description of Artificial Sequence: Synthetic oligonucleotide
  Sense strand starting at position 3705 of SEQ ID NO: 1888026
agcucauguucagggaaug

SEQ ID NO: 2505395 - RNA, 19 nt, Artificial Sequence
  Description of Artificial Sequence: Synthetic oligonucleotide
  Antisense strand to SEQ ID NO: 2505394
cauucccugaacaugagcu

SEQ ID NO: 2505396 - RNA, 19 nt, Artificial Sequence
  Description of Artificial Sequence: Synthetic oligonucleotide
  Sense strand starting at position 134 of SEQ ID NO: 1888027
gcacuuacuuaccgaggaa

SEQ ID NO: 2505397 - RNA, 19 nt, Artificial Sequence
  Description of Artificial Sequence: Synthetic oligonucleotide
  Antisense strand to SEQ ID NO: 2505396
uuccucgguaaguaagugc

SEQ ID NO: 2505398 - RNA, 19 nt, Artificial Sequence
  Description of Artificial Sequence: Synthetic oligonucleotide
  Sense strand starting at position 219 of SEQ ID NO: 1888027
gggccaaguuguuuccaua

SEQ ID NO: 2505399 - RNA, 19 nt, Artificial Sequence
  Description of Artificial Sequence: Synthetic oligonucleotide
  Antisense strand to SEQ ID NO: 2505398
uauggaaacaacuuggccc

SEQ ID NO: 2505400 - RNA, 19 nt, Artificial Sequence
  Description of Artificial Sequence: Synthetic oligonucleotide
  Sense strand starting at position 472 of SEQ ID NO: 1888027
ugaagacagcggcauuaau

SEQ ID NO: 2505401 - RNA, 19 nt, Artificial Sequence
  Description of Artificial Sequence: Synthetic oligonucleotide
  Antisense strand to SEQ ID NO: 2505400
auuaaugccgcugucuuca

SEQ ID NO: 2505402 - RNA, 19 nt, Artificial Sequence
  Description of Artificial Sequence: Synthetic oligonucleotide
  Sense strand starting at position 652 of SEQ ID NO: 1888027
gaggccuggugucugcaaa

SEQ ID NO: 2505403 - RNA, 19 nt, Artificial Sequence
  Description of Artificial Sequence: Synthetic oligonucleotide
  Antisense strand to SEQ ID NO: 2505402
uuugcagacaccaggccuc

SEQ ID NO: 2505404 - RNA, 19 nt, Artificial Sequence
  Description of Artificial Sequence: Synthetic oligonucleotide
  Sense strand starting at position 2062 of SEQ ID NO: 1888027
gaugcagauccuggaucuu

SEQ ID NO: 2505405 - RNA, 19 nt, Artificial Sequence
  Description of Artificial Sequence: Synthetic oligonucleotide
  Antisense strand to SEQ ID NO: 2505404
aagauccaggaucugcauc

SEQ ID NO: 2505406 - RNA, 19 nt, Artificial Sequence
  Description of Artificial Sequence: Synthetic oligonucleotide
  Sense strand starting at position 2068 of SEQ ID NO: 1888027
gauccuggaucuuaaagga

SEQ ID NO: 2505407 - RNA, 19 nt, Artificial Sequence
  Description of Artificial Sequence: Synthetic oligonucleotide
  Antisense strand to SEQ ID NO: 2505406
uccuuuaagauccaggauc

SEQ ID NO: 2505408 - RNA, 19 nt, Artificial Sequence
  Description of Artificial Sequence: Synthetic oligonucleotide
  Sense strand starting at position 2126 of SEQ ID NO: 1888027
gcacaugugaggugacaca

SEQ ID NO: 2505409 - RNA, 19 nt, Artificial Sequence
  Description of Artificial Sequence: Synthetic oligonucleotide
  Antisense strand to SEQ ID NO: 2505408
ugugucaccucacaugugc

SEQ ID NO: 2505410 - RNA, 19 nt, Artificial Sequence
  Description of Artificial Sequence: Synthetic oligonucleotide
  Sense strand starting at position 2182 of SEQ ID NO: 1888027
agcacauucucggcggaga

SEQ ID NO: 2505411 - RNA, 19 nt, Artificial Sequence
  Description of Artificial Sequence: Synthetic oligonucleotide
  Antisense strand to SEQ ID NO: 2505410
ucuccgccgagaaugugcu

SEQ ID NO: 2505412 - RNA, 19 nt, Artificial Sequence
  Description of Artificial Sequence: Synthetic oligonucleotide
  Sense strand starting at position 2183 of SEQ ID NO: 1888027
gcacauucucggcggagau

SEQ ID NO: 2505413 - RNA, 19 nt, Artificial Sequence
  Description of Artificial Sequence: Synthetic oligonucleotide
  Antisense strand to SEQ ID NO: 2505412
aucuccgccgagaaugugc

SEQ ID NO: 2505414 - RNA, 19 nt, Artificial Sequence
  Description of Artificial Sequence: Synthetic oligonucleotide
  Sense strand starting at position 2583 of SEQ ID NO: 1888027
augggcaccucgugagaaa

SEQ ID NO: 2505415 - RNA, 19 nt, Artificial Sequence
  Description of Artificial Sequence: Synthetic oligonucleotide
  Antisense strand to SEQ ID NO: 2505414
uuucucacgaggugcccau

SEQ ID NO: 2505416 - RNA, 19 nt, Artificial Sequence
  Description of Artificial Sequence: Synthetic oligonucleotide
  Sense strand starting at position 2656 of SEQ ID NO: 1888027
gccugcaguccugagcuuu

SEQ ID NO: 2505417 - RNA, 19 nt, Artificial Sequence
  Description of Artificial Sequence: Synthetic oligonucleotide
  Antisense strand to SEQ ID NO: 2505416
aaagcucaggacugcaggc

SEQ ID NO: 2505418 - RNA, 19 nt, Artificial Sequence
  Description of Artificial Sequence: Synthetic oligonucleotide
  Sense strand starting at position 2697 of SEQ ID NO: 1888027
cugccuccugggugugauu

SEQ ID NO: 2505419 - RNA, 19 nt, Artificial Sequence
  Description of Artificial Sequence: Synthetic oligonucleotide
  Antisense strand to SEQ ID NO: 2505418
aaucacacccaggaggcag

SEQ ID NO: 2505420 - RNA, 19 nt, Artificial Sequence
  Description of Artificial Sequence: Synthetic oligonucleotide
  Sense strand starting at position 3156 of SEQ ID NO: 1888027
gagcauguggccugagaag

SEQ ID NO: 2505421 - RNA, 19 nt, Artificial Sequence
  Description of Artificial Sequence: Synthetic oligonucleotide
  Antisense strand to SEQ ID NO: 2505420
cuucucaggccacaugcuc

SEQ ID NO: 2505422 - RNA, 19 nt, Artificial Sequence
  Description of Artificial Sequence: Synthetic oligonucleotide
  Sense strand starting at position 3207 of SEQ ID NO: 1888027
acgucagacucaggauagu

SEQ ID NO: 2505423 - RNA, 19 nt, Artificial Sequence
  Description of Artificial Sequence: Synthetic oligonucleotide
  Antisense strand to SEQ ID NO: 2505422
acuauccugagucugacgu

SEQ ID NO: 2505424 - RNA, 19 nt, Artificial Sequence
  Description of Artificial Sequence: Synthetic oligonucleotide
  Sense strand starting at position 3245 of SEQ ID NO: 1888027
agaagcuucuccucuguua

SEQ ID NO: 2505425 - RNA, 19 nt, Artificial Sequence
  Description of Artificial Sequence: Synthetic oligonucleotide
  Antisense strand to SEQ ID NO: 2505424
uaacagaggagaagcuucu

SEQ ID NO: 2505426 - RNA, 19 nt, Artificial Sequence
  Description of Artificial Sequence: Synthetic oligonucleotide
  Sense strand starting at position 3380 of SEQ ID NO: 1888027
ccaggacugucucucaaug

SEQ ID NO: 2505427 - RNA, 19 nt, Artificial Sequence
  Description of Artificial Sequence: Synthetic oligonucleotide
  Antisense strand to SEQ ID NO: 2505426
cauugagagacaguccugg

SEQ ID NO: 2505428 - RNA, 19 nt, Artificial Sequence
  Description of Artificial Sequence: Synthetic oligonucleotide
  Sense strand starting at position 3428 of SEQ ID NO: 1888027
gcccuauaacucugagaug

SEQ ID NO: 2505429 - RNA, 19 nt, Artificial Sequence
  Description of Artificial Sequence: Synthetic oligonucleotide
  Antisense strand to SEQ ID NO: 2505428
caucucagaguuauagggc

SEQ ID NO: 2505430 - RNA, 19 nt, Artificial Sequence
  Description of Artificial Sequence: Synthetic oligonucleotide
  Sense strand starting at position 3507 of SEQ ID NO: 1888027
gccagcucggugugcuauu

SEQ ID NO: 2505431 - RNA, 19 nt, Artificial Sequence
  Description of Artificial Sequence: Synthetic oligonucleotide
  Antisense strand to SEQ ID NO: 2505430
aauagcacaccgagcuggc

SEQ ID NO: 2505432 - RNA, 19 nt, Artificial Sequence
  Description of Artificial Sequence: Synthetic oligonucleotide
  Sense strand starting at position 3731 of SEQ ID NO: 1888027
gcaccuuggucacuuuaaa

SEQ ID NO: 2505433 - RNA, 19 nt, Artificial Sequence
  Description of Artificial Sequence: Synthetic oligonucleotide
  Antisense strand to SEQ ID NO: 2505432
uuuaaagugaccaaggugc

SEQ ID NO: 2505434 - RNA, 19 nt, Artificial Sequence
  Description of Artificial Sequence: Synthetic oligonucleotide
  Sense strand starting at position 54 of SEQ ID NO: 1888028
aucugaucgccuuggcauu

SEQ ID NO: 2505435 - RNA, 19 nt, Artificial Sequence
  Description of Artificial Sequence: Synthetic oligonucleotide
  Antisense strand to SEQ ID NO: 2505434
aaugccaaggcgaucagau

SEQ ID NO: 2505436 - RNA, 19 nt, Artificial Sequence
  Description of Artificial Sequence: Synthetic oligonucleotide
  Sense strand starting at position 61 of SEQ ID NO: 1888028
cgccuuggcauuuagugau

SEQ ID NO: 2505437 - RNA, 19 nt, Artificial Sequence
  Description of Artificial Sequence: Synthetic oligonucleotide
  Antisense strand to SEQ ID NO: 2505436
aucacuaaaugccaaggcg

SEQ ID NO: 2505438 - RNA, 19 nt, Artificial Sequence
  Description of Artificial Sequence: Synthetic oligonucleotide
  Sense strand starting at position 64 of SEQ ID NO: 1888028
cuuggcauuuagugauucu

SEQ ID NO: 2505439 - RNA, 19 nt, Artificial Sequence
  Description of Artificial Sequence: Synthetic oligonucleotide
  Antisense strand to SEQ ID NO: 2505438
agaaucacuaaaugccaag

SEQ ID NO: 2505440 - RNA, 19 nt, Artificial Sequence
  Description of Artificial Sequence: Synthetic oligonucleotide
  Sense strand starting at position 67 of SEQ ID NO: 1888028
ggcauuuagugauucuuuc

SEQ ID NO: 2505441 - RNA, 19 nt, Artificial Sequence
  Description of Artificial Sequence: Synthetic oligonucleotide
  Antisense strand to SEQ ID NO: 2505440
gaaagaaucacuaaaugcc

SEQ ID NO: 2505442 - RNA, 19 nt, Artificial Sequence
  Description of Artificial Sequence: Synthetic oligonucleotide
  Sense strand starting at position 73 of SEQ ID NO: 1888028
uagugauucuuucccugga

SEQ ID NO: 2505443 - RNA, 19 nt, Artificial Sequence
  Description of Artificial Sequence: Synthetic oligonucleotide
  Antisense strand to SEQ ID NO: 2505442
uccagggaaagaaucacua

SEQ ID NO: 2505444 - RNA, 19 nt, Artificial Sequence
  Description of Artificial Sequence: Synthetic oligonucleotide
  Sense strand starting at position 74 of SEQ ID NO: 1888028
agugauucuuucccuggaa

SEQ ID NO: 2505445 - RNA, 19 nt, Artificial Sequence
  Description of Artificial Sequence: Synthetic oligonucleotide
  Antisense strand to SEQ ID NO: 2505444
uuccagggaaagaaucacu

SEQ ID NO: 2505446 - RNA, 19 nt, Artificial Sequence
  Description of Artificial Sequence: Synthetic oligonucleotide
  Sense strand starting at position 75 of SEQ ID NO: 1888028
gugauucuuucccuggaau

SEQ ID NO: 2505447 - RNA, 19 nt, Artificial Sequence
  Description of Artificial Sequence: Synthetic oligonucleotide
  Antisense strand to SEQ ID NO: 2505446
auuccagggaaagaaucac

SEQ ID NO: 2505448 - RNA, 19 nt, Artificial Sequence
  Description of Artificial Sequence: Synthetic oligonucleotide
  Sense strand starting at position 76 of SEQ ID NO: 1888028
ugauucuuucccuggaauu

SEQ ID NO: 2505449 - RNA, 19 nt, Artificial Sequence
  Description of Artificial Sequence: Synthetic oligonucleotide
  Antisense strand to SEQ ID NO: 2505448
aauuccagggaaagaauca

SEQ ID NO: 2505450 - RNA, 19 nt, Artificial Sequence
  Description of Artificial Sequence: Synthetic oligonucleotide
  Sense strand starting at position 169 of SEQ ID NO: 1888028
aggguucagcugggacaaa

SEQ ID NO: 2505451 - RNA, 19 nt, Artificial Sequence
  Description of Artificial Sequence: Synthetic oligonucleotide
  Antisense strand to SEQ ID NO: 2505450
uuugucccagcugaacccu

SEQ ID NO: 2505452 - RNA, 19 nt, Artificial Sequence
  Description of Artificial Sequence: Synthetic oligonucleotide
  Sense strand starting at position 334 of SEQ ID NO: 1888028
ggagucuuaccuuguccca

SEQ ID NO: 2505453 - RNA, 19 nt, Artificial Sequence
  Description of Artificial Sequence: Synthetic oligonucleotide
  Antisense strand to SEQ ID NO: 2505452
ugggacaagguaagacucc

SEQ ID NO: 2505454 - RNA, 19 nt, Artificial Sequence
  Description of Artificial Sequence: Synthetic oligonucleotide
  Sense strand starting at position 336 of SEQ ID NO: 1888028
agucuuaccuugucccaca

SEQ ID NO: 2505455 - RNA, 19 nt, Artificial Sequence
  Description of Artificial Sequence: Synthetic oligonucleotide
  Antisense strand to SEQ ID NO: 2505454
ugugggacaagguaagacu

SEQ ID NO: 2505456 - RNA, 19 nt, Artificial Sequence
  Description of Artificial Sequence: Synthetic oligonucleotide
  Sense strand starting at position 337 of SEQ ID NO: 1888028
gucuuaccuugucccacaa

SEQ ID NO: 2505457 - RNA, 19 nt, Artificial Sequence
  Description of Artificial Sequence: Synthetic oligonucleotide
  Antisense strand to SEQ ID NO: 2505456
uugugggacaagguaagac

SEQ ID NO: 2505458 - RNA, 19 nt, Artificial Sequence
  Description of Artificial Sequence: Synthetic oligonucleotide
  Sense strand starting at position 458 of SEQ ID NO: 1888028
gaccuugguccucgacaca

SEQ ID NO: 2505459 - RNA, 19 nt, Artificial Sequence
  Description of Artificial Sequence: Synthetic oligonucleotide
  Antisense strand to SEQ ID NO: 2505458
ugugucgaggaccaagguc

SEQ ID NO: 2505460 - RNA, 19 nt, Artificial Sequence
  Description of Artificial Sequence: Synthetic oligonucleotide
  Sense strand starting at position 514 of SEQ ID NO: 1888028
gcuggugccacucaaauga

SEQ ID NO: 2505461 - RNA, 19 nt, Artificial Sequence
  Description of Artificial Sequence: Synthetic oligonucleotide
  Antisense strand to SEQ ID NO: 2505460
ucauuugaguggcaccagc

SEQ ID NO: 2505462 - RNA, 19 nt, Artificial Sequence
  Description of Artificial Sequence: Synthetic oligonucleotide
  Sense strand starting at position 569 of SEQ ID NO: 1888028
ccagcuggacugugaauau

SEQ ID NO: 2505463 - RNA, 19 nt, Artificial Sequence
  Description of Artificial Sequence: Synthetic oligonucleotide
  Antisense strand to SEQ ID NO: 2505462
auauucacaguccagcugg

SEQ ID NO: 2505464 - RNA, 19 nt, Artificial Sequence
  Description of Artificial Sequence: Synthetic oligonucleotide
  Sense strand starting at position 578 of SEQ ID NO: 1888028
cugugaauaucacggcauc

SEQ ID NO: 2505465 - RNA, 19 nt, Artificial Sequence
  Description of Artificial Sequence: Synthetic oligonucleotide
  Antisense strand to SEQ ID NO: 2505464
gaugccgugauauucacag

SEQ ID NO: 2505466 - RNA, 19 nt, Artificial Sequence
  Description of Artificial Sequence: Synthetic oligonucleotide
  Sense strand starting at position 625 of SEQ ID NO: 1888028
uugagacccuuacuguuua

SEQ ID NO: 2505467 - RNA, 19 nt, Artificial Sequence
  Description of Artificial Sequence: Synthetic oligonucleotide
  Antisense strand to SEQ ID NO: 2505466
uaaacaguaagggucucaa

SEQ ID NO: 2505468 - RNA, 19 nt, Artificial Sequence
  Description of Artificial Sequence: Synthetic oligonucleotide
  Sense strand starting at position 680 of SEQ ID NO: 1888028
ccuuguaguucuuguuaaa

SEQ ID NO: 2505469 - RNA, 19 nt, Artificial Sequence
  Description of Artificial Sequence: Synthetic oligonucleotide
  Antisense strand to SEQ ID NO: 2505468
uuuaacaagaacuacaagg

SEQ ID NO: 2505470 - RNA, 19 nt, Artificial Sequence
  Description of Artificial Sequence: Synthetic oligonucleotide
  Sense strand starting at position 716 of SEQ ID NO: 1888028
ccaggaaggucugaggaga

SEQ ID NO: 2505471 - RNA, 19 nt, Artificial Sequence
  Description of Artificial Sequence: Synthetic oligonucleotide
  Antisense strand to SEQ ID NO: 2505470
ucuccucagaccuuccugg

SEQ ID NO: 2505472 - RNA, 19 nt, Artificial Sequence
  Description of Artificial Sequence: Synthetic oligonucleotide
  Sense strand starting at position 762 of SEQ ID NO: 1888028
gggcuauacuggcuuccaa

SEQ ID NO: 2505473 - RNA, 19 nt, Artificial Sequence
  Description of Artificial Sequence: Synthetic oligonucleotide
  Antisense strand to SEQ ID NO: 2505472
uuggaagccaguauagccc

SEQ ID NO: 2505474 - RNA, 19 nt, Artificial Sequence
  Description of Artificial Sequence: Synthetic oligonucleotide
  Sense strand starting at position 865 of SEQ ID NO: 1888028
ccugccgucucaggugaaa

SEQ ID NO: 2505475 - RNA, 19 nt, Artificial Sequence
  Description of Artificial Sequence: Synthetic oligonucleotide
  Antisense strand to SEQ ID NO: 2505474
uuucaccugagacggcagg

SEQ ID NO: 2505476 - RNA, 19 nt, Artificial Sequence
  Description of Artificial Sequence: Synthetic oligonucleotide
  Sense strand starting at position 867 of SEQ ID NO: 1888028
ugccgucucaggugaaauu

SEQ ID NO: 2505477 - RNA, 19 nt, Artificial Sequence
  Description of Artificial Sequence: Synthetic oligonucleotide
  Antisense strand to SEQ ID NO: 2505476
aauuucaccugagacggca

SEQ ID NO: 2505478 - RNA, 19 nt, Artificial Sequence
  Description of Artificial Sequence: Synthetic oligonucleotide
  Sense strand starting at position 868 of SEQ ID NO: 1888028
gccgucucaggugaaauuu

SEQ ID NO: 2505479 - RNA, 19 nt, Artificial Sequence
  Description of Artificial Sequence: Synthetic oligonucleotide
  Antisense strand to SEQ ID NO: 2505478
aaauuucaccugagacggc

SEQ ID NO: 2505480 - RNA, 19 nt, Artificial Sequence
  Description of Artificial Sequence: Synthetic oligonucleotide
  Sense strand starting at position 877 of SEQ ID NO: 1888028
ggugaaauuuggcuuccgu

SEQ ID NO: 2505481 - RNA, 19 nt, Artificial Sequence
  Description of Artificial Sequence: Synthetic oligonucleotide
  Antisense strand to SEQ ID NO: 2505480
acggaagccaaauuucacc

SEQ ID NO: 2505482 - RNA, 19 nt, Artificial Sequence
  Description of Artificial Sequence: Synthetic oligonucleotide
  Sense strand starting at position 1023 of SEQ ID NO: 1888028
caguacucguccuucugaa

SEQ ID NO: 2505483 - RNA, 19 nt, Artificial Sequence
  Description of Artificial Sequence: Synthetic oligonucleotide
  Antisense strand to SEQ ID NO: 2505482
uucagaaggacgaguacug

SEQ ID NO: 2505484 - RNA, 19 nt, Artificial Sequence
  Description of Artificial Sequence: Synthetic oligonucleotide
  Sense strand starting at position 1027 of SEQ ID NO: 1888028
acucguccuucugaaacau

SEQ ID NO: 2505485 - RNA, 19 nt, Artificial Sequence
  Description of Artificial Sequence: Synthetic oligonucleotide
  Antisense strand to SEQ ID NO: 2505484
auguuucagaaggacgagu

SEQ ID NO: 2505486 - RNA, 19 nt, Artificial Sequence
  Description of Artificial Sequence: Synthetic oligonucleotide
  Sense strand starting at position 1038 of SEQ ID NO: 1888028
ugaaacauguacuuguaca

SEQ ID NO: 2505487 - RNA, 19 nt, Artificial Sequence
  Description of Artificial Sequence: Synthetic oligonucleotide
  Antisense strand to SEQ ID NO: 2505486
uguacaaguacauguuuca

SEQ ID NO: 2505488 - RNA, 19 nt, Artificial Sequence
  Description of Artificial Sequence: Synthetic oligonucleotide
  Sense strand starting at position 1243 of SEQ ID NO: 1888028
uguaacuucucccagguca

SEQ ID NO: 2505489 - RNA, 19 nt, Artificial Sequence
  Description of Artificial Sequence: Synthetic oligonucleotide
  Antisense strand to SEQ ID NO: 2505488
ugaccugggagaaguuaca

SEQ ID NO: 2505490 - RNA, 19 nt, Artificial Sequence
  Description of Artificial Sequence: Synthetic oligonucleotide
  Sense strand starting at position 1271 of SEQ ID NO: 1888028
guguccugcucacagcaau

SEQ ID NO: 2505491 - RNA, 19 nt, Artificial Sequence
  Description of Artificial Sequence: Synthetic oligonucleotide
  Antisense strand to SEQ ID NO: 2505490
auugcugugagcaggacac

SEQ ID NO: 2505492 - RNA, 19 nt, Artificial Sequence
  Description of Artificial Sequence: Synthetic oligonucleotide
  Sense strand starting at position 3156 of SEQ ID NO: 1888028
agcccuuuguugucagaug

SEQ ID NO: 2505493 - RNA, 19 nt, Artificial Sequence
  Description of Artificial Sequence: Synthetic oligonucleotide
  Antisense strand to SEQ ID NO: 2505492
caucugacaacaaagggcu

SEQ ID NO: 2505494 - RNA, 19 nt, Artificial Sequence
  Description of Artificial Sequence: Synthetic oligonucleotide
  Sense strand starting at position 3286 of SEQ ID NO: 1888028
gucuguguucaggcgucua

SEQ ID NO: 2505495 - RNA, 19 nt, Artificial Sequence
  Description of Artificial Sequence: Synthetic oligonucleotide
  Antisense strand to SEQ ID NO: 2505494
uagacgccugaacacagac

SEQ ID NO: 2505496 - RNA, 19 nt, Artificial Sequence
  Description of Artificial Sequence: Synthetic oligonucleotide
  Sense strand starting at position 3607 of SEQ ID NO: 1888028
gugcaaggcuuauguggaa

SEQ ID NO: 2505497 - RNA, 19 nt, Artificial Sequence
  Description of Artificial Sequence: Synthetic oligonucleotide
  Antisense strand to SEQ ID NO: 2505496
uuccacauaagccuugcac

SEQ ID NO: 2505498 - RNA, 19 nt, Artificial Sequence
  Description of Artificial Sequence: Synthetic oligonucleotide
  Sense strand starting at position 3612 of SEQ ID NO: 1888028
aggcuuauguggaagagag

SEQ ID NO: 2505499 - RNA, 19 nt, Artificial Sequence
  Description of Artificial Sequence: Synthetic oligonucleotide
  Antisense strand to SEQ ID NO: 2505498
cucucuuccacauaagccu

SEQ ID NO: 2505500 - RNA, 19 nt, Artificial Sequence
  Description of Artificial Sequence: Synthetic oligonucleotide
  Sense strand starting at position 3614 of SEQ ID NO: 1888028
gcuuauguggaagagagua

SEQ ID NO: 2505501 - RNA, 19 nt, Artificial Sequence
  Description of Artificial Sequence: Synthetic oligonucleotide
  Antisense strand to SEQ ID NO: 2505500
uacucucuuccacauaagc

SEQ ID NO: 2505502 - RNA, 19 nt, Artificial Sequence
  Description of Artificial Sequence: Synthetic oligonucleotide
  Sense strand starting at position 3627 of SEQ ID NO: 1888028
agaguaggucuccagccua

SEQ ID NO: 2505503 - RNA, 19 nt, Artificial Sequence
  Description of Artificial Sequence: Synthetic oligonucleotide
  Antisense strand to SEQ ID NO: 2505502
uaggcuggagaccuacucu

SEQ ID NO: 2505504 - RNA, 19 nt, Artificial Sequence
  Description of Artificial Sequence: Synthetic oligonucleotide
  Sense strand starting at position 178 of SEQ ID NO: 1888029
gauggaucaugccuggguu

SEQ ID NO: 2505505 - RNA, 19 nt, Artificial Sequence
  Description of Artificial Sequence: Synthetic oligonucleotide
  Antisense strand to SEQ ID NO: 2505504
aacccaggcaugauccauc

SEQ ID NO: 2505506 - RNA, 19 nt, Artificial Sequence
  Description of Artificial Sequence: Synthetic oligonucleotide
  Sense strand starting at position 181 of SEQ ID NO: 1888029
ggaucaugccuggguugaa

SEQ ID NO: 2505507 - RNA, 19 nt, Artificial Sequence
  Description of Artificial Sequence: Synthetic oligonucleotide
  Antisense strand to SEQ ID NO: 2505506
uucaacccaggcaugaucc

SEQ ID NO: 2505508 - RNA, 19 nt, Artificial Sequence
  Description of Artificial Sequence: Synthetic oligonucleotide
  Sense strand starting at position 182 of SEQ ID NO: 1888029
gaucaugccuggguugaau

SEQ ID NO: 2505509 - RNA, 19 nt, Artificial Sequence
  Description of Artificial Sequence: Synthetic oligonucleotide
  Antisense strand to SEQ ID NO: 2505508
auucaacccaggcaugauc

SEQ ID NO: 2505510 - RNA, 19 nt, Artificial Sequence
  Description of Artificial Sequence: Synthetic oligonucleotide
  Sense strand starting at position 236 of SEQ ID NO: 1888029
gggcucaaacccugauauc

SEQ ID NO: 2505511 - RNA, 19 nt, Artificial Sequence
  Description of Artificial Sequence: Synthetic oligonucleotide
  Antisense strand to SEQ ID NO: 2505510
gauaucaggguuugagccc

SEQ ID NO: 2505512 - RNA, 19 nt, Artificial Sequence
  Description of Artificial Sequence: Synthetic oligonucleotide
  Sense strand starting at position 237 of SEQ ID NO: 1888029
ggcucaaacccugauaucu

SEQ ID NO: 2505513 - RNA, 19 nt, Artificial Sequence
  Description of Artificial Sequence: Synthetic oligonucleotide
  Antisense strand to SEQ ID NO: 2505512
agauaucaggguuugagcc

SEQ ID NO: 2505514 - RNA, 19 nt, Artificial Sequence
  Description of Artificial Sequence: Synthetic oligonucleotide
  Sense strand starting at position 247 of SEQ ID NO: 1888029
cugauaucuuaagcaaaga

SEQ ID NO: 2505515 - RNA, 19 nt, Artificial Sequence
  Description of Artificial Sequence: Synthetic oligonucleotide
  Antisense strand to SEQ ID NO: 2505514
ucuuugcuuaagauaucag

SEQ ID NO: 2505516 - RNA, 19 nt, Artificial Sequence
  Description of Artificial Sequence: Synthetic oligonucleotide
  Sense strand starting at position 288 of SEQ ID NO: 1888029
ggaaaugugagaugugcuu

SEQ ID NO: 2505517 - RNA, 19 nt, Artificial Sequence
  Description of Artificial Sequence: Synthetic oligonucleotide
  Antisense strand to SEQ ID NO: 2505516
aagcacaucucacauuucc

SEQ ID NO: 2505518 - RNA, 19 nt, Artificial Sequence
  Description of Artificial Sequence: Synthetic oligonucleotide
  Sense strand starting at position 330 of SEQ ID NO: 1888029
ccaccugaguccucuugau

SEQ ID NO: 2505519 - RNA, 19 nt, Artificial Sequence
  Description of Artificial Sequence: Synthetic oligonucleotide
  Antisense strand to SEQ ID NO: 2505518
aucaagaggacucaggugg

SEQ ID NO: 2505520 - RNA, 19 nt, Artificial Sequence
  Description of Artificial Sequence: Synthetic oligonucleotide
  Sense strand starting at position 452 of SEQ ID NO: 1888029
gggucaauuugagguaauu

SEQ ID NO: 2505521 - RNA, 19 nt, Artificial Sequence
  Description of Artificial Sequence: Synthetic oligonucleotide
  Antisense strand to SEQ ID NO: 2505520
aauuaccucaaauugaccc

SEQ ID NO: 2505522 - RNA, 19 nt, Artificial Sequence
  Description of Artificial Sequence: Synthetic oligonucleotide
  Sense strand starting at position 634 of SEQ ID NO: 1888029
cccagugaacugugaguca

SEQ ID NO: 2505523 - RNA, 19 nt, Artificial Sequence
  Description of Artificial Sequence: Synthetic oligonucleotide
  Antisense strand to SEQ ID NO: 2505522
ugacucacaguucacuggg

SEQ ID NO: 2505524 - RNA, 19 nt, Artificial Sequence
  Description of Artificial Sequence: Synthetic oligonucleotide
  Sense strand starting at position 652 of SEQ ID NO: 1888029
agagccauuucuggagcua

SEQ ID NO: 2505525 - RNA, 19 nt, Artificial Sequence
  Description of Artificial Sequence: Synthetic oligonucleotide
  Antisense strand to SEQ ID NO: 2505524
uagcuccagaaauggcucu

SEQ ID NO: 2505526 - RNA, 19 nt, Artificial Sequence
  Description of Artificial Sequence: Synthetic oligonucleotide
  Sense strand starting at position 743 of SEQ ID NO: 1888029
ccuuacuggccauaaggau

SEQ ID NO: 2505527 - RNA, 19 nt, Artificial Sequence
  Description of Artificial Sequence: Synthetic oligonucleotide
  Antisense strand to SEQ ID NO: 2505526
auccuuauggccaguaagg

SEQ ID NO: 2505528 - RNA, 19 nt, Artificial Sequence
  Description of Artificial Sequence: Synthetic oligonucleotide
  Sense strand starting at position 1194 of SEQ ID NO: 1888029
ggccuuacagguuggauga

SEQ ID NO: 2505529 - RNA, 19 nt, Artificial Sequence
  Description of Artificial Sequence: Synthetic oligonucleotide
  Antisense strand to SEQ ID NO: 2505528
ucauccaaccuguaaggcc

SEQ ID NO: 2505530 - RNA, 19 nt, Artificial Sequence
  Description of Artificial Sequence: Synthetic oligonucleotide
  Sense strand starting at position 1331 of SEQ ID NO: 1888029
ugauaaaggguuugaggca

SEQ ID NO: 2505531 - RNA, 19 nt, Artificial Sequence
  Description of Artificial Sequence: Synthetic oligonucleotide
  Antisense strand to SEQ ID NO: 2505530
ugccucaaacccuuuauca

SEQ ID NO: 2505532 - RNA, 19 nt, Artificial Sequence
  Description of Artificial Sequence: Synthetic oligonucleotide
  Sense strand starting at position 1340 of SEQ ID NO: 1888029
guuugaggcagggaaguua

SEQ ID NO: 2505533 - RNA, 19 nt, Artificial Sequence
  Description of Artificial Sequence: Synthetic oligonucleotide
  Antisense strand to SEQ ID NO: 2505532
uaacuucccugccucaaac

SEQ ID NO: 2505534 - RNA, 19 nt, Artificial Sequence
  Description of Artificial Sequence: Synthetic oligonucleotide
  Sense strand starting at position 1348 of SEQ ID NO: 1888029
cagggaaguuaauugcuca

SEQ ID NO: 2505535 - RNA, 19 nt, Artificial Sequence
  Description of Artificial Sequence: Synthetic oligonucleotide
  Antisense strand to SEQ ID NO: 2505534
ugagcaauuaacuucccug

SEQ ID NO: 2505536 - RNA, 19 nt, Artificial Sequence
  Description of Artificial Sequence: Synthetic oligonucleotide
  Sense strand starting at position 1426 of SEQ ID NO: 1888029
ccggguucucuggguggua

SEQ ID NO: 2505537 - RNA, 19 nt, Artificial Sequence
  Description of Artificial Sequence: Synthetic oligonucleotide
  Antisense strand to SEQ ID NO: 2505536
uaccacccagagaacccgg

SEQ ID NO: 2505538 - RNA, 19 nt, Artificial Sequence
  Description of Artificial Sequence: Synthetic oligonucleotide
  Sense strand starting at position 1479 of SEQ ID NO: 1888029
gggugacacuuugcuggaa

SEQ ID NO: 2505539 - RNA, 19 nt, Artificial Sequence
  Description of Artificial Sequence: Synthetic oligonucleotide
  Antisense strand to SEQ ID NO: 2505538
uuccagcaaagugucaccc

SEQ ID NO: 2505540 - RNA, 19 nt, Artificial Sequence
  Description of Artificial Sequence: Synthetic oligonucleotide
  Sense strand starting at position 1482 of SEQ ID NO: 1888029
ugacacuuugcuggaacaa

SEQ ID NO: 2505541 - RNA, 19 nt, Artificial Sequence
  Description of Artificial Sequence: Synthetic oligonucleotide
  Antisense strand to SEQ ID NO: 2505540
uuguuccagcaaaguguca

SEQ ID NO: 2505542 - RNA, 19 nt, Artificial Sequence
  Description of Artificial Sequence: Synthetic oligonucleotide
  Sense strand starting at position 2044 of SEQ ID NO: 1888029
guggcugugucucuaauga

SEQ ID NO: 2505543 - RNA, 19 nt, Artificial Sequence
  Description of Artificial Sequence: Synthetic oligonucleotide
  Antisense strand to SEQ ID NO: 2505542
ucauuagagacacagccac

SEQ ID NO: 2505544 - RNA, 19 nt, Artificial Sequence
  Description of Artificial Sequence: Synthetic oligonucleotide
  Sense strand starting at position 2063 of SEQ ID NO: 1888029
gggagagccuuccauuugu

SEQ ID NO: 2505545 - RNA, 19 nt, Artificial Sequence
  Description of Artificial Sequence: Synthetic oligonucleotide
  Antisense strand to SEQ ID NO: 2505544
acaaauggaaggcucuccc

SEQ ID NO: 2505546 - RNA, 19 nt, Artificial Sequence
  Description of Artificial Sequence: Synthetic oligonucleotide
  Sense strand starting at position 2072 of SEQ ID NO: 1888029
uuccauuugucgcuguauu

SEQ ID NO: 2505547 - RNA, 19 nt, Artificial Sequence
  Description of Artificial Sequence: Synthetic oligonucleotide
  Antisense strand to SEQ ID NO: 2505546
aauacagcgacaaauggaa

SEQ ID NO: 2505548 - RNA, 19 nt, Artificial Sequence
  Description of Artificial Sequence: Synthetic oligonucleotide
  Sense strand starting at position 2139 of SEQ ID NO: 1888029
guuugaacggcucguuacu

SEQ ID NO: 2505549 - RNA, 19 nt, Artificial Sequence
  Description of Artificial Sequence: Synthetic oligonucleotide
  Antisense strand to SEQ ID NO: 2505548
aguaacgagccguucaaac

SEQ ID NO: 2505550 - RNA, 19 nt, Artificial Sequence
  Description of Artificial Sequence: Synthetic oligonucleotide
  Sense strand starting at position 2160 of SEQ ID NO: 1888029
gcuccauugccggagcaga

SEQ ID NO: 2505551 - RNA, 19 nt, Artificial Sequence
  Description of Artificial Sequence: Synthetic oligonucleotide
  Antisense strand to SEQ ID NO: 2505550
ucugcuccggcaauggagc

SEQ ID NO: 2505552 - RNA, 19 nt, Artificial Sequence
  Description of Artificial Sequence: Synthetic oligonucleotide
  Sense strand starting at position 2353 of SEQ ID NO: 1888029
uugagaccuugauaaacuc

SEQ ID NO: 2505553 - RNA, 19 nt, Artificial Sequence
  Description of Artificial Sequence: Synthetic oligonucleotide
  Antisense strand to SEQ ID NO: 2505552
gaguuuaucaaggucucaa

SEQ ID NO: 2505554 - RNA, 19 nt, Artificial Sequence
  Description of Artificial Sequence: Synthetic oligonucleotide
  Sense strand starting at position 2380 of SEQ ID NO: 1888029
uugucuuguggauggagaa

SEQ ID NO: 2505555 - RNA, 19 nt, Artificial Sequence
  Description of Artificial Sequence: Synthetic oligonucleotide
  Antisense strand to SEQ ID NO: 2505554
uucuccauccacaagacaa

SEQ ID NO: 2505556 - RNA, 19 nt, Artificial Sequence
  Description of Artificial Sequence: Synthetic oligonucleotide
  Sense strand starting at position 2381 of SEQ ID NO: 1888029
ugucuuguggauggagaaa

SEQ ID NO: 2505557 - RNA, 19 nt, Artificial Sequence
  Description of Artificial Sequence: Synthetic oligonucleotide
  Antisense strand to SEQ ID NO: 2505556
uuucuccauccacaagaca

SEQ ID NO: 2505558 - RNA, 19 nt, Artificial Sequence
  Description of Artificial Sequence: Synthetic oligonucleotide
  Sense strand starting at position 2429 of SEQ ID NO: 1888029
ucgccuucugacugugaca

SEQ ID NO: 2505559 - RNA, 19 nt, Artificial Sequence
  Description of Artificial Sequence: Synthetic oligonucleotide
  Antisense strand to SEQ ID NO: 2505558
ugucacagucagaaggcga

SEQ ID NO: 2505560 - RNA, 19 nt, Artificial Sequence
  Description of Artificial Sequence: Synthetic oligonucleotide
  Sense strand starting at position 2431 of SEQ ID NO: 1888029
gccuucugacugugacaac

SEQ ID NO: 2505561 - RNA, 19 nt, Artificial Sequence
  Description of Artificial Sequence: Synthetic oligonucleotide
  Antisense strand to SEQ ID NO: 2505560
guugucacagucagaaggc

SEQ ID NO: 2505562 - RNA, 19 nt, Artificial Sequence
  Description of Artificial Sequence: Synthetic oligonucleotide
  Sense strand starting at position 2606 of SEQ ID NO: 1888029
ggaggauauugugccucuu

SEQ ID NO: 2505563 - RNA, 19 nt, Artificial Sequence
  Description of Artificial Sequence: Synthetic oligonucleotide
  Antisense strand to SEQ ID NO: 2505562
aagaggcacaauauccucc

SEQ ID NO: 2505564 - RNA, 19 nt, Artificial Sequence
  Description of Artificial Sequence: Synthetic oligonucleotide
  Sense strand starting at position 2612 of SEQ ID NO: 1888029
uauugugccucuuugugua

SEQ ID NO: 2505565 - RNA, 19 nt, Artificial Sequence
  Description of Artificial Sequence: Synthetic oligonucleotide
  Antisense strand to SEQ ID NO: 2505564
uacacaaagaggcacaaua

SEQ ID NO: 2505566 - RNA, 19 nt, Artificial Sequence
  Description of Artificial Sequence: Synthetic oligonucleotide
  Sense strand starting at position 2753 of SEQ ID NO: 1888029
cagggacuguucuaugauu

SEQ ID NO: 2505567 - RNA, 19 nt, Artificial Sequence
  Description of Artificial Sequence: Synthetic oligonucleotide
  Antisense strand to SEQ ID NO: 2505566
aaucauagaacagucccug

SEQ ID NO: 2505568 - RNA, 19 nt, Artificial Sequence
  Description of Artificial Sequence: Synthetic oligonucleotide
  Sense strand starting at position 2761 of SEQ ID NO: 1888029
guucuaugauuuggcagga

SEQ ID NO: 2505569 - RNA, 19 nt, Artificial Sequence
  Description of Artificial Sequence: Synthetic oligonucleotide
  Antisense strand to SEQ ID NO: 2505568
uccugccaaaucauagaac

SEQ ID NO: 2505570 - RNA, 19 nt, Artificial Sequence
  Description of Artificial Sequence: Synthetic oligonucleotide
  Sense strand starting at position 3023 of SEQ ID NO: 1888029
cugugcucccuccaugaca

SEQ ID NO: 2505571 - RNA, 19 nt, Artificial Sequence
  Description of Artificial Sequence: Synthetic oligonucleotide
  Antisense strand to SEQ ID NO: 2505570
ugucauggagggagcacag

SEQ ID NO: 2505572 - RNA, 19 nt, Artificial Sequence
  Description of Artificial Sequence: Synthetic oligonucleotide
  Sense strand starting at position 3052 of SEQ ID NO: 1888029
cugggaaugcucuggccau

SEQ ID NO: 2505573 - RNA, 19 nt, Artificial Sequence
  Description of Artificial Sequence: Synthetic oligonucleotide
  Antisense strand to SEQ ID NO: 2505572
auggccagagcauucccag

SEQ ID NO: 2505574 - RNA, 19 nt, Artificial Sequence
  Description of Artificial Sequence: Synthetic oligonucleotide
  Sense strand starting at position 3441 of SEQ ID NO: 1888029
uguguuaguucugcucauc

SEQ ID NO: 2505575 - RNA, 19 nt, Artificial Sequence
  Description of Artificial Sequence: Synthetic oligonucleotide
  Antisense strand to SEQ ID NO: 2505574
gaugagcagaacuaacaca

SEQ ID NO: 2505576 - RNA, 19 nt, Artificial Sequence
  Description of Artificial Sequence: Synthetic oligonucleotide
  Sense strand starting at position 3580 of SEQ ID NO: 1888029
uuaauuaggguuugaauga

SEQ ID NO: 2505577 - RNA, 19 nt, Artificial Sequence
  Description of Artificial Sequence: Synthetic oligonucleotide
  Antisense strand to SEQ ID NO: 2505576
ucauucaaacccuaauuaa

SEQ ID NO: 2505578 - RNA, 19 nt, Artificial Sequence
  Description of Artificial Sequence: Synthetic oligonucleotide
  Sense strand starting at position 3704 of SEQ ID NO: 1888029
caguguggaucucaggaga

SEQ ID NO: 2505579 - RNA, 19 nt, Artificial Sequence
  Description of Artificial Sequence: Synthetic oligonucleotide
  Antisense strand to SEQ ID NO: 2505578
ucuccugagauccacacug

SEQ ID NO: 2505580 - RNA, 19 nt, Artificial Sequence
  Description of Artificial Sequence: Synthetic oligonucleotide
  Sense strand starting at position 3802 of SEQ ID NO: 1888029
uagaguuugggaggucuga

SEQ ID NO: 2505581 - RNA, 19 nt, Artificial Sequence
  Description of Artificial Sequence: Synthetic oligonucleotide
  Antisense strand to SEQ ID NO: 2505580
ucagaccucccaaacucua

SEQ ID NO: 2505582 - RNA, 19 nt, Artificial Sequence
  Description of Artificial Sequence: Synthetic oligonucleotide
  Sense strand starting at position 3895 of SEQ ID NO: 1888029
ggaucuguuuccuuguugu

SEQ ID NO: 2505583 - RNA, 19 nt, Artificial Sequence
  Description of Artificial Sequence: Synthetic oligonucleotide
  Antisense strand to SEQ ID NO: 2505582
acaacaaggaaacagaucc

SEQ ID NO: 2505584 - RNA, 19 nt, Artificial Sequence
  Description of Artificial Sequence: Synthetic oligonucleotide
  Sense strand starting at position 230 of SEQ ID NO: 1888030
uuaagcucucagugaagac

SEQ ID NO: 2505585 - RNA, 19 nt, Artificial Sequence
  Description of Artificial Sequence: Synthetic oligonucleotide
  Antisense strand to SEQ ID NO: 2505584
gucuucacugagagcuuaa

SEQ ID NO: 2505586 - RNA, 19 nt, Artificial Sequence
  Description of Artificial Sequence: Synthetic oligonucleotide
  Sense strand starting at position 234 of SEQ ID NO: 1888030
gcucucagugaagacauaa

SEQ ID NO: 2505587 - RNA, 19 nt, Artificial Sequence
  Description of Artificial Sequence: Synthetic oligonucleotide
  Antisense strand to SEQ ID NO: 2505586
uuaugucuucacugagagc

SEQ ID NO: 2505588 - RNA, 19 nt, Artificial Sequence
  Description of Artificial Sequence: Synthetic oligonucleotide
  Sense strand starting at position 253 of SEQ ID NO: 1888030
agcacugugcucuaggaga

SEQ ID NO: 2505589 - RNA, 19 nt, Artificial Sequence
  Description of Artificial Sequence: Synthetic oligonucleotide
  Antisense strand to SEQ ID NO: 2505588
ucuccuagagcacagugcu

SEQ ID NO: 2505590 - RNA, 19 nt, Artificial Sequence
  Description of Artificial Sequence: Synthetic oligonucleotide
  Sense strand starting at position 255 of SEQ ID NO: 1888030
cacugugcucuaggagaaa

SEQ ID NO: 2505591 - RNA, 19 nt, Artificial Sequence
  Description of Artificial Sequence: Synthetic oligonucleotide
  Antisense strand to SEQ ID NO: 2505590
uuucuccuagagcacagug

SEQ ID NO: 2505592 - RNA, 19 nt, Artificial Sequence
  Description of Artificial Sequence: Synthetic oligonucleotide
  Sense strand starting at position 673 of SEQ ID NO: 1888030
cugagagguucucuaugga

SEQ ID NO: 2505593 - RNA, 19 nt, Artificial Sequence
  Description of Artificial Sequence: Synthetic oligonucleotide
  Antisense strand to SEQ ID NO: 2505592
uccauagagaaccucucag

SEQ ID NO: 2505594 - RNA, 19 nt, Artificial Sequence
  Description of Artificial Sequence: Synthetic oligonucleotide
  Sense strand starting at position 717 of SEQ ID NO: 1888030
aggagucauuuggacucau

SEQ ID NO: 2505595 - RNA, 19 nt, Artificial Sequence
  Description of Artificial Sequence: Synthetic oligonucleotide
  Antisense strand to SEQ ID NO: 2505594
augaguccaaaugacuccu

SEQ ID NO: 2505596 - RNA, 19 nt, Artificial Sequence
  Description of Artificial Sequence: Synthetic oligonucleotide
  Sense strand starting at position 1078 of SEQ ID NO: 1888030
ucggaucaggguuaaguuu

SEQ ID NO: 2505597 - RNA, 19 nt, Artificial Sequence
  Description of Artificial Sequence: Synthetic oligonucleotide
  Antisense strand to SEQ ID NO: 2505596
aaacuuaacccugauccga

SEQ ID NO: 2505598 - RNA, 19 nt, Artificial Sequence
  Description of Artificial Sequence: Synthetic oligonucleotide
  Sense strand starting at position 1299 of SEQ ID NO: 1888030
gugaguacccuuggaagac

SEQ ID NO: 2505599 - RNA, 19 nt, Artificial Sequence
  Description of Artificial Sequence: Synthetic oligonucleotide
  Antisense strand to SEQ ID NO: 2505598
gucuuccaaggguacucac

SEQ ID NO: 2505600 - RNA, 19 nt, Artificial Sequence
  Description of Artificial Sequence: Synthetic oligonucleotide
  Sense strand starting at position 1413 of SEQ ID NO: 1888030
augagacaguuauugacau

SEQ ID NO: 2505601 - RNA, 19 nt, Artificial Sequence
  Description of Artificial Sequence: Synthetic oligonucleotide
  Antisense strand to SEQ ID NO: 2505600
augucaauaacugucucau

SEQ ID NO: 2505602 - RNA, 19 nt, Artificial Sequence
  Description of Artificial Sequence: Synthetic oligonucleotide
  Sense strand starting at position 1426 of SEQ ID NO: 1888030
ugacaugcuuccuuuacag

SEQ ID NO: 2505603 - RNA, 19 nt, Artificial Sequence
  Description of Artificial Sequence: Synthetic oligonucleotide
  Antisense strand to SEQ ID NO: 2505602
cuguaaaggaagcauguca

SEQ ID NO: 2505604 - RNA, 19 nt, Artificial Sequence
  Description of Artificial Sequence: Synthetic oligonucleotide
  Sense strand starting at position 1523 of SEQ ID NO: 1888030
agggaagaaaugugcuuaa

SEQ ID NO: 2505605 - RNA, 19 nt, Artificial Sequence
  Description of Artificial Sequence: Synthetic oligonucleotide
  Antisense strand to SEQ ID NO: 2505604
uuaagcacauuucuucccu

SEQ ID NO: 2505606 - RNA, 19 nt, Artificial Sequence
  Description of Artificial Sequence: Synthetic oligonucleotide
  Sense strand starting at position 1571 of SEQ ID NO: 1888030
gcaaccaggcaugaucaau

SEQ ID NO: 2505607 - RNA, 19 nt, Artificial Sequence
  Description of Artificial Sequence: Synthetic oligonucleotide
  Antisense strand to SEQ ID NO: 2505606
auugaucaugccugguugc

SEQ ID NO: 2505608 - RNA, 19 nt, Artificial Sequence
  Description of Artificial Sequence: Synthetic oligonucleotide
  Sense strand starting at position 1733 of SEQ ID NO: 1888030
aucuuacuagcaggaagau

SEQ ID NO: 2505609 - RNA, 19 nt, Artificial Sequence
  Description of Artificial Sequence: Synthetic oligonucleotide
  Antisense strand to SEQ ID NO: 2505608
aucuuccugcuaguaagau

SEQ ID NO: 2505610 - RNA, 19 nt, Artificial Sequence
  Description of Artificial Sequence: Synthetic oligonucleotide
  Sense strand starting at position 1811 of SEQ ID NO: 1888030
ugggcuucucaucaugauu

SEQ ID NO: 2505611 - RNA, 19 nt, Artificial Sequence
  Description of Artificial Sequence: Synthetic oligonucleotide
  Antisense strand to SEQ ID NO: 2505610
aaucaugaugagaagccca

SEQ ID NO: 2505612 - RNA, 19 nt, Artificial Sequence
  Description of Artificial Sequence: Synthetic oligonucleotide
  Sense strand starting at position 1814 of SEQ ID NO: 1888030
gcuucucaucaugauugaa

SEQ ID NO: 2505613 - RNA, 19 nt, Artificial Sequence
  Description of Artificial Sequence: Synthetic oligonucleotide
  Antisense strand to SEQ ID NO: 2505612
uucaaucaugaugagaagc

SEQ ID NO: 2505614 - RNA, 19 nt, Artificial Sequence
  Description of Artificial Sequence: Synthetic oligonucleotide
  Sense strand starting at position 1847 of SEQ ID NO: 1888030
uguucugugcuagaaccaa

SEQ ID NO: 2505615 - RNA, 19 nt, Artificial Sequence
  Description of Artificial Sequence: Synthetic oligonucleotide
  Antisense strand to SEQ ID NO: 2505614
uugguucuagcacagaaca

SEQ ID NO: 2505616 - RNA, 19 nt, Artificial Sequence
  Description of Artificial Sequence: Synthetic oligonucleotide
  Sense strand starting at position 2048 of SEQ ID NO: 1888030
aauggcaagugaucccauu

SEQ ID NO: 2505617 - RNA, 19 nt, Artificial Sequence
  Description of Artificial Sequence: Synthetic oligonucleotide
  Antisense strand to SEQ ID NO: 2505616
aaugggaucacuugccauu

SEQ ID NO: 2505618 - RNA, 19 nt, Artificial Sequence
  Description of Artificial Sequence: Synthetic oligonucleotide
  Sense strand starting at position 2445 of SEQ ID NO: 1888030
gucccagacccuugaauuc

SEQ ID NO: 2505619 - RNA, 19 nt, Artificial Sequence
  Description of Artificial Sequence: Synthetic oligonucleotide
  Antisense strand to SEQ ID NO: 2505618
gaauucaagggucugggac

SEQ ID NO: 2505620 - RNA, 19 nt, Artificial Sequence
  Description of Artificial Sequence: Synthetic oligonucleotide
  Sense strand starting at position 2649 of SEQ ID NO: 1888030
gacaaaucuugcccaaggu

SEQ ID NO: 2505621 - RNA, 19 nt, Artificial Sequence
  Description of Artificial Sequence: Synthetic oligonucleotide
  Antisense strand to SEQ ID NO: 2505620
accuugggcaagauuuguc

SEQ ID NO: 2505622 - RNA, 19 nt, Artificial Sequence
  Description of Artificial Sequence: Synthetic oligonucleotide
  Sense strand starting at position 2671 of SEQ ID NO: 1888030
agagcuaguguauaauaga

SEQ ID NO: 2505623 - RNA, 19 nt, Artificial Sequence
  Description of Artificial Sequence: Synthetic oligonucleotide
  Antisense strand to SEQ ID NO: 2505622
ucuauuauacacuagcucu

SEQ ID NO: 2505624 - RNA, 19 nt, Artificial Sequence
  Description of Artificial Sequence: Synthetic oligonucleotide
  Sense strand starting at position 2682 of SEQ ID NO: 1888030
auaauagaaucaggauuug

SEQ ID NO: 2505625 - RNA, 19 nt, Artificial Sequence
  Description of Artificial Sequence: Synthetic oligonucleotide
  Antisense strand to SEQ ID NO: 2505624
caaauccugauucuauuau

SEQ ID NO: 2505626 - RNA, 19 nt, Artificial Sequence
  Description of Artificial Sequence: Synthetic oligonucleotide
  Sense strand starting at position 2818 of SEQ ID NO: 1888030
gaagauguuuguuccuuga

SEQ ID NO: 2505627 - RNA, 19 nt, Artificial Sequence
  Description of Artificial Sequence: Synthetic oligonucleotide
  Antisense strand to SEQ ID NO: 2505626
ucaaggaacaaacaucuuc

SEQ ID NO: 2505628 - RNA, 19 nt, Artificial Sequence
  Description of Artificial Sequence: Synthetic oligonucleotide
  Sense strand starting at position 2820 of SEQ ID NO: 1888030
agauguuuguuccuugaag

SEQ ID NO: 2505629 - RNA, 19 nt, Artificial Sequence
  Description of Artificial Sequence: Synthetic oligonucleotide
  Antisense strand to SEQ ID NO: 2505628
cuucaaggaacaaacaucu

SEQ ID NO: 2505630 - RNA, 19 nt, Artificial Sequence
  Description of Artificial Sequence: Synthetic oligonucleotide
  Sense strand starting at position 2821 of SEQ ID NO: 1888030
gauguuuguuccuugaaga

SEQ ID NO: 2505631 - RNA, 19 nt, Artificial Sequence
  Description of Artificial Sequence: Synthetic oligonucleotide
  Antisense strand to SEQ ID NO: 2505630
ucuucaaggaacaaacauc

SEQ ID NO: 2505632 - RNA, 19 nt, Artificial Sequence
  Description of Artificial Sequence: Synthetic oligonucleotide
  Sense strand starting at position 3006 of SEQ ID NO: 1888030
gggcccaauuaagucauaa

SEQ ID NO: 2505633 - RNA, 19 nt, Artificial Sequence
  Description of Artificial Sequence: Synthetic oligonucleotide
  Antisense strand to SEQ ID NO: 2505632
uuaugacuuaauugggccc

SEQ ID NO: 2505634 - RNA, 19 nt, Artificial Sequence
  Description of Artificial Sequence: Synthetic oligonucleotide
  Sense strand starting at position 3021 of SEQ ID NO: 1888030
auaagaguucuguacucau

SEQ ID NO: 2505635 - RNA, 19 nt, Artificial Sequence
  Description of Artificial Sequence: Synthetic oligonucleotide
  Antisense strand to SEQ ID NO: 2505634
augaguacagaacucuuau

SEQ ID NO: 2505636 - RNA, 19 nt, Artificial Sequence
  Description of Artificial Sequence: Synthetic oligonucleotide
  Sense strand starting at position 3024 of SEQ ID NO: 1888030
agaguucuguacucaugaa

SEQ ID NO: 2505637 - RNA, 19 nt, Artificial Sequence
  Description of Artificial Sequence: Synthetic oligonucleotide
  Antisense strand to SEQ ID NO: 2505636
uucaugaguacagaacucu

SEQ ID NO: 2505638 - RNA, 19 nt, Artificial Sequence
  Description of Artificial Sequence: Synthetic oligonucleotide
  Sense strand starting at position 3042 of SEQ ID NO: 1888030
auaggacaguguccuuaua

SEQ ID NO: 2505639 - RNA, 19 nt, Artificial Sequence
  Description of Artificial Sequence: Synthetic oligonucleotide
  Antisense strand to SEQ ID NO: 2505638
uauaaggacacuguccuau

SEQ ID NO: 2505640 - RNA, 19 nt, Artificial Sequence
  Description of Artificial Sequence: Synthetic oligonucleotide
  Sense strand starting at position 3044 of SEQ ID NO: 1888030
aggacaguguccuuauaaa

SEQ ID NO: 2505641 - RNA, 19 nt, Artificial Sequence
  Description of Artificial Sequence: Synthetic oligonucleotide
  Antisense strand to SEQ ID NO: 2505640
uuuauaaggacacuguccu

SEQ ID NO: 2505642 - RNA, 19 nt, Artificial Sequence
  Description of Artificial Sequence: Synthetic oligonucleotide
  Sense strand starting at position 3056 of SEQ ID NO: 1888030
uuauaaagauggccucaga

SEQ ID NO: 2505643 - RNA, 19 nt, Artificial Sequence
  Description of Artificial Sequence: Synthetic oligonucleotide
  Antisense strand to SEQ ID NO: 2505642
ucugaggccaucuuuauaa

SEQ ID NO: 2505644 - RNA, 19 nt, Artificial Sequence
  Description of Artificial Sequence: Synthetic oligonucleotide
  Sense strand starting at position 3254 of SEQ ID NO: 1888030
agaagugugagacguaaau

SEQ ID NO: 2505645 - RNA, 19 nt, Artificial Sequence
  Description of Artificial Sequence: Synthetic oligonucleotide
  Antisense strand to SEQ ID NO: 2505644
auuuacgucucacacuucu

SEQ ID NO: 2505646 - RNA, 19 nt, Artificial Sequence
  Description of Artificial Sequence: Synthetic oligonucleotide
  Sense strand starting at position 3333 of SEQ ID NO: 1888030
uacuuucuugauggugaga

SEQ ID NO: 2505647 - RNA, 19 nt, Artificial Sequence
  Description of Artificial Sequence: Synthetic oligonucleotide
  Antisense strand to SEQ ID NO: 2505646
ucucaccaucaagaaagua

SEQ ID NO: 2505648 - RNA, 19 nt, Artificial Sequence
  Description of Artificial Sequence: Synthetic oligonucleotide
  Sense strand starting at position 3408 of SEQ ID NO: 1888030
ggaacauauuccuugcaug

SEQ ID NO: 2505649 - RNA, 19 nt, Artificial Sequence
  Description of Artificial Sequence: Synthetic oligonucleotide
  Antisense strand to SEQ ID NO: 2505648
caugcaaggaauauguucc

SEQ ID NO: 2505650 - RNA, 19 nt, Artificial Sequence
  Description of Artificial Sequence: Synthetic oligonucleotide
  Sense strand starting at position 3448 of SEQ ID NO: 1888030
uuaggucaccucugaauug

SEQ ID NO: 2505651 - RNA, 19 nt, Artificial Sequence
  Description of Artificial Sequence: Synthetic oligonucleotide
  Antisense strand to SEQ ID NO: 2505650
caauucagaggugaccuaa

SEQ ID NO: 2505652 - RNA, 19 nt, Artificial Sequence
  Description of Artificial Sequence: Synthetic oligonucleotide
  Sense strand starting at position 3457 of SEQ ID NO: 1888030
cucugaauugcucagcaca

SEQ ID NO: 2505653 - RNA, 19 nt, Artificial Sequence
  Description of Artificial Sequence: Synthetic oligonucleotide
  Antisense strand to SEQ ID NO: 2505652
ugugcugagcaauucagag

SEQ ID NO: 2505654 - RNA, 19 nt, Artificial Sequence
  Description of Artificial Sequence: Synthetic oligonucleotide
  Sense strand starting at position 3858 of SEQ ID NO: 1888030
cuggcaaagauguagugaa

SEQ ID NO: 2505655 - RNA, 19 nt, Artificial Sequence
  Description of Artificial Sequence: Synthetic oligonucleotide
  Antisense strand to SEQ ID NO: 2505654
uucacuacaucuuugccag

SEQ ID NO: 2505656 - RNA, 19 nt, Artificial Sequence
  Description of Artificial Sequence: Synthetic oligonucleotide
  Sense strand starting at position 3872 of SEQ ID NO: 1888030
gugaaauauguacacgcua

SEQ ID NO: 2505657 - RNA, 19 nt, Artificial Sequence
  Description of Artificial Sequence: Synthetic oligonucleotide
  Antisense strand to SEQ ID NO: 2505656
uagcguguacauauuucac

SEQ ID NO: 2505658 - RNA, 19 nt, Artificial Sequence
  Description of Artificial Sequence: Synthetic oligonucleotide
  Sense strand starting at position 3909 of SEQ ID NO: 1888030
aaagauccaguuugguaaa

SEQ ID NO: 2505659 - RNA, 19 nt, Artificial Sequence
  Description of Artificial Sequence: Synthetic oligonucleotide
  Antisense strand to SEQ ID NO: 2505658
uuuaccaaacuggaucuuu

SEQ ID NO: 2505660 - RNA, 19 nt, Artificial Sequence
  Description of Artificial Sequence: Synthetic oligonucleotide
  Sense strand starting at position 3911 of SEQ ID NO: 1888030
agauccaguuugguaaaua

SEQ ID NO: 2505661 - RNA, 19 nt, Artificial Sequence
  Description of Artificial Sequence: Synthetic oligonucleotide
  Antisense strand to SEQ ID NO: 2505660
uauuuaccaaacuggaucu

SEQ ID NO: 2505662 - RNA, 19 nt, Artificial Sequence
  Description of Artificial Sequence: Synthetic oligonucleotide
  Sense strand starting at position 3922 of SEQ ID NO: 1888030
gguaaauauuucgugaugu

SEQ ID NO: 2505663 - RNA, 19 nt, Artificial Sequence
  Description of Artificial Sequence: Synthetic oligonucleotide
  Antisense strand to SEQ ID NO: 2505662
acaucacgaaauauuuacc

SEQ ID NO: 2505664 - RNA, 19 nt, Artificial Sequence
  Description of Artificial Sequence: Synthetic oligonucleotide
  Sense strand starting at position 116 of SEQ ID NO: 1888031
gcccucgucuguuacauaa

SEQ ID NO: 2505665 - RNA, 19 nt, Artificial Sequence
  Description of Artificial Sequence: Synthetic oligonucleotide
  Antisense strand to SEQ ID NO: 2505664
uuauguaacagacgagggc

SEQ ID NO: 2505666 - RNA, 19 nt, Artificial Sequence
  Description of Artificial Sequence: Synthetic oligonucleotide
  Sense strand starting at position 118 of SEQ ID NO: 1888031
ccucgucuguuacauaauu

SEQ ID NO: 2505667 - RNA, 19 nt, Artificial Sequence
  Description of Artificial Sequence: Synthetic oligonucleotide
  Antisense strand to SEQ ID NO: 2505666
aauuauguaacagacgagg

SEQ ID NO: 2505668 - RNA, 19 nt, Artificial Sequence
  Description of Artificial Sequence: Synthetic oligonucleotide
  Sense strand starting at position 127 of SEQ ID NO: 1888031
uuacauaauucgggcguga

SEQ ID NO: 2505669 - RNA, 19 nt, Artificial Sequence
  Description of Artificial Sequence: Synthetic oligonucleotide
  Antisense strand to SEQ ID NO: 2505668
ucacgcccgaauuauguaa

SEQ ID NO: 2505670 - RNA, 19 nt, Artificial Sequence
  Description of Artificial Sequence: Synthetic oligonucleotide
  Sense strand starting at position 129 of SEQ ID NO: 1888031
acauaauucgggcgugaaa

SEQ ID NO: 2505671 - RNA, 19 nt, Artificial Sequence
  Description of Artificial Sequence: Synthetic oligonucleotide
  Antisense strand to SEQ ID NO: 2505670
uuucacgcccgaauuaugu

SEQ ID NO: 2505672 - RNA, 19 nt, Artificial Sequence
  Description of Artificial Sequence: Synthetic oligonucleotide
  Sense strand starting at position 131 of SEQ ID NO: 1888031
auaauucgggcgugaaauc

SEQ ID NO: 2505673 - RNA, 19 nt, Artificial Sequence
  Description of Artificial Sequence: Synthetic oligonucleotide
  Antisense strand to SEQ ID NO: 2505672
gauuucacgcccgaauuau

SEQ ID NO: 2505674 - RNA, 19 nt, Artificial Sequence
  Description of Artificial Sequence: Synthetic oligonucleotide
  Sense strand starting at position 272 of SEQ ID NO: 1888031
acuggcauuugucaugacu

SEQ ID NO: 2505675 - RNA, 19 nt, Artificial Sequence
  Description of Artificial Sequence: Synthetic oligonucleotide
  Antisense strand to SEQ ID NO: 2505674
agucaugacaaaugccagu

SEQ ID NO: 2505676 - RNA, 19 nt, Artificial Sequence
  Description of Artificial Sequence: Synthetic oligonucleotide
  Sense strand starting at position 274 of SEQ ID NO: 1888031
uggcauuugucaugacuug

SEQ ID NO: 2505677 - RNA, 19 nt, Artificial Sequence
  Description of Artificial Sequence: Synthetic oligonucleotide
  Antisense strand to SEQ ID NO: 2505676
caagucaugacaaaugcca

SEQ ID NO: 2505678 - RNA, 19 nt, Artificial Sequence
  Description of Artificial Sequence: Synthetic oligonucleotide
  Sense strand starting at position 299 of SEQ ID NO: 1888031
gcuugagagucuccggaaa

SEQ ID NO: 2505679 - RNA, 19 nt, Artificial Sequence
  Description of Artificial Sequence: Synthetic oligonucleotide
  Antisense strand to SEQ ID NO: 2505678
uuuccggagacucucaagc

SEQ ID NO: 2505680 - RNA, 19 nt, Artificial Sequence
  Description of Artificial Sequence: Synthetic oligonucleotide
  Sense strand starting at position 844 of SEQ ID NO: 1888031
ggaugcuuggccggguaua

SEQ ID NO: 2505681 - RNA, 19 nt, Artificial Sequence
  Description of Artificial Sequence: Synthetic oligonucleotide
  Antisense strand to SEQ ID NO: 2505680
uauacccggccaagcaucc

SEQ ID NO: 2505682 - RNA, 19 nt, Artificial Sequence
  Description of Artificial Sequence: Synthetic oligonucleotide
  Sense strand starting at position 845 of SEQ ID NO: 1888031
gaugcuuggccggguauau

SEQ ID NO: 2505683 - RNA, 19 nt, Artificial Sequence
  Description of Artificial Sequence: Synthetic oligonucleotide
  Antisense strand to SEQ ID NO: 2505682
auauacccggccaagcauc

SEQ ID NO: 2505684 - RNA, 19 nt, Artificial Sequence
  Description of Artificial Sequence: Synthetic oligonucleotide
  Sense strand starting at position 1638 of SEQ ID NO: 1888031
cgcggcaucauccacauuu

SEQ ID NO: 2505685 - RNA, 19 nt, Artificial Sequence
  Description of Artificial Sequence: Synthetic oligonucleotide
  Antisense strand to SEQ ID NO: 2505684
aaauguggaugaugccgcg

SEQ ID NO: 2505686 - RNA, 19 nt, Artificial Sequence
  Description of Artificial Sequence: Synthetic oligonucleotide
  Sense strand starting at position 1852 of SEQ ID NO: 1888031
gggcuaaacuuaccuugaa

SEQ ID NO: 2505687 - RNA, 19 nt, Artificial Sequence
  Description of Artificial Sequence: Synthetic oligonucleotide
  Antisense strand to SEQ ID NO: 2505686
uucaagguaaguuuagccc

SEQ ID NO: 2505688 - RNA, 19 nt, Artificial Sequence
  Description of Artificial Sequence: Synthetic oligonucleotide
  Sense strand starting at position 2159 of SEQ ID NO: 1888031
ggcgguauucaccgcugaa

SEQ ID NO: 2505689 - RNA, 19 nt, Artificial Sequence
  Description of Artificial Sequence: Synthetic oligonucleotide
  Antisense strand to SEQ ID NO: 2505688
uucagcggugaauaccgcc

SEQ ID NO: 2505690 - RNA, 19 nt, Artificial Sequence
  Description of Artificial Sequence: Synthetic oligonucleotide
  Sense strand starting at position 2162 of SEQ ID NO: 1888031
gguauucaccgcugaagag

SEQ ID NO: 2505691 - RNA, 19 nt, Artificial Sequence
  Description of Artificial Sequence: Synthetic oligonucleotide
  Antisense strand to SEQ ID NO: 2505690
cucuucagcggugaauacc

SEQ ID NO: 2505692 - RNA, 19 nt, Artificial Sequence
  Description of Artificial Sequence: Synthetic oligonucleotide
  Sense strand starting at position 2256 of SEQ ID NO: 1888031
uuucuaugcagacgggaaa

SEQ ID NO: 2505693 - RNA, 19 nt, Artificial Sequence
  Description of Artificial Sequence: Synthetic oligonucleotide
  Antisense strand to SEQ ID NO: 2505692
uuucccgucugcauagaaa

SEQ ID NO: 2505694 - RNA, 19 nt, Artificial Sequence
  Description of Artificial Sequence: Synthetic oligonucleotide
  Sense strand starting at position 2311 of SEQ ID NO: 1888031
gcagaaguccuguggacuc

SEQ ID NO: 2505695 - RNA, 19 nt, Artificial Sequence
  Description of Artificial Sequence: Synthetic oligonucleotide
  Antisense strand to SEQ ID NO: 2505694
gaguccacaggacuucugc

SEQ ID NO: 2505696 - RNA, 19 nt, Artificial Sequence
  Description of Artificial Sequence: Synthetic oligonucleotide
  Sense strand starting at position 2401 of SEQ ID NO: 1888031
agaugaaugccucacaggu

SEQ ID NO: 2505697 - RNA, 19 nt, Artificial Sequence
  Description of Artificial Sequence: Synthetic oligonucleotide
  Antisense strand to SEQ ID NO: 2505696
accugugaggcauucaucu

SEQ ID NO: 2505698 - RNA, 19 nt, Artificial Sequence
  Description of Artificial Sequence: Synthetic oligonucleotide
  Sense strand starting at position 2522 of SEQ ID NO: 1888031
cgguuauugcggaggucuu

SEQ ID NO: 2505699 - RNA, 19 nt, Artificial Sequence
  Description of Artificial Sequence: Synthetic oligonucleotide
  Antisense strand to SEQ ID NO: 2505698
aagaccuccgcaauaaccg

SEQ ID NO: 2505700 - RNA, 19 nt, Artificial Sequence
  Description of Artificial Sequence: Synthetic oligonucleotide
  Sense strand starting at position 2619 of SEQ ID NO: 1888031
uauccuuggcuacgugaaa

SEQ ID NO: 2505701 - RNA, 19 nt, Artificial Sequence
  Description of Artificial Sequence: Synthetic oligonucleotide
  Antisense strand to SEQ ID NO: 2505700
uuucacguagccaaggaua

SEQ ID NO: 2505702 - RNA, 19 nt, Artificial Sequence
  Description of Artificial Sequence: Synthetic oligonucleotide
  Sense strand starting at position 2648 of SEQ ID NO: 1888031
acagcagcuacguggaaau

SEQ ID NO: 2505703 - RNA, 19 nt, Artificial Sequence
  Description of Artificial Sequence: Synthetic oligonucleotide
  Antisense strand to SEQ ID NO: 2505702
auuuccacguagcugcugu

SEQ ID NO: 2505704 - RNA, 19 nt, Artificial Sequence
  Description of Artificial Sequence: Synthetic oligonucleotide
  Sense strand starting at position 2853 of SEQ ID NO: 1888031
gcaggcucugcggagacau

SEQ ID NO: 2505705 - RNA, 19 nt, Artificial Sequence
  Description of Artificial Sequence: Synthetic oligonucleotide
  Antisense strand to SEQ ID NO: 2505704
augucuccgcagagccugc

SEQ ID NO: 2505706 - RNA, 19 nt, Artificial Sequence
  Description of Artificial Sequence: Synthetic oligonucleotide
  Sense strand starting at position 2947 of SEQ ID NO: 1888031
gcaacagagucauguugga

SEQ ID NO: 2505707 - RNA, 19 nt, Artificial Sequence
  Description of Artificial Sequence: Synthetic oligonucleotide
  Antisense strand to SEQ ID NO: 2505706
uccaacaugacucuguugc

SEQ ID NO: 2505708 - RNA, 19 nt, Artificial Sequence
  Description of Artificial Sequence: Synthetic oligonucleotide
  Sense strand starting at position 2963 of SEQ ID NO: 1888031
ggaccucucuuccugauga

SEQ ID NO: 2505709 - RNA, 19 nt, Artificial Sequence
  Description of Artificial Sequence: Synthetic oligonucleotide
  Antisense strand to SEQ ID NO: 2505708
ucaucaggaagagaggucc

SEQ ID NO: 2505710 - RNA, 19 nt, Artificial Sequence
  Description of Artificial Sequence: Synthetic oligonucleotide
  Sense strand starting at position 3371 of SEQ ID NO: 1888031
ggcuucacggcuggucaua

SEQ ID NO: 2505711 - RNA, 19 nt, Artificial Sequence
  Description of Artificial Sequence: Synthetic oligonucleotide
  Antisense strand to SEQ ID NO: 2505710
uaugaccagccgugaagcc

SEQ ID NO: 2505712 - RNA, 19 nt, Artificial Sequence
  Description of Artificial Sequence: Synthetic oligonucleotide
  Sense strand starting at position 3376 of SEQ ID NO: 1888031
cacggcuggucauagaagu

SEQ ID NO: 2505713 - RNA, 19 nt, Artificial Sequence
  Description of Artificial Sequence: Synthetic oligonucleotide
  Antisense strand to SEQ ID NO: 2505712
acuucuaugaccagccgug

SEQ ID NO: 2505714 - RNA, 19 nt, Artificial Sequence
  Description of Artificial Sequence: Synthetic oligonucleotide
  Sense strand starting at position 3475 of SEQ ID NO: 1888031
auuccaaagugcuuaguuu

SEQ ID NO: 2505715 - RNA, 19 nt, Artificial Sequence
  Description of Artificial Sequence: Synthetic oligonucleotide
  Antisense strand to SEQ ID NO: 2505714
aaacuaagcacuuuggaau

SEQ ID NO: 2505716 - RNA, 19 nt, Artificial Sequence
  Description of Artificial Sequence: Synthetic oligonucleotide
  Sense strand starting at position 3486 of SEQ ID NO: 1888031
cuuaguuugccacucgcua

SEQ ID NO: 2505717 - RNA, 19 nt, Artificial Sequence
  Description of Artificial Sequence: Synthetic oligonucleotide
  Antisense strand to SEQ ID NO: 2505716
uagcgaguggcaaacuaag

SEQ ID NO: 2505718 - RNA, 19 nt, Artificial Sequence
  Description of Artificial Sequence: Synthetic oligonucleotide
  Sense strand starting at position 3499 of SEQ ID NO: 1888031
ucgcuaaguuuacuuaaac

SEQ ID NO: 2505719 - RNA, 19 nt, Artificial Sequence
  Description of Artificial Sequence: Synthetic oligonucleotide
  Antisense strand to SEQ ID NO: 2505718
guuuaaguaaacuuagcga

SEQ ID NO: 2505720 - RNA, 19 nt, Artificial Sequence
  Description of Artificial Sequence: Synthetic oligonucleotide
  Sense strand starting at position 3543 of SEQ ID NO: 1888031
uggugagcaccgggaaauu

SEQ ID NO: 2505721 - RNA, 19 nt, Artificial Sequence
  Description of Artificial Sequence: Synthetic oligonucleotide
  Antisense strand to SEQ ID NO: 2505720
aauuucccggugcucacca

SEQ ID NO: 2505722 - RNA, 19 nt, Artificial Sequence
  Description of Artificial Sequence: Synthetic oligonucleotide
  Sense strand starting at position 3591 of SEQ ID NO: 1888031
gacuguaaauugguauuga

SEQ ID NO: 2505723 - RNA, 19 nt, Artificial Sequence
  Description of Artificial Sequence: Synthetic oligonucleotide
  Antisense strand to SEQ ID NO: 2505722
ucaauaccaauuuacaguc

SEQ ID NO: 2505724 - RNA, 19 nt, Artificial Sequence
  Description of Artificial Sequence: Synthetic oligonucleotide
  Sense strand starting at position 3592 of SEQ ID NO: 1888031
acuguaaauugguauugau

SEQ ID NO: 2505725 - RNA, 19 nt, Artificial Sequence
  Description of Artificial Sequence: Synthetic oligonucleotide
  Antisense strand to SEQ ID NO: 2505724
aucaauaccaauuuacagu

SEQ ID NO: 2505726 - RNA, 19 nt, Artificial Sequence
  Description of Artificial Sequence: Synthetic oligonucleotide
  Sense strand starting at position 3595 of SEQ ID NO: 1888031
guaaauugguauugaucag

SEQ ID NO: 2505727 - RNA, 19 nt, Artificial Sequence
  Description of Artificial Sequence: Synthetic oligonucleotide
  Antisense strand to SEQ ID NO: 2505726
cugaucaauaccaauuuac

SEQ ID NO: 2505728 - RNA, 19 nt, Artificial Sequence
  Description of Artificial Sequence: Synthetic oligonucleotide
  Sense strand starting at position 302 of SEQ ID NO: 1888032
cauguagagucuugaaagc

SEQ ID NO: 2505729 - RNA, 19 nt, Artificial Sequence
  Description of Artificial Sequence: Synthetic oligonucleotide
  Antisense strand to SEQ ID NO: 2505728
gcuuucaagacucuacaug

SEQ ID NO: 2505730 - RNA, 19 nt, Artificial Sequence
  Description of Artificial Sequence: Synthetic oligonucleotide
  Sense strand starting at position 406 of SEQ ID NO: 1888032
ggcacaguugugcaagaca

SEQ ID NO: 2505731 - RNA, 19 nt, Artificial Sequence
  Description of Artificial Sequence: Synthetic oligonucleotide
  Antisense strand to SEQ ID NO: 2505730
ugucuugcacaacugugcc

SEQ ID NO: 2505732 - RNA, 19 nt, Artificial Sequence
  Description of Artificial Sequence: Synthetic oligonucleotide
  Sense strand starting at position 452 of SEQ ID NO: 1888032
gacccugacccugguaaga

SEQ ID NO: 2505733 - RNA, 19 nt, Artificial Sequence
  Description of Artificial Sequence: Synthetic oligonucleotide
  Antisense strand to SEQ ID NO: 2505732
ucuuaccagggucaggguc

SEQ ID NO: 2505734 - RNA, 19 nt, Artificial Sequence
  Description of Artificial Sequence: Synthetic oligonucleotide
  Sense strand starting at position 473 of SEQ ID NO: 1888032
gccaguuguccugguugca

SEQ ID NO: 2505735 - RNA, 19 nt, Artificial Sequence
  Description of Artificial Sequence: Synthetic oligonucleotide
  Antisense strand to SEQ ID NO: 2505734
ugcaaccaggacaacuggc

SEQ ID NO: 2505736 - RNA, 19 nt, Artificial Sequence
  Description of Artificial Sequence: Synthetic oligonucleotide
  Sense strand starting at position 707 of SEQ ID NO: 1888032
aauagaaggucuucccaga

SEQ ID NO: 2505737 - RNA, 19 nt, Artificial Sequence
  Description of Artificial Sequence: Synthetic oligonucleotide
  Antisense strand to SEQ ID NO: 2505736
ucugggaagaccuucuauu

SEQ ID NO: 2505738 - RNA, 19 nt, Artificial Sequence
  Description of Artificial Sequence: Synthetic oligonucleotide
  Sense strand starting at position 837 of SEQ ID NO: 1888032
agagcuuccgcaguagcau

SEQ ID NO: 2505739 - RNA, 19 nt, Artificial Sequence
  Description of Artificial Sequence: Synthetic oligonucleotide
  Antisense strand to SEQ ID NO: 2505738
augcuacugcggaagcucu

SEQ ID NO: 2505740 - RNA, 19 nt, Artificial Sequence
  Description of Artificial Sequence: Synthetic oligonucleotide
  Sense strand starting at position 883 of SEQ ID NO: 1888032
gcuggcauuccugggauag

SEQ ID NO: 2505741 - RNA, 19 nt, Artificial Sequence
  Description of Artificial Sequence: Synthetic oligonucleotide
  Antisense strand to SEQ ID NO: 2505740
cuaucccaggaaugccagc

SEQ ID NO: 2505742 - RNA, 19 nt, Artificial Sequence
  Description of Artificial Sequence: Synthetic oligonucleotide
  Sense strand starting at position 884 of SEQ ID NO: 1888032
cuggcauuccugggauaga

SEQ ID NO: 2505743 - RNA, 19 nt, Artificial Sequence
  Description of Artificial Sequence: Synthetic oligonucleotide
  Antisense strand to SEQ ID NO: 2505742
ucuaucccaggaaugccag

SEQ ID NO: 2505744 - RNA, 19 nt, Artificial Sequence
  Description of Artificial Sequence: Synthetic oligonucleotide
  Sense strand starting at position 885 of SEQ ID NO: 1888032
uggcauuccugggauagau

SEQ ID NO: 2505745 - RNA, 19 nt, Artificial Sequence
  Description of Artificial Sequence: Synthetic oligonucleotide
  Antisense strand to SEQ ID NO: 2505744
aucuaucccaggaaugcca

SEQ ID NO: 2505746 - RNA, 19 nt, Artificial Sequence
  Description of Artificial Sequence: Synthetic oligonucleotide
  Sense strand starting at position 982 of SEQ ID NO: 1888032
agcagaaacugauggaacu

SEQ ID NO: 2505747 - RNA, 19 nt, Artificial Sequence
  Description of Artificial Sequence: Synthetic oligonucleotide
  Antisense strand to SEQ ID NO: 2505746
aguuccaucaguuucugcu

SEQ ID NO: 2505748 - RNA, 19 nt, Artificial Sequence
  Description of Artificial Sequence: Synthetic oligonucleotide
  Sense strand starting at position 1061 of SEQ ID NO: 1888032
ggguauuggucgaugucgu

SEQ ID NO: 2505749 - RNA, 19 nt, Artificial Sequence
  Description of Artificial Sequence: Synthetic oligonucleotide
  Antisense strand to SEQ ID NO: 2505748
acgacaucgaccaauaccc

SEQ ID NO: 2505750 - RNA, 19 nt, Artificial Sequence
  Description of Artificial Sequence: Synthetic oligonucleotide
  Sense strand starting at position 1062 of SEQ ID NO: 1888032
gguauuggucgaugucguu

SEQ ID NO: 2505751 - RNA, 19 nt, Artificial Sequence
  Description of Artificial Sequence: Synthetic oligonucleotide
  Antisense strand to SEQ ID NO: 2505750
aacgacaucgaccaauacc

SEQ ID NO: 2505752 - RNA, 19 nt, Artificial Sequence
  Description of Artificial Sequence: Synthetic oligonucleotide
  Sense strand starting at position 1068 of SEQ ID NO: 1888032
ggucgaugucguugccaag

SEQ ID NO: 2505753 - RNA, 19 nt, Artificial Sequence
  Description of Artificial Sequence: Synthetic oligonucleotide
  Antisense strand to SEQ ID NO: 2505752
cuuggcaacgacaucgacc

SEQ ID NO: 2505754 - RNA, 19 nt, Artificial Sequence
  Description of Artificial Sequence: Synthetic oligonucleotide
  Sense strand starting at position 1397 of SEQ ID NO: 1888032
aguguugaccacugaccaa

SEQ ID NO: 2505755 - RNA, 19 nt, Artificial Sequence
  Description of Artificial Sequence: Synthetic oligonucleotide
  Antisense strand to SEQ ID NO: 2505754
uuggucaguggucaacacu

SEQ ID NO: 2505756 - RNA, 19 nt, Artificial Sequence
  Description of Artificial Sequence: Synthetic oligonucleotide
  Sense strand starting at position 1627 of SEQ ID NO: 1888032
ggugcugauucagguguca

SEQ ID NO: 2505757 - RNA, 19 nt, Artificial Sequence
  Description of Artificial Sequence: Synthetic oligonucleotide
  Antisense strand to SEQ ID NO: 2505756
ugacaccugaaucagcacc

SEQ ID NO: 2505758 - RNA, 19 nt, Artificial Sequence
  Description of Artificial Sequence: Synthetic oligonucleotide
  Sense strand starting at position 1764 of SEQ ID NO: 1888032
cuucucuaccuguaaggau

SEQ ID NO: 2505759 - RNA, 19 nt, Artificial Sequence
  Description of Artificial Sequence: Synthetic oligonucleotide
  Antisense strand to SEQ ID NO: 2505758
auccuuacagguagagaag

SEQ ID NO: 2505760 - RNA, 19 nt, Artificial Sequence
  Description of Artificial Sequence: Synthetic oligonucleotide
  Sense strand starting at position 2019 of SEQ ID NO: 1888032
ccaguuauaucauagaucu

SEQ ID NO: 2505761 - RNA, 19 nt, Artificial Sequence
  Description of Artificial Sequence: Synthetic oligonucleotide
  Antisense strand to SEQ ID NO: 2505760
agaucuaugauauaacugg

SEQ ID NO: 2505762 - RNA, 19 nt, Artificial Sequence
  Description of Artificial Sequence: Synthetic oligonucleotide
  Sense strand starting at position 2936 of SEQ ID NO: 1888032
ccucucuggaguuguguga

SEQ ID NO: 2505763 - RNA, 19 nt, Artificial Sequence
  Description of Artificial Sequence: Synthetic oligonucleotide
  Antisense strand to SEQ ID NO: 2505762
ucacacaacuccagagagg

SEQ ID NO: 2505764 - RNA, 19 nt, Artificial Sequence
  Description of Artificial Sequence: Synthetic oligonucleotide
  Sense strand starting at position 2940 of SEQ ID NO: 1888032
ucuggaguugugugacauc

SEQ ID NO: 2505765 - RNA, 19 nt, Artificial Sequence
  Description of Artificial Sequence: Synthetic oligonucleotide
  Antisense strand to SEQ ID NO: 2505764
gaugucacacaacuccaga

SEQ ID NO: 2505766 - RNA, 19 nt, Artificial Sequence
  Description of Artificial Sequence: Synthetic oligonucleotide
  Sense strand starting at position 2943 of SEQ ID NO: 1888032
ggaguugugugacaucaac

SEQ ID NO: 2505767 - RNA, 19 nt, Artificial Sequence
  Description of Artificial Sequence: Synthetic oligonucleotide
  Antisense strand to SEQ ID NO: 2505766
guugaugucacacaacucc

SEQ ID NO: 2505768 - RNA, 19 nt, Artificial Sequence
  Description of Artificial Sequence: Synthetic oligonucleotide
  Sense strand starting at position 3018 of SEQ ID NO: 1888032
uuagauggcucagagacau

SEQ ID NO: 2505769 - RNA, 19 nt, Artificial Sequence
  Description of Artificial Sequence: Synthetic oligonucleotide
  Antisense strand to SEQ ID NO: 2505768
augucucugagccaucuaa

SEQ ID NO: 2505770 - RNA, 19 nt, Artificial Sequence
  Description of Artificial Sequence: Synthetic oligonucleotide
  Sense strand starting at position 3041 of SEQ ID NO: 1888032
ccugaauaagccugagacu

SEQ ID NO: 2505771 - RNA, 19 nt, Artificial Sequence
  Description of Artificial Sequence: Synthetic oligonucleotide
  Antisense strand to SEQ ID NO: 2505770
agucucaggcuuauucagg

SEQ ID NO: 2505772 - RNA, 19 nt, Artificial Sequence
  Description of Artificial Sequence: Synthetic oligonucleotide
  Sense strand starting at position 3044 of SEQ ID NO: 1888032
gaauaagccugagacugaa

SEQ ID NO: 2505773 - RNA, 19 nt, Artificial Sequence
  Description of Artificial Sequence: Synthetic oligonucleotide
  Antisense strand to SEQ ID NO: 2505772
uucagucucaggcuuauuc

SEQ ID NO: 2505774 - RNA, 19 nt, Artificial Sequence
  Description of Artificial Sequence: Synthetic oligonucleotide
  Sense strand starting at position 3468 of SEQ ID NO: 1888032
acucauguguuauuaauuc

SEQ ID NO: 2505775 - RNA, 19 nt, Artificial Sequence
  Description of Artificial Sequence: Synthetic oligonucleotide
  Antisense strand to SEQ ID NO: 2505774
gaauuaauaacacaugagu

SEQ ID NO: 2505776 - RNA, 19 nt, Artificial Sequence
  Description of Artificial Sequence: Synthetic oligonucleotide
  Sense strand starting at position 3667 of SEQ ID NO: 1888032
ccacgcuaggcuuauuuau

SEQ ID NO: 2505777 - RNA, 19 nt, Artificial Sequence
  Description of Artificial Sequence: Synthetic oligonucleotide
  Antisense strand to SEQ ID NO: 2505776
auaaauaagccuagcgugg

SEQ ID NO: 2505778 - RNA, 19 nt, Artificial Sequence
  Description of Artificial Sequence: Synthetic oligonucleotide
  Sense strand starting at position 1 of SEQ ID NO: 1888033
gccuuaugggauuauuauc

SEQ ID NO: 2505779 - RNA, 19 nt, Artificial Sequence
  Description of Artificial Sequence: Synthetic oligonucleotide
  Antisense strand to SEQ ID NO: 2505778
gauaauaaucccauaaggc

SEQ ID NO: 2505780 - RNA, 19 nt, Artificial Sequence
  Description of Artificial Sequence: Synthetic oligonucleotide
  Sense strand starting at position 7 of SEQ ID NO: 1888033
ugggauuauuaucaagaac

SEQ ID NO: 2505781 - RNA, 19 nt, Artificial Sequence
  Description of Artificial Sequence: Synthetic oligonucleotide
  Antisense strand to SEQ ID NO: 2505780
guucuugauaauaauccca

SEQ ID NO: 2505782 - RNA, 19 nt, Artificial Sequence
  Description of Artificial Sequence: Synthetic oligonucleotide
  Sense strand starting at position 223 of SEQ ID NO: 1888033
ucagaauccugcuuagaau

SEQ ID NO: 2505783 - RNA, 19 nt, Artificial Sequence
  Description of Artificial Sequence: Synthetic oligonucleotide
  Antisense strand to SEQ ID NO: 2505782
auucuaagcaggauucuga

SEQ ID NO: 2505784 - RNA, 19 nt, Artificial Sequence
  Description of Artificial Sequence: Synthetic oligonucleotide
  Sense strand starting at position 468 of SEQ ID NO: 1888033
agaccugucccauaaguag

SEQ ID NO: 2505785 - RNA, 19 nt, Artificial Sequence
  Description of Artificial Sequence: Synthetic oligonucleotide
  Antisense strand to SEQ ID NO: 2505784
cuacuuaugggacaggucu

SEQ ID NO: 2505786 - RNA, 19 nt, Artificial Sequence
  Description of Artificial Sequence: Synthetic oligonucleotide
  Sense strand starting at position 496 of SEQ ID NO: 1888033
ggaagauccuaggccucuu

SEQ ID NO: 2505787 - RNA, 19 nt, Artificial Sequence
  Description of Artificial Sequence: Synthetic oligonucleotide
  Antisense strand to SEQ ID NO: 2505786
aagaggccuaggaucuucc

SEQ ID NO: 2505788 - RNA, 19 nt, Artificial Sequence
  Description of Artificial Sequence: Synthetic oligonucleotide
  Sense strand starting at position 588 of SEQ ID NO: 1888033
augugaaaccuaggaguaa

SEQ ID NO: 2505789 - RNA, 19 nt, Artificial Sequence
  Description of Artificial Sequence: Synthetic oligonucleotide
  Antisense strand to SEQ ID NO: 2505788
uuacuccuagguuucacau

SEQ ID NO: 2505790 - RNA, 19 nt, Artificial Sequence
  Description of Artificial Sequence: Synthetic oligonucleotide
  Sense strand starting at position 589 of SEQ ID NO: 1888033
ugugaaaccuaggaguaag

SEQ ID NO: 2505791 - RNA, 19 nt, Artificial Sequence
  Description of Artificial Sequence: Synthetic oligonucleotide
  Antisense strand to SEQ ID NO: 2505790
cuuacuccuagguuucaca

SEQ ID NO: 2505792 - RNA, 19 nt, Artificial Sequence
  Description of Artificial Sequence: Synthetic oligonucleotide
  Sense strand starting at position 650 of SEQ ID NO: 1888033
cagagaggcucaguacauu

SEQ ID NO: 2505793 - RNA, 19 nt, Artificial Sequence
  Description of Artificial Sequence: Synthetic oligonucleotide
  Antisense strand to SEQ ID NO: 2505792
aauguacugagccucucug

SEQ ID NO: 2505794 - RNA, 19 nt, Artificial Sequence
  Description of Artificial Sequence: Synthetic oligonucleotide
  Sense strand starting at position 656 of SEQ ID NO: 1888033
ggcucaguacauugugcaa

SEQ ID NO: 2505795 - RNA, 19 nt, Artificial Sequence
  Description of Artificial Sequence: Synthetic oligonucleotide
  Antisense strand to SEQ ID NO: 2505794
uugcacaauguacugagcc

SEQ ID NO: 2505796 - RNA, 19 nt, Artificial Sequence
  Description of Artificial Sequence: Synthetic oligonucleotide
  Sense strand starting at position 682 of SEQ ID NO: 1888033
cagcuacagaguugugaag

SEQ ID NO: 2505797 - RNA, 19 nt, Artificial Sequence
  Description of Artificial Sequence: Synthetic oligonucleotide
  Antisense strand to SEQ ID NO: 2505796
cuucacaacucuguagcug

SEQ ID NO: 2505798 - RNA, 19 nt, Artificial Sequence
  Description of Artificial Sequence: Synthetic oligonucleotide
  Sense strand starting at position 693 of SEQ ID NO: 1888033
uugugaagccgagauugga

SEQ ID NO: 2505799 - RNA, 19 nt, Artificial Sequence
  Description of Artificial Sequence: Synthetic oligonucleotide
  Antisense strand to SEQ ID NO: 2505798
uccaaucucggcuucacaa

SEQ ID NO: 2505800 - RNA, 19 nt, Artificial Sequence
  Description of Artificial Sequence: Synthetic oligonucleotide
  Sense strand starting at position 876 of SEQ ID NO: 1888033
agaggacacgugcaucuaa

SEQ ID NO: 2505801 - RNA, 19 nt, Artificial Sequence
  Description of Artificial Sequence: Synthetic oligonucleotide
  Antisense strand to SEQ ID NO: 2505800
uuagaugcacguguccucu

SEQ ID NO: 2505802 - RNA, 19 nt, Artificial Sequence
  Description of Artificial Sequence: Synthetic oligonucleotide
  Sense strand starting at position 1054 of SEQ ID NO: 1888033
gucagacagaacuggguua

SEQ ID NO: 2505803 - RNA, 19 nt, Artificial Sequence
  Description of Artificial Sequence: Synthetic oligonucleotide
  Antisense strand to SEQ ID NO: 2505802
uaacccaguucugucugac

SEQ ID NO: 2505804 - RNA, 19 nt, Artificial Sequence
  Description of Artificial Sequence: Synthetic oligonucleotide
  Sense strand starting at position 1068 of SEQ ID NO: 1888033
gguuaaagaucagacacgu

SEQ ID NO: 2505805 - RNA, 19 nt, Artificial Sequence
  Description of Artificial Sequence: Synthetic oligonucleotide
  Antisense strand to SEQ ID NO: 2505804
acgugucugaucuuuaacc

SEQ ID NO: 2505806 - RNA, 19 nt, Artificial Sequence
  Description of Artificial Sequence: Synthetic oligonucleotide
  Sense strand starting at position 1103 of SEQ ID NO: 1888033
aguccauaucuguaagccu

SEQ ID NO: 2505807 - RNA, 19 nt, Artificial Sequence
  Description of Artificial Sequence: Synthetic oligonucleotide
  Antisense strand to SEQ ID NO: 2505806
aggcuuacagauauggacu

SEQ ID NO: 2505808 - RNA, 19 nt, Artificial Sequence
  Description of Artificial Sequence: Synthetic oligonucleotide
  Sense strand starting at position 1575 of SEQ ID NO: 1888033
uggcuucuacagugcuuau

SEQ ID NO: 2505809 - RNA, 19 nt, Artificial Sequence
  Description of Artificial Sequence: Synthetic oligonucleotide
  Antisense strand to SEQ ID NO: 2505808
auaagcacuguagaagcca

SEQ ID NO: 2505810 - RNA, 19 nt, Artificial Sequence
  Description of Artificial Sequence: Synthetic oligonucleotide
  Sense strand starting at position 1585 of SEQ ID NO: 1888033
agugcuuauuugucaguuu

SEQ ID NO: 2505811 - RNA, 19 nt, Artificial Sequence
  Description of Artificial Sequence: Synthetic oligonucleotide
  Antisense strand to SEQ ID NO: 2505810
aaacugacaaauaagcacu

SEQ ID NO: 2505812 - RNA, 19 nt, Artificial Sequence
  Description of Artificial Sequence: Synthetic oligonucleotide
  Sense strand starting at position 1752 of SEQ ID NO: 1888033
aaguuugccguccgccaaa

SEQ ID NO: 2505813 - RNA, 19 nt, Artificial Sequence
  Description of Artificial Sequence: Synthetic oligonucleotide
  Antisense strand to SEQ ID NO: 2505812
uuuggcggacggcaaacuu

SEQ ID NO: 2505814 - RNA, 19 nt, Artificial Sequence
  Description of Artificial Sequence: Synthetic oligonucleotide
  Sense strand starting at position 2212 of SEQ ID NO: 1888033
cauugaaaguccuugaaag

SEQ ID NO: 2505815 - RNA, 19 nt, Artificial Sequence
  Description of Artificial Sequence: Synthetic oligonucleotide
  Antisense strand to SEQ ID NO: 2505814
cuuucaaggacuuucaaug

SEQ ID NO: 2505816 - RNA, 19 nt, Artificial Sequence
  Description of Artificial Sequence: Synthetic oligonucleotide
  Sense strand starting at position 2288 of SEQ ID NO: 1888033
cuugauaaccgucauaguu

SEQ ID NO: 2505817 - RNA, 19 nt, Artificial Sequence
  Description of Artificial Sequence: Synthetic oligonucleotide
  Antisense strand to SEQ ID NO: 2505816
aacuaugacgguuaucaag

SEQ ID NO: 2505818 - RNA, 19 nt, Artificial Sequence
  Description of Artificial Sequence: Synthetic oligonucleotide
  Sense strand starting at position 2290 of SEQ ID NO: 1888033
ugauaaccgucauaguuac

SEQ ID NO: 2505819 - RNA, 19 nt, Artificial Sequence
  Description of Artificial Sequence: Synthetic oligonucleotide
  Antisense strand to SEQ ID NO: 2505818
guaacuaugacgguuauca

SEQ ID NO: 2505820 - RNA, 19 nt, Artificial Sequence
  Description of Artificial Sequence: Synthetic oligonucleotide
  Sense strand starting at position 2296 of SEQ ID NO: 1888033
ccgucauaguuaccaauga

SEQ ID NO: 2505821 - RNA, 19 nt, Artificial Sequence
  Description of Artificial Sequence: Synthetic oligonucleotide
  Antisense strand to SEQ ID NO: 2505820
ucauugguaacuaugacgg

SEQ ID NO: 2505822 - RNA, 19 nt, Artificial Sequence
  Description of Artificial Sequence: Synthetic oligonucleotide
  Sense strand starting at position 2415 of SEQ ID NO: 1888033
ggacaucccuauuacuaug

SEQ ID NO: 2505823 - RNA, 19 nt, Artificial Sequence
  Description of Artificial Sequence: Synthetic oligonucleotide
  Antisense strand to SEQ ID NO: 2505822
cauaguaauagggaugucc

SEQ ID NO: 2505824 - RNA, 19 nt, Artificial Sequence
  Description of Artificial Sequence: Synthetic oligonucleotide
  Sense strand starting at position 2484 of SEQ ID NO: 1888033
cgcugaggaacuugucuga

SEQ ID NO: 2505825 - RNA, 19 nt, Artificial Sequence
  Description of Artificial Sequence: Synthetic oligonucleotide
  Antisense strand to SEQ ID NO: 2505824
ucagacaaguuccucagcg

SEQ ID NO: 2505826 - RNA, 19 nt, Artificial Sequence
  Description of Artificial Sequence: Synthetic oligonucleotide
  Sense strand starting at position 2487 of SEQ ID NO: 1888033
ugaggaacuugucugaagu

SEQ ID NO: 2505827 - RNA, 19 nt, Artificial Sequence
  Description of Artificial Sequence: Synthetic oligonucleotide
  Antisense strand to SEQ ID NO: 2505826
acuucagacaaguuccuca

SEQ ID NO: 2505828 - RNA, 19 nt, Artificial Sequence
  Description of Artificial Sequence: Synthetic oligonucleotide
  Sense strand starting at position 2488 of SEQ ID NO: 1888033
gaggaacuugucugaaguu

SEQ ID NO: 2505829 - RNA, 19 nt, Artificial Sequence
  Description of Artificial Sequence: Synthetic oligonucleotide
  Antisense strand to SEQ ID NO: 2505828
aacuucagacaaguuccuc

SEQ ID NO: 2505830 - RNA, 19 nt, Artificial Sequence
  Description of Artificial Sequence: Synthetic oligonucleotide
  Sense strand starting at position 2489 of SEQ ID NO: 1888033
aggaacuugucugaaguua

SEQ ID NO: 2505831 - RNA, 19 nt, Artificial Sequence
  Description of Artificial Sequence: Synthetic oligonucleotide
  Antisense strand to SEQ ID NO: 2505830
uaacuucagacaaguuccu

SEQ ID NO: 2505832 - RNA, 19 nt, Artificial Sequence
  Description of Artificial Sequence: Synthetic oligonucleotide
  Sense strand starting at position 2766 of SEQ ID NO: 1888033
gcugcaagccuuuguguuu

SEQ ID NO: 2505833 - RNA, 19 nt, Artificial Sequence
  Description of Artificial Sequence: Synthetic oligonucleotide
  Antisense strand to SEQ ID NO: 2505832
aaacacaaaggcuugcagc

SEQ ID NO: 2505834 - RNA, 19 nt, Artificial Sequence
  Description of Artificial Sequence: Synthetic oligonucleotide
  Sense strand starting at position 2959 of SEQ ID NO: 1888033
gugucuuaugccuaauggu

SEQ ID NO: 2505835 - RNA, 19 nt, Artificial Sequence
  Description of Artificial Sequence: Synthetic oligonucleotide
  Antisense strand to SEQ ID NO: 2505834
accauuaggcauaagacac

SEQ ID NO: 2505836 - RNA, 19 nt, Artificial Sequence
  Description of Artificial Sequence: Synthetic oligonucleotide
  Sense strand starting at position 3190 of SEQ ID NO: 1888033
gggcauuaguaugaaacga

SEQ ID NO: 2505837 - RNA, 19 nt, Artificial Sequence
  Description of Artificial Sequence: Synthetic oligonucleotide
  Antisense strand to SEQ ID NO: 2505836
ucguuucauacuaaugccc

SEQ ID NO: 2505838 - RNA, 19 nt, Artificial Sequence
  Description of Artificial Sequence: Synthetic oligonucleotide
  Sense strand starting at position 3354 of SEQ ID NO: 1888033
ucugacuauggagguaaua

SEQ ID NO: 2505839 - RNA, 19 nt, Artificial Sequence
  Description of Artificial Sequence: Synthetic oligonucleotide
  Antisense strand to SEQ ID NO: 2505838
uauuaccuccauagucaga

SEQ ID NO: 2505840 - RNA, 19 nt, Artificial Sequence
  Description of Artificial Sequence: Synthetic oligonucleotide
  Sense strand starting at position 3367 of SEQ ID NO: 1888033
guaauacauccucagggca

SEQ ID NO: 2505841 - RNA, 19 nt, Artificial Sequence
  Description of Artificial Sequence: Synthetic oligonucleotide
  Antisense strand to SEQ ID NO: 2505840
ugcccugaggauguauuac

SEQ ID NO: 2505842 - RNA, 19 nt, Artificial Sequence
  Description of Artificial Sequence: Synthetic oligonucleotide
  Sense strand starting at position 3473 of SEQ ID NO: 1888033
gucauuuaucuaggcucau

SEQ ID NO: 2505843 - RNA, 19 nt, Artificial Sequence
  Description of Artificial Sequence: Synthetic oligonucleotide
  Antisense strand to SEQ ID NO: 2505842
augagccuagauaaaugac

SEQ ID NO: 2505844 - RNA, 19 nt, Artificial Sequence
  Description of Artificial Sequence: Synthetic oligonucleotide
  Sense strand starting at position 3542 of SEQ ID NO: 1888033
auucuaauauugucucgau

SEQ ID NO: 2505845 - RNA, 19 nt, Artificial Sequence
  Description of Artificial Sequence: Synthetic oligonucleotide
  Antisense strand to SEQ ID NO: 2505844
aucgagacaauauuagaau

SEQ ID NO: 2505846 - RNA, 19 nt, Artificial Sequence
  Description of Artificial Sequence: Synthetic oligonucleotide
  Sense strand starting at position 3543 of SEQ ID NO: 1888033
uucuaauauugucucgauu

SEQ ID NO: 2505847 - RNA, 19 nt, Artificial Sequence
  Description of Artificial Sequence: Synthetic oligonucleotide
  Antisense strand to SEQ ID NO: 2505846
aaucgagacaauauuagaa

SEQ ID NO: 2505848 - RNA, 19 nt, Artificial Sequence
  Description of Artificial Sequence: Synthetic oligonucleotide
  Sense strand starting at position 3609 of SEQ ID NO: 1888033
gacagcguauuauuccauu

SEQ ID NO: 2505849 - RNA, 19 nt, Artificial Sequence
  Description of Artificial Sequence: Synthetic oligonucleotide
  Antisense strand to SEQ ID NO: 2505848
aauggaauaauacgcuguc

SEQ ID NO: 2505850 - RNA, 19 nt, Artificial Sequence
  Description of Artificial Sequence: Synthetic oligonucleotide
  Sense strand starting at position 3722 of SEQ ID NO: 1888033
auggcagacuagguugaau

SEQ ID NO: 2505851 - RNA, 19 nt, Artificial Sequence
  Description of Artificial Sequence: Synthetic oligonucleotide
  Antisense strand to SEQ ID NO: 2505850
auucaaccuagucugccau

SEQ ID NO: 2505852 - RNA, 19 nt, Artificial Sequence
  Description of Artificial Sequence: Synthetic oligonucleotide
  Sense strand starting at position 3734 of SEQ ID NO: 1888033
guugaauacagccgagguu

SEQ ID NO: 2505853 - RNA, 19 nt, Artificial Sequence
  Description of Artificial Sequence: Synthetic oligonucleotide
  Antisense strand to SEQ ID NO: 2505852
aaccucggcuguauucaac

SEQ ID NO: 2505854 - RNA, 19 nt, Artificial Sequence
  Description of Artificial Sequence: Synthetic oligonucleotide
  Sense strand starting at position 3793 of SEQ ID NO: 1888033
ggauguuggccauggagag

SEQ ID NO: 2505855 - RNA, 19 nt, Artificial Sequence
  Description of Artificial Sequence: Synthetic oligonucleotide
  Antisense strand to SEQ ID NO: 2505854
cucuccauggccaacaucc

SEQ ID NO: 2505856 - RNA, 19 nt, Artificial Sequence
  Description of Artificial Sequence: Synthetic oligonucleotide
  Sense strand starting at position 3794 of SEQ ID NO: 1888033
gauguuggccauggagaga

SEQ ID NO: 2505857 - RNA, 19 nt, Artificial Sequence
  Description of Artificial Sequence: Synthetic oligonucleotide
  Antisense strand to SEQ ID NO: 2505856
ucucuccauggccaacauc

SEQ ID NO: 2505858 - RNA, 19 nt, Artificial Sequence
  Description of Artificial Sequence: Synthetic oligonucleotide
  Sense strand starting at position 41 of SEQ ID NO: 1888034
gcaagaauuaucuggagug

SEQ ID NO: 2505859 - RNA, 19 nt, Artificial Sequence
  Description of Artificial Sequence: Synthetic oligonucleotide
  Antisense strand to SEQ ID NO: 2505858
cacuccagauaauucuugc

SEQ ID NO: 2505860 - RNA, 19 nt, Artificial Sequence
  Description of Artificial Sequence: Synthetic oligonucleotide
  Sense strand starting at position 482 of SEQ ID NO: 1888034
uuuagacaucauuaagcga

SEQ ID NO: 2505861 - RNA, 19 nt, Artificial Sequence
  Description of Artificial Sequence: Synthetic oligonucleotide
  Antisense strand to SEQ ID NO: 2505860
ucgcuuaaugaugucuaaa

SEQ ID NO: 2505862 - RNA, 19 nt, Artificial Sequence
  Description of Artificial Sequence: Synthetic oligonucleotide
  Sense strand starting at position 485 of SEQ ID NO: 1888034
agacaucauuaagcgauca

SEQ ID NO: 2505863 - RNA, 19 nt, Artificial Sequence
  Description of Artificial Sequence: Synthetic oligonucleotide
  Antisense strand to SEQ ID NO: 2505862
ugaucgcuuaaugaugucu

SEQ ID NO: 2505864 - RNA, 19 nt, Artificial Sequence
  Description of Artificial Sequence: Synthetic oligonucleotide
  Sense strand starting at position 498 of SEQ ID NO: 1888034
cgaucacuuccagaaucug

SEQ ID NO: 2505865 - RNA, 19 nt, Artificial Sequence
  Description of Artificial Sequence: Synthetic oligonucleotide
  Antisense strand to SEQ ID NO: 2505864
cagauucuggaagugaucg

SEQ ID NO: 2505866 - RNA, 19 nt, Artificial Sequence
  Description of Artificial Sequence: Synthetic oligonucleotide
  Sense strand starting at position 506 of SEQ ID NO: 1888034
uccagaaucugugcucuaa

SEQ ID NO: 2505867 - RNA, 19 nt, Artificial Sequence
  Description of Artificial Sequence: Synthetic oligonucleotide
  Antisense strand to SEQ ID NO: 2505866
uuagagcacagauucugga

SEQ ID NO: 2505868 - RNA, 19 nt, Artificial Sequence
  Description of Artificial Sequence: Synthetic oligonucleotide
  Sense strand starting at position 533 of SEQ ID NO: 1888034
ucuagaggugcauauauaa

SEQ ID NO: 2505869 - RNA, 19 nt, Artificial Sequence
  Description of Artificial Sequence: Synthetic oligonucleotide
  Antisense strand to SEQ ID NO: 2505868
uuauauaugcaccucuaga

SEQ ID NO: 2505870 - RNA, 19 nt, Artificial Sequence
  Description of Artificial Sequence: Synthetic oligonucleotide
  Sense strand starting at position 547 of SEQ ID NO: 1888034
uauaauauggccuguaaug

SEQ ID NO: 2505871 - RNA, 19 nt, Artificial Sequence
  Description of Artificial Sequence: Synthetic oligonucleotide
  Antisense strand to SEQ ID NO: 2505870
cauuacaggccauauuaua

SEQ ID NO: 2505872 - RNA, 19 nt, Artificial Sequence
  Description of Artificial Sequence: Synthetic oligonucleotide
  Sense strand starting at position 564 of SEQ ID NO: 1888034
ugaaaugacugugauaaua

SEQ ID NO: 2505873 - RNA, 19 nt, Artificial Sequence
  Description of Artificial Sequence: Synthetic oligonucleotide
  Antisense strand to SEQ ID NO: 2505872
uauuaucacagucauuuca

SEQ ID NO: 2505874 - RNA, 19 nt, Artificial Sequence
  Description of Artificial Sequence: Synthetic oligonucleotide
  Sense strand starting at position 634 of SEQ ID NO: 1888034
gugccacuauauuuaaguu

SEQ ID NO: 2505875 - RNA, 19 nt, Artificial Sequence
  Description of Artificial Sequence: Synthetic oligonucleotide
  Antisense strand to SEQ ID NO: 2505874
aacuuaaauauaguggcac

SEQ ID NO: 2505876 - RNA, 19 nt, Artificial Sequence
  Description of Artificial Sequence: Synthetic oligonucleotide
  Sense strand starting at position 681 of SEQ ID NO: 1888034
ucugaucugcccuagauuc

SEQ ID NO: 2505877 - RNA, 19 nt, Artificial Sequence
  Description of Artificial Sequence: Synthetic oligonucleotide
  Antisense strand to SEQ ID NO: 2505876
gaaucuagggcagaucaga

SEQ ID NO: 2505878 - RNA, 19 nt, Artificial Sequence
  Description of Artificial Sequence: Synthetic oligonucleotide
  Sense strand starting at position 914 of SEQ ID NO: 1888034
cuggaaucaagcuguuugu

SEQ ID NO: 2505879 - RNA, 19 nt, Artificial Sequence
  Description of Artificial Sequence: Synthetic oligonucleotide
  Antisense strand to SEQ ID NO: 2505878
acaaacagcuugauuccag

SEQ ID NO: 2505880 - RNA, 19 nt, Artificial Sequence
  Description of Artificial Sequence: Synthetic oligonucleotide
  Sense strand starting at position 917 of SEQ ID NO: 1888034
gaaucaagcuguuugugau

SEQ ID NO: 2505881 - RNA, 19 nt, Artificial Sequence
  Description of Artificial Sequence: Synthetic oligonucleotide
  Antisense strand to SEQ ID NO: 2505880
aucacaaacagcuugauuc

SEQ ID NO: 2505882 - RNA, 19 nt, Artificial Sequence
  Description of Artificial Sequence: Synthetic oligonucleotide
  Sense strand starting at position 918 of SEQ ID NO: 1888034
aaucaagcuguuugugaug

SEQ ID NO: 2505883 - RNA, 19 nt, Artificial Sequence
  Description of Artificial Sequence: Synthetic oligonucleotide
  Antisense strand to SEQ ID NO: 2505882
caucacaaacagcuugauu

SEQ ID NO: 2505884 - RNA, 19 nt, Artificial Sequence
  Description of Artificial Sequence: Synthetic oligonucleotide
  Sense strand starting at position 963 of SEQ ID NO: 1888034
uacgaagcauccuccgaau

SEQ ID NO: 2505885 - RNA, 19 nt, Artificial Sequence
  Description of Artificial Sequence: Synthetic oligonucleotide
  Antisense strand to SEQ ID NO: 2505884
auucggaggaugcuucgua

SEQ ID NO: 2505886 - RNA, 19 nt, Artificial Sequence
  Description of Artificial Sequence: Synthetic oligonucleotide
  Sense strand starting at position 974 of SEQ ID NO: 1888034
cuccgaaugggacgaguaa

SEQ ID NO: 2505887 - RNA, 19 nt, Artificial Sequence
  Description of Artificial Sequence: Synthetic oligonucleotide
  Antisense strand to SEQ ID NO: 2505886
uuacucgucccauucggag

SEQ ID NO: 2505888 - RNA, 19 nt, Artificial Sequence
  Description of Artificial Sequence: Synthetic oligonucleotide
  Sense strand starting at position 1110 of SEQ ID NO: 1888034
aguauucgguccuuuacau

SEQ ID NO: 2505889 - RNA, 19 nt, Artificial Sequence
  Description of Artificial Sequence: Synthetic oligonucleotide
  Antisense strand to SEQ ID NO: 2505888
auguaaaggaccgaauacu

SEQ ID NO: 2505890 - RNA, 19 nt, Artificial Sequence
  Description of Artificial Sequence: Synthetic oligonucleotide
  Sense strand starting at position 1136 of SEQ ID NO: 1888034
gcaacagcagcucaagauu

SEQ ID NO: 2505891 - RNA, 19 nt, Artificial Sequence
  Description of Artificial Sequence: Synthetic oligonucleotide
  Antisense strand to SEQ ID NO: 2505890
aaucuugagcugcuguugc

SEQ ID NO: 2505892 - RNA, 19 nt, Artificial Sequence
  Description of Artificial Sequence: Synthetic oligonucleotide
  Sense strand starting at position 1208 of SEQ ID NO: 1888034
gaguuauucugaguuaaac

SEQ ID NO: 2505893 - RNA, 19 nt, Artificial Sequence
  Description of Artificial Sequence: Synthetic oligonucleotide
  Antisense strand to SEQ ID NO: 2505892
guuuaacucagaauaacuc

SEQ ID NO: 2505894 - RNA, 19 nt, Artificial Sequence
  Description of Artificial Sequence: Synthetic oligonucleotide
  Sense strand starting at position 1210 of SEQ ID NO: 1888034
guuauucugaguuaaacga

SEQ ID NO: 2505895 - RNA, 19 nt, Artificial Sequence
  Description of Artificial Sequence: Synthetic oligonucleotide
  Antisense strand to SEQ ID NO: 2505894
ucguuuaacucagaauaac

SEQ ID NO: 2505896 - RNA, 19 nt, Artificial Sequence
  Description of Artificial Sequence: Synthetic oligonucleotide
  Sense strand starting at position 1214 of SEQ ID NO: 1888034
uucugaguuaaacgagauu

SEQ ID NO: 2505897 - RNA, 19 nt, Artificial Sequence
  Description of Artificial Sequence: Synthetic oligonucleotide
  Antisense strand to SEQ ID NO: 2505896
aaucucguuuaacucagaa

SEQ ID NO: 2505898 - RNA, 19 nt, Artificial Sequence
  Description of Artificial Sequence: Synthetic oligonucleotide
  Sense strand starting at position 1260 of SEQ ID NO: 1888034
aagcauucucagcagaagu

SEQ ID NO: 2505899 - RNA, 19 nt, Artificial Sequence
  Description of Artificial Sequence: Synthetic oligonucleotide
  Antisense strand to SEQ ID NO: 2505898
acuucugcugagaaugcuu

SEQ ID NO: 2505900 - RNA, 19 nt, Artificial Sequence
  Description of Artificial Sequence: Synthetic oligonucleotide
  Sense strand starting at position 1262 of SEQ ID NO: 1888034
gcauucucagcagaagucu

SEQ ID NO: 2505901 - RNA, 19 nt, Artificial Sequence
  Description of Artificial Sequence: Synthetic oligonucleotide
  Antisense strand to SEQ ID NO: 2505900
agacuucugcugagaaugc

SEQ ID NO: 2505902 - RNA, 19 nt, Artificial Sequence
  Description of Artificial Sequence: Synthetic oligonucleotide
  Sense strand starting at position 1268 of SEQ ID NO: 1888034
ucagcagaagucuguuacu

SEQ ID NO: 2505903 - RNA, 19 nt, Artificial Sequence
  Description of Artificial Sequence: Synthetic oligonucleotide
  Antisense strand to SEQ ID NO: 2505902
aguaacagacuucugcuga

SEQ ID NO: 2505904 - RNA, 19 nt, Artificial Sequence
  Description of Artificial Sequence: Synthetic oligonucleotide
  Sense strand starting at position 1273 of SEQ ID NO: 1888034
agaagucuguuacuguuaa

SEQ ID NO: 2505905 - RNA, 19 nt, Artificial Sequence
  Description of Artificial Sequence: Synthetic oligonucleotide
  Antisense strand to SEQ ID NO: 2505904
uuaacaguaacagacuucu

SEQ ID NO: 2505906 - RNA, 19 nt, Artificial Sequence
  Description of Artificial Sequence: Synthetic oligonucleotide
  Sense strand starting at position 1296 of SEQ ID NO: 1888034
ugugcuacuuaauucgaaa

SEQ ID NO: 2505907 - RNA, 19 nt, Artificial Sequence
  Description of Artificial Sequence: Synthetic oligonucleotide
  Antisense strand to SEQ ID NO: 2505906
uuucgaauuaaguagcaca

SEQ ID NO: 2505908 - RNA, 19 nt, Artificial Sequence
  Description of Artificial Sequence: Synthetic oligonucleotide
  Sense strand starting at position 2040 of SEQ ID NO: 1888034
aagccauccgagugaaaca

SEQ ID NO: 2505909 - RNA, 19 nt, Artificial Sequence
  Description of Artificial Sequence: Synthetic oligonucleotide
  Antisense strand to SEQ ID NO: 2505908
uguuucacucggauggcuu

SEQ ID NO: 2505910 - RNA, 19 nt, Artificial Sequence
  Description of Artificial Sequence: Synthetic oligonucleotide
  Sense strand starting at position 2082 of SEQ ID NO: 1888034
gcgcuacucguggcggaaa

SEQ ID NO: 2505911 - RNA, 19 nt, Artificial Sequence
  Description of Artificial Sequence: Synthetic oligonucleotide
  Antisense strand to SEQ ID NO: 2505910
uuuccgccacgaguagcgc

SEQ ID NO: 2505912 - RNA, 19 nt, Artificial Sequence
  Description of Artificial Sequence: Synthetic oligonucleotide
  Sense strand starting at position 2095 of SEQ ID NO: 1888034
cggaaaugacgucagcauc

SEQ ID NO: 2505913 - RNA, 19 nt, Artificial Sequence
  Description of Artificial Sequence: Synthetic oligonucleotide
  Antisense strand to SEQ ID NO: 2505912
gaugcugacgucauuuccg

SEQ ID NO: 2505914 - RNA, 19 nt, Artificial Sequence
  Description of Artificial Sequence: Synthetic oligonucleotide
  Sense strand starting at position 2355 of SEQ ID NO: 1888034
caggauuuagcccgcuuau

SEQ ID NO: 2505915 - RNA, 19 nt, Artificial Sequence
  Description of Artificial Sequence: Synthetic oligonucleotide
  Antisense strand to SEQ ID NO: 2505914
auaagcgggcuaaauccug

SEQ ID NO: 2505916 - RNA, 19 nt, Artificial Sequence
  Description of Artificial Sequence: Synthetic oligonucleotide
  Sense strand starting at position 2396 of SEQ ID NO: 1888034
ucuguagggccuuguugaa

SEQ ID NO: 2505917 - RNA, 19 nt, Artificial Sequence
  Description of Artificial Sequence: Synthetic oligonucleotide
  Antisense strand to SEQ ID NO: 2505916
uucaacaaggcccuacaga

SEQ ID NO: 2505918 - RNA, 19 nt, Artificial Sequence
  Description of Artificial Sequence: Synthetic oligonucleotide
  Sense strand starting at position 2403 of SEQ ID NO: 1888034
ggccuuguugaagauguua

SEQ ID NO: 2505919 - RNA, 19 nt, Artificial Sequence
  Description of Artificial Sequence: Synthetic oligonucleotide
  Antisense strand to SEQ ID NO: 2505918
uaacaucuucaacaaggcc

SEQ ID NO: 2505920 - RNA, 19 nt, Artificial Sequence
  Description of Artificial Sequence: Synthetic oligonucleotide
  Sense strand starting at position 2411 of SEQ ID NO: 1888034
ugaagauguuaacucuucu

SEQ ID NO: 2505921 - RNA, 19 nt, Artificial Sequence
  Description of Artificial Sequence: Synthetic oligonucleotide
  Antisense strand to SEQ ID NO: 2505920
agaagaguuaacaucuuca

SEQ ID NO: 2505922 - RNA, 19 nt, Artificial Sequence
  Description of Artificial Sequence: Synthetic oligonucleotide
  Sense strand starting at position 2626 of SEQ ID NO: 1888034
gcgucagugguucacaaag

SEQ ID NO: 2505923 - RNA, 19 nt, Artificial Sequence
  Description of Artificial Sequence: Synthetic oligonucleotide
  Antisense strand to SEQ ID NO: 2505922
cuuugugaaccacugacgc

SEQ ID NO: 2505924 - RNA, 19 nt, Artificial Sequence
  Description of Artificial Sequence: Synthetic oligonucleotide
  Sense strand starting at position 3129 of SEQ ID NO: 1888034
caaguaauguaucugguac

SEQ ID NO: 2505925 - RNA, 19 nt, Artificial Sequence
  Description of Artificial Sequence: Synthetic oligonucleotide
  Antisense strand to SEQ ID NO: 2505924
guaccagauacauuacuug

SEQ ID NO: 2505926 - RNA, 19 nt, Artificial Sequence
  Description of Artificial Sequence: Synthetic oligonucleotide
  Sense strand starting at position 3150 of SEQ ID NO: 1888034
gggugugucugacuccaga

SEQ ID NO: 2505927 - RNA, 19 nt, Artificial Sequence
  Description of Artificial Sequence: Synthetic oligonucleotide
  Antisense strand to SEQ ID NO: 2505926
ucuggagucagacacaccc

SEQ ID NO: 2505928 - RNA, 19 nt, Artificial Sequence
  Description of Artificial Sequence: Synthetic oligonucleotide
  Sense strand starting at position 3175 of SEQ ID NO: 1888034
gcucuuaaccguuaaacuu

SEQ ID NO: 2505929 - RNA, 19 nt, Artificial Sequence
  Description of Artificial Sequence: Synthetic oligonucleotide
  Antisense strand to SEQ ID NO: 2505928
aaguuuaacgguuaagagc

SEQ ID NO: 2505930 - RNA, 19 nt, Artificial Sequence
  Description of Artificial Sequence: Synthetic oligonucleotide
  Sense strand starting at position 3725 of SEQ ID NO: 1888034
aacauacugugaucacguu

SEQ ID NO: 2505931 - RNA, 19 nt, Artificial Sequence
  Description of Artificial Sequence: Synthetic oligonucleotide
  Antisense strand to SEQ ID NO: 2505930
aacgugaucacaguauguu

SEQ ID NO: 2505932 - RNA, 19 nt, Artificial Sequence
  Description of Artificial Sequence: Synthetic oligonucleotide
  Sense strand starting at position 3726 of SEQ ID NO: 1888034
acauacugugaucacguua

SEQ ID NO: 2505933 - RNA, 19 nt, Artificial Sequence
  Description of Artificial Sequence: Synthetic oligonucleotide
  Antisense strand to SEQ ID NO: 2505932
uaacgugaucacaguaugu

SEQ ID NO: 2505934 - RNA, 19 nt, Artificial Sequence
  Description of Artificial Sequence: Synthetic oligonucleotide
  Sense strand starting at position 3738 of SEQ ID NO: 1888034
cacguuacugucuggaacu

SEQ ID NO: 2505935 - RNA, 19 nt, Artificial Sequence
  Description of Artificial Sequence: Synthetic oligonucleotide
  Antisense strand to SEQ ID NO: 2505934
aguuccagacaguaacgug

SEQ ID NO: 2505936 - RNA, 19 nt, Artificial Sequence
  Description of Artificial Sequence: Synthetic oligonucleotide
  Sense strand starting at position 3975 of SEQ ID NO: 1888034
ucuguugcccgugcucaaa

SEQ ID NO: 2505937 - RNA, 19 nt, Artificial Sequence
  Description of Artificial Sequence: Synthetic oligonucleotide
  Antisense strand to SEQ ID NO: 2505936
uuugagcacgggcaacaga

SEQ ID NO: 2505938 - RNA, 19 nt, Artificial Sequence
  Description of Artificial Sequence: Synthetic oligonucleotide
  Sense strand starting at position 178 of SEQ ID NO: 1888035
gugcuuagccuccagauag

SEQ ID NO: 2505939 - RNA, 19 nt, Artificial Sequence
  Description of Artificial Sequence: Synthetic oligonucleotide
  Antisense strand to SEQ ID NO: 2505938
cuaucuggaggcuaagcac

SEQ ID NO: 2505940 - RNA, 19 nt, Artificial Sequence
  Description of Artificial Sequence: Synthetic oligonucleotide
  Sense strand starting at position 225 of SEQ ID NO: 1888035
cugugauccagagguccca

SEQ ID NO: 2505941 - RNA, 19 nt, Artificial Sequence
  Description of Artificial Sequence: Synthetic oligonucleotide
  Antisense strand to SEQ ID NO: 2505940
ugggaccucuggaucacag

SEQ ID NO: 2505942 - RNA, 19 nt, Artificial Sequence
  Description of Artificial Sequence: Synthetic oligonucleotide
  Sense strand starting at position 301 of SEQ ID NO: 1888035
aggauuaucucccagggac

SEQ ID NO: 2505943 - RNA, 19 nt, Artificial Sequence
  Description of Artificial Sequence: Synthetic oligonucleotide
  Antisense strand to SEQ ID NO: 2505942
gucccugggagauaauccu

SEQ ID NO: 2505944 - RNA, 19 nt, Artificial Sequence
  Description of Artificial Sequence: Synthetic oligonucleotide
  Sense strand starting at position 331 of SEQ ID NO: 1888035
cucguagcucaggauggau

SEQ ID NO: 2505945 - RNA, 19 nt, Artificial Sequence
  Description of Artificial Sequence: Synthetic oligonucleotide
  Antisense strand to SEQ ID NO: 2505944
auccauccugagcuacgag

SEQ ID NO: 2505946 - RNA, 19 nt, Artificial Sequence
  Description of Artificial Sequence: Synthetic oligonucleotide
  Sense strand starting at position 718 of SEQ ID NO: 1888035
gggaaauguaaucggacau

SEQ ID NO: 2505947 - RNA, 19 nt, Artificial Sequence
  Description of Artificial Sequence: Synthetic oligonucleotide
  Antisense strand to SEQ ID NO: 2505946
auguccgauuacauuuccc

SEQ ID NO: 2505948 - RNA, 19 nt, Artificial Sequence
  Description of Artificial Sequence: Synthetic oligonucleotide
  Sense strand starting at position 719 of SEQ ID NO: 1888035
ggaaauguaaucggacauc

SEQ ID NO: 2505949 - RNA, 19 nt, Artificial Sequence
  Description of Artificial Sequence: Synthetic oligonucleotide
  Antisense strand to SEQ ID NO: 2505948
gauguccgauuacauuucc

SEQ ID NO: 2505950 - RNA, 19 nt, Artificial Sequence
  Description of Artificial Sequence: Synthetic oligonucleotide
  Sense strand starting at position 775 of SEQ ID NO: 1888035
cucugucccucggagauaa

SEQ ID NO: 2505951 - RNA, 19 nt, Artificial Sequence
  Description of Artificial Sequence: Synthetic oligonucleotide
  Antisense strand to SEQ ID NO: 2505950
uuaucuccgagggacagag

SEQ ID NO: 2505952 - RNA, 19 nt, Artificial Sequence
  Description of Artificial Sequence: Synthetic oligonucleotide
  Sense strand starting at position 787 of SEQ ID NO: 1888035
gagauaauccugugcacuc

SEQ ID NO: 2505953 - RNA, 19 nt, Artificial Sequence
  Description of Artificial Sequence: Synthetic oligonucleotide
  Antisense strand to SEQ ID NO: 2505952
gagugcacaggauuaucuc

SEQ ID NO: 2505954 - RNA, 19 nt, Artificial Sequence
  Description of Artificial Sequence: Synthetic oligonucleotide
  Sense strand starting at position 904 of SEQ ID NO: 1888035
agagaugcuacugguccaa

SEQ ID NO: 2505955 - RNA, 19 nt, Artificial Sequence
  Description of Artificial Sequence: Synthetic oligonucleotide
  Antisense strand to SEQ ID NO: 2505954
uuggaccaguagcaucucu

SEQ ID NO: 2505956 - RNA, 19 nt, Artificial Sequence
  Description of Artificial Sequence: Synthetic oligonucleotide
  Sense strand starting at position 1020 of SEQ ID NO: 1888035
ggacaaucgcuucgcggaa

SEQ ID NO: 2505957 - RNA, 19 nt, Artificial Sequence
  Description of Artificial Sequence: Synthetic oligonucleotide
  Antisense strand to SEQ ID NO: 2505956
uuccgcgaagcgauugucc

SEQ ID NO: 2505958 - RNA, 19 nt, Artificial Sequence
  Description of Artificial Sequence: Synthetic oligonucleotide
  Sense strand starting at position 1021 of SEQ ID NO: 1888035
gacaaucgcuucgcggaaa

SEQ ID NO: 2505959 - RNA, 19 nt, Artificial Sequence
  Description of Artificial Sequence: Synthetic oligonucleotide
  Antisense strand to SEQ ID NO: 2505958
uuuccgcgaagcgauuguc

SEQ ID NO: 2505960 - RNA, 19 nt, Artificial Sequence
  Description of Artificial Sequence: Synthetic oligonucleotide
  Sense strand starting at position 1412 of SEQ ID NO: 1888035
cccauugguugaucuggga

SEQ ID NO: 2505961 - RNA, 19 nt, Artificial Sequence
  Description of Artificial Sequence: Synthetic oligonucleotide
  Antisense strand to SEQ ID NO: 2505960
ucccagaucaaccaauggg

SEQ ID NO: 2505962 - RNA, 19 nt, Artificial Sequence
  Description of Artificial Sequence: Synthetic oligonucleotide
  Sense strand starting at position 1554 of SEQ ID NO: 1888035
cgagcucucgcgaggaaga

SEQ ID NO: 2505963 - RNA, 19 nt, Artificial Sequence
  Description of Artificial Sequence: Synthetic oligonucleotide
  Antisense strand to SEQ ID NO: 2505962
ucuuccucgcgagagcucg

SEQ ID NO: 2505964 - RNA, 19 nt, Artificial Sequence
  Description of Artificial Sequence: Synthetic oligonucleotide
  Sense strand starting at position 1984 of SEQ ID NO: 1888035
ggagaagcaucagaacaaa

SEQ ID NO: 2505965 - RNA, 19 nt, Artificial Sequence
  Description of Artificial Sequence: Synthetic oligonucleotide
  Antisense strand to SEQ ID NO: 2505964
uuuguucugaugcuucucc

SEQ ID NO: 2505966 - RNA, 19 nt, Artificial Sequence
  Description of Artificial Sequence: Synthetic oligonucleotide
  Sense strand starting at position 2098 of SEQ ID NO: 1888035
gcgagaugcgccucgcuca

SEQ ID NO: 2505967 - RNA, 19 nt, Artificial Sequence
  Description of Artificial Sequence: Synthetic oligonucleotide
  Antisense strand to SEQ ID NO: 2505966
ugagcgaggcgcaucucgc

SEQ ID NO: 2505968 - RNA, 19 nt, Artificial Sequence
  Description of Artificial Sequence: Synthetic oligonucleotide
  Sense strand starting at position 2411 of SEQ ID NO: 1888035
ccauaaccugucugcugau

SEQ ID NO: 2505969 - RNA, 19 nt, Artificial Sequence
  Description of Artificial Sequence: Synthetic oligonucleotide
  Antisense strand to SEQ ID NO: 2505968
aucagcagacagguuaugg

SEQ ID NO: 2505970 - RNA, 19 nt, Artificial Sequence
  Description of Artificial Sequence: Synthetic oligonucleotide
  Sense strand starting at position 2438 of SEQ ID NO: 1888035
ugcacacuguuggcaaauu

SEQ ID NO: 2505971 - RNA, 19 nt, Artificial Sequence
  Description of Artificial Sequence: Synthetic oligonucleotide
  Antisense strand to SEQ ID NO: 2505970
aauuugccaacagugugca

SEQ ID NO: 2505972 - RNA, 19 nt, Artificial Sequence
  Description of Artificial Sequence: Synthetic oligonucleotide
  Sense strand starting at position 2546 of SEQ ID NO: 1888035
agcacuuugggugacucau

SEQ ID NO: 2505973 - RNA, 19 nt, Artificial Sequence
  Description of Artificial Sequence: Synthetic oligonucleotide
  Antisense strand to SEQ ID NO: 2505972
augagucacccaaagugcu

SEQ ID NO: 2505974 - RNA, 19 nt, Artificial Sequence
  Description of Artificial Sequence: Synthetic oligonucleotide
  Sense strand starting at position 2566 of SEQ ID NO: 1888035
ugcccucgcguuugagaga

SEQ ID NO: 2505975 - RNA, 19 nt, Artificial Sequence
  Description of Artificial Sequence: Synthetic oligonucleotide
  Antisense strand to SEQ ID NO: 2505974
ucucucaaacgcgagggca

SEQ ID NO: 2505976 - RNA, 19 nt, Artificial Sequence
  Description of Artificial Sequence: Synthetic oligonucleotide
  Sense strand starting at position 2667 of SEQ ID NO: 1888035
uuuagaccuugucuugaaa

SEQ ID NO: 2505977 - RNA, 19 nt, Artificial Sequence
  Description of Artificial Sequence: Synthetic oligonucleotide
  Antisense strand to SEQ ID NO: 2505976
uuucaagacaaggucuaaa

SEQ ID NO: 2505978 - RNA, 19 nt, Artificial Sequence
  Description of Artificial Sequence: Synthetic oligonucleotide
  Sense strand starting at position 2670 of SEQ ID NO: 1888035
agaccuugucuugaaaguc

SEQ ID NO: 2505979 - RNA, 19 nt, Artificial Sequence
  Description of Artificial Sequence: Synthetic oligonucleotide
  Antisense strand to SEQ ID NO: 2505978
gacuuucaagacaaggucu

SEQ ID NO: 2505980 - RNA, 19 nt, Artificial Sequence
  Description of Artificial Sequence: Synthetic oligonucleotide
  Sense strand starting at position 2803 of SEQ ID NO: 1888035
ucaggaaucugguuucgug

SEQ ID NO: 2505981 - RNA, 19 nt, Artificial Sequence
  Description of Artificial Sequence: Synthetic oligonucleotide
  Antisense strand to SEQ ID NO: 2505980
cacgaaaccagauuccuga

SEQ ID NO: 2505982 - RNA, 19 nt, Artificial Sequence
  Description of Artificial Sequence: Synthetic oligonucleotide
  Sense strand starting at position 2825 of SEQ ID NO: 1888035
uuugaaauaucagaagauc

SEQ ID NO: 2505983 - RNA, 19 nt, Artificial Sequence
  Description of Artificial Sequence: Synthetic oligonucleotide
  Antisense strand to SEQ ID NO: 2505982
gaucuucugauauuucaaa

SEQ ID NO: 2505984 - RNA, 19 nt, Artificial Sequence
  Description of Artificial Sequence: Synthetic oligonucleotide
  Sense strand starting at position 2924 of SEQ ID NO: 1888035
ccuguuucucacgguuagu

SEQ ID NO: 2505985 - RNA, 19 nt, Artificial Sequence
  Description of Artificial Sequence: Synthetic oligonucleotide
  Antisense strand to SEQ ID NO: 2505984
acuaaccgugagaaacagg

SEQ ID NO: 2505986 - RNA, 19 nt, Artificial Sequence
  Description of Artificial Sequence: Synthetic oligonucleotide
  Sense strand starting at position 2956 of SEQ ID NO: 1888035
ugugcagacauuugugauc

SEQ ID NO: 2505987 - RNA, 19 nt, Artificial Sequence
  Description of Artificial Sequence: Synthetic oligonucleotide
  Antisense strand to SEQ ID NO: 2505986
gaucacaaaugucugcaca

SEQ ID NO: 2505988 - RNA, 19 nt, Artificial Sequence
  Description of Artificial Sequence: Synthetic oligonucleotide
  Sense strand starting at position 3527 of SEQ ID NO: 1888035
uacugaauguaucugauga

SEQ ID NO: 2505989 - RNA, 19 nt, Artificial Sequence
  Description of Artificial Sequence: Synthetic oligonucleotide
  Antisense strand to SEQ ID NO: 2505988
ucaucagauacauucagua

SEQ ID NO: 2505990 - RNA, 19 nt, Artificial Sequence
  Description of Artificial Sequence: Synthetic oligonucleotide
  Sense strand starting at position 3529 of SEQ ID NO: 1888035
cugaauguaucugaugagu

SEQ ID NO: 2505991 - RNA, 19 nt, Artificial Sequence
  Description of Artificial Sequence: Synthetic oligonucleotide
  Antisense strand to SEQ ID NO: 2505990
acucaucagauacauucag

SEQ ID NO: 2505992 - RNA, 19 nt, Artificial Sequence
  Description of Artificial Sequence: Synthetic oligonucleotide
  Sense strand starting at position 3531 of SEQ ID NO: 1888035
gaauguaucugaugaguaa

SEQ ID NO: 2505993 - RNA, 19 nt, Artificial Sequence
  Description of Artificial Sequence: Synthetic oligonucleotide
  Antisense strand to SEQ ID NO: 2505992
uuacucaucagauacauuc

SEQ ID NO: 2505994 - RNA, 19 nt, Artificial Sequence
  Description of Artificial Sequence: Synthetic oligonucleotide
  Sense strand starting at position 3534 of SEQ ID NO: 1888035
uguaucugaugaguaaguu

SEQ ID NO: 2505995 - RNA, 19 nt, Artificial Sequence
  Description of Artificial Sequence: Synthetic oligonucleotide
  Antisense strand to SEQ ID NO: 2505994
aacuuacucaucagauaca

SEQ ID NO: 2505996 - RNA, 19 nt, Artificial Sequence
  Description of Artificial Sequence: Synthetic oligonucleotide
  Sense strand starting at position 3535 of SEQ ID NO: 1888035
guaucugaugaguaaguua

SEQ ID NO: 2505997 - RNA, 19 nt, Artificial Sequence
  Description of Artificial Sequence: Synthetic oligonucleotide
  Antisense strand to SEQ ID NO: 2505996
uaacuuacucaucagauac

SEQ ID NO: 2505998 - RNA, 19 nt, Artificial Sequence
  Description of Artificial Sequence: Synthetic oligonucleotide
  Sense strand starting at position 3540 of SEQ ID NO: 1888035
ugaugaguaaguuauugug

SEQ ID NO: 2505999 - RNA, 19 nt, Artificial Sequence
  Description of Artificial Sequence: Synthetic oligonucleotide
  Antisense strand to SEQ ID NO: 2505998
cacaauaacuuacucauca

SEQ ID NO: 2506000 - RNA, 19 nt, Artificial Sequence
  Description of Artificial Sequence: Synthetic oligonucleotide
  Sense strand starting at position 3627 of SEQ ID NO: 1888035
gucuccuguccuugccaaa

SEQ ID NO: 2506001 - RNA, 19 nt, Artificial Sequence
  Description of Artificial Sequence: Synthetic oligonucleotide
  Antisense strand to SEQ ID NO: 2506000
uuuggcaaggacaggagac

SEQ ID NO: 2506002 - RNA, 19 nt, Artificial Sequence
  Description of Artificial Sequence: Synthetic oligonucleotide
  Sense strand starting at position 3725 of SEQ ID NO: 1888035
acuacaugcucucagggaa

SEQ ID NO: 2506003 - RNA, 19 nt, Artificial Sequence
  Description of Artificial Sequence: Synthetic oligonucleotide
  Antisense strand to SEQ ID NO: 2506002
uucccugagagcauguagu

SEQ ID NO: 2506004 - RNA, 19 nt, Artificial Sequence
  Description of Artificial Sequence: Synthetic oligonucleotide
  Sense strand starting at position 3744 of SEQ ID NO: 1888035
ggccaaagaugguucugga

SEQ ID NO: 2506005 - RNA, 19 nt, Artificial Sequence
  Description of Artificial Sequence: Synthetic oligonucleotide
  Antisense strand to SEQ ID NO: 2506004
uccagaaccaucuuuggcc

SEQ ID NO: 2506006 - RNA, 19 nt, Artificial Sequence
  Description of Artificial Sequence: Synthetic oligonucleotide
  Sense strand starting at position 3747 of SEQ ID NO: 1888035
caaagaugguucuggaaag

SEQ ID NO: 2506007 - RNA, 19 nt, Artificial Sequence
  Description of Artificial Sequence: Synthetic oligonucleotide
  Antisense strand to SEQ ID NO: 2506006
cuuuccagaaccaucuuug

SEQ ID NO: 2506008 - RNA, 19 nt, Artificial Sequence
  Description of Artificial Sequence: Synthetic oligonucleotide
  Sense strand starting at position 3838 of SEQ ID NO: 1888035
gcccaaugugucuguguua

SEQ ID NO: 2506009 - RNA, 19 nt, Artificial Sequence
  Description of Artificial Sequence: Synthetic oligonucleotide
  Antisense strand to SEQ ID NO: 2506008
uaacacagacacauugggc

SEQ ID NO: 2506010 - RNA, 19 nt, Artificial Sequence
  Description of Artificial Sequence: Synthetic oligonucleotide
  Sense strand starting at position 3841 of SEQ ID NO: 1888035
caaugugucuguguuacca

SEQ ID NO: 2506011 - RNA, 19 nt, Artificial Sequence
  Description of Artificial Sequence: Synthetic oligonucleotide
  Antisense strand to SEQ ID NO: 2506010
ugguaacacagacacauug

SEQ ID NO: 2506012 - RNA, 19 nt, Artificial Sequence
  Description of Artificial Sequence: Synthetic oligonucleotide
  Sense strand starting at position 3850 of SEQ ID NO: 1888035
uguguuaccacacgaguag

SEQ ID NO: 2506013 - RNA, 19 nt, Artificial Sequence
  Description of Artificial Sequence: Synthetic oligonucleotide
  Antisense strand to SEQ ID NO: 2506012
cuacucgugugguaacaca

SEQ ID NO: 2506014 - RNA, 19 nt, Artificial Sequence
  Description of Artificial Sequence: Synthetic oligonucleotide
  Sense strand starting at position 3851 of SEQ ID NO: 1888035
guguuaccacacgaguagu

SEQ ID NO: 2506015 - RNA, 19 nt, Artificial Sequence
  Description of Artificial Sequence: Synthetic oligonucleotide
  Antisense strand to SEQ ID NO: 2506014
acuacucgugugguaacac

SEQ ID NO: 2506016 - RNA, 19 nt, Artificial Sequence
  Description of Artificial Sequence: Synthetic oligonucleotide
  Sense strand starting at position 3911 of SEQ ID NO: 1888035
gauagauggcucugcaagg

SEQ ID NO: 2506017 - RNA, 19 nt, Artificial Sequence
  Description of Artificial Sequence: Synthetic oligonucleotide
  Antisense strand to SEQ ID NO: 2506016
ccuugcagagccaucuauc

SEQ ID NO: 2506018 - RNA, 19 nt, Artificial Sequence
  Description of Artificial Sequence: Synthetic oligonucleotide
  Sense strand starting at position 37 of SEQ ID NO: 1888036
ccauuauauuagguuggua

SEQ ID NO: 2506019 - RNA, 19 nt, Artificial Sequence
  Description of Artificial Sequence: Synthetic oligonucleotide
  Antisense strand to SEQ ID NO: 2506018
uaccaaccuaauauaaugg

SEQ ID NO: 2506020 - RNA, 19 nt, Artificial Sequence
  Description of Artificial Sequence: Synthetic oligonucleotide
  Sense strand starting at position 39 of SEQ ID NO: 1888036
auuauauuagguugguaca

SEQ ID NO: 2506021 - RNA, 19 nt, Artificial Sequence
  Description of Artificial Sequence: Synthetic oligonucleotide
  Antisense strand to SEQ ID NO: 2506020
uguaccaaccuaauauaau

SEQ ID NO: 2506022 - RNA, 19 nt, Artificial Sequence
  Description of Artificial Sequence: Synthetic oligonucleotide
  Sense strand starting at position 90 of SEQ ID NO: 1888036
ugcuguuugauaugggaau

SEQ ID NO: 2506023 - RNA, 19 nt, Artificial Sequence
  Description of Artificial Sequence: Synthetic oligonucleotide
  Antisense strand to SEQ ID NO: 2506022
auucccauaucaaacagca

SEQ ID NO: 2506024 - RNA, 19 nt, Artificial Sequence
  Description of Artificial Sequence: Synthetic oligonucleotide
  Sense strand starting at position 92 of SEQ ID NO: 1888036
cuguuugauaugggaauac

SEQ ID NO: 2506025 - RNA, 19 nt, Artificial Sequence
  Description of Artificial Sequence: Synthetic oligonucleotide
  Antisense strand to SEQ ID NO: 2506024
guauucccauaucaaacag

SEQ ID NO: 2506026 - RNA, 19 nt, Artificial Sequence
  Description of Artificial Sequence: Synthetic oligonucleotide
  Sense strand starting at position 221 of SEQ ID NO: 1888036
uggaaauuauguuuaagac

SEQ ID NO: 2506027 - RNA, 19 nt, Artificial Sequence
  Description of Artificial Sequence: Synthetic oligonucleotide
  Antisense strand to SEQ ID NO: 2506026
gucuuaaacauaauuucca

SEQ ID NO: 2506028 - RNA, 19 nt, Artificial Sequence
  Description of Artificial Sequence: Synthetic oligonucleotide
  Sense strand starting at position 508 of SEQ ID NO: 1888036
ucacccauuccguggucau

SEQ ID NO: 2506029 - RNA, 19 nt, Artificial Sequence
  Description of Artificial Sequence: Synthetic oligonucleotide
  Antisense strand to SEQ ID NO: 2506028
augaccacggaauggguga

SEQ ID NO: 2506030 - RNA, 19 nt, Artificial Sequence
  Description of Artificial Sequence: Synthetic oligonucleotide
  Sense strand starting at position 509 of SEQ ID NO: 1888036
cacccauuccguggucauu

SEQ ID NO: 2506031 - RNA, 19 nt, Artificial Sequence
  Description of Artificial Sequence: Synthetic oligonucleotide
  Antisense strand to SEQ ID NO: 2506030
aaugaccacggaaugggug

SEQ ID NO: 2506032 - RNA, 19 nt, Artificial Sequence
  Description of Artificial Sequence: Synthetic oligonucleotide
  Sense strand starting at position 519 of SEQ ID NO: 1888036
guggucauucggcauuuga

SEQ ID NO: 2506033 - RNA, 19 nt, Artificial Sequence
  Description of Artificial Sequence: Synthetic oligonucleotide
  Antisense strand to SEQ ID NO: 2506032
ucaaaugccgaaugaccac

SEQ ID NO: 2506034 - RNA, 19 nt, Artificial Sequence
  Description of Artificial Sequence: Synthetic oligonucleotide
  Sense strand starting at position 622 of SEQ ID NO: 1888036
agugucaucuucucucacu

SEQ ID NO: 2506035 - RNA, 19 nt, Artificial Sequence
  Description of Artificial Sequence: Synthetic oligonucleotide
  Antisense strand to SEQ ID NO: 2506034
agugagagaagaugacacu

SEQ ID NO: 2506036 - RNA, 19 nt, Artificial Sequence
  Description of Artificial Sequence: Synthetic oligonucleotide
  Sense strand starting at position 975 of SEQ ID NO: 1888036
gccauuucuuaguaggaau

SEQ ID NO: 2506037 - RNA, 19 nt, Artificial Sequence
  Description of Artificial Sequence: Synthetic oligonucleotide
  Antisense strand to SEQ ID NO: 2506036
auuccuacuaagaaauggc

SEQ ID NO: 2506038 - RNA, 19 nt, Artificial Sequence
  Description of Artificial Sequence: Synthetic oligonucleotide
  Sense strand starting at position 978 of SEQ ID NO: 1888036
auuucuuaguaggaauugu

SEQ ID NO: 2506039 - RNA, 19 nt, Artificial Sequence
  Description of Artificial Sequence: Synthetic oligonucleotide
  Antisense strand to SEQ ID NO: 2506038
acaauuccuacuaagaaau

SEQ ID NO: 2506040 - RNA, 19 nt, Artificial Sequence
  Description of Artificial Sequence: Synthetic oligonucleotide
  Sense strand starting at position 989 of SEQ ID NO: 1888036
ggaauuguaacaugugaug

SEQ ID NO: 2506041 - RNA, 19 nt, Artificial Sequence
  Description of Artificial Sequence: Synthetic oligonucleotide
  Antisense strand to SEQ ID NO: 2506040
caucacauguuacaauucc

SEQ ID NO: 2506042 - RNA, 19 nt, Artificial Sequence
  Description of Artificial Sequence: Synthetic oligonucleotide
  Sense strand starting at position 1042 of SEQ ID NO: 1888036
agcucagugguuggaucua

SEQ ID NO: 2506043 - RNA, 19 nt, Artificial Sequence
  Description of Artificial Sequence: Synthetic oligonucleotide
  Antisense strand to SEQ ID NO: 2506042
uagauccaaccacugagcu

SEQ ID NO: 2506044 - RNA, 19 nt, Artificial Sequence
  Description of Artificial Sequence: Synthetic oligonucleotide
  Sense strand starting at position 1188 of SEQ ID NO: 1888036
agaaguuaugcucagcaaa

SEQ ID NO: 2506045 - RNA, 19 nt, Artificial Sequence
  Description of Artificial Sequence: Synthetic oligonucleotide
  Antisense strand to SEQ ID NO: 2506044
uuugcugagcauaacuucu

SEQ ID NO: 2506046 - RNA, 19 nt, Artificial Sequence
  Description of Artificial Sequence: Synthetic oligonucleotide
  Sense strand starting at position 1191 of SEQ ID NO: 1888036
aguuaugcucagcaaauua

SEQ ID NO: 2506047 - RNA, 19 nt, Artificial Sequence
  Description of Artificial Sequence: Synthetic oligonucleotide
  Antisense strand to SEQ ID NO: 2506046
uaauuugcugagcauaacu

SEQ ID NO: 2506048 - RNA, 19 nt, Artificial Sequence
  Description of Artificial Sequence: Synthetic oligonucleotide
  Sense strand starting at position 1518 of SEQ ID NO: 1888036
cguauuuaucauuggcaaa

SEQ ID NO: 2506049 - RNA, 19 nt, Artificial Sequence
  Description of Artificial Sequence: Synthetic oligonucleotide
  Antisense strand to SEQ ID NO: 2506048
uuugccaaugauaaauacg

SEQ ID NO: 2506050 - RNA, 19 nt, Artificial Sequence
  Description of Artificial Sequence: Synthetic oligonucleotide
  Sense strand starting at position 1581 of SEQ ID NO: 1888036
guuugagucugguuauagu

SEQ ID NO: 2506051 - RNA, 19 nt, Artificial Sequence
  Description of Artificial Sequence: Synthetic oligonucleotide
  Antisense strand to SEQ ID NO: 2506050
acuauaaccagacucaaac

SEQ ID NO: 2506052 - RNA, 19 nt, Artificial Sequence
  Description of Artificial Sequence: Synthetic oligonucleotide
  Sense strand starting at position 1664 of SEQ ID NO: 1888036
gucaacuauugucuccuua

SEQ ID NO: 2506053 - RNA, 19 nt, Artificial Sequence
  Description of Artificial Sequence: Synthetic oligonucleotide
  Antisense strand to SEQ ID NO: 2506052
uaaggagacaauaguugac

SEQ ID NO: 2506054 - RNA, 19 nt, Artificial Sequence
  Description of Artificial Sequence: Synthetic oligonucleotide
  Sense strand starting at position 1744 of SEQ ID NO: 1888036
uaagcucuuguuuggauga

SEQ ID NO: 2506055 - RNA, 19 nt, Artificial Sequence
  Description of Artificial Sequence: Synthetic oligonucleotide
  Antisense strand to SEQ ID NO: 2506054
ucauccaaacaagagcuua

SEQ ID NO: 2506056 - RNA, 19 nt, Artificial Sequence
  Description of Artificial Sequence: Synthetic oligonucleotide
  Sense strand starting at position 1755 of SEQ ID NO: 1888036
uuggaugauuuacaauuga

SEQ ID NO: 2506057 - RNA, 19 nt, Artificial Sequence
  Description of Artificial Sequence: Synthetic oligonucleotide
  Antisense strand to SEQ ID NO: 2506056
ucaauuguaaaucauccaa

SEQ ID NO: 2506058 - RNA, 19 nt, Artificial Sequence
  Description of Artificial Sequence: Synthetic oligonucleotide
  Sense strand starting at position 2289 of SEQ ID NO: 1888036
agcucuuaagaguagauau

SEQ ID NO: 2506059 - RNA, 19 nt, Artificial Sequence
  Description of Artificial Sequence: Synthetic oligonucleotide
  Antisense strand to SEQ ID NO: 2506058
auaucuacucuuaagagcu

SEQ ID NO: 2506060 - RNA, 19 nt, Artificial Sequence
  Description of Artificial Sequence: Synthetic oligonucleotide
  Sense strand starting at position 2291 of SEQ ID NO: 1888036
cucuuaagaguagauaugu

SEQ ID NO: 2506061 - RNA, 19 nt, Artificial Sequence
  Description of Artificial Sequence: Synthetic oligonucleotide
  Antisense strand to SEQ ID NO: 2506060
acauaucuacucuuaagag

SEQ ID NO: 2506062 - RNA, 19 nt, Artificial Sequence
  Description of Artificial Sequence: Synthetic oligonucleotide
  Sense strand starting at position 2296 of SEQ ID NO: 1888036
aagaguagauauguuguau

SEQ ID NO: 2506063 - RNA, 19 nt, Artificial Sequence
  Description of Artificial Sequence: Synthetic oligonucleotide
  Antisense strand to SEQ ID NO: 2506062
auacaacauaucuacucuu

SEQ ID NO: 2506064 - RNA, 19 nt, Artificial Sequence
  Description of Artificial Sequence: Synthetic oligonucleotide
  Sense strand starting at position 2310 of SEQ ID NO: 1888036
uguauuacuuccuuuagca

SEQ ID NO: 2506065 - RNA, 19 nt, Artificial Sequence
  Description of Artificial Sequence: Synthetic oligonucleotide
  Antisense strand to SEQ ID NO: 2506064
ugcuaaaggaaguaauaca

SEQ ID NO: 2506066 - RNA, 19 nt, Artificial Sequence
  Description of Artificial Sequence: Synthetic oligonucleotide
  Sense strand starting at position 2755 of SEQ ID NO: 1888036
acauuauaaguguacguau

SEQ ID NO: 2506067 - RNA, 19 nt, Artificial Sequence
  Description of Artificial Sequence: Synthetic oligonucleotide
  Antisense strand to SEQ ID NO: 2506066
auacguacacuuauaaugu

SEQ ID NO: 2506068 - RNA, 19 nt, Artificial Sequence
  Description of Artificial Sequence: Synthetic oligonucleotide
  Sense strand starting at position 2766 of SEQ ID NO: 1888036
guacguauuauguauacau

SEQ ID NO: 2506069 - RNA, 19 nt, Artificial Sequence
  Description of Artificial Sequence: Synthetic oligonucleotide
  Antisense strand to SEQ ID NO: 2506068
auguauacauaauacguac

SEQ ID NO: 2506070 - RNA, 19 nt, Artificial Sequence
  Description of Artificial Sequence: Synthetic oligonucleotide
  Sense strand starting at position 2864 of SEQ ID NO: 1888036
ugccuugacuucuuagcau

SEQ ID NO: 2506071 - RNA, 19 nt, Artificial Sequence
  Description of Artificial Sequence: Synthetic oligonucleotide
  Antisense strand to SEQ ID NO: 2506070
augcuaagaagucaaggca

SEQ ID NO: 2506072 - RNA, 19 nt, Artificial Sequence
  Description of Artificial Sequence: Synthetic oligonucleotide
  Sense strand starting at position 2875 of SEQ ID NO: 1888036
cuuagcaugugucuuuaau

SEQ ID NO: 2506073 - RNA, 19 nt, Artificial Sequence
  Description of Artificial Sequence: Synthetic oligonucleotide
  Antisense strand to SEQ ID NO: 2506072
auuaaagacacaugcuaag

SEQ ID NO: 2506074 - RNA, 19 nt, Artificial Sequence
  Description of Artificial Sequence: Synthetic oligonucleotide
  Sense strand starting at position 2953 of SEQ ID NO: 1888036
uuaacaaugugggcucaaa

SEQ ID NO: 2506075 - RNA, 19 nt, Artificial Sequence
  Description of Artificial Sequence: Synthetic oligonucleotide
  Antisense strand to SEQ ID NO: 2506074
uuugagcccacauuguuaa

SEQ ID NO: 2506076 - RNA, 19 nt, Artificial Sequence
  Description of Artificial Sequence: Synthetic oligonucleotide
  Sense strand starting at position 3147 of SEQ ID NO: 1888036
aucagauauugagaaacag

SEQ ID NO: 2506077 - RNA, 19 nt, Artificial Sequence
  Description of Artificial Sequence: Synthetic oligonucleotide
  Antisense strand to SEQ ID NO: 2506076
cuguuucucaauaucugau

SEQ ID NO: 2506078 - RNA, 19 nt, Artificial Sequence
  Description of Artificial Sequence: Synthetic oligonucleotide
  Sense strand starting at position 3179 of SEQ ID NO: 1888036
gagagacuauaucaguauu

SEQ ID NO: 2506079 - RNA, 19 nt, Artificial Sequence
  Description of Artificial Sequence: Synthetic oligonucleotide
  Antisense strand to SEQ ID NO: 2506078
aauacugauauagucucuc

SEQ ID NO: 2506080 - RNA, 19 nt, Artificial Sequence
  Description of Artificial Sequence: Synthetic oligonucleotide
  Sense strand starting at position 3276 of SEQ ID NO: 1888036
uacugugcagcuuaaagaa

SEQ ID NO: 2506081 - RNA, 19 nt, Artificial Sequence
  Description of Artificial Sequence: Synthetic oligonucleotide
  Antisense strand to SEQ ID NO: 2506080
uucuuuaagcugcacagua

SEQ ID NO: 2506082 - RNA, 19 nt, Artificial Sequence
  Description of Artificial Sequence: Synthetic oligonucleotide
  Sense strand starting at position 3320 of SEQ ID NO: 1888036
ucauguuagggucaugcuu

SEQ ID NO: 2506083 - RNA, 19 nt, Artificial Sequence
  Description of Artificial Sequence: Synthetic oligonucleotide
  Antisense strand to SEQ ID NO: 2506082
aagcaugacccuaacauga

SEQ ID NO: 2506084 - RNA, 19 nt, Artificial Sequence
  Description of Artificial Sequence: Synthetic oligonucleotide
  Sense strand starting at position 3329 of SEQ ID NO: 1888036
ggucaugcuugggcaucaa

SEQ ID NO: 2506085 - RNA, 19 nt, Artificial Sequence
  Description of Artificial Sequence: Synthetic oligonucleotide
  Antisense strand to SEQ ID NO: 2506084
uugaugcccaagcaugacc

SEQ ID NO: 2506086 - RNA, 19 nt, Artificial Sequence
  Description of Artificial Sequence: Synthetic oligonucleotide
  Sense strand starting at position 3333 of SEQ ID NO: 1888036
augcuugggcaucaauuaa

SEQ ID NO: 2506087 - RNA, 19 nt, Artificial Sequence
  Description of Artificial Sequence: Synthetic oligonucleotide
  Antisense strand to SEQ ID NO: 2506086
uuaauugaugcccaagcau

SEQ ID NO: 2506088 - RNA, 19 nt, Artificial Sequence
  Description of Artificial Sequence: Synthetic oligonucleotide
  Sense strand starting at position 3393 of SEQ ID NO: 1888036
ucuuaaguccuuuggagaa

SEQ ID NO: 2506089 - RNA, 19 nt, Artificial Sequence
  Description of Artificial Sequence: Synthetic oligonucleotide
  Antisense strand to SEQ ID NO: 2506088
uucuccaaaggacuuaaga

SEQ ID NO: 2506090 - RNA, 19 nt, Artificial Sequence
  Description of Artificial Sequence: Synthetic oligonucleotide
  Sense strand starting at position 3554 of SEQ ID NO: 1888036
ucaggaauucuaugucaaa

SEQ ID NO: 2506091 - RNA, 19 nt, Artificial Sequence
  Description of Artificial Sequence: Synthetic oligonucleotide
  Antisense strand to SEQ ID NO: 2506090
uuugacauagaauuccuga

SEQ ID NO: 2506092 - RNA, 19 nt, Artificial Sequence
  Description of Artificial Sequence: Synthetic oligonucleotide
  Sense strand starting at position 3557 of SEQ ID NO: 1888036
ggaauucuaugucaaauag

SEQ ID NO: 2506093 - RNA, 19 nt, Artificial Sequence
  Description of Artificial Sequence: Synthetic oligonucleotide
  Antisense strand to SEQ ID NO: 2506092
cuauuugacauagaauucc

SEQ ID NO: 2506094 - RNA, 19 nt, Artificial Sequence
  Description of Artificial Sequence: Synthetic oligonucleotide
  Sense strand starting at position 3607 of SEQ ID NO: 1888036
aaguuuagagguuguccaa

SEQ ID NO: 2506095 - RNA, 19 nt, Artificial Sequence
  Description of Artificial Sequence: Synthetic oligonucleotide
  Antisense strand to SEQ ID NO: 2506094
uuggacaaccucuaaacuu

SEQ ID NO: 2506096 - RNA, 19 nt, Artificial Sequence
  Description of Artificial Sequence: Synthetic oligonucleotide
  Sense strand starting at position 3696 of SEQ ID NO: 1888036
gaguguaguggugcgugau

SEQ ID NO: 2506097 - RNA, 19 nt, Artificial Sequence
  Description of Artificial Sequence: Synthetic oligonucleotide
  Antisense strand to SEQ ID NO: 2506096
aucacgcaccacuacacuc

SEQ ID NO: 2506098 - RNA, 19 nt, Artificial Sequence
  Description of Artificial Sequence: Synthetic oligonucleotide
  Sense strand starting at position 52 of SEQ ID NO: 1888037
ucauuuguuucugcuugca

SEQ ID NO: 2506099 - RNA, 19 nt, Artificial Sequence
  Description of Artificial Sequence: Synthetic oligonucleotide
  Antisense strand to SEQ ID NO: 2506098
ugcaagcagaaacaaauga

SEQ ID NO: 2506100 - RNA, 19 nt, Artificial Sequence
  Description of Artificial Sequence: Synthetic oligonucleotide
  Sense strand starting at position 60 of SEQ ID NO: 1888037
uucugcuugcaugauauau

SEQ ID NO: 2506101 - RNA, 19 nt, Artificial Sequence
  Description of Artificial Sequence: Synthetic oligonucleotide
  Antisense strand to SEQ ID NO: 2506100
auauaucaugcaagcagaa

SEQ ID NO: 2506102 - RNA, 19 nt, Artificial Sequence
  Description of Artificial Sequence: Synthetic oligonucleotide
  Sense strand starting at position 64 of SEQ ID NO: 1888037
gcuugcaugauauauggca

SEQ ID NO: 2506103 - RNA, 19 nt, Artificial Sequence
  Description of Artificial Sequence: Synthetic oligonucleotide
  Antisense strand to SEQ ID NO: 2506102
ugccauauaucaugcaagc

SEQ ID NO: 2506104 - RNA, 19 nt, Artificial Sequence
  Description of Artificial Sequence: Synthetic oligonucleotide
  Sense strand starting at position 144 of SEQ ID NO: 1888037
cuggguaucucagcaaauu

SEQ ID NO: 2506105 - RNA, 19 nt, Artificial Sequence
  Description of Artificial Sequence: Synthetic oligonucleotide
  Antisense strand to SEQ ID NO: 2506104
aauuugcugagauacccag

SEQ ID NO: 2506106 - RNA, 19 nt, Artificial Sequence
  Description of Artificial Sequence: Synthetic oligonucleotide
  Sense strand starting at position 145 of SEQ ID NO: 1888037
uggguaucucagcaaauua

SEQ ID NO: 2506107 - RNA, 19 nt, Artificial Sequence
  Description of Artificial Sequence: Synthetic oligonucleotide
  Antisense strand to SEQ ID NO: 2506106
uaauuugcugagauaccca

SEQ ID NO: 2506108 - RNA, 19 nt, Artificial Sequence
  Description of Artificial Sequence: Synthetic oligonucleotide
  Sense strand starting at position 221 of SEQ ID NO: 1888037
ccaccagcucauugcaaga

SEQ ID NO: 2506109 - RNA, 19 nt, Artificial Sequence
  Description of Artificial Sequence: Synthetic oligonucleotide
  Antisense strand to SEQ ID NO: 2506108
ucuugcaaugagcuggugg

SEQ ID NO: 2506110 - RNA, 19 nt, Artificial Sequence
  Description of Artificial Sequence: Synthetic oligonucleotide
  Sense strand starting at position 238 of SEQ ID NO: 1888037
gacaccauccugugaacgu

SEQ ID NO: 2506111 - RNA, 19 nt, Artificial Sequence
  Description of Artificial Sequence: Synthetic oligonucleotide
  Antisense strand to SEQ ID NO: 2506110
acguucacaggaugguguc

SEQ ID NO: 2506112 - RNA, 19 nt, Artificial Sequence
  Description of Artificial Sequence: Synthetic oligonucleotide
  Sense strand starting at position 278 of SEQ ID NO: 1888037
auaggaaaguccuugauac

SEQ ID NO: 2506113 - RNA, 19 nt, Artificial Sequence
  Description of Artificial Sequence: Synthetic oligonucleotide
  Antisense strand to SEQ ID NO: 2506112
guaucaaggacuuuccuau

SEQ ID NO: 2506114 - RNA, 19 nt, Artificial Sequence
  Description of Artificial Sequence: Synthetic oligonucleotide
  Sense strand starting at position 279 of SEQ ID NO: 1888037
uaggaaaguccuugauacc

SEQ ID NO: 2506115 - RNA, 19 nt, Artificial Sequence
  Description of Artificial Sequence: Synthetic oligonucleotide
  Antisense strand to SEQ ID NO: 2506114
gguaucaaggacuuuccua

SEQ ID NO: 2506116 - RNA, 19 nt, Artificial Sequence
  Description of Artificial Sequence: Synthetic oligonucleotide
  Sense strand starting at position 437 of SEQ ID NO: 1888037
ucgggaaucaugcagaugu

SEQ ID NO: 2506117 - RNA, 19 nt, Artificial Sequence
  Description of Artificial Sequence: Synthetic oligonucleotide
  Antisense strand to SEQ ID NO: 2506116
acaucugcaugauucccga

SEQ ID NO: 2506118 - RNA, 19 nt, Artificial Sequence
  Description of Artificial Sequence: Synthetic oligonucleotide
  Sense strand starting at position 487 of SEQ ID NO: 1888037
cuaugagaccuuuggcaag

SEQ ID NO: 2506119 - RNA, 19 nt, Artificial Sequence
  Description of Artificial Sequence: Synthetic oligonucleotide
  Antisense strand to SEQ ID NO: 2506118
cuugccaaaggucucauag

SEQ ID NO: 2506120 - RNA, 19 nt, Artificial Sequence
  Description of Artificial Sequence: Synthetic oligonucleotide
  Sense strand starting at position 581 of SEQ ID NO: 1888037
ggcaguguuuggcucagag

SEQ ID NO: 2506121 - RNA, 19 nt, Artificial Sequence
  Description of Artificial Sequence: Synthetic oligonucleotide
  Antisense strand to SEQ ID NO: 2506120
cucugagccaaacacugcc

SEQ ID NO: 2506122 - RNA, 19 nt, Artificial Sequence
  Description of Artificial Sequence: Synthetic oligonucleotide
  Sense strand starting at position 618 of SEQ ID NO: 1888037
cucaauagauagcuucuga

SEQ ID NO: 2506123 - RNA, 19 nt, Artificial Sequence
  Description of Artificial Sequence: Synthetic oligonucleotide
  Antisense strand to SEQ ID NO: 2506122
ucagaagcuaucuauugag

SEQ ID NO: 2506124 - RNA, 19 nt, Artificial Sequence
  Description of Artificial Sequence: Synthetic oligonucleotide
  Sense strand starting at position 677 of SEQ ID NO: 1888037
gggaguuaugagggcaaac

SEQ ID NO: 2506125 - RNA, 19 nt, Artificial Sequence
  Description of Artificial Sequence: Synthetic oligonucleotide
  Antisense strand to SEQ ID NO: 2506124
guuugcccucauaacuccc

SEQ ID NO: 2506126 - RNA, 19 nt, Artificial Sequence
  Description of Artificial Sequence: Synthetic oligonucleotide
  Sense strand starting at position 701 of SEQ ID NO: 1888037
ucuugagaagccuggauca

SEQ ID NO: 2506127 - RNA, 19 nt, Artificial Sequence
  Description of Artificial Sequence: Synthetic oligonucleotide
  Antisense strand to SEQ ID NO: 2506126
ugauccaggcuucucaaga

SEQ ID NO: 2506128 - RNA, 19 nt, Artificial Sequence
  Description of Artificial Sequence: Synthetic oligonucleotide
  Sense strand starting at position 909 of SEQ ID NO: 1888037
ccuugauaccaugggucau

SEQ ID NO: 2506129 - RNA, 19 nt, Artificial Sequence
  Description of Artificial Sequence: Synthetic oligonucleotide
  Antisense strand to SEQ ID NO: 2506128
augacccaugguaucaagg

SEQ ID NO: 2506130 - RNA, 19 nt, Artificial Sequence
  Description of Artificial Sequence: Synthetic oligonucleotide
  Sense strand starting at position 1097 of SEQ ID NO: 1888037
gagauaugcuugguuggcu

SEQ ID NO: 2506131 - RNA, 19 nt, Artificial Sequence
  Description of Artificial Sequence: Synthetic oligonucleotide
  Antisense strand to SEQ ID NO: 2506130
agccaaccaagcauaucuc

SEQ ID NO: 2506132 - RNA, 19 nt, Artificial Sequence
  Description of Artificial Sequence: Synthetic oligonucleotide
  Sense strand starting at position 1122 of SEQ ID NO: 1888037
cccucuggugccuggagaa

SEQ ID NO: 2506133 - RNA, 19 nt, Artificial Sequence
  Description of Artificial Sequence: Synthetic oligonucleotide
  Antisense strand to SEQ ID NO: 2506132
uucuccaggcaccagaggg

SEQ ID NO: 2506134 - RNA, 19 nt, Artificial Sequence
  Description of Artificial Sequence: Synthetic oligonucleotide
  Sense strand starting at position 1188 of SEQ ID NO: 1888037
ccagaacucuggucuccua

SEQ ID NO: 2506135 - RNA, 19 nt, Artificial Sequence
  Description of Artificial Sequence: Synthetic oligonucleotide
  Antisense strand to SEQ ID NO: 2506134
uaggagaccagaguucugg

SEQ ID NO: 2506136 - RNA, 19 nt, Artificial Sequence
  Description of Artificial Sequence: Synthetic oligonucleotide
  Sense strand starting at position 1209 of SEQ ID NO: 1888037
ccuuuauugugucccauaa

SEQ ID NO: 2506137 - RNA, 19 nt, Artificial Sequence
  Description of Artificial Sequence: Synthetic oligonucleotide
  Antisense strand to SEQ ID NO: 2506136
uuaugggacacaauaaagg

SEQ ID NO: 2506138 - RNA, 19 nt, Artificial Sequence
  Description of Artificial Sequence: Synthetic oligonucleotide
  Sense strand starting at position 1294 of SEQ ID NO: 1888037
gauuccuccuagguuggaa

SEQ ID NO: 2506139 - RNA, 19 nt, Artificial Sequence
  Description of Artificial Sequence: Synthetic oligonucleotide
  Antisense strand to SEQ ID NO: 2506138
uuccaaccuaggaggaauc

SEQ ID NO: 2506140 - RNA, 19 nt, Artificial Sequence
  Description of Artificial Sequence: Synthetic oligonucleotide
  Sense strand starting at position 1332 of SEQ ID NO: 1888037
gguggaaggcgauguuaaa

SEQ ID NO: 2506141 - RNA, 19 nt, Artificial Sequence
  Description of Artificial Sequence: Synthetic oligonucleotide
  Antisense strand to SEQ ID NO: 2506140
uuuaacaucgccuuccacc

SEQ ID NO: 2506142 - RNA, 19 nt, Artificial Sequence
  Description of Artificial Sequence: Synthetic oligonucleotide
  Sense strand starting at position 1466 of SEQ ID NO: 1888037
gcuggcaucuguccacaau

SEQ ID NO: 2506143 - RNA, 19 nt, Artificial Sequence
  Description of Artificial Sequence: Synthetic oligonucleotide
  Antisense strand to SEQ ID NO: 2506142
auuguggacagaugccagc

SEQ ID NO: 2506144 - RNA, 19 nt, Artificial Sequence
  Description of Artificial Sequence: Synthetic oligonucleotide
  Sense strand starting at position 1467 of SEQ ID NO: 1888037
cuggcaucuguccacaaua

SEQ ID NO: 2506145 - RNA, 19 nt, Artificial Sequence
  Description of Artificial Sequence: Synthetic oligonucleotide
  Antisense strand to SEQ ID NO: 2506144
uauuguggacagaugccag

SEQ ID NO: 2506146 - RNA, 19 nt, Artificial Sequence
  Description of Artificial Sequence: Synthetic oligonucleotide
  Sense strand starting at position 1469 of SEQ ID NO: 1888037
ggcaucuguccacaauaag

SEQ ID NO: 2506147 - RNA, 19 nt, Artificial Sequence
  Description of Artificial Sequence: Synthetic oligonucleotide
  Antisense strand to SEQ ID NO: 2506146
cuuauuguggacagaugcc

SEQ ID NO: 2506148 - RNA, 19 nt, Artificial Sequence
  Description of Artificial Sequence: Synthetic oligonucleotide
  Sense strand starting at position 2161 of SEQ ID NO: 1888037
agagacagcucuucuucuu

SEQ ID NO: 2506149 - RNA, 19 nt, Artificial Sequence
  Description of Artificial Sequence: Synthetic oligonucleotide
  Antisense strand to SEQ ID NO: 2506148
aagaagaagagcugucucu

SEQ ID NO: 2506150 - RNA, 19 nt, Artificial Sequence
  Description of Artificial Sequence: Synthetic oligonucleotide
  Sense strand starting at position 2246 of SEQ ID NO: 1888037
gagagaucccaugggugcu

SEQ ID NO: 2506151 - RNA, 19 nt, Artificial Sequence
  Description of Artificial Sequence: Synthetic oligonucleotide
  Antisense strand to SEQ ID NO: 2506150
agcacccaugggaucucuc

SEQ ID NO: 2506152 - RNA, 19 nt, Artificial Sequence
  Description of Artificial Sequence: Synthetic oligonucleotide
  Sense strand starting at position 2441 of SEQ ID NO: 1888037
ggaagaguuucccaacuca

SEQ ID NO: 2506153 - RNA, 19 nt, Artificial Sequence
  Description of Artificial Sequence: Synthetic oligonucleotide
  Antisense strand to SEQ ID NO: 2506152
ugaguugggaaacucuucc

SEQ ID NO: 2506154 - RNA, 19 nt, Artificial Sequence
  Description of Artificial Sequence: Synthetic oligonucleotide
  Sense strand starting at position 2456 of SEQ ID NO: 1888037
cucagaauuucgcucucuu

SEQ ID NO: 2506155 - RNA, 19 nt, Artificial Sequence
  Description of Artificial Sequence: Synthetic oligonucleotide
  Antisense strand to SEQ ID NO: 2506154
aagagagcgaaauucugag

SEQ ID NO: 2506156 - RNA, 19 nt, Artificial Sequence
  Description of Artificial Sequence: Synthetic oligonucleotide
  Sense strand starting at position 2477 of SEQ ID NO: 1888037
aaaggaaauucccucgugu

SEQ ID NO: 2506157 - RNA, 19 nt, Artificial Sequence
  Description of Artificial Sequence: Synthetic oligonucleotide
  Antisense strand to SEQ ID NO: 2506156
acacgagggaauuuccuuu

SEQ ID NO: 2506158 - RNA, 19 nt, Artificial Sequence
  Description of Artificial Sequence: Synthetic oligonucleotide
  Sense strand starting at position 2590 of SEQ ID NO: 1888037
acaggcauuuauuaagagu

SEQ ID NO: 2506159 - RNA, 19 nt, Artificial Sequence
  Description of Artificial Sequence: Synthetic oligonucleotide
  Antisense strand to SEQ ID NO: 2506158
acucuuaauaaaugccugu

SEQ ID NO: 2506160 - RNA, 19 nt, Artificial Sequence
  Description of Artificial Sequence: Synthetic oligonucleotide
  Sense strand starting at position 2755 of SEQ ID NO: 1888037
aguggcguucgccuguaau

SEQ ID NO: 2506161 - RNA, 19 nt, Artificial Sequence
  Description of Artificial Sequence: Synthetic oligonucleotide
  Antisense strand to SEQ ID NO: 2506160
auuacaggcgaacgccacu

SEQ ID NO: 2506162 - RNA, 19 nt, Artificial Sequence
  Description of Artificial Sequence: Synthetic oligonucleotide
  Sense strand starting at position 3140 of SEQ ID NO: 1888037
gcuugagcucaagaaguca

SEQ ID NO: 2506163 - RNA, 19 nt, Artificial Sequence
  Description of Artificial Sequence: Synthetic oligonucleotide
  Antisense strand to SEQ ID NO: 2506162
ugacuucuugagcucaagc

SEQ ID NO: 2506164 - RNA, 19 nt, Artificial Sequence
  Description of Artificial Sequence: Synthetic oligonucleotide
  Sense strand starting at position 3148 of SEQ ID NO: 1888037
ucaagaagucaagguugca

SEQ ID NO: 2506165 - RNA, 19 nt, Artificial Sequence
  Description of Artificial Sequence: Synthetic oligonucleotide
  Antisense strand to SEQ ID NO: 2506164
ugcaaccuugacuucuuga

SEQ ID NO: 2506166 - RNA, 19 nt, Artificial Sequence
  Description of Artificial Sequence: Synthetic oligonucleotide
  Sense strand starting at position 3172 of SEQ ID NO: 1888037
ccaugauugcaaugauuac

SEQ ID NO: 2506167 - RNA, 19 nt, Artificial Sequence
  Description of Artificial Sequence: Synthetic oligonucleotide
  Antisense strand to SEQ ID NO: 2506166
guaaucauugcaaucaugg

SEQ ID NO: 2506168 - RNA, 19 nt, Artificial Sequence
  Description of Artificial Sequence: Synthetic oligonucleotide
  Sense strand starting at position 3278 of SEQ ID NO: 1888037
cacuuuaaguauguuagga

SEQ ID NO: 2506169 - RNA, 19 nt, Artificial Sequence
  Description of Artificial Sequence: Synthetic oligonucleotide
  Antisense strand to SEQ ID NO: 2506168
uccuaacauacuuaaagug

SEQ ID NO: 2506170 - RNA, 19 nt, Artificial Sequence
  Description of Artificial Sequence: Synthetic oligonucleotide
  Sense strand starting at position 3328 of SEQ ID NO: 1888037
acacacuugugccuacauu

SEQ ID NO: 2506171 - RNA, 19 nt, Artificial Sequence
  Description of Artificial Sequence: Synthetic oligonucleotide
  Antisense strand to SEQ ID NO: 2506170
aauguaggcacaagugugu

SEQ ID NO: 2506172 - RNA, 19 nt, Artificial Sequence
  Description of Artificial Sequence: Synthetic oligonucleotide
  Sense strand starting at position 3808 of SEQ ID NO: 1888037
gaaggacuguguucccuua

SEQ ID NO: 2506173 - RNA, 19 nt, Artificial Sequence
  Description of Artificial Sequence: Synthetic oligonucleotide
  Antisense strand to SEQ ID NO: 2506172
uaagggaacacaguccuuc

SEQ ID NO: 2506174 - RNA, 19 nt, Artificial Sequence
  Description of Artificial Sequence: Synthetic oligonucleotide
  Sense strand starting at position 3897 of SEQ ID NO: 1888037
gcucucaauuucuggaaga

SEQ ID NO: 2506175 - RNA, 19 nt, Artificial Sequence
  Description of Artificial Sequence: Synthetic oligonucleotide
  Antisense strand to SEQ ID NO: 2506174
ucuuccagaaauugagagc

SEQ ID NO: 2506176 - RNA, 19 nt, Artificial Sequence
  Description of Artificial Sequence: Synthetic oligonucleotide
  Sense strand starting at position 3898 of SEQ ID NO: 1888037
cucucaauuucuggaagag

SEQ ID NO: 2506177 - RNA, 19 nt, Artificial Sequence
  Description of Artificial Sequence: Synthetic oligonucleotide
  Antisense strand to SEQ ID NO: 2506176
cucuuccagaaauugagag

SEQ ID NO: 2506178 - RNA, 19 nt, Artificial Sequence
  Description of Artificial Sequence: Synthetic oligonucleotide
  Sense strand starting at position 149 of SEQ ID NO: 1888038
cucauauugucuguggcuu

SEQ ID NO: 2506179 - RNA, 19 nt, Artificial Sequence
  Description of Artificial Sequence: Synthetic oligonucleotide
  Antisense strand to SEQ ID NO: 2506178
aagccacagacaauaugag

SEQ ID NO: 2506180 - RNA, 19 nt, Artificial Sequence
  Description of Artificial Sequence: Synthetic oligonucleotide
  Sense strand starting at position 150 of SEQ ID NO: 1888038
ucauauugucuguggcuua

SEQ ID NO: 2506181 - RNA, 19 nt, Artificial Sequence
  Description of Artificial Sequence: Synthetic oligonucleotide
  Antisense strand to SEQ ID NO: 2506180
uaagccacagacaauauga

SEQ ID NO: 2506182 - RNA, 19 nt, Artificial Sequence
  Description of Artificial Sequence: Synthetic oligonucleotide
  Sense strand starting at position 151 of SEQ ID NO: 1888038
cauauugucuguggcuuaa

SEQ ID NO: 2506183 - RNA, 19 nt, Artificial Sequence
  Description of Artificial Sequence: Synthetic oligonucleotide
  Antisense strand to SEQ ID NO: 2506182
uuaagccacagacaauaug

SEQ ID NO: 2506184 - RNA, 19 nt, Artificial Sequence
  Description of Artificial Sequence: Synthetic oligonucleotide
  Sense strand starting at position 188 of SEQ ID NO: 1888038
cgucaagucuucuuucuaa

SEQ ID NO: 2506185 - RNA, 19 nt, Artificial Sequence
  Description of Artificial Sequence: Synthetic oligonucleotide
  Antisense strand to SEQ ID NO: 2506184
uuagaaagaagacuugacg

SEQ ID NO: 2506186 - RNA, 19 nt, Artificial Sequence
  Description of Artificial Sequence: Synthetic oligonucleotide
  Sense strand starting at position 263 of SEQ ID NO: 1888038
gucgcuucuccuggagcua

SEQ ID NO: 2506187 - RNA, 19 nt, Artificial Sequence
  Description of Artificial Sequence: Synthetic oligonucleotide
  Antisense strand to SEQ ID NO: 2506186
uagcuccaggagaagcgac

SEQ ID NO: 2506188 - RNA, 19 nt, Artificial Sequence
  Description of Artificial Sequence: Synthetic oligonucleotide
  Sense strand starting at position 2848 of SEQ ID NO: 1888038
agaguaaugggucaggcau

SEQ ID NO: 2506189 - RNA, 19 nt, Artificial Sequence
  Description of Artificial Sequence: Synthetic oligonucleotide
  Antisense strand to SEQ ID NO: 2506188
augccugacccauuacucu

SEQ ID NO: 2506190 - RNA, 19 nt, Artificial Sequence
  Description of Artificial Sequence: Synthetic oligonucleotide
  Sense strand starting at position 2907 of SEQ ID NO: 1888038
ugggaacccugcuugagaa

SEQ ID NO: 2506191 - RNA, 19 nt, Artificial Sequence
  Description of Artificial Sequence: Synthetic oligonucleotide
  Antisense strand to SEQ ID NO: 2506190
uucucaagcaggguuccca

SEQ ID NO: 2506192 - RNA, 19 nt, Artificial Sequence
  Description of Artificial Sequence: Synthetic oligonucleotide
  Sense strand starting at position 2922 of SEQ ID NO: 1888038
agaagagauuccggagccu

SEQ ID NO: 2506193 - RNA, 19 nt, Artificial Sequence
  Description of Artificial Sequence: Synthetic oligonucleotide
  Antisense strand to SEQ ID NO: 2506192
aggcuccggaaucucuucu

SEQ ID NO: 2506194 - RNA, 19 nt, Artificial Sequence
  Description of Artificial Sequence: Synthetic oligonucleotide
  Sense strand starting at position 3176 of SEQ ID NO: 1888038
ggcgagucuguguuugugu

SEQ ID NO: 2506195 - RNA, 19 nt, Artificial Sequence
  Description of Artificial Sequence: Synthetic oligonucleotide
  Antisense strand to SEQ ID NO: 2506194
acacaaacacagacucgcc

SEQ ID NO: 2506196 - RNA, 19 nt, Artificial Sequence
  Description of Artificial Sequence: Synthetic oligonucleotide
  Sense strand starting at position 3263 of SEQ ID NO: 1888038
ugauuaccuuuccugagga

SEQ ID NO: 2506197 - RNA, 19 nt, Artificial Sequence
  Description of Artificial Sequence: Synthetic oligonucleotide
  Antisense strand to SEQ ID NO: 2506196
uccucaggaaagguaauca

SEQ ID NO: 2506198 - RNA, 19 nt, Artificial Sequence
  Description of Artificial Sequence: Synthetic oligonucleotide
  Sense strand starting at position 3264 of SEQ ID NO: 1888038
gauuaccuuuccugaggau

SEQ ID NO: 2506199 - RNA, 19 nt, Artificial Sequence
  Description of Artificial Sequence: Synthetic oligonucleotide
  Antisense strand to SEQ ID NO: 2506198
auccucaggaaagguaauc

SEQ ID NO: 2506200 - RNA, 19 nt, Artificial Sequence
  Description of Artificial Sequence: Synthetic oligonucleotide
  Sense strand starting at position 3299 of SEQ ID NO: 1888038
gcucucuuugcccagacuu

SEQ ID NO: 2506201 - RNA, 19 nt, Artificial Sequence
  Description of Artificial Sequence: Synthetic oligonucleotide
  Antisense strand to SEQ ID NO: 2506200
aagucugggcaaagagagc

SEQ ID NO: 2506202 - RNA, 19 nt, Artificial Sequence
  Description of Artificial Sequence: Synthetic oligonucleotide
  Sense strand starting at position 3480 of SEQ ID NO: 1888038
gauggcauuccugagaguu

SEQ ID NO: 2506203 - RNA, 19 nt, Artificial Sequence
  Description of Artificial Sequence: Synthetic oligonucleotide
  Antisense strand to SEQ ID NO: 2506202
aacucucaggaaugccauc

SEQ ID NO: 2506204 - RNA, 19 nt, Artificial Sequence
  Description of Artificial Sequence: Synthetic oligonucleotide
  Sense strand starting at position 3482 of SEQ ID NO: 1888038
uggcauuccugagaguuga

SEQ ID NO: 2506205 - RNA, 19 nt, Artificial Sequence
  Description of Artificial Sequence: Synthetic oligonucleotide
  Antisense strand to SEQ ID NO: 2506204
ucaacucucaggaaugcca

SEQ ID NO: 2506206 - RNA, 19 nt, Artificial Sequence
  Description of Artificial Sequence: Synthetic oligonucleotide
  Sense strand starting at position 3486 of SEQ ID NO: 1888038
auuccugagaguugaggau

SEQ ID NO: 2506207 - RNA, 19 nt, Artificial Sequence
  Description of Artificial Sequence: Synthetic oligonucleotide
  Antisense strand to SEQ ID NO: 2506206
auccucaacucucaggaau

SEQ ID NO: 2506208 - RNA, 19 nt, Artificial Sequence
  Description of Artificial Sequence: Synthetic oligonucleotide
  Sense strand starting at position 3492 of SEQ ID NO: 1888038
gagaguugaggauguagau

SEQ ID NO: 2506209 - RNA, 19 nt, Artificial Sequence
  Description of Artificial Sequence: Synthetic oligonucleotide
  Antisense strand to SEQ ID NO: 2506208
aucuacauccucaacucuc

SEQ ID NO: 2506210 - RNA, 19 nt, Artificial Sequence
  Description of Artificial Sequence: Synthetic oligonucleotide
  Sense strand starting at position 3502 of SEQ ID NO: 1888038
gauguagauggaugugagu

SEQ ID NO: 2506211 - RNA, 19 nt, Artificial Sequence
  Description of Artificial Sequence: Synthetic oligonucleotide
  Antisense strand to SEQ ID NO: 2506210
acucacauccaucuacauc

SEQ ID NO: 2506212 - RNA, 19 nt, Artificial Sequence
  Description of Artificial Sequence: Synthetic oligonucleotide
  Sense strand starting at position 3508 of SEQ ID NO: 1888038
gauggaugugaguggauac

SEQ ID NO: 2506213 - RNA, 19 nt, Artificial Sequence
  Description of Artificial Sequence: Synthetic oligonucleotide
  Antisense strand to SEQ ID NO: 2506212
guauccacucacauccauc

SEQ ID NO: 2506214 - RNA, 19 nt, Artificial Sequence
  Description of Artificial Sequence: Synthetic oligonucleotide
  Sense strand starting at position 3551 of SEQ ID NO: 1888038
gcacgcaagaaguguuaua

SEQ ID NO: 2506215 - RNA, 19 nt, Artificial Sequence
  Description of Artificial Sequence: Synthetic oligonucleotide
  Antisense strand to SEQ ID NO: 2506214
uauaacacuucuugcgugc

SEQ ID NO: 2506216 - RNA, 19 nt, Artificial Sequence
  Description of Artificial Sequence: Synthetic oligonucleotide
  Sense strand starting at position 3556 of SEQ ID NO: 1888038
caagaaguguuauauaagc

SEQ ID NO: 2506217 - RNA, 19 nt, Artificial Sequence
  Description of Artificial Sequence: Synthetic oligonucleotide
  Antisense strand to SEQ ID NO: 2506216
gcuuauauaacacuucuug

SEQ ID NO: 2506218 - RNA, 19 nt, Artificial Sequence
  Description of Artificial Sequence: Synthetic oligonucleotide
  Sense strand starting at position 3571 of SEQ ID NO: 1888038
aagcgcuugcucuuguuau

SEQ ID NO: 2506219 - RNA, 19 nt, Artificial Sequence
  Description of Artificial Sequence: Synthetic oligonucleotide
  Antisense strand to SEQ ID NO: 2506218
auaacaagagcaagcgcuu

SEQ ID NO: 2506220 - RNA, 19 nt, Artificial Sequence
  Description of Artificial Sequence: Synthetic oligonucleotide
  Sense strand starting at position 3572 of SEQ ID NO: 1888038
agcgcuugcucuuguuauu

SEQ ID NO: 2506221 - RNA, 19 nt, Artificial Sequence
  Description of Artificial Sequence: Synthetic oligonucleotide
  Antisense strand to SEQ ID NO: 2506220
aauaacaagagcaagcgcu

SEQ ID NO: 2506222 - RNA, 19 nt, Artificial Sequence
  Description of Artificial Sequence: Synthetic oligonucleotide
  Sense strand starting at position 3573 of SEQ ID NO: 1888038
gcgcuugcucuuguuauua

SEQ ID NO: 2506223 - RNA, 19 nt, Artificial Sequence
  Description of Artificial Sequence: Synthetic oligonucleotide
  Antisense strand to SEQ ID NO: 2506222
uaauaacaagagcaagcgc

SEQ ID NO: 2506224 - RNA, 19 nt, Artificial Sequence
  Description of Artificial Sequence: Synthetic oligonucleotide
  Sense strand starting at position 3575 of SEQ ID NO: 1888038
gcuugcucuuguuauuauu

SEQ ID NO: 2506225 - RNA, 19 nt, Artificial Sequence
  Description of Artificial Sequence: Synthetic oligonucleotide
  Antisense strand to SEQ ID NO: 2506224
aauaauaacaagagcaagc

SEQ ID NO: 2506226 - RNA, 19 nt, Artificial Sequence
  Description of Artificial Sequence: Synthetic oligonucleotide
  Sense strand starting at position 3784 of SEQ ID NO: 1888038
guccgaucccuaugggcaa

SEQ ID NO: 2506227 - RNA, 19 nt, Artificial Sequence
  Description of Artificial Sequence: Synthetic oligonucleotide
  Antisense strand to SEQ ID NO: 2506226
uugcccauagggaucggac

SEQ ID NO: 2506228 - RNA, 19 nt, Artificial Sequence
  Description of Artificial Sequence: Synthetic oligonucleotide
  Sense strand starting at position 3886 of SEQ ID NO: 1888038
cugggaucucaggagcagu

SEQ ID NO: 2506229 - RNA, 19 nt, Artificial Sequence
  Description of Artificial Sequence: Synthetic oligonucleotide
  Antisense strand to SEQ ID NO: 2506228
acugcuccugagaucccag

SEQ ID NO: 2506230 - RNA, 19 nt, Artificial Sequence
  Description of Artificial Sequence: Synthetic oligonucleotide
  Sense strand starting at position 3915 of SEQ ID NO: 1888038
gugguucgcgaaugggaaa

SEQ ID NO: 2506231 - RNA, 19 nt, Artificial Sequence
  Description of Artificial Sequence: Synthetic oligonucleotide
  Antisense strand to SEQ ID NO: 2506230
uuucccauucgcgaaccac

SEQ ID NO: 2506232 - RNA, 19 nt, Artificial Sequence
  Description of Artificial Sequence: Synthetic oligonucleotide
  Sense strand starting at position 3968 of SEQ ID NO: 1888038
uugugcuuucccuguggga

SEQ ID NO: 2506233 - RNA, 19 nt, Artificial Sequence
  Description of Artificial Sequence: Synthetic oligonucleotide
  Antisense strand to SEQ ID NO: 2506232
ucccacagggaaagcacaa

SEQ ID NO: 2506234 - RNA, 19 nt, Artificial Sequence
  Description of Artificial Sequence: Synthetic oligonucleotide
  Sense strand starting at position 154 of SEQ ID NO: 1888039
cgucaaugagcugagcgau

SEQ ID NO: 2506235 - RNA, 19 nt, Artificial Sequence
  Description of Artificial Sequence: Synthetic oligonucleotide
  Antisense strand to SEQ ID NO: 2506234
aucgcucagcucauugacg

SEQ ID NO: 2506236 - RNA, 19 nt, Artificial Sequence
  Description of Artificial Sequence: Synthetic oligonucleotide
  Sense strand starting at position 229 of SEQ ID NO: 1888039
acuuguuguaaccggagaa

SEQ ID NO: 2506237 - RNA, 19 nt, Artificial Sequence
  Description of Artificial Sequence: Synthetic oligonucleotide
  Antisense strand to SEQ ID NO: 2506236
uucuccgguuacaacaagu

SEQ ID NO: 2506238 - RNA, 19 nt, Artificial Sequence
  Description of Artificial Sequence: Synthetic oligonucleotide
  Sense strand starting at position 230 of SEQ ID NO: 1888039
cuuguuguaaccggagaag

SEQ ID NO: 2506239 - RNA, 19 nt, Artificial Sequence
  Description of Artificial Sequence: Synthetic oligonucleotide
  Antisense strand to SEQ ID NO: 2506238
cuucuccgguuacaacaag

SEQ ID NO: 2506240 - RNA, 19 nt, Artificial Sequence
  Description of Artificial Sequence: Synthetic oligonucleotide
  Sense strand starting at position 233 of SEQ ID NO: 1888039
guuguaaccggagaagagu

SEQ ID NO: 2506241 - RNA, 19 nt, Artificial Sequence
  Description of Artificial Sequence: Synthetic oligonucleotide
  Antisense strand to SEQ ID NO: 2506240
acucuucuccgguuacaac

SEQ ID NO: 2506242 - RNA, 19 nt, Artificial Sequence
  Description of Artificial Sequence: Synthetic oligonucleotide
  Sense strand starting at position 588 of SEQ ID NO: 1888039
guguaauugugauuuccuc

SEQ ID NO: 2506243 - RNA, 19 nt, Artificial Sequence
  Description of Artificial Sequence: Synthetic oligonucleotide
  Antisense strand to SEQ ID NO: 2506242
gaggaaaucacaauuacac

SEQ ID NO: 2506244 - RNA, 19 nt, Artificial Sequence
  Description of Artificial Sequence: Synthetic oligonucleotide
  Sense strand starting at position 914 of SEQ ID NO: 1888039
aggaguguuucagaugcag

SEQ ID NO: 2506245 - RNA, 19 nt, Artificial Sequence
  Description of Artificial Sequence: Synthetic oligonucleotide
  Antisense strand to SEQ ID NO: 2506244
cugcaucugaaacacuccu

SEQ ID NO: 2506246 - RNA, 19 nt, Artificial Sequence
  Description of Artificial Sequence: Synthetic oligonucleotide
  Sense strand starting at position 1001 of SEQ ID NO: 1888039
ccugaugagucgcucugga

SEQ ID NO: 2506247 - RNA, 19 nt, Artificial Sequence
  Description of Artificial Sequence: Synthetic oligonucleotide
  Antisense strand to SEQ ID NO: 2506246
uccagagcgacucaucagg

SEQ ID NO: 2506248 - RNA, 19 nt, Artificial Sequence
  Description of Artificial Sequence: Synthetic oligonucleotide
  Sense strand starting at position 2150 of SEQ ID NO: 1888039
ggguaaaguuuccuuguuc

SEQ ID NO: 2506249 - RNA, 19 nt, Artificial Sequence
  Description of Artificial Sequence: Synthetic oligonucleotide
  Antisense strand to SEQ ID NO: 2506248
gaacaaggaaacuuuaccc

SEQ ID NO: 2506250 - RNA, 19 nt, Artificial Sequence
  Description of Artificial Sequence: Synthetic oligonucleotide
  Sense strand starting at position 2151 of SEQ ID NO: 1888039
gguaaaguuuccuuguucu

SEQ ID NO: 2506251 - RNA, 19 nt, Artificial Sequence
  Description of Artificial Sequence: Synthetic oligonucleotide
  Antisense strand to SEQ ID NO: 2506250
agaacaaggaaacuuuacc

SEQ ID NO: 2506252 - RNA, 19 nt, Artificial Sequence
  Description of Artificial Sequence: Synthetic oligonucleotide
  Sense strand starting at position 2596 of SEQ ID NO: 1888039
gcgccuugugcggcugaau

SEQ ID NO: 2506253 - RNA, 19 nt, Artificial Sequence
  Description of Artificial Sequence: Synthetic oligonucleotide
  Antisense strand to SEQ ID NO: 2506252
auucagccgcacaaggcgc

SEQ ID NO: 2506254 - RNA, 19 nt, Artificial Sequence
  Description of Artificial Sequence: Synthetic oligonucleotide
  Sense strand starting at position 2607 of SEQ ID NO: 1888039
ggcugaaucucgugugcag

SEQ ID NO: 2506255 - RNA, 19 nt, Artificial Sequence
  Description of Artificial Sequence: Synthetic oligonucleotide
  Antisense strand to SEQ ID NO: 2506254
cugcacacgagauucagcc

SEQ ID NO: 2506256 - RNA, 19 nt, Artificial Sequence
  Description of Artificial Sequence: Synthetic oligonucleotide
  Sense strand starting at position 2633 of SEQ ID NO: 1888039
gggcgaggcucugcagaaa

SEQ ID NO: 2506257 - RNA, 19 nt, Artificial Sequence
  Description of Artificial Sequence: Synthetic oligonucleotide
  Antisense strand to SEQ ID NO: 2506256
uuucugcagagccucgccc

SEQ ID NO: 2506258 - RNA, 19 nt, Artificial Sequence
  Description of Artificial Sequence: Synthetic oligonucleotide
  Sense strand starting at position 2636 of SEQ ID NO: 1888039
cgaggcucugcagaaacau

SEQ ID NO: 2506259 - RNA, 19 nt, Artificial Sequence
  Description of Artificial Sequence: Synthetic oligonucleotide
  Antisense strand to SEQ ID NO: 2506258
auguuucugcagagccucg

SEQ ID NO: 2506260 - RNA, 19 nt, Artificial Sequence
  Description of Artificial Sequence: Synthetic oligonucleotide
  Sense strand starting at position 2730 of SEQ ID NO: 1888039
ggagauuuccgucgucggu

SEQ ID NO: 2506261 - RNA, 19 nt, Artificial Sequence
  Description of Artificial Sequence: Synthetic oligonucleotide
  Antisense strand to SEQ ID NO: 2506260
accgacgacggaaaucucc

SEQ ID NO: 2506262 - RNA, 19 nt, Artificial Sequence
  Description of Artificial Sequence: Synthetic oligonucleotide
  Sense strand starting at position 2732 of SEQ ID NO: 1888039
agauuuccgucgucgguaa

SEQ ID NO: 2506263 - RNA, 19 nt, Artificial Sequence
  Description of Artificial Sequence: Synthetic oligonucleotide
  Antisense strand to SEQ ID NO: 2506262
uuaccgacgacggaaaucu

SEQ ID NO: 2506264 - RNA, 19 nt, Artificial Sequence
  Description of Artificial Sequence: Synthetic oligonucleotide
  Sense strand starting at position 2733 of SEQ ID NO: 1888039
gauuuccgucgucgguaau

SEQ ID NO: 2506265 - RNA, 19 nt, Artificial Sequence
  Description of Artificial Sequence: Synthetic oligonucleotide
  Antisense strand to SEQ ID NO: 2506264
auuaccgacgacggaaauc

SEQ ID NO: 2506266 - RNA, 19 nt, Artificial Sequence
  Description of Artificial Sequence: Synthetic oligonucleotide
  Sense strand starting at position 2736 of SEQ ID NO: 1888039
uuccgucgucgguaaugga

SEQ ID NO: 2506267 - RNA, 19 nt, Artificial Sequence
  Description of Artificial Sequence: Synthetic oligonucleotide
  Antisense strand to SEQ ID NO: 2506266
uccauuaccgacgacggaa

SEQ ID NO: 2506268 - RNA, 19 nt, Artificial Sequence
  Description of Artificial Sequence: Synthetic oligonucleotide
  Sense strand starting at position 2737 of SEQ ID NO: 1888039
uccgucgucgguaauggaa

SEQ ID NO: 2506269 - RNA, 19 nt, Artificial Sequence
  Description of Artificial Sequence: Synthetic oligonucleotide
  Antisense strand to SEQ ID NO: 2506268
uuccauuaccgacgacgga

SEQ ID NO: 2506270 - RNA, 19 nt, Artificial Sequence
  Description of Artificial Sequence: Synthetic oligonucleotide
  Sense strand starting at position 2852 of SEQ ID NO: 1888039
ucaggaguucccugcagca

SEQ ID NO: 2506271 - RNA, 19 nt, Artificial Sequence
  Description of Artificial Sequence: Synthetic oligonucleotide
  Antisense strand to SEQ ID NO: 2506270
ugcugcagggaacuccuga

SEQ ID NO: 2506272 - RNA, 19 nt, Artificial Sequence
  Description of Artificial Sequence: Synthetic oligonucleotide
  Sense strand starting at position 3049 of SEQ ID NO: 1888039
gcucauggcuccucauaca

SEQ ID NO: 2506273 - RNA, 19 nt, Artificial Sequence
  Description of Artificial Sequence: Synthetic oligonucleotide
  Antisense strand to SEQ ID NO: 2506272
uguaugaggagccaugagc

SEQ ID NO: 2506274 - RNA, 19 nt, Artificial Sequence
  Description of Artificial Sequence: Synthetic oligonucleotide
  Sense strand starting at position 3125 of SEQ ID NO: 1888039
gugggcagugccuacaauu

SEQ ID NO: 2506275 - RNA, 19 nt, Artificial Sequence
  Description of Artificial Sequence: Synthetic oligonucleotide
  Antisense strand to SEQ ID NO: 2506274
aauuguaggcacugcccac

SEQ ID NO: 2506276 - RNA, 19 nt, Artificial Sequence
  Description of Artificial Sequence: Synthetic oligonucleotide
  Sense strand starting at position 3201 of SEQ ID NO: 1888039
uccugaauugccuggucca

SEQ ID NO: 2506277 - RNA, 19 nt, Artificial Sequence
  Description of Artificial Sequence: Synthetic oligonucleotide
  Antisense strand to SEQ ID NO: 2506276
uggaccaggcaauucagga

SEQ ID NO: 2506278 - RNA, 19 nt, Artificial Sequence
  Description of Artificial Sequence: Synthetic oligonucleotide
  Sense strand starting at position 3329 of SEQ ID NO: 1888039
gucccuacguuaccaaaga

SEQ ID NO: 2506279 - RNA, 19 nt, Artificial Sequence
  Description of Artificial Sequence: Synthetic oligonucleotide
  Antisense strand to SEQ ID NO: 2506278
ucuuugguaacguagggac

SEQ ID NO: 2506280 - RNA, 19 nt, Artificial Sequence
  Description of Artificial Sequence: Synthetic oligonucleotide
  Sense strand starting at position 3389 of SEQ ID NO: 1888039
cacagucaguacugggauu

SEQ ID NO: 2506281 - RNA, 19 nt, Artificial Sequence
  Description of Artificial Sequence: Synthetic oligonucleotide
  Antisense strand to SEQ ID NO: 2506280
aaucccaguacugacugug

SEQ ID NO: 2506282 - RNA, 19 nt, Artificial Sequence
  Description of Artificial Sequence: Synthetic oligonucleotide
  Sense strand starting at position 3452 of SEQ ID NO: 1888039
gcuggccucagauguaguu

SEQ ID NO: 2506283 - RNA, 19 nt, Artificial Sequence
  Description of Artificial Sequence: Synthetic oligonucleotide
  Antisense strand to SEQ ID NO: 2506282
aacuacaucugaggccagc

SEQ ID NO: 2506284 - RNA, 19 nt, Artificial Sequence
  Description of Artificial Sequence: Synthetic oligonucleotide
  Sense strand starting at position 3515 of SEQ ID NO: 1888039
aggucuacuuuccugaacu

SEQ ID NO: 2506285 - RNA, 19 nt, Artificial Sequence
  Description of Artificial Sequence: Synthetic oligonucleotide
  Antisense strand to SEQ ID NO: 2506284
aguucaggaaaguagaccu

SEQ ID NO: 2506286 - RNA, 19 nt, Artificial Sequence
  Description of Artificial Sequence: Synthetic oligonucleotide
  Sense strand starting at position 3516 of SEQ ID NO: 1888039
ggucuacuuuccugaacuc

SEQ ID NO: 2506287 - RNA, 19 nt, Artificial Sequence
  Description of Artificial Sequence: Synthetic oligonucleotide
  Antisense strand to SEQ ID NO: 2506286
gaguucaggaaaguagacc

SEQ ID NO: 2506288 - RNA, 19 nt, Artificial Sequence
  Description of Artificial Sequence: Synthetic oligonucleotide
  Sense strand starting at position 3938 of SEQ ID NO: 1888039
ccaugaggcucucugcuua

SEQ ID NO: 2506289 - RNA, 19 nt, Artificial Sequence
  Description of Artificial Sequence: Synthetic oligonucleotide
  Antisense strand to SEQ ID NO: 2506288
uaagcagagagccucaugg

SEQ ID NO: 2506290 - RNA, 19 nt, Artificial Sequence
  Description of Artificial Sequence: Synthetic oligonucleotide
  Sense strand starting at position 3942 of SEQ ID NO: 1888039
gaggcucucugcuuaggaa

SEQ ID NO: 2506291 - RNA, 19 nt, Artificial Sequence
  Description of Artificial Sequence: Synthetic oligonucleotide
  Antisense strand to SEQ ID NO: 2506290
uuccuaagcagagagccuc

SEQ ID NO: 2506292 - RNA, 19 nt, Artificial Sequence
  Description of Artificial Sequence: Synthetic oligonucleotide
  Sense strand starting at position 122 of SEQ ID NO: 1888040
guauaaacacgccaaacau

SEQ ID NO: 2506293 - RNA, 19 nt, Artificial Sequence
  Description of Artificial Sequence: Synthetic oligonucleotide
  Antisense strand to SEQ ID NO: 2506292
auguuuggcguguuuauac

SEQ ID NO: 2506294 - RNA, 19 nt, Artificial Sequence
  Description of Artificial Sequence: Synthetic oligonucleotide
  Sense strand starting at position 182 of SEQ ID NO: 1888040
cuguaacaguucuucccaa

SEQ ID NO: 2506295 - RNA, 19 nt, Artificial Sequence
  Description of Artificial Sequence: Synthetic oligonucleotide
  Antisense strand to SEQ ID NO: 2506294
uugggaagaacuguuacag

SEQ ID NO: 2506296 - RNA, 19 nt, Artificial Sequence
  Description of Artificial Sequence: Synthetic oligonucleotide
  Sense strand starting at position 301 of SEQ ID NO: 1888040
cuuguauuguaguucuaua

SEQ ID NO: 2506297 - RNA, 19 nt, Artificial Sequence
  Description of Artificial Sequence: Synthetic oligonucleotide
  Antisense strand to SEQ ID NO: 2506296
uauagaacuacaauacaag

SEQ ID NO: 2506298 - RNA, 19 nt, Artificial Sequence
  Description of Artificial Sequence: Synthetic oligonucleotide
  Sense strand starting at position 337 of SEQ ID NO: 1888040
ucccuauguguccagacuu

SEQ ID NO: 2506299 - RNA, 19 nt, Artificial Sequence
  Description of Artificial Sequence: Synthetic oligonucleotide
  Antisense strand to SEQ ID NO: 2506298
aagucuggacacauaggga

SEQ ID NO: 2506300 - RNA, 19 nt, Artificial Sequence
  Description of Artificial Sequence: Synthetic oligonucleotide
  Sense strand starting at position 370 of SEQ ID NO: 1888040
gacugcaaaugcucugaga

SEQ ID NO: 2506301 - RNA, 19 nt, Artificial Sequence
  Description of Artificial Sequence: Synthetic oligonucleotide
  Antisense strand to SEQ ID NO: 2506300
ucucagagcauuugcaguc

SEQ ID NO: 2506302 - RNA, 19 nt, Artificial Sequence
  Description of Artificial Sequence: Synthetic oligonucleotide
  Sense strand starting at position 372 of SEQ ID NO: 1888040
cugcaaaugcucugagaug

SEQ ID NO: 2506303 - RNA, 19 nt, Artificial Sequence
  Description of Artificial Sequence: Synthetic oligonucleotide
  Antisense strand to SEQ ID NO: 2506302
caucucagagcauuugcag

SEQ ID NO: 2506304 - RNA, 19 nt, Artificial Sequence
  Description of Artificial Sequence: Synthetic oligonucleotide
  Sense strand starting at position 423 of SEQ ID NO: 1888040
agacaauucuuguugcuaa

SEQ ID NO: 2506305 - RNA, 19 nt, Artificial Sequence
  Description of Artificial Sequence: Synthetic oligonucleotide
  Antisense strand to SEQ ID NO: 2506304
uuagcaacaagaauugucu

SEQ ID NO: 2506306 - RNA, 19 nt, Artificial Sequence
  Description of Artificial Sequence: Synthetic oligonucleotide
  Sense strand starting at position 564 of SEQ ID NO: 1888040
guggguuauacugacucua

SEQ ID NO: 2506307 - RNA, 19 nt, Artificial Sequence
  Description of Artificial Sequence: Synthetic oligonucleotide
  Antisense strand to SEQ ID NO: 2506306
uagagucaguauaacccac

SEQ ID NO: 2506308 - RNA, 19 nt, Artificial Sequence
  Description of Artificial Sequence: Synthetic oligonucleotide
  Sense strand starting at position 566 of SEQ ID NO: 1888040
ggguuauacugacucuauu

SEQ ID NO: 2506309 - RNA, 19 nt, Artificial Sequence
  Description of Artificial Sequence: Synthetic oligonucleotide
  Antisense strand to SEQ ID NO: 2506308
aauagagucaguauaaccc

SEQ ID NO: 2506310 - RNA, 19 nt, Artificial Sequence
  Description of Artificial Sequence: Synthetic oligonucleotide
  Sense strand starting at position 629 of SEQ ID NO: 1888040
uuagguuaucucugagaau

SEQ ID NO: 2506311 - RNA, 19 nt, Artificial Sequence
  Description of Artificial Sequence: Synthetic oligonucleotide
  Antisense strand to SEQ ID NO: 2506310
auucucagagauaaccuaa

SEQ ID NO: 2506312 - RNA, 19 nt, Artificial Sequence
  Description of Artificial Sequence: Synthetic oligonucleotide
  Sense strand starting at position 692 of SEQ ID NO: 1888040
cugcaauucucagcaugac

SEQ ID NO: 2506313 - RNA, 19 nt, Artificial Sequence
  Description of Artificial Sequence: Synthetic oligonucleotide
  Antisense strand to SEQ ID NO: 2506312
gucaugcugagaauugcag

SEQ ID NO: 2506314 - RNA, 19 nt, Artificial Sequence
  Description of Artificial Sequence: Synthetic oligonucleotide
  Sense strand starting at position 693 of SEQ ID NO: 1888040
ugcaauucucagcaugaca

SEQ ID NO: 2506315 - RNA, 19 nt, Artificial Sequence
  Description of Artificial Sequence: Synthetic oligonucleotide
  Antisense strand to SEQ ID NO: 2506314
ugucaugcugagaauugca

SEQ ID NO: 2506316 - RNA, 19 nt, Artificial Sequence
  Description of Artificial Sequence: Synthetic oligonucleotide
  Sense strand starting at position 721 of SEQ ID NO: 1888040
ugaguaaauguuuagcacu

SEQ ID NO: 2506317 - RNA, 19 nt, Artificial Sequence
  Description of Artificial Sequence: Synthetic oligonucleotide
  Antisense strand to SEQ ID NO: 2506316
agugcuaaacauuuacuca

SEQ ID NO: 2506318 - RNA, 19 nt, Artificial Sequence
  Description of Artificial Sequence: Synthetic oligonucleotide
  Sense strand starting at position 723 of SEQ ID NO: 1888040
aguaaauguuuagcacuua

SEQ ID NO: 2506319 - RNA, 19 nt, Artificial Sequence
  Description of Artificial Sequence: Synthetic oligonucleotide
  Antisense strand to SEQ ID NO: 2506318
uaagugcuaaacauuuacu

SEQ ID NO: 2506320 - RNA, 19 nt, Artificial Sequence
  Description of Artificial Sequence: Synthetic oligonucleotide
  Sense strand starting at position 872 of SEQ ID NO: 1888040
accuguagauccucaaagu

SEQ ID NO: 2506321 - RNA, 19 nt, Artificial Sequence
  Description of Artificial Sequence: Synthetic oligonucleotide
  Antisense strand to SEQ ID NO: 2506320
acuuugaggaucuacaggu

SEQ ID NO: 2506322 - RNA, 19 nt, Artificial Sequence
  Description of Artificial Sequence: Synthetic oligonucleotide
  Sense strand starting at position 992 of SEQ ID NO: 1888040
uggaucucguccuccugaa

SEQ ID NO: 2506323 - RNA, 19 nt, Artificial Sequence
  Description of Artificial Sequence: Synthetic oligonucleotide
  Antisense strand to SEQ ID NO: 2506322
uucaggaggacgagaucca

SEQ ID NO: 2506324 - RNA, 19 nt, Artificial Sequence
  Description of Artificial Sequence: Synthetic oligonucleotide
  Sense strand starting at position 1027 of SEQ ID NO: 1888040
ucccgagggagccguaaau

SEQ ID NO: 2506325 - RNA, 19 nt, Artificial Sequence
  Description of Artificial Sequence: Synthetic oligonucleotide
  Antisense strand to SEQ ID NO: 2506324
auuuacggcucccucggga

SEQ ID NO: 2506326 - RNA, 19 nt, Artificial Sequence
  Description of Artificial Sequence: Synthetic oligonucleotide
  Sense strand starting at position 1029 of SEQ ID NO: 1888040
ccgagggagccguaaaugu

SEQ ID NO: 2506327 - RNA, 19 nt, Artificial Sequence
  Description of Artificial Sequence: Synthetic oligonucleotide
  Antisense strand to SEQ ID NO: 2506326
acauuuacggcucccucgg

SEQ ID NO: 2506328 - RNA, 19 nt, Artificial Sequence
  Description of Artificial Sequence: Synthetic oligonucleotide
  Sense strand starting at position 1037 of SEQ ID NO: 1888040
gccguaaaugugcugcuca

SEQ ID NO: 2506329 - RNA, 19 nt, Artificial Sequence
  Description of Artificial Sequence: Synthetic oligonucleotide
  Antisense strand to SEQ ID NO: 2506328
ugagcagcacauuuacggc

SEQ ID NO: 2506330 - RNA, 19 nt, Artificial Sequence
  Description of Artificial Sequence: Synthetic oligonucleotide
  Sense strand starting at position 1039 of SEQ ID NO: 1888040
cguaaaugugcugcucaca

SEQ ID NO: 2506331 - RNA, 19 nt, Artificial Sequence
  Description of Artificial Sequence: Synthetic oligonucleotide
  Antisense strand to SEQ ID NO: 2506330
ugugagcagcacauuuacg

SEQ ID NO: 2506332 - RNA, 19 nt, Artificial Sequence
  Description of Artificial Sequence: Synthetic oligonucleotide
  Sense strand starting at position 1177 of SEQ ID NO: 1888040
cugcuacacccucgaguaa

SEQ ID NO: 2506333 - RNA, 19 nt, Artificial Sequence
  Description of Artificial Sequence: Synthetic oligonucleotide
  Antisense strand to SEQ ID NO: 2506332
uuacucgaggguguagcag

SEQ ID NO: 2506334 - RNA, 19 nt, Artificial Sequence
  Description of Artificial Sequence: Synthetic oligonucleotide
  Sense strand starting at position 1178 of SEQ ID NO: 1888040
ugcuacacccucgaguaaa

SEQ ID NO: 2506335 - RNA, 19 nt, Artificial Sequence
  Description of Artificial Sequence: Synthetic oligonucleotide
  Antisense strand to SEQ ID NO: 2506334
uuuacucgaggguguagca

SEQ ID NO: 2506336 - RNA, 19 nt, Artificial Sequence
  Description of Artificial Sequence: Synthetic oligonucleotide
  Sense strand starting at position 1272 of SEQ ID NO: 1888040
ugugacacuuccuuucuga

SEQ ID NO: 2506337 - RNA, 19 nt, Artificial Sequence
  Description of Artificial Sequence: Synthetic oligonucleotide
  Antisense strand to SEQ ID NO: 2506336
ucagaaaggaagugucaca

SEQ ID NO: 2506338 - RNA, 19 nt, Artificial Sequence
  Description of Artificial Sequence: Synthetic oligonucleotide
  Sense strand starting at position 1389 of SEQ ID NO: 1888040
gaaggaguguccucacuac

SEQ ID NO: 2506339 - RNA, 19 nt, Artificial Sequence
  Description of Artificial Sequence: Synthetic oligonucleotide
  Antisense strand to SEQ ID NO: 2506338
guagugaggacacuccuuc

SEQ ID NO: 2506340 - RNA, 19 nt, Artificial Sequence
  Description of Artificial Sequence: Synthetic oligonucleotide
  Sense strand starting at position 1393 of SEQ ID NO: 1888040
gaguguccucacuacgauu

SEQ ID NO: 2506341 - RNA, 19 nt, Artificial Sequence
  Description of Artificial Sequence: Synthetic oligonucleotide
  Antisense strand to SEQ ID NO: 2506340
aaucguagugaggacacuc

SEQ ID NO: 2506342 - RNA, 19 nt, Artificial Sequence
  Description of Artificial Sequence: Synthetic oligonucleotide
  Sense strand starting at position 1395 of SEQ ID NO: 1888040
guguccucacuacgauuau

SEQ ID NO: 2506343 - RNA, 19 nt, Artificial Sequence
  Description of Artificial Sequence: Synthetic oligonucleotide
  Antisense strand to SEQ ID NO: 2506342
auaaucguagugaggacac

SEQ ID NO: 2506344 - RNA, 19 nt, Artificial Sequence
  Description of Artificial Sequence: Synthetic oligonucleotide
  Sense strand starting at position 1427 of SEQ ID NO: 1888040
ggcacagagauguaguuau

SEQ ID NO: 2506345 - RNA, 19 nt, Artificial Sequence
  Description of Artificial Sequence: Synthetic oligonucleotide
  Antisense strand to SEQ ID NO: 2506344
auaacuacaucucugugcc

SEQ ID NO: 2506346 - RNA, 19 nt, Artificial Sequence
  Description of Artificial Sequence: Synthetic oligonucleotide
  Sense strand starting at position 2056 of SEQ ID NO: 1888040
gggcgaucucccggaaguu

SEQ ID NO: 2506347 - RNA, 19 nt, Artificial Sequence
  Description of Artificial Sequence: Synthetic oligonucleotide
  Antisense strand to SEQ ID NO: 2506346
aacuuccgggagaucgccc

SEQ ID NO: 2506348 - RNA, 19 nt, Artificial Sequence
  Description of Artificial Sequence: Synthetic oligonucleotide
  Sense strand starting at position 2057 of SEQ ID NO: 1888040
ggcgaucucccggaaguua

SEQ ID NO: 2506349 - RNA, 19 nt, Artificial Sequence
  Description of Artificial Sequence: Synthetic oligonucleotide
  Antisense strand to SEQ ID NO: 2506348
uaacuuccgggagaucgcc

SEQ ID NO: 2506350 - RNA, 19 nt, Artificial Sequence
  Description of Artificial Sequence: Synthetic oligonucleotide
  Sense strand starting at position 2170 of SEQ ID NO: 1888040
ggguaugagugucuagcuu

SEQ ID NO: 2506351 - RNA, 19 nt, Artificial Sequence
  Description of Artificial Sequence: Synthetic oligonucleotide
  Antisense strand to SEQ ID NO: 2506350
aagcuagacacucauaccc

SEQ ID NO: 2506352 - RNA, 19 nt, Artificial Sequence
  Description of Artificial Sequence: Synthetic oligonucleotide
  Sense strand starting at position 2197 of SEQ ID NO: 1888040
acugcaagacugugcaaau

SEQ ID NO: 2506353 - RNA, 19 nt, Artificial Sequence
  Description of Artificial Sequence: Synthetic oligonucleotide
  Antisense strand to SEQ ID NO: 2506352
auuugcacagucuugcagu

SEQ ID NO: 2506354 - RNA, 19 nt, Artificial Sequence
  Description of Artificial Sequence: Synthetic oligonucleotide
  Sense strand starting at position 2198 of SEQ ID NO: 1888040
cugcaagacugugcaaauu

SEQ ID NO: 2506355 - RNA, 19 nt, Artificial Sequence
  Description of Artificial Sequence: Synthetic oligonucleotide
  Antisense strand to SEQ ID NO: 2506354
aauuugcacagucuugcag

SEQ ID NO: 2506356 - RNA, 19 nt, Artificial Sequence
  Description of Artificial Sequence: Synthetic oligonucleotide
  Sense strand starting at position 2228 of SEQ ID NO: 1888040
uccaguuuccgcggaagga

SEQ ID NO: 2506357 - RNA, 19 nt, Artificial Sequence
  Description of Artificial Sequence: Synthetic oligonucleotide
  Antisense strand to SEQ ID NO: 2506356
uccuuccgcggaaacugga

SEQ ID NO: 2506358 - RNA, 19 nt, Artificial Sequence
  Description of Artificial Sequence: Synthetic oligonucleotide
  Sense strand starting at position 2241 of SEQ ID NO: 1888040
gaaggagcgaauugugcuu

SEQ ID NO: 2506359 - RNA, 19 nt, Artificial Sequence
  Description of Artificial Sequence: Synthetic oligonucleotide
  Antisense strand to SEQ ID NO: 2506358
aagcacaauucgcuccuuc

SEQ ID NO: 2506360 - RNA, 19 nt, Artificial Sequence
  Description of Artificial Sequence: Synthetic oligonucleotide
  Sense strand starting at position 2253 of SEQ ID NO: 1888040
ugugcuuaccucuaaguuu

SEQ ID NO: 2506361 - RNA, 19 nt, Artificial Sequence
  Description of Artificial Sequence: Synthetic oligonucleotide
  Antisense strand to SEQ ID NO: 2506360
aaacuuagagguaagcaca

SEQ ID NO: 2506362 - RNA, 19 nt, Artificial Sequence
  Description of Artificial Sequence: Synthetic oligonucleotide
  Sense strand starting at position 2292 of SEQ ID NO: 1888040
caacgugguggcuaguuau

SEQ ID NO: 2506363 - RNA, 19 nt, Artificial Sequence
  Description of Artificial Sequence: Synthetic oligonucleotide
  Antisense strand to SEQ ID NO: 2506362
auaacuagccaccacguug

SEQ ID NO: 2506364 - RNA, 19 nt, Artificial Sequence
  Description of Artificial Sequence: Synthetic oligonucleotide
  Sense strand starting at position 2298 of SEQ ID NO: 1888040
gguggcuaguuauuauauc

SEQ ID NO: 2506365 - RNA, 19 nt, Artificial Sequence
  Description of Artificial Sequence: Synthetic oligonucleotide
  Antisense strand to SEQ ID NO: 2506364
gauauaauaacuagccacc

SEQ ID NO: 2506366 - RNA, 19 nt, Artificial Sequence
  Description of Artificial Sequence: Synthetic oligonucleotide
  Sense strand starting at position 3569 of SEQ ID NO: 1888040
ggcuuaagucuguaguccu

SEQ ID NO: 2506367 - RNA, 19 nt, Artificial Sequence
  Description of Artificial Sequence: Synthetic oligonucleotide
  Antisense strand to SEQ ID NO: 2506366
aggacuacagacuuaagcc

SEQ ID NO: 2506368 - RNA, 19 nt, Artificial Sequence
  Description of Artificial Sequence: Synthetic oligonucleotide
  Sense strand starting at position 3665 of SEQ ID NO: 1888040
ugcacuuuagcucagguaa

SEQ ID NO: 2506369 - RNA, 19 nt, Artificial Sequence
  Description of Artificial Sequence: Synthetic oligonucleotide
  Antisense strand to SEQ ID NO: 2506368
uuaccugagcuaaagugca

SEQ ID NO: 2506370 - RNA, 19 nt, Artificial Sequence
  Description of Artificial Sequence: Synthetic oligonucleotide
  Sense strand starting at position 3865 of SEQ ID NO: 1888040
guuugcucuguguagguaa

SEQ ID NO: 2506371 - RNA, 19 nt, Artificial Sequence
  Description of Artificial Sequence: Synthetic oligonucleotide
  Antisense strand to SEQ ID NO: 2506370
uuaccuacacagagcaaac

SEQ ID NO: 2506372 - RNA, 19 nt, Artificial Sequence
  Description of Artificial Sequence: Synthetic oligonucleotide
  Sense strand starting at position 4 of SEQ ID NO: 1888041
cacugaugguaagaaguga

SEQ ID NO: 2506373 - RNA, 19 nt, Artificial Sequence
  Description of Artificial Sequence: Synthetic oligonucleotide
  Antisense strand to SEQ ID NO: 2506372
ucacuucuuaccaucagug

SEQ ID NO: 2506374 - RNA, 19 nt, Artificial Sequence
  Description of Artificial Sequence: Synthetic oligonucleotide
  Sense strand starting at position 60 of SEQ ID NO: 1888041
uuaggauccucugaaagca

SEQ ID NO: 2506375 - RNA, 19 nt, Artificial Sequence
  Description of Artificial Sequence: Synthetic oligonucleotide
  Antisense strand to SEQ ID NO: 2506374
ugcuuucagaggauccuaa

SEQ ID NO: 2506376 - RNA, 19 nt, Artificial Sequence
  Description of Artificial Sequence: Synthetic oligonucleotide
  Sense strand starting at position 200 of SEQ ID NO: 1888041
ugugccuccaaggaagaau

SEQ ID NO: 2506377 - RNA, 19 nt, Artificial Sequence
  Description of Artificial Sequence: Synthetic oligonucleotide
  Antisense strand to SEQ ID NO: 2506376
auucuuccuuggaggcaca

SEQ ID NO: 2506378 - RNA, 19 nt, Artificial Sequence
  Description of Artificial Sequence: Synthetic oligonucleotide
  Sense strand starting at position 333 of SEQ ID NO: 1888041
ugagaaagauaacaaguaa

SEQ ID NO: 2506379 - RNA, 19 nt, Artificial Sequence
  Description of Artificial Sequence: Synthetic oligonucleotide
  Antisense strand to SEQ ID NO: 2506378
uuacuuguuaucuuucuca

SEQ ID NO: 2506380 - RNA, 19 nt, Artificial Sequence
  Description of Artificial Sequence: Synthetic oligonucleotide
  Sense strand starting at position 352 of SEQ ID NO: 1888041
gcaauaaguaaguguuagu

SEQ ID NO: 2506381 - RNA, 19 nt, Artificial Sequence
  Description of Artificial Sequence: Synthetic oligonucleotide
  Antisense strand to SEQ ID NO: 2506380
acuaacacuuacuuauugc

SEQ ID NO: 2506382 - RNA, 19 nt, Artificial Sequence
  Description of Artificial Sequence: Synthetic oligonucleotide
  Sense strand starting at position 357 of SEQ ID NO: 1888041
aaguaaguguuaguaaaug

SEQ ID NO: 2506383 - RNA, 19 nt, Artificial Sequence
  Description of Artificial Sequence: Synthetic oligonucleotide
  Antisense strand to SEQ ID NO: 2506382
cauuuacuaacacuuacuu

SEQ ID NO: 2506384 - RNA, 19 nt, Artificial Sequence
  Description of Artificial Sequence: Synthetic oligonucleotide
  Sense strand starting at position 367 of SEQ ID NO: 1888041
uaguaaaugcuaugaagua

SEQ ID NO: 2506385 - RNA, 19 nt, Artificial Sequence
  Description of Artificial Sequence: Synthetic oligonucleotide
  Antisense strand to SEQ ID NO: 2506384
uacuucauagcauuuacua

SEQ ID NO: 2506386 - RNA, 19 nt, Artificial Sequence
  Description of Artificial Sequence: Synthetic oligonucleotide
  Sense strand starting at position 419 of SEQ ID NO: 1888041
ggagaaagguccuagacag

SEQ ID NO: 2506387 - RNA, 19 nt, Artificial Sequence
  Description of Artificial Sequence: Synthetic oligonucleotide
  Antisense strand to SEQ ID NO: 2506386
cugucuaggaccuuucucc

SEQ ID NO: 2506388 - RNA, 19 nt, Artificial Sequence
  Description of Artificial Sequence: Synthetic oligonucleotide
  Sense strand starting at position 831 of SEQ ID NO: 1888041
ucggaauaacccuggaaua

SEQ ID NO: 2506389 - RNA, 19 nt, Artificial Sequence
  Description of Artificial Sequence: Synthetic oligonucleotide
  Antisense strand to SEQ ID NO: 2506388
uauuccaggguuauuccga

SEQ ID NO: 2506390 - RNA, 19 nt, Artificial Sequence
  Description of Artificial Sequence: Synthetic oligonucleotide
  Sense strand starting at position 832 of SEQ ID NO: 1888041
cggaauaacccuggaauau

SEQ ID NO: 2506391 - RNA, 19 nt, Artificial Sequence
  Description of Artificial Sequence: Synthetic oligonucleotide
  Antisense strand to SEQ ID NO: 2506390
auauuccaggguuauuccg

SEQ ID NO: 2506392 - RNA, 19 nt, Artificial Sequence
  Description of Artificial Sequence: Synthetic oligonucleotide
  Sense strand starting at position 932 of SEQ ID NO: 1888041
uuuguaaaccacgguaaau

SEQ ID NO: 2506393 - RNA, 19 nt, Artificial Sequence
  Description of Artificial Sequence: Synthetic oligonucleotide
  Antisense strand to SEQ ID NO: 2506392
auuuaccgugguuuacaaa

SEQ ID NO: 2506394 - RNA, 19 nt, Artificial Sequence
  Description of Artificial Sequence: Synthetic oligonucleotide
  Sense strand starting at position 934 of SEQ ID NO: 1888041
uguaaaccacgguaaauaa

SEQ ID NO: 2506395 - RNA, 19 nt, Artificial Sequence
  Description of Artificial Sequence: Synthetic oligonucleotide
  Antisense strand to SEQ ID NO: 2506394
uuauuuaccgugguuuaca

SEQ ID NO: 2506396 - RNA, 19 nt, Artificial Sequence
  Description of Artificial Sequence: Synthetic oligonucleotide
  Sense strand starting at position 970 of SEQ ID NO: 1888041
gccacuuuccgagguagau

SEQ ID NO: 2506397 - RNA, 19 nt, Artificial Sequence
  Description of Artificial Sequence: Synthetic oligonucleotide
  Antisense strand to SEQ ID NO: 2506396
aucuaccucggaaaguggc

SEQ ID NO: 2506398 - RNA, 19 nt, Artificial Sequence
  Description of Artificial Sequence: Synthetic oligonucleotide
  Sense strand starting at position 1020 of SEQ ID NO: 1888041
aauggaggcucagugagau

SEQ ID NO: 2506399 - RNA, 19 nt, Artificial Sequence
  Description of Artificial Sequence: Synthetic oligonucleotide
  Antisense strand to SEQ ID NO: 2506398
aucucacugagccuccauu

SEQ ID NO: 2506400 - RNA, 19 nt, Artificial Sequence
  Description of Artificial Sequence: Synthetic oligonucleotide
  Sense strand starting at position 1073 of SEQ ID NO: 1888041
aggcuacgucuggaaugaa

SEQ ID NO: 2506401 - RNA, 19 nt, Artificial Sequence
  Description of Artificial Sequence: Synthetic oligonucleotide
  Antisense strand to SEQ ID NO: 2506400
uucauuccagacguagccu

SEQ ID NO: 2506402 - RNA, 19 nt, Artificial Sequence
  Description of Artificial Sequence: Synthetic oligonucleotide
  Sense strand starting at position 1111 of SEQ ID NO: 1888041
aagucuaugcuccgaacca

SEQ ID NO: 2506403 - RNA, 19 nt, Artificial Sequence
  Description of Artificial Sequence: Synthetic oligonucleotide
  Antisense strand to SEQ ID NO: 2506402
ugguucggagcauagacuu

SEQ ID NO: 2506404 - RNA, 19 nt, Artificial Sequence
  Description of Artificial Sequence: Synthetic oligonucleotide
  Sense strand starting at position 1190 of SEQ ID NO: 1888041
uuucuaugucccgggugua

SEQ ID NO: 2506405 - RNA, 19 nt, Artificial Sequence
  Description of Artificial Sequence: Synthetic oligonucleotide
  Antisense strand to SEQ ID NO: 2506404
uacacccgggacauagaaa

SEQ ID NO: 2506406 - RNA, 19 nt, Artificial Sequence
  Description of Artificial Sequence: Synthetic oligonucleotide
  Sense strand starting at position 1202 of SEQ ID NO: 1888041
ggguguaccgacuagaauu

SEQ ID NO: 2506407 - RNA, 19 nt, Artificial Sequence
  Description of Artificial Sequence: Synthetic oligonucleotide
  Antisense strand to SEQ ID NO: 2506406
aauucuagucgguacaccc

SEQ ID NO: 2506408 - RNA, 19 nt, Artificial Sequence
  Description of Artificial Sequence: Synthetic oligonucleotide
  Sense strand starting at position 1210 of SEQ ID NO: 1888041
cgacuagaauucucacaaa

SEQ ID NO: 2506409 - RNA, 19 nt, Artificial Sequence
  Description of Artificial Sequence: Synthetic oligonucleotide
  Antisense strand to SEQ ID NO: 2506408
uuugugagaauucuagucg

SEQ ID NO: 2506410 - RNA, 19 nt, Artificial Sequence
  Description of Artificial Sequence: Synthetic oligonucleotide
  Sense strand starting at position 1506 of SEQ ID NO: 1888041
cgccgugauggagaggaaa

SEQ ID NO: 2506411 - RNA, 19 nt, Artificial Sequence
  Description of Artificial Sequence: Synthetic oligonucleotide
  Antisense strand to SEQ ID NO: 2506410
uuuccucuccaucacggcg

SEQ ID NO: 2506412 - RNA, 19 nt, Artificial Sequence
  Description of Artificial Sequence: Synthetic oligonucleotide
  Sense strand starting at position 1730 of SEQ ID NO: 1888041
ucccuagcgcucguuagua

SEQ ID NO: 2506413 - RNA, 19 nt, Artificial Sequence
  Description of Artificial Sequence: Synthetic oligonucleotide
  Antisense strand to SEQ ID NO: 2506412
uacuaacgagcgcuaggga

SEQ ID NO: 2506414 - RNA, 19 nt, Artificial Sequence
  Description of Artificial Sequence: Synthetic oligonucleotide
  Sense strand starting at position 2072 of SEQ ID NO: 1888041
gcucuuuggcucugaccau

SEQ ID NO: 2506415 - RNA, 19 nt, Artificial Sequence
  Description of Artificial Sequence: Synthetic oligonucleotide
  Antisense strand to SEQ ID NO: 2506414
auggucagagccaaagagc

SEQ ID NO: 2506416 - RNA, 19 nt, Artificial Sequence
  Description of Artificial Sequence: Synthetic oligonucleotide
  Sense strand starting at position 2183 of SEQ ID NO: 1888041
gcacguaggagguguucaa

SEQ ID NO: 2506417 - RNA, 19 nt, Artificial Sequence
  Description of Artificial Sequence: Synthetic oligonucleotide
  Antisense strand to SEQ ID NO: 2506416
uugaacaccuccuacgugc

SEQ ID NO: 2506418 - RNA, 19 nt, Artificial Sequence
  Description of Artificial Sequence: Synthetic oligonucleotide
  Sense strand starting at position 2187 of SEQ ID NO: 1888041
guaggagguguucaauguu

SEQ ID NO: 2506419 - RNA, 19 nt, Artificial Sequence
  Description of Artificial Sequence: Synthetic oligonucleotide
  Antisense strand to SEQ ID NO: 2506418
aacauugaacaccuccuac

SEQ ID NO: 2506420 - RNA, 19 nt, Artificial Sequence
  Description of Artificial Sequence: Synthetic oligonucleotide
  Sense strand starting at position 2190 of SEQ ID NO: 1888041
ggagguguucaauguugau

SEQ ID NO: 2506421 - RNA, 19 nt, Artificial Sequence
  Description of Artificial Sequence: Synthetic oligonucleotide
  Antisense strand to SEQ ID NO: 2506420
aucaacauugaacaccucc

SEQ ID NO: 2506422 - RNA, 19 nt, Artificial Sequence
  Description of Artificial Sequence: Synthetic oligonucleotide
  Sense strand starting at position 2194 of SEQ ID NO: 1888041
guguucaauguugaucgau

SEQ ID NO: 2506423 - RNA, 19 nt, Artificial Sequence
  Description of Artificial Sequence: Synthetic oligonucleotide
  Antisense strand to SEQ ID NO: 2506422
aucgaucaacauugaacac

SEQ ID NO: 2506424 - RNA, 19 nt, Artificial Sequence
  Description of Artificial Sequence: Synthetic oligonucleotide
  Sense strand starting at position 2586 of SEQ ID NO: 1888041
ugggauguucuagauuccu

SEQ ID NO: 2506425 - RNA, 19 nt, Artificial Sequence
  Description of Artificial Sequence: Synthetic oligonucleotide
  Antisense strand to SEQ ID NO: 2506424
aggaaucuagaacauccca

SEQ ID NO: 2506426 - RNA, 19 nt, Artificial Sequence
  Description of Artificial Sequence: Synthetic oligonucleotide
  Sense strand starting at position 2591 of SEQ ID NO: 1888041
uguucuagauuccugaaug

SEQ ID NO: 2506427 - RNA, 19 nt, Artificial Sequence
  Description of Artificial Sequence: Synthetic oligonucleotide
  Antisense strand to SEQ ID NO: 2506426
cauucaggaaucuagaaca

SEQ ID NO: 2506428 - RNA, 19 nt, Artificial Sequence
  Description of Artificial Sequence: Synthetic oligonucleotide
  Sense strand starting at position 2607 of SEQ ID NO: 1888041
augauuggcuccuucuuua

SEQ ID NO: 2506429 - RNA, 19 nt, Artificial Sequence
  Description of Artificial Sequence: Synthetic oligonucleotide
  Antisense strand to SEQ ID NO: 2506428
uaaagaaggagccaaucau

SEQ ID NO: 2506430 - RNA, 19 nt, Artificial Sequence
  Description of Artificial Sequence: Synthetic oligonucleotide
  Sense strand starting at position 2742 of SEQ ID NO: 1888041
ugcccaggucaauguaaau

SEQ ID NO: 2506431 - RNA, 19 nt, Artificial Sequence
  Description of Artificial Sequence: Synthetic oligonucleotide
  Antisense strand to SEQ ID NO: 2506430
auuuacauugaccugggca

SEQ ID NO: 2506432 - RNA, 19 nt, Artificial Sequence
  Description of Artificial Sequence: Synthetic oligonucleotide
  Sense strand starting at position 2787 of SEQ ID NO: 1888041
guauaaauacuguguagga

SEQ ID NO: 2506433 - RNA, 19 nt, Artificial Sequence
  Description of Artificial Sequence: Synthetic oligonucleotide
  Antisense strand to SEQ ID NO: 2506432
uccuacacaguauuuauac

SEQ ID NO: 2506434 - RNA, 19 nt, Artificial Sequence
  Description of Artificial Sequence: Synthetic oligonucleotide
  Sense strand starting at position 2791 of SEQ ID NO: 1888041
aaauacuguguaggacaua

SEQ ID NO: 2506435 - RNA, 19 nt, Artificial Sequence
  Description of Artificial Sequence: Synthetic oligonucleotide
  Antisense strand to SEQ ID NO: 2506434
uauguccuacacaguauuu

SEQ ID NO: 2506436 - RNA, 19 nt, Artificial Sequence
  Description of Artificial Sequence: Synthetic oligonucleotide
  Sense strand starting at position 2792 of SEQ ID NO: 1888041
aauacuguguaggacauau

SEQ ID NO: 2506437 - RNA, 19 nt, Artificial Sequence
  Description of Artificial Sequence: Synthetic oligonucleotide
  Antisense strand to SEQ ID NO: 2506436
auauguccuacacaguauu

SEQ ID NO: 2506438 - RNA, 19 nt, Artificial Sequence
  Description of Artificial Sequence: Synthetic oligonucleotide
  Sense strand starting at position 2824 of SEQ ID NO: 1888041
ucaugcauugcuuaucuga

SEQ ID NO: 2506439 - RNA, 19 nt, Artificial Sequence
  Description of Artificial Sequence: Synthetic oligonucleotide
  Antisense strand to SEQ ID NO: 2506438
ucagauaagcaaugcauga

SEQ ID NO: 2506440 - RNA, 19 nt, Artificial Sequence
  Description of Artificial Sequence: Synthetic oligonucleotide
  Sense strand starting at position 2826 of SEQ ID NO: 1888041
augcauugcuuaucugaaa

SEQ ID NO: 2506441 - RNA, 19 nt, Artificial Sequence
  Description of Artificial Sequence: Synthetic oligonucleotide
  Antisense strand to SEQ ID NO: 2506440
uuucagauaagcaaugcau

SEQ ID NO: 2506442 - RNA, 19 nt, Artificial Sequence
  Description of Artificial Sequence: Synthetic oligonucleotide
  Sense strand starting at position 2827 of SEQ ID NO: 1888041
ugcauugcuuaucugaaau

SEQ ID NO: 2506443 - RNA, 19 nt, Artificial Sequence
  Description of Artificial Sequence: Synthetic oligonucleotide
  Antisense strand to SEQ ID NO: 2506442
auuucagauaagcaaugca

SEQ ID NO: 2506444 - RNA, 19 nt, Artificial Sequence
  Description of Artificial Sequence: Synthetic oligonucleotide
  Sense strand starting at position 2856 of SEQ ID NO: 1888041
cugggugcccaguguuuga

SEQ ID NO: 2506445 - RNA, 19 nt, Artificial Sequence
  Description of Artificial Sequence: Synthetic oligonucleotide
  Antisense strand to SEQ ID NO: 2506444
ucaaacacugggcacccag

SEQ ID NO: 2506446 - RNA, 19 nt, Artificial Sequence
  Description of Artificial Sequence: Synthetic oligonucleotide
  Sense strand starting at position 2865 of SEQ ID NO: 1888041
caguguuugaucugguaag

SEQ ID NO: 2506447 - RNA, 19 nt, Artificial Sequence
  Description of Artificial Sequence: Synthetic oligonucleotide
  Antisense strand to SEQ ID NO: 2506446
cuuaccagaucaaacacug

SEQ ID NO: 2506448 - RNA, 19 nt, Artificial Sequence
  Description of Artificial Sequence: Synthetic oligonucleotide
  Sense strand starting at position 2882 of SEQ ID NO: 1888041
agccuaguuccaugauauc

SEQ ID NO: 2506449 - RNA, 19 nt, Artificial Sequence
  Description of Artificial Sequence: Synthetic oligonucleotide
  Antisense strand to SEQ ID NO: 2506448
gauaucauggaacuaggcu

SEQ ID NO: 2506450 - RNA, 19 nt, Artificial Sequence
  Description of Artificial Sequence: Synthetic oligonucleotide
  Sense strand starting at position 3644 of SEQ ID NO: 1888041
cgguaaucccagugauuug

SEQ ID NO: 2506451 - RNA, 19 nt, Artificial Sequence
  Description of Artificial Sequence: Synthetic oligonucleotide
  Antisense strand to SEQ ID NO: 2506450
caaaucacugggauuaccg

SEQ ID NO: 2506452 - RNA, 19 nt, Artificial Sequence
  Description of Artificial Sequence: Synthetic oligonucleotide
  Sense strand starting at position 116 of SEQ ID NO: 1888042
auguaucuuucuccaugga

SEQ ID NO: 2506453 - RNA, 19 nt, Artificial Sequence
  Description of Artificial Sequence: Synthetic oligonucleotide
  Antisense strand to SEQ ID NO: 2506452
uccauggagaaagauacau

SEQ ID NO: 2506454 - RNA, 19 nt, Artificial Sequence
  Description of Artificial Sequence: Synthetic oligonucleotide
  Sense strand starting at position 1163 of SEQ ID NO: 1888042
aagcccuugcuguauagaa

SEQ ID NO: 2506455 - RNA, 19 nt, Artificial Sequence
  Description of Artificial Sequence: Synthetic oligonucleotide
  Antisense strand to SEQ ID NO: 2506454
uucuauacagcaagggcuu

SEQ ID NO: 2506456 - RNA, 19 nt, Artificial Sequence
  Description of Artificial Sequence: Synthetic oligonucleotide
  Sense strand starting at position 1165 of SEQ ID NO: 1888042
gcccuugcuguauagaauc

SEQ ID NO: 2506457 - RNA, 19 nt, Artificial Sequence
  Description of Artificial Sequence: Synthetic oligonucleotide
  Antisense strand to SEQ ID NO: 2506456
gauucuauacagcaagggc

SEQ ID NO: 2506458 - RNA, 19 nt, Artificial Sequence
  Description of Artificial Sequence: Synthetic oligonucleotide
  Sense strand starting at position 1173 of SEQ ID NO: 1888042
uguauagaaucccuuaggu

SEQ ID NO: 2506459 - RNA, 19 nt, Artificial Sequence
  Description of Artificial Sequence: Synthetic oligonucleotide
  Antisense strand to SEQ ID NO: 2506458
accuaagggauucuauaca

SEQ ID NO: 2506460 - RNA, 19 nt, Artificial Sequence
  Description of Artificial Sequence: Synthetic oligonucleotide
  Sense strand starting at position 1257 of SEQ ID NO: 1888042
agacaauuaguuggagagu

SEQ ID NO: 2506461 - RNA, 19 nt, Artificial Sequence
  Description of Artificial Sequence: Synthetic oligonucleotide
  Antisense strand to SEQ ID NO: 2506460
acucuccaacuaauugucu

SEQ ID NO: 2506462 - RNA, 19 nt, Artificial Sequence
  Description of Artificial Sequence: Synthetic oligonucleotide
  Sense strand starting at position 1263 of SEQ ID NO: 1888042
uuaguuggagagugauaaa

SEQ ID NO: 2506463 - RNA, 19 nt, Artificial Sequence
  Description of Artificial Sequence: Synthetic oligonucleotide
  Antisense strand to SEQ ID NO: 2506462
uuuaucacucuccaacuaa

SEQ ID NO: 2506464 - RNA, 19 nt, Artificial Sequence
  Description of Artificial Sequence: Synthetic oligonucleotide
  Sense strand starting at position 1349 of SEQ ID NO: 1888042
ucagauaagcaaugcauga

SEQ ID NO: 2506465 - RNA, 19 nt, Artificial Sequence
  Description of Artificial Sequence: Synthetic oligonucleotide
  Antisense strand to SEQ ID NO: 2506464
ucaugcauugcuuaucuga

SEQ ID NO: 2506466 - RNA, 19 nt, Artificial Sequence
  Description of Artificial Sequence: Synthetic oligonucleotide
  Sense strand starting at position 1375 of SEQ ID NO: 1888042
guauaaauauguccuacac

SEQ ID NO: 2506467 - RNA, 19 nt, Artificial Sequence
  Description of Artificial Sequence: Synthetic oligonucleotide
  Antisense strand to SEQ ID NO: 2506466
guguaggacauauuuauac

SEQ ID NO: 2506468 - RNA, 19 nt, Artificial Sequence
  Description of Artificial Sequence: Synthetic oligonucleotide
  Sense strand starting at position 1622 of SEQ ID NO: 1888042
guauaaaugcucuaaagug

SEQ ID NO: 2506469 - RNA, 19 nt, Artificial Sequence
  Description of Artificial Sequence: Synthetic oligonucleotide
  Antisense strand to SEQ ID NO: 2506468
cacuuuagagcauuuauac

SEQ ID NO: 2506470 - RNA, 19 nt, Artificial Sequence
  Description of Artificial Sequence: Synthetic oligonucleotide
  Sense strand starting at position 1640 of SEQ ID NO: 1888042
ggaaauaagcuuggagcuu

SEQ ID NO: 2506471 - RNA, 19 nt, Artificial Sequence
  Description of Artificial Sequence: Synthetic oligonucleotide
  Antisense strand to SEQ ID NO: 2506470
aagcuccaagcuuauuucc

SEQ ID NO: 2506472 - RNA, 19 nt, Artificial Sequence
  Description of Artificial Sequence: Synthetic oligonucleotide
  Sense strand starting at position 1766 of SEQ ID NO: 1888042
guuugugggcuguaauaag

SEQ ID NO: 2506473 - RNA, 19 nt, Artificial Sequence
  Description of Artificial Sequence: Synthetic oligonucleotide
  Antisense strand to SEQ ID NO: 2506472
cuuauuacagcccacaaac

SEQ ID NO: 2506474 - RNA, 19 nt, Artificial Sequence
  Description of Artificial Sequence: Synthetic oligonucleotide
  Sense strand starting at position 2110 of SEQ ID NO: 1888042
gccaaagagcauugucacu

SEQ ID NO: 2506475 - RNA, 19 nt, Artificial Sequence
  Description of Artificial Sequence: Synthetic oligonucleotide
  Antisense strand to SEQ ID NO: 2506474
agugacaaugcucuuuggc

SEQ ID NO: 2506476 - RNA, 19 nt, Artificial Sequence
  Description of Artificial Sequence: Synthetic oligonucleotide
  Sense strand starting at position 2115 of SEQ ID NO: 1888042
agagcauugucacuuguga

SEQ ID NO: 2506477 - RNA, 19 nt, Artificial Sequence
  Description of Artificial Sequence: Synthetic oligonucleotide
  Antisense strand to SEQ ID NO: 2506476
ucacaagugacaaugcucu

SEQ ID NO: 2506478 - RNA, 19 nt, Artificial Sequence
  Description of Artificial Sequence: Synthetic oligonucleotide
  Sense strand starting at position 2117 of SEQ ID NO: 1888042
agcauugucacuugugaga

SEQ ID NO: 2506479 - RNA, 19 nt, Artificial Sequence
  Description of Artificial Sequence: Synthetic oligonucleotide
  Antisense strand to SEQ ID NO: 2506478
ucucacaagugacaaugcu

SEQ ID NO: 2506480 - RNA, 19 nt, Artificial Sequence
  Description of Artificial Sequence: Synthetic oligonucleotide
  Sense strand starting at position 2130 of SEQ ID NO: 1888042
gugagaucagcgcagaaac

SEQ ID NO: 2506481 - RNA, 19 nt, Artificial Sequence
  Description of Artificial Sequence: Synthetic oligonucleotide
  Antisense strand to SEQ ID NO: 2506480
guuucugcgcugaucucac

SEQ ID NO: 2506482 - RNA, 19 nt, Artificial Sequence
  Description of Artificial Sequence: Synthetic oligonucleotide
  Sense strand starting at position 2861 of SEQ ID NO: 1888042
uugcccuaacucuagugaa

SEQ ID NO: 2506483 - RNA, 19 nt, Artificial Sequence
  Description of Artificial Sequence: Synthetic oligonucleotide
  Antisense strand to SEQ ID NO: 2506482
uucacuagaguuagggcaa

SEQ ID NO: 2506484 - RNA, 19 nt, Artificial Sequence
  Description of Artificial Sequence: Synthetic oligonucleotide
  Sense strand starting at position 2911 of SEQ ID NO: 1888042
acuuguaucccugacugua

SEQ ID NO: 2506485 - RNA, 19 nt, Artificial Sequence
  Description of Artificial Sequence: Synthetic oligonucleotide
  Antisense strand to SEQ ID NO: 2506484
uacagucagggauacaagu

SEQ ID NO: 2506486 - RNA, 19 nt, Artificial Sequence
  Description of Artificial Sequence: Synthetic oligonucleotide
  Sense strand starting at position 2913 of SEQ ID NO: 1888042
uuguaucccugacuguaaa

SEQ ID NO: 2506487 - RNA, 19 nt, Artificial Sequence
  Description of Artificial Sequence: Synthetic oligonucleotide
  Antisense strand to SEQ ID NO: 2506486
uuuacagucagggauacaa

SEQ ID NO: 2506488 - RNA, 19 nt, Artificial Sequence
  Description of Artificial Sequence: Synthetic oligonucleotide
  Sense strand starting at position 2941 of SEQ ID NO: 1888042
gugaucucacuuugcugaa

SEQ ID NO: 2506489 - RNA, 19 nt, Artificial Sequence
  Description of Artificial Sequence: Synthetic oligonucleotide
  Antisense strand to SEQ ID NO: 2506488
uucagcaaagugagaucac

SEQ ID NO: 2506490 - RNA, 19 nt, Artificial Sequence
  Description of Artificial Sequence: Synthetic oligonucleotide
  Sense strand starting at position 2942 of SEQ ID NO: 1888042
ugaucucacuuugcugaau

SEQ ID NO: 2506491 - RNA, 19 nt, Artificial Sequence
  Description of Artificial Sequence: Synthetic oligonucleotide
  Antisense strand to SEQ ID NO: 2506490
auucagcaaagugagauca

SEQ ID NO: 2506492 - RNA, 19 nt, Artificial Sequence
  Description of Artificial Sequence: Synthetic oligonucleotide
  Sense strand starting at position 2953 of SEQ ID NO: 1888042
ugcugaauuguuugugaga

SEQ ID NO: 2506493 - RNA, 19 nt, Artificial Sequence
  Description of Artificial Sequence: Synthetic oligonucleotide
  Antisense strand to SEQ ID NO: 2506492
ucucacaaacaauucagca

SEQ ID NO: 2506494 - RNA, 19 nt, Artificial Sequence
  Description of Artificial Sequence: Synthetic oligonucleotide
  Sense strand starting at position 2954 of SEQ ID NO: 1888042
gcugaauuguuugugagaa

SEQ ID NO: 2506495 - RNA, 19 nt, Artificial Sequence
  Description of Artificial Sequence: Synthetic oligonucleotide
  Antisense strand to SEQ ID NO: 2506494
uucucacaaacaauucagc

SEQ ID NO: 2506496 - RNA, 19 nt, Artificial Sequence
  Description of Artificial Sequence: Synthetic oligonucleotide
  Sense strand starting at position 2967 of SEQ ID NO: 1888042
ugagaauucuagucgguac

SEQ ID NO: 2506497 - RNA, 19 nt, Artificial Sequence
  Description of Artificial Sequence: Synthetic oligonucleotide
  Antisense strand to SEQ ID NO: 2506496
guaccgacuagaauucuca

SEQ ID NO: 2506498 - RNA, 19 nt, Artificial Sequence
  Description of Artificial Sequence: Synthetic oligonucleotide
  Sense strand starting at position 2968 of SEQ ID NO: 1888042
gagaauucuagucgguaca

SEQ ID NO: 2506499 - RNA, 19 nt, Artificial Sequence
  Description of Artificial Sequence: Synthetic oligonucleotide
  Antisense strand to SEQ ID NO: 2506498
uguaccgacuagaauucuc

SEQ ID NO: 2506500 - RNA, 19 nt, Artificial Sequence
  Description of Artificial Sequence: Synthetic oligonucleotide
  Sense strand starting at position 3069 of SEQ ID NO: 1888042
gagcauagacuuuggaauu

SEQ ID NO: 2506501 - RNA, 19 nt, Artificial Sequence
  Description of Artificial Sequence: Synthetic oligonucleotide
  Antisense strand to SEQ ID NO: 2506500
aauuccaaagucuaugcuc

SEQ ID NO: 2506502 - RNA, 19 nt, Artificial Sequence
  Description of Artificial Sequence: Synthetic oligonucleotide
  Sense strand starting at position 3082 of SEQ ID NO: 1888042
ggaauuagaucgccugggu

SEQ ID NO: 2506503 - RNA, 19 nt, Artificial Sequence
  Description of Artificial Sequence: Synthetic oligonucleotide
  Antisense strand to SEQ ID NO: 2506502
acccaggcgaucuaauucc

SEQ ID NO: 2506504 - RNA, 19 nt, Artificial Sequence
  Description of Artificial Sequence: Synthetic oligonucleotide
  Sense strand starting at position 3200 of SEQ ID NO: 1888042
agaaucuaccucggaaagu

SEQ ID NO: 2506505 - RNA, 19 nt, Artificial Sequence
  Description of Artificial Sequence: Synthetic oligonucleotide
  Antisense strand to SEQ ID NO: 2506504
acuuuccgagguagauucu

SEQ ID NO: 2506506 - RNA, 19 nt, Artificial Sequence
  Description of Artificial Sequence: Synthetic oligonucleotide
  Sense strand starting at position 3224 of SEQ ID NO: 1888042
ugaggaugcgcugaguuau

SEQ ID NO: 2506507 - RNA, 19 nt, Artificial Sequence
  Description of Artificial Sequence: Synthetic oligonucleotide
  Antisense strand to SEQ ID NO: 2506506
auaacucagcgcauccuca

SEQ ID NO: 2506508 - RNA, 19 nt, Artificial Sequence
  Description of Artificial Sequence: Synthetic oligonucleotide
  Sense strand starting at position 3238 of SEQ ID NO: 1888042
guuauuuaccgugguuuac

SEQ ID NO: 2506509 - RNA, 19 nt, Artificial Sequence
  Description of Artificial Sequence: Synthetic oligonucleotide
  Antisense strand to SEQ ID NO: 2506508
guaaaccacgguaaauaac

SEQ ID NO: 2506510 - RNA, 19 nt, Artificial Sequence
  Description of Artificial Sequence: Synthetic oligonucleotide
  Sense strand starting at position 3240 of SEQ ID NO: 1888042
uauuuaccgugguuuacaa

SEQ ID NO: 2506511 - RNA, 19 nt, Artificial Sequence
  Description of Artificial Sequence: Synthetic oligonucleotide
  Antisense strand to SEQ ID NO: 2506510
uuguaaaccacgguaaaua

SEQ ID NO: 2506512 - RNA, 19 nt, Artificial Sequence
  Description of Artificial Sequence: Synthetic oligonucleotide
  Sense strand starting at position 3337 of SEQ ID NO: 1888042
uuccauauuccaggguuau

SEQ ID NO: 2506513 - RNA, 19 nt, Artificial Sequence
  Description of Artificial Sequence: Synthetic oligonucleotide
  Antisense strand to SEQ ID NO: 2506512
auaacccuggaauauggaa

SEQ ID NO: 2506514 - RNA, 19 nt, Artificial Sequence
  Description of Artificial Sequence: Synthetic oligonucleotide
  Sense strand starting at position 3338 of SEQ ID NO: 1888042
uccauauuccaggguuauu

SEQ ID NO: 2506515 - RNA, 19 nt, Artificial Sequence
  Description of Artificial Sequence: Synthetic oligonucleotide
  Antisense strand to SEQ ID NO: 2506514
aauaacccuggaauaugga

SEQ ID NO: 2506516 - RNA, 19 nt, Artificial Sequence
  Description of Artificial Sequence: Synthetic oligonucleotide
  Sense strand starting at position 3347 of SEQ ID NO: 1888042
caggguuauuccgauuuaa

SEQ ID NO: 2506517 - RNA, 19 nt, Artificial Sequence
  Description of Artificial Sequence: Synthetic oligonucleotide
  Antisense strand to SEQ ID NO: 2506516
uuaaaucggaauaacccug

SEQ ID NO: 2506518 - RNA, 19 nt, Artificial Sequence
  Description of Artificial Sequence: Synthetic oligonucleotide
  Sense strand starting at position 3655 of SEQ ID NO: 1888042
agacuacaggucugagacu

SEQ ID NO: 2506519 - RNA, 19 nt, Artificial Sequence
  Description of Artificial Sequence: Synthetic oligonucleotide
  Antisense strand to SEQ ID NO: 2506518
agucucagaccuguagucu

SEQ ID NO: 2506520 - RNA, 19 nt, Artificial Sequence
  Description of Artificial Sequence: Synthetic oligonucleotide
  Sense strand starting at position 3733 of SEQ ID NO: 1888042
ugaucaggcugucuaauca

SEQ ID NO: 2506521 - RNA, 19 nt, Artificial Sequence
  Description of Artificial Sequence: Synthetic oligonucleotide
  Antisense strand to SEQ ID NO: 2506520
ugauuagacagccugauca

SEQ ID NO: 2506522 - RNA, 19 nt, Artificial Sequence
  Description of Artificial Sequence: Synthetic oligonucleotide
  Sense strand starting at position 3854 of SEQ ID NO: 1888042
ucucaacugcuagaaugua

SEQ ID NO: 2506523 - RNA, 19 nt, Artificial Sequence
  Description of Artificial Sequence: Synthetic oligonucleotide
  Antisense strand to SEQ ID NO: 2506522
uacauucuagcaguugaga

SEQ ID NO: 2506524 - RNA, 19 nt, Artificial Sequence
  Description of Artificial Sequence: Synthetic oligonucleotide
  Sense strand starting at position 3867 of SEQ ID NO: 1888042
aauguaagcuguuugagag

SEQ ID NO: 2506525 - RNA, 19 nt, Artificial Sequence
  Description of Artificial Sequence: Synthetic oligonucleotide
  Antisense strand to SEQ ID NO: 2506524
cucucaaacagcuuacauu

SEQ ID NO: 2506526 - RNA, 19 nt, Artificial Sequence
  Description of Artificial Sequence: Synthetic oligonucleotide
  Sense strand starting at position 3953 of SEQ ID NO: 1888042
augguagaugcacaaguau

SEQ ID NO: 2506527 - RNA, 19 nt, Artificial Sequence
  Description of Artificial Sequence: Synthetic oligonucleotide
  Antisense strand to SEQ ID NO: 2506526
auacuugugcaucuaccau

SEQ ID NO: 2506528 - RNA, 19 nt, Artificial Sequence
  Description of Artificial Sequence: Synthetic oligonucleotide
  Sense strand starting at position 3968 of SEQ ID NO: 1888042
guauuauucuuccuuggag

SEQ ID NO: 2506529 - RNA, 19 nt, Artificial Sequence
  Description of Artificial Sequence: Synthetic oligonucleotide
  Antisense strand to SEQ ID NO: 2506528
cuccaaggaagaauaauac

SEQ ID NO: 2506530 - RNA, 19 nt, Artificial Sequence
  Description of Artificial Sequence: Synthetic oligonucleotide
  Sense strand starting at position 3971 of SEQ ID NO: 1888042
uuauucuuccuuggaggca

SEQ ID NO: 2506531 - RNA, 19 nt, Artificial Sequence
  Description of Artificial Sequence: Synthetic oligonucleotide
  Antisense strand to SEQ ID NO: 2506530
ugccuccaaggaagaauaa

SEQ ID NO: 2506532 - RNA, 19 nt, Artificial Sequence
  Description of Artificial Sequence: Synthetic oligonucleotide
  Sense strand starting at position 46 of SEQ ID NO: 1888043
aagugcuguggguaauuau

SEQ ID NO: 2506533 - RNA, 19 nt, Artificial Sequence
  Description of Artificial Sequence: Synthetic oligonucleotide
  Antisense strand to SEQ ID NO: 2506532
auaauuacccacagcacuu

SEQ ID NO: 2506534 - RNA, 19 nt, Artificial Sequence
  Description of Artificial Sequence: Synthetic oligonucleotide
  Sense strand starting at position 149 of SEQ ID NO: 1888043
uagucucaggccuagaaca

SEQ ID NO: 2506535 - RNA, 19 nt, Artificial Sequence
  Description of Artificial Sequence: Synthetic oligonucleotide
  Antisense strand to SEQ ID NO: 2506534
uguucuaggccugagacua

SEQ ID NO: 2506536 - RNA, 19 nt, Artificial Sequence
  Description of Artificial Sequence: Synthetic oligonucleotide
  Sense strand starting at position 348 of SEQ ID NO: 1888043
ccacaucagucuccugaga

SEQ ID NO: 2506537 - RNA, 19 nt, Artificial Sequence
  Description of Artificial Sequence: Synthetic oligonucleotide
  Antisense strand to SEQ ID NO: 2506536
ucucaggagacugaugugg

SEQ ID NO: 2506538 - RNA, 19 nt, Artificial Sequence
  Description of Artificial Sequence: Synthetic oligonucleotide
  Sense strand starting at position 960 of SEQ ID NO: 1888043
aaagcuauuguuuaggaua

SEQ ID NO: 2506539 - RNA, 19 nt, Artificial Sequence
  Description of Artificial Sequence: Synthetic oligonucleotide
  Antisense strand to SEQ ID NO: 2506538
uauccuaaacaauagcuuu

SEQ ID NO: 2506540 - RNA, 19 nt, Artificial Sequence
  Description of Artificial Sequence: Synthetic oligonucleotide
  Sense strand starting at position 974 of SEQ ID NO: 1888043
ggauacagcugacuuagau

SEQ ID NO: 2506541 - RNA, 19 nt, Artificial Sequence
  Description of Artificial Sequence: Synthetic oligonucleotide
  Antisense strand to SEQ ID NO: 2506540
aucuaagucagcuguaucc

SEQ ID NO: 2506542 - RNA, 19 nt, Artificial Sequence
  Description of Artificial Sequence: Synthetic oligonucleotide
  Sense strand starting at position 986 of SEQ ID NO: 1888043
cuuagauuagggugcugau

SEQ ID NO: 2506543 - RNA, 19 nt, Artificial Sequence
  Description of Artificial Sequence: Synthetic oligonucleotide
  Antisense strand to SEQ ID NO: 2506542
aucagcacccuaaucuaag

SEQ ID NO: 2506544 - RNA, 19 nt, Artificial Sequence
  Description of Artificial Sequence: Synthetic oligonucleotide
  Sense strand starting at position 999 of SEQ ID NO: 1888043
gcugauauuagagacaguu

SEQ ID NO: 2506545 - RNA, 19 nt, Artificial Sequence
  Description of Artificial Sequence: Synthetic oligonucleotide
  Antisense strand to SEQ ID NO: 2506544
aacugucucuaauaucagc

SEQ ID NO: 2506546 - RNA, 19 nt, Artificial Sequence
  Description of Artificial Sequence: Synthetic oligonucleotide
  Sense strand starting at position 1221 of SEQ ID NO: 1888043
uaaucagagcuugguauca

SEQ ID NO: 2506547 - RNA, 19 nt, Artificial Sequence
  Description of Artificial Sequence: Synthetic oligonucleotide
  Antisense strand to SEQ ID NO: 2506546
ugauaccaagcucugauua

SEQ ID NO: 2506548 - RNA, 19 nt, Artificial Sequence
  Description of Artificial Sequence: Synthetic oligonucleotide
  Sense strand starting at position 1287 of SEQ ID NO: 1888043
ccaagucagcagugaauau

SEQ ID NO: 2506549 - RNA, 19 nt, Artificial Sequence
  Description of Artificial Sequence: Synthetic oligonucleotide
  Antisense strand to SEQ ID NO: 2506548
auauucacugcugacuugg

SEQ ID NO: 2506550 - RNA, 19 nt, Artificial Sequence
  Description of Artificial Sequence: Synthetic oligonucleotide
  Sense strand starting at position 1569 of SEQ ID NO: 1888043
ugggauuacagcgaguauu

SEQ ID NO: 2506551 - RNA, 19 nt, Artificial Sequence
  Description of Artificial Sequence: Synthetic oligonucleotide
  Antisense strand to SEQ ID NO: 2506550
aauacucgcuguaauccca

SEQ ID NO: 2506552 - RNA, 19 nt, Artificial Sequence
  Description of Artificial Sequence: Synthetic oligonucleotide
  Sense strand starting at position 1601 of SEQ ID NO: 1888043
uccacauauucgguaucua

SEQ ID NO: 2506553 - RNA, 19 nt, Artificial Sequence
  Description of Artificial Sequence: Synthetic oligonucleotide
  Antisense strand to SEQ ID NO: 2506552
uagauaccgaauaugugga

SEQ ID NO: 2506554 - RNA, 19 nt, Artificial Sequence
  Description of Artificial Sequence: Synthetic oligonucleotide
  Sense strand starting at position 1602 of SEQ ID NO: 1888043
ccacauauucgguaucuaa

SEQ ID NO: 2506555 - RNA, 19 nt, Artificial Sequence
  Description of Artificial Sequence: Synthetic oligonucleotide
  Antisense strand to SEQ ID NO: 2506554
uuagauaccgaauaugugg

SEQ ID NO: 2506556 - RNA, 19 nt, Artificial Sequence
  Description of Artificial Sequence: Synthetic oligonucleotide
  Sense strand starting at position 1678 of SEQ ID NO: 1888043
ucuagauauucguuccaac

SEQ ID NO: 2506557 - RNA, 19 nt, Artificial Sequence
  Description of Artificial Sequence: Synthetic oligonucleotide
  Antisense strand to SEQ ID NO: 2506556
guuggaacgaauaucuaga

SEQ ID NO: 2506558 - RNA, 19 nt, Artificial Sequence
  Description of Artificial Sequence: Synthetic oligonucleotide
  Sense strand starting at position 2057 of SEQ ID NO: 1888043
ccacuaagaucuguaggau

SEQ ID NO: 2506559 - RNA, 19 nt, Artificial Sequence
  Description of Artificial Sequence: Synthetic oligonucleotide
  Antisense strand to SEQ ID NO: 2506558
auccuacagaucuuagugg

SEQ ID NO: 2506560 - RNA, 19 nt, Artificial Sequence
  Description of Artificial Sequence: Synthetic oligonucleotide
  Sense strand starting at position 2060 of SEQ ID NO: 1888043
cuaagaucuguaggaucca

SEQ ID NO: 2506561 - RNA, 19 nt, Artificial Sequence
  Description of Artificial Sequence: Synthetic oligonucleotide
  Antisense strand to SEQ ID NO: 2506560
uggauccuacagaucuuag

SEQ ID NO: 2506562 - RNA, 19 nt, Artificial Sequence
  Description of Artificial Sequence: Synthetic oligonucleotide
  Sense strand starting at position 2111 of SEQ ID NO: 1888043
gguauuguugcuggauuuc

SEQ ID NO: 2506563 - RNA, 19 nt, Artificial Sequence
  Description of Artificial Sequence: Synthetic oligonucleotide
  Antisense strand to SEQ ID NO: 2506562
gaaauccagcaacaauacc

SEQ ID NO: 2506564 - RNA, 19 nt, Artificial Sequence
  Description of Artificial Sequence: Synthetic oligonucleotide
  Sense strand starting at position 2248 of SEQ ID NO: 1888043
agauaauggugccugaucu

SEQ ID NO: 2506565 - RNA, 19 nt, Artificial Sequence
  Description of Artificial Sequence: Synthetic oligonucleotide
  Antisense strand to SEQ ID NO: 2506564
agaucaggcaccauuaucu

SEQ ID NO: 2506566 - RNA, 19 nt, Artificial Sequence
  Description of Artificial Sequence: Synthetic oligonucleotide
  Sense strand starting at position 2249 of SEQ ID NO: 1888043
gauaauggugccugaucuc

SEQ ID NO: 2506567 - RNA, 19 nt, Artificial Sequence
  Description of Artificial Sequence: Synthetic oligonucleotide
  Antisense strand to SEQ ID NO: 2506566
gagaucaggcaccauuauc

SEQ ID NO: 2506568 - RNA, 19 nt, Artificial Sequence
  Description of Artificial Sequence: Synthetic oligonucleotide
  Sense strand starting at position 2252 of SEQ ID NO: 1888043
aauggugccugaucucaca

SEQ ID NO: 2506569 - RNA, 19 nt, Artificial Sequence
  Description of Artificial Sequence: Synthetic oligonucleotide
  Antisense strand to SEQ ID NO: 2506568
ugugagaucaggcaccauu

SEQ ID NO: 2506570 - RNA, 19 nt, Artificial Sequence
  Description of Artificial Sequence: Synthetic oligonucleotide
  Sense strand starting at position 2282 of SEQ ID NO: 1888043
cccugagggcugcauagaa

SEQ ID NO: 2506571 - RNA, 19 nt, Artificial Sequence
  Description of Artificial Sequence: Synthetic oligonucleotide
  Antisense strand to SEQ ID NO: 2506570
uucuaugcagcccucaggg

SEQ ID NO: 2506572 - RNA, 19 nt, Artificial Sequence
  Description of Artificial Sequence: Synthetic oligonucleotide
  Sense strand starting at position 2386 of SEQ ID NO: 1888043
uugauucuagcccagauaa

SEQ ID NO: 2506573 - RNA, 19 nt, Artificial Sequence
  Description of Artificial Sequence: Synthetic oligonucleotide
  Antisense strand to SEQ ID NO: 2506572
uuaucugggcuagaaucaa

SEQ ID NO: 2506574 - RNA, 19 nt, Artificial Sequence
  Description of Artificial Sequence: Synthetic oligonucleotide
  Sense strand starting at position 2491 of SEQ ID NO: 1888043
gaaugugcuguguaccaca

SEQ ID NO: 2506575 - RNA, 19 nt, Artificial Sequence
  Description of Artificial Sequence: Synthetic oligonucleotide
  Antisense strand to SEQ ID NO: 2506574
ugugguacacagcacauuc

SEQ ID NO: 2506576 - RNA, 19 nt, Artificial Sequence
  Description of Artificial Sequence: Synthetic oligonucleotide
  Sense strand starting at position 2510 of SEQ ID NO: 1888043
gggcagugugaggguaaau

SEQ ID NO: 2506577 - RNA, 19 nt, Artificial Sequence
  Description of Artificial Sequence: Synthetic oligonucleotide
  Antisense strand to SEQ ID NO: 2506576
auuuacccucacacugccc

SEQ ID NO: 2506578 - RNA, 19 nt, Artificial Sequence
  Description of Artificial Sequence: Synthetic oligonucleotide
  Sense strand starting at position 2569 of SEQ ID NO: 1888043
agaaauuggccaggugaaa

SEQ ID NO: 2506579 - RNA, 19 nt, Artificial Sequence
  Description of Artificial Sequence: Synthetic oligonucleotide
  Antisense strand to SEQ ID NO: 2506578
uuucaccuggccaauuucu

SEQ ID NO: 2506580 - RNA, 19 nt, Artificial Sequence
  Description of Artificial Sequence: Synthetic oligonucleotide
  Sense strand starting at position 2621 of SEQ ID NO: 1888043
uguggagaugcauauucca

SEQ ID NO: 2506581 - RNA, 19 nt, Artificial Sequence
  Description of Artificial Sequence: Synthetic oligonucleotide
  Antisense strand to SEQ ID NO: 2506580
uggaauaugcaucuccaca

SEQ ID NO: 2506582 - RNA, 19 nt, Artificial Sequence
  Description of Artificial Sequence: Synthetic oligonucleotide
  Sense strand starting at position 2624 of SEQ ID NO: 1888043
ggagaugcauauuccagaa

SEQ ID NO: 2506583 - RNA, 19 nt, Artificial Sequence
  Description of Artificial Sequence: Synthetic oligonucleotide
  Antisense strand to SEQ ID NO: 2506582
uucuggaauaugcaucucc

SEQ ID NO: 2506584 - RNA, 19 nt, Artificial Sequence
  Description of Artificial Sequence: Synthetic oligonucleotide
  Sense strand starting at position 2652 of SEQ ID NO: 1888043
ugugcaaagcccuaaggau

SEQ ID NO: 2506585 - RNA, 19 nt, Artificial Sequence
  Description of Artificial Sequence: Synthetic oligonucleotide
  Antisense strand to SEQ ID NO: 2506584
auccuuagggcuuugcaca

SEQ ID NO: 2506586 - RNA, 19 nt, Artificial Sequence
  Description of Artificial Sequence: Synthetic oligonucleotide
  Sense strand starting at position 2667 of SEQ ID NO: 1888043
ggauaagaauuguuuguga

SEQ ID NO: 2506587 - RNA, 19 nt, Artificial Sequence
  Description of Artificial Sequence: Synthetic oligonucleotide
  Antisense strand to SEQ ID NO: 2506586
ucacaaacaauucuuaucc

SEQ ID NO: 2506588 - RNA, 19 nt, Artificial Sequence
  Description of Artificial Sequence: Synthetic oligonucleotide
  Sense strand starting at position 2669 of SEQ ID NO: 1888043
auaagaauuguuugugaag

SEQ ID NO: 2506589 - RNA, 19 nt, Artificial Sequence
  Description of Artificial Sequence: Synthetic oligonucleotide
  Antisense strand to SEQ ID NO: 2506588
cuucacaaacaauucuuau

SEQ ID NO: 2506590 - RNA, 19 nt, Artificial Sequence
  Description of Artificial Sequence: Synthetic oligonucleotide
  Sense strand starting at position 2670 of SEQ ID NO: 1888043
uaagaauuguuugugaaga

SEQ ID NO: 2506591 - RNA, 19 nt, Artificial Sequence
  Description of Artificial Sequence: Synthetic oligonucleotide
  Antisense strand to SEQ ID NO: 2506590
ucuucacaaacaauucuua

SEQ ID NO: 2506592 - RNA, 19 nt, Artificial Sequence
  Description of Artificial Sequence: Synthetic oligonucleotide
  Sense strand starting at position 2908 of SEQ ID NO: 1888043
uguuaacagugacuaaauu

SEQ ID NO: 2506593 - RNA, 19 nt, Artificial Sequence
  Description of Artificial Sequence: Synthetic oligonucleotide
  Antisense strand to SEQ ID NO: 2506592
aauuuagucacuguuaaca

SEQ ID NO: 2506594 - RNA, 19 nt, Artificial Sequence
  Description of Artificial Sequence: Synthetic oligonucleotide
  Sense strand starting at position 2996 of SEQ ID NO: 1888043
guauuucucugacuugguu

SEQ ID NO: 2506595 - RNA, 19 nt, Artificial Sequence
  Description of Artificial Sequence: Synthetic oligonucleotide
  Antisense strand to SEQ ID NO: 2506594
aaccaagucagagaaauac

SEQ ID NO: 2506596 - RNA, 19 nt, Artificial Sequence
  Description of Artificial Sequence: Synthetic oligonucleotide
  Sense strand starting at position 3000 of SEQ ID NO: 1888043
uucucugacuugguuacaa

SEQ ID NO: 2506597 - RNA, 19 nt, Artificial Sequence
  Description of Artificial Sequence: Synthetic oligonucleotide
  Antisense strand to SEQ ID NO: 2506596
uuguaaccaagucagagaa

SEQ ID NO: 2506598 - RNA, 19 nt, Artificial Sequence
  Description of Artificial Sequence: Synthetic oligonucleotide
  Sense strand starting at position 3002 of SEQ ID NO: 1888043
cucugacuugguuacaaau

SEQ ID NO: 2506599 - RNA, 19 nt, Artificial Sequence
  Description of Artificial Sequence: Synthetic oligonucleotide
  Antisense strand to SEQ ID NO: 2506598
auuuguaaccaagucagag

SEQ ID NO: 2506600 - RNA, 19 nt, Artificial Sequence
  Description of Artificial Sequence: Synthetic oligonucleotide
  Sense strand starting at position 3046 of SEQ ID NO: 1888043
guaccuauaucuuuacuag

SEQ ID NO: 2506601 - RNA, 19 nt, Artificial Sequence
  Description of Artificial Sequence: Synthetic oligonucleotide
  Antisense strand to SEQ ID NO: 2506600
cuaguaaagauauagguac

SEQ ID NO: 2506602 - RNA, 19 nt, Artificial Sequence
  Description of Artificial Sequence: Synthetic oligonucleotide
  Sense strand starting at position 3086 of SEQ ID NO: 1888043
ccuguuucgguauaaacca

SEQ ID NO: 2506603 - RNA, 19 nt, Artificial Sequence
  Description of Artificial Sequence: Synthetic oligonucleotide
  Antisense strand to SEQ ID NO: 2506602
ugguuuauaccgaaacagg

SEQ ID NO: 2506604 - RNA, 19 nt, Artificial Sequence
  Description of Artificial Sequence: Synthetic oligonucleotide
  Sense strand starting at position 3662 of SEQ ID NO: 1888043
agggaguguguaugaggua

SEQ ID NO: 2506605 - RNA, 19 nt, Artificial Sequence
  Description of Artificial Sequence: Synthetic oligonucleotide
  Antisense strand to SEQ ID NO: 2506604
uaccucauacacacucccu

SEQ ID NO: 2506606 - RNA, 19 nt, Artificial Sequence
  Description of Artificial Sequence: Synthetic oligonucleotide
  Sense strand starting at position 3788 of SEQ ID NO: 1888043
gcaggaguucuccacguaa

SEQ ID NO: 2506607 - RNA, 19 nt, Artificial Sequence
  Description of Artificial Sequence: Synthetic oligonucleotide
  Antisense strand to SEQ ID NO: 2506606
uuacguggagaacuccugc

SEQ ID NO: 2506608 - RNA, 19 nt, Artificial Sequence
  Description of Artificial Sequence: Synthetic oligonucleotide
  Sense strand starting at position 3904 of SEQ ID NO: 1888043
auggcuaauucuuuaagua

SEQ ID NO: 2506609 - RNA, 19 nt, Artificial Sequence
  Description of Artificial Sequence: Synthetic oligonucleotide
  Antisense strand to SEQ ID NO: 2506608
uacuuaaagaauuagccau

SEQ ID NO: 2506610 - RNA, 19 nt, Artificial Sequence
  Description of Artificial Sequence: Synthetic oligonucleotide
  Sense strand starting at position 3905 of SEQ ID NO: 1888043
uggcuaauucuuuaaguaa

SEQ ID NO: 2506611 - RNA, 19 nt, Artificial Sequence
  Description of Artificial Sequence: Synthetic oligonucleotide
  Antisense strand to SEQ ID NO: 2506610
uuacuuaaagaauuagcca

SEQ ID NO: 2506612 - RNA, 19 nt, Artificial Sequence
  Description of Artificial Sequence: Synthetic oligonucleotide
  Sense strand starting at position 391 of SEQ ID NO: 1888044
cuuggcacugcugauuaaa

SEQ ID NO: 2506613 - RNA, 19 nt, Artificial Sequence
  Description of Artificial Sequence: Synthetic oligonucleotide
  Antisense strand to SEQ ID NO: 2506612
uuuaaucagcagugccaag

SEQ ID NO: 2506614 - RNA, 19 nt, Artificial Sequence
  Description of Artificial Sequence: Synthetic oligonucleotide
  Sense strand starting at position 425 of SEQ ID NO: 1888044
uuaacacagcggugauauu

SEQ ID NO: 2506615 - RNA, 19 nt, Artificial Sequence
  Description of Artificial Sequence: Synthetic oligonucleotide
  Antisense strand to SEQ ID NO: 2506614
aauaucaccgcuguguuaa

SEQ ID NO: 2506616 - RNA, 19 nt, Artificial Sequence
  Description of Artificial Sequence: Synthetic oligonucleotide
  Sense strand starting at position 510 of SEQ ID NO: 1888044
uuacaauugccugaguggu

SEQ ID NO: 2506617 - RNA, 19 nt, Artificial Sequence
  Description of Artificial Sequence: Synthetic oligonucleotide
  Antisense strand to SEQ ID NO: 2506616
accacucaggcaauuguaa

SEQ ID NO: 2506618 - RNA, 19 nt, Artificial Sequence
  Description of Artificial Sequence: Synthetic oligonucleotide
  Sense strand starting at position 518 of SEQ ID NO: 1888044
gccugagugguugagaugu

SEQ ID NO: 2506619 - RNA, 19 nt, Artificial Sequence
  Description of Artificial Sequence: Synthetic oligonucleotide
  Antisense strand to SEQ ID NO: 2506618
acaucucaaccacucaggc

SEQ ID NO: 2506620 - RNA, 19 nt, Artificial Sequence
  Description of Artificial Sequence: Synthetic oligonucleotide
  Sense strand starting at position 541 of SEQ ID NO: 1888044
gcagcaucuugguuauuuc

SEQ ID NO: 2506621 - RNA, 19 nt, Artificial Sequence
  Description of Artificial Sequence: Synthetic oligonucleotide
  Antisense strand to SEQ ID NO: 2506620
gaaauaaccaagaugcugc

SEQ ID NO: 2506622 - RNA, 19 nt, Artificial Sequence
  Description of Artificial Sequence: Synthetic oligonucleotide
  Sense strand starting at position 548 of SEQ ID NO: 1888044
cuugguuauuucuaacaug

SEQ ID NO: 2506623 - RNA, 19 nt, Artificial Sequence
  Description of Artificial Sequence: Synthetic oligonucleotide
  Antisense strand to SEQ ID NO: 2506622
cauguuagaaauaaccaag

SEQ ID NO: 2506624 - RNA, 19 nt, Artificial Sequence
  Description of Artificial Sequence: Synthetic oligonucleotide
  Sense strand starting at position 710 of SEQ ID NO: 1888044
gccaaagauugaguuaauc

SEQ ID NO: 2506625 - RNA, 19 nt, Artificial Sequence
  Description of Artificial Sequence: Synthetic oligonucleotide
  Antisense strand to SEQ ID NO: 2506624
gauuaacucaaucuuuggc

SEQ ID NO: 2506626 - RNA, 19 nt, Artificial Sequence
  Description of Artificial Sequence: Synthetic oligonucleotide
  Sense strand starting at position 719 of SEQ ID NO: 1888044
ugaguuaaucaaugaccag

SEQ ID NO: 2506627 - RNA, 19 nt, Artificial Sequence
  Description of Artificial Sequence: Synthetic oligonucleotide
  Antisense strand to SEQ ID NO: 2506626
cuggucauugauuaacuca

SEQ ID NO: 2506628 - RNA, 19 nt, Artificial Sequence
  Description of Artificial Sequence: Synthetic oligonucleotide
  Sense strand starting at position 722 of SEQ ID NO: 1888044
guuaaucaaugaccaguua

SEQ ID NO: 2506629 - RNA, 19 nt, Artificial Sequence
  Description of Artificial Sequence: Synthetic oligonucleotide
  Antisense strand to SEQ ID NO: 2506628
uaacuggucauugauuaac

SEQ ID NO: 2506630 - RNA, 19 nt, Artificial Sequence
  Description of Artificial Sequence: Synthetic oligonucleotide
  Sense strand starting at position 741 of SEQ ID NO: 1888044
aucaaccaugccugugaaa

SEQ ID NO: 2506631 - RNA, 19 nt, Artificial Sequence
  Description of Artificial Sequence: Synthetic oligonucleotide
  Antisense strand to SEQ ID NO: 2506630
uuucacaggcaugguugau

SEQ ID NO: 2506632 - RNA, 19 nt, Artificial Sequence
  Description of Artificial Sequence: Synthetic oligonucleotide
  Sense strand starting at position 743 of SEQ ID NO: 1888044
caaccaugccugugaaaug

SEQ ID NO: 2506633 - RNA, 19 nt, Artificial Sequence
  Description of Artificial Sequence: Synthetic oligonucleotide
  Antisense strand to SEQ ID NO: 2506632
cauuucacaggcaugguug

SEQ ID NO: 2506634 - RNA, 19 nt, Artificial Sequence
  Description of Artificial Sequence: Synthetic oligonucleotide
  Sense strand starting at position 770 of SEQ ID NO: 1888044
auugaaaccucagaaggau

SEQ ID NO: 2506635 - RNA, 19 nt, Artificial Sequence
  Description of Artificial Sequence: Synthetic oligonucleotide
  Antisense strand to SEQ ID NO: 2506634
auccuucugagguuucaau

SEQ ID NO: 2506636 - RNA, 19 nt, Artificial Sequence
  Description of Artificial Sequence: Synthetic oligonucleotide
  Sense strand starting at position 922 of SEQ ID NO: 1888044
gcauacuugauggaagcau

SEQ ID NO: 2506637 - RNA, 19 nt, Artificial Sequence
  Description of Artificial Sequence: Synthetic oligonucleotide
  Antisense strand to SEQ ID NO: 2506636
augcuuccaucaaguaugc

SEQ ID NO: 2506638 - RNA, 19 nt, Artificial Sequence
  Description of Artificial Sequence: Synthetic oligonucleotide
  Sense strand starting at position 1012 of SEQ ID NO: 1888044
uagguaaccgcuuggaaug

SEQ ID NO: 2506639 - RNA, 19 nt, Artificial Sequence
  Description of Artificial Sequence: Synthetic oligonucleotide
  Antisense strand to SEQ ID NO: 2506638
cauuccaagcgguuaccua

SEQ ID NO: 2506640 - RNA, 19 nt, Artificial Sequence
  Description of Artificial Sequence: Synthetic oligonucleotide
  Sense strand starting at position 1066 of SEQ ID NO: 1888044
gaauauaaaugagcaugua

SEQ ID NO: 2506641 - RNA, 19 nt, Artificial Sequence
  Description of Artificial Sequence: Synthetic oligonucleotide
  Antisense strand to SEQ ID NO: 2506640
uacaugcucauuuauauuc

SEQ ID NO: 2506642 - RNA, 19 nt, Artificial Sequence
  Description of Artificial Sequence: Synthetic oligonucleotide
  Sense strand starting at position 1103 of SEQ ID NO: 1888044
ccaguuaagauguguauag

SEQ ID NO: 2506643 - RNA, 19 nt, Artificial Sequence
  Description of Artificial Sequence: Synthetic oligonucleotide
  Antisense strand to SEQ ID NO: 2506642
cuauacacaucuuaacugg

SEQ ID NO: 2506644 - RNA, 19 nt, Artificial Sequence
  Description of Artificial Sequence: Synthetic oligonucleotide
  Sense strand starting at position 1104 of SEQ ID NO: 1888044
caguuaagauguguauaga

SEQ ID NO: 2506645 - RNA, 19 nt, Artificial Sequence
  Description of Artificial Sequence: Synthetic oligonucleotide
  Antisense strand to SEQ ID NO: 2506644
ucuauacacaucuuaacug

SEQ ID NO: 2506646 - RNA, 19 nt, Artificial Sequence
  Description of Artificial Sequence: Synthetic oligonucleotide
  Sense strand starting at position 1105 of SEQ ID NO: 1888044
aguuaagauguguauagag

SEQ ID NO: 2506647 - RNA, 19 nt, Artificial Sequence
  Description of Artificial Sequence: Synthetic oligonucleotide
  Antisense strand to SEQ ID NO: 2506646
cucuauacacaucuuaacu

SEQ ID NO: 2506648 - RNA, 19 nt, Artificial Sequence
  Description of Artificial Sequence: Synthetic oligonucleotide
  Sense strand starting at position 1141 of SEQ ID NO: 1888044
guaggcagaaaucauaagu

SEQ ID NO: 2506649 - RNA, 19 nt, Artificial Sequence
  Description of Artificial Sequence: Synthetic oligonucleotide
  Antisense strand to SEQ ID NO: 2506648
acuuaugauuucugccuac

SEQ ID NO: 2506650 - RNA, 19 nt, Artificial Sequence
  Description of Artificial Sequence: Synthetic oligonucleotide
  Sense strand starting at position 1146 of SEQ ID NO: 1888044
cagaaaucauaaguugugu

SEQ ID NO: 2506651 - RNA, 19 nt, Artificial Sequence
  Description of Artificial Sequence: Synthetic oligonucleotide
  Antisense strand to SEQ ID NO: 2506650
acacaacuuaugauuucug

SEQ ID NO: 2506652 - RNA, 19 nt, Artificial Sequence
  Description of Artificial Sequence: Synthetic oligonucleotide
  Sense strand starting at position 1151 of SEQ ID NO: 1888044
aucauaaguuguguuaaug

SEQ ID NO: 2506653 - RNA, 19 nt, Artificial Sequence
  Description of Artificial Sequence: Synthetic oligonucleotide
  Antisense strand to SEQ ID NO: 2506652
cauuaacacaacuuaugau

SEQ ID NO: 2506654 - RNA, 19 nt, Artificial Sequence
  Description of Artificial Sequence: Synthetic oligonucleotide
  Sense strand starting at position 1157 of SEQ ID NO: 1888044
aguuguguuaaugaaagau

SEQ ID NO: 2506655 - RNA, 19 nt, Artificial Sequence
  Description of Artificial Sequence: Synthetic oligonucleotide
  Antisense strand to SEQ ID NO: 2506654
aucuuucauuaacacaacu

SEQ ID NO: 2506656 - RNA, 19 nt, Artificial Sequence
  Description of Artificial Sequence: Synthetic oligonucleotide
  Sense strand starting at position 1161 of SEQ ID NO: 1888044
guguuaaugaaagauaugu

SEQ ID NO: 2506657 - RNA, 19 nt, Artificial Sequence
  Description of Artificial Sequence: Synthetic oligonucleotide
  Antisense strand to SEQ ID NO: 2506656
acauaucuuucauuaacac

SEQ ID NO: 2506658 - RNA, 19 nt, Artificial Sequence
  Description of Artificial Sequence: Synthetic oligonucleotide
  Sense strand starting at position 1180 of SEQ ID NO: 1888044
ggagguagcguauaucuaa

SEQ ID NO: 2506659 - RNA, 19 nt, Artificial Sequence
  Description of Artificial Sequence: Synthetic oligonucleotide
  Antisense strand to SEQ ID NO: 2506658
uuagauauacgcuaccucc

SEQ ID NO: 2506660 - RNA, 19 nt, Artificial Sequence
  Description of Artificial Sequence: Synthetic oligonucleotide
  Sense strand starting at position 1571 of SEQ ID NO: 1888044
ggcagauggucuccucacu

SEQ ID NO: 2506661 - RNA, 19 nt, Artificial Sequence
  Description of Artificial Sequence: Synthetic oligonucleotide
  Antisense strand to SEQ ID NO: 2506660
agugaggagaccaucugcc

SEQ ID NO: 2506662 - RNA, 19 nt, Artificial Sequence
  Description of Artificial Sequence: Synthetic oligonucleotide
  Sense strand starting at position 2140 of SEQ ID NO: 1888044
gcagaagucccucaccuuu

SEQ ID NO: 2506663 - RNA, 19 nt, Artificial Sequence
  Description of Artificial Sequence: Synthetic oligonucleotide
  Antisense strand to SEQ ID NO: 2506662
aaaggugagggacuucugc

SEQ ID NO: 2506664 - RNA, 19 nt, Artificial Sequence
  Description of Artificial Sequence: Synthetic oligonucleotide
  Sense strand starting at position 2437 of SEQ ID NO: 1888044
accucuguggagugaacaa

SEQ ID NO: 2506665 - RNA, 19 nt, Artificial Sequence
  Description of Artificial Sequence: Synthetic oligonucleotide
  Antisense strand to SEQ ID NO: 2506664
uuguucacuccacagaggu

SEQ ID NO: 2506666 - RNA, 19 nt, Artificial Sequence
  Description of Artificial Sequence: Synthetic oligonucleotide
  Sense strand starting at position 2520 of SEQ ID NO: 1888044
gcaugucccagguaagcau

SEQ ID NO: 2506667 - RNA, 19 nt, Artificial Sequence
  Description of Artificial Sequence: Synthetic oligonucleotide
  Antisense strand to SEQ ID NO: 2506666
augcuuaccugggacaugc

SEQ ID NO: 2506668 - RNA, 19 nt, Artificial Sequence
  Description of Artificial Sequence: Synthetic oligonucleotide
  Sense strand starting at position 2784 of SEQ ID NO: 1888044
gaaagucggcccugauaau

SEQ ID NO: 2506669 - RNA, 19 nt, Artificial Sequence
  Description of Artificial Sequence: Synthetic oligonucleotide
  Antisense strand to SEQ ID NO: 2506668
auuaucagggccgacuuuc

SEQ ID NO: 2506670 - RNA, 19 nt, Artificial Sequence
  Description of Artificial Sequence: Synthetic oligonucleotide
  Sense strand starting at position 2793 of SEQ ID NO: 1888044
cccugauaaucccuggguu

SEQ ID NO: 2506671 - RNA, 19 nt, Artificial Sequence
  Description of Artificial Sequence: Synthetic oligonucleotide
  Antisense strand to SEQ ID NO: 2506670
aacccagggauuaucaggg

SEQ ID NO: 2506672 - RNA, 19 nt, Artificial Sequence
  Description of Artificial Sequence: Synthetic oligonucleotide
  Sense strand starting at position 2794 of SEQ ID NO: 1888044
ccugauaaucccuggguua

SEQ ID NO: 2506673 - RNA, 19 nt, Artificial Sequence
  Description of Artificial Sequence: Synthetic oligonucleotide
  Antisense strand to SEQ ID NO: 2506672
uaacccagggauuaucagg

SEQ ID NO: 2506674 - RNA, 19 nt, Artificial Sequence
  Description of Artificial Sequence: Synthetic oligonucleotide
  Sense strand starting at position 2795 of SEQ ID NO: 1888044
cugauaaucccuggguuaa

SEQ ID NO: 2506675 - RNA, 19 nt, Artificial Sequence
  Description of Artificial Sequence: Synthetic oligonucleotide
  Antisense strand to SEQ ID NO: 2506674
uuaacccagggauuaucag

SEQ ID NO: 2506676 - RNA, 19 nt, Artificial Sequence
  Description of Artificial Sequence: Synthetic oligonucleotide
  Sense strand starting at position 2796 of SEQ ID NO: 1888044
ugauaaucccuggguuaaa

SEQ ID NO: 2506677 - RNA, 19 nt, Artificial Sequence
  Description of Artificial Sequence: Synthetic oligonucleotide
  Antisense strand to SEQ ID NO: 2506676
uuuaacccagggauuauca

SEQ ID NO: 2506678 - RNA, 19 nt, Artificial Sequence
  Description of Artificial Sequence: Synthetic oligonucleotide
  Sense strand starting at position 2797 of SEQ ID NO: 1888044
gauaaucccuggguuaaag

SEQ ID NO: 2506679 - RNA, 19 nt, Artificial Sequence
  Description of Artificial Sequence: Synthetic oligonucleotide
  Antisense strand to SEQ ID NO: 2506678
cuuuaacccagggauuauc

SEQ ID NO: 2506680 - RNA, 19 nt, Artificial Sequence
  Description of Artificial Sequence: Synthetic oligonucleotide
  Sense strand starting at position 2815 of SEQ ID NO: 1888044
ggcccaaguguuugaaacu

SEQ ID NO: 2506681 - RNA, 19 nt, Artificial Sequence
  Description of Artificial Sequence: Synthetic oligonucleotide
  Antisense strand to SEQ ID NO: 2506680
aguuucaaacacuugggcc

SEQ ID NO: 2506682 - RNA, 19 nt, Artificial Sequence
  Description of Artificial Sequence: Synthetic oligonucleotide
  Sense strand starting at position 2821 of SEQ ID NO: 1888044
aguguuugaaacugaauug

SEQ ID NO: 2506683 - RNA, 19 nt, Artificial Sequence
  Description of Artificial Sequence: Synthetic oligonucleotide
  Antisense strand to SEQ ID NO: 2506682
caauucaguuucaaacacu

SEQ ID NO: 2506684 - RNA, 19 nt, Artificial Sequence
  Description of Artificial Sequence: Synthetic oligonucleotide
  Sense strand starting at position 3167 of SEQ ID NO: 1888044
acacaucaguugucugaaa

SEQ ID NO: 2506685 - RNA, 19 nt, Artificial Sequence
  Description of Artificial Sequence: Synthetic oligonucleotide
  Antisense strand to SEQ ID NO: 2506684
uuucagacaacugaugugu

SEQ ID NO: 2506686 - RNA, 19 nt, Artificial Sequence
  Description of Artificial Sequence: Synthetic oligonucleotide
  Sense strand starting at position 3234 of SEQ ID NO: 1888044
acaucuuguguccaaagca

SEQ ID NO: 2506687 - RNA, 19 nt, Artificial Sequence
  Description of Artificial Sequence: Synthetic oligonucleotide
  Antisense strand to SEQ ID NO: 2506686
ugcuuuggacacaagaugu

SEQ ID NO: 2506688 - RNA, 19 nt, Artificial Sequence
  Description of Artificial Sequence: Synthetic oligonucleotide
  Sense strand starting at position 3603 of SEQ ID NO: 1888044
cugguugcucugggaacua

SEQ ID NO: 2506689 - RNA, 19 nt, Artificial Sequence
  Description of Artificial Sequence: Synthetic oligonucleotide
  Antisense strand to SEQ ID NO: 2506688
uaguucccagagcaaccag

SEQ ID NO: 2506690 - RNA, 19 nt, Artificial Sequence
  Description of Artificial Sequence: Synthetic oligonucleotide
  Sense strand starting at position 3837 of SEQ ID NO: 1888044
agucaaugacuuuaguaua

SEQ ID NO: 2506691 - RNA, 19 nt, Artificial Sequence
  Description of Artificial Sequence: Synthetic oligonucleotide
  Antisense strand to SEQ ID NO: 2506690
uauacuaaagucauugacu

SEQ ID NO: 2506692 - RNA, 19 nt, Artificial Sequence
  Description of Artificial Sequence: Synthetic oligonucleotide
  Sense strand starting at position 5 of SEQ ID NO: 1888045
aaacguuuguguguaaagu

SEQ ID NO: 2506693 - RNA, 19 nt, Artificial Sequence
  Description of Artificial Sequence: Synthetic oligonucleotide
  Antisense strand to SEQ ID NO: 2506692
acuuuacacacaaacguuu

SEQ ID NO: 2506694 - RNA, 19 nt, Artificial Sequence
  Description of Artificial Sequence: Synthetic oligonucleotide
  Sense strand starting at position 6 of SEQ ID NO: 1888045
aacguuuguguguaaagug

SEQ ID NO: 2506695 - RNA, 19 nt, Artificial Sequence
  Description of Artificial Sequence: Synthetic oligonucleotide
  Antisense strand to SEQ ID NO: 2506694
cacuuuacacacaaacguu

SEQ ID NO: 2506696 - RNA, 19 nt, Artificial Sequence
  Description of Artificial Sequence: Synthetic oligonucleotide
  Sense strand starting at position 167 of SEQ ID NO: 1888045
uagggaguguauucuauga

SEQ ID NO: 2506697 - RNA, 19 nt, Artificial Sequence
  Description of Artificial Sequence: Synthetic oligonucleotide
  Antisense strand to SEQ ID NO: 2506696
ucauagaauacacucccua

SEQ ID NO: 2506698 - RNA, 19 nt, Artificial Sequence
  Description of Artificial Sequence: Synthetic oligonucleotide
  Sense strand starting at position 169 of SEQ ID NO: 1888045
gggaguguauucuaugaga

SEQ ID NO: 2506699 - RNA, 19 nt, Artificial Sequence
  Description of Artificial Sequence: Synthetic oligonucleotide
  Antisense strand to SEQ ID NO: 2506698
ucucauagaauacacuccc

SEQ ID NO: 2506700 - RNA, 19 nt, Artificial Sequence
  Description of Artificial Sequence: Synthetic oligonucleotide
  Sense strand starting at position 171 of SEQ ID NO: 1888045
gaguguauucuaugagaug

SEQ ID NO: 2506701 - RNA, 19 nt, Artificial Sequence
  Description of Artificial Sequence: Synthetic oligonucleotide
  Antisense strand to SEQ ID NO: 2506700
caucucauagaauacacuc

SEQ ID NO: 2506702 - RNA, 19 nt, Artificial Sequence
  Description of Artificial Sequence: Synthetic oligonucleotide
  Sense strand starting at position 172 of SEQ ID NO: 1888045
aguguauucuaugagauga

SEQ ID NO: 2506703 - RNA, 19 nt, Artificial Sequence
  Description of Artificial Sequence: Synthetic oligonucleotide
  Antisense strand to SEQ ID NO: 2506702
ucaucucauagaauacacu

SEQ ID NO: 2506704 - RNA, 19 nt, Artificial Sequence
  Description of Artificial Sequence: Synthetic oligonucleotide
  Sense strand starting at position 174 of SEQ ID NO: 1888045
uguauucuaugagaugaac

SEQ ID NO: 2506705 - RNA, 19 nt, Artificial Sequence
  Description of Artificial Sequence: Synthetic oligonucleotide
  Antisense strand to SEQ ID NO: 2506704
guucaucucauagaauaca

SEQ ID NO: 2506706 - RNA, 19 nt, Artificial Sequence
  Description of Artificial Sequence: Synthetic oligonucleotide
  Sense strand starting at position 200 of SEQ ID NO: 1888045
cccuuugucuuucuuugau

SEQ ID NO: 2506707 - RNA, 19 nt, Artificial Sequence
  Description of Artificial Sequence: Synthetic oligonucleotide
  Antisense strand to SEQ ID NO: 2506706
aucaaagaaagacaaaggg

SEQ ID NO: 2506708 - RNA, 19 nt, Artificial Sequence
  Description of Artificial Sequence: Synthetic oligonucleotide
  Sense strand starting at position 260 of SEQ ID NO: 1888045
guagguugauccucuuguu

SEQ ID NO: 2506709 - RNA, 19 nt, Artificial Sequence
  Description of Artificial Sequence: Synthetic oligonucleotide
  Antisense strand to SEQ ID NO: 2506708
aacaagaggaucaaccuac

SEQ ID NO: 2506710 - RNA, 19 nt, Artificial Sequence
  Description of Artificial Sequence: Synthetic oligonucleotide
  Sense strand starting at position 292 of SEQ ID NO: 1888045
auuugaaacugugagaaca

SEQ ID NO: 2506711 - RNA, 19 nt, Artificial Sequence
  Description of Artificial Sequence: Synthetic oligonucleotide
  Antisense strand to SEQ ID NO: 2506710
uguucucacaguuucaaau

SEQ ID NO: 2506712 - RNA, 19 nt, Artificial Sequence
  Description of Artificial Sequence: Synthetic oligonucleotide
  Sense strand starting at position 294 of SEQ ID NO: 1888045
uugaaacugugagaacaau

SEQ ID NO: 2506713 - RNA, 19 nt, Artificial Sequence
  Description of Artificial Sequence: Synthetic oligonucleotide
  Antisense strand to SEQ ID NO: 2506712
auuguucucacaguuucaa

SEQ ID NO: 2506714 - RNA, 19 nt, Artificial Sequence
  Description of Artificial Sequence: Synthetic oligonucleotide
  Sense strand starting at position 303 of SEQ ID NO: 1888045
ugagaacaauuucgucacu

SEQ ID NO: 2506715 - RNA, 19 nt, Artificial Sequence
  Description of Artificial Sequence: Synthetic oligonucleotide
  Antisense strand to SEQ ID NO: 2506714
agugacgaaauuguucuca

SEQ ID NO: 2506716 - RNA, 19 nt, Artificial Sequence
  Description of Artificial Sequence: Synthetic oligonucleotide
  Sense strand starting at position 331 of SEQ ID NO: 1888045
uccugacauuguuuccaca

SEQ ID NO: 2506717 - RNA, 19 nt, Artificial Sequence
  Description of Artificial Sequence: Synthetic oligonucleotide
  Antisense strand to SEQ ID NO: 2506716
uguggaaacaaugucagga

SEQ ID NO: 2506718 - RNA, 19 nt, Artificial Sequence
  Description of Artificial Sequence: Synthetic oligonucleotide
  Sense strand starting at position 396 of SEQ ID NO: 1888045
ccugcucuuccucgagcua

SEQ ID NO: 2506719 - RNA, 19 nt, Artificial Sequence
  Description of Artificial Sequence: Synthetic oligonucleotide
  Antisense strand to SEQ ID NO: 2506718
uagcucgaggaagagcagg

SEQ ID NO: 2506720 - RNA, 19 nt, Artificial Sequence
  Description of Artificial Sequence: Synthetic oligonucleotide
  Sense strand starting at position 397 of SEQ ID NO: 1888045
cugcucuuccucgagcuaa

SEQ ID NO: 2506721 - RNA, 19 nt, Artificial Sequence
  Description of Artificial Sequence: Synthetic oligonucleotide
  Antisense strand to SEQ ID NO: 2506720
uuagcucgaggaagagcag

SEQ ID NO: 2506722 - RNA, 19 nt, Artificial Sequence
  Description of Artificial Sequence: Synthetic oligonucleotide
  Sense strand starting at position 507 of SEQ ID NO: 1888045
aguggaagauuaugcauca

SEQ ID NO: 2506723 - RNA, 19 nt, Artificial Sequence
  Description of Artificial Sequence: Synthetic oligonucleotide
  Antisense strand to SEQ ID NO: 2506722
ugaugcauaaucuuccacu

SEQ ID NO: 2506724 - RNA, 19 nt, Artificial Sequence
  Description of Artificial Sequence: Synthetic oligonucleotide
  Sense strand starting at position 529 of SEQ ID NO: 1888045
uguuaauuauuucgcauca

SEQ ID NO: 2506725 - RNA, 19 nt, Artificial Sequence
  Description of Artificial Sequence: Synthetic oligonucleotide
  Antisense strand to SEQ ID NO: 2506724
ugaugcgaaauaauuaaca

SEQ ID NO: 2506726 - RNA, 19 nt, Artificial Sequence
  Description of Artificial Sequence: Synthetic oligonucleotide
  Sense strand starting at position 549 of SEQ ID NO: 1888045
gguuguggcagugaaacuu

SEQ ID NO: 2506727 - RNA, 19 nt, Artificial Sequence
  Description of Artificial Sequence: Synthetic oligonucleotide
  Antisense strand to SEQ ID NO: 2506726
aaguuucacugccacaacc

SEQ ID NO: 2506728 - RNA, 19 nt, Artificial Sequence
  Description of Artificial Sequence: Synthetic oligonucleotide
  Sense strand starting at position 792 of SEQ ID NO: 1888045
guaccuugaucaguccagu

SEQ ID NO: 2506729 - RNA, 19 nt, Artificial Sequence
  Description of Artificial Sequence: Synthetic oligonucleotide
  Antisense strand to SEQ ID NO: 2506728
acuggacugaucaagguac

SEQ ID NO: 2506730 - RNA, 19 nt, Artificial Sequence
  Description of Artificial Sequence: Synthetic oligonucleotide
  Sense strand starting at position 795 of SEQ ID NO: 1888045
ccuugaucaguccaguagu

SEQ ID NO: 2506731 - RNA, 19 nt, Artificial Sequence
  Description of Artificial Sequence: Synthetic oligonucleotide
  Antisense strand to SEQ ID NO: 2506730
acuacuggacugaucaagg

SEQ ID NO: 2506732 - RNA, 19 nt, Artificial Sequence
  Description of Artificial Sequence: Synthetic oligonucleotide
  Sense strand starting at position 798 of SEQ ID NO: 1888045
ugaucaguccaguaguuuc

SEQ ID NO: 2506733 - RNA, 19 nt, Artificial Sequence
  Description of Artificial Sequence: Synthetic oligonucleotide
  Antisense strand to SEQ ID NO: 2506732
gaaacuacuggacugauca

SEQ ID NO: 2506734 - RNA, 19 nt, Artificial Sequence
  Description of Artificial Sequence: Synthetic oligonucleotide
  Sense strand starting at position 913 of SEQ ID NO: 1888045
cagcucuugcuggauacua

SEQ ID NO: 2506735 - RNA, 19 nt, Artificial Sequence
  Description of Artificial Sequence: Synthetic oligonucleotide
  Antisense strand to SEQ ID NO: 2506734
uaguauccagcaagagcug

SEQ ID NO: 2506736 - RNA, 19 nt, Artificial Sequence
  Description of Artificial Sequence: Synthetic oligonucleotide
  Sense strand starting at position 915 of SEQ ID NO: 1888045
gcucuugcuggauacuaau

SEQ ID NO: 2506737 - RNA, 19 nt, Artificial Sequence
  Description of Artificial Sequence: Synthetic oligonucleotide
  Antisense strand to SEQ ID NO: 2506736
auuaguauccagcaagagc

SEQ ID NO: 2506738 - RNA, 19 nt, Artificial Sequence
  Description of Artificial Sequence: Synthetic oligonucleotide
  Sense strand starting at position 1029 of SEQ ID NO: 1888045
gcuguaugcucagcaagcu

SEQ ID NO: 2506739 - RNA, 19 nt, Artificial Sequence
  Description of Artificial Sequence: Synthetic oligonucleotide
  Antisense strand to SEQ ID NO: 2506738
agcuugcugagcauacagc

SEQ ID NO: 2506740 - RNA, 19 nt, Artificial Sequence
  Description of Artificial Sequence: Synthetic oligonucleotide
  Sense strand starting at position 1217 of SEQ ID NO: 1888045
uggucuuucucucugcaca

SEQ ID NO: 2506741 - RNA, 19 nt, Artificial Sequence
  Description of Artificial Sequence: Synthetic oligonucleotide
  Antisense strand to SEQ ID NO: 2506740
ugugcagagagaaagacca

SEQ ID NO: 2506742 - RNA, 19 nt, Artificial Sequence
  Description of Artificial Sequence: Synthetic oligonucleotide
  Sense strand starting at position 1278 of SEQ ID NO: 1888045
acucgaguucuuugaucuu

SEQ ID NO: 2506743 - RNA, 19 nt, Artificial Sequence
  Description of Artificial Sequence: Synthetic oligonucleotide
  Antisense strand to SEQ ID NO: 2506742
aagaucaaagaacucgagu

SEQ ID NO: 2506744 - RNA, 19 nt, Artificial Sequence
  Description of Artificial Sequence: Synthetic oligonucleotide
  Sense strand starting at position 1281 of SEQ ID NO: 1888045
cgaguucuuugaucuuggu

SEQ ID NO: 2506745 - RNA, 19 nt, Artificial Sequence
  Description of Artificial Sequence: Synthetic oligonucleotide
  Antisense strand to SEQ ID NO: 2506744
accaagaucaaagaacucg

SEQ ID NO: 2506746 - RNA, 19 nt, Artificial Sequence
  Description of Artificial Sequence: Synthetic oligonucleotide
  Sense strand starting at position 1284 of SEQ ID NO: 1888045
guucuuugaucuuggugaa

SEQ ID NO: 2506747 - RNA, 19 nt, Artificial Sequence
  Description of Artificial Sequence: Synthetic oligonucleotide
  Antisense strand to SEQ ID NO: 2506746
uucaccaagaucaaagaac

SEQ ID NO: 2506748 - RNA, 19 nt, Artificial Sequence
  Description of Artificial Sequence: Synthetic oligonucleotide
  Sense strand starting at position 1285 of SEQ ID NO: 1888045
uucuuugaucuuggugaau

SEQ ID NO: 2506749 - RNA, 19 nt, Artificial Sequence
  Description of Artificial Sequence: Synthetic oligonucleotide
  Antisense strand to SEQ ID NO: 2506748
auucaccaagaucaaagaa

SEQ ID NO: 2506750 - RNA, 19 nt, Artificial Sequence
  Description of Artificial Sequence: Synthetic oligonucleotide
  Sense strand starting at position 1287 of SEQ ID NO: 1888045
cuuugaucuuggugaauug

SEQ ID NO: 2506751 - RNA, 19 nt, Artificial Sequence
  Description of Artificial Sequence: Synthetic oligonucleotide
  Antisense strand to SEQ ID NO: 2506750
caauucaccaagaucaaag

SEQ ID NO: 2506752 - RNA, 19 nt, Artificial Sequence
  Description of Artificial Sequence: Synthetic oligonucleotide
  Sense strand starting at position 1294 of SEQ ID NO: 1888045
cuuggugaauugcucagaa

SEQ ID NO: 2506753 - RNA, 19 nt, Artificial Sequence
  Description of Artificial Sequence: Synthetic oligonucleotide
  Antisense strand to SEQ ID NO: 2506752
uucugagcaauucaccaag

SEQ ID NO: 2506754 - RNA, 19 nt, Artificial Sequence
  Description of Artificial Sequence: Synthetic oligonucleotide
  Sense strand starting at position 1298 of SEQ ID NO: 1888045
gugaauugcucagaaagga

SEQ ID NO: 2506755 - RNA, 19 nt, Artificial Sequence
  Description of Artificial Sequence: Synthetic oligonucleotide
  Antisense strand to SEQ ID NO: 2506754
uccuuucugagcaauucac

SEQ ID NO: 2506756 - RNA, 19 nt, Artificial Sequence
  Description of Artificial Sequence: Synthetic oligonucleotide
  Sense strand starting at position 1339 of SEQ ID NO: 1888045
aaugacuuggccuguuuga

SEQ ID NO: 2506757 - RNA, 19 nt, Artificial Sequence
  Description of Artificial Sequence: Synthetic oligonucleotide
  Antisense strand to SEQ ID NO: 2506756
ucaaacaggccaagucauu

SEQ ID NO: 2506758 - RNA, 19 nt, Artificial Sequence
  Description of Artificial Sequence: Synthetic oligonucleotide
  Sense strand starting at position 1434 of SEQ ID NO: 1888045
aggcuuuggaguugaaaca

SEQ ID NO: 2506759 - RNA, 19 nt, Artificial Sequence
  Description of Artificial Sequence: Synthetic oligonucleotide
  Antisense strand to SEQ ID NO: 2506758
uguuucaacuccaaagccu

SEQ ID NO: 2506760 - RNA, 19 nt, Artificial Sequence
  Description of Artificial Sequence: Synthetic oligonucleotide
  Sense strand starting at position 1474 of SEQ ID NO: 1888045
uggacuuaguagggucaga

SEQ ID NO: 2506761 - RNA, 19 nt, Artificial Sequence
  Description of Artificial Sequence: Synthetic oligonucleotide
  Antisense strand to SEQ ID NO: 2506760
ucugacccuacuaagucca

SEQ ID NO: 2506762 - RNA, 19 nt, Artificial Sequence
  Description of Artificial Sequence: Synthetic oligonucleotide
  Sense strand starting at position 1479 of SEQ ID NO: 1888045
uuaguagggucagaacaau

SEQ ID NO: 2506763 - RNA, 19 nt, Artificial Sequence
  Description of Artificial Sequence: Synthetic oligonucleotide
  Antisense strand to SEQ ID NO: 2506762
auuguucugacccuacuaa

SEQ ID NO: 2506764 - RNA, 19 nt, Artificial Sequence
  Description of Artificial Sequence: Synthetic oligonucleotide
  Sense strand starting at position 1697 of SEQ ID NO: 1888045
ccgguucagucagugaaca

SEQ ID NO: 2506765 - RNA, 19 nt, Artificial Sequence
  Description of Artificial Sequence: Synthetic oligonucleotide
  Antisense strand to SEQ ID NO: 2506764
uguucacugacugaaccgg

SEQ ID NO: 2506766 - RNA, 19 nt, Artificial Sequence
  Description of Artificial Sequence: Synthetic oligonucleotide
  Sense strand starting at position 1698 of SEQ ID NO: 1888045
cgguucagucagugaacau

SEQ ID NO: 2506767 - RNA, 19 nt, Artificial Sequence
  Description of Artificial Sequence: Synthetic oligonucleotide
  Antisense strand to SEQ ID NO: 2506766
auguucacugacugaaccg

SEQ ID NO: 2506768 - RNA, 19 nt, Artificial Sequence
  Description of Artificial Sequence: Synthetic oligonucleotide
  Sense strand starting at position 2852 of SEQ ID NO: 1888045
ggugguggguaauggauaa

SEQ ID NO: 2506769 - RNA, 19 nt, Artificial Sequence
  Description of Artificial Sequence: Synthetic oligonucleotide
  Antisense strand to SEQ ID NO: 2506768
uuauccauuacccaccacc

SEQ ID NO: 2506770 - RNA, 19 nt, Artificial Sequence
  Description of Artificial Sequence: Synthetic oligonucleotide
  Sense strand starting at position 3019 of SEQ ID NO: 1888045
aggugaggguaauggauaa

SEQ ID NO: 2506771 - RNA, 19 nt, Artificial Sequence
  Description of Artificial Sequence: Synthetic oligonucleotide
  Antisense strand to SEQ ID NO: 2506770
uuauccauuacccucaccu

SEQ ID NO: 2506772 - RNA, 19 nt, Artificial Sequence
  Description of Artificial Sequence: Synthetic oligonucleotide
  Sense strand starting at position 55 of SEQ ID NO: 1888046
gccuaaggauucucccacu

SEQ ID NO: 2506773 - RNA, 19 nt, Artificial Sequence
  Description of Artificial Sequence: Synthetic oligonucleotide
  Antisense strand to SEQ ID NO: 2506772
agugggagaauccuuaggc

SEQ ID NO: 2506774 - RNA, 19 nt, Artificial Sequence
  Description of Artificial Sequence: Synthetic oligonucleotide
  Sense strand starting at position 285 of SEQ ID NO: 1888046
aguaucauuccuuaugauu

SEQ ID NO: 2506775 - RNA, 19 nt, Artificial Sequence
  Description of Artificial Sequence: Synthetic oligonucleotide
  Antisense strand to SEQ ID NO: 2506774
aaucauaaggaaugauacu

SEQ ID NO: 2506776 - RNA, 19 nt, Artificial Sequence
  Description of Artificial Sequence: Synthetic oligonucleotide
  Sense strand starting at position 291 of SEQ ID NO: 1888046
auuccuuaugauugacaga

SEQ ID NO: 2506777 - RNA, 19 nt, Artificial Sequence
  Description of Artificial Sequence: Synthetic oligonucleotide
  Antisense strand to SEQ ID NO: 2506776
ucugucaaucauaaggaau

SEQ ID NO: 2506778 - RNA, 19 nt, Artificial Sequence
  Description of Artificial Sequence: Synthetic oligonucleotide
  Sense strand starting at position 315 of SEQ ID NO: 1888046
gaaacaaauuugugaguuu

SEQ ID NO: 2506779 - RNA, 19 nt, Artificial Sequence
  Description of Artificial Sequence: Synthetic oligonucleotide
  Antisense strand to SEQ ID NO: 2506778
aaacucacaaauuuguuuc

SEQ ID NO: 2506780 - RNA, 19 nt, Artificial Sequence
  Description of Artificial Sequence: Synthetic oligonucleotide
  Sense strand starting at position 409 of SEQ ID NO: 1888046
agcuguuguggacaucuga

SEQ ID NO: 2506781 - RNA, 19 nt, Artificial Sequence
  Description of Artificial Sequence: Synthetic oligonucleotide
  Antisense strand to SEQ ID NO: 2506780
ucagauguccacaacagcu

SEQ ID NO: 2506782 - RNA, 19 nt, Artificial Sequence
  Description of Artificial Sequence: Synthetic oligonucleotide
  Sense strand starting at position 425 of SEQ ID NO: 1888046
ugaggagugguccagccaa

SEQ ID NO: 2506783 - RNA, 19 nt, Artificial Sequence
  Description of Artificial Sequence: Synthetic oligonucleotide
  Antisense strand to SEQ ID NO: 2506782
uuggcuggaccacuccuca

SEQ ID NO: 2506784 - RNA, 19 nt, Artificial Sequence
  Description of Artificial Sequence: Synthetic oligonucleotide
  Sense strand starting at position 452 of SEQ ID NO: 1888046
ugaauuguuacugguugga

SEQ ID NO: 2506785 - RNA, 19 nt, Artificial Sequence
  Description of Artificial Sequence: Synthetic oligonucleotide
  Antisense strand to SEQ ID NO: 2506784
uccaaccaguaacaauuca

SEQ ID NO: 2506786 - RNA, 19 nt, Artificial Sequence
  Description of Artificial Sequence: Synthetic oligonucleotide
  Sense strand starting at position 454 of SEQ ID NO: 1888046
aauuguuacugguuggauu

SEQ ID NO: 2506787 - RNA, 19 nt, Artificial Sequence
  Description of Artificial Sequence: Synthetic oligonucleotide
  Antisense strand to SEQ ID NO: 2506786
aauccaaccaguaacaauu

SEQ ID NO: 2506788 - RNA, 19 nt, Artificial Sequence
  Description of Artificial Sequence: Synthetic oligonucleotide
  Sense strand starting at position 462 of SEQ ID NO: 1888046
cugguuggauuguuaaaua

SEQ ID NO: 2506789 - RNA, 19 nt, Artificial Sequence
  Description of Artificial Sequence: Synthetic oligonucleotide
  Antisense strand to SEQ ID NO: 2506788
uauuuaacaauccaaccag

SEQ ID NO: 2506790 - RNA, 19 nt, Artificial Sequence
  Description of Artificial Sequence: Synthetic oligonucleotide
  Sense strand starting at position 503 of SEQ ID NO: 1888046
uuacgauuucggcagcgua

SEQ ID NO: 2506791 - RNA, 19 nt, Artificial Sequence
  Description of Artificial Sequence: Synthetic oligonucleotide
  Antisense strand to SEQ ID NO: 2506790
uacgcugccgaaaucguaa

SEQ ID NO: 2506792 - RNA, 19 nt, Artificial Sequence
  Description of Artificial Sequence: Synthetic oligonucleotide
  Sense strand starting at position 506 of SEQ ID NO: 1888046
cgauuucggcagcguauga

SEQ ID NO: 2506793 - RNA, 19 nt, Artificial Sequence
  Description of Artificial Sequence: Synthetic oligonucleotide
  Antisense strand to SEQ ID NO: 2506792
ucauacgcugccgaaaucg

SEQ ID NO: 2506794 - RNA, 19 nt, Artificial Sequence
  Description of Artificial Sequence: Synthetic oligonucleotide
  Sense strand starting at position 517 of SEQ ID NO: 1888046
gcguaugaugcugucuuca

SEQ ID NO: 2506795 - RNA, 19 nt, Artificial Sequence
  Description of Artificial Sequence: Synthetic oligonucleotide
  Antisense strand to SEQ ID NO: 2506794
ugaagacagcaucauacgc

SEQ ID NO: 2506796 - RNA, 19 nt, Artificial Sequence
  Description of Artificial Sequence: Synthetic oligonucleotide
  Sense strand starting at position 610 of SEQ ID NO: 1888046
agauguuaguaucccucaa

SEQ ID NO: 2506797 - RNA, 19 nt, Artificial Sequence
  Description of Artificial Sequence: Synthetic oligonucleotide
  Antisense strand to SEQ ID NO: 2506796
uugagggauacuaacaucu

SEQ ID NO: 2506798 - RNA, 19 nt, Artificial Sequence
  Description of Artificial Sequence: Synthetic oligonucleotide
  Sense strand starting at position 771 of SEQ ID NO: 1888046
aacugagagcuccgaaguu

SEQ ID NO: 2506799 - RNA, 19 nt, Artificial Sequence
  Description of Artificial Sequence: Synthetic oligonucleotide
  Antisense strand to SEQ ID NO: 2506798
aacuucggagcucucaguu

SEQ ID NO: 2506800 - RNA, 19 nt, Artificial Sequence
  Description of Artificial Sequence: Synthetic oligonucleotide
  Sense strand starting at position 916 of SEQ ID NO: 1888046
aggacaugaucaccuguaa

SEQ ID NO: 2506801 - RNA, 19 nt, Artificial Sequence
  Description of Artificial Sequence: Synthetic oligonucleotide
  Antisense strand to SEQ ID NO: 2506800
uuacaggugaucauguccu

SEQ ID NO: 2506802 - RNA, 19 nt, Artificial Sequence
  Description of Artificial Sequence: Synthetic oligonucleotide
  Sense strand starting at position 1221 of SEQ ID NO: 1888046
agcaguaugccaugaccaa

SEQ ID NO: 2506803 - RNA, 19 nt, Artificial Sequence
  Description of Artificial Sequence: Synthetic oligonucleotide
  Antisense strand to SEQ ID NO: 2506802
uuggucauggcauacugcu

SEQ ID NO: 2506804 - RNA, 19 nt, Artificial Sequence
  Description of Artificial Sequence: Synthetic oligonucleotide
  Sense strand starting at position 1638 of SEQ ID NO: 1888046
ugagaugauccugggcaaa

SEQ ID NO: 2506805 - RNA, 19 nt, Artificial Sequence
  Description of Artificial Sequence: Synthetic oligonucleotide
  Antisense strand to SEQ ID NO: 2506804
uuugcccaggaucaucuca

SEQ ID NO: 2506806 - RNA, 19 nt, Artificial Sequence
  Description of Artificial Sequence: Synthetic oligonucleotide
  Sense strand starting at position 1754 of SEQ ID NO: 1888046
ccgagagagguucacguua

SEQ ID NO: 2506807 - RNA, 19 nt, Artificial Sequence
  Description of Artificial Sequence: Synthetic oligonucleotide
  Antisense strand to SEQ ID NO: 2506806
uaacgugaaccucucucgg

SEQ ID NO: 2506808 - RNA, 19 nt, Artificial Sequence
  Description of Artificial Sequence: Synthetic oligonucleotide
  Sense strand starting at position 1759 of SEQ ID NO: 1888046
agagguucacguuaccuga

SEQ ID NO: 2506809 - RNA, 19 nt, Artificial Sequence
  Description of Artificial Sequence: Synthetic oligonucleotide
  Antisense strand to SEQ ID NO: 2506808
ucagguaacgugaaccucu

SEQ ID NO: 2506810 - RNA, 19 nt, Artificial Sequence
  Description of Artificial Sequence: Synthetic oligonucleotide
  Sense strand starting at position 1961 of SEQ ID NO: 1888046
ggauuuauaugaggucauc

SEQ ID NO: 2506811 - RNA, 19 nt, Artificial Sequence
  Description of Artificial Sequence: Synthetic oligonucleotide
  Antisense strand to SEQ ID NO: 2506810
gaugaccucauauaaaucc

SEQ ID NO: 2506812 - RNA, 19 nt, Artificial Sequence
  Description of Artificial Sequence: Synthetic oligonucleotide
  Sense strand starting at position 1970 of SEQ ID NO: 1888046
ugaggucauccaggccaaa

SEQ ID NO: 2506813 - RNA, 19 nt, Artificial Sequence
  Description of Artificial Sequence: Synthetic oligonucleotide
  Antisense strand to SEQ ID NO: 2506812
uuuggccuggaugaccuca

SEQ ID NO: 2506814 - RNA, 19 nt, Artificial Sequence
  Description of Artificial Sequence: Synthetic oligonucleotide
  Sense strand starting at position 2037 of SEQ ID NO: 1888046
gaaacuggccaguaccaau

SEQ ID NO: 2506815 - RNA, 19 nt, Artificial Sequence
  Description of Artificial Sequence: Synthetic oligonucleotide
  Antisense strand to SEQ ID NO: 2506814
auugguacuggccaguuuc

SEQ ID NO: 2506816 - RNA, 19 nt, Artificial Sequence
  Description of Artificial Sequence: Synthetic oligonucleotide
  Sense strand starting at position 2081 of SEQ ID NO: 1888046
agccauuuggccugugaga

SEQ ID NO: 2506817 - RNA, 19 nt, Artificial Sequence
  Description of Artificial Sequence: Synthetic oligonucleotide
  Antisense strand to SEQ ID NO: 2506816
ucucacaggccaaauggcu

SEQ ID NO: 2506818 - RNA, 19 nt, Artificial Sequence
  Description of Artificial Sequence: Synthetic oligonucleotide
  Sense strand starting at position 2281 of SEQ ID NO: 1888046
gguacuugcugauuugcaa

SEQ ID NO: 2506819 - RNA, 19 nt, Artificial Sequence
  Description of Artificial Sequence: Synthetic oligonucleotide
  Antisense strand to SEQ ID NO: 2506818
uugcaaaucagcaaguacc

SEQ ID NO: 2506820 - RNA, 19 nt, Artificial Sequence
  Description of Artificial Sequence: Synthetic oligonucleotide
  Sense strand starting at position 2333 of SEQ ID NO: 1888046
uugucauguuuggugacaa

SEQ ID NO: 2506821 - RNA, 19 nt, Artificial Sequence
  Description of Artificial Sequence: Synthetic oligonucleotide
  Antisense strand to SEQ ID NO: 2506820
uugucaccaaacaugacaa

SEQ ID NO: 2506822 - RNA, 19 nt, Artificial Sequence
  Description of Artificial Sequence: Synthetic oligonucleotide
  Sense strand starting at position 2345 of SEQ ID NO: 1888046
gugacaauauuguucucca

SEQ ID NO: 2506823 - RNA, 19 nt, Artificial Sequence
  Description of Artificial Sequence: Synthetic oligonucleotide
  Antisense strand to SEQ ID NO: 2506822
uggagaacaauauugucac

SEQ ID NO: 2506824 - RNA, 19 nt, Artificial Sequence
  Description of Artificial Sequence: Synthetic oligonucleotide
  Sense strand starting at position 2353 of SEQ ID NO: 1888046
auuguucuccaugauuaug

SEQ ID NO: 2506825 - RNA, 19 nt, Artificial Sequence
  Description of Artificial Sequence: Synthetic oligonucleotide
  Antisense strand to SEQ ID NO: 2506824
cauaaucauggagaacaau

SEQ ID NO: 2506826 - RNA, 19 nt, Artificial Sequence
  Description of Artificial Sequence: Synthetic oligonucleotide
  Sense strand starting at position 2355 of SEQ ID NO: 1888046
uguucuccaugauuauguu

SEQ ID NO: 2506827 - RNA, 19 nt, Artificial Sequence
  Description of Artificial Sequence: Synthetic oligonucleotide
  Antisense strand to SEQ ID NO: 2506826
aacauaaucauggagaaca

SEQ ID NO: 2506828 - RNA, 19 nt, Artificial Sequence
  Description of Artificial Sequence: Synthetic oligonucleotide
  Sense strand starting at position 2361 of SEQ ID NO: 1888046
ccaugauuauguucuguuu

SEQ ID NO: 2506829 - RNA, 19 nt, Artificial Sequence
  Description of Artificial Sequence: Synthetic oligonucleotide
  Antisense strand to SEQ ID NO: 2506828
aaacagaacauaaucaugg

SEQ ID NO: 2506830 - RNA, 19 nt, Artificial Sequence
  Description of Artificial Sequence: Synthetic oligonucleotide
  Sense strand starting at position 2890 of SEQ ID NO: 1888046
aucuguucucccuguaaag

SEQ ID NO: 2506831 - RNA, 19 nt, Artificial Sequence
  Description of Artificial Sequence: Synthetic oligonucleotide
  Antisense strand to SEQ ID NO: 2506830
cuuuacagggagaacagau

SEQ ID NO: 2506832 - RNA, 19 nt, Artificial Sequence
  Description of Artificial Sequence: Synthetic oligonucleotide
  Sense strand starting at position 2892 of SEQ ID NO: 1888046
cuguucucccuguaaagcu

SEQ ID NO: 2506833 - RNA, 19 nt, Artificial Sequence
  Description of Artificial Sequence: Synthetic oligonucleotide
  Antisense strand to SEQ ID NO: 2506832
agcuuuacagggagaacag

SEQ ID NO: 2506834 - RNA, 19 nt, Artificial Sequence
  Description of Artificial Sequence: Synthetic oligonucleotide
  Sense strand starting at position 2980 of SEQ ID NO: 1888046
gagagacuuucccuggcca

SEQ ID NO: 2506835 - RNA, 19 nt, Artificial Sequence
  Description of Artificial Sequence: Synthetic oligonucleotide
  Antisense strand to SEQ ID NO: 2506834
uggccagggaaagucucuc

SEQ ID NO: 2506836 - RNA, 19 nt, Artificial Sequence
  Description of Artificial Sequence: Synthetic oligonucleotide
  Sense strand starting at position 3027 of SEQ ID NO: 1888046
gucacucuggacuguaaua

SEQ ID NO: 2506837 - RNA, 19 nt, Artificial Sequence
  Description of Artificial Sequence: Synthetic oligonucleotide
  Antisense strand to SEQ ID NO: 2506836
uauuacaguccagagugac

SEQ ID NO: 2506838 - RNA, 19 nt, Artificial Sequence
  Description of Artificial Sequence: Synthetic oligonucleotide
  Sense strand starting at position 3038 of SEQ ID NO: 1888046
cuguaauaacuugguuuau

SEQ ID NO: 2506839 - RNA, 19 nt, Artificial Sequence
  Description of Artificial Sequence: Synthetic oligonucleotide
  Antisense strand to SEQ ID NO: 2506838
auaaaccaaguuauuacag

SEQ ID NO: 2506840 - RNA, 19 nt, Artificial Sequence
  Description of Artificial Sequence: Synthetic oligonucleotide
  Sense strand starting at position 3039 of SEQ ID NO: 1888046
uguaauaacuugguuuaug

SEQ ID NO: 2506841 - RNA, 19 nt, Artificial Sequence
  Description of Artificial Sequence: Synthetic oligonucleotide
  Antisense strand to SEQ ID NO: 2506840
cauaaaccaaguuauuaca

SEQ ID NO: 2506842 - RNA, 19 nt, Artificial Sequence
  Description of Artificial Sequence: Synthetic oligonucleotide
  Sense strand starting at position 3040 of SEQ ID NO: 1888046
guaauaacuugguuuauga

SEQ ID NO: 2506843 - RNA, 19 nt, Artificial Sequence
  Description of Artificial Sequence: Synthetic oligonucleotide
  Antisense strand to SEQ ID NO: 2506842
ucauaaaccaaguuauuac

SEQ ID NO: 2506844 - RNA, 19 nt, Artificial Sequence
  Description of Artificial Sequence: Synthetic oligonucleotide
  Sense strand starting at position 3115 of SEQ ID NO: 1888046
cuccacuuagaaugucaga

SEQ ID NO: 2506845 - RNA, 19 nt, Artificial Sequence
  Description of Artificial Sequence: Synthetic oligonucleotide
  Antisense strand to SEQ ID NO: 2506844
ucugacauucuaaguggag

SEQ ID NO: 2506846 - RNA, 19 nt, Artificial Sequence
  Description of Artificial Sequence: Synthetic oligonucleotide
  Sense strand starting at position 3129 of SEQ ID NO: 1888046
ucagaaaccuggcuuauaa

SEQ ID NO: 2506847 - RNA, 19 nt, Artificial Sequence
  Description of Artificial Sequence: Synthetic oligonucleotide
  Antisense strand to SEQ ID NO: 2506846
uuauaagccagguuucuga

SEQ ID NO: 2506848 - RNA, 19 nt, Artificial Sequence
  Description of Artificial Sequence: Synthetic oligonucleotide
  Sense strand starting at position 3159 of SEQ ID NO: 1888046
auaacaucaccugguguau

SEQ ID NO: 2506849 - RNA, 19 nt, Artificial Sequence
  Description of Artificial Sequence: Synthetic oligonucleotide
  Antisense strand to SEQ ID NO: 2506848
auacaccaggugauguuau

SEQ ID NO: 2506850 - RNA, 19 nt, Artificial Sequence
  Description of Artificial Sequence: Synthetic oligonucleotide
  Sense strand starting at position 3270 of SEQ ID NO: 1888046
uggguaugcaguuaagugu

SEQ ID NO: 2506851 - RNA, 19 nt, Artificial Sequence
  Description of Artificial Sequence: Synthetic oligonucleotide
  Antisense strand to SEQ ID NO: 2506850
acacuuaacugcauaccca

SEQ ID NO: 2506852 - RNA, 19 nt, Artificial Sequence
  Description of Artificial Sequence: Synthetic oligonucleotide
  Sense strand starting at position 1522 of SEQ ID NO: 1888047
gaggaaauauuguagauaa

SEQ ID NO: 2506853 - RNA, 19 nt, Artificial Sequence
  Description of Artificial Sequence: Synthetic oligonucleotide
  Antisense strand to SEQ ID NO: 2506852
uuaucuacaauauuuccuc

SEQ ID NO: 2506854 - RNA, 19 nt, Artificial Sequence
  Description of Artificial Sequence: Synthetic oligonucleotide
  Sense strand starting at position 1532 of SEQ ID NO: 1888047
uguagauaauuggugaguu

SEQ ID NO: 2506855 - RNA, 19 nt, Artificial Sequence
  Description of Artificial Sequence: Synthetic oligonucleotide
  Antisense strand to SEQ ID NO: 2506854
aacucaccaauuaucuaca

SEQ ID NO: 2506856 - RNA, 19 nt, Artificial Sequence
  Description of Artificial Sequence: Synthetic oligonucleotide
  Sense strand starting at position 1575 of SEQ ID NO: 1888047
ccucuuucugcaggguaaa

SEQ ID NO: 2506857 - RNA, 19 nt, Artificial Sequence
  Description of Artificial Sequence: Synthetic oligonucleotide
  Antisense strand to SEQ ID NO: 2506856
uuuacccugcagaaagagg

SEQ ID NO: 2506858 - RNA, 19 nt, Artificial Sequence
  Description of Artificial Sequence: Synthetic oligonucleotide
  Sense strand starting at position 1576 of SEQ ID NO: 1888047
cucuuucugcaggguaaau

SEQ ID NO: 2506859 - RNA, 19 nt, Artificial Sequence
  Description of Artificial Sequence: Synthetic oligonucleotide
  Antisense strand to SEQ ID NO: 2506858
auuuacccugcagaaagag

SEQ ID NO: 2506860 - RNA, 19 nt, Artificial Sequence
  Description of Artificial Sequence: Synthetic oligonucleotide
  Sense strand starting at position 1592 of SEQ ID NO: 1888047
aauuccugagagugaauau

SEQ ID NO: 2506861 - RNA, 19 nt, Artificial Sequence
  Description of Artificial Sequence: Synthetic oligonucleotide
  Antisense strand to SEQ ID NO: 2506860
auauucacucucaggaauu

SEQ ID NO: 2506862 - RNA, 19 nt, Artificial Sequence
  Description of Artificial Sequence: Synthetic oligonucleotide
  Sense strand starting at position 1601 of SEQ ID NO: 1888047
gagugaauaucucuggucu

SEQ ID NO: 2506863 - RNA, 19 nt, Artificial Sequence
  Description of Artificial Sequence: Synthetic oligonucleotide
  Antisense strand to SEQ ID NO: 2506862
agaccagagauauucacuc

SEQ ID NO: 2506864 - RNA, 19 nt, Artificial Sequence
  Description of Artificial Sequence: Synthetic oligonucleotide
  Sense strand starting at position 1602 of SEQ ID NO: 1888047
agugaauaucucuggucug

SEQ ID NO: 2506865 - RNA, 19 nt, Artificial Sequence
  Description of Artificial Sequence: Synthetic oligonucleotide
  Antisense strand to SEQ ID NO: 2506864
cagaccagagauauucacu

SEQ ID NO: 2506866 - RNA, 19 nt, Artificial Sequence
  Description of Artificial Sequence: Synthetic oligonucleotide
  Sense strand starting at position 1605 of SEQ ID NO: 1888047
gaauaucucuggucuguau

SEQ ID NO: 2506867 - RNA, 19 nt, Artificial Sequence
  Description of Artificial Sequence: Synthetic oligonucleotide
  Antisense strand to SEQ ID NO: 2506866
auacagaccagagauauuc

SEQ ID NO: 2506868 - RNA, 19 nt, Artificial Sequence
  Description of Artificial Sequence: Synthetic oligonucleotide
  Sense strand starting at position 1619 of SEQ ID NO: 1888047
uguauccuguuaucuugau

SEQ ID NO: 2506869 - RNA, 19 nt, Artificial Sequence
  Description of Artificial Sequence: Synthetic oligonucleotide
  Antisense strand to SEQ ID NO: 2506868
aucaagauaacaggauaca

SEQ ID NO: 2506870 - RNA, 19 nt, Artificial Sequence
  Description of Artificial Sequence: Synthetic oligonucleotide
  Sense strand starting at position 1620 of SEQ ID NO: 1888047
guauccuguuaucuugauu

SEQ ID NO: 2506871 - RNA, 19 nt, Artificial Sequence
  Description of Artificial Sequence: Synthetic oligonucleotide
  Antisense strand to SEQ ID NO: 2506870
aaucaagauaacaggauac

SEQ ID NO: 2506872 - RNA, 19 nt, Artificial Sequence
  Description of Artificial Sequence: Synthetic oligonucleotide
  Sense strand starting at position 1873 of SEQ ID NO: 1888047
ggcaguguugcuuccucuu

SEQ ID NO: 2506873 - RNA, 19 nt, Artificial Sequence
  Description of Artificial Sequence: Synthetic oligonucleotide
  Antisense strand to SEQ ID NO: 2506872
aagaggaagcaacacugcc

SEQ ID NO: 2506874 - RNA, 19 nt, Artificial Sequence
  Description of Artificial Sequence: Synthetic oligonucleotide
  Sense strand starting at position 1925 of SEQ ID NO: 1888047
ucuccuaguccauggugau

SEQ ID NO: 2506875 - RNA, 19 nt, Artificial Sequence
  Description of Artificial Sequence: Synthetic oligonucleotide
  Antisense strand to SEQ ID NO: 2506874
aucaccauggacuaggaga

SEQ ID NO: 2506876 - RNA, 19 nt, Artificial Sequence
  Description of Artificial Sequence: Synthetic oligonucleotide
  Sense strand starting at position 1926 of SEQ ID NO: 1888047
cuccuaguccauggugauu

SEQ ID NO: 2506877 - RNA, 19 nt, Artificial Sequence
  Description of Artificial Sequence: Synthetic oligonucleotide
  Antisense strand to SEQ ID NO: 2506876
aaucaccauggacuaggag

SEQ ID NO: 2506878 - RNA, 19 nt, Artificial Sequence
  Description of Artificial Sequence: Synthetic oligonucleotide
  Sense strand starting at position 1931 of SEQ ID NO: 1888047
aguccauggugauugcuaa

SEQ ID NO: 2506879 - RNA, 19 nt, Artificial Sequence
  Description of Artificial Sequence: Synthetic oligonucleotide
  Antisense strand to SEQ ID NO: 2506878
uuagcaaucaccauggacu

SEQ ID NO: 2506880 - RNA, 19 nt, Artificial Sequence
  Description of Artificial Sequence: Synthetic oligonucleotide
  Sense strand starting at position 1932 of SEQ ID NO: 1888047
guccauggugauugcuaaa

SEQ ID NO: 2506881 - RNA, 19 nt, Artificial Sequence
  Description of Artificial Sequence: Synthetic oligonucleotide
  Antisense strand to SEQ ID NO: 2506880
uuuagcaaucaccauggac

SEQ ID NO: 2506882 - RNA, 19 nt, Artificial Sequence
  Description of Artificial Sequence: Synthetic oligonucleotide
  Sense strand starting at position 1945 of SEQ ID NO: 1888047
gcuaaaugaucauuggcuu

SEQ ID NO: 2506883 - RNA, 19 nt, Artificial Sequence
  Description of Artificial Sequence: Synthetic oligonucleotide
  Antisense strand to SEQ ID NO: 2506882
aagccaaugaucauuuagc

SEQ ID NO: 2506884 - RNA, 19 nt, Artificial Sequence
  Description of Artificial Sequence: Synthetic oligonucleotide
  Sense strand starting at position 1948 of SEQ ID NO: 1888047
aaaugaucauuggcuugua

SEQ ID NO: 2506885 - RNA, 19 nt, Artificial Sequence
  Description of Artificial Sequence: Synthetic oligonucleotide
  Antisense strand to SEQ ID NO: 2506884
uacaagccaaugaucauuu

SEQ ID NO: 2506886 - RNA, 19 nt, Artificial Sequence
  Description of Artificial Sequence: Synthetic oligonucleotide
  Sense strand starting at position 1951 of SEQ ID NO: 1888047
ugaucauuggcuuguagug

SEQ ID NO: 2506887 - RNA, 19 nt, Artificial Sequence
  Description of Artificial Sequence: Synthetic oligonucleotide
  Antisense strand to SEQ ID NO: 2506886
cacuacaagccaaugauca

SEQ ID NO: 2506888 - RNA, 19 nt, Artificial Sequence
  Description of Artificial Sequence: Synthetic oligonucleotide
  Sense strand starting at position 2382 of SEQ ID NO: 1888047
uggauuagagcucacccuu

SEQ ID NO: 2506889 - RNA, 19 nt, Artificial Sequence
  Description of Artificial Sequence: Synthetic oligonucleotide
  Antisense strand to SEQ ID NO: 2506888
aagggugagcucuaaucca

SEQ ID NO: 2506890 - RNA, 19 nt, Artificial Sequence
  Description of Artificial Sequence: Synthetic oligonucleotide
  Sense strand starting at position 2544 of SEQ ID NO: 1888047
uucuuauuaugagugaaac

SEQ ID NO: 2506891 - RNA, 19 nt, Artificial Sequence
  Description of Artificial Sequence: Synthetic oligonucleotide
  Antisense strand to SEQ ID NO: 2506890
guuucacucauaauaagaa

SEQ ID NO: 2506892 - RNA, 19 nt, Artificial Sequence
  Description of Artificial Sequence: Synthetic oligonucleotide
  Sense strand starting at position 2545 of SEQ ID NO: 1888047
ucuuauuaugagugaaacu

SEQ ID NO: 2506893 - RNA, 19 nt, Artificial Sequence
  Description of Artificial Sequence: Synthetic oligonucleotide
  Antisense strand to SEQ ID NO: 2506892
aguuucacucauaauaaga

SEQ ID NO: 2506894 - RNA, 19 nt, Artificial Sequence
  Description of Artificial Sequence: Synthetic oligonucleotide
  Sense strand starting at position 2608 of SEQ ID NO: 1888047
uggacugucuauucguauu

SEQ ID NO: 2506895 - RNA, 19 nt, Artificial Sequence
  Description of Artificial Sequence: Synthetic oligonucleotide
  Antisense strand to SEQ ID NO: 2506894
aauacgaauagacagucca

SEQ ID NO: 2506896 - RNA, 19 nt, Artificial Sequence
  Description of Artificial Sequence: Synthetic oligonucleotide
  Sense strand starting at position 2679 of SEQ ID NO: 1888047
uuuguucccuguuucuaga

SEQ ID NO: 2506897 - RNA, 19 nt, Artificial Sequence
  Description of Artificial Sequence: Synthetic oligonucleotide
  Antisense strand to SEQ ID NO: 2506896
ucuagaaacagggaacaaa

SEQ ID NO: 2506898 - RNA, 19 nt, Artificial Sequence
  Description of Artificial Sequence: Synthetic oligonucleotide
  Sense strand starting at position 2914 of SEQ ID NO: 1888047
guaguauccuauucuuguu

SEQ ID NO: 2506899 - RNA, 19 nt, Artificial Sequence
  Description of Artificial Sequence: Synthetic oligonucleotide
  Antisense strand to SEQ ID NO: 2506898
aacaagaauaggauacuac

SEQ ID NO: 2506900 - RNA, 19 nt, Artificial Sequence
  Description of Artificial Sequence: Synthetic oligonucleotide
  Sense strand starting at position 2953 of SEQ ID NO: 1888047
cuaauuucucgcgaggcuu

SEQ ID NO: 2506901 - RNA, 19 nt, Artificial Sequence
  Description of Artificial Sequence: Synthetic oligonucleotide
  Antisense strand to SEQ ID NO: 2506900
aagccucgcgagaaauuag

SEQ ID NO: 2506902 - RNA, 19 nt, Artificial Sequence
  Description of Artificial Sequence: Synthetic oligonucleotide
  Sense strand starting at position 3050 of SEQ ID NO: 1888047
auuagauguuugccucuca

SEQ ID NO: 2506903 - RNA, 19 nt, Artificial Sequence
  Description of Artificial Sequence: Synthetic oligonucleotide
  Antisense strand to SEQ ID NO: 2506902
ugagaggcaaacaucuaau

SEQ ID NO: 2506904 - RNA, 19 nt, Artificial Sequence
  Description of Artificial Sequence: Synthetic oligonucleotide
  Sense strand starting at position 3051 of SEQ ID NO: 1888047
uuagauguuugccucucau

SEQ ID NO: 2506905 - RNA, 19 nt, Artificial Sequence
  Description of Artificial Sequence: Synthetic oligonucleotide
  Antisense strand to SEQ ID NO: 2506904
augagaggcaaacaucuaa

SEQ ID NO: 2506906 - RNA, 19 nt, Artificial Sequence
  Description of Artificial Sequence: Synthetic oligonucleotide
  Sense strand starting at position 3057 of SEQ ID NO: 1888047
guuugccucucaucaauga

SEQ ID NO: 2506907 - RNA, 19 nt, Artificial Sequence
  Description of Artificial Sequence: Synthetic oligonucleotide
  Antisense strand to SEQ ID NO: 2506906
ucauugaugagaggcaaac

SEQ ID NO: 2506908 - RNA, 19 nt, Artificial Sequence
  Description of Artificial Sequence: Synthetic oligonucleotide
  Sense strand starting at position 3126 of SEQ ID NO: 1888047
cugcaaagcuuauuagaaa

SEQ ID NO: 2506909 - RNA, 19 nt, Artificial Sequence
  Description of Artificial Sequence: Synthetic oligonucleotide
  Antisense strand to SEQ ID NO: 2506908
uuucuaauaagcuuugcag

SEQ ID NO: 2506910 - RNA, 19 nt, Artificial Sequence
  Description of Artificial Sequence: Synthetic oligonucleotide
  Sense strand starting at position 3368 of SEQ ID NO: 1888047
gcugaaauuauaggugucu

SEQ ID NO: 2506911 - RNA, 19 nt, Artificial Sequence
  Description of Artificial Sequence: Synthetic oligonucleotide
  Antisense strand to SEQ ID NO: 2506910
agacaccuauaauuucagc

SEQ ID NO: 2506912 - RNA, 19 nt, Artificial Sequence
  Description of Artificial Sequence: Synthetic oligonucleotide
  Sense strand starting at position 3373 of SEQ ID NO: 1888047
aauuauaggugucugccau

SEQ ID NO: 2506913 - RNA, 19 nt, Artificial Sequence
  Description of Artificial Sequence: Synthetic oligonucleotide
  Antisense strand to SEQ ID NO: 2506912
auggcagacaccuauaauu

SEQ ID NO: 2506914 - RNA, 19 nt, Artificial Sequence
  Description of Artificial Sequence: Synthetic oligonucleotide
  Sense strand starting at position 3594 of SEQ ID NO: 1888047
gggcuuaccaauugugaca

SEQ ID NO: 2506915 - RNA, 19 nt, Artificial Sequence
  Description of Artificial Sequence: Synthetic oligonucleotide
  Antisense strand to SEQ ID NO: 2506914
ugucacaauugguaagccc

SEQ ID NO: 2506916 - RNA, 19 nt, Artificial Sequence
  Description of Artificial Sequence: Synthetic oligonucleotide
  Sense strand starting at position 3634 of SEQ ID NO: 1888047
ugggccauuuaguggagaa

SEQ ID NO: 2506917 - RNA, 19 nt, Artificial Sequence
  Description of Artificial Sequence: Synthetic oligonucleotide
  Antisense strand to SEQ ID NO: 2506916
uucuccacuaaauggccca

SEQ ID NO: 2506918 - RNA, 19 nt, Artificial Sequence
  Description of Artificial Sequence: Synthetic oligonucleotide
  Sense strand starting at position 3648 of SEQ ID NO: 1888047
gagaaaugccagugucagu

SEQ ID NO: 2506919 - RNA, 19 nt, Artificial Sequence
  Description of Artificial Sequence: Synthetic oligonucleotide
  Antisense strand to SEQ ID NO: 2506918
acugacacuggcauuucuc

SEQ ID NO: 2506920 - RNA, 19 nt, Artificial Sequence
  Description of Artificial Sequence: Synthetic oligonucleotide
  Sense strand starting at position 3745 of SEQ ID NO: 1888047
gcuaaauaguuucucagca

SEQ ID NO: 2506921 - RNA, 19 nt, Artificial Sequence
  Description of Artificial Sequence: Synthetic oligonucleotide
  Antisense strand to SEQ ID NO: 2506920
ugcugagaaacuauuuagc

SEQ ID NO: 2506922 - RNA, 19 nt, Artificial Sequence
  Description of Artificial Sequence: Synthetic oligonucleotide
  Sense strand starting at position 3913 of SEQ ID NO: 1888047
auaguaugauagguauaga

SEQ ID NO: 2506923 - RNA, 19 nt, Artificial Sequence
  Description of Artificial Sequence: Synthetic oligonucleotide
  Antisense strand to SEQ ID NO: 2506922
ucuauaccuaucauacuau

SEQ ID NO: 2506924 - RNA, 19 nt, Artificial Sequence
  Description of Artificial Sequence: Synthetic oligonucleotide
  Sense strand starting at position 3916 of SEQ ID NO: 1888047
guaugauagguauagagug

SEQ ID NO: 2506925 - RNA, 19 nt, Artificial Sequence
  Description of Artificial Sequence: Synthetic oligonucleotide
  Antisense strand to SEQ ID NO: 2506924
cacucuauaccuaucauac

SEQ ID NO: 2506926 - RNA, 19 nt, Artificial Sequence
  Description of Artificial Sequence: Synthetic oligonucleotide
  Sense strand starting at position 3934 of SEQ ID NO: 1888047
gauggcugccugcaugaaa

SEQ ID NO: 2506927 - RNA, 19 nt, Artificial Sequence
  Description of Artificial Sequence: Synthetic oligonucleotide
  Antisense strand to SEQ ID NO: 2506926
uuucaugcaggcagccauc

SEQ ID NO: 2506928 - RNA, 19 nt, Artificial Sequence
  Description of Artificial Sequence: Synthetic oligonucleotide
  Sense strand starting at position 3968 of SEQ ID NO: 1888047
guaucuaaggauugauucu

SEQ ID NO: 2506929 - RNA, 19 nt, Artificial Sequence
  Description of Artificial Sequence: Synthetic oligonucleotide
  Antisense strand to SEQ ID NO: 2506928
agaaucaauccuuagauac

SEQ ID NO: 2506930 - RNA, 19 nt, Artificial Sequence
  Description of Artificial Sequence: Synthetic oligonucleotide
  Sense strand starting at position 3975 of SEQ ID NO: 1888047
aggauugauucuuaaacac

SEQ ID NO: 2506931 - RNA, 19 nt, Artificial Sequence
  Description of Artificial Sequence: Synthetic oligonucleotide
  Antisense strand to SEQ ID NO: 2506930
guguuuaagaaucaauccu

SEQ ID NO: 2506932 - RNA, 19 nt, Artificial Sequence
  Description of Artificial Sequence: Synthetic oligonucleotide
  Sense strand starting at position 116 of SEQ ID NO: 1888048
caucacagugcuuggaaca

SEQ ID NO: 2506933 - RNA, 19 nt, Artificial Sequence
  Description of Artificial Sequence: Synthetic oligonucleotide
  Antisense strand to SEQ ID NO: 2506932
uguuccaagcacugugaug

SEQ ID NO: 2506934 - RNA, 19 nt, Artificial Sequence
  Description of Artificial Sequence: Synthetic oligonucleotide
  Sense strand starting at position 117 of SEQ ID NO: 1888048
aucacagugcuuggaacaa

SEQ ID NO: 2506935 - RNA, 19 nt, Artificial Sequence
  Description of Artificial Sequence: Synthetic oligonucleotide
  Antisense strand to SEQ ID NO: 2506934
uuguuccaagcacugugau

SEQ ID NO: 2506936 - RNA, 19 nt, Artificial Sequence
  Description of Artificial Sequence: Synthetic oligonucleotide
  Sense strand starting at position 286 of SEQ ID NO: 1888048
gagauugaauuagcuuaga

SEQ ID NO: 2506937 - RNA, 19 nt, Artificial Sequence
  Description of Artificial Sequence: Synthetic oligonucleotide
  Antisense strand to SEQ ID NO: 2506936
ucuaagcuaauucaaucuc

SEQ ID NO: 2506938 - RNA, 19 nt, Artificial Sequence
  Description of Artificial Sequence: Synthetic oligonucleotide
  Sense strand starting at position 423 of SEQ ID NO: 1888048
ggugccaugucauuuaucu

SEQ ID NO: 2506939 - RNA, 19 nt, Artificial Sequence
  Description of Artificial Sequence: Synthetic oligonucleotide
  Antisense strand to SEQ ID NO: 2506938
agauaaaugacauggcacc

SEQ ID NO: 2506940 - RNA, 19 nt, Artificial Sequence
  Description of Artificial Sequence: Synthetic oligonucleotide
  Sense strand starting at position 430 of SEQ ID NO: 1888048
ugucauuuaucucuguagu

SEQ ID NO: 2506941 - RNA, 19 nt, Artificial Sequence
  Description of Artificial Sequence: Synthetic oligonucleotide
  Antisense strand to SEQ ID NO: 2506940
acuacagagauaaaugaca

SEQ ID NO: 2506942 - RNA, 19 nt, Artificial Sequence
  Description of Artificial Sequence: Synthetic oligonucleotide
  Sense strand starting at position 431 of SEQ ID NO: 1888048
gucauuuaucucuguaguc

SEQ ID NO: 2506943 - RNA, 19 nt, Artificial Sequence
  Description of Artificial Sequence: Synthetic oligonucleotide
  Antisense strand to SEQ ID NO: 2506942
gacuacagagauaaaugac

SEQ ID NO: 2506944 - RNA, 19 nt, Artificial Sequence
  Description of Artificial Sequence: Synthetic oligonucleotide
  Sense strand starting at position 494 of SEQ ID NO: 1888048
ugggaaaguuuggugaguu

SEQ ID NO: 2506945 - RNA, 19 nt, Artificial Sequence
  Description of Artificial Sequence: Synthetic oligonucleotide
  Antisense strand to SEQ ID NO: 2506944
aacucaccaaacuuuccca

SEQ ID NO: 2506946 - RNA, 19 nt, Artificial Sequence
  Description of Artificial Sequence: Synthetic oligonucleotide
  Sense strand starting at position 498 of SEQ ID NO: 1888048
aaaguuuggugaguuagag

SEQ ID NO: 2506947 - RNA, 19 nt, Artificial Sequence
  Description of Artificial Sequence: Synthetic oligonucleotide
  Antisense strand to SEQ ID NO: 2506946
cucuaacucaccaaacuuu

SEQ ID NO: 2506948 - RNA, 19 nt, Artificial Sequence
  Description of Artificial Sequence: Synthetic oligonucleotide
  Sense strand starting at position 605 of SEQ ID NO: 1888048
guuauugcaguuugagaaa

SEQ ID NO: 2506949 - RNA, 19 nt, Artificial Sequence
  Description of Artificial Sequence: Synthetic oligonucleotide
  Antisense strand to SEQ ID NO: 2506948
uuucucaaacugcaauaac

SEQ ID NO: 2506950 - RNA, 19 nt, Artificial Sequence
  Description of Artificial Sequence: Synthetic oligonucleotide
  Sense strand starting at position 771 of SEQ ID NO: 1888048
gaggucagcuuguuuagga

SEQ ID NO: 2506951 - RNA, 19 nt, Artificial Sequence
  Description of Artificial Sequence: Synthetic oligonucleotide
  Antisense strand to SEQ ID NO: 2506950
uccuaaacaagcugaccuc

SEQ ID NO: 2506952 - RNA, 19 nt, Artificial Sequence
  Description of Artificial Sequence: Synthetic oligonucleotide
  Sense strand starting at position 772 of SEQ ID NO: 1888048
aggucagcuuguuuaggaa

SEQ ID NO: 2506953 - RNA, 19 nt, Artificial Sequence
  Description of Artificial Sequence: Synthetic oligonucleotide
  Antisense strand to SEQ ID NO: 2506952
uuccuaaacaagcugaccu

SEQ ID NO: 2506954 - RNA, 19 nt, Artificial Sequence
  Description of Artificial Sequence: Synthetic oligonucleotide
  Sense strand starting at position 799 of SEQ ID NO: 1888048
guuucugacucuguagaaa

SEQ ID NO: 2506955 - RNA, 19 nt, Artificial Sequence
  Description of Artificial Sequence: Synthetic oligonucleotide
  Antisense strand to SEQ ID NO: 2506954
uuucuacagagucagaaac

SEQ ID NO: 2506956 - RNA, 19 nt, Artificial Sequence
  Description of Artificial Sequence: Synthetic oligonucleotide
  Sense strand starting at position 887 of SEQ ID NO: 1888048
cuggaauugguggguggua

SEQ ID NO: 2506957 - RNA, 19 nt, Artificial Sequence
  Description of Artificial Sequence: Synthetic oligonucleotide
  Antisense strand to SEQ ID NO: 2506956
uaccacccaccaauuccag

SEQ ID NO: 2506958 - RNA, 19 nt, Artificial Sequence
  Description of Artificial Sequence: Synthetic oligonucleotide
  Sense strand starting at position 916 of SEQ ID NO: 1888048
gggucuuucucuguuuaaa

SEQ ID NO: 2506959 - RNA, 19 nt, Artificial Sequence
  Description of Artificial Sequence: Synthetic oligonucleotide
  Antisense strand to SEQ ID NO: 2506958
uuuaaacagagaaagaccc

SEQ ID NO: 2506960 - RNA, 19 nt, Artificial Sequence
  Description of Artificial Sequence: Synthetic oligonucleotide
  Sense strand starting at position 1260 of SEQ ID NO: 1888048
gucacccuggguuauaaau

SEQ ID NO: 2506961 - RNA, 19 nt, Artificial Sequence
  Description of Artificial Sequence: Synthetic oligonucleotide
  Antisense strand to SEQ ID NO: 2506960
auuuauaacccagggugac

SEQ ID NO: 2506962 - RNA, 19 nt, Artificial Sequence
  Description of Artificial Sequence: Synthetic oligonucleotide
  Sense strand starting at position 1312 of SEQ ID NO: 1888048
ggcaccaugucauuuaucu

SEQ ID NO: 2506963 - RNA, 19 nt, Artificial Sequence
  Description of Artificial Sequence: Synthetic oligonucleotide
  Antisense strand to SEQ ID NO: 2506962
agauaaaugacauggugcc

SEQ ID NO: 2506964 - RNA, 19 nt, Artificial Sequence
  Description of Artificial Sequence: Synthetic oligonucleotide
  Sense strand starting at position 1320 of SEQ ID NO: 1888048
gucauuuaucuccgugguc

SEQ ID NO: 2506965 - RNA, 19 nt, Artificial Sequence
  Description of Artificial Sequence: Synthetic oligonucleotide
  Antisense strand to SEQ ID NO: 2506964
gaccacggagauaaaugac

SEQ ID NO: 2506966 - RNA, 19 nt, Artificial Sequence
  Description of Artificial Sequence: Synthetic oligonucleotide
  Sense strand starting at position 1322 of SEQ ID NO: 1888048
cauuuaucuccgugguccu

SEQ ID NO: 2506967 - RNA, 19 nt, Artificial Sequence
  Description of Artificial Sequence: Synthetic oligonucleotide
  Antisense strand to SEQ ID NO: 2506966
aggaccacggagauaaaug

SEQ ID NO: 2506968 - RNA, 19 nt, Artificial Sequence
  Description of Artificial Sequence: Synthetic oligonucleotide
  Sense strand starting at position 1323 of SEQ ID NO: 1888048
auuuaucuccgugguccua

SEQ ID NO: 2506969 - RNA, 19 nt, Artificial Sequence
  Description of Artificial Sequence: Synthetic oligonucleotide
  Antisense strand to SEQ ID NO: 2506968
uaggaccacggagauaaau

SEQ ID NO: 2506970 - RNA, 19 nt, Artificial Sequence
  Description of Artificial Sequence: Synthetic oligonucleotide
  Sense strand starting at position 1397 of SEQ ID NO: 1888048
ccauuaagguagcugugau

SEQ ID NO: 2506971 - RNA, 19 nt, Artificial Sequence
  Description of Artificial Sequence: Synthetic oligonucleotide
  Antisense strand to SEQ ID NO: 2506970
aucacagcuaccuuaaugg

SEQ ID NO: 2506972 - RNA, 19 nt, Artificial Sequence
  Description of Artificial Sequence: Synthetic oligonucleotide
  Sense strand starting at position 1957 of SEQ ID NO: 1888048
cucccuuugucauuuaggu

SEQ ID NO: 2506973 - RNA, 19 nt, Artificial Sequence
  Description of Artificial Sequence: Synthetic oligonucleotide
  Antisense strand to SEQ ID NO: 2506972
accuaaaugacaaagggag

SEQ ID NO: 2506974 - RNA, 19 nt, Artificial Sequence
  Description of Artificial Sequence: Synthetic oligonucleotide
  Sense strand starting at position 2179 of SEQ ID NO: 1888048
ggaggaaugucuguacaaa

SEQ ID NO: 2506975 - RNA, 19 nt, Artificial Sequence
  Description of Artificial Sequence: Synthetic oligonucleotide
  Antisense strand to SEQ ID NO: 2506974
uuuguacagacauuccucc

SEQ ID NO: 2506976 - RNA, 19 nt, Artificial Sequence
  Description of Artificial Sequence: Synthetic oligonucleotide
  Sense strand starting at position 2356 of SEQ ID NO: 1888048
cgcuuccucagagaucuga

SEQ ID NO: 2506977 - RNA, 19 nt, Artificial Sequence
  Description of Artificial Sequence: Synthetic oligonucleotide
  Antisense strand to SEQ ID NO: 2506976
ucagaucucugaggaagcg

SEQ ID NO: 2506978 - RNA, 19 nt, Artificial Sequence
  Description of Artificial Sequence: Synthetic oligonucleotide
  Sense strand starting at position 2800 of SEQ ID NO: 1888048
gcuugaaacagaugucaag

SEQ ID NO: 2506979 - RNA, 19 nt, Artificial Sequence
  Description of Artificial Sequence: Synthetic oligonucleotide
  Antisense strand to SEQ ID NO: 2506978
cuugacaucuguuucaagc

SEQ ID NO: 2506980 - RNA, 19 nt, Artificial Sequence
  Description of Artificial Sequence: Synthetic oligonucleotide
  Sense strand starting at position 2806 of SEQ ID NO: 1888048
aacagaugucaaggguaua

SEQ ID NO: 2506981 - RNA, 19 nt, Artificial Sequence
  Description of Artificial Sequence: Synthetic oligonucleotide
  Antisense strand to SEQ ID NO: 2506980
uauacccuugacaucuguu

SEQ ID NO: 2506982 - RNA, 19 nt, Artificial Sequence
  Description of Artificial Sequence: Synthetic oligonucleotide
  Sense strand starting at position 2807 of SEQ ID NO: 1888048
acagaugucaaggguauaa

SEQ ID NO: 2506983 - RNA, 19 nt, Artificial Sequence
  Description of Artificial Sequence: Synthetic oligonucleotide
  Antisense strand to SEQ ID NO: 2506982
uuauacccuugacaucugu

SEQ ID NO: 2506984 - RNA, 19 nt, Artificial Sequence
  Description of Artificial Sequence: Synthetic oligonucleotide
  Sense strand starting at position 2940 of SEQ ID NO: 1888048
cagugaggucagcaagugu

SEQ ID NO: 2506985 - RNA, 19 nt, Artificial Sequence
  Description of Artificial Sequence: Synthetic oligonucleotide
  Antisense strand to SEQ ID NO: 2506984
acacuugcugaccucacug

SEQ ID NO: 2506986 - RNA, 19 nt, Artificial Sequence
  Description of Artificial Sequence: Synthetic oligonucleotide
  Sense strand starting at position 2944 of SEQ ID NO: 1888048
gaggucagcaaguguaaau

SEQ ID NO: 2506987 - RNA, 19 nt, Artificial Sequence
  Description of Artificial Sequence: Synthetic oligonucleotide
  Antisense strand to SEQ ID NO: 2506986
auuuacacuugcugaccuc

SEQ ID NO: 2506988 - RNA, 19 nt, Artificial Sequence
  Description of Artificial Sequence: Synthetic oligonucleotide
  Sense strand starting at position 3167 of SEQ ID NO: 1888048
ugcccaggccuggagaaau

SEQ ID NO: 2506989 - RNA, 19 nt, Artificial Sequence
  Description of Artificial Sequence: Synthetic oligonucleotide
  Antisense strand to SEQ ID NO: 2506988
auuucuccaggccugggca

SEQ ID NO: 2506990 - RNA, 19 nt, Artificial Sequence
  Description of Artificial Sequence: Synthetic oligonucleotide
  Sense strand starting at position 3183 of SEQ ID NO: 1888048
aauaauguaucuguuggau

SEQ ID NO: 2506991 - RNA, 19 nt, Artificial Sequence
  Description of Artificial Sequence: Synthetic oligonucleotide
  Antisense strand to SEQ ID NO: 2506990
auccaacagauacauuauu

SEQ ID NO: 2506992 - RNA, 19 nt, Artificial Sequence
  Description of Artificial Sequence: Synthetic oligonucleotide
  Sense strand starting at position 3186 of SEQ ID NO: 1888048
aauguaucuguuggauucu

SEQ ID NO: 2506993 - RNA, 19 nt, Artificial Sequence
  Description of Artificial Sequence: Synthetic oligonucleotide
  Antisense strand to SEQ ID NO: 2506992
agaauccaacagauacauu

SEQ ID NO: 2506994 - RNA, 19 nt, Artificial Sequence
  Description of Artificial Sequence: Synthetic oligonucleotide
  Sense strand starting at position 3236 of SEQ ID NO: 1888048
ccugaaaugccaggauaua

SEQ ID NO: 2506995 - RNA, 19 nt, Artificial Sequence
  Description of Artificial Sequence: Synthetic oligonucleotide
  Antisense strand to SEQ ID NO: 2506994
uauauccuggcauuucagg

SEQ ID NO: 2506996 - RNA, 19 nt, Artificial Sequence
  Description of Artificial Sequence: Synthetic oligonucleotide
  Sense strand starting at position 3400 of SEQ ID NO: 1888048
gcagaugugcaguagggau

SEQ ID NO: 2506997 - RNA, 19 nt, Artificial Sequence
  Description of Artificial Sequence: Synthetic oligonucleotide
  Antisense strand to SEQ ID NO: 2506996
aucccuacugcacaucugc

SEQ ID NO: 2506998 - RNA, 19 nt, Artificial Sequence
  Description of Artificial Sequence: Synthetic oligonucleotide
  Sense strand starting at position 3404 of SEQ ID NO: 1888048
augugcaguagggaucaau

SEQ ID NO: 2506999 - RNA, 19 nt, Artificial Sequence
  Description of Artificial Sequence: Synthetic oligonucleotide
  Antisense strand to SEQ ID NO: 2506998
auugaucccuacugcacau

SEQ ID NO: 2507000 - RNA, 19 nt, Artificial Sequence
  Description of Artificial Sequence: Synthetic oligonucleotide
  Sense strand starting at position 3710 of SEQ ID NO: 1888048
uguaguccuccugaggacu

SEQ ID NO: 2507001 - RNA, 19 nt, Artificial Sequence
  Description of Artificial Sequence: Synthetic oligonucleotide
  Antisense strand to SEQ ID NO: 2507000
aguccucaggaggacuaca

SEQ ID NO: 2507002 - RNA, 19 nt, Artificial Sequence
  Description of Artificial Sequence: Synthetic oligonucleotide
  Sense strand starting at position 3718 of SEQ ID NO: 1888048
uccugaggacucuggagua

SEQ ID NO: 2507003 - RNA, 19 nt, Artificial Sequence
  Description of Artificial Sequence: Synthetic oligonucleotide
  Antisense strand to SEQ ID NO: 2507002
uacuccagaguccucagga

SEQ ID NO: 2507004 - RNA, 19 nt, Artificial Sequence
  Description of Artificial Sequence: Synthetic oligonucleotide
  Sense strand starting at position 3766 of SEQ ID NO: 1888048
gggagaugucaagggagca

SEQ ID NO: 2507005 - RNA, 19 nt, Artificial Sequence
  Description of Artificial Sequence: Synthetic oligonucleotide
  Antisense strand to SEQ ID NO: 2507004
ugcucccuugacaucuccc

SEQ ID NO: 2507006 - RNA, 19 nt, Artificial Sequence
  Description of Artificial Sequence: Synthetic oligonucleotide
  Sense strand starting at position 3787 of SEQ ID NO: 1888048
gggagacuuauaugugcac

SEQ ID NO: 2507007 - RNA, 19 nt, Artificial Sequence
  Description of Artificial Sequence: Synthetic oligonucleotide
  Antisense strand to SEQ ID NO: 2507006
gugcacauauaagucuccc

SEQ ID NO: 2507008 - RNA, 19 nt, Artificial Sequence
  Description of Artificial Sequence: Synthetic oligonucleotide
  Sense strand starting at position 3859 of SEQ ID NO: 1888048
uguucauggugagucagaa

SEQ ID NO: 2507009 - RNA, 19 nt, Artificial Sequence
  Description of Artificial Sequence: Synthetic oligonucleotide
  Antisense strand to SEQ ID NO: 2507008
uucugacucaccaugaaca

SEQ ID NO: 2507010 - RNA, 19 nt, Artificial Sequence
  Description of Artificial Sequence: Synthetic oligonucleotide
  Sense strand starting at position 3920 of SEQ ID NO: 1888048
uucagaugacagugaggua

SEQ ID NO: 2507011 - RNA, 19 nt, Artificial Sequence
  Description of Artificial Sequence: Synthetic oligonucleotide
  Antisense strand to SEQ ID NO: 2507010
uaccucacugucaucugaa

SEQ ID NO: 2507012 - RNA, 19 nt, Artificial Sequence
  Description of Artificial Sequence: Synthetic oligonucleotide
  Sense strand starting at position 36 of SEQ ID NO: 1888049
ucacacugcucuguuauuu

SEQ ID NO: 2507013 - RNA, 19 nt, Artificial Sequence
  Description of Artificial Sequence: Synthetic oligonucleotide
  Antisense strand to SEQ ID NO: 2507012
aaauaacagagcaguguga

SEQ ID NO: 2507014 - RNA, 19 nt, Artificial Sequence
  Description of Artificial Sequence: Synthetic oligonucleotide
  Sense strand starting at position 55 of SEQ ID NO: 1888049
uggcuuucuggacauucua

SEQ ID NO: 2507015 - RNA, 19 nt, Artificial Sequence
  Description of Artificial Sequence: Synthetic oligonucleotide
  Antisense strand to SEQ ID NO: 2507014
uagaauguccagaaagcca

SEQ ID NO: 2507016 - RNA, 19 nt, Artificial Sequence
  Description of Artificial Sequence: Synthetic oligonucleotide
  Sense strand starting at position 108 of SEQ ID NO: 1888049
gcacccuuugcuucgaguu

SEQ ID NO: 2507017 - RNA, 19 nt, Artificial Sequence
  Description of Artificial Sequence: Synthetic oligonucleotide
  Antisense strand to SEQ ID NO: 2507016
aacucgaagcaaagggugc

SEQ ID NO: 2507018 - RNA, 19 nt, Artificial Sequence
  Description of Artificial Sequence: Synthetic oligonucleotide
  Sense strand starting at position 278 of SEQ ID NO: 1888049
uccuguuguguguuauucu

SEQ ID NO: 2507019 - RNA, 19 nt, Artificial Sequence
  Description of Artificial Sequence: Synthetic oligonucleotide
  Antisense strand to SEQ ID NO: 2507018
agaauaacacacaacagga

SEQ ID NO: 2507020 - RNA, 19 nt, Artificial Sequence
  Description of Artificial Sequence: Synthetic oligonucleotide
  Sense strand starting at position 561 of SEQ ID NO: 1888049
aucuguauuugucuccuga

SEQ ID NO: 2507021 - RNA, 19 nt, Artificial Sequence
  Description of Artificial Sequence: Synthetic oligonucleotide
  Antisense strand to SEQ ID NO: 2507020
ucaggagacaaauacagau

SEQ ID NO: 2507022 - RNA, 19 nt, Artificial Sequence
  Description of Artificial Sequence: Synthetic oligonucleotide
  Sense strand starting at position 563 of SEQ ID NO: 1888049
cuguauuugucuccugaac

SEQ ID NO: 2507023 - RNA, 19 nt, Artificial Sequence
  Description of Artificial Sequence: Synthetic oligonucleotide
  Antisense strand to SEQ ID NO: 2507022
guucaggagacaaauacag

SEQ ID NO: 2507024 - RNA, 19 nt, Artificial Sequence
  Description of Artificial Sequence: Synthetic oligonucleotide
  Sense strand starting at position 674 of SEQ ID NO: 1888049
auaguacccuggucugauu

SEQ ID NO: 2507025 - RNA, 19 nt, Artificial Sequence
  Description of Artificial Sequence: Synthetic oligonucleotide
  Antisense strand to SEQ ID NO: 2507024
aaucagaccaggguacuau

SEQ ID NO: 2507026 - RNA, 19 nt, Artificial Sequence
  Description of Artificial Sequence: Synthetic oligonucleotide
  Sense strand starting at position 815 of SEQ ID NO: 1888049
auggauaauuggcugauga

SEQ ID NO: 2507027 - RNA, 19 nt, Artificial Sequence
  Description of Artificial Sequence: Synthetic oligonucleotide
  Antisense strand to SEQ ID NO: 2507026
ucaucagccaauuauccau

SEQ ID NO: 2507028 - RNA, 19 nt, Artificial Sequence
  Description of Artificial Sequence: Synthetic oligonucleotide
  Sense strand starting at position 816 of SEQ ID NO: 1888049
uggauaauuggcugaugac

SEQ ID NO: 2507029 - RNA, 19 nt, Artificial Sequence
  Description of Artificial Sequence: Synthetic oligonucleotide
  Antisense strand to SEQ ID NO: 2507028
gucaucagccaauuaucca

SEQ ID NO: 2507030 - RNA, 19 nt, Artificial Sequence
  Description of Artificial Sequence: Synthetic oligonucleotide
  Sense strand starting at position 822 of SEQ ID NO: 1888049
auuggcugaugacuugaaa

SEQ ID NO: 2507031 - RNA, 19 nt, Artificial Sequence
  Description of Artificial Sequence: Synthetic oligonucleotide
  Antisense strand to SEQ ID NO: 2507030
uuucaagucaucagccaau

SEQ ID NO: 2507032 - RNA, 19 nt, Artificial Sequence
  Description of Artificial Sequence: Synthetic oligonucleotide
  Sense strand starting at position 908 of SEQ ID NO: 1888049
uuggguuuaucucucacau

SEQ ID NO: 2507033 - RNA, 19 nt, Artificial Sequence
  Description of Artificial Sequence: Synthetic oligonucleotide
  Antisense strand to SEQ ID NO: 2507032
augugagagauaaacccaa

SEQ ID NO: 2507034 - RNA, 19 nt, Artificial Sequence
  Description of Artificial Sequence: Synthetic oligonucleotide
  Sense strand starting at position 928 of SEQ ID NO: 1888049
acuuauaugcauggucaga

SEQ ID NO: 2507035 - RNA, 19 nt, Artificial Sequence
  Description of Artificial Sequence: Synthetic oligonucleotide
  Antisense strand to SEQ ID NO: 2507034
ucugaccaugcauauaagu

SEQ ID NO: 2507036 - RNA, 19 nt, Artificial Sequence
  Description of Artificial Sequence: Synthetic oligonucleotide
  Sense strand starting at position 930 of SEQ ID NO: 1888049
uuauaugcauggucagaau

SEQ ID NO: 2507037 - RNA, 19 nt, Artificial Sequence
  Description of Artificial Sequence: Synthetic oligonucleotide
  Antisense strand to SEQ ID NO: 2507036
auucugaccaugcauauaa

SEQ ID NO: 2507038 - RNA, 19 nt, Artificial Sequence
  Description of Artificial Sequence: Synthetic oligonucleotide
  Sense strand starting at position 1107 of SEQ ID NO: 1888049
acaagaaacuguuugcaga

SEQ ID NO: 2507039 - RNA, 19 nt, Artificial Sequence
  Description of Artificial Sequence: Synthetic oligonucleotide
  Antisense strand to SEQ ID NO: 2507038
ucugcaaacaguuucuugu

SEQ ID NO: 2507040 - RNA, 19 nt, Artificial Sequence
  Description of Artificial Sequence: Synthetic oligonucleotide
  Sense strand starting at position 1220 of SEQ ID NO: 1888049
ugugauugugauucguguu

SEQ ID NO: 2507041 - RNA, 19 nt, Artificial Sequence
  Description of Artificial Sequence: Synthetic oligonucleotide
  Antisense strand to SEQ ID NO: 2507040
aacacgaaucacaaucaca

SEQ ID NO: 2507042 - RNA, 19 nt, Artificial Sequence
  Description of Artificial Sequence: Synthetic oligonucleotide
  Sense strand starting at position 1225 of SEQ ID NO: 1888049
uugugauucguguuagucu

SEQ ID NO: 2507043 - RNA, 19 nt, Artificial Sequence
  Description of Artificial Sequence: Synthetic oligonucleotide
  Antisense strand to SEQ ID NO: 2507042
agacuaacacgaaucacaa

SEQ ID NO: 2507044 - RNA, 19 nt, Artificial Sequence
  Description of Artificial Sequence: Synthetic oligonucleotide
  Sense strand starting at position 1297 of SEQ ID NO: 1888049
agacauucggaguggacaa

SEQ ID NO: 2507045 - RNA, 19 nt, Artificial Sequence
  Description of Artificial Sequence: Synthetic oligonucleotide
  Antisense strand to SEQ ID NO: 2507044
uuguccacuccgaaugucu

SEQ ID NO: 2507046 - RNA, 19 nt, Artificial Sequence
  Description of Artificial Sequence: Synthetic oligonucleotide
  Sense strand starting at position 1520 of SEQ ID NO: 1888049
cggacagucugacuccaua

SEQ ID NO: 2507047 - RNA, 19 nt, Artificial Sequence
  Description of Artificial Sequence: Synthetic oligonucleotide
  Antisense strand to SEQ ID NO: 2507046
uauggagucagacuguccg

SEQ ID NO: 2507048 - RNA, 19 nt, Artificial Sequence
  Description of Artificial Sequence: Synthetic oligonucleotide
  Sense strand starting at position 2371 of SEQ ID NO: 1888049
cagugcuuucuggauuaaa

SEQ ID NO: 2507049 - RNA, 19 nt, Artificial Sequence
  Description of Artificial Sequence: Synthetic oligonucleotide
  Antisense strand to SEQ ID NO: 2507048
uuuaauccagaaagcacug

SEQ ID NO: 2507050 - RNA, 19 nt, Artificial Sequence
  Description of Artificial Sequence: Synthetic oligonucleotide
  Sense strand starting at position 2374 of SEQ ID NO: 1888049
ugcuuucuggauuaaauac

SEQ ID NO: 2507051 - RNA, 19 nt, Artificial Sequence
  Description of Artificial Sequence: Synthetic oligonucleotide
  Antisense strand to SEQ ID NO: 2507050
guauuuaauccagaaagca

SEQ ID NO: 2507052 - RNA, 19 nt, Artificial Sequence
  Description of Artificial Sequence: Synthetic oligonucleotide
  Sense strand starting at position 2481 of SEQ ID NO: 1888049
guggguuguauuugucagu

SEQ ID NO: 2507053 - RNA, 19 nt, Artificial Sequence
  Description of Artificial Sequence: Synthetic oligonucleotide
  Antisense strand to SEQ ID NO: 2507052
acugacaaauacaacccac

SEQ ID NO: 2507054 - RNA, 19 nt, Artificial Sequence
  Description of Artificial Sequence: Synthetic oligonucleotide
  Sense strand starting at position 2482 of SEQ ID NO: 1888049
uggguuguauuugucagua

SEQ ID NO: 2507055 - RNA, 19 nt, Artificial Sequence
  Description of Artificial Sequence: Synthetic oligonucleotide
  Antisense strand to SEQ ID NO: 2507054
uacugacaaauacaaccca

SEQ ID NO: 2507056 - RNA, 19 nt, Artificial Sequence
  Description of Artificial Sequence: Synthetic oligonucleotide
  Sense strand starting at position 2559 of SEQ ID NO: 1888049
ugcgaaaugauauggaagu

SEQ ID NO: 2507057 - RNA, 19 nt, Artificial Sequence
  Description of Artificial Sequence: Synthetic oligonucleotide
  Antisense strand to SEQ ID NO: 2507056
acuuccauaucauuucgca

SEQ ID NO: 2507058 - RNA, 19 nt, Artificial Sequence
  Description of Artificial Sequence: Synthetic oligonucleotide
  Sense strand starting at position 2572 of SEQ ID NO: 1888049
ggaagucuucagggaccuu

SEQ ID NO: 2507059 - RNA, 19 nt, Artificial Sequence
  Description of Artificial Sequence: Synthetic oligonucleotide
  Antisense strand to SEQ ID NO: 2507058
aaggucccugaagacuucc

SEQ ID NO: 2507060 - RNA, 19 nt, Artificial Sequence
  Description of Artificial Sequence: Synthetic oligonucleotide
  Sense strand starting at position 2704 of SEQ ID NO: 1888049
uuugauacccuugagucaa

SEQ ID NO: 2507061 - RNA, 19 nt, Artificial Sequence
  Description of Artificial Sequence: Synthetic oligonucleotide
  Antisense strand to SEQ ID NO: 2507060
uugacucaaggguaucaaa

SEQ ID NO: 2507062 - RNA, 19 nt, Artificial Sequence
  Description of Artificial Sequence: Synthetic oligonucleotide
  Sense strand starting at position 2706 of SEQ ID NO: 1888049
ugauacccuugagucaaau

SEQ ID NO: 2507063 - RNA, 19 nt, Artificial Sequence
  Description of Artificial Sequence: Synthetic oligonucleotide
  Antisense strand to SEQ ID NO: 2507062
auuugacucaaggguauca

SEQ ID NO: 2507064 - RNA, 19 nt, Artificial Sequence
  Description of Artificial Sequence: Synthetic oligonucleotide
  Sense strand starting at position 2737 of SEQ ID NO: 1888049
cacagauucuaggccuuga

SEQ ID NO: 2507065 - RNA, 19 nt, Artificial Sequence
  Description of Artificial Sequence: Synthetic oligonucleotide
  Antisense strand to SEQ ID NO: 2507064
ucaaggccuagaaucugug

SEQ ID NO: 2507066 - RNA, 19 nt, Artificial Sequence
  Description of Artificial Sequence: Synthetic oligonucleotide
  Sense strand starting at position 2741 of SEQ ID NO: 1888049
gauucuaggccuugaucca

SEQ ID NO: 2507067 - RNA, 19 nt, Artificial Sequence
  Description of Artificial Sequence: Synthetic oligonucleotide
  Antisense strand to SEQ ID NO: 2507066
uggaucaaggccuagaauc

SEQ ID NO: 2507068 - RNA, 19 nt, Artificial Sequence
  Description of Artificial Sequence: Synthetic oligonucleotide
  Sense strand starting at position 2742 of SEQ ID NO: 1888049
auucuaggccuugauccaa

SEQ ID NO: 2507069 - RNA, 19 nt, Artificial Sequence
  Description of Artificial Sequence: Synthetic oligonucleotide
  Antisense strand to SEQ ID NO: 2507068
uuggaucaaggccuagaau

SEQ ID NO: 2507070 - RNA, 19 nt, Artificial Sequence
  Description of Artificial Sequence: Synthetic oligonucleotide
  Sense strand starting at position 2804 of SEQ ID NO: 1888049
ugagaagcuccugaauucu

SEQ ID NO: 2507071 - RNA, 19 nt, Artificial Sequence
  Description of Artificial Sequence: Synthetic oligonucleotide
  Antisense strand to SEQ ID NO: 2507070
agaauucaggagcuucuca

SEQ ID NO: 2507072 - RNA, 19 nt, Artificial Sequence
  Description of Artificial Sequence: Synthetic oligonucleotide
  Sense strand starting at position 2828 of SEQ ID NO: 1888049
uuaacaaauuugggaaaga

SEQ ID NO: 2507073 - RNA, 19 nt, Artificial Sequence
  Description of Artificial Sequence: Synthetic oligonucleotide
  Antisense strand to SEQ ID NO: 2507072
ucuuucccaaauuuguuaa

SEQ ID NO: 2507074 - RNA, 19 nt, Artificial Sequence
  Description of Artificial Sequence: Synthetic oligonucleotide
  Sense strand starting at position 2941 of SEQ ID NO: 1888049
ggaaauaacuuucuaggua

SEQ ID NO: 2507075 - RNA, 19 nt, Artificial Sequence
  Description of Artificial Sequence: Synthetic oligonucleotide
  Antisense strand to SEQ ID NO: 2507074
uaccuagaaaguuauuucc

SEQ ID NO: 2507076 - RNA, 19 nt, Artificial Sequence
  Description of Artificial Sequence: Synthetic oligonucleotide
  Sense strand starting at position 3024 of SEQ ID NO: 1888049
uucugaauucuuugaaaga

SEQ ID NO: 2507077 - RNA, 19 nt, Artificial Sequence
  Description of Artificial Sequence: Synthetic oligonucleotide
  Antisense strand to SEQ ID NO: 2507076
ucuuucaaagaauucagaa

SEQ ID NO: 2507078 - RNA, 19 nt, Artificial Sequence
  Description of Artificial Sequence: Synthetic oligonucleotide
  Sense strand starting at position 3232 of SEQ ID NO: 1888049
guuagcucucauuaccuca

SEQ ID NO: 2507079 - RNA, 19 nt, Artificial Sequence
  Description of Artificial Sequence: Synthetic oligonucleotide
  Antisense strand to SEQ ID NO: 2507078
ugagguaaugagagcuaac

SEQ ID NO: 2507080 - RNA, 19 nt, Artificial Sequence
  Description of Artificial Sequence: Synthetic oligonucleotide
  Sense strand starting at position 3305 of SEQ ID NO: 1888049
auguaagaaucuucuuuga

SEQ ID NO: 2507081 - RNA, 19 nt, Artificial Sequence
  Description of Artificial Sequence: Synthetic oligonucleotide
  Antisense strand to SEQ ID NO: 2507080
ucaaagaagauucuuacau

SEQ ID NO: 2507082 - RNA, 19 nt, Artificial Sequence
  Description of Artificial Sequence: Synthetic oligonucleotide
  Sense strand starting at position 3307 of SEQ ID NO: 1888049
guaagaaucuucuuugauu

SEQ ID NO: 2507083 - RNA, 19 nt, Artificial Sequence
  Description of Artificial Sequence: Synthetic oligonucleotide
  Antisense strand to SEQ ID NO: 2507082
aaucaaagaagauucuuac

SEQ ID NO: 2507084 - RNA, 19 nt, Artificial Sequence
  Description of Artificial Sequence: Synthetic oligonucleotide
  Sense strand starting at position 3471 of SEQ ID NO: 1888049
ggaacuguauucucacuuu

SEQ ID NO: 2507085 - RNA, 19 nt, Artificial Sequence
  Description of Artificial Sequence: Synthetic oligonucleotide
  Antisense strand to SEQ ID NO: 2507084
aaagugagaauacaguucc

SEQ ID NO: 2507086 - RNA, 19 nt, Artificial Sequence
  Description of Artificial Sequence: Synthetic oligonucleotide
  Sense strand starting at position 3608 of SEQ ID NO: 1888049
gccuauugaguguagauaa

SEQ ID NO: 2507087 - RNA, 19 nt, Artificial Sequence
  Description of Artificial Sequence: Synthetic oligonucleotide
  Antisense strand to SEQ ID NO: 2507086
uuaucuacacucaauaggc

SEQ ID NO: 2507088 - RNA, 19 nt, Artificial Sequence
  Description of Artificial Sequence: Synthetic oligonucleotide
  Sense strand starting at position 3619 of SEQ ID NO: 1888049
guagauaaacaucaugcuu

SEQ ID NO: 2507089 - RNA, 19 nt, Artificial Sequence
  Description of Artificial Sequence: Synthetic oligonucleotide
  Antisense strand to SEQ ID NO: 2507088
aagcaugauguuuaucuac

SEQ ID NO: 2507090 - RNA, 19 nt, Artificial Sequence
  Description of Artificial Sequence: Synthetic oligonucleotide
  Sense strand starting at position 3649 of SEQ ID NO: 1888049
uuaguugaucuguaguuua

SEQ ID NO: 2507091 - RNA, 19 nt, Artificial Sequence
  Description of Artificial Sequence: Synthetic oligonucleotide
  Antisense strand to SEQ ID NO: 2507090
uaaacuacagaucaacuaa

SEQ ID NO: 2507092 - RNA, 19 nt, Artificial Sequence
  Description of Artificial Sequence: Synthetic oligonucleotide
  Sense strand starting at position 191 of SEQ ID NO: 1888050
aggucucagaguugcuaua

SEQ ID NO: 2507093 - RNA, 19 nt, Artificial Sequence
  Description of Artificial Sequence: Synthetic oligonucleotide
  Antisense strand to SEQ ID NO: 2507092
uauagcaacucugagaccu

SEQ ID NO: 2507094 - RNA, 19 nt, Artificial Sequence
  Description of Artificial Sequence: Synthetic oligonucleotide
  Sense strand starting at position 193 of SEQ ID NO: 1888050
gucucagaguugcuauaau

SEQ ID NO: 2507095 - RNA, 19 nt, Artificial Sequence
  Description of Artificial Sequence: Synthetic oligonucleotide
  Antisense strand to SEQ ID NO: 2507094
auuauagcaacucugagac

SEQ ID NO: 2507096 - RNA, 19 nt, Artificial Sequence
  Description of Artificial Sequence: Synthetic oligonucleotide
  Sense strand starting at position 231 of SEQ ID NO: 1888050
gguauuuaguuguuugcaa

SEQ ID NO: 2507097 - RNA, 19 nt, Artificial Sequence
  Description of Artificial Sequence: Synthetic oligonucleotide
  Antisense strand to SEQ ID NO: 2507096
uugcaaacaacuaaauacc

SEQ ID NO: 2507098 - RNA, 19 nt, Artificial Sequence
  Description of Artificial Sequence: Synthetic oligonucleotide
  Sense strand starting at position 232 of SEQ ID NO: 1888050
guauuuaguuguuugcaau

SEQ ID NO: 2507099 - RNA, 19 nt, Artificial Sequence
  Description of Artificial Sequence: Synthetic oligonucleotide
  Antisense strand to SEQ ID NO: 2507098
auugcaaacaacuaaauac

SEQ ID NO: 2507100 - RNA, 19 nt, Artificial Sequence
  Description of Artificial Sequence: Synthetic oligonucleotide
  Sense strand starting at position 291 of SEQ ID NO: 1888050
agcauuuaucuuuguugua

SEQ ID NO: 2507101 - RNA, 19 nt, Artificial Sequence
  Description of Artificial Sequence: Synthetic oligonucleotide
  Antisense strand to SEQ ID NO: 2507100
uacaacaaagauaaaugcu

SEQ ID NO: 2507102 - RNA, 19 nt, Artificial Sequence
  Description of Artificial Sequence: Synthetic oligonucleotide
  Sense strand starting at position 292 of SEQ ID NO: 1888050
gcauuuaucuuuguuguac

SEQ ID NO: 2507103 - RNA, 19 nt, Artificial Sequence
  Description of Artificial Sequence: Synthetic oligonucleotide
  Antisense strand to SEQ ID NO: 2507102
guacaacaaagauaaaugc

SEQ ID NO: 2507104 - RNA, 19 nt, Artificial Sequence
  Description of Artificial Sequence: Synthetic oligonucleotide
  Sense strand starting at position 322 of SEQ ID NO: 1888050
aagacagauuccuagaagu

SEQ ID NO: 2507105 - RNA, 19 nt, Artificial Sequence
  Description of Artificial Sequence: Synthetic oligonucleotide
  Antisense strand to SEQ ID NO: 2507104
acuucuaggaaucugucuu

SEQ ID NO: 2507106 - RNA, 19 nt, Artificial Sequence
  Description of Artificial Sequence: Synthetic oligonucleotide
  Sense strand starting at position 340 of SEQ ID NO: 1888050
uggaauuacugucuuagag

SEQ ID NO: 2507107 - RNA, 19 nt, Artificial Sequence
  Description of Artificial Sequence: Synthetic oligonucleotide
  Antisense strand to SEQ ID NO: 2507106
cucuaagacaguaauucca

SEQ ID NO: 2507108 - RNA, 19 nt, Artificial Sequence
  Description of Artificial Sequence: Synthetic oligonucleotide
  Sense strand starting at position 395 of SEQ ID NO: 1888050
agaaacuugacacgguaau

SEQ ID NO: 2507109 - RNA, 19 nt, Artificial Sequence
  Description of Artificial Sequence: Synthetic oligonucleotide
  Antisense strand to SEQ ID NO: 2507108
auuaccgugucaaguuucu

SEQ ID NO: 2507110 - RNA, 19 nt, Artificial Sequence
  Description of Artificial Sequence: Synthetic oligonucleotide
  Sense strand starting at position 396 of SEQ ID NO: 1888050
gaaacuugacacgguaauu

SEQ ID NO: 2507111 - RNA, 19 nt, Artificial Sequence
  Description of Artificial Sequence: Synthetic oligonucleotide
  Antisense strand to SEQ ID NO: 2507110
aauuaccgugucaaguuuc

SEQ ID NO: 2507112 - RNA, 19 nt, Artificial Sequence
  Description of Artificial Sequence: Synthetic oligonucleotide
  Sense strand starting at position 429 of SEQ ID NO: 1888050
gcacuuaggcuuuaucugu

SEQ ID NO: 2507113 - RNA, 19 nt, Artificial Sequence
  Description of Artificial Sequence: Synthetic oligonucleotide
  Antisense strand to SEQ ID NO: 2507112
acagauaaagccuaagugc

SEQ ID NO: 2507114 - RNA, 19 nt, Artificial Sequence
  Description of Artificial Sequence: Synthetic oligonucleotide
  Sense strand starting at position 433 of SEQ ID NO: 1888050
uuaggcuuuaucugugaag

SEQ ID NO: 2507115 - RNA, 19 nt, Artificial Sequence
  Description of Artificial Sequence: Synthetic oligonucleotide
  Antisense strand to SEQ ID NO: 2507114
cuucacagauaaagccuaa

SEQ ID NO: 2507116 - RNA, 19 nt, Artificial Sequence
  Description of Artificial Sequence: Synthetic oligonucleotide
  Sense strand starting at position 614 of SEQ ID NO: 1888050
uugggaaacacucgucuaa

SEQ ID NO: 2507117 - RNA, 19 nt, Artificial Sequence
  Description of Artificial Sequence: Synthetic oligonucleotide
  Antisense strand to SEQ ID NO: 2507116
uuagacgaguguuucccaa

SEQ ID NO: 2507118 - RNA, 19 nt, Artificial Sequence
  Description of Artificial Sequence: Synthetic oligonucleotide
  Sense strand starting at position 616 of SEQ ID NO: 1888050
gggaaacacucgucuaagg

SEQ ID NO: 2507119 - RNA, 19 nt, Artificial Sequence
  Description of Artificial Sequence: Synthetic oligonucleotide
  Antisense strand to SEQ ID NO: 2507118
ccuuagacgaguguuuccc

SEQ ID NO: 2507120 - RNA, 19 nt, Artificial Sequence
  Description of Artificial Sequence: Synthetic oligonucleotide
  Sense strand starting at position 716 of SEQ ID NO: 1888050
ggcucuuacgcauacagga

SEQ ID NO: 2507121 - RNA, 19 nt, Artificial Sequence
  Description of Artificial Sequence: Synthetic oligonucleotide
  Antisense strand to SEQ ID NO: 2507120
uccuguaugcguaagagcc

SEQ ID NO: 2507122 - RNA, 19 nt, Artificial Sequence
  Description of Artificial Sequence: Synthetic oligonucleotide
  Sense strand starting at position 1079 of SEQ ID NO: 1888050
caggaagucuggcuucuau

SEQ ID NO: 2507123 - RNA, 19 nt, Artificial Sequence
  Description of Artificial Sequence: Synthetic oligonucleotide
  Antisense strand to SEQ ID NO: 2507122
auagaagccagacuuccug

SEQ ID NO: 2507124 - RNA, 19 nt, Artificial Sequence
  Description of Artificial Sequence: Synthetic oligonucleotide
  Sense strand starting at position 1131 of SEQ ID NO: 1888050
ucagcauucugauuggcuu

SEQ ID NO: 2507125 - RNA, 19 nt, Artificial Sequence
  Description of Artificial Sequence: Synthetic oligonucleotide
  Antisense strand to SEQ ID NO: 2507124
aagccaaucagaaugcuga

SEQ ID NO: 2507126 - RNA, 19 nt, Artificial Sequence
  Description of Artificial Sequence: Synthetic oligonucleotide
  Sense strand starting at position 1132 of SEQ ID NO: 1888050
cagcauucugauuggcuua

SEQ ID NO: 2507127 - RNA, 19 nt, Artificial Sequence
  Description of Artificial Sequence: Synthetic oligonucleotide
  Antisense strand to SEQ ID NO: 2507126
uaagccaaucagaaugcug

SEQ ID NO: 2507128 - RNA, 19 nt, Artificial Sequence
  Description of Artificial Sequence: Synthetic oligonucleotide
  Sense strand starting at position 1137 of SEQ ID NO: 1888050
uucugauuggcuuaaggcu

SEQ ID NO: 2507129 - RNA, 19 nt, Artificial Sequence
  Description of Artificial Sequence: Synthetic oligonucleotide
  Antisense strand to SEQ ID NO: 2507128
agccuuaagccaaucagaa

SEQ ID NO: 2507130 - RNA, 19 nt, Artificial Sequence
  Description of Artificial Sequence: Synthetic oligonucleotide
  Sense strand starting at position 1146 of SEQ ID NO: 1888050
gcuuaaggcuuguuuggaa

SEQ ID NO: 2507131 - RNA, 19 nt, Artificial Sequence
  Description of Artificial Sequence: Synthetic oligonucleotide
  Antisense strand to SEQ ID NO: 2507130
uuccaaacaagccuuaagc

SEQ ID NO: 2507132 - RNA, 19 nt, Artificial Sequence
  Description of Artificial Sequence: Synthetic oligonucleotide
  Sense strand starting at position 1183 of SEQ ID NO: 1888050
ccuagaguucuccauugcu

SEQ ID NO: 2507133 - RNA, 19 nt, Artificial Sequence
  Description of Artificial Sequence: Synthetic oligonucleotide
  Antisense strand to SEQ ID NO: 2507132
agcaauggagaacucuagg

SEQ ID NO: 2507134 - RNA, 19 nt, Artificial Sequence
  Description of Artificial Sequence: Synthetic oligonucleotide
  Sense strand starting at position 1186 of SEQ ID NO: 1888050
agaguucuccauugcuaaa

SEQ ID NO: 2507135 - RNA, 19 nt, Artificial Sequence
  Description of Artificial Sequence: Synthetic oligonucleotide
  Antisense strand to SEQ ID NO: 2507134
uuuagcaauggagaacucu

SEQ ID NO: 2507136 - RNA, 19 nt, Artificial Sequence
  Description of Artificial Sequence: Synthetic oligonucleotide
  Sense strand starting at position 1246 of SEQ ID NO: 1888050
gcucaagggcccuagauau

SEQ ID NO: 2507137 - RNA, 19 nt, Artificial Sequence
  Description of Artificial Sequence: Synthetic oligonucleotide
  Antisense strand to SEQ ID NO: 2507136
auaucuagggcccuugagc

SEQ ID NO: 2507138 - RNA, 19 nt, Artificial Sequence
  Description of Artificial Sequence: Synthetic oligonucleotide
  Sense strand starting at position 1312 of SEQ ID NO: 1888050
gcccuaagaggcugguuaa

SEQ ID NO: 2507139 - RNA, 19 nt, Artificial Sequence
  Description of Artificial Sequence: Synthetic oligonucleotide
  Antisense strand to SEQ ID NO: 2507138
uuaaccagccucuuagggc

SEQ ID NO: 2507140 - RNA, 19 nt, Artificial Sequence
  Description of Artificial Sequence: Synthetic oligonucleotide
  Sense strand starting at position 1330 of SEQ ID NO: 1888050
acagaaauaucacaguaug

SEQ ID NO: 2507141 - RNA, 19 nt, Artificial Sequence
  Description of Artificial Sequence: Synthetic oligonucleotide
  Antisense strand to SEQ ID NO: 2507140
cauacugugauauuucugu

SEQ ID NO: 2507142 - RNA, 19 nt, Artificial Sequence
  Description of Artificial Sequence: Synthetic oligonucleotide
  Sense strand starting at position 1552 of SEQ ID NO: 1888050
accgguugacugugugaca

SEQ ID NO: 2507143 - RNA, 19 nt, Artificial Sequence
  Description of Artificial Sequence: Synthetic oligonucleotide
  Antisense strand to SEQ ID NO: 2507142
ugucacacagucaaccggu

SEQ ID NO: 2507144 - RNA, 19 nt, Artificial Sequence
  Description of Artificial Sequence: Synthetic oligonucleotide
  Sense strand starting at position 1553 of SEQ ID NO: 1888050
ccgguugacugugugacaa

SEQ ID NO: 2507145 - RNA, 19 nt, Artificial Sequence
  Description of Artificial Sequence: Synthetic oligonucleotide
  Antisense strand to SEQ ID NO: 2507144
uugucacacagucaaccgg

SEQ ID NO: 2507146 - RNA, 19 nt, Artificial Sequence
  Description of Artificial Sequence: Synthetic oligonucleotide
  Sense strand starting at position 1790 of SEQ ID NO: 1888050
ggccauugaggucguaaca

SEQ ID NO: 2507147 - RNA, 19 nt, Artificial Sequence
  Description of Artificial Sequence: Synthetic oligonucleotide
  Antisense strand to SEQ ID NO: 2507146
uguuacgaccucaauggcc

SEQ ID NO: 2507148 - RNA, 19 nt, Artificial Sequence
  Description of Artificial Sequence: Synthetic oligonucleotide
  Sense strand starting at position 1818 of SEQ ID NO: 1888050
aucagagccuaguccuuaa

SEQ ID NO: 2507149 - RNA, 19 nt, Artificial Sequence
  Description of Artificial Sequence: Synthetic oligonucleotide
  Antisense strand to SEQ ID NO: 2507148
uuaaggacuaggcucugau

SEQ ID NO: 2507150 - RNA, 19 nt, Artificial Sequence
  Description of Artificial Sequence: Synthetic oligonucleotide
  Sense strand starting at position 1821 of SEQ ID NO: 1888050
agagccuaguccuuaacua

SEQ ID NO: 2507151 - RNA, 19 nt, Artificial Sequence
  Description of Artificial Sequence: Synthetic oligonucleotide
  Antisense strand to SEQ ID NO: 2507150
uaguuaaggacuaggcucu

SEQ ID NO: 2507152 - RNA, 19 nt, Artificial Sequence
  Description of Artificial Sequence: Synthetic oligonucleotide
  Sense strand starting at position 1822 of SEQ ID NO: 1888050
gagccuaguccuuaacuag

SEQ ID NO: 2507153 - RNA, 19 nt, Artificial Sequence
  Description of Artificial Sequence: Synthetic oligonucleotide
  Antisense strand to SEQ ID NO: 2507152
cuaguuaaggacuaggcuc

SEQ ID NO: 2507154 - RNA, 19 nt, Artificial Sequence
  Description of Artificial Sequence: Synthetic oligonucleotide
  Sense strand starting at position 1845 of SEQ ID NO: 1888050
ggguaagugcccggacuaa

SEQ ID NO: 2507155 - RNA, 19 nt, Artificial Sequence
  Description of Artificial Sequence: Synthetic oligonucleotide
  Antisense strand to SEQ ID NO: 2507154
uuaguccgggcacuuaccc

SEQ ID NO: 2507156 - RNA, 19 nt, Artificial Sequence
  Description of Artificial Sequence: Synthetic oligonucleotide
  Sense strand starting at position 2797 of SEQ ID NO: 1888050
gacggauuuguuugguuuc

SEQ ID NO: 2507157 - RNA, 19 nt, Artificial Sequence
  Description of Artificial Sequence: Synthetic oligonucleotide
  Antisense strand to SEQ ID NO: 2507156
gaaaccaaacaaauccguc

SEQ ID NO: 2507158 - RNA, 19 nt, Artificial Sequence
  Description of Artificial Sequence: Synthetic oligonucleotide
  Sense strand starting at position 2799 of SEQ ID NO: 1888050
cggauuuguuugguuucaa

SEQ ID NO: 2507159 - RNA, 19 nt, Artificial Sequence
  Description of Artificial Sequence: Synthetic oligonucleotide
  Antisense strand to SEQ ID NO: 2507158
uugaaaccaaacaaauccg

SEQ ID NO: 2507160 - RNA, 19 nt, Artificial Sequence
  Description of Artificial Sequence: Synthetic oligonucleotide
  Sense strand starting at position 3721 of SEQ ID NO: 1888050
gguagaacugauuguuagu

SEQ ID NO: 2507161 - RNA, 19 nt, Artificial Sequence
  Description of Artificial Sequence: Synthetic oligonucleotide
  Antisense strand to SEQ ID NO: 2507160
acuaacaaucaguucuacc

SEQ ID NO: 2507162 - RNA, 19 nt, Artificial Sequence
  Description of Artificial Sequence: Synthetic oligonucleotide
  Sense strand starting at position 3726 of SEQ ID NO: 1888050
aacugauuguuagugugau

SEQ ID NO: 2507163 - RNA, 19 nt, Artificial Sequence
  Description of Artificial Sequence: Synthetic oligonucleotide
  Antisense strand to SEQ ID NO: 2507162
aucacacuaacaaucaguu

SEQ ID NO: 2507164 - RNA, 19 nt, Artificial Sequence
  Description of Artificial Sequence: Synthetic oligonucleotide
  Sense strand starting at position 3830 of SEQ ID NO: 1888050
aguugugugggucacaguu

SEQ ID NO: 2507165 - RNA, 19 nt, Artificial Sequence
  Description of Artificial Sequence: Synthetic oligonucleotide
  Antisense strand to SEQ ID NO: 2507164
aacugugacccacacaacu

SEQ ID NO: 2507166 - RNA, 19 nt, Artificial Sequence
  Description of Artificial Sequence: Synthetic oligonucleotide
  Sense strand starting at position 3888 of SEQ ID NO: 1888050
gugcuguaugcgucgguga

SEQ ID NO: 2507167 - RNA, 19 nt, Artificial Sequence
  Description of Artificial Sequence: Synthetic oligonucleotide
  Antisense strand to SEQ ID NO: 2507166
ucaccgacgcauacagcac

SEQ ID NO: 2507168 - RNA, 19 nt, Artificial Sequence
  Description of Artificial Sequence: Synthetic oligonucleotide
  Sense strand starting at position 3918 of SEQ ID NO: 1888050
uuuguaaggcuugagcgau

SEQ ID NO: 2507169 - RNA, 19 nt, Artificial Sequence
  Description of Artificial Sequence: Synthetic oligonucleotide
  Antisense strand to SEQ ID NO: 2507168
aucgcucaagccuuacaaa

SEQ ID NO: 2507170 - RNA, 19 nt, Artificial Sequence
  Description of Artificial Sequence: Synthetic oligonucleotide
  Sense strand starting at position 3946 of SEQ ID NO: 1888050
ccaguuauccuagcgcugu

SEQ ID NO: 2507171 - RNA, 19 nt, Artificial Sequence
  Description of Artificial Sequence: Synthetic oligonucleotide
  Antisense strand to SEQ ID NO: 2507170
acagcgcuaggauaacugg

SEQ ID NO: 2507172 - RNA, 19 nt, Artificial Sequence
  Description of Artificial Sequence: Synthetic oligonucleotide
  Sense strand starting at position 406 of SEQ ID NO: 1888051
ggaauuagcguccaucaau

SEQ ID NO: 2507173 - RNA, 19 nt, Artificial Sequence
  Description of Artificial Sequence: Synthetic oligonucleotide
  Antisense strand to SEQ ID NO: 2507172
auugauggacgcuaauucc

SEQ ID NO: 2507174 - RNA, 19 nt, Artificial Sequence
  Description of Artificial Sequence: Synthetic oligonucleotide
  Sense strand starting at position 412 of SEQ ID NO: 1888051
agcguccaucaauagguaa

SEQ ID NO: 2507175 - RNA, 19 nt, Artificial Sequence
  Description of Artificial Sequence: Synthetic oligonucleotide
  Antisense strand to SEQ ID NO: 2507174
uuaccuauugauggacgcu

SEQ ID NO: 2507176 - RNA, 19 nt, Artificial Sequence
  Description of Artificial Sequence: Synthetic oligonucleotide
  Sense strand starting at position 671 of SEQ ID NO: 1888051
ggagguggcagugaacuaa

SEQ ID NO: 2507177 - RNA, 19 nt, Artificial Sequence
  Description of Artificial Sequence: Synthetic oligonucleotide
  Antisense strand to SEQ ID NO: 2507176
uuaguucacugccaccucc

SEQ ID NO: 2507178 - RNA, 19 nt, Artificial Sequence
  Description of Artificial Sequence: Synthetic oligonucleotide
  Sense strand starting at position 675 of SEQ ID NO: 1888051
guggcagugaacuaagaug

SEQ ID NO: 2507179 - RNA, 19 nt, Artificial Sequence
  Description of Artificial Sequence: Synthetic oligonucleotide
  Antisense strand to SEQ ID NO: 2507178
caucuuaguucacugccac

SEQ ID NO: 2507180 - RNA, 19 nt, Artificial Sequence
  Description of Artificial Sequence: Synthetic oligonucleotide
  Sense strand starting at position 776 of SEQ ID NO: 1888051
ggugauggauauucuauaa

SEQ ID NO: 2507181 - RNA, 19 nt, Artificial Sequence
  Description of Artificial Sequence: Synthetic oligonucleotide
  Antisense strand to SEQ ID NO: 2507180
uuauagaauauccaucacc

SEQ ID NO: 2507182 - RNA, 19 nt, Artificial Sequence
  Description of Artificial Sequence: Synthetic oligonucleotide
  Sense strand starting at position 902 of SEQ ID NO: 1888051
agcuuaagaagugauguga

SEQ ID NO: 2507183 - RNA, 19 nt, Artificial Sequence
  Description of Artificial Sequence: Synthetic oligonucleotide
  Antisense strand to SEQ ID NO: 2507182
ucacaucacuucuuaagcu

SEQ ID NO: 2507184 - RNA, 19 nt, Artificial Sequence
  Description of Artificial Sequence: Synthetic oligonucleotide
  Sense strand starting at position 958 of SEQ ID NO: 1888051
uuuguaaugauguggagau

SEQ ID NO: 2507185 - RNA, 19 nt, Artificial Sequence
  Description of Artificial Sequence: Synthetic oligonucleotide
  Antisense strand to SEQ ID NO: 2507184
aucuccacaucauuacaaa

SEQ ID NO: 2507186 - RNA, 19 nt, Artificial Sequence
  Description of Artificial Sequence: Synthetic oligonucleotide
  Sense strand starting at position 974 of SEQ ID NO: 1888051
gauauugugguguaauaau

SEQ ID NO: 2507187 - RNA, 19 nt, Artificial Sequence
  Description of Artificial Sequence: Synthetic oligonucleotide
  Antisense strand to SEQ ID NO: 2507186
auuauuacaccacaauauc

SEQ ID NO: 2507188 - RNA, 19 nt, Artificial Sequence
  Description of Artificial Sequence: Synthetic oligonucleotide
  Sense strand starting at position 1029 of SEQ ID NO: 1888051
ggcuaaacuguauaaacca

SEQ ID NO: 2507189 - RNA, 19 nt, Artificial Sequence
  Description of Artificial Sequence: Synthetic oligonucleotide
  Antisense strand to SEQ ID NO: 2507188
ugguuuauacaguuuagcc

SEQ ID NO: 2507190 - RNA, 19 nt, Artificial Sequence
  Description of Artificial Sequence: Synthetic oligonucleotide
  Sense strand starting at position 1068 of SEQ ID NO: 1888051
gaagucauaugacuacugu

SEQ ID NO: 2507191 - RNA, 19 nt, Artificial Sequence
  Description of Artificial Sequence: Synthetic oligonucleotide
  Antisense strand to SEQ ID NO: 2507190
acaguagucauaugacuuc

SEQ ID NO: 2507192 - RNA, 19 nt, Artificial Sequence
  Description of Artificial Sequence: Synthetic oligonucleotide
  Sense strand starting at position 1221 of SEQ ID NO: 1888051
ccaagcugugaggauuaca

SEQ ID NO: 2507193 - RNA, 19 nt, Artificial Sequence
  Description of Artificial Sequence: Synthetic oligonucleotide
  Antisense strand to SEQ ID NO: 2507192
uguaauccucacagcuugg

SEQ ID NO: 2507194 - RNA, 19 nt, Artificial Sequence
  Description of Artificial Sequence: Synthetic oligonucleotide
  Sense strand starting at position 1459 of SEQ ID NO: 1888051
cgcugaauaacagauaugu

SEQ ID NO: 2507195 - RNA, 19 nt, Artificial Sequence
  Description of Artificial Sequence: Synthetic oligonucleotide
  Antisense strand to SEQ ID NO: 2507194
acauaucuguuauucagcg

SEQ ID NO: 2507196 - RNA, 19 nt, Artificial Sequence
  Description of Artificial Sequence: Synthetic oligonucleotide
  Sense strand starting at position 1488 of SEQ ID NO: 1888051
gggacuaaagauuguaucu

SEQ ID NO: 2507197 - RNA, 19 nt, Artificial Sequence
  Description of Artificial Sequence: Synthetic oligonucleotide
  Antisense strand to SEQ ID NO: 2507196
agauacaaucuuuaguccc

SEQ ID NO: 2507198 - RNA, 19 nt, Artificial Sequence
  Description of Artificial Sequence: Synthetic oligonucleotide
  Sense strand starting at position 1546 of SEQ ID NO: 1888051
acauaaagugcuuggcaga

SEQ ID NO: 2507199 - RNA, 19 nt, Artificial Sequence
  Description of Artificial Sequence: Synthetic oligonucleotide
  Antisense strand to SEQ ID NO: 2507198
ucugccaagcacuuuaugu

SEQ ID NO: 2507200 - RNA, 19 nt, Artificial Sequence
  Description of Artificial Sequence: Synthetic oligonucleotide
  Sense strand starting at position 1989 of SEQ ID NO: 1888051
ugcgcaaagguuucuguca

SEQ ID NO: 2507201 - RNA, 19 nt, Artificial Sequence
  Description of Artificial Sequence: Synthetic oligonucleotide
  Antisense strand to SEQ ID NO: 2507200
ugacagaaaccuuugcgca

SEQ ID NO: 2507202 - RNA, 19 nt, Artificial Sequence
  Description of Artificial Sequence: Synthetic oligonucleotide
  Sense strand starting at position 2075 of SEQ ID NO: 1888051
ccgccaggauucuuggaaa

SEQ ID NO: 2507203 - RNA, 19 nt, Artificial Sequence
  Description of Artificial Sequence: Synthetic oligonucleotide
  Antisense strand to SEQ ID NO: 2507202
uuuccaagaauccuggcgg

SEQ ID NO: 2507204 - RNA, 19 nt, Artificial Sequence
  Description of Artificial Sequence: Synthetic oligonucleotide
  Sense strand starting at position 2134 of SEQ ID NO: 1888051
gugcgcuaagcuguggaaa

SEQ ID NO: 2507205 - RNA, 19 nt, Artificial Sequence
  Description of Artificial Sequence: Synthetic oligonucleotide
  Antisense strand to SEQ ID NO: 2507204
uuuccacagcuuagcgcac

SEQ ID NO: 2507206 - RNA, 19 nt, Artificial Sequence
  Description of Artificial Sequence: Synthetic oligonucleotide
  Sense strand starting at position 2346 of SEQ ID NO: 1888051
gcucguguaguuccaguua

SEQ ID NO: 2507207 - RNA, 19 nt, Artificial Sequence
  Description of Artificial Sequence: Synthetic oligonucleotide
  Antisense strand to SEQ ID NO: 2507206
uaacuggaacuacacgagc

SEQ ID NO: 2507208 - RNA, 19 nt, Artificial Sequence
  Description of Artificial Sequence: Synthetic oligonucleotide
  Sense strand starting at position 2560 of SEQ ID NO: 1888051
gcucucaauggaggucuaa

SEQ ID NO: 2507209 - RNA, 19 nt, Artificial Sequence
  Description of Artificial Sequence: Synthetic oligonucleotide
  Antisense strand to SEQ ID NO: 2507208
uuagaccuccauugagagc

SEQ ID NO: 2507210 - RNA, 19 nt, Artificial Sequence
  Description of Artificial Sequence: Synthetic oligonucleotide
  Sense strand starting at position 2742 of SEQ ID NO: 1888051
cgagucuccggguaagaug

SEQ ID NO: 2507211 - RNA, 19 nt, Artificial Sequence
  Description of Artificial Sequence: Synthetic oligonucleotide
  Antisense strand to SEQ ID NO: 2507210
caucuuacccggagacucg

SEQ ID NO: 2507212 - RNA, 19 nt, Artificial Sequence
  Description of Artificial Sequence: Synthetic oligonucleotide
  Sense strand starting at position 2753 of SEQ ID NO: 1888051
guaagaugccgugcaagcu

SEQ ID NO: 2507213 - RNA, 19 nt, Artificial Sequence
  Description of Artificial Sequence: Synthetic oligonucleotide
  Antisense strand to SEQ ID NO: 2507212
agcuugcacggcaucuuac

SEQ ID NO: 2507214 - RNA, 19 nt, Artificial Sequence
  Description of Artificial Sequence: Synthetic oligonucleotide
  Sense strand starting at position 2775 of SEQ ID NO: 1888051
agaugaauugguuagggcu

SEQ ID NO: 2507215 - RNA, 19 nt, Artificial Sequence
  Description of Artificial Sequence: Synthetic oligonucleotide
  Antisense strand to SEQ ID NO: 2507214
agcccuaaccaauucaucu

SEQ ID NO: 2507216 - RNA, 19 nt, Artificial Sequence
  Description of Artificial Sequence: Synthetic oligonucleotide
  Sense strand starting at position 2861 of SEQ ID NO: 1888051
cuguguguucugucuuguu

SEQ ID NO: 2507217 - RNA, 19 nt, Artificial Sequence
  Description of Artificial Sequence: Synthetic oligonucleotide
  Antisense strand to SEQ ID NO: 2507216
aacaagacagaacacacag

SEQ ID NO: 2507218 - RNA, 19 nt, Artificial Sequence
  Description of Artificial Sequence: Synthetic oligonucleotide
  Sense strand starting at position 2863 of SEQ ID NO: 1888051
guguguucugucuuguucu

SEQ ID NO: 2507219 - RNA, 19 nt, Artificial Sequence
  Description of Artificial Sequence: Synthetic oligonucleotide
  Antisense strand to SEQ ID NO: 2507218
agaacaagacagaacacac

SEQ ID NO: 2507220 - RNA, 19 nt, Artificial Sequence
  Description of Artificial Sequence: Synthetic oligonucleotide
  Sense strand starting at position 2865 of SEQ ID NO: 1888051
guguucugucuuguucuca

SEQ ID NO: 2507221 - RNA, 19 nt, Artificial Sequence
  Description of Artificial Sequence: Synthetic oligonucleotide
  Antisense strand to SEQ ID NO: 2507220
ugagaacaagacagaacac

SEQ ID NO: 2507222 - RNA, 19 nt, Artificial Sequence
  Description of Artificial Sequence: Synthetic oligonucleotide
  Sense strand starting at position 2948 of SEQ ID NO: 1888051
cuggguccucuaggaguaa

SEQ ID NO: 2507223 - RNA, 19 nt, Artificial Sequence
  Description of Artificial Sequence: Synthetic oligonucleotide
  Antisense strand to SEQ ID NO: 2507222
uuacuccuagaggacccag

SEQ ID NO: 2507224 - RNA, 19 nt, Artificial Sequence
  Description of Artificial Sequence: Synthetic oligonucleotide
  Sense strand starting at position 2982 of SEQ ID NO: 1888051
acaugcugccguuuaguga

SEQ ID NO: 2507225 - RNA, 19 nt, Artificial Sequence
  Description of Artificial Sequence: Synthetic oligonucleotide
  Antisense strand to SEQ ID NO: 2507224
ucacuaaacggcagcaugu

SEQ ID NO: 2507226 - RNA, 19 nt, Artificial Sequence
  Description of Artificial Sequence: Synthetic oligonucleotide
  Sense strand starting at position 3009 of SEQ ID NO: 1888051
ccacauuacugugcugaac

SEQ ID NO: 2507227 - RNA, 19 nt, Artificial Sequence
  Description of Artificial Sequence: Synthetic oligonucleotide
  Antisense strand to SEQ ID NO: 2507226
guucagcacaguaaugugg

SEQ ID NO: 2507228 - RNA, 19 nt, Artificial Sequence
  Description of Artificial Sequence: Synthetic oligonucleotide
  Sense strand starting at position 3037 of SEQ ID NO: 1888051
acguuaucuccgguagcuu

SEQ ID NO: 2507229 - RNA, 19 nt, Artificial Sequence
  Description of Artificial Sequence: Synthetic oligonucleotide
  Antisense strand to SEQ ID NO: 2507228
aagcuaccggagauaacgu

SEQ ID NO: 2507230 - RNA, 19 nt, Artificial Sequence
  Description of Artificial Sequence: Synthetic oligonucleotide
  Sense strand starting at position 3057 of SEQ ID NO: 1888051
agggaaguaucgguaaccu

SEQ ID NO: 2507231 - RNA, 19 nt, Artificial Sequence
  Description of Artificial Sequence: Synthetic oligonucleotide
  Antisense strand to SEQ ID NO: 2507230
agguuaccgauacuucccu

SEQ ID NO: 2507232 - RNA, 19 nt, Artificial Sequence
  Description of Artificial Sequence: Synthetic oligonucleotide
  Sense strand starting at position 3065 of SEQ ID NO: 1888051
aucgguaaccucgauacuu

SEQ ID NO: 2507233 - RNA, 19 nt, Artificial Sequence
  Description of Artificial Sequence: Synthetic oligonucleotide
  Antisense strand to SEQ ID NO: 2507232
aaguaucgagguuaccgau

SEQ ID NO: 2507234 - RNA, 19 nt, Artificial Sequence
  Description of Artificial Sequence: Synthetic oligonucleotide
  Sense strand starting at position 3067 of SEQ ID NO: 1888051
cgguaaccucgauacuuua

SEQ ID NO: 2507235 - RNA, 19 nt, Artificial Sequence
  Description of Artificial Sequence: Synthetic oligonucleotide
  Antisense strand to SEQ ID NO: 2507234
uaaaguaucgagguuaccg

SEQ ID NO: 2507236 - RNA, 19 nt, Artificial Sequence
  Description of Artificial Sequence: Synthetic oligonucleotide
  Sense strand starting at position 3223 of SEQ ID NO: 1888051
uugacuuuacugcgaagaa

SEQ ID NO: 2507237 - RNA, 19 nt, Artificial Sequence
  Description of Artificial Sequence: Synthetic oligonucleotide
  Antisense strand to SEQ ID NO: 2507236
uucuucgcaguaaagucaa

SEQ ID NO: 2507238 - RNA, 19 nt, Artificial Sequence
  Description of Artificial Sequence: Synthetic oligonucleotide
  Sense strand starting at position 3257 of SEQ ID NO: 1888051
ccguaaccagaucaaaguu

SEQ ID NO: 2507239 - RNA, 19 nt, Artificial Sequence
  Description of Artificial Sequence: Synthetic oligonucleotide
  Antisense strand to SEQ ID NO: 2507238
aacuuugaucugguuacgg

SEQ ID NO: 2507240 - RNA, 19 nt, Artificial Sequence
  Description of Artificial Sequence: Synthetic oligonucleotide
  Sense strand starting at position 3271 of SEQ ID NO: 1888051
aaguuaguauuacuggcaa

SEQ ID NO: 2507241 - RNA, 19 nt, Artificial Sequence
  Description of Artificial Sequence: Synthetic oligonucleotide
  Antisense strand to SEQ ID NO: 2507240
uugccaguaauacuaacuu

SEQ ID NO: 2507242 - RNA, 19 nt, Artificial Sequence
  Description of Artificial Sequence: Synthetic oligonucleotide
  Sense strand starting at position 3456 of SEQ ID NO: 1888051
ucucaaagucaugaaagca

SEQ ID NO: 2507243 - RNA, 19 nt, Artificial Sequence
  Description of Artificial Sequence: Synthetic oligonucleotide
  Antisense strand to SEQ ID NO: 2507242
ugcuuucaugacuuugaga

SEQ ID NO: 2507244 - RNA, 19 nt, Artificial Sequence
  Description of Artificial Sequence: Synthetic oligonucleotide
  Sense strand starting at position 3545 of SEQ ID NO: 1888051
ggugaaaucugaguaaggg

SEQ ID NO: 2507245 - RNA, 19 nt, Artificial Sequence
  Description of Artificial Sequence: Synthetic oligonucleotide
  Antisense strand to SEQ ID NO: 2507244
cccuuacucagauuucacc

SEQ ID NO: 2507246 - RNA, 19 nt, Artificial Sequence
  Description of Artificial Sequence: Synthetic oligonucleotide
  Sense strand starting at position 3555 of SEQ ID NO: 1888051
gaguaagggcuguaguuua

SEQ ID NO: 2507247 - RNA, 19 nt, Artificial Sequence
  Description of Artificial Sequence: Synthetic oligonucleotide
  Antisense strand to SEQ ID NO: 2507246
uaaacuacagcccuuacuc

SEQ ID NO: 2507248 - RNA, 19 nt, Artificial Sequence
  Description of Artificial Sequence: Synthetic oligonucleotide
  Sense strand starting at position 3612 of SEQ ID NO: 1888051
auucuagcaugguuauaug

SEQ ID NO: 2507249 - RNA, 19 nt, Artificial Sequence
  Description of Artificial Sequence: Synthetic oligonucleotide
  Antisense strand to SEQ ID NO: 2507248
cauauaaccaugcuagaau

SEQ ID NO: 2507250 - RNA, 19 nt, Artificial Sequence
  Description of Artificial Sequence: Synthetic oligonucleotide
  Sense strand starting at position 3863 of SEQ ID NO: 1888051
ugucuugcccauggagaac

SEQ ID NO: 2507251 - RNA, 19 nt, Artificial Sequence
  Description of Artificial Sequence: Synthetic oligonucleotide
  Antisense strand to SEQ ID NO: 2507250
guucuccaugggcaagaca

SEQ ID NO: 2507252 - RNA, 19 nt, Artificial Sequence
  Description of Artificial Sequence: Synthetic oligonucleotide
  Sense strand starting at position 6 of SEQ ID NO: 1888052
gagaguguucauggcagua

SEQ ID NO: 2507253 - RNA, 19 nt, Artificial Sequence
  Description of Artificial Sequence: Synthetic oligonucleotide
  Antisense strand to SEQ ID NO: 2507252
uacugccaugaacacucuc

SEQ ID NO: 2507254 - RNA, 19 nt, Artificial Sequence
  Description of Artificial Sequence: Synthetic oligonucleotide
  Sense strand starting at position 16 of SEQ ID NO: 1888052
auggcaguauugcuuagaa

SEQ ID NO: 2507255 - RNA, 19 nt, Artificial Sequence
  Description of Artificial Sequence: Synthetic oligonucleotide
  Antisense strand to SEQ ID NO: 2507254
uucuaagcaauacugccau

SEQ ID NO: 2507256 - RNA, 19 nt, Artificial Sequence
  Description of Artificial Sequence: Synthetic oligonucleotide
  Sense strand starting at position 18 of SEQ ID NO: 1888052
ggcaguauugcuuagaaca

SEQ ID NO: 2507257 - RNA, 19 nt, Artificial Sequence
  Description of Artificial Sequence: Synthetic oligonucleotide
  Antisense strand to SEQ ID NO: 2507256
uguucuaagcaauacugcc

SEQ ID NO: 2507258 - RNA, 19 nt, Artificial Sequence
  Description of Artificial Sequence: Synthetic oligonucleotide
  Sense strand starting at position 66 of SEQ ID NO: 1888052
acccauuaaugggugauua

SEQ ID NO: 2507259 - RNA, 19 nt, Artificial Sequence
  Description of Artificial Sequence: Synthetic oligonucleotide
  Antisense strand to SEQ ID NO: 2507258
uaaucacccauuaaugggu

SEQ ID NO: 2507260 - RNA, 19 nt, Artificial Sequence
  Description of Artificial Sequence: Synthetic oligonucleotide
  Sense strand starting at position 67 of SEQ ID NO: 1888052
cccauuaaugggugauuaa

SEQ ID NO: 2507261 - RNA, 19 nt, Artificial Sequence
  Description of Artificial Sequence: Synthetic oligonucleotide
  Antisense strand to SEQ ID NO: 2507260
uuaaucacccauuaauggg

SEQ ID NO: 2507262 - RNA, 19 nt, Artificial Sequence
  Description of Artificial Sequence: Synthetic oligonucleotide
  Sense strand starting at position 70 of SEQ ID NO: 1888052
auuaaugggugauuaaacu

SEQ ID NO: 2507263 - RNA, 19 nt, Artificial Sequence
  Description of Artificial Sequence: Synthetic oligonucleotide
  Antisense strand to SEQ ID NO: 2507262
aguuuaaucacccauuaau

SEQ ID NO: 2507264 - RNA, 19 nt, Artificial Sequence
  Description of Artificial Sequence: Synthetic oligonucleotide
  Sense strand starting at position 76 of SEQ ID NO: 1888052
gggugauuaaacuguguua

SEQ ID NO: 2507265 - RNA, 19 nt, Artificial Sequence
  Description of Artificial Sequence: Synthetic oligonucleotide
  Antisense strand to SEQ ID NO: 2507264
uaacacaguuuaaucaccc

SEQ ID NO: 2507266 - RNA, 19 nt, Artificial Sequence
  Description of Artificial Sequence: Synthetic oligonucleotide
  Sense strand starting at position 78 of SEQ ID NO: 1888052
gugauuaaacuguguuaua

SEQ ID NO: 2507267 - RNA, 19 nt, Artificial Sequence
  Description of Artificial Sequence: Synthetic oligonucleotide
  Antisense strand to SEQ ID NO: 2507266
uauaacacaguuuaaucac

SEQ ID NO: 2507268 - RNA, 19 nt, Artificial Sequence
  Description of Artificial Sequence: Synthetic oligonucleotide
  Sense strand starting at position 135 of SEQ ID NO: 1888052
caagacuucuaugugcuga

SEQ ID NO: 2507269 - RNA, 19 nt, Artificial Sequence
  Description of Artificial Sequence: Synthetic oligonucleotide
  Antisense strand to SEQ ID NO: 2507268
ucagcacauagaagucuug

SEQ ID NO: 2507270 - RNA, 19 nt, Artificial Sequence
  Description of Artificial Sequence: Synthetic oligonucleotide
  Sense strand starting at position 140 of SEQ ID NO: 1888052
cuucuaugugcugauggaa

SEQ ID NO: 2507271 - RNA, 19 nt, Artificial Sequence
  Description of Artificial Sequence: Synthetic oligonucleotide
  Antisense strand to SEQ ID NO: 2507270
uuccaucagcacauagaag

SEQ ID NO: 2507272 - RNA, 19 nt, Artificial Sequence
  Description of Artificial Sequence: Synthetic oligonucleotide
  Sense strand starting at position 185 of SEQ ID NO: 1888052
aagucagggugguuuagua

SEQ ID NO: 2507273 - RNA, 19 nt, Artificial Sequence
  Description of Artificial Sequence: Synthetic oligonucleotide
  Antisense strand to SEQ ID NO: 2507272
uacuaaaccacccugacuu

SEQ ID NO: 2507274 - RNA, 19 nt, Artificial Sequence
  Description of Artificial Sequence: Synthetic oligonucleotide
  Sense strand starting at position 327 of SEQ ID NO: 1888052
ucauaucuugacugugaug

SEQ ID NO: 2507275 - RNA, 19 nt, Artificial Sequence
  Description of Artificial Sequence: Synthetic oligonucleotide
  Antisense strand to SEQ ID NO: 2507274
caucacagucaagauauga

SEQ ID NO: 2507276 - RNA, 19 nt, Artificial Sequence
  Description of Artificial Sequence: Synthetic oligonucleotide
  Sense strand starting at position 796 of SEQ ID NO: 1888052
guuggaauucuaggguaug

SEQ ID NO: 2507277 - RNA, 19 nt, Artificial Sequence
  Description of Artificial Sequence: Synthetic oligonucleotide
  Antisense strand to SEQ ID NO: 2507276
cauacccuagaauuccaac

SEQ ID NO: 2507278 - RNA, 19 nt, Artificial Sequence
  Description of Artificial Sequence: Synthetic oligonucleotide
  Sense strand starting at position 982 of SEQ ID NO: 1888052
uuaagauacugagcugaga

SEQ ID NO: 2507279 - RNA, 19 nt, Artificial Sequence
  Description of Artificial Sequence: Synthetic oligonucleotide
  Antisense strand to SEQ ID NO: 2507278
ucucagcucaguaucuuaa

SEQ ID NO: 2507280 - RNA, 19 nt, Artificial Sequence
  Description of Artificial Sequence: Synthetic oligonucleotide
  Sense strand starting at position 1174 of SEQ ID NO: 1888052
gguaucucguuacuccaga

SEQ ID NO: 2507281 - RNA, 19 nt, Artificial Sequence
  Description of Artificial Sequence: Synthetic oligonucleotide
  Antisense strand to SEQ ID NO: 2507280
ucuggaguaacgagauacc

SEQ ID NO: 2507282 - RNA, 19 nt, Artificial Sequence
  Description of Artificial Sequence: Synthetic oligonucleotide
  Sense strand starting at position 1175 of SEQ ID NO: 1888052
guaucucguuacuccagaa

SEQ ID NO: 2507283 - RNA, 19 nt, Artificial Sequence
  Description of Artificial Sequence: Synthetic oligonucleotide
  Antisense strand to SEQ ID NO: 2507282
uucuggaguaacgagauac

SEQ ID NO: 2507284 - RNA, 19 nt, Artificial Sequence
  Description of Artificial Sequence: Synthetic oligonucleotide
  Sense strand starting at position 1179 of SEQ ID NO: 1888052
cucguuacuccagaaauug

SEQ ID NO: 2507285 - RNA, 19 nt, Artificial Sequence
  Description of Artificial Sequence: Synthetic oligonucleotide
  Antisense strand to SEQ ID NO: 2507284
caauuucuggaguaacgag

SEQ ID NO: 2507286 - RNA, 19 nt, Artificial Sequence
  Description of Artificial Sequence: Synthetic oligonucleotide
  Sense strand starting at position 1258 of SEQ ID NO: 1888052
ccggcuaauccaggacuuu

SEQ ID NO: 2507287 - RNA, 19 nt, Artificial Sequence
  Description of Artificial Sequence: Synthetic oligonucleotide
  Antisense strand to SEQ ID NO: 2507286
aaaguccuggauuagccgg

SEQ ID NO: 2507288 - RNA, 19 nt, Artificial Sequence
  Description of Artificial Sequence: Synthetic oligonucleotide
  Sense strand starting at position 1298 of SEQ ID NO: 1888052
aguggauccuggaggugau

SEQ ID NO: 2507289 - RNA, 19 nt, Artificial Sequence
  Description of Artificial Sequence: Synthetic oligonucleotide
  Antisense strand to SEQ ID NO: 2507288
aucaccuccaggauccacu

SEQ ID NO: 2507290 - RNA, 19 nt, Artificial Sequence
  Description of Artificial Sequence: Synthetic oligonucleotide
  Sense strand starting at position 1299 of SEQ ID NO: 1888052
guggauccuggaggugaua

SEQ ID NO: 2507291 - RNA, 19 nt, Artificial Sequence
  Description of Artificial Sequence: Synthetic oligonucleotide
  Antisense strand to SEQ ID NO: 2507290
uaucaccuccaggauccac

SEQ ID NO: 2507292 - RNA, 19 nt, Artificial Sequence
  Description of Artificial Sequence: Synthetic oligonucleotide
  Sense strand starting at position 1301 of SEQ ID NO: 1888052
ggauccuggaggugauagu

SEQ ID NO: 2507293 - RNA, 19 nt, Artificial Sequence
  Description of Artificial Sequence: Synthetic oligonucleotide
  Antisense strand to SEQ ID NO: 2507292
acuaucaccuccaggaucc

SEQ ID NO: 2507294 - RNA, 19 nt, Artificial Sequence
  Description of Artificial Sequence: Synthetic oligonucleotide
  Sense strand starting at position 1494 of SEQ ID NO: 1888052
gugagaggucgcagcucau

SEQ ID NO: 2507295 - RNA, 19 nt, Artificial Sequence
  Description of Artificial Sequence: Synthetic oligonucleotide
  Antisense strand to SEQ ID NO: 2507294
augagcugcgaccucucac

SEQ ID NO: 2507296 - RNA, 19 nt, Artificial Sequence
  Description of Artificial Sequence: Synthetic oligonucleotide
  Sense strand starting at position 2111 of SEQ ID NO: 1888052
ugaucaacgugucuuaaag

SEQ ID NO: 2507297 - RNA, 19 nt, Artificial Sequence
  Description of Artificial Sequence: Synthetic oligonucleotide
  Antisense strand to SEQ ID NO: 2507296
cuuuaagacacguugauca

SEQ ID NO: 2507298 - RNA, 19 nt, Artificial Sequence
  Description of Artificial Sequence: Synthetic oligonucleotide
  Sense strand starting at position 2183 of SEQ ID NO: 1888052
gcauguauugagcacuuau

SEQ ID NO: 2507299 - RNA, 19 nt, Artificial Sequence
  Description of Artificial Sequence: Synthetic oligonucleotide
  Antisense strand to SEQ ID NO: 2507298
auaagugcucaauacaugc

SEQ ID NO: 2507300 - RNA, 19 nt, Artificial Sequence
  Description of Artificial Sequence: Synthetic oligonucleotide
  Sense strand starting at position 2767 of SEQ ID NO: 1888052
guggucugcucccuuauuu

SEQ ID NO: 2507301 - RNA, 19 nt, Artificial Sequence
  Description of Artificial Sequence: Synthetic oligonucleotide
  Antisense strand to SEQ ID NO: 2507300
aaauaagggagcagaccac

SEQ ID NO: 2507302 - RNA, 19 nt, Artificial Sequence
  Description of Artificial Sequence: Synthetic oligonucleotide
  Sense strand starting at position 2775 of SEQ ID NO: 1888052
cucccuuauuuagggauau

SEQ ID NO: 2507303 - RNA, 19 nt, Artificial Sequence
  Description of Artificial Sequence: Synthetic oligonucleotide
  Antisense strand to SEQ ID NO: 2507302
auaucccuaaauaagggag

SEQ ID NO: 2507304 - RNA, 19 nt, Artificial Sequence
  Description of Artificial Sequence: Synthetic oligonucleotide
  Sense strand starting at position 2808 of SEQ ID NO: 1888052
caguuacuuguugauugua

SEQ ID NO: 2507305 - RNA, 19 nt, Artificial Sequence
  Description of Artificial Sequence: Synthetic oligonucleotide
  Antisense strand to SEQ ID NO: 2507304
uacaaucaacaaguaacug

SEQ ID NO: 2507306 - RNA, 19 nt, Artificial Sequence
  Description of Artificial Sequence: Synthetic oligonucleotide
  Sense strand starting at position 2810 of SEQ ID NO: 1888052
guuacuuguugauuguaua

SEQ ID NO: 2507307 - RNA, 19 nt, Artificial Sequence
  Description of Artificial Sequence: Synthetic oligonucleotide
  Antisense strand to SEQ ID NO: 2507306
uauacaaucaacaaguaac

SEQ ID NO: 2507308 - RNA, 19 nt, Artificial Sequence
  Description of Artificial Sequence: Synthetic oligonucleotide
  Sense strand starting at position 2899 of SEQ ID NO: 1888052
gcugucacucuugagguuu

SEQ ID NO: 2507309 - RNA, 19 nt, Artificial Sequence
  Description of Artificial Sequence: Synthetic oligonucleotide
  Antisense strand to SEQ ID NO: 2507308
aaaccucaagagugacagc

SEQ ID NO: 2507310 - RNA, 19 nt, Artificial Sequence
  Description of Artificial Sequence: Synthetic oligonucleotide
  Sense strand starting at position 2907 of SEQ ID NO: 1888052
ucuugagguuuccugaaau

SEQ ID NO: 2507311 - RNA, 19 nt, Artificial Sequence
  Description of Artificial Sequence: Synthetic oligonucleotide
  Antisense strand to SEQ ID NO: 2507310
auuucaggaaaccucaaga

SEQ ID NO: 2507312 - RNA, 19 nt, Artificial Sequence
  Description of Artificial Sequence: Synthetic oligonucleotide
  Sense strand starting at position 2919 of SEQ ID NO: 1888052
cugaaaucccgucaguucu

SEQ ID NO: 2507313 - RNA, 19 nt, Artificial Sequence
  Description of Artificial Sequence: Synthetic oligonucleotide
  Antisense strand to SEQ ID NO: 2507312
agaacugacgggauuucag

SEQ ID NO: 2507314 - RNA, 19 nt, Artificial Sequence
  Description of Artificial Sequence: Synthetic oligonucleotide
  Sense strand starting at position 2968 of SEQ ID NO: 1888052
uugggaugugguuacacaa

SEQ ID NO: 2507315 - RNA, 19 nt, Artificial Sequence
  Description of Artificial Sequence: Synthetic oligonucleotide
  Antisense strand to SEQ ID NO: 2507314
uuguguaaccacaucccaa

SEQ ID NO: 2507316 - RNA, 19 nt, Artificial Sequence
  Description of Artificial Sequence: Synthetic oligonucleotide
  Sense strand starting at position 3030 of SEQ ID NO: 1888052
cugucagcccuguagaaug

SEQ ID NO: 2507317 - RNA, 19 nt, Artificial Sequence
  Description of Artificial Sequence: Synthetic oligonucleotide
  Antisense strand to SEQ ID NO: 2507316
cauucuacagggcugacag

SEQ ID NO: 2507318 - RNA, 19 nt, Artificial Sequence
  Description of Artificial Sequence: Synthetic oligonucleotide
  Sense strand starting at position 3041 of SEQ ID NO: 1888052
guagaaugucuuggguaag

SEQ ID NO: 2507319 - RNA, 19 nt, Artificial Sequence
  Description of Artificial Sequence: Synthetic oligonucleotide
  Antisense strand to SEQ ID NO: 2507318
cuuacccaagacauucuac

SEQ ID NO: 2507320 - RNA, 19 nt, Artificial Sequence
  Description of Artificial Sequence: Synthetic oligonucleotide
  Sense strand starting at position 3502 of SEQ ID NO: 1888052
gacuuuggucagugugaca

SEQ ID NO: 2507321 - RNA, 19 nt, Artificial Sequence
  Description of Artificial Sequence: Synthetic oligonucleotide
  Antisense strand to SEQ ID NO: 2507320
ugucacacugaccaaaguc

SEQ ID NO: 2507322 - RNA, 19 nt, Artificial Sequence
  Description of Artificial Sequence: Synthetic oligonucleotide
  Sense strand starting at position 3546 of SEQ ID NO: 1888052
aagucagaucuaggaucca

SEQ ID NO: 2507323 - RNA, 19 nt, Artificial Sequence
  Description of Artificial Sequence: Synthetic oligonucleotide
  Antisense strand to SEQ ID NO: 2507322
uggauccuagaucugacuu

SEQ ID NO: 2507324 - RNA, 19 nt, Artificial Sequence
  Description of Artificial Sequence: Synthetic oligonucleotide
  Sense strand starting at position 3587 of SEQ ID NO: 1888052
aucuauaaccuguguaugu

SEQ ID NO: 2507325 - RNA, 19 nt, Artificial Sequence
  Description of Artificial Sequence: Synthetic oligonucleotide
  Antisense strand to SEQ ID NO: 2507324
acauacacagguuauagau

SEQ ID NO: 2507326 - RNA, 19 nt, Artificial Sequence
  Description of Artificial Sequence: Synthetic oligonucleotide
  Sense strand starting at position 3589 of SEQ ID NO: 1888052
cuauaaccuguguauguga

SEQ ID NO: 2507327 - RNA, 19 nt, Artificial Sequence
  Description of Artificial Sequence: Synthetic oligonucleotide
  Antisense strand to SEQ ID NO: 2507326
ucacauacacagguuauag

SEQ ID NO: 2507328 - RNA, 19 nt, Artificial Sequence
  Description of Artificial Sequence: Synthetic oligonucleotide
  Sense strand starting at position 3708 of SEQ ID NO: 1888052
aggauuggcuaucucuuau

SEQ ID NO: 2507329 - RNA, 19 nt, Artificial Sequence
  Description of Artificial Sequence: Synthetic oligonucleotide
  Antisense strand to SEQ ID NO: 2507328
auaagagauagccaauccu

SEQ ID NO: 2507330 - RNA, 19 nt, Artificial Sequence
  Description of Artificial Sequence: Synthetic oligonucleotide
  Sense strand starting at position 3715 of SEQ ID NO: 1888052
gcuaucucuuauuugcuga

SEQ ID NO: 2507331 - RNA, 19 nt, Artificial Sequence
  Description of Artificial Sequence: Synthetic oligonucleotide
  Antisense strand to SEQ ID NO: 2507330
ucagcaaauaagagauagc

SEQ ID NO: 2507332 - RNA, 19 nt, Artificial Sequence
  Description of Artificial Sequence: Synthetic oligonucleotide
  Sense strand starting at position 341 of SEQ ID NO: 1888054
ggcgggaugcgccuguaau

SEQ ID NO: 2507333 - RNA, 19 nt, Artificial Sequence
  Description of Artificial Sequence: Synthetic oligonucleotide
  Antisense strand to SEQ ID NO: 2507332
auuacaggcgcaucccgcc

SEQ ID NO: 2507334 - RNA, 19 nt, Artificial Sequence
  Description of Artificial Sequence: Synthetic oligonucleotide
  Sense strand starting at position 546 of SEQ ID NO: 1888054
aggguagagaugugguaaa

SEQ ID NO: 2507335 - RNA, 19 nt, Artificial Sequence
  Description of Artificial Sequence: Synthetic oligonucleotide
  Antisense strand to SEQ ID NO: 2507334
uuuaccacaucucuacccu

SEQ ID NO: 2507336 - RNA, 19 nt, Artificial Sequence
  Description of Artificial Sequence: Synthetic oligonucleotide
  Sense strand starting at position 553 of SEQ ID NO: 1888054
agaugugguaaagggaauu

SEQ ID NO: 2507337 - RNA, 19 nt, Artificial Sequence
  Description of Artificial Sequence: Synthetic oligonucleotide
  Antisense strand to SEQ ID NO: 2507336
aauucccuuuaccacaucu

SEQ ID NO: 2507338 - RNA, 19 nt, Artificial Sequence
  Description of Artificial Sequence: Synthetic oligonucleotide
  Sense strand starting at position 571 of SEQ ID NO: 1888054
uuaagauuccaacguaacu

SEQ ID NO: 2507339 - RNA, 19 nt, Artificial Sequence
  Description of Artificial Sequence: Synthetic oligonucleotide
  Antisense strand to SEQ ID NO: 2507338
aguuacguuggaaucuuaa

SEQ ID NO: 2507340 - RNA, 19 nt, Artificial Sequence
  Description of Artificial Sequence: Synthetic oligonucleotide
  Sense strand starting at position 592 of SEQ ID NO: 1888054
gcaggaagaccgcauaucu

SEQ ID NO: 2507341 - RNA, 19 nt, Artificial Sequence
  Description of Artificial Sequence: Synthetic oligonucleotide
  Antisense strand to SEQ ID NO: 2507340
agauaugcggucuuccugc

SEQ ID NO: 2507342 - RNA, 19 nt, Artificial Sequence
  Description of Artificial Sequence: Synthetic oligonucleotide
  Sense strand starting at position 904 of SEQ ID NO: 1888054
agccuaagaaguugaggau

SEQ ID NO: 2507343 - RNA, 19 nt, Artificial Sequence
  Description of Artificial Sequence: Synthetic oligonucleotide
  Antisense strand to SEQ ID NO: 2507342
auccucaacuucuuaggcu

SEQ ID NO: 2507344 - RNA, 19 nt, Artificial Sequence
  Description of Artificial Sequence: Synthetic oligonucleotide
  Sense strand starting at position 1037 of SEQ ID NO: 1888054
ggaacuuacugagucacuu

SEQ ID NO: 2507345 - RNA, 19 nt, Artificial Sequence
  Description of Artificial Sequence: Synthetic oligonucleotide
  Antisense strand to SEQ ID NO: 2507344
aagugacucaguaaguucc

SEQ ID NO: 2507346 - RNA, 19 nt, Artificial Sequence
  Description of Artificial Sequence: Synthetic oligonucleotide
  Sense strand starting at position 1113 of SEQ ID NO: 1888054
ugucuuugugacgaaggaa

SEQ ID NO: 2507347 - RNA, 19 nt, Artificial Sequence
  Description of Artificial Sequence: Synthetic oligonucleotide
  Antisense strand to SEQ ID NO: 2507346
uuccuucgucacaaagaca

SEQ ID NO: 2507348 - RNA, 19 nt, Artificial Sequence
  Description of Artificial Sequence: Synthetic oligonucleotide
  Sense strand starting at position 1116 of SEQ ID NO: 1888054
cuuugugacgaaggaauga

SEQ ID NO: 2507349 - RNA, 19 nt, Artificial Sequence
  Description of Artificial Sequence: Synthetic oligonucleotide
  Antisense strand to SEQ ID NO: 2507348
ucauuccuucgucacaaag

SEQ ID NO: 2507350 - RNA, 19 nt, Artificial Sequence
  Description of Artificial Sequence: Synthetic oligonucleotide
  Sense strand starting at position 1143 of SEQ ID NO: 1888054
gugaaagcacuuuacauua

SEQ ID NO: 2507351 - RNA, 19 nt, Artificial Sequence
  Description of Artificial Sequence: Synthetic oligonucleotide
  Antisense strand to SEQ ID NO: 2507350
uaauguaaagugcuuucac

SEQ ID NO: 2507352 - RNA, 19 nt, Artificial Sequence
  Description of Artificial Sequence: Synthetic oligonucleotide
  Sense strand starting at position 1214 of SEQ ID NO: 1888054
ugacgcuuggccugagaga

SEQ ID NO: 2507353 - RNA, 19 nt, Artificial Sequence
  Description of Artificial Sequence: Synthetic oligonucleotide
  Antisense strand to SEQ ID NO: 2507352
ucucucaggccaagcguca

SEQ ID NO: 2507354 - RNA, 19 nt, Artificial Sequence
  Description of Artificial Sequence: Synthetic oligonucleotide
  Sense strand starting at position 1215 of SEQ ID NO: 1888054
gacgcuuggccugagagau

SEQ ID NO: 2507355 - RNA, 19 nt, Artificial Sequence
  Description of Artificial Sequence: Synthetic oligonucleotide
  Antisense strand to SEQ ID NO: 2507354
aucucucaggccaagcguc

SEQ ID NO: 2507356 - RNA, 19 nt, Artificial Sequence
  Description of Artificial Sequence: Synthetic oligonucleotide
  Sense strand starting at position 1219 of SEQ ID NO: 1888054
cuuggccugagagauucua

SEQ ID NO: 2507357 - RNA, 19 nt, Artificial Sequence
  Description of Artificial Sequence: Synthetic oligonucleotide
  Antisense strand to SEQ ID NO: 2507356
uagaaucucucaggccaag

SEQ ID NO: 2507358 - RNA, 19 nt, Artificial Sequence
  Description of Artificial Sequence: Synthetic oligonucleotide
  Sense strand starting at position 1232 of SEQ ID NO: 1888054
auucuauagugcccagaga

SEQ ID NO: 2507359 - RNA, 19 nt, Artificial Sequence
  Description of Artificial Sequence: Synthetic oligonucleotide
  Antisense strand to SEQ ID NO: 2507358
ucucugggcacuauagaau

SEQ ID NO: 2507360 - RNA, 19 nt, Artificial Sequence
  Description of Artificial Sequence: Synthetic oligonucleotide
  Sense strand starting at position 1233 of SEQ ID NO: 1888054
uucuauagugcccagagau

SEQ ID NO: 2507361 - RNA, 19 nt, Artificial Sequence
  Description of Artificial Sequence: Synthetic oligonucleotide
  Antisense strand to SEQ ID NO: 2507360
aucucugggcacuauagaa

SEQ ID NO: 2507362 - RNA, 19 nt, Artificial Sequence
  Description of Artificial Sequence: Synthetic oligonucleotide
  Sense strand starting at position 1266 of SEQ ID NO: 1888054
ugggaaucccuaggucacu

SEQ ID NO: 2507363 - RNA, 19 nt, Artificial Sequence
  Description of Artificial Sequence: Synthetic oligonucleotide
  Antisense strand to SEQ ID NO: 2507362
agugaccuagggauuccca

SEQ ID NO: 2507364 - RNA, 19 nt, Artificial Sequence
  Description of Artificial Sequence: Synthetic oligonucleotide
  Sense strand starting at position 1306 of SEQ ID NO: 1888054
aauuaauggugcuuggaga

SEQ ID NO: 2507365 - RNA, 19 nt, Artificial Sequence
  Description of Artificial Sequence: Synthetic oligonucleotide
  Antisense strand to SEQ ID NO: 2507364
ucuccaagcaccauuaauu

SEQ ID NO: 2507366 - RNA, 19 nt, Artificial Sequence
  Description of Artificial Sequence: Synthetic oligonucleotide
  Sense strand starting at position 1639 of SEQ ID NO: 1888054
acaguuguucucgaacgaa

SEQ ID NO: 2507367 - RNA, 19 nt, Artificial Sequence
  Description of Artificial Sequence: Synthetic oligonucleotide
  Antisense strand to SEQ ID NO: 2507366
uucguucgagaacaacugu

SEQ ID NO: 2507368 - RNA, 19 nt, Artificial Sequence
  Description of Artificial Sequence: Synthetic oligonucleotide
  Sense strand starting at position 2154 of SEQ ID NO: 1888054
aggagcugucaucgaccua

SEQ ID NO: 2507369 - RNA, 19 nt, Artificial Sequence
  Description of Artificial Sequence: Synthetic oligonucleotide
  Antisense strand to SEQ ID NO: 2507368
uaggucgaugacagcuccu

SEQ ID NO: 2507370 - RNA, 19 nt, Artificial Sequence
  Description of Artificial Sequence: Synthetic oligonucleotide
  Sense strand starting at position 2188 of SEQ ID NO: 1888054
gguugugaggcaugaggga

SEQ ID NO: 2507371 - RNA, 19 nt, Artificial Sequence
  Description of Artificial Sequence: Synthetic oligonucleotide
  Antisense strand to SEQ ID NO: 2507370
ucccucaugccucacaacc

SEQ ID NO: 2507372 - RNA, 19 nt, Artificial Sequence
  Description of Artificial Sequence: Synthetic oligonucleotide
  Sense strand starting at position 2236 of SEQ ID NO: 1888054
gguugaugauggagguauu

SEQ ID NO: 2507373 - RNA, 19 nt, Artificial Sequence
  Description of Artificial Sequence: Synthetic oligonucleotide
  Antisense strand to SEQ ID NO: 2507372
aauaccuccaucaucaacc

SEQ ID NO: 2507374 - RNA, 19 nt, Artificial Sequence
  Description of Artificial Sequence: Synthetic oligonucleotide
  Sense strand starting at position 2402 of SEQ ID NO: 1888054
gaggcuacccauggagaga

SEQ ID NO: 2507375 - RNA, 19 nt, Artificial Sequence
  Description of Artificial Sequence: Synthetic oligonucleotide
  Antisense strand to SEQ ID NO: 2507374
ucucuccauggguagccuc

SEQ ID NO: 2507376 - RNA, 19 nt, Artificial Sequence
  Description of Artificial Sequence: Synthetic oligonucleotide
  Sense strand starting at position 2415 of SEQ ID NO: 1888054
gagagaguuccaggaggca

SEQ ID NO: 2507377 - RNA, 19 nt, Artificial Sequence
  Description of Artificial Sequence: Synthetic oligonucleotide
  Antisense strand to SEQ ID NO: 2507376
ugccuccuggaacucucuc

SEQ ID NO: 2507378 - RNA, 19 nt, Artificial Sequence
  Description of Artificial Sequence: Synthetic oligonucleotide
  Sense strand starting at position 2942 of SEQ ID NO: 1888054
guguaucauguuuacuauc

SEQ ID NO: 2507379 - RNA, 19 nt, Artificial Sequence
  Description of Artificial Sequence: Synthetic oligonucleotide
  Antisense strand to SEQ ID NO: 2507378
gauaguaaacaugauacac

SEQ ID NO: 2507380 - RNA, 19 nt, Artificial Sequence
  Description of Artificial Sequence: Synthetic oligonucleotide
  Sense strand starting at position 2951 of SEQ ID NO: 1888054
guuuacuaucccggguaag

SEQ ID NO: 2507381 - RNA, 19 nt, Artificial Sequence
  Description of Artificial Sequence: Synthetic oligonucleotide
  Antisense strand to SEQ ID NO: 2507380
cuuacccgggauaguaaac

SEQ ID NO: 2507382 - RNA, 19 nt, Artificial Sequence
  Description of Artificial Sequence: Synthetic oligonucleotide
  Sense strand starting at position 2952 of SEQ ID NO: 1888054
uuuacuaucccggguaagu

SEQ ID NO: 2507383 - RNA, 19 nt, Artificial Sequence
  Description of Artificial Sequence: Synthetic oligonucleotide
  Antisense strand to SEQ ID NO: 2507382
acuuacccgggauaguaaa

SEQ ID NO: 2507384 - RNA, 19 nt, Artificial Sequence
  Description of Artificial Sequence: Synthetic oligonucleotide
  Sense strand starting at position 2962 of SEQ ID NO: 1888054
cggguaaguggugaguuca

SEQ ID NO: 2507385 - RNA, 19 nt, Artificial Sequence
  Description of Artificial Sequence: Synthetic oligonucleotide
  Antisense strand to SEQ ID NO: 2507384
ugaacucaccacuuacccg

SEQ ID NO: 2507386 - RNA, 19 nt, Artificial Sequence
  Description of Artificial Sequence: Synthetic oligonucleotide
  Sense strand starting at position 3032 of SEQ ID NO: 1888054
agaugaugacgacgacaau

SEQ ID NO: 2507387 - RNA, 19 nt, Artificial Sequence
  Description of Artificial Sequence: Synthetic oligonucleotide
  Antisense strand to SEQ ID NO: 2507386
auugucgucgucaucaucu

SEQ ID NO: 2507388 - RNA, 19 nt, Artificial Sequence
  Description of Artificial Sequence: Synthetic oligonucleotide
  Sense strand starting at position 3063 of SEQ ID NO: 1888054
gaugaugacucagcaagau

SEQ ID NO: 2507389 - RNA, 19 nt, Artificial Sequence
  Description of Artificial Sequence: Synthetic oligonucleotide
  Antisense strand to SEQ ID NO: 2507388
aucuugcugagucaucauc

SEQ ID NO: 2507390 - RNA, 19 nt, Artificial Sequence
  Description of Artificial Sequence: Synthetic oligonucleotide
  Sense strand starting at position 3128 of SEQ ID NO: 1888054
guguguuuccggguaucca

SEQ ID NO: 2507391 - RNA, 19 nt, Artificial Sequence
  Description of Artificial Sequence: Synthetic oligonucleotide
  Antisense strand to SEQ ID NO: 2507390
uggauacccggaaacacac

SEQ ID NO: 2507392 - RNA, 19 nt, Artificial Sequence
  Description of Artificial Sequence: Synthetic oligonucleotide
  Sense strand starting at position 3375 of SEQ ID NO: 1888054
cucuguaacugguuaaccu

SEQ ID NO: 2507393 - RNA, 19 nt, Artificial Sequence
  Description of Artificial Sequence: Synthetic oligonucleotide
  Antisense strand to SEQ ID NO: 2507392
agguuaaccaguuacagag

SEQ ID NO: 2507394 - RNA, 19 nt, Artificial Sequence
  Description of Artificial Sequence: Synthetic oligonucleotide
  Sense strand starting at position 3379 of SEQ ID NO: 1888054
guaacugguuaaccuuuaa

SEQ ID NO: 2507395 - RNA, 19 nt, Artificial Sequence
  Description of Artificial Sequence: Synthetic oligonucleotide
  Antisense strand to SEQ ID NO: 2507394
uuaaagguuaaccaguuac

SEQ ID NO: 2507396 - RNA, 19 nt, Artificial Sequence
  Description of Artificial Sequence: Synthetic oligonucleotide
  Sense strand starting at position 3522 of SEQ ID NO: 1888054
agaagauacuaguuagggu

SEQ ID NO: 2507397 - RNA, 19 nt, Artificial Sequence
  Description of Artificial Sequence: Synthetic oligonucleotide
  Antisense strand to SEQ ID NO: 2507396
acccuaacuaguaucuucu

SEQ ID NO: 2507398 - RNA, 19 nt, Artificial Sequence
  Description of Artificial Sequence: Synthetic oligonucleotide
  Sense strand starting at position 3565 of SEQ ID NO: 1888054
guguguacacaagaaucuu

SEQ ID NO: 2507399 - RNA, 19 nt, Artificial Sequence
  Description of Artificial Sequence: Synthetic oligonucleotide
  Antisense strand to SEQ ID NO: 2507398
aagauucuuguguacacac

SEQ ID NO: 2507400 - RNA, 19 nt, Artificial Sequence
  Description of Artificial Sequence: Synthetic oligonucleotide
  Sense strand starting at position 3602 of SEQ ID NO: 1888054
ugaccuggguuucuagaca

SEQ ID NO: 2507401 - RNA, 19 nt, Artificial Sequence
  Description of Artificial Sequence: Synthetic oligonucleotide
  Antisense strand to SEQ ID NO: 2507400
ugucuagaaacccagguca

SEQ ID NO: 2507402 - RNA, 19 nt, Artificial Sequence
  Description of Artificial Sequence: Synthetic oligonucleotide
  Sense strand starting at position 3748 of SEQ ID NO: 1888054
ugaacuuggacuuguugua

SEQ ID NO: 2507403 - RNA, 19 nt, Artificial Sequence
  Description of Artificial Sequence: Synthetic oligonucleotide
  Antisense strand to SEQ ID NO: 2507402
uacaacaaguccaaguuca

SEQ ID NO: 2507404 - RNA, 19 nt, Artificial Sequence
  Description of Artificial Sequence: Synthetic oligonucleotide
  Sense strand starting at position 3757 of SEQ ID NO: 1888054
acuuguuguacuuagugau

SEQ ID NO: 2507405 - RNA, 19 nt, Artificial Sequence
  Description of Artificial Sequence: Synthetic oligonucleotide
  Antisense strand to SEQ ID NO: 2507404
aucacuaaguacaacaagu

SEQ ID NO: 2507406 - RNA, 19 nt, Artificial Sequence
  Description of Artificial Sequence: Synthetic oligonucleotide
  Sense strand starting at position 3897 of SEQ ID NO: 1888054
aacugaugauacuugguga

SEQ ID NO: 2507407 - RNA, 19 nt, Artificial Sequence
  Description of Artificial Sequence: Synthetic oligonucleotide
  Antisense strand to SEQ ID NO: 2507406
ucaccaaguaucaucaguu

SEQ ID NO: 2507408 - RNA, 19 nt, Artificial Sequence
  Description of Artificial Sequence: Synthetic oligonucleotide
  Sense strand starting at position 3898 of SEQ ID NO: 1888054
acugaugauacuuggugau

SEQ ID NO: 2507409 - RNA, 19 nt, Artificial Sequence
  Description of Artificial Sequence: Synthetic oligonucleotide
  Antisense strand to SEQ ID NO: 2507408
aucaccaaguaucaucagu

SEQ ID NO: 2507410 - RNA, 19 nt, Artificial Sequence
  Description of Artificial Sequence: Synthetic oligonucleotide
  Sense strand starting at position 3900 of SEQ ID NO: 1888054
ugaugauacuuggugauga

SEQ ID NO: 2507411 - RNA, 19 nt, Artificial Sequence
  Description of Artificial Sequence: Synthetic oligonucleotide
  Antisense strand to SEQ ID NO: 2507410
ucaucaccaaguaucauca

SEQ ID NO: 2507412 - RNA, 19 nt, Artificial Sequence
  Description of Artificial Sequence: Synthetic oligonucleotide
  Sense strand starting at position 440 of SEQ ID NO: 1888053
ggcgggaugcgccuguaau

SEQ ID NO: 2507413 - RNA, 19 nt, Artificial Sequence
  Description of Artificial Sequence: Synthetic oligonucleotide
  Antisense strand to SEQ ID NO: 2507412
auuacaggcgcaucccgcc

SEQ ID NO: 2507414 - RNA, 19 nt, Artificial Sequence
  Description of Artificial Sequence: Synthetic oligonucleotide
  Sense strand starting at position 645 of SEQ ID NO: 1888053
aggguagagaugugguaaa

SEQ ID NO: 2507415 - RNA, 19 nt, Artificial Sequence
  Description of Artificial Sequence: Synthetic oligonucleotide
  Antisense strand to SEQ ID NO: 2507414
uuuaccacaucucuacccu

SEQ ID NO: 2507416 - RNA, 19 nt, Artificial Sequence
  Description of Artificial Sequence: Synthetic oligonucleotide
  Sense strand starting at position 652 of SEQ ID NO: 1888053
agaugugguaaagggaauu

SEQ ID NO: 2507417 - RNA, 19 nt, Artificial Sequence
  Description of Artificial Sequence: Synthetic oligonucleotide
  Antisense strand to SEQ ID NO: 2507416
aauucccuuuaccacaucu

SEQ ID NO: 2507418 - RNA, 19 nt, Artificial Sequence
  Description of Artificial Sequence: Synthetic oligonucleotide
  Sense strand starting at position 670 of SEQ ID NO: 1888053
uuaagauuccaacguaacu

SEQ ID NO: 2507419 - RNA, 19 nt, Artificial Sequence
  Description of Artificial Sequence: Synthetic oligonucleotide
  Antisense strand to SEQ ID NO: 2507418
aguuacguuggaaucuuaa

SEQ ID NO: 2507420 - RNA, 19 nt, Artificial Sequence
  Description of Artificial Sequence: Synthetic oligonucleotide
  Sense strand starting at position 691 of SEQ ID NO: 1888053
gcaggaagaccgcauaucu

SEQ ID NO: 2507421 - RNA, 19 nt, Artificial Sequence
  Description of Artificial Sequence: Synthetic oligonucleotide
  Antisense strand to SEQ ID NO: 2507420
agauaugcggucuuccugc

SEQ ID NO: 2507422 - RNA, 19 nt, Artificial Sequence
  Description of Artificial Sequence: Synthetic oligonucleotide
  Sense strand starting at position 733 of SEQ ID NO: 1888053
aauggaugcuuagaaagag

SEQ ID NO: 2507423 - RNA, 19 nt, Artificial Sequence
  Description of Artificial Sequence: Synthetic oligonucleotide
  Antisense strand to SEQ ID NO: 2507422
cucuuucuaagcauccauu

SEQ ID NO: 2507424 - RNA, 19 nt, Artificial Sequence
  Description of Artificial Sequence: Synthetic oligonucleotide
  Sense strand starting at position 1003 of SEQ ID NO: 1888053
agccuaagaaguugaggau

SEQ ID NO: 2507425 - RNA, 19 nt, Artificial Sequence
  Description of Artificial Sequence: Synthetic oligonucleotide
  Antisense strand to SEQ ID NO: 2507424
auccucaacuucuuaggcu

SEQ ID NO: 2507426 - RNA, 19 nt, Artificial Sequence
  Description of Artificial Sequence: Synthetic oligonucleotide
  Sense strand starting at position 1136 of SEQ ID NO: 1888053
ggaacuuacugagucacuu

SEQ ID NO: 2507427 - RNA, 19 nt, Artificial Sequence
  Description of Artificial Sequence: Synthetic oligonucleotide
  Antisense strand to SEQ ID NO: 2507426
aagugacucaguaaguucc

SEQ ID NO: 2507428 - RNA, 19 nt, Artificial Sequence
  Description of Artificial Sequence: Synthetic oligonucleotide
  Sense strand starting at position 1212 of SEQ ID NO: 1888053
ugucuuugugacgaaggaa

SEQ ID NO: 2507429 - RNA, 19 nt, Artificial Sequence
  Description of Artificial Sequence: Synthetic oligonucleotide
  Antisense strand to SEQ ID NO: 2507428
uuccuucgucacaaagaca

SEQ ID NO: 2507430 - RNA, 19 nt, Artificial Sequence
  Description of Artificial Sequence: Synthetic oligonucleotide
  Sense strand starting at position 1215 of SEQ ID NO: 1888053
cuuugugacgaaggaauga

SEQ ID NO: 2507431 - RNA, 19 nt, Artificial Sequence
  Description of Artificial Sequence: Synthetic oligonucleotide
  Antisense strand to SEQ ID NO: 2507430
ucauuccuucgucacaaag

SEQ ID NO: 2507432 - RNA, 19 nt, Artificial Sequence
  Description of Artificial Sequence: Synthetic oligonucleotide
  Sense strand starting at position 1242 of SEQ ID NO: 1888053
gugaaagcacuuuacauua

SEQ ID NO: 2507433 - RNA, 19 nt, Artificial Sequence
  Description of Artificial Sequence: Synthetic oligonucleotide
  Antisense strand to SEQ ID NO: 2507432
uaauguaaagugcuuucac

SEQ ID NO: 2507434 - RNA, 19 nt, Artificial Sequence
  Description of Artificial Sequence: Synthetic oligonucleotide
  Sense strand starting at position 1313 of SEQ ID NO: 1888053
ugacgcuuggccugagaga

SEQ ID NO: 2507435 - RNA, 19 nt, Artificial Sequence
  Description of Artificial Sequence: Synthetic oligonucleotide
  Antisense strand to SEQ ID NO: 2507434
ucucucaggccaagcguca

SEQ ID NO: 2507436 - RNA, 19 nt, Artificial Sequence
  Description of Artificial Sequence: Synthetic oligonucleotide
  Sense strand starting at position 1314 of SEQ ID NO: 1888053
gacgcuuggccugagagau

SEQ ID NO: 2507437 - RNA, 19 nt, Artificial Sequence
  Description of Artificial Sequence: Synthetic oligonucleotide
  Antisense strand to SEQ ID NO: 2507436
aucucucaggccaagcguc

SEQ ID NO: 2507438 - RNA, 19 nt, Artificial Sequence
  Description of Artificial Sequence: Synthetic oligonucleotide
  Sense strand starting at position 1318 of SEQ ID NO: 1888053
cuuggccugagagauucua

SEQ ID NO: 2507439 - RNA, 19 nt, Artificial Sequence
  Description of Artificial Sequence: Synthetic oligonucleotide
  Antisense strand to SEQ ID NO: 2507438
uagaaucucucaggccaag

SEQ ID NO: 2507440 - RNA, 19 nt, Artificial Sequence
  Description of Artificial Sequence: Synthetic oligonucleotide
  Sense strand starting at position 1331 of SEQ ID NO: 1888053
auucuauagugcccagaga

SEQ ID NO: 2507441 - RNA, 19 nt, Artificial Sequence
  Description of Artificial Sequence: Synthetic oligonucleotide
  Antisense strand to SEQ ID NO: 2507440
ucucugggcacuauagaau

SEQ ID NO: 2507442 - RNA, 19 nt, Artificial Sequence
  Description of Artificial Sequence: Synthetic oligonucleotide
  Sense strand starting at position 1332 of SEQ ID NO: 1888053
uucuauagugcccagagau

SEQ ID NO: 2507443 - RNA, 19 nt, Artificial Sequence
  Description of Artificial Sequence: Synthetic oligonucleotide
  Antisense strand to SEQ ID NO: 2507442
aucucugggcacuauagaa

SEQ ID NO: 2507444 - RNA, 19 nt, Artificial Sequence
  Description of Artificial Sequence: Synthetic oligonucleotide
  Sense strand starting at position 1365 of SEQ ID NO: 1888053
ugggaaucccuaggucacu

SEQ ID NO: 2507445 - RNA, 19 nt, Artificial Sequence
  Description of Artificial Sequence: Synthetic oligonucleotide
  Antisense strand to SEQ ID NO: 2507444
agugaccuagggauuccca

SEQ ID NO: 2507446 - RNA, 19 nt, Artificial Sequence
  Description of Artificial Sequence: Synthetic oligonucleotide
  Sense strand starting at position 1405 of SEQ ID NO: 1888053
aauuaauggugcuuggaga

SEQ ID NO: 2507447 - RNA, 19 nt, Artificial Sequence
  Description of Artificial Sequence: Synthetic oligonucleotide
  Antisense strand to SEQ ID NO: 2507446
ucuccaagcaccauuaauu

SEQ ID NO: 2507448 - RNA, 19 nt, Artificial Sequence
  Description of Artificial Sequence: Synthetic oligonucleotide
  Sense strand starting at position 1666 of SEQ ID NO: 1888053
guagaaguucucugagccu

SEQ ID NO: 2507449 - RNA, 19 nt, Artificial Sequence
  Description of Artificial Sequence: Synthetic oligonucleotide
  Antisense strand to SEQ ID NO: 2507448
aggcucagagaacuucuac

SEQ ID NO: 2507450 - RNA, 19 nt, Artificial Sequence
  Description of Artificial Sequence: Synthetic oligonucleotide
  Sense strand starting at position 1738 of SEQ ID NO: 1888053
acaguuguucucgaacgaa

SEQ ID NO: 2507451 - RNA, 19 nt, Artificial Sequence
  Description of Artificial Sequence: Synthetic oligonucleotide
  Antisense strand to SEQ ID NO: 2507450
uucguucgagaacaacugu

SEQ ID NO: 2507452 - RNA, 19 nt, Artificial Sequence
  Description of Artificial Sequence: Synthetic oligonucleotide
  Sense strand starting at position 2253 of SEQ ID NO: 1888053
aggagcugucaucgaccua

SEQ ID NO: 2507453 - RNA, 19 nt, Artificial Sequence
  Description of Artificial Sequence: Synthetic oligonucleotide
  Antisense strand to SEQ ID NO: 2507452
uaggucgaugacagcuccu

SEQ ID NO: 2507454 - RNA, 19 nt, Artificial Sequence
  Description of Artificial Sequence: Synthetic oligonucleotide
  Sense strand starting at position 2287 of SEQ ID NO: 1888053
gguugugaggcaugaggga

SEQ ID NO: 2507455 - RNA, 19 nt, Artificial Sequence
  Description of Artificial Sequence: Synthetic oligonucleotide
  Antisense strand to SEQ ID NO: 2507454
ucccucaugccucacaacc

SEQ ID NO: 2507456 - RNA, 19 nt, Artificial Sequence
  Description of Artificial Sequence: Synthetic oligonucleotide
  Sense strand starting at position 2335 of SEQ ID NO: 1888053
gguugaugauggagguauu

SEQ ID NO: 2507457 - RNA, 19 nt, Artificial Sequence
  Description of Artificial Sequence: Synthetic oligonucleotide
  Antisense strand to SEQ ID NO: 2507456
aauaccuccaucaucaacc

SEQ ID NO: 2507458 - RNA, 19 nt, Artificial Sequence
  Description of Artificial Sequence: Synthetic oligonucleotide
  Sense strand starting at position 2501 of SEQ ID NO: 1888053
gaggcuacccauggagaga

SEQ ID NO: 2507459 - RNA, 19 nt, Artificial Sequence
  Description of Artificial Sequence: Synthetic oligonucleotide
  Antisense strand to SEQ ID NO: 2507458
ucucuccauggguagccuc

SEQ ID NO: 2507460 - RNA, 19 nt, Artificial Sequence
  Description of Artificial Sequence: Synthetic oligonucleotide
  Sense strand starting at position 2514 of SEQ ID NO: 1888053
gagagaguuccaggaggca

SEQ ID NO: 2507461 - RNA, 19 nt, Artificial Sequence
  Description of Artificial Sequence: Synthetic oligonucleotide
  Antisense strand to SEQ ID NO: 2507460
ugccuccuggaacucucuc

SEQ ID NO: 2507462 - RNA, 19 nt, Artificial Sequence
  Description of Artificial Sequence: Synthetic oligonucleotide
  Sense strand starting at position 3040 of SEQ ID NO: 1888053
uguguaucauguuuacuau

SEQ ID NO: 2507463 - RNA, 19 nt, Artificial Sequence
  Description of Artificial Sequence: Synthetic oligonucleotide
  Antisense strand to SEQ ID NO: 2507462
auaguaaacaugauacaca

SEQ ID NO: 2507464 - RNA, 19 nt, Artificial Sequence
  Description of Artificial Sequence: Synthetic oligonucleotide
  Sense strand starting at position 3041 of SEQ ID NO: 1888053
guguaucauguuuacuauc

SEQ ID NO: 2507465 - RNA, 19 nt, Artificial Sequence
  Description of Artificial Sequence: Synthetic oligonucleotide
  Antisense strand to SEQ ID NO: 2507464
gauaguaaacaugauacac

SEQ ID NO: 2507466 - RNA, 19 nt, Artificial Sequence
  Description of Artificial Sequence: Synthetic oligonucleotide
  Sense strand starting at position 3050 of SEQ ID NO: 1888053
guuuacuaucccggguaag

SEQ ID NO: 2507467 - RNA, 19 nt, Artificial Sequence
  Description of Artificial Sequence: Synthetic oligonucleotide
  Antisense strand to SEQ ID NO: 2507466
cuuacccgggauaguaaac

SEQ ID NO: 2507468 - RNA, 19 nt, Artificial Sequence
  Description of Artificial Sequence: Synthetic oligonucleotide
  Sense strand starting at position 3051 of SEQ ID NO: 1888053
uuuacuaucccggguaagu

SEQ ID NO: 2507469 - RNA, 19 nt, Artificial Sequence
  Description of Artificial Sequence: Synthetic oligonucleotide
  Antisense strand to SEQ ID NO: 2507468
acuuacccgggauaguaaa

SEQ ID NO: 2507470 - RNA, 19 nt, Artificial Sequence
  Description of Artificial Sequence: Synthetic oligonucleotide
  Sense strand starting at position 3061 of SEQ ID NO: 1888053
cggguaaguggugaguuca

SEQ ID NO: 2507471 - RNA, 19 nt, Artificial Sequence
  Description of Artificial Sequence: Synthetic oligonucleotide
  Antisense strand to SEQ ID NO: 2507470
ugaacucaccacuuacccg

SEQ ID NO: 2507472 - RNA, 19 nt, Artificial Sequence
  Description of Artificial Sequence: Synthetic oligonucleotide
  Sense strand starting at position 3131 of SEQ ID NO: 1888053
agaugaugacgacgacaau

SEQ ID NO: 2507473 - RNA, 19 nt, Artificial Sequence
  Description of Artificial Sequence: Synthetic oligonucleotide
  Antisense strand to SEQ ID NO: 2507472
auugucgucgucaucaucu

SEQ ID NO: 2507474 - RNA, 19 nt, Artificial Sequence
  Description of Artificial Sequence: Synthetic oligonucleotide
  Sense strand starting at position 3162 of SEQ ID NO: 1888053
gaugaugacucagcaagau

SEQ ID NO: 2507475 - RNA, 19 nt, Artificial Sequence
  Description of Artificial Sequence: Synthetic oligonucleotide
  Antisense strand to SEQ ID NO: 2507474
aucuugcugagucaucauc

SEQ ID NO: 2507476 - RNA, 19 nt, Artificial Sequence
  Description of Artificial Sequence: Synthetic oligonucleotide
  Sense strand starting at position 3227 of SEQ ID NO: 1888053
guguguuuccggguaucca

SEQ ID NO: 2507477 - RNA, 19 nt, Artificial Sequence
  Description of Artificial Sequence: Synthetic oligonucleotide
  Antisense strand to SEQ ID NO: 2507476
uggauacccggaaacacac

SEQ ID NO: 2507478 - RNA, 19 nt, Artificial Sequence
  Description of Artificial Sequence: Synthetic oligonucleotide
  Sense strand starting at position 3474 of SEQ ID NO: 1888053
cucuguaacugguuaaccu

SEQ ID NO: 2507479 - RNA, 19 nt, Artificial Sequence
  Description of Artificial Sequence: Synthetic oligonucleotide
  Antisense strand to SEQ ID NO: 2507478
agguuaaccaguuacagag

SEQ ID NO: 2507480 - RNA, 19 nt, Artificial Sequence
  Description of Artificial Sequence: Synthetic oligonucleotide
  Sense strand starting at position 3478 of SEQ ID NO: 1888053
guaacugguuaaccuuuaa

SEQ ID NO: 2507481 - RNA, 19 nt, Artificial Sequence
  Description of Artificial Sequence: Synthetic oligonucleotide
  Antisense strand to SEQ ID NO: 2507480
uuaaagguuaaccaguuac

SEQ ID NO: 2507482 - RNA, 19 nt, Artificial Sequence
  Description of Artificial Sequence: Synthetic oligonucleotide
  Sense strand starting at position 3621 of SEQ ID NO: 1888053
agaagauacuaguuagggu

SEQ ID NO: 2507483 - RNA, 19 nt, Artificial Sequence
  Description of Artificial Sequence: Synthetic oligonucleotide
  Antisense strand to SEQ ID NO: 2507482
acccuaacuaguaucuucu

SEQ ID NO: 2507484 - RNA, 19 nt, Artificial Sequence
  Description of Artificial Sequence: Synthetic oligonucleotide
  Sense strand starting at position 3664 of SEQ ID NO: 1888053
guguguacacaagaaucuu

SEQ ID NO: 2507485 - RNA, 19 nt, Artificial Sequence
  Description of Artificial Sequence: Synthetic oligonucleotide
  Antisense strand to SEQ ID NO: 2507484
aagauucuuguguacacac

SEQ ID NO: 2507486 - RNA, 19 nt, Artificial Sequence
  Description of Artificial Sequence: Synthetic oligonucleotide
  Sense strand starting at position 3701 of SEQ ID NO: 1888053
ugaccuggguuucuagaca

SEQ ID NO: 2507487 - RNA, 19 nt, Artificial Sequence
  Description of Artificial Sequence: Synthetic oligonucleotide
  Antisense strand to SEQ ID NO: 2507486
ugucuagaaacccagguca

SEQ ID NO: 2507488 - RNA, 19 nt, Artificial Sequence
  Description of Artificial Sequence: Synthetic oligonucleotide
  Sense strand starting at position 3847 of SEQ ID NO: 1888053
ugaacuuggacuuguugua

SEQ ID NO: 2507489 - RNA, 19 nt, Artificial Sequence
  Description of Artificial Sequence: Synthetic oligonucleotide
  Antisense strand to SEQ ID NO: 2507488
uacaacaaguccaaguuca

SEQ ID NO: 2507490 - RNA, 19 nt, Artificial Sequence
  Description of Artificial Sequence: Synthetic oligonucleotide
  Sense strand starting at position 3856 of SEQ ID NO: 1888053
acuuguuguacuuagugau

SEQ ID NO: 2507491 - RNA, 19 nt, Artificial Sequence
  Description of Artificial Sequence: Synthetic oligonucleotide
  Antisense strand to SEQ ID NO: 2507490
aucacuaaguacaacaagu

SEQ ID NO: 2507492 - RNA, 19 nt, Artificial Sequence
  Description of Artificial Sequence: Synthetic oligonucleotide
  Sense strand starting at position 67 of SEQ ID NO: 1888055
caaggaguucucugcaaca

SEQ ID NO: 2507493 - RNA, 19 nt, Artificial Sequence
  Description of Artificial Sequence: Synthetic oligonucleotide
  Antisense strand to SEQ ID NO: 2507492
uguugcagagaacuccuug

SEQ ID NO: 2507494 - RNA, 19 nt, Artificial Sequence
  Description of Artificial Sequence: Synthetic oligonucleotide
  Sense strand starting at position 188 of SEQ ID NO: 1888055
ucaugacauucguuacaga

SEQ ID NO: 2507495 - RNA, 19 nt, Artificial Sequence
  Description of Artificial Sequence: Synthetic oligonucleotide
  Antisense strand to SEQ ID NO: 2507494
ucuguaacgaaugucauga

SEQ ID NO: 2507496 - RNA, 19 nt, Artificial Sequence
  Description of Artificial Sequence: Synthetic oligonucleotide
  Sense strand starting at position 189 of SEQ ID NO: 1888055
caugacauucguuacagaa

SEQ ID NO: 2507497 - RNA, 19 nt, Artificial Sequence
  Description of Artificial Sequence: Synthetic oligonucleotide
  Antisense strand to SEQ ID NO: 2507496
uucuguaacgaaugucaug

SEQ ID NO: 2507498 - RNA, 19 nt, Artificial Sequence
  Description of Artificial Sequence: Synthetic oligonucleotide
  Sense strand starting at position 317 of SEQ ID NO: 1888055
cagucaugaucgccuagca

SEQ ID NO: 2507499 - RNA, 19 nt, Artificial Sequence
  Description of Artificial Sequence: Synthetic oligonucleotide
  Antisense strand to SEQ ID NO: 2507498
ugcuaggcgaucaugacug

SEQ ID NO: 2507500 - RNA, 19 nt, Artificial Sequence
  Description of Artificial Sequence: Synthetic oligonucleotide
  Sense strand starting at position 387 of SEQ ID NO: 1888055
agcuucucugucugagaca

SEQ ID NO: 2507501 - RNA, 19 nt, Artificial Sequence
  Description of Artificial Sequence: Synthetic oligonucleotide
  Antisense strand to SEQ ID NO: 2507500
ugucucagacagagaagcu

SEQ ID NO: 2507502 - RNA, 19 nt, Artificial Sequence
  Description of Artificial Sequence: Synthetic oligonucleotide
  Sense strand starting at position 396 of SEQ ID NO: 1888055
gucugagacacguguggaa

SEQ ID NO: 2507503 - RNA, 19 nt, Artificial Sequence
  Description of Artificial Sequence: Synthetic oligonucleotide
  Antisense strand to SEQ ID NO: 2507502
uuccacacgugucucagac

SEQ ID NO: 2507504 - RNA, 19 nt, Artificial Sequence
  Description of Artificial Sequence: Synthetic oligonucleotide
  Sense strand starting at position 753 of SEQ ID NO: 1888055
uucagaauuguaugguggu

SEQ ID NO: 2507505 - RNA, 19 nt, Artificial Sequence
  Description of Artificial Sequence: Synthetic oligonucleotide
  Antisense strand to SEQ ID NO: 2507504
accaccauacaauucugaa

SEQ ID NO: 2507506 - RNA, 19 nt, Artificial Sequence
  Description of Artificial Sequence: Synthetic oligonucleotide
  Sense strand starting at position 1286 of SEQ ID NO: 1888055
ggcaaacccugaggcuaau

SEQ ID NO: 2507507 - RNA, 19 nt, Artificial Sequence
  Description of Artificial Sequence: Synthetic oligonucleotide
  Antisense strand to SEQ ID NO: 2507506
auuagccucaggguuugcc

SEQ ID NO: 2507508 - RNA, 19 nt, Artificial Sequence
  Description of Artificial Sequence: Synthetic oligonucleotide
  Sense strand starting at position 1362 of SEQ ID NO: 1888055
aagagauauuaugaaggau

SEQ ID NO: 2507509 - RNA, 19 nt, Artificial Sequence
  Description of Artificial Sequence: Synthetic oligonucleotide
  Antisense strand to SEQ ID NO: 2507508
auccuucauaauaucucuu

SEQ ID NO: 2507510 - RNA, 19 nt, Artificial Sequence
  Description of Artificial Sequence: Synthetic oligonucleotide
  Sense strand starting at position 1442 of SEQ ID NO: 1888055
gaggaauugugccuuaaug

SEQ ID NO: 2507511 - RNA, 19 nt, Artificial Sequence
  Description of Artificial Sequence: Synthetic oligonucleotide
  Antisense strand to SEQ ID NO: 2507510
cauuaaggcacaauuccuc

SEQ ID NO: 2507512 - RNA, 19 nt, Artificial Sequence
  Description of Artificial Sequence: Synthetic oligonucleotide
  Sense strand starting at position 1444 of SEQ ID NO: 1888055
ggaauugugccuuaaugag

SEQ ID NO: 2507513 - RNA, 19 nt, Artificial Sequence
  Description of Artificial Sequence: Synthetic oligonucleotide
  Antisense strand to SEQ ID NO: 2507512
cucauuaaggcacaauucc

SEQ ID NO: 2507514 - RNA, 19 nt, Artificial Sequence
  Description of Artificial Sequence: Synthetic oligonucleotide
  Sense strand starting at position 1450 of SEQ ID NO: 1888055
gugccuuaaugaguuugua

SEQ ID NO: 2507515 - RNA, 19 nt, Artificial Sequence
  Description of Artificial Sequence: Synthetic oligonucleotide
  Antisense strand to SEQ ID NO: 2507514
uacaaacucauuaaggcac

SEQ ID NO: 2507516 - RNA, 19 nt, Artificial Sequence
  Description of Artificial Sequence: Synthetic oligonucleotide
  Sense strand starting at position 1453 of SEQ ID NO: 1888055
ccuuaaugaguuuguacua

SEQ ID NO: 2507517 - RNA, 19 nt, Artificial Sequence
  Description of Artificial Sequence: Synthetic oligonucleotide
  Antisense strand to SEQ ID NO: 2507516
uaguacaaacucauuaagg

SEQ ID NO: 2507518 - RNA, 19 nt, Artificial Sequence
  Description of Artificial Sequence: Synthetic oligonucleotide
  Sense strand starting at position 1458 of SEQ ID NO: 1888055
augaguuuguacuacuaua

SEQ ID NO: 2507519 - RNA, 19 nt, Artificial Sequence
  Description of Artificial Sequence: Synthetic oligonucleotide
  Antisense strand to SEQ ID NO: 2507518
uauaguaguacaaacucau

SEQ ID NO: 2507520 - RNA, 19 nt, Artificial Sequence
  Description of Artificial Sequence: Synthetic oligonucleotide
  Sense strand starting at position 1997 of SEQ ID NO: 1888055
ugaauaauaugguaaucac

SEQ ID NO: 2507521 - RNA, 19 nt, Artificial Sequence
  Description of Artificial Sequence: Synthetic oligonucleotide
  Antisense strand to SEQ ID NO: 2507520
gugauuaccauauuauuca

SEQ ID NO: 2507522 - RNA, 19 nt, Artificial Sequence
  Description of Artificial Sequence: Synthetic oligonucleotide
  Sense strand starting at position 2277 of SEQ ID NO: 1888055
ucuggcuuguuuccauaua

SEQ ID NO: 2507523 - RNA, 19 nt, Artificial Sequence
  Description of Artificial Sequence: Synthetic oligonucleotide
  Antisense strand to SEQ ID NO: 2507522
uauauggaaacaagccaga

SEQ ID NO: 2507524 - RNA, 19 nt, Artificial Sequence
  Description of Artificial Sequence: Synthetic oligonucleotide
  Sense strand starting at position 2278 of SEQ ID NO: 1888055
cuggcuuguuuccauauau

SEQ ID NO: 2507525 - RNA, 19 nt, Artificial Sequence
  Description of Artificial Sequence: Synthetic oligonucleotide
  Antisense strand to SEQ ID NO: 2507524
auauauggaaacaagccag

SEQ ID NO: 2507526 - RNA, 19 nt, Artificial Sequence
  Description of Artificial Sequence: Synthetic oligonucleotide
  Sense strand starting at position 2289 of SEQ ID NO: 1888055
ccauauauucgcuauuaug

SEQ ID NO: 2507527 - RNA, 19 nt, Artificial Sequence
  Description of Artificial Sequence: Synthetic oligonucleotide
  Antisense strand to SEQ ID NO: 2507526
cauaauagcgaauauaugg

SEQ ID NO: 2507528 - RNA, 19 nt, Artificial Sequence
  Description of Artificial Sequence: Synthetic oligonucleotide
  Sense strand starting at position 2336 of SEQ ID NO: 1888055
uuuacuaccucugguacau

SEQ ID NO: 2507529 - RNA, 19 nt, Artificial Sequence
  Description of Artificial Sequence: Synthetic oligonucleotide
  Antisense strand to SEQ ID NO: 2507528
auguaccagagguaguaaa

SEQ ID NO: 2507530 - RNA, 19 nt, Artificial Sequence
  Description of Artificial Sequence: Synthetic oligonucleotide
  Sense strand starting at position 2407 of SEQ ID NO: 1888055
auaugagaaugcucaaacu

SEQ ID NO: 2507531 - RNA, 19 nt, Artificial Sequence
  Description of Artificial Sequence: Synthetic oligonucleotide
  Antisense strand to SEQ ID NO: 2507530
aguuugagcauucucauau

SEQ ID NO: 2507532 - RNA, 19 nt, Artificial Sequence
  Description of Artificial Sequence: Synthetic oligonucleotide
  Sense strand starting at position 2855 of SEQ ID NO: 1888055
cagacuugaguaugucuuu

SEQ ID NO: 2507533 - RNA, 19 nt, Artificial Sequence
  Description of Artificial Sequence: Synthetic oligonucleotide
  Antisense strand to SEQ ID NO: 2507532
aaagacauacucaagucug

SEQ ID NO: 2507534 - RNA, 19 nt, Artificial Sequence
  Description of Artificial Sequence: Synthetic oligonucleotide
  Sense strand starting at position 2856 of SEQ ID NO: 1888055
agacuugaguaugucuuua

SEQ ID NO: 2507535 - RNA, 19 nt, Artificial Sequence
  Description of Artificial Sequence: Synthetic oligonucleotide
  Antisense strand to SEQ ID NO: 2507534
uaaagacauacucaagucu

SEQ ID NO: 2507536 - RNA, 19 nt, Artificial Sequence
  Description of Artificial Sequence: Synthetic oligonucleotide
  Sense strand starting at position 2858 of SEQ ID NO: 1888055
acuugaguaugucuuuauc

SEQ ID NO: 2507537 - RNA, 19 nt, Artificial Sequence
  Description of Artificial Sequence: Synthetic oligonucleotide
  Antisense strand to SEQ ID NO: 2507536
gauaaagacauacucaagu

SEQ ID NO: 2507538 - RNA, 19 nt, Artificial Sequence
  Description of Artificial Sequence: Synthetic oligonucleotide
  Sense strand starting at position 3297 of SEQ ID NO: 1888055
aggugacucgggugauguu

SEQ ID NO: 2507539 - RNA, 19 nt, Artificial Sequence
  Description of Artificial Sequence: Synthetic oligonucleotide
  Antisense strand to SEQ ID NO: 2507538
aacaucacccgagucaccu

SEQ ID NO: 2507540 - RNA, 19 nt, Artificial Sequence
  Description of Artificial Sequence: Synthetic oligonucleotide
  Sense strand starting at position 3298 of SEQ ID NO: 1888055
ggugacucgggugauguua

SEQ ID NO: 2507541 - RNA, 19 nt, Artificial Sequence
  Description of Artificial Sequence: Synthetic oligonucleotide
  Antisense strand to SEQ ID NO: 2507540
uaacaucacccgagucacc

SEQ ID NO: 2507542 - RNA, 19 nt, Artificial Sequence
  Description of Artificial Sequence: Synthetic oligonucleotide
  Sense strand starting at position 3300 of SEQ ID NO: 1888055
ugacucgggugauguuaaa

SEQ ID NO: 2507543 - RNA, 19 nt, Artificial Sequence
  Description of Artificial Sequence: Synthetic oligonucleotide
  Antisense strand to SEQ ID NO: 2507542
uuuaacaucacccgaguca

SEQ ID NO: 2507544 - RNA, 19 nt, Artificial Sequence
  Description of Artificial Sequence: Synthetic oligonucleotide
  Sense strand starting at position 3852 of SEQ ID NO: 1888055
cugcuagggcucugcagaa

SEQ ID NO: 2507545 - RNA, 19 nt, Artificial Sequence
  Description of Artificial Sequence: Synthetic oligonucleotide
  Antisense strand to SEQ ID NO: 2507544
uucugcagagcccuagcag

SEQ ID NO: 2507546 - RNA, 19 nt, Artificial Sequence
  Description of Artificial Sequence: Synthetic oligonucleotide
  Sense strand starting at position 3856 of SEQ ID NO: 1888055
uagggcucugcagaagaga

SEQ ID NO: 2507547 - RNA, 19 nt, Artificial Sequence
  Description of Artificial Sequence: Synthetic oligonucleotide
  Antisense strand to SEQ ID NO: 2507546
ucucuucugcagagcccua

SEQ ID NO: 2507548 - RNA, 19 nt, Artificial Sequence
  Description of Artificial Sequence: Synthetic oligonucleotide
  Sense strand starting at position 66 of SEQ ID NO: 1888057
caaggaguucucugcaaca

SEQ ID NO: 2507549 - RNA, 19 nt, Artificial Sequence
  Description of Artificial Sequence: Synthetic oligonucleotide
  Antisense strand to SEQ ID NO: 2507548
uguugcagagaacuccuug

SEQ ID NO: 2507550 - RNA, 19 nt, Artificial Sequence
  Description of Artificial Sequence: Synthetic oligonucleotide
  Sense strand starting at position 68 of SEQ ID NO: 1888057
aggaguucucugcaacauu

SEQ ID NO: 2507551 - RNA, 19 nt, Artificial Sequence
  Description of Artificial Sequence: Synthetic oligonucleotide
  Antisense strand to SEQ ID NO: 2507550
aauguugcagagaacuccu

SEQ ID NO: 2507552 - RNA, 19 nt, Artificial Sequence
  Description of Artificial Sequence: Synthetic oligonucleotide
  Sense strand starting at position 187 of SEQ ID NO: 1888057
ucaugacauucguuacaga

SEQ ID NO: 2507553 - RNA, 19 nt, Artificial Sequence
  Description of Artificial Sequence: Synthetic oligonucleotide
  Antisense strand to SEQ ID NO: 2507552
ucuguaacgaaugucauga

SEQ ID NO: 2507554 - RNA, 19 nt, Artificial Sequence
  Description of Artificial Sequence: Synthetic oligonucleotide
  Sense strand starting at position 188 of SEQ ID NO: 1888057
caugacauucguuacagaa

SEQ ID NO: 2507555 - RNA, 19 nt, Artificial Sequence
  Description of Artificial Sequence: Synthetic oligonucleotide
  Antisense strand to SEQ ID NO: 2507554
uucuguaacgaaugucaug

SEQ ID NO: 2507556 - RNA, 19 nt, Artificial Sequence
  Description of Artificial Sequence: Synthetic oligonucleotide
  Sense strand starting at position 316 of SEQ ID NO: 1888057
cagucaugaucgccuagca

SEQ ID NO: 2507557 - RNA, 19 nt, Artificial Sequence
  Description of Artificial Sequence: Synthetic oligonucleotide
  Antisense strand to SEQ ID NO: 2507556
ugcuaggcgaucaugacug

SEQ ID NO: 2507558 - RNA, 19 nt, Artificial Sequence
  Description of Artificial Sequence: Synthetic oligonucleotide
  Sense strand starting at position 395 of SEQ ID NO: 1888057
gucugagacacguguggaa

SEQ ID NO: 2507559 - RNA, 19 nt, Artificial Sequence
  Description of Artificial Sequence: Synthetic oligonucleotide
  Antisense strand to SEQ ID NO: 2507558
uuccacacgugucucagac

SEQ ID NO: 2507560 - RNA, 19 nt, Artificial Sequence
  Description of Artificial Sequence: Synthetic oligonucleotide
  Sense strand starting at position 681 of SEQ ID NO: 1888057
gcgugacuuguccagagag

SEQ ID NO: 2507561 - RNA, 19 nt, Artificial Sequence
  Description of Artificial Sequence: Synthetic oligonucleotide
  Antisense strand to SEQ ID NO: 2507560
cucucuggacaagucacgc

SEQ ID NO: 2507562 - RNA, 19 nt, Artificial Sequence
  Description of Artificial Sequence: Synthetic oligonucleotide
  Sense strand starting at position 682 of SEQ ID NO: 1888057
cgugacuuguccagagagg

SEQ ID NO: 2507563 - RNA, 19 nt, Artificial Sequence
  Description of Artificial Sequence: Synthetic oligonucleotide
  Antisense strand to SEQ ID NO: 2507562
ccucucuggacaagucacg

SEQ ID NO: 2507564 - RNA, 19 nt, Artificial Sequence
  Description of Artificial Sequence: Synthetic oligonucleotide
  Sense strand starting at position 752 of SEQ ID NO: 1888057
uucagaauuguaugguggu

SEQ ID NO: 2507565 - RNA, 19 nt, Artificial Sequence
  Description of Artificial Sequence: Synthetic oligonucleotide
  Antisense strand to SEQ ID NO: 2507564
accaccauacaauucugaa

SEQ ID NO: 2507566 - RNA, 19 nt, Artificial Sequence
  Description of Artificial Sequence: Synthetic oligonucleotide
  Sense strand starting at position 1285 of SEQ ID NO: 1888057
ggcaaacccugaggcuaau

SEQ ID NO: 2507567 - RNA, 19 nt, Artificial Sequence
  Description of Artificial Sequence: Synthetic oligonucleotide
  Antisense strand to SEQ ID NO: 2507566
auuagccucaggguuugcc

SEQ ID NO: 2507568 - RNA, 19 nt, Artificial Sequence
  Description of Artificial Sequence: Synthetic oligonucleotide
  Sense strand starting at position 1441 of SEQ ID NO: 1888057
gaggaauugugccuuaaug

SEQ ID NO: 2507569 - RNA, 19 nt, Artificial Sequence
  Description of Artificial Sequence: Synthetic oligonucleotide
  Antisense strand to SEQ ID NO: 2507568
cauuaaggcacaauuccuc

SEQ ID NO: 2507570 - RNA, 19 nt, Artificial Sequence
  Description of Artificial Sequence: Synthetic oligonucleotide
  Sense strand starting at position 1443 of SEQ ID NO: 1888057
ggaauugugccuuaaugag

SEQ ID NO: 2507571 - RNA, 19 nt, Artificial Sequence
  Description of Artificial Sequence: Synthetic oligonucleotide
  Antisense strand to SEQ ID NO: 2507570
cucauuaaggcacaauucc

SEQ ID NO: 2507572 - RNA, 19 nt, Artificial Sequence
  Description of Artificial Sequence: Synthetic oligonucleotide
  Sense strand starting at position 1449 of SEQ ID NO: 1888057
gugccuuaaugaguuugua

SEQ ID NO: 2507573 - RNA, 19 nt, Artificial Sequence
  Description of Artificial Sequence: Synthetic oligonucleotide
  Antisense strand to SEQ ID NO: 2507572
uacaaacucauuaaggcac

SEQ ID NO: 2507574 - RNA, 19 nt, Artificial Sequence
  Description of Artificial Sequence: Synthetic oligonucleotide
  Sense strand starting at position 1452 of SEQ ID NO: 1888057
ccuuaaugaguuuguacua

SEQ ID NO: 2507575 - RNA, 19 nt, Artificial Sequence
  Description of Artificial Sequence: Synthetic oligonucleotide
  Antisense strand to SEQ ID NO: 2507574
uaguacaaacucauuaagg

SEQ ID NO: 2507576 - RNA, 19 nt, Artificial Sequence
  Description of Artificial Sequence: Synthetic oligonucleotide
  Sense strand starting at position 1457 of SEQ ID NO: 1888057
augaguuuguacuacuaua

SEQ ID NO: 2507577 - RNA, 19 nt, Artificial Sequence
  Description of Artificial Sequence: Synthetic oligonucleotide
  Antisense strand to SEQ ID NO: 2507576
uauaguaguacaaacucau

SEQ ID NO: 2507578 - RNA, 19 nt, Artificial Sequence
  Description of Artificial Sequence: Synthetic oligonucleotide
  Sense strand starting at position 1709 of SEQ ID NO: 1888057
guguaaggauccuaaacuc

SEQ ID NO: 2507579 - RNA, 19 nt, Artificial Sequence
  Description of Artificial Sequence: Synthetic oligonucleotide
  Antisense strand to SEQ ID NO: 2507578
gaguuuaggauccuuacac

SEQ ID NO: 2507580 - RNA, 19 nt, Artificial Sequence
  Description of Artificial Sequence: Synthetic oligonucleotide
  Sense strand starting at position 1717 of SEQ ID NO: 1888057
auccuaaacucauucguga

SEQ ID NO: 2507581 - RNA, 19 nt, Artificial Sequence
  Description of Artificial Sequence: Synthetic oligonucleotide
  Antisense strand to SEQ ID NO: 2507580
ucacgaaugaguuuaggau

SEQ ID NO: 2507582 - RNA, 19 nt, Artificial Sequence
  Description of Artificial Sequence: Synthetic oligonucleotide
  Sense strand starting at position 1720 of SEQ ID NO: 1888057
cuaaacucauucgugaaca

SEQ ID NO: 2507583 - RNA, 19 nt, Artificial Sequence
  Description of Artificial Sequence: Synthetic oligonucleotide
  Antisense strand to SEQ ID NO: 2507582
uguucacgaaugaguuuag

SEQ ID NO: 2507584 - RNA, 19 nt, Artificial Sequence
  Description of Artificial Sequence: Synthetic oligonucleotide
  Sense strand starting at position 1784 of SEQ ID NO: 1888057
aucuuaugacauuggugau

SEQ ID NO: 2507585 - RNA, 19 nt, Artificial Sequence
  Description of Artificial Sequence: Synthetic oligonucleotide
  Antisense strand to SEQ ID NO: 2507584
aucaccaaugucauaagau

SEQ ID NO: 2507586 - RNA, 19 nt, Artificial Sequence
  Description of Artificial Sequence: Synthetic oligonucleotide
  Sense strand starting at position 1787 of SEQ ID NO: 1888057
uuaugacauuggugauuaa

SEQ ID NO: 2507587 - RNA, 19 nt, Artificial Sequence
  Description of Artificial Sequence: Synthetic oligonucleotide
  Antisense strand to SEQ ID NO: 2507586
uuaaucaccaaugucauaa

SEQ ID NO: 2507588 - RNA, 19 nt, Artificial Sequence
  Description of Artificial Sequence: Synthetic oligonucleotide
  Sense strand starting at position 1924 of SEQ ID NO: 1888057
auccuuggcucauagcaua

SEQ ID NO: 2507589 - RNA, 19 nt, Artificial Sequence
  Description of Artificial Sequence: Synthetic oligonucleotide
  Antisense strand to SEQ ID NO: 2507588
uaugcuaugagccaaggau

SEQ ID NO: 2507590 - RNA, 19 nt, Artificial Sequence
  Description of Artificial Sequence: Synthetic oligonucleotide
  Sense strand starting at position 2297 of SEQ ID NO: 1888057
cgcuauuaugaauggaauu

SEQ ID NO: 2507591 - RNA, 19 nt, Artificial Sequence
  Description of Artificial Sequence: Synthetic oligonucleotide
  Antisense strand to SEQ ID NO: 2507590
aauuccauucauaauagcg

SEQ ID NO: 2507592 - RNA, 19 nt, Artificial Sequence
  Description of Artificial Sequence: Synthetic oligonucleotide
  Sense strand starting at position 2335 of SEQ ID NO: 1888057
uuuacuaccucugguacau

SEQ ID NO: 2507593 - RNA, 19 nt, Artificial Sequence
  Description of Artificial Sequence: Synthetic oligonucleotide
  Antisense strand to SEQ ID NO: 2507592
auguaccagagguaguaaa

SEQ ID NO: 2507594 - RNA, 19 nt, Artificial Sequence
  Description of Artificial Sequence: Synthetic oligonucleotide
  Sense strand starting at position 2375 of SEQ ID NO: 1888057
gccuaugguagaggaauua

SEQ ID NO: 2507595 - RNA, 19 nt, Artificial Sequence
  Description of Artificial Sequence: Synthetic oligonucleotide
  Antisense strand to SEQ ID NO: 2507594
uaauuccucuaccauaggc

SEQ ID NO: 2507596 - RNA, 19 nt, Artificial Sequence
  Description of Artificial Sequence: Synthetic oligonucleotide
  Sense strand starting at position 2738 of SEQ ID NO: 1888057
uugcuucugccauauaaga

SEQ ID NO: 2507597 - RNA, 19 nt, Artificial Sequence
  Description of Artificial Sequence: Synthetic oligonucleotide
  Antisense strand to SEQ ID NO: 2507596
ucuuauauggcagaagcaa

SEQ ID NO: 2507598 - RNA, 19 nt, Artificial Sequence
  Description of Artificial Sequence: Synthetic oligonucleotide
  Sense strand starting at position 3297 of SEQ ID NO: 1888057
aggugacucgggugauguu

SEQ ID NO: 2507599 - RNA, 19 nt, Artificial Sequence
  Description of Artificial Sequence: Synthetic oligonucleotide
  Antisense strand to SEQ ID NO: 2507598
aacaucacccgagucaccu

SEQ ID NO: 2507600 - RNA, 19 nt, Artificial Sequence
  Description of Artificial Sequence: Synthetic oligonucleotide
  Sense strand starting at position 3298 of SEQ ID NO: 1888057
ggugacucgggugauguua

SEQ ID NO: 2507601 - RNA, 19 nt, Artificial Sequence
  Description of Artificial Sequence: Synthetic oligonucleotide
  Antisense strand to SEQ ID NO: 2507600
uaacaucacccgagucacc

SEQ ID NO: 2507602 - RNA, 19 nt, Artificial Sequence
  Description of Artificial Sequence: Synthetic oligonucleotide
  Sense strand starting at position 3300 of SEQ ID NO: 1888057
ugacucgggugauguuaaa

SEQ ID NO: 2507603 - RNA, 19 nt, Artificial Sequence
  Description of Artificial Sequence: Synthetic oligonucleotide
  Antisense strand to SEQ ID NO: 2507602
uuuaacaucacccgaguca

SEQ ID NO: 2507604 - RNA, 19 nt, Artificial Sequence
  Description of Artificial Sequence: Synthetic oligonucleotide
  Sense strand starting at position 3856 of SEQ ID NO: 1888057
uagggcucugcagaagaga

SEQ ID NO: 2507605 - RNA, 19 nt, Artificial Sequence
  Description of Artificial Sequence: Synthetic oligonucleotide
  Antisense strand to SEQ ID NO: 2507604
ucucuucugcagagcccua

SEQ ID NO: 2507606 - RNA, 19 nt, Artificial Sequence
  Description of Artificial Sequence: Synthetic oligonucleotide
  Sense strand starting at position 188 of SEQ ID NO: 1888056
agacaaugugaccaugcau

SEQ ID NO: 2507607 - RNA, 19 nt, Artificial Sequence
  Description of Artificial Sequence: Synthetic oligonucleotide
  Antisense strand to SEQ ID NO: 2507606
augcauggucacauugucu

SEQ ID NO: 2507608 - RNA, 19 nt, Artificial Sequence
  Description of Artificial Sequence: Synthetic oligonucleotide
  Sense strand starting at position 212 of SEQ ID NO: 1888056
uggcguaucccacagaaga

SEQ ID NO: 2507609 - RNA, 19 nt, Artificial Sequence
  Description of Artificial Sequence: Synthetic oligonucleotide
  Antisense strand to SEQ ID NO: 2507608
ucuucugugggauacgcca

SEQ ID NO: 2507610 - RNA, 19 nt, Artificial Sequence
  Description of Artificial Sequence: Synthetic oligonucleotide
  Sense strand starting at position 214 of SEQ ID NO: 1888056
gcguaucccacagaagaug

SEQ ID NO: 2507611 - RNA, 19 nt, Artificial Sequence
  Description of Artificial Sequence: Synthetic oligonucleotide
  Antisense strand to SEQ ID NO: 2507610
caucuucugugggauacgc

SEQ ID NO: 2507612 - RNA, 19 nt, Artificial Sequence
  Description of Artificial Sequence: Synthetic oligonucleotide
  Sense strand starting at position 222 of SEQ ID NO: 1888056
cacagaagauggugugaau

SEQ ID NO: 2507613 - RNA, 19 nt, Artificial Sequence
  Description of Artificial Sequence: Synthetic oligonucleotide
  Antisense strand to SEQ ID NO: 2507612
auucacaccaucuucugug

SEQ ID NO: 2507614 - RNA, 19 nt, Artificial Sequence
  Description of Artificial Sequence: Synthetic oligonucleotide
  Sense strand starting at position 277 of SEQ ID NO: 1888056
aacgguguucuccaugcau

SEQ ID NO: 2507615 - RNA, 19 nt, Artificial Sequence
  Description of Artificial Sequence: Synthetic oligonucleotide
  Antisense strand to SEQ ID NO: 2507614
augcauggagaacaccguu

SEQ ID NO: 2507616 - RNA, 19 nt, Artificial Sequence
  Description of Artificial Sequence: Synthetic oligonucleotide
  Sense strand starting at position 279 of SEQ ID NO: 1888056
cgguguucuccaugcaugu

SEQ ID NO: 2507617 - RNA, 19 nt, Artificial Sequence
  Description of Artificial Sequence: Synthetic oligonucleotide
  Antisense strand to SEQ ID NO: 2507616
acaugcauggagaacaccg

SEQ ID NO: 2507618 - RNA, 19 nt, Artificial Sequence
  Description of Artificial Sequence: Synthetic oligonucleotide
  Sense strand starting at position 474 of SEQ ID NO: 1888056
ccugguaucccugacacaa

SEQ ID NO: 2507619 - RNA, 19 nt, Artificial Sequence
  Description of Artificial Sequence: Synthetic oligonucleotide
  Antisense strand to SEQ ID NO: 2507618
uugugucagggauaccagg

SEQ ID NO: 2507620 - RNA, 19 nt, Artificial Sequence
  Description of Artificial Sequence: Synthetic oligonucleotide
  Sense strand starting at position 790 of SEQ ID NO: 1888056
ggucaugagaccugcggaa

SEQ ID NO: 2507621 - RNA, 19 nt, Artificial Sequence
  Description of Artificial Sequence: Synthetic oligonucleotide
  Antisense strand to SEQ ID NO: 2507620
uuccgcaggucucaugacc

SEQ ID NO: 2507622 - RNA, 19 nt, Artificial Sequence
  Description of Artificial Sequence: Synthetic oligonucleotide
  Sense strand starting at position 792 of SEQ ID NO: 1888056
ucaugagaccugcggaauc

SEQ ID NO: 2507623 - RNA, 19 nt, Artificial Sequence
  Description of Artificial Sequence: Synthetic oligonucleotide
  Antisense strand to SEQ ID NO: 2507622
gauuccgcaggucucauga

SEQ ID NO: 2507624 - RNA, 19 nt, Artificial Sequence
  Description of Artificial Sequence: Synthetic oligonucleotide
  Sense strand starting at position 847 of SEQ ID NO: 1888056
cacggaucuccaggaaaug

SEQ ID NO: 2507625 - RNA, 19 nt, Artificial Sequence
  Description of Artificial Sequence: Synthetic oligonucleotide
  Antisense strand to SEQ ID NO: 2507624
cauuuccuggagauccgug

SEQ ID NO: 2507626 - RNA, 19 nt, Artificial Sequence
  Description of Artificial Sequence: Synthetic oligonucleotide
  Sense strand starting at position 857 of SEQ ID NO: 1888056
caggaaaugucacccugac

SEQ ID NO: 2507627 - RNA, 19 nt, Artificial Sequence
  Description of Artificial Sequence: Synthetic oligonucleotide
  Antisense strand to SEQ ID NO: 2507626
gucagggugacauuuccug

SEQ ID NO: 2507628 - RNA, 19 nt, Artificial Sequence
  Description of Artificial Sequence: Synthetic oligonucleotide
  Sense strand starting at position 1257 of SEQ ID NO: 1888056
ucuugauccuaggaaacug

SEQ ID NO: 2507629 - RNA, 19 nt, Artificial Sequence
  Description of Artificial Sequence: Synthetic oligonucleotide
  Antisense strand to SEQ ID NO: 2507628
caguuuccuaggaucaaga

SEQ ID NO: 2507630 - RNA, 19 nt, Artificial Sequence
  Description of Artificial Sequence: Synthetic oligonucleotide
  Sense strand starting at position 1300 of SEQ ID NO: 1888056
ucauuugcuccgugaccaa

SEQ ID NO: 2507631 - RNA, 19 nt, Artificial Sequence
  Description of Artificial Sequence: Synthetic oligonucleotide
  Antisense strand to SEQ ID NO: 2507630
uuggucacggagcaaauga

SEQ ID NO: 2507632 - RNA, 19 nt, Artificial Sequence
  Description of Artificial Sequence: Synthetic oligonucleotide
  Sense strand starting at position 1697 of SEQ ID NO: 1888056
gguugugcucucgacgaga

SEQ ID NO: 2507633 - RNA, 19 nt, Artificial Sequence
  Description of Artificial Sequence: Synthetic oligonucleotide
  Antisense strand to SEQ ID NO: 2507632
ucucgucgagagcacaacc

SEQ ID NO: 2507634 - RNA, 19 nt, Artificial Sequence
  Description of Artificial Sequence: Synthetic oligonucleotide
  Sense strand starting at position 1699 of SEQ ID NO: 1888056
uugugcucucgacgagaac

SEQ ID NO: 2507635 - RNA, 19 nt, Artificial Sequence
  Description of Artificial Sequence: Synthetic oligonucleotide
  Antisense strand to SEQ ID NO: 2507634
guucucgucgagagcacaa

SEQ ID NO: 2507636 - RNA, 19 nt, Artificial Sequence
  Description of Artificial Sequence: Synthetic oligonucleotide
  Sense strand starting at position 1714 of SEQ ID NO: 1888056
gaacgauccucgggugaga

SEQ ID NO: 2507637 - RNA, 19 nt, Artificial Sequence
  Description of Artificial Sequence: Synthetic oligonucleotide
  Antisense strand to SEQ ID NO: 2507636
ucucacccgaggaucguuc

SEQ ID NO: 2507638 - RNA, 19 nt, Artificial Sequence
  Description of Artificial Sequence: Synthetic oligonucleotide
  Sense strand starting at position 1754 of SEQ ID NO: 1888056
gccuacauguccucgagau

SEQ ID NO: 2507639 - RNA, 19 nt, Artificial Sequence
  Description of Artificial Sequence: Synthetic oligonucleotide
  Antisense strand to SEQ ID NO: 2507638
aucucgaggacauguaggc

SEQ ID NO: 2507640 - RNA, 19 nt, Artificial Sequence
  Description of Artificial Sequence: Synthetic oligonucleotide
  Sense strand starting at position 1755 of SEQ ID NO: 1888056
ccuacauguccucgagauc

SEQ ID NO: 2507641 - RNA, 19 nt, Artificial Sequence
  Description of Artificial Sequence: Synthetic oligonucleotide
  Antisense strand to SEQ ID NO: 2507640
gaucucgaggacauguagg

SEQ ID NO: 2507642 - RNA, 19 nt, Artificial Sequence
  Description of Artificial Sequence: Synthetic oligonucleotide
  Sense strand starting at position 1756 of SEQ ID NO: 1888056
cuacauguccucgagauca

SEQ ID NO: 2507643 - RNA, 19 nt, Artificial Sequence
  Description of Artificial Sequence: Synthetic oligonucleotide
  Antisense strand to SEQ ID NO: 2507642
ugaucucgaggacauguag

SEQ ID NO: 2507644 - RNA, 19 nt, Artificial Sequence
  Description of Artificial Sequence: Synthetic oligonucleotide
  Sense strand starting at position 1884 of SEQ ID NO: 1888056
uggucagcccuuugcgaau

SEQ ID NO: 2507645 - RNA, 19 nt, Artificial Sequence
  Description of Artificial Sequence: Synthetic oligonucleotide
  Antisense strand to SEQ ID NO: 2507644
auucgcaaagggcugacca

SEQ ID NO: 2507646 - RNA, 19 nt, Artificial Sequence
  Description of Artificial Sequence: Synthetic oligonucleotide
  Sense strand starting at position 2011 of SEQ ID NO: 1888056
gaggacugcuuucuaagac

SEQ ID NO: 2507647 - RNA, 19 nt, Artificial Sequence
  Description of Artificial Sequence: Synthetic oligonucleotide
  Antisense strand to SEQ ID NO: 2507646
gucuuagaaagcaguccuc

SEQ ID NO: 2507648 - RNA, 19 nt, Artificial Sequence
  Description of Artificial Sequence: Synthetic oligonucleotide
  Sense strand starting at position 2012 of SEQ ID NO: 1888056
aggacugcuuucuaagaca

SEQ ID NO: 2507649 - RNA, 19 nt, Artificial Sequence
  Description of Artificial Sequence: Synthetic oligonucleotide
  Antisense strand to SEQ ID NO: 2507648
ugucuuagaaagcaguccu

SEQ ID NO: 2507650 - RNA, 19 nt, Artificial Sequence
  Description of Artificial Sequence: Synthetic oligonucleotide
  Sense strand starting at position 2444 of SEQ ID NO: 1888056
aaagaaugaucccauaggu

SEQ ID NO: 2507651 - RNA, 19 nt, Artificial Sequence
  Description of Artificial Sequence: Synthetic oligonucleotide
  Antisense strand to SEQ ID NO: 2507650
accuaugggaucauucuuu

SEQ ID NO: 2507652 - RNA, 19 nt, Artificial Sequence
  Description of Artificial Sequence: Synthetic oligonucleotide
  Sense strand starting at position 3012 of SEQ ID NO: 1888056
gccugagacauguauggac

SEQ ID NO: 2507653 - RNA, 19 nt, Artificial Sequence
  Description of Artificial Sequence: Synthetic oligonucleotide
  Antisense strand to SEQ ID NO: 2507652
guccauacaugucucaggc

SEQ ID NO: 2507654 - RNA, 19 nt, Artificial Sequence
  Description of Artificial Sequence: Synthetic oligonucleotide
  Sense strand starting at position 3045 of SEQ ID NO: 1888056
ggucauuagaccugcggaa

SEQ ID NO: 2507655 - RNA, 19 nt, Artificial Sequence
  Description of Artificial Sequence: Synthetic oligonucleotide
  Antisense strand to SEQ ID NO: 2507654
uuccgcaggucuaaugacc

SEQ ID NO: 2507656 - RNA, 19 nt, Artificial Sequence
  Description of Artificial Sequence: Synthetic oligonucleotide
  Sense strand starting at position 3047 of SEQ ID NO: 1888056
ucauuagaccugcggaauc

SEQ ID NO: 2507657 - RNA, 19 nt, Artificial Sequence
  Description of Artificial Sequence: Synthetic oligonucleotide
  Antisense strand to SEQ ID NO: 2507656
gauuccgcaggucuaauga

SEQ ID NO: 2507658 - RNA, 19 nt, Artificial Sequence
  Description of Artificial Sequence: Synthetic oligonucleotide
  Sense strand starting at position 3058 of SEQ ID NO: 1888056
gcggaauccagcugaaaca

SEQ ID NO: 2507659 - RNA, 19 nt, Artificial Sequence
  Description of Artificial Sequence: Synthetic oligonucleotide
  Antisense strand to SEQ ID NO: 2507658
uguuucagcuggauuccgc

SEQ ID NO: 2507660 - RNA, 19 nt, Artificial Sequence
  Description of Artificial Sequence: Synthetic oligonucleotide
  Sense strand starting at position 3140 of SEQ ID NO: 1888056
agucaucuuuguugaagaa

SEQ ID NO: 2507661 - RNA, 19 nt, Artificial Sequence
  Description of Artificial Sequence: Synthetic oligonucleotide
  Antisense strand to SEQ ID NO: 2507660
uucuucaacaaagaugacu

SEQ ID NO: 2507662 - RNA, 19 nt, Artificial Sequence
  Description of Artificial Sequence: Synthetic oligonucleotide
  Sense strand starting at position 3141 of SEQ ID NO: 1888056
gucaucuuuguugaagaaa

SEQ ID NO: 2507663 - RNA, 19 nt, Artificial Sequence
  Description of Artificial Sequence: Synthetic oligonucleotide
  Antisense strand to SEQ ID NO: 2507662
uuucuucaacaaagaugac

SEQ ID NO: 2507664 - RNA, 19 nt, Artificial Sequence
  Description of Artificial Sequence: Synthetic oligonucleotide
  Sense strand starting at position 3325 of SEQ ID NO: 1888056
uccaaugacagcgauuguu

SEQ ID NO: 2507665 - RNA, 19 nt, Artificial Sequence
  Description of Artificial Sequence: Synthetic oligonucleotide
  Antisense strand to SEQ ID NO: 2507664
aacaaucgcugucauugga

SEQ ID NO: 2507666 - RNA, 19 nt, Artificial Sequence
  Description of Artificial Sequence: Synthetic oligonucleotide
  Sense strand starting at position 3450 of SEQ ID NO: 1888056
gcugcuguccugugggaaa

SEQ ID NO: 2507667 - RNA, 19 nt, Artificial Sequence
  Description of Artificial Sequence: Synthetic oligonucleotide
  Antisense strand to SEQ ID NO: 2507666
uuucccacaggacagcagc

SEQ ID NO: 2507668 - RNA, 19 nt, Artificial Sequence
  Description of Artificial Sequence: Synthetic oligonucleotide
  Sense strand starting at position 3613 of SEQ ID NO: 1888056
gcgguuccgcgacagugaa

SEQ ID NO: 2507669 - RNA, 19 nt, Artificial Sequence
  Description of Artificial Sequence: Synthetic oligonucleotide
  Antisense strand to SEQ ID NO: 2507668
uucacugucgcggaaccgc

SEQ ID NO: 2507670 - RNA, 19 nt, Artificial Sequence
  Description of Artificial Sequence: Synthetic oligonucleotide
  Sense strand starting at position 3614 of SEQ ID NO: 1888056
cgguuccgcgacagugaaa

SEQ ID NO: 2507671 - RNA, 19 nt, Artificial Sequence
  Description of Artificial Sequence: Synthetic oligonucleotide
  Antisense strand to SEQ ID NO: 2507670
uuucacugucgcggaaccg

SEQ ID NO: 2507672 - RNA, 19 nt, Artificial Sequence
  Description of Artificial Sequence: Synthetic oligonucleotide
  Sense strand starting at position 3951 of SEQ ID NO: 1888056
ugguucugcucucaaagaa

SEQ ID NO: 2507673 - RNA, 19 nt, Artificial Sequence
  Description of Artificial Sequence: Synthetic oligonucleotide
  Antisense strand to SEQ ID NO: 2507672
uucuuugagagcagaacca

SEQ ID NO: 2507674 - RNA, 19 nt, Artificial Sequence
  Description of Artificial Sequence: Synthetic oligonucleotide
  Sense strand starting at position 61 of SEQ ID NO: 1888058
uuuagagguuuccugaaau

SEQ ID NO: 2507675 - RNA, 19 nt, Artificial Sequence
  Description of Artificial Sequence: Synthetic oligonucleotide
  Antisense strand to SEQ ID NO: 2507674
auuucaggaaaccucuaaa

SEQ ID NO: 2507676 - RNA, 19 nt, Artificial Sequence
  Description of Artificial Sequence: Synthetic oligonucleotide
  Sense strand starting at position 210 of SEQ ID NO: 1888058
uggacaaguugcucccaga

SEQ ID NO: 2507677 - RNA, 19 nt, Artificial Sequence
  Description of Artificial Sequence: Synthetic oligonucleotide
  Antisense strand to SEQ ID NO: 2507676
ucugggagcaacuugucca

SEQ ID NO: 2507678 - RNA, 19 nt, Artificial Sequence
  Description of Artificial Sequence: Synthetic oligonucleotide
  Sense strand starting at position 558 of SEQ ID NO: 1888058
augcaaauagcuuacgaua

SEQ ID NO: 2507679 - RNA, 19 nt, Artificial Sequence
  Description of Artificial Sequence: Synthetic oligonucleotide
  Antisense strand to SEQ ID NO: 2507678
uaucguaagcuauuugcau

SEQ ID NO: 2507680 - RNA, 19 nt, Artificial Sequence
  Description of Artificial Sequence: Synthetic oligonucleotide
  Sense strand starting at position 618 of SEQ ID NO: 1888058
cgcuguaugcguuucacaa

SEQ ID NO: 2507681 - RNA, 19 nt, Artificial Sequence
  Description of Artificial Sequence: Synthetic oligonucleotide
  Antisense strand to SEQ ID NO: 2507680
uugugaaacgcauacagcg

SEQ ID NO: 2507682 - RNA, 19 nt, Artificial Sequence
  Description of Artificial Sequence: Synthetic oligonucleotide
  Sense strand starting at position 664 of SEQ ID NO: 1888058
ggcccagagugauucgaaa

SEQ ID NO: 2507683 - RNA, 19 nt, Artificial Sequence
  Description of Artificial Sequence: Synthetic oligonucleotide
  Antisense strand to SEQ ID NO: 2507682
uuucgaaucacucugggcc

SEQ ID NO: 2507684 - RNA, 19 nt, Artificial Sequence
  Description of Artificial Sequence: Synthetic oligonucleotide
  Sense strand starting at position 666 of SEQ ID NO: 1888058
cccagagugauucgaaaca

SEQ ID NO: 2507685 - RNA, 19 nt, Artificial Sequence
  Description of Artificial Sequence: Synthetic oligonucleotide
  Antisense strand to SEQ ID NO: 2507684
uguuucgaaucacucuggg

SEQ ID NO: 2507686 - RNA, 19 nt, Artificial Sequence
  Description of Artificial Sequence: Synthetic oligonucleotide
  Sense strand starting at position 820 of SEQ ID NO: 1888058
gcagcaaaucuaggaaauu

SEQ ID NO: 2507687 - RNA, 19 nt, Artificial Sequence
  Description of Artificial Sequence: Synthetic oligonucleotide
  Antisense strand to SEQ ID NO: 2507686
aauuuccuagauuugcugc

SEQ ID NO: 2507688 - RNA, 19 nt, Artificial Sequence
  Description of Artificial Sequence: Synthetic oligonucleotide
  Sense strand starting at position 907 of SEQ ID NO: 1888058
gcugacacauccuuuagag

SEQ ID NO: 2507689 - RNA, 19 nt, Artificial Sequence
  Description of Artificial Sequence: Synthetic oligonucleotide
  Antisense strand to SEQ ID NO: 2507688
cucuaaaggaugugucagc

SEQ ID NO: 2507690 - RNA, 19 nt, Artificial Sequence
  Description of Artificial Sequence: Synthetic oligonucleotide
  Sense strand starting at position 1080 of SEQ ID NO: 1888058
ggguguacaggagaguuua

SEQ ID NO: 2507691 - RNA, 19 nt, Artificial Sequence
  Description of Artificial Sequence: Synthetic oligonucleotide
  Antisense strand to SEQ ID NO: 2507690
uaaacucuccuguacaccc

SEQ ID NO: 2507692 - RNA, 19 nt, Artificial Sequence
  Description of Artificial Sequence: Synthetic oligonucleotide
  Sense strand starting at position 1247 of SEQ ID NO: 1888058
ccgggauuucccgagccga

SEQ ID NO: 2507693 - RNA, 19 nt, Artificial Sequence
  Description of Artificial Sequence: Synthetic oligonucleotide
  Antisense strand to SEQ ID NO: 2507692
ucggcucgggaaaucccgg

SEQ ID NO: 2507694 - RNA, 19 nt, Artificial Sequence
  Description of Artificial Sequence: Synthetic oligonucleotide
  Sense strand starting at position 1294 of SEQ ID NO: 1888058
gcguauagcagauacacaa

SEQ ID NO: 2507695 - RNA, 19 nt, Artificial Sequence
  Description of Artificial Sequence: Synthetic oligonucleotide
  Antisense strand to SEQ ID NO: 2507694
uuguguaucugcuauacgc

SEQ ID NO: 2507696 - RNA, 19 nt, Artificial Sequence
  Description of Artificial Sequence: Synthetic oligonucleotide
  Sense strand starting at position 1315 of SEQ ID NO: 1888058
aauagcugucaucaugaga

SEQ ID NO: 2507697 - RNA, 19 nt, Artificial Sequence
  Description of Artificial Sequence: Synthetic oligonucleotide
  Antisense strand to SEQ ID NO: 2507696
ucucaugaugacagcuauu

SEQ ID NO: 2507698 - RNA, 19 nt, Artificial Sequence
  Description of Artificial Sequence: Synthetic oligonucleotide
  Sense strand starting at position 1318 of SEQ ID NO: 1888058
agcugucaucaugagaauc

SEQ ID NO: 2507699 - RNA, 19 nt, Artificial Sequence
  Description of Artificial Sequence: Synthetic oligonucleotide
  Antisense strand to SEQ ID NO: 2507698
gauucucaugaugacagcu

SEQ ID NO: 2507700 - RNA, 19 nt, Artificial Sequence
  Description of Artificial Sequence: Synthetic oligonucleotide
  Sense strand starting at position 1532 of SEQ ID NO: 1888058
ccagaagucuguccacaca

SEQ ID NO: 2507701 - RNA, 19 nt, Artificial Sequence
  Description of Artificial Sequence: Synthetic oligonucleotide
  Antisense strand to SEQ ID NO: 2507700
uguguggacagacuucugg

SEQ ID NO: 2507702 - RNA, 19 nt, Artificial Sequence
  Description of Artificial Sequence: Synthetic oligonucleotide
  Sense strand starting at position 1771 of SEQ ID NO: 1888058
ggaagaucgccuugaggac

SEQ ID NO: 2507703 - RNA, 19 nt, Artificial Sequence
  Description of Artificial Sequence: Synthetic oligonucleotide
  Antisense strand to SEQ ID NO: 2507702
guccucaaggcgaucuucc

SEQ ID NO: 2507704 - RNA, 19 nt, Artificial Sequence
  Description of Artificial Sequence: Synthetic oligonucleotide
  Sense strand starting at position 1980 of SEQ ID NO: 1888058
ggccgauugcuugucagug

SEQ ID NO: 2507705 - RNA, 19 nt, Artificial Sequence
  Description of Artificial Sequence: Synthetic oligonucleotide
  Antisense strand to SEQ ID NO: 2507704
cacugacaagcaaucggcc

SEQ ID NO: 2507706 - RNA, 19 nt, Artificial Sequence
  Description of Artificial Sequence: Synthetic oligonucleotide
  Sense strand starting at position 2134 of SEQ ID NO: 1888058
guuuguggucguguccuga

SEQ ID NO: 2507707 - RNA, 19 nt, Artificial Sequence
  Description of Artificial Sequence: Synthetic oligonucleotide
  Antisense strand to SEQ ID NO: 2507706
ucaggacacgaccacaaac

SEQ ID NO: 2507708 - RNA, 19 nt, Artificial Sequence
  Description of Artificial Sequence: Synthetic oligonucleotide
  Sense strand starting at position 2147 of SEQ ID NO: 1888058
uccugaauccuccacgauu

SEQ ID NO: 2507709 - RNA, 19 nt, Artificial Sequence
  Description of Artificial Sequence: Synthetic oligonucleotide
  Antisense strand to SEQ ID NO: 2507708
aaucguggaggauucagga

SEQ ID NO: 2507710 - RNA, 19 nt, Artificial Sequence
  Description of Artificial Sequence: Synthetic oligonucleotide
  Sense strand starting at position 2149 of SEQ ID NO: 1888058
cugaauccuccacgauuaa

SEQ ID NO: 2507711 - RNA, 19 nt, Artificial Sequence
  Description of Artificial Sequence: Synthetic oligonucleotide
  Antisense strand to SEQ ID NO: 2507710
uuaaucguggaggauucag

SEQ ID NO: 2507712 - RNA, 19 nt, Artificial Sequence
  Description of Artificial Sequence: Synthetic oligonucleotide
  Sense strand starting at position 2156 of SEQ ID NO: 1888058
cuccacgauuaaucacaga

SEQ ID NO: 2507713 - RNA, 19 nt, Artificial Sequence
  Description of Artificial Sequence: Synthetic oligonucleotide
  Antisense strand to SEQ ID NO: 2507712
ucugugauuaaucguggag

SEQ ID NO: 2507714 - RNA, 19 nt, Artificial Sequence
  Description of Artificial Sequence: Synthetic oligonucleotide
  Sense strand starting at position 2180 of SEQ ID NO: 1888058
ugauuucugcuuugccuca

SEQ ID NO: 2507715 - RNA, 19 nt, Artificial Sequence
  Description of Artificial Sequence: Synthetic oligonucleotide
  Antisense strand to SEQ ID NO: 2507714
ugaggcaaagcagaaauca

SEQ ID NO: 2507716 - RNA, 19 nt, Artificial Sequence
  Description of Artificial Sequence: Synthetic oligonucleotide
  Sense strand starting at position 2513 of SEQ ID NO: 1888058
cuucuccuagauugagagu

SEQ ID NO: 2507717 - RNA, 19 nt, Artificial Sequence
  Description of Artificial Sequence: Synthetic oligonucleotide
  Antisense strand to SEQ ID NO: 2507716
acucucaaucuaggagaag

SEQ ID NO: 2507718 - RNA, 19 nt, Artificial Sequence
  Description of Artificial Sequence: Synthetic oligonucleotide
  Sense strand starting at position 2765 of SEQ ID NO: 1888058
uccugauucugcucaggga

SEQ ID NO: 2507719 - RNA, 19 nt, Artificial Sequence
  Description of Artificial Sequence: Synthetic oligonucleotide
  Antisense strand to SEQ ID NO: 2507718
ucccugagcagaaucagga

SEQ ID NO: 2507720 - RNA, 19 nt, Artificial Sequence
  Description of Artificial Sequence: Synthetic oligonucleotide
  Sense strand starting at position 2998 of SEQ ID NO: 1888058
aggguaauuuggcaaagac

SEQ ID NO: 2507721 - RNA, 19 nt, Artificial Sequence
  Description of Artificial Sequence: Synthetic oligonucleotide
  Antisense strand to SEQ ID NO: 2507720
gucuuugccaaauuacccu

SEQ ID NO: 2507722 - RNA, 19 nt, Artificial Sequence
  Description of Artificial Sequence: Synthetic oligonucleotide
  Sense strand starting at position 3030 of SEQ ID NO: 1888058
agaugagggucuccuacua

SEQ ID NO: 2507723 - RNA, 19 nt, Artificial Sequence
  Description of Artificial Sequence: Synthetic oligonucleotide
  Antisense strand to SEQ ID NO: 2507722
uaguaggagacccucaucu

SEQ ID NO: 2507724 - RNA, 19 nt, Artificial Sequence
  Description of Artificial Sequence: Synthetic oligonucleotide
  Sense strand starting at position 3076 of SEQ ID NO: 1888058
cagagaugcuugcugagag

SEQ ID NO: 2507725 - RNA, 19 nt, Artificial Sequence
  Description of Artificial Sequence: Synthetic oligonucleotide
  Antisense strand to SEQ ID NO: 2507724
cucucagcaagcaucucug

SEQ ID NO: 2507726 - RNA, 19 nt, Artificial Sequence
  Description of Artificial Sequence: Synthetic oligonucleotide
  Sense strand starting at position 3088 of SEQ ID NO: 1888058
cugagagcugcuuaucaua

SEQ ID NO: 2507727 - RNA, 19 nt, Artificial Sequence
  Description of Artificial Sequence: Synthetic oligonucleotide
  Antisense strand to SEQ ID NO: 2507726
uaugauaagcagcucucag

SEQ ID NO: 2507728 - RNA, 19 nt, Artificial Sequence
  Description of Artificial Sequence: Synthetic oligonucleotide
  Sense strand starting at position 3106 of SEQ ID NO: 1888058
aggaaaugaugggaaauaa

SEQ ID NO: 2507729 - RNA, 19 nt, Artificial Sequence
  Description of Artificial Sequence: Synthetic oligonucleotide
  Antisense strand to SEQ ID NO: 2507728
uuauuucccaucauuuccu

SEQ ID NO: 2507730 - RNA, 19 nt, Artificial Sequence
  Description of Artificial Sequence: Synthetic oligonucleotide
  Sense strand starting at position 3137 of SEQ ID NO: 1888058
uccaauaaugacugcuuga

SEQ ID NO: 2507731 - RNA, 19 nt, Artificial Sequence
  Description of Artificial Sequence: Synthetic oligonucleotide
  Antisense strand to SEQ ID NO: 2507730
ucaagcagucauuauugga

SEQ ID NO: 2507732 - RNA, 19 nt, Artificial Sequence
  Description of Artificial Sequence: Synthetic oligonucleotide
  Sense strand starting at position 3148 of SEQ ID NO: 1888058
cugcuugaacaagauguga

SEQ ID NO: 2507733 - RNA, 19 nt, Artificial Sequence
  Description of Artificial Sequence: Synthetic oligonucleotide
  Antisense strand to SEQ ID NO: 2507732
ucacaucuuguucaagcag

SEQ ID NO: 2507734 - RNA, 19 nt, Artificial Sequence
  Description of Artificial Sequence: Synthetic oligonucleotide
  Sense strand starting at position 3150 of SEQ ID NO: 1888058
gcuugaacaagaugugaaa

SEQ ID NO: 2507735 - RNA, 19 nt, Artificial Sequence
  Description of Artificial Sequence: Synthetic oligonucleotide
  Antisense strand to SEQ ID NO: 2507734
uuucacaucuuguucaagc

SEQ ID NO: 2507736 - RNA, 19 nt, Artificial Sequence
  Description of Artificial Sequence: Synthetic oligonucleotide
  Sense strand starting at position 3161 of SEQ ID NO: 1888058
augugaaagauaugguaca

SEQ ID NO: 2507737 - RNA, 19 nt, Artificial Sequence
  Description of Artificial Sequence: Synthetic oligonucleotide
  Antisense strand to SEQ ID NO: 2507736
uguaccauaucuuucacau

SEQ ID NO: 2507738 - RNA, 19 nt, Artificial Sequence
  Description of Artificial Sequence: Synthetic oligonucleotide
  Sense strand starting at position 3596 of SEQ ID NO: 1888058
gagcuaugucuguauugaa

SEQ ID NO: 2507739 - RNA, 19 nt, Artificial Sequence
  Description of Artificial Sequence: Synthetic oligonucleotide
  Antisense strand to SEQ ID NO: 2507738
uucaauacagacauagcuc

SEQ ID NO: 2507740 - RNA, 19 nt, Artificial Sequence
  Description of Artificial Sequence: Synthetic oligonucleotide
  Sense strand starting at position 3603 of SEQ ID NO: 1888058
gucuguauugaagagcaga

SEQ ID NO: 2507741 - RNA, 19 nt, Artificial Sequence
  Description of Artificial Sequence: Synthetic oligonucleotide
  Antisense strand to SEQ ID NO: 2507740
ucugcucuucaauacagac

SEQ ID NO: 2507742 - RNA, 19 nt, Artificial Sequence
  Description of Artificial Sequence: Synthetic oligonucleotide
  Sense strand starting at position 3666 of SEQ ID NO: 1888058
ugauacauuugguagaaug

SEQ ID NO: 2507743 - RNA, 19 nt, Artificial Sequence
  Description of Artificial Sequence: Synthetic oligonucleotide
  Antisense strand to SEQ ID NO: 2507742
cauucuaccaaauguauca

SEQ ID NO: 2507744 - RNA, 19 nt, Artificial Sequence
  Description of Artificial Sequence: Synthetic oligonucleotide
  Sense strand starting at position 3780 of SEQ ID NO: 1888058
aguugcuaccucugggaaa

SEQ ID NO: 2507745 - RNA, 19 nt, Artificial Sequence
  Description of Artificial Sequence: Synthetic oligonucleotide
  Antisense strand to SEQ ID NO: 2507744
uuucccagagguagcaacu

SEQ ID NO: 2507746 - RNA, 19 nt, Artificial Sequence
  Description of Artificial Sequence: Synthetic oligonucleotide
  Sense strand starting at position 3847 of SEQ ID NO: 1888058
ugagaauagauuggucugu

SEQ ID NO: 2507747 - RNA, 19 nt, Artificial Sequence
  Description of Artificial Sequence: Synthetic oligonucleotide
  Antisense strand to SEQ ID NO: 2507746
acagaccaaucuauucuca

SEQ ID NO: 2507748 - RNA, 19 nt, Artificial Sequence
  Description of Artificial Sequence: Synthetic oligonucleotide
  Sense strand starting at position 3848 of SEQ ID NO: 1888058
gagaauagauuggucuguu

SEQ ID NO: 2507749 - RNA, 19 nt, Artificial Sequence
  Description of Artificial Sequence: Synthetic oligonucleotide
  Antisense strand to SEQ ID NO: 2507748
aacagaccaaucuauucuc

SEQ ID NO: 2507750 - RNA, 19 nt, Artificial Sequence
  Description of Artificial Sequence: Synthetic oligonucleotide
  Sense strand starting at position 3849 of SEQ ID NO: 1888058
agaauagauuggucuguua

SEQ ID NO: 2507751 - RNA, 19 nt, Artificial Sequence
  Description of Artificial Sequence: Synthetic oligonucleotide
  Antisense strand to SEQ ID NO: 2507750
uaacagaccaaucuauucu

SEQ ID NO: 2507752 - RNA, 19 nt, Artificial Sequence
  Description of Artificial Sequence: Synthetic oligonucleotide
  Sense strand starting at position 3851 of SEQ ID NO: 1888058
aauagauuggucuguuacu

SEQ ID NO: 2507753 - RNA, 19 nt, Artificial Sequence
  Description of Artificial Sequence: Synthetic oligonucleotide
  Antisense strand to SEQ ID NO: 2507752
aguaacagaccaaucuauu

SEQ ID NO: 2507754 - RNA, 19 nt, Artificial Sequence
  Description of Artificial Sequence: Synthetic oligonucleotide
  Sense strand starting at position 177 of SEQ ID NO: 1888059
ugaguuggguucccucaga

SEQ ID NO: 2507755 - RNA, 19 nt, Artificial Sequence
  Description of Artificial Sequence: Synthetic oligonucleotide
  Antisense strand to SEQ ID NO: 2507754
ucugagggaacccaacuca

SEQ ID NO: 2507756 - RNA, 19 nt, Artificial Sequence
  Description of Artificial Sequence: Synthetic oligonucleotide
  Sense strand starting at position 221 of SEQ ID NO: 1888059
ggaggcugucccuaaacca

SEQ ID NO: 2507757 - RNA, 19 nt, Artificial Sequence
  Description of Artificial Sequence: Synthetic oligonucleotide
  Antisense strand to SEQ ID NO: 2507756
ugguuuagggacagccucc

SEQ ID NO: 2507758 - RNA, 19 nt, Artificial Sequence
  Description of Artificial Sequence: Synthetic oligonucleotide
  Sense strand starting at position 428 of SEQ ID NO: 1888059
auggucucccgauaucaag

SEQ ID NO: 2507759 - RNA, 19 nt, Artificial Sequence
  Description of Artificial Sequence: Synthetic oligonucleotide
  Antisense strand to SEQ ID NO: 2507758
cuugauaucgggagaccau

SEQ ID NO: 2507760 - RNA, 19 nt, Artificial Sequence
  Description of Artificial Sequence: Synthetic oligonucleotide
  Sense strand starting at position 583 of SEQ ID NO: 1888059
ggccaucucaaugguggua

SEQ ID NO: 2507761 - RNA, 19 nt, Artificial Sequence
  Description of Artificial Sequence: Synthetic oligonucleotide
  Antisense strand to SEQ ID NO: 2507760
uaccaccauugagauggcc

SEQ ID NO: 2507762 - RNA, 19 nt, Artificial Sequence
  Description of Artificial Sequence: Synthetic oligonucleotide
  Sense strand starting at position 586 of SEQ ID NO: 1888059
caucucaauggugguaaca

SEQ ID NO: 2507763 - RNA, 19 nt, Artificial Sequence
  Description of Artificial Sequence: Synthetic oligonucleotide
  Antisense strand to SEQ ID NO: 2507762
uguuaccaccauugagaug

SEQ ID NO: 2507764 - RNA, 19 nt, Artificial Sequence
  Description of Artificial Sequence: Synthetic oligonucleotide
  Sense strand starting at position 603 of SEQ ID NO: 1888059
cagugaccuggucagggau

SEQ ID NO: 2507765 - RNA, 19 nt, Artificial Sequence
  Description of Artificial Sequence: Synthetic oligonucleotide
  Antisense strand to SEQ ID NO: 2507764
aucccugaccaggucacug

SEQ ID NO: 2507766 - RNA, 19 nt, Artificial Sequence
  Description of Artificial Sequence: Synthetic oligonucleotide
  Sense strand starting at position 653 of SEQ ID NO: 1888059
uggaccucaucacuaagua

SEQ ID NO: 2507767 - RNA, 19 nt, Artificial Sequence
  Description of Artificial Sequence: Synthetic oligonucleotide
  Antisense strand to SEQ ID NO: 2507766
uacuuagugaugaggucca

SEQ ID NO: 2507768 - RNA, 19 nt, Artificial Sequence
  Description of Artificial Sequence: Synthetic oligonucleotide
  Sense strand starting at position 702 of SEQ ID NO: 1888059
ccgcuuugaguccuagcca

SEQ ID NO: 2507769 - RNA, 19 nt, Artificial Sequence
  Description of Artificial Sequence: Synthetic oligonucleotide
  Antisense strand to SEQ ID NO: 2507768
uggcuaggacucaaagcgg

SEQ ID NO: 2507770 - RNA, 19 nt, Artificial Sequence
  Description of Artificial Sequence: Synthetic oligonucleotide
  Sense strand starting at position 707 of SEQ ID NO: 1888059
uugaguccuagccaaagga

SEQ ID NO: 2507771 - RNA, 19 nt, Artificial Sequence
  Description of Artificial Sequence: Synthetic oligonucleotide
  Antisense strand to SEQ ID NO: 2507770
uccuuuggcuaggacucaa

SEQ ID NO: 2507772 - RNA, 19 nt, Artificial Sequence
  Description of Artificial Sequence: Synthetic oligonucleotide
  Sense strand starting at position 818 of SEQ ID NO: 1888059
ucuagaaacccaggucaga

SEQ ID NO: 2507773 - RNA, 19 nt, Artificial Sequence
  Description of Artificial Sequence: Synthetic oligonucleotide
  Antisense strand to SEQ ID NO: 2507772
ucugaccuggguuucuaga

SEQ ID NO: 2507774 - RNA, 19 nt, Artificial Sequence
  Description of Artificial Sequence: Synthetic oligonucleotide
  Sense strand starting at position 840 of SEQ ID NO: 1888059
acucucugggcucaagauu

SEQ ID NO: 2507775 - RNA, 19 nt, Artificial Sequence
  Description of Artificial Sequence: Synthetic oligonucleotide
  Antisense strand to SEQ ID NO: 2507774
aaucuugagcccagagagu

SEQ ID NO: 2507776 - RNA, 19 nt, Artificial Sequence
  Description of Artificial Sequence: Synthetic oligonucleotide
  Sense strand starting at position 1038 of SEQ ID NO: 1888059
guuaaagguuaaccaguua

SEQ ID NO: 2507777 - RNA, 19 nt, Artificial Sequence
  Description of Artificial Sequence: Synthetic oligonucleotide
  Antisense strand to SEQ ID NO: 2507776
uaacugguuaaccuuuaac

SEQ ID NO: 2507778 - RNA, 19 nt, Artificial Sequence
  Description of Artificial Sequence: Synthetic oligonucleotide
  Sense strand starting at position 1251 of SEQ ID NO: 1888059
gugggucugaggugaauga

SEQ ID NO: 2507779 - RNA, 19 nt, Artificial Sequence
  Description of Artificial Sequence: Synthetic oligonucleotide
  Antisense strand to SEQ ID NO: 2507778
ucauucaccucagacccac

SEQ ID NO: 2507780 - RNA, 19 nt, Artificial Sequence
  Description of Artificial Sequence: Synthetic oligonucleotide
  Sense strand starting at position 1255 of SEQ ID NO: 1888059
gucugaggugaaugaguga

SEQ ID NO: 2507781 - RNA, 19 nt, Artificial Sequence
  Description of Artificial Sequence: Synthetic oligonucleotide
  Antisense strand to SEQ ID NO: 2507780
ucacucauucaccucagac

SEQ ID NO: 2507782 - RNA, 19 nt, Artificial Sequence
  Description of Artificial Sequence: Synthetic oligonucleotide
  Sense strand starting at position 1353 of SEQ ID NO: 1888059
ucaucuugcugagucauca

SEQ ID NO: 2507783 - RNA, 19 nt, Artificial Sequence
  Description of Artificial Sequence: Synthetic oligonucleotide
  Antisense strand to SEQ ID NO: 2507782
ugaugacucagcaagauga

SEQ ID NO: 2507784 - RNA, 19 nt, Artificial Sequence
  Description of Artificial Sequence: Synthetic oligonucleotide
  Sense strand starting at position 1357 of SEQ ID NO: 1888059
cuugcugagucaucaucau

SEQ ID NO: 2507785 - RNA, 19 nt, Artificial Sequence
  Description of Artificial Sequence: Synthetic oligonucleotide
  Antisense strand to SEQ ID NO: 2507784
augaugaugacucagcaag

SEQ ID NO: 2507786 - RNA, 19 nt, Artificial Sequence
  Description of Artificial Sequence: Synthetic oligonucleotide
  Sense strand starting at position 1463 of SEQ ID NO: 1888059
accacuuacccgggauagu

SEQ ID NO: 2507787 - RNA, 19 nt, Artificial Sequence
  Description of Artificial Sequence: Synthetic oligonucleotide
  Antisense strand to SEQ ID NO: 2507786
acuaucccggguaaguggu

SEQ ID NO: 2507788 - RNA, 19 nt, Artificial Sequence
  Description of Artificial Sequence: Synthetic oligonucleotide
  Sense strand starting at position 1464 of SEQ ID NO: 1888059
ccacuuacccgggauagua

SEQ ID NO: 2507789 - RNA, 19 nt, Artificial Sequence
  Description of Artificial Sequence: Synthetic oligonucleotide
  Antisense strand to SEQ ID NO: 2507788
uacuaucccggguaagugg

SEQ ID NO: 2507790 - RNA, 19 nt, Artificial Sequence
  Description of Artificial Sequence: Synthetic oligonucleotide
  Sense strand starting at position 1798 of SEQ ID NO: 1888059
ggcugcugagugagugaua

SEQ ID NO: 2507791 - RNA, 19 nt, Artificial Sequence
  Description of Artificial Sequence: Synthetic oligonucleotide
  Antisense strand to SEQ ID NO: 2507790
uaucacucacucagcagcc

SEQ ID NO: 2507792 - RNA, 19 nt, Artificial Sequence
  Description of Artificial Sequence: Synthetic oligonucleotide
  Sense strand starting at position 2258 of SEQ ID NO: 1888059
gaggucuaggucgaugaca

SEQ ID NO: 2507793 - RNA, 19 nt, Artificial Sequence
  Description of Artificial Sequence: Synthetic oligonucleotide
  Antisense strand to SEQ ID NO: 2507792
ugucaucgaccuagaccuc

SEQ ID NO: 2507794 - RNA, 19 nt, Artificial Sequence
  Description of Artificial Sequence: Synthetic oligonucleotide
  Sense strand starting at position 2436 of SEQ ID NO: 1888059
ggaagucucccuggacgga

SEQ ID NO: 2507795 - RNA, 19 nt, Artificial Sequence
  Description of Artificial Sequence: Synthetic oligonucleotide
  Antisense strand to SEQ ID NO: 2507794
uccguccagggagacuucc

SEQ ID NO: 2507796 - RNA, 19 nt, Artificial Sequence
  Description of Artificial Sequence: Synthetic oligonucleotide
  Sense strand starting at position 2512 of SEQ ID NO: 1888059
guuacugguuacuugguaa

SEQ ID NO: 2507797 - RNA, 19 nt, Artificial Sequence
  Description of Artificial Sequence: Synthetic oligonucleotide
  Antisense strand to SEQ ID NO: 2507796
uuaccaaguaaccaguaac

SEQ ID NO: 2507798 - RNA, 19 nt, Artificial Sequence
  Description of Artificial Sequence: Synthetic oligonucleotide
  Sense strand starting at position 2776 of SEQ ID NO: 1888059
agcuucguucgagaacaac

SEQ ID NO: 2507799 - RNA, 19 nt, Artificial Sequence
  Description of Artificial Sequence: Synthetic oligonucleotide
  Antisense strand to SEQ ID NO: 2507798
guuguucucgaacgaagcu

SEQ ID NO: 2507800 - RNA, 19 nt, Artificial Sequence
  Description of Artificial Sequence: Synthetic oligonucleotide
  Sense strand starting at position 2785 of SEQ ID NO: 1888059
cgagaacaacugugagauc

SEQ ID NO: 2507801 - RNA, 19 nt, Artificial Sequence
  Description of Artificial Sequence: Synthetic oligonucleotide
  Antisense strand to SEQ ID NO: 2507800
gaucucacaguuguucucg

SEQ ID NO: 2507802 - RNA, 19 nt, Artificial Sequence
  Description of Artificial Sequence: Synthetic oligonucleotide
  Sense strand starting at position 3147 of SEQ ID NO: 1888059
cccggagugaccuagggau

SEQ ID NO: 2507803 - RNA, 19 nt, Artificial Sequence
  Description of Artificial Sequence: Synthetic oligonucleotide
  Antisense strand to SEQ ID NO: 2507802
aucccuaggucacuccggg

SEQ ID NO: 2507804 - RNA, 19 nt, Artificial Sequence
  Description of Artificial Sequence: Synthetic oligonucleotide
  Sense strand starting at position 3159 of SEQ ID NO: 1888059
uagggauucccaggguauc

SEQ ID NO: 2507805 - RNA, 19 nt, Artificial Sequence
  Description of Artificial Sequence: Synthetic oligonucleotide
  Antisense strand to SEQ ID NO: 2507804
gauacccugggaaucccua

SEQ ID NO: 2507806 - RNA, 19 nt, Artificial Sequence
  Description of Artificial Sequence: Synthetic oligonucleotide
  Sense strand starting at position 3160 of SEQ ID NO: 1888059
agggauucccaggguauca

SEQ ID NO: 2507807 - RNA, 19 nt, Artificial Sequence
  Description of Artificial Sequence: Synthetic oligonucleotide
  Antisense strand to SEQ ID NO: 2507806
ugauacccugggaaucccu

SEQ ID NO: 2507808 - RNA, 19 nt, Artificial Sequence
  Description of Artificial Sequence: Synthetic oligonucleotide
  Sense strand starting at position 3181 of SEQ ID NO: 1888059
uguuaucucugggcacuau

SEQ ID NO: 2507809 - RNA, 19 nt, Artificial Sequence
  Description of Artificial Sequence: Synthetic oligonucleotide
  Antisense strand to SEQ ID NO: 2507808
auagugcccagagauaaca

SEQ ID NO: 2507810 - RNA, 19 nt, Artificial Sequence
  Description of Artificial Sequence: Synthetic oligonucleotide
  Sense strand starting at position 3182 of SEQ ID NO: 1888059
guuaucucugggcacuaua

SEQ ID NO: 2507811 - RNA, 19 nt, Artificial Sequence
  Description of Artificial Sequence: Synthetic oligonucleotide
  Antisense strand to SEQ ID NO: 2507810
uauagugcccagagauaac

SEQ ID NO: 2507812 - RNA, 19 nt, Artificial Sequence
  Description of Artificial Sequence: Synthetic oligonucleotide
  Sense strand starting at position 3331 of SEQ ID NO: 1888059
guaggaguuacuggccuaa

SEQ ID NO: 2507813 - RNA, 19 nt, Artificial Sequence
  Description of Artificial Sequence: Synthetic oligonucleotide
  Antisense strand to SEQ ID NO: 2507812
uuaggccaguaacuccuac

SEQ ID NO: 2507814 - RNA, 19 nt, Artificial Sequence
  Description of Artificial Sequence: Synthetic oligonucleotide
  Sense strand starting at position 3333 of SEQ ID NO: 1888059
aggaguuacuggccuaacu

SEQ ID NO: 2507815 - RNA, 19 nt, Artificial Sequence
  Description of Artificial Sequence: Synthetic oligonucleotide
  Antisense strand to SEQ ID NO: 2507814
aguuaggccaguaacuccu

SEQ ID NO: 2507816 - RNA, 19 nt, Artificial Sequence
  Description of Artificial Sequence: Synthetic oligonucleotide
  Sense strand starting at position 3335 of SEQ ID NO: 1888059
gaguuacuggccuaacuug

SEQ ID NO: 2507817 - RNA, 19 nt, Artificial Sequence
  Description of Artificial Sequence: Synthetic oligonucleotide
  Antisense strand to SEQ ID NO: 2507816
caaguuaggccaguaacuc

SEQ ID NO: 2507818 - RNA, 19 nt, Artificial Sequence
  Description of Artificial Sequence: Synthetic oligonucleotide
  Sense strand starting at position 3343 of SEQ ID NO: 1888059
ggccuaacuugacugauga

SEQ ID NO: 2507819 - RNA, 19 nt, Artificial Sequence
  Description of Artificial Sequence: Synthetic oligonucleotide
  Antisense strand to SEQ ID NO: 2507818
ucaucagucaaguuaggcc

SEQ ID NO: 2507820 - RNA, 19 nt, Artificial Sequence
  Description of Artificial Sequence: Synthetic oligonucleotide
  Sense strand starting at position 3379 of SEQ ID NO: 1888059
cuaagugacucaguaaguu

SEQ ID NO: 2507821 - RNA, 19 nt, Artificial Sequence
  Description of Artificial Sequence: Synthetic oligonucleotide
  Antisense strand to SEQ ID NO: 2507820
aacuuacugagucacuuag

SEQ ID NO: 2507822 - RNA, 19 nt, Artificial Sequence
  Description of Artificial Sequence: Synthetic oligonucleotide
  Sense strand starting at position 3407 of SEQ ID NO: 1888059
guuccuaguguuggagaag

SEQ ID NO: 2507823 - RNA, 19 nt, Artificial Sequence
  Description of Artificial Sequence: Synthetic oligonucleotide
  Antisense strand to SEQ ID NO: 2507822
cuucuccaacacuaggaac

SEQ ID NO: 2507824 - RNA, 19 nt, Artificial Sequence
  Description of Artificial Sequence: Synthetic oligonucleotide
  Sense strand starting at position 3680 of SEQ ID NO: 1888059
uuaccuuggucucuuaaag

SEQ ID NO: 2507825 - RNA, 19 nt, Artificial Sequence
  Description of Artificial Sequence: Synthetic oligonucleotide
  Antisense strand to SEQ ID NO: 2507824
cuuuaagagaccaagguaa

SEQ ID NO: 2507826 - RNA, 19 nt, Artificial Sequence
  Description of Artificial Sequence: Synthetic oligonucleotide
  Sense strand starting at position 3796 of SEQ ID NO: 1888059
auccauuucugucucugua

SEQ ID NO: 2507827 - RNA, 19 nt, Artificial Sequence
  Description of Artificial Sequence: Synthetic oligonucleotide
  Antisense strand to SEQ ID NO: 2507826
uacagagacagaaauggau

SEQ ID NO: 2507828 - RNA, 19 nt, Artificial Sequence
  Description of Artificial Sequence: Synthetic oligonucleotide
  Sense strand starting at position 3808 of SEQ ID NO: 1888059
cucuguaaagauuagcuaa

SEQ ID NO: 2507829 - RNA, 19 nt, Artificial Sequence
  Description of Artificial Sequence: Synthetic oligonucleotide
  Antisense strand to SEQ ID NO: 2507828
uuagcuaaucuuuacagag

SEQ ID NO: 2507830 - RNA, 19 nt, Artificial Sequence
  Description of Artificial Sequence: Synthetic oligonucleotide
  Sense strand starting at position 3810 of SEQ ID NO: 1888059
cuguaaagauuagcuaaga

SEQ ID NO: 2507831 - RNA, 19 nt, Artificial Sequence
  Description of Artificial Sequence: Synthetic oligonucleotide
  Antisense strand to SEQ ID NO: 2507830
ucuuagcuaaucuuuacag

SEQ ID NO: 2507832 - RNA, 19 nt, Artificial Sequence
  Description of Artificial Sequence: Synthetic oligonucleotide
  Sense strand starting at position 3811 of SEQ ID NO: 1888059
uguaaagauuagcuaagau

SEQ ID NO: 2507833 - RNA, 19 nt, Artificial Sequence
  Description of Artificial Sequence: Synthetic oligonucleotide
  Antisense strand to SEQ ID NO: 2507832
aucuuagcuaaucuuuaca

SEQ ID NO: 2507834 - RNA, 19 nt, Artificial Sequence
  Description of Artificial Sequence: Synthetic oligonucleotide
  Sense strand starting at position 22 of SEQ ID NO: 1888060
gaggguagaucacaagguu

SEQ ID NO: 2507835 - RNA, 19 nt, Artificial Sequence
  Description of Artificial Sequence: Synthetic oligonucleotide
  Antisense strand to SEQ ID NO: 2507834
aaccuugugaucuacccuc

SEQ ID NO: 2507836 - RNA, 19 nt, Artificial Sequence
  Description of Artificial Sequence: Synthetic oligonucleotide
  Sense strand starting at position 276 of SEQ ID NO: 1888060
gcuaccaaaugcuaaagaa

SEQ ID NO: 2507837 - RNA, 19 nt, Artificial Sequence
  Description of Artificial Sequence: Synthetic oligonucleotide
  Antisense strand to SEQ ID NO: 2507836
uucuuuagcauuugguagc

SEQ ID NO: 2507838 - RNA, 19 nt, Artificial Sequence
  Description of Artificial Sequence: Synthetic oligonucleotide
  Sense strand starting at position 285 of SEQ ID NO: 1888060
ugcuaaagaacguguacaa

SEQ ID NO: 2507839 - RNA, 19 nt, Artificial Sequence
  Description of Artificial Sequence: Synthetic oligonucleotide
  Antisense strand to SEQ ID NO: 2507838
uuguacacguucuuuagca

SEQ ID NO: 2507840 - RNA, 19 nt, Artificial Sequence
  Description of Artificial Sequence: Synthetic oligonucleotide
  Sense strand starting at position 338 of SEQ ID NO: 1888060
aaguuagguccaugucuac

SEQ ID NO: 2507841 - RNA, 19 nt, Artificial Sequence
  Description of Artificial Sequence: Synthetic oligonucleotide
  Antisense strand to SEQ ID NO: 2507840
guagacauggaccuaacuu

SEQ ID NO: 2507842 - RNA, 19 nt, Artificial Sequence
  Description of Artificial Sequence: Synthetic oligonucleotide
  Sense strand starting at position 345 of SEQ ID NO: 1888060
guccaugucuacuaggcua

SEQ ID NO: 2507843 - RNA, 19 nt, Artificial Sequence
  Description of Artificial Sequence: Synthetic oligonucleotide
  Antisense strand to SEQ ID NO: 2507842
uagccuaguagacauggac

SEQ ID NO: 2507844 - RNA, 19 nt, Artificial Sequence
  Description of Artificial Sequence: Synthetic oligonucleotide
  Sense strand starting at position 364 of SEQ ID NO: 1888060
ugagcccuuccaugaaaca

SEQ ID NO: 2507845 - RNA, 19 nt, Artificial Sequence
  Description of Artificial Sequence: Synthetic oligonucleotide
  Antisense strand to SEQ ID NO: 2507844
uguuucauggaagggcuca

SEQ ID NO: 2507846 - RNA, 19 nt, Artificial Sequence
  Description of Artificial Sequence: Synthetic oligonucleotide
  Sense strand starting at position 421 of SEQ ID NO: 1888060
agaauugauugcugaaagg

SEQ ID NO: 2507847 - RNA, 19 nt, Artificial Sequence
  Description of Artificial Sequence: Synthetic oligonucleotide
  Antisense strand to SEQ ID NO: 2507846
ccuuucagcaaucaauucu

SEQ ID NO: 2507848 - RNA, 19 nt, Artificial Sequence
  Description of Artificial Sequence: Synthetic oligonucleotide
  Sense strand starting at position 506 of SEQ ID NO: 1888060
acccuuuaucuagagguac

SEQ ID NO: 2507849 - RNA, 19 nt, Artificial Sequence
  Description of Artificial Sequence: Synthetic oligonucleotide
  Antisense strand to SEQ ID NO: 2507848
guaccucuagauaaagggu

SEQ ID NO: 2507850 - RNA, 19 nt, Artificial Sequence
  Description of Artificial Sequence: Synthetic oligonucleotide
  Sense strand starting at position 857 of SEQ ID NO: 1888060
ggaagcuugugacacccau

SEQ ID NO: 2507851 - RNA, 19 nt, Artificial Sequence
  Description of Artificial Sequence: Synthetic oligonucleotide
  Antisense strand to SEQ ID NO: 2507850
augggugucacaagcuucc

SEQ ID NO: 2507852 - RNA, 19 nt, Artificial Sequence
  Description of Artificial Sequence: Synthetic oligonucleotide
  Sense strand starting at position 1116 of SEQ ID NO: 1888060
gaacuugggaggugaaguu

SEQ ID NO: 2507853 - RNA, 19 nt, Artificial Sequence
  Description of Artificial Sequence: Synthetic oligonucleotide
  Antisense strand to SEQ ID NO: 2507852
aacuucaccucccaaguuc

SEQ ID NO: 2507854 - RNA, 19 nt, Artificial Sequence
  Description of Artificial Sequence: Synthetic oligonucleotide
  Sense strand starting at position 1128 of SEQ ID NO: 1888060
ugaaguuuccagugagcug

SEQ ID NO: 2507855 - RNA, 19 nt, Artificial Sequence
  Description of Artificial Sequence: Synthetic oligonucleotide
  Antisense strand to SEQ ID NO: 2507854
cagcucacuggaaacuuca

SEQ ID NO: 2507856 - RNA, 19 nt, Artificial Sequence
  Description of Artificial Sequence: Synthetic oligonucleotide
  Sense strand starting at position 1322 of SEQ ID NO: 1888060
uggguuugaaucugaguga

SEQ ID NO: 2507857 - RNA, 19 nt, Artificial Sequence
  Description of Artificial Sequence: Synthetic oligonucleotide
  Antisense strand to SEQ ID NO: 2507856
ucacucagauucaaaccca

SEQ ID NO: 2507858 - RNA, 19 nt, Artificial Sequence
  Description of Artificial Sequence: Synthetic oligonucleotide
  Sense strand starting at position 1323 of SEQ ID NO: 1888060
ggguuugaaucugagugag

SEQ ID NO: 2507859 - RNA, 19 nt, Artificial Sequence
  Description of Artificial Sequence: Synthetic oligonucleotide
  Antisense strand to SEQ ID NO: 2507858
cucacucagauucaaaccc

SEQ ID NO: 2507860 - RNA, 19 nt, Artificial Sequence
  Description of Artificial Sequence: Synthetic oligonucleotide
  Sense strand starting at position 1340 of SEQ ID NO: 1888060
agggcugaucugggacuaa

SEQ ID NO: 2507861 - RNA, 19 nt, Artificial Sequence
  Description of Artificial Sequence: Synthetic oligonucleotide
  Antisense strand to SEQ ID NO: 2507860
uuagucccagaucagcccu

SEQ ID NO: 2507862 - RNA, 19 nt, Artificial Sequence
  Description of Artificial Sequence: Synthetic oligonucleotide
  Sense strand starting at position 1351 of SEQ ID NO: 1888060
gggacuaacuagugaucaa

SEQ ID NO: 2507863 - RNA, 19 nt, Artificial Sequence
  Description of Artificial Sequence: Synthetic oligonucleotide
  Antisense strand to SEQ ID NO: 2507862
uugaucacuaguuaguccc

SEQ ID NO: 2507864 - RNA, 19 nt, Artificial Sequence
  Description of Artificial Sequence: Synthetic oligonucleotide
  Sense strand starting at position 1401 of SEQ ID NO: 1888060
guuccaaucugggucugau

SEQ ID NO: 2507865 - RNA, 19 nt, Artificial Sequence
  Description of Artificial Sequence: Synthetic oligonucleotide
  Antisense strand to SEQ ID NO: 2507864
aucagacccagauuggaac

SEQ ID NO: 2507866 - RNA, 19 nt, Artificial Sequence
  Description of Artificial Sequence: Synthetic oligonucleotide
  Sense strand starting at position 1542 of SEQ ID NO: 1888060
accgauaucugcuucugga

SEQ ID NO: 2507867 - RNA, 19 nt, Artificial Sequence
  Description of Artificial Sequence: Synthetic oligonucleotide
  Antisense strand to SEQ ID NO: 2507866
uccagaagcagauaucggu

SEQ ID NO: 2507868 - RNA, 19 nt, Artificial Sequence
  Description of Artificial Sequence: Synthetic oligonucleotide
  Sense strand starting at position 1545 of SEQ ID NO: 1888060
gauaucugcuucuggacca

SEQ ID NO: 2507869 - RNA, 19 nt, Artificial Sequence
  Description of Artificial Sequence: Synthetic oligonucleotide
  Antisense strand to SEQ ID NO: 2507868
ugguccagaagcagauauc

SEQ ID NO: 2507870 - RNA, 19 nt, Artificial Sequence
  Description of Artificial Sequence: Synthetic oligonucleotide
  Sense strand starting at position 1587 of SEQ ID NO: 1888060
gguaaagccugcucagaac

SEQ ID NO: 2507871 - RNA, 19 nt, Artificial Sequence
  Description of Artificial Sequence: Synthetic oligonucleotide
  Antisense strand to SEQ ID NO: 2507870
guucugagcaggcuuuacc

SEQ ID NO: 2507872 - RNA, 19 nt, Artificial Sequence
  Description of Artificial Sequence: Synthetic oligonucleotide
  Sense strand starting at position 1887 of SEQ ID NO: 1888060
gccggucagcccuguuagu

SEQ ID NO: 2507873 - RNA, 19 nt, Artificial Sequence
  Description of Artificial Sequence: Synthetic oligonucleotide
  Antisense strand to SEQ ID NO: 2507872
acuaacagggcugaccggc

SEQ ID NO: 2507874 - RNA, 19 nt, Artificial Sequence
  Description of Artificial Sequence: Synthetic oligonucleotide
  Sense strand starting at position 1914 of SEQ ID NO: 1888060
gcguuaccgucagagccau

SEQ ID NO: 2507875 - RNA, 19 nt, Artificial Sequence
  Description of Artificial Sequence: Synthetic oligonucleotide
  Antisense strand to SEQ ID NO: 2507874
auggcucugacgguaacgc

SEQ ID NO: 2507876 - RNA, 19 nt, Artificial Sequence
  Description of Artificial Sequence: Synthetic oligonucleotide
  Sense strand starting at position 2206 of SEQ ID NO: 1888060
gggagugagagcugugaua

SEQ ID NO: 2507877 - RNA, 19 nt, Artificial Sequence
  Description of Artificial Sequence: Synthetic oligonucleotide
  Antisense strand to SEQ ID NO: 2507876
uaucacagcucucacuccc

SEQ ID NO: 2507878 - RNA, 19 nt, Artificial Sequence
  Description of Artificial Sequence: Synthetic oligonucleotide
  Sense strand starting at position 2849 of SEQ ID NO: 1888060
ccacacagcugagauuaua

SEQ ID NO: 2507879 - RNA, 19 nt, Artificial Sequence
  Description of Artificial Sequence: Synthetic oligonucleotide
  Antisense strand to SEQ ID NO: 2507878
uauaaucucagcugugugg

SEQ ID NO: 2507880 - RNA, 19 nt, Artificial Sequence
  Description of Artificial Sequence: Synthetic oligonucleotide
  Sense strand starting at position 3663 of SEQ ID NO: 1888060
ggguuuggcacaugguaga

SEQ ID NO: 2507881 - RNA, 19 nt, Artificial Sequence
  Description of Artificial Sequence: Synthetic oligonucleotide
  Antisense strand to SEQ ID NO: 2507880
ucuaccaugugccaaaccc

SEQ ID NO: 2507882 - RNA, 19 nt, Artificial Sequence
  Description of Artificial Sequence: Synthetic oligonucleotide
  Sense strand starting at position 3722 of SEQ ID NO: 1888060
ucccuuagcccucagaagu

SEQ ID NO: 2507883 - RNA, 19 nt, Artificial Sequence
  Description of Artificial Sequence: Synthetic oligonucleotide
  Antisense strand to SEQ ID NO: 2507882
acuucugagggcuaaggga

SEQ ID NO: 2507884 - RNA, 19 nt, Artificial Sequence
  Description of Artificial Sequence: Synthetic oligonucleotide
  Sense strand starting at position 3736 of SEQ ID NO: 1888060
gaaguagugcuguaggcau

SEQ ID NO: 2507885 - RNA, 19 nt, Artificial Sequence
  Description of Artificial Sequence: Synthetic oligonucleotide
  Antisense strand to SEQ ID NO: 2507884
augccuacagcacuacuuc

SEQ ID NO: 2507886 - RNA, 19 nt, Artificial Sequence
  Description of Artificial Sequence: Synthetic oligonucleotide
  Sense strand starting at position 3778 of SEQ ID NO: 1888060
agugauuaaauguguguuc

SEQ ID NO: 2507887 - RNA, 19 nt, Artificial Sequence
  Description of Artificial Sequence: Synthetic oligonucleotide
  Antisense strand to SEQ ID NO: 2507886
gaacacacauuuaaucacu

SEQ ID NO: 2507888 - RNA, 19 nt, Artificial Sequence
  Description of Artificial Sequence: Synthetic oligonucleotide
  Sense strand starting at position 3780 of SEQ ID NO: 1888060
ugauuaaauguguguuccu

SEQ ID NO: 2507889 - RNA, 19 nt, Artificial Sequence
  Description of Artificial Sequence: Synthetic oligonucleotide
  Antisense strand to SEQ ID NO: 2507888
aggaacacacauuuaauca

SEQ ID NO: 2507890 - RNA, 19 nt, Artificial Sequence
  Description of Artificial Sequence: Synthetic oligonucleotide
  Sense strand starting at position 3781 of SEQ ID NO: 1888060
gauuaaauguguguuccua

SEQ ID NO: 2507891 - RNA, 19 nt, Artificial Sequence
  Description of Artificial Sequence: Synthetic oligonucleotide
  Antisense strand to SEQ ID NO: 2507890
uaggaacacacauuuaauc

SEQ ID NO: 2507892 - RNA, 19 nt, Artificial Sequence
  Description of Artificial Sequence: Synthetic oligonucleotide
  Sense strand starting at position 3785 of SEQ ID NO: 1888060
aaauguguguuccuagcuu

SEQ ID NO: 2507893 - RNA, 19 nt, Artificial Sequence
  Description of Artificial Sequence: Synthetic oligonucleotide
  Antisense strand to SEQ ID NO: 2507892
aagcuaggaacacacauuu

SEQ ID NO: 2507894 - RNA, 19 nt, Artificial Sequence
  Description of Artificial Sequence: Synthetic oligonucleotide
  Sense strand starting at position 3789 of SEQ ID NO: 1888060
guguguuccuagcuugcaa

SEQ ID NO: 2507895 - RNA, 19 nt, Artificial Sequence
  Description of Artificial Sequence: Synthetic oligonucleotide
  Antisense strand to SEQ ID NO: 2507894
uugcaagcuaggaacacac

SEQ ID NO: 2507896 - RNA, 19 nt, Artificial Sequence
  Description of Artificial Sequence: Synthetic oligonucleotide
  Sense strand starting at position 3793 of SEQ ID NO: 1888060
guuccuagcuugcaacaua

SEQ ID NO: 2507897 - RNA, 19 nt, Artificial Sequence
  Description of Artificial Sequence: Synthetic oligonucleotide
  Antisense strand to SEQ ID NO: 2507896
uauguugcaagcuaggaac

SEQ ID NO: 2507898 - RNA, 19 nt, Artificial Sequence
  Description of Artificial Sequence: Synthetic oligonucleotide
  Sense strand starting at position 3891 of SEQ ID NO: 1888060
ggcugcaaaucuuugaaau

SEQ ID NO: 2507899 - RNA, 19 nt, Artificial Sequence
  Description of Artificial Sequence: Synthetic oligonucleotide
  Antisense strand to SEQ ID NO: 2507898
auuucaaagauuugcagcc

SEQ ID NO: 2507900 - RNA, 19 nt, Artificial Sequence
  Description of Artificial Sequence: Synthetic oligonucleotide
  Sense strand starting at position 3892 of SEQ ID NO: 1888060
gcugcaaaucuuugaaauu

SEQ ID NO: 2507901 - RNA, 19 nt, Artificial Sequence
  Description of Artificial Sequence: Synthetic oligonucleotide
  Antisense strand to SEQ ID NO: 2507900
aauuucaaagauuugcagc

SEQ ID NO: 2507902 - RNA, 19 nt, Artificial Sequence
  Description of Artificial Sequence: Synthetic oligonucleotide
  Sense strand starting at position 3954 of SEQ ID NO: 1888060
gcucaucacuuagguuaau

SEQ ID NO: 2507903 - RNA, 19 nt, Artificial Sequence
  Description of Artificial Sequence: Synthetic oligonucleotide
  Antisense strand to SEQ ID NO: 2507902
auuaaccuaagugaugagc

SEQ ID NO: 2507904 - RNA, 19 nt, Artificial Sequence
  Description of Artificial Sequence: Synthetic oligonucleotide
  Sense strand starting at position 140 of SEQ ID NO: 1888061
ucauccuuccgaugacaaa

SEQ ID NO: 2507905 - RNA, 19 nt, Artificial Sequence
  Description of Artificial Sequence: Synthetic oligonucleotide
  Antisense strand to SEQ ID NO: 2507904
uuugucaucggaaggauga

SEQ ID NO: 2507906 - RNA, 19 nt, Artificial Sequence
  Description of Artificial Sequence: Synthetic oligonucleotide
  Sense strand starting at position 311 of SEQ ID NO: 1888061
acuccuccuuuggcagaau

SEQ ID NO: 2507907 - RNA, 19 nt, Artificial Sequence
  Description of Artificial Sequence: Synthetic oligonucleotide
  Antisense strand to SEQ ID NO: 2507906
auucugccaaaggaggagu

SEQ ID NO: 2507908 - RNA, 19 nt, Artificial Sequence
  Description of Artificial Sequence: Synthetic oligonucleotide
  Sense strand starting at position 468 of SEQ ID NO: 1888061
gagggaucccuccauguuu

SEQ ID NO: 2507909 - RNA, 19 nt, Artificial Sequence
  Description of Artificial Sequence: Synthetic oligonucleotide
  Antisense strand to SEQ ID NO: 2507908
aaacauggagggaucccuc

SEQ ID NO: 2507910 - RNA, 19 nt, Artificial Sequence
  Description of Artificial Sequence: Synthetic oligonucleotide
  Sense strand starting at position 485 of SEQ ID NO: 1888061
uuccaugauuuggaagaga

SEQ ID NO: 2507911 - RNA, 19 nt, Artificial Sequence
  Description of Artificial Sequence: Synthetic oligonucleotide
  Antisense strand to SEQ ID NO: 2507910
ucucuuccaaaucauggaa

SEQ ID NO: 2507912 - RNA, 19 nt, Artificial Sequence
  Description of Artificial Sequence: Synthetic oligonucleotide
  Sense strand starting at position 659 of SEQ ID NO: 1888061
gagggaagguuauucguau

SEQ ID NO: 2507913 - RNA, 19 nt, Artificial Sequence
  Description of Artificial Sequence: Synthetic oligonucleotide
  Antisense strand to SEQ ID NO: 2507912
auacgaauaaccuucccuc

SEQ ID NO: 2507914 - RNA, 19 nt, Artificial Sequence
  Description of Artificial Sequence: Synthetic oligonucleotide
  Sense strand starting at position 660 of SEQ ID NO: 1888061
agggaagguuauucguauc

SEQ ID NO: 2507915 - RNA, 19 nt, Artificial Sequence
  Description of Artificial Sequence: Synthetic oligonucleotide
  Antisense strand to SEQ ID NO: 2507914
gauacgaauaaccuucccu

SEQ ID NO: 2507916 - RNA, 19 nt, Artificial Sequence
  Description of Artificial Sequence: Synthetic oligonucleotide
  Sense strand starting at position 824 of SEQ ID NO: 1888061
cgacucugaugucugaauu

SEQ ID NO: 2507917 - RNA, 19 nt, Artificial Sequence
  Description of Artificial Sequence: Synthetic oligonucleotide
  Antisense strand to SEQ ID NO: 2507916
aauucagacaucagagucg

SEQ ID NO: 2507918 - RNA, 19 nt, Artificial Sequence
  Description of Artificial Sequence: Synthetic oligonucleotide
  Sense strand starting at position 825 of SEQ ID NO: 1888061
gacucugaugucugaauuc

SEQ ID NO: 2507919 - RNA, 19 nt, Artificial Sequence
  Description of Artificial Sequence: Synthetic oligonucleotide
  Antisense strand to SEQ ID NO: 2507918
gaauucagacaucagaguc

SEQ ID NO: 2507920 - RNA, 19 nt, Artificial Sequence
  Description of Artificial Sequence: Synthetic oligonucleotide
  Sense strand starting at position 881 of SEQ ID NO: 1888061
cuuguauuaucacuaugua

SEQ ID NO: 2507921 - RNA, 19 nt, Artificial Sequence
  Description of Artificial Sequence: Synthetic oligonucleotide
  Antisense strand to SEQ ID NO: 2507920
uacauagugauaauacaag

SEQ ID NO: 2507922 - RNA, 19 nt, Artificial Sequence
  Description of Artificial Sequence: Synthetic oligonucleotide
  Sense strand starting at position 1016 of SEQ ID NO: 1888061
gagccuuggauuuguaagu

SEQ ID NO: 2507923 - RNA, 19 nt, Artificial Sequence
  Description of Artificial Sequence: Synthetic oligonucleotide
  Antisense strand to SEQ ID NO: 2507922
acuuacaaauccaaggcuc

SEQ ID NO: 2507924 - RNA, 19 nt, Artificial Sequence
  Description of Artificial Sequence: Synthetic oligonucleotide
  Sense strand starting at position 1022 of SEQ ID NO: 1888061
uggauuuguaaguggcuca

SEQ ID NO: 2507925 - RNA, 19 nt, Artificial Sequence
  Description of Artificial Sequence: Synthetic oligonucleotide
  Antisense strand to SEQ ID NO: 2507924
ugagccacuuacaaaucca

SEQ ID NO: 2507926 - RNA, 19 nt, Artificial Sequence
  Description of Artificial Sequence: Synthetic oligonucleotide
  Sense strand starting at position 1095 of SEQ ID NO: 1888061
gggccaaagcaaugacuua

SEQ ID NO: 2507927 - RNA, 19 nt, Artificial Sequence
  Description of Artificial Sequence: Synthetic oligonucleotide
  Antisense strand to SEQ ID NO: 2507926
uaagucauugcuuuggccc

SEQ ID NO: 2507928 - RNA, 19 nt, Artificial Sequence
  Description of Artificial Sequence: Synthetic oligonucleotide
  Sense strand starting at position 1180 of SEQ ID NO: 1888061
cucugcagacucggaauua

SEQ ID NO: 2507929 - RNA, 19 nt, Artificial Sequence
  Description of Artificial Sequence: Synthetic oligonucleotide
  Antisense strand to SEQ ID NO: 2507928
uaauuccgagucugcagag

SEQ ID NO: 2507930 - RNA, 19 nt, Artificial Sequence
  Description of Artificial Sequence: Synthetic oligonucleotide
  Sense strand starting at position 1306 of SEQ ID NO: 1888061
aagugugaccuugggaaag

SEQ ID NO: 2507931 - RNA, 19 nt, Artificial Sequence
  Description of Artificial Sequence: Synthetic oligonucleotide
  Antisense strand to SEQ ID NO: 2507930
cuuucccaaggucacacuu

SEQ ID NO: 2507932 - RNA, 19 nt, Artificial Sequence
  Description of Artificial Sequence: Synthetic oligonucleotide
  Sense strand starting at position 1339 of SEQ ID NO: 1888061
agugacuucgccucgccaa

SEQ ID NO: 2507933 - RNA, 19 nt, Artificial Sequence
  Description of Artificial Sequence: Synthetic oligonucleotide
  Antisense strand to SEQ ID NO: 2507932
uuggcgaggcgaagucacu

SEQ ID NO: 2507934 - RNA, 19 nt, Artificial Sequence
  Description of Artificial Sequence: Synthetic oligonucleotide
  Sense strand starting at position 1396 of SEQ ID NO: 1888061
gcaucuaaggugcagaaau

SEQ ID NO: 2507935 - RNA, 19 nt, Artificial Sequence
  Description of Artificial Sequence: Synthetic oligonucleotide
  Antisense strand to SEQ ID NO: 2507934
auuucugcaccuuagaugc

SEQ ID NO: 2507936 - RNA, 19 nt, Artificial Sequence
  Description of Artificial Sequence: Synthetic oligonucleotide
  Sense strand starting at position 2077 of SEQ ID NO: 1888061
uguguuugccgggugacuu

SEQ ID NO: 2507937 - RNA, 19 nt, Artificial Sequence
  Description of Artificial Sequence: Synthetic oligonucleotide
  Antisense strand to SEQ ID NO: 2507936
aagucacccggcaaacaca

SEQ ID NO: 2507938 - RNA, 19 nt, Artificial Sequence
  Description of Artificial Sequence: Synthetic oligonucleotide
  Sense strand starting at position 2148 of SEQ ID NO: 1888061
gcccaaagaaugggaguaa

SEQ ID NO: 2507939 - RNA, 19 nt, Artificial Sequence
  Description of Artificial Sequence: Synthetic oligonucleotide
  Antisense strand to SEQ ID NO: 2507938
uuacucccauucuuugggc

SEQ ID NO: 2507940 - RNA, 19 nt, Artificial Sequence
  Description of Artificial Sequence: Synthetic oligonucleotide
  Sense strand starting at position 2195 of SEQ ID NO: 1888061
ggugacugucaucagguuu

SEQ ID NO: 2507941 - RNA, 19 nt, Artificial Sequence
  Description of Artificial Sequence: Synthetic oligonucleotide
  Antisense strand to SEQ ID NO: 2507940
aaaccugaugacagucacc

SEQ ID NO: 2507942 - RNA, 19 nt, Artificial Sequence
  Description of Artificial Sequence: Synthetic oligonucleotide
  Sense strand starting at position 2231 of SEQ ID NO: 1888061
guuacucauccugggaaga

SEQ ID NO: 2507943 - RNA, 19 nt, Artificial Sequence
  Description of Artificial Sequence: Synthetic oligonucleotide
  Antisense strand to SEQ ID NO: 2507942
ucuucccaggaugaguaac

SEQ ID NO: 2507944 - RNA, 19 nt, Artificial Sequence
  Description of Artificial Sequence: Synthetic oligonucleotide
  Sense strand starting at position 2299 of SEQ ID NO: 1888061
uuauaaguggcucaagguu

SEQ ID NO: 2507945 - RNA, 19 nt, Artificial Sequence
  Description of Artificial Sequence: Synthetic oligonucleotide
  Antisense strand to SEQ ID NO: 2507944
aaccuugagccacuuauaa

SEQ ID NO: 2507946 - RNA, 19 nt, Artificial Sequence
  Description of Artificial Sequence: Synthetic oligonucleotide
  Sense strand starting at position 2343 of SEQ ID NO: 1888061
ggaggaguuguccaaauuc

SEQ ID NO: 2507947 - RNA, 19 nt, Artificial Sequence
  Description of Artificial Sequence: Synthetic oligonucleotide
  Antisense strand to SEQ ID NO: 2507946
gaauuuggacaacuccucc

SEQ ID NO: 2507948 - RNA, 19 nt, Artificial Sequence
  Description of Artificial Sequence: Synthetic oligonucleotide
  Sense strand starting at position 2391 of SEQ ID NO: 1888061
auucuuauugagcauguga

SEQ ID NO: 2507949 - RNA, 19 nt, Artificial Sequence
  Description of Artificial Sequence: Synthetic oligonucleotide
  Antisense strand to SEQ ID NO: 2507948
ucacaugcucaauaagaau

SEQ ID NO: 2507950 - RNA, 19 nt, Artificial Sequence
  Description of Artificial Sequence: Synthetic oligonucleotide
  Sense strand starting at position 2393 of SEQ ID NO: 1888061
ucuuauugagcaugugaaa

SEQ ID NO: 2507951 - RNA, 19 nt, Artificial Sequence
  Description of Artificial Sequence: Synthetic oligonucleotide
  Antisense strand to SEQ ID NO: 2507950
uuucacaugcucaauaaga

SEQ ID NO: 2507952 - RNA, 19 nt, Artificial Sequence
  Description of Artificial Sequence: Synthetic oligonucleotide
  Sense strand starting at position 2402 of SEQ ID NO: 1888061
gcaugugaaaguugauaau

SEQ ID NO: 2507953 - RNA, 19 nt, Artificial Sequence
  Description of Artificial Sequence: Synthetic oligonucleotide
  Antisense strand to SEQ ID NO: 2507952
auuaucaacuuucacaugc

SEQ ID NO: 2507954 - RNA, 19 nt, Artificial Sequence
  Description of Artificial Sequence: Synthetic oligonucleotide
  Sense strand starting at position 2751 of SEQ ID NO: 1888061
guaugcuccgaguugcgau

SEQ ID NO: 2507955 - RNA, 19 nt, Artificial Sequence
  Description of Artificial Sequence: Synthetic oligonucleotide
  Antisense strand to SEQ ID NO: 2507954
aucgcaacucggagcauac

SEQ ID NO: 2507956 - RNA, 19 nt, Artificial Sequence
  Description of Artificial Sequence: Synthetic oligonucleotide
  Sense strand starting at position 2882 of SEQ ID NO: 1888061
cggugaaggagucagacuu

SEQ ID NO: 2507957 - RNA, 19 nt, Artificial Sequence
  Description of Artificial Sequence: Synthetic oligonucleotide
  Antisense strand to SEQ ID NO: 2507956
aagucugacuccuucaccg

SEQ ID NO: 2507958 - RNA, 19 nt, Artificial Sequence
  Description of Artificial Sequence: Synthetic oligonucleotide
  Sense strand starting at position 2913 of SEQ ID NO: 1888061
cacagaaucuacguaugau

SEQ ID NO: 2507959 - RNA, 19 nt, Artificial Sequence
  Description of Artificial Sequence: Synthetic oligonucleotide
  Antisense strand to SEQ ID NO: 2507958
aucauacguagauucugug

SEQ ID NO: 2507960 - RNA, 19 nt, Artificial Sequence
  Description of Artificial Sequence: Synthetic oligonucleotide
  Sense strand starting at position 2921 of SEQ ID NO: 1888061
cuacguaugaugugggaga

SEQ ID NO: 2507961 - RNA, 19 nt, Artificial Sequence
  Description of Artificial Sequence: Synthetic oligonucleotide
  Antisense strand to SEQ ID NO: 2507960
ucucccacaucauacguag

SEQ ID NO: 2507962 - RNA, 19 nt, Artificial Sequence
  Description of Artificial Sequence: Synthetic oligonucleotide
  Sense strand starting at position 2923 of SEQ ID NO: 1888061
acguaugaugugggagaga

SEQ ID NO: 2507963 - RNA, 19 nt, Artificial Sequence
  Description of Artificial Sequence: Synthetic oligonucleotide
  Antisense strand to SEQ ID NO: 2507962
ucucucccacaucauacgu

SEQ ID NO: 2507964 - RNA, 19 nt, Artificial Sequence
  Description of Artificial Sequence: Synthetic oligonucleotide
  Sense strand starting at position 3051 of SEQ ID NO: 1888061
agagaugccucacuuaguc

SEQ ID NO: 2507965 - RNA, 19 nt, Artificial Sequence
  Description of Artificial Sequence: Synthetic oligonucleotide
  Antisense strand to SEQ ID NO: 2507964
gacuaagugaggcaucucu

SEQ ID NO: 2507966 - RNA, 19 nt, Artificial Sequence
  Description of Artificial Sequence: Synthetic oligonucleotide
  Sense strand starting at position 3068 of SEQ ID NO: 1888061
ucuggaauguggucagaua

SEQ ID NO: 2507967 - RNA, 19 nt, Artificial Sequence
  Description of Artificial Sequence: Synthetic oligonucleotide
  Antisense strand to SEQ ID NO: 2507966
uaucugaccacauuccaga

SEQ ID NO: 2507968 - RNA, 19 nt, Artificial Sequence
  Description of Artificial Sequence: Synthetic oligonucleotide
  Sense strand starting at position 3069 of SEQ ID NO: 1888061
cuggaauguggucagauau

SEQ ID NO: 2507969 - RNA, 19 nt, Artificial Sequence
  Description of Artificial Sequence: Synthetic oligonucleotide
  Antisense strand to SEQ ID NO: 2507968
auaucugaccacauuccag

SEQ ID NO: 2507970 - RNA, 19 nt, Artificial Sequence
  Description of Artificial Sequence: Synthetic oligonucleotide
  Sense strand starting at position 3090 of SEQ ID NO: 1888061
cccugaguuagccagguuu

SEQ ID NO: 2507971 - RNA, 19 nt, Artificial Sequence
  Description of Artificial Sequence: Synthetic oligonucleotide
  Antisense strand to SEQ ID NO: 2507970
aaaccuggcuaacucaggg

SEQ ID NO: 2507972 - RNA, 19 nt, Artificial Sequence
  Description of Artificial Sequence: Synthetic oligonucleotide
  Sense strand starting at position 3113 of SEQ ID NO: 1888061
agguuuagccaagguuaga

SEQ ID NO: 2507973 - RNA, 19 nt, Artificial Sequence
  Description of Artificial Sequence: Synthetic oligonucleotide
  Antisense strand to SEQ ID NO: 2507972
ucuaaccuuggcuaaaccu

SEQ ID NO: 2507974 - RNA, 19 nt, Artificial Sequence
  Description of Artificial Sequence: Synthetic oligonucleotide
  Sense strand starting at position 3201 of SEQ ID NO: 1888061
gcaagagaacacugugaca

SEQ ID NO: 2507975 - RNA, 19 nt, Artificial Sequence
  Description of Artificial Sequence: Synthetic oligonucleotide
  Antisense strand to SEQ ID NO: 2507974
ugucacaguguucucuugc

SEQ ID NO: 2507976 - RNA, 19 nt, Artificial Sequence
  Description of Artificial Sequence: Synthetic oligonucleotide
  Sense strand starting at position 3213 of SEQ ID NO: 1888061
ugugacauggucuaggaca

SEQ ID NO: 2507977 - RNA, 19 nt, Artificial Sequence
  Description of Artificial Sequence: Synthetic oligonucleotide
  Antisense strand to SEQ ID NO: 2507976
uguccuagaccaugucaca

SEQ ID NO: 2507978 - RNA, 19 nt, Artificial Sequence
  Description of Artificial Sequence: Synthetic oligonucleotide
  Sense strand starting at position 3215 of SEQ ID NO: 1888061
ugacauggucuaggacaua

SEQ ID NO: 2507979 - RNA, 19 nt, Artificial Sequence
  Description of Artificial Sequence: Synthetic oligonucleotide
  Antisense strand to SEQ ID NO: 2507978
uauguccuagaccauguca

SEQ ID NO: 2507980 - RNA, 19 nt, Artificial Sequence
  Description of Artificial Sequence: Synthetic oligonucleotide
  Sense strand starting at position 3238 of SEQ ID NO: 1888061
ggcacaugugacuaaucuu

SEQ ID NO: 2507981 - RNA, 19 nt, Artificial Sequence
  Description of Artificial Sequence: Synthetic oligonucleotide
  Antisense strand to SEQ ID NO: 2507980
aagauuagucacaugugcc

SEQ ID NO: 2507982 - RNA, 19 nt, Artificial Sequence
  Description of Artificial Sequence: Synthetic oligonucleotide
  Sense strand starting at position 3892 of SEQ ID NO: 1888061
cucccuugaccucaggauu

SEQ ID NO: 2507983 - RNA, 19 nt, Artificial Sequence
  Description of Artificial Sequence: Synthetic oligonucleotide
  Antisense strand to SEQ ID NO: 2507982
aauccugaggucaagggag

SEQ ID NO: 2507984 - RNA, 19 nt, Artificial Sequence
  Description of Artificial Sequence: Synthetic oligonucleotide
  Sense strand starting at position 2011 of SEQ ID NO: 1888062
aaguuccgauucugagauu

SEQ ID NO: 2507985 - RNA, 19 nt, Artificial Sequence
  Description of Artificial Sequence: Synthetic oligonucleotide
  Antisense strand to SEQ ID NO: 2507984
aaucucagaaucggaacuu

SEQ ID NO: 2507986 - RNA, 19 nt, Artificial Sequence
  Description of Artificial Sequence: Synthetic oligonucleotide
  Sense strand starting at position 2057 of SEQ ID NO: 1888062
cugcgaguuugcgagugua

SEQ ID NO: 2507987 - RNA, 19 nt, Artificial Sequence
  Description of Artificial Sequence: Synthetic oligonucleotide
  Antisense strand to SEQ ID NO: 2507986
uacacucgcaaacucgcag

SEQ ID NO: 2507988 - RNA, 19 nt, Artificial Sequence
  Description of Artificial Sequence: Synthetic oligonucleotide
  Sense strand starting at position 2377 of SEQ ID NO: 1888062
cugcuuugcuucgaugcua

SEQ ID NO: 2507989 - RNA, 19 nt, Artificial Sequence
  Description of Artificial Sequence: Synthetic oligonucleotide
  Antisense strand to SEQ ID NO: 2507988
uagcaucgaagcaaagcag

SEQ ID NO: 2507990 - RNA, 19 nt, Artificial Sequence
  Description of Artificial Sequence: Synthetic oligonucleotide
  Sense strand starting at position 2748 of SEQ ID NO: 1888062
guugguaucuuucagugag

SEQ ID NO: 2507991 - RNA, 19 nt, Artificial Sequence
  Description of Artificial Sequence: Synthetic oligonucleotide
  Antisense strand to SEQ ID NO: 2507990
cucacugaaagauaccaac

SEQ ID NO: 2507992 - RNA, 19 nt, Artificial Sequence
  Description of Artificial Sequence: Synthetic oligonucleotide
  Sense strand starting at position 2750 of SEQ ID NO: 1888062
ugguaucuuucagugagug

SEQ ID NO: 2507993 - RNA, 19 nt, Artificial Sequence
  Description of Artificial Sequence: Synthetic oligonucleotide
  Antisense strand to SEQ ID NO: 2507992
cacucacugaaagauacca

SEQ ID NO: 2507994 - RNA, 19 nt, Artificial Sequence
  Description of Artificial Sequence: Synthetic oligonucleotide
  Sense strand starting at position 2780 of SEQ ID NO: 1888062
gcaggagucccuuaggaga

SEQ ID NO: 2507995 - RNA, 19 nt, Artificial Sequence
  Description of Artificial Sequence: Synthetic oligonucleotide
  Antisense strand to SEQ ID NO: 2507994
ucuccuaagggacuccugc

SEQ ID NO: 2507996 - RNA, 19 nt, Artificial Sequence
  Description of Artificial Sequence: Synthetic oligonucleotide
  Sense strand starting at position 2866 of SEQ ID NO: 1888062
gucggaugaccucaugaag

SEQ ID NO: 2507997 - RNA, 19 nt, Artificial Sequence
  Description of Artificial Sequence: Synthetic oligonucleotide
  Antisense strand to SEQ ID NO: 2507996
cuucaugaggucauccgac

SEQ ID NO: 2507998 - RNA, 19 nt, Artificial Sequence
  Description of Artificial Sequence: Synthetic oligonucleotide
  Sense strand starting at position 2982 of SEQ ID NO: 1888062
uagugacauugguuuccau

SEQ ID NO: 2507999 - RNA, 19 nt, Artificial Sequence
  Description of Artificial Sequence: Synthetic oligonucleotide
  Antisense strand to SEQ ID NO: 2507998
auggaaaccaaugucacua

SEQ ID NO: 2508000 - RNA, 19 nt, Artificial Sequence
  Description of Artificial Sequence: Synthetic oligonucleotide
  Sense strand starting at position 2993 of SEQ ID NO: 1888062
guuuccaucuguugaaggu

SEQ ID NO: 2508001 - RNA, 19 nt, Artificial Sequence
  Description of Artificial Sequence: Synthetic oligonucleotide
  Antisense strand to SEQ ID NO: 2508000
accuucaacagauggaaac

SEQ ID NO: 2508002 - RNA, 19 nt, Artificial Sequence
  Description of Artificial Sequence: Synthetic oligonucleotide
  Sense strand starting at position 3054 of SEQ ID NO: 1888062
aggagaaaugggugcuuca

SEQ ID NO: 2508003 - RNA, 19 nt, Artificial Sequence
  Description of Artificial Sequence: Synthetic oligonucleotide
  Antisense strand to SEQ ID NO: 2508002
ugaagcacccauuucuccu

SEQ ID NO: 2508004 - RNA, 19 nt, Artificial Sequence
  Description of Artificial Sequence: Synthetic oligonucleotide
  Sense strand starting at position 3141 of SEQ ID NO: 1888062
gggucauguucccguuuca

SEQ ID NO: 2508005 - RNA, 19 nt, Artificial Sequence
  Description of Artificial Sequence: Synthetic oligonucleotide
  Antisense strand to SEQ ID NO: 2508004
ugaaacgggaacaugaccc

SEQ ID NO: 2508006 - RNA, 19 nt, Artificial Sequence
  Description of Artificial Sequence: Synthetic oligonucleotide
  Sense strand starting at position 3192 of SEQ ID NO: 1888062
caugcaggcccuuggaaau

SEQ ID NO: 2508007 - RNA, 19 nt, Artificial Sequence
  Description of Artificial Sequence: Synthetic oligonucleotide
  Antisense strand to SEQ ID NO: 2508006
auuuccaagggccugcaug

SEQ ID NO: 2508008 - RNA, 19 nt, Artificial Sequence
  Description of Artificial Sequence: Synthetic oligonucleotide
  Sense strand starting at position 3206 of SEQ ID NO: 1888062
gaaauuugguugcagccaa

SEQ ID NO: 2508009 - RNA, 19 nt, Artificial Sequence
  Description of Artificial Sequence: Synthetic oligonucleotide
  Antisense strand to SEQ ID NO: 2508008
uuggcugcaaccaaauuuc

SEQ ID NO: 2508010 - RNA, 19 nt, Artificial Sequence
  Description of Artificial Sequence: Synthetic oligonucleotide
  Sense strand starting at position 3231 of SEQ ID NO: 1888062
aagagucauccuggcuuga

SEQ ID NO: 2508011 - RNA, 19 nt, Artificial Sequence
  Description of Artificial Sequence: Synthetic oligonucleotide
  Antisense strand to SEQ ID NO: 2508010
ucaagccaggaugacucuu

SEQ ID NO: 2508012 - RNA, 19 nt, Artificial Sequence
  Description of Artificial Sequence: Synthetic oligonucleotide
  Sense strand starting at position 3344 of SEQ ID NO: 1888062
gcagcagggagcugucaaa

SEQ ID NO: 2508013 - RNA, 19 nt, Artificial Sequence
  Description of Artificial Sequence: Synthetic oligonucleotide
  Antisense strand to SEQ ID NO: 2508012
uuugacagcucccugcugc

SEQ ID NO: 2508014 - RNA, 19 nt, Artificial Sequence
  Description of Artificial Sequence: Synthetic oligonucleotide
  Sense strand starting at position 3514 of SEQ ID NO: 1888062
uuugacaagugugagaauu

SEQ ID NO: 2508015 - RNA, 19 nt, Artificial Sequence
  Description of Artificial Sequence: Synthetic oligonucleotide
  Antisense strand to SEQ ID NO: 2508014
aauucucacacuugucaaa

SEQ ID NO: 2508016 - RNA, 19 nt, Artificial Sequence
  Description of Artificial Sequence: Synthetic oligonucleotide
  Sense strand starting at position 3592 of SEQ ID NO: 1888062
caaagaacagugugaacuu

SEQ ID NO: 2508017 - RNA, 19 nt, Artificial Sequence
  Description of Artificial Sequence: Synthetic oligonucleotide
  Antisense strand to SEQ ID NO: 2508016
aaguucacacuguucuuug

SEQ ID NO: 2508018 - RNA, 19 nt, Artificial Sequence
  Description of Artificial Sequence: Synthetic oligonucleotide
  Sense strand starting at position 3593 of SEQ ID NO: 1888062
aaagaacagugugaacuuu

SEQ ID NO: 2508019 - RNA, 19 nt, Artificial Sequence
  Description of Artificial Sequence: Synthetic oligonucleotide
  Antisense strand to SEQ ID NO: 2508018
aaaguucacacuguucuuu

SEQ ID NO: 2508020 - RNA, 19 nt, Artificial Sequence
  Description of Artificial Sequence: Synthetic oligonucleotide
  Sense strand starting at position 3627 of SEQ ID NO: 1888062
ggcugugcugcguccaauu

SEQ ID NO: 2508021 - RNA, 19 nt, Artificial Sequence
  Description of Artificial Sequence: Synthetic oligonucleotide
  Antisense strand to SEQ ID NO: 2508020
aauuggacgcagcacagcc

SEQ ID NO: 2508022 - RNA, 19 nt, Artificial Sequence
  Description of Artificial Sequence: Synthetic oligonucleotide
  Sense strand starting at position 3811 of SEQ ID NO: 1888062
gagccuuggcuucgagaug

SEQ ID NO: 2508023 - RNA, 19 nt, Artificial Sequence
  Description of Artificial Sequence: Synthetic oligonucleotide
  Antisense strand to SEQ ID NO: 2508022
caucucgaagccaaggcuc

SEQ ID NO: 2508024 - RNA, 19 nt, Artificial Sequence
  Description of Artificial Sequence: Synthetic oligonucleotide
  Sense strand starting at position 3812 of SEQ ID NO: 1888062
agccuuggcuucgagauga

SEQ ID NO: 2508025 - RNA, 19 nt, Artificial Sequence
  Description of Artificial Sequence: Synthetic oligonucleotide
  Antisense strand to SEQ ID NO: 2508024
ucaucucgaagccaaggcu

SEQ ID NO: 2508026 - RNA, 19 nt, Artificial Sequence
  Description of Artificial Sequence: Synthetic oligonucleotide
  Sense strand starting at position 7 of SEQ ID NO: 1888063
agcagaacuuuacuaaagu

SEQ ID NO: 2508027 - RNA, 19 nt, Artificial Sequence
  Description of Artificial Sequence: Synthetic oligonucleotide
  Antisense strand to SEQ ID NO: 2508026
acuuuaguaaaguucugcu

SEQ ID NO: 2508028 - RNA, 19 nt, Artificial Sequence
  Description of Artificial Sequence: Synthetic oligonucleotide
  Sense strand starting at position 207 of SEQ ID NO: 1888063
ucaaauuacucgccaugga

SEQ ID NO: 2508029 - RNA, 19 nt, Artificial Sequence
  Description of Artificial Sequence: Synthetic oligonucleotide
  Antisense strand to SEQ ID NO: 2508028
uccauggcgaguaauuuga

SEQ ID NO: 2508030 - RNA, 19 nt, Artificial Sequence
  Description of Artificial Sequence: Synthetic oligonucleotide
  Sense strand starting at position 210 of SEQ ID NO: 1888063
aauuacucgccauggagaa

SEQ ID NO: 2508031 - RNA, 19 nt, Artificial Sequence
  Description of Artificial Sequence: Synthetic oligonucleotide
  Antisense strand to SEQ ID NO: 2508030
uucuccauggcgaguaauu

SEQ ID NO: 2508032 - RNA, 19 nt, Artificial Sequence
  Description of Artificial Sequence: Synthetic oligonucleotide
  Sense strand starting at position 211 of SEQ ID NO: 1888063
auuacucgccauggagaaa

SEQ ID NO: 2508033 - RNA, 19 nt, Artificial Sequence
  Description of Artificial Sequence: Synthetic oligonucleotide
  Antisense strand to SEQ ID NO: 2508032
uuucuccauggcgaguaau

SEQ ID NO: 2508034 - RNA, 19 nt, Artificial Sequence
  Description of Artificial Sequence: Synthetic oligonucleotide
  Sense strand starting at position 334 of SEQ ID NO: 1888063
ugaguaagauaagauuucu

SEQ ID NO: 2508035 - RNA, 19 nt, Artificial Sequence
  Description of Artificial Sequence: Synthetic oligonucleotide
  Antisense strand to SEQ ID NO: 2508034
agaaaucuuaucuuacuca

SEQ ID NO: 2508036 - RNA, 19 nt, Artificial Sequence
  Description of Artificial Sequence: Synthetic oligonucleotide
  Sense strand starting at position 340 of SEQ ID NO: 1888063
agauaagauuucuagcuuu

SEQ ID NO: 2508037 - RNA, 19 nt, Artificial Sequence
  Description of Artificial Sequence: Synthetic oligonucleotide
  Antisense strand to SEQ ID NO: 2508036
aaagcuagaaaucuuaucu

SEQ ID NO: 2508038 - RNA, 19 nt, Artificial Sequence
  Description of Artificial Sequence: Synthetic oligonucleotide
  Sense strand starting at position 381 of SEQ ID NO: 1888063
cuucuagauguguaaagug

SEQ ID NO: 2508039 - RNA, 19 nt, Artificial Sequence
  Description of Artificial Sequence: Synthetic oligonucleotide
  Antisense strand to SEQ ID NO: 2508038
cacuuuacacaucuagaag

SEQ ID NO: 2508040 - RNA, 19 nt, Artificial Sequence
  Description of Artificial Sequence: Synthetic oligonucleotide
  Sense strand starting at position 401 of SEQ ID NO: 1888063
guagacauucuuuaccugu

SEQ ID NO: 2508041 - RNA, 19 nt, Artificial Sequence
  Description of Artificial Sequence: Synthetic oligonucleotide
  Antisense strand to SEQ ID NO: 2508040
acagguaaagaaugucuac

SEQ ID NO: 2508042 - RNA, 19 nt, Artificial Sequence
  Description of Artificial Sequence: Synthetic oligonucleotide
  Sense strand starting at position 481 of SEQ ID NO: 1888063
gguaacuguucacugggau

SEQ ID NO: 2508043 - RNA, 19 nt, Artificial Sequence
  Description of Artificial Sequence: Synthetic oligonucleotide
  Antisense strand to SEQ ID NO: 2508042
aucccagugaacaguuacc

SEQ ID NO: 2508044 - RNA, 19 nt, Artificial Sequence
  Description of Artificial Sequence: Synthetic oligonucleotide
  Sense strand starting at position 482 of SEQ ID NO: 1888063
guaacuguucacugggaug

SEQ ID NO: 2508045 - RNA, 19 nt, Artificial Sequence
  Description of Artificial Sequence: Synthetic oligonucleotide
  Antisense strand to SEQ ID NO: 2508044
caucccagugaacaguuac

SEQ ID NO: 2508046 - RNA, 19 nt, Artificial Sequence
  Description of Artificial Sequence: Synthetic oligonucleotide
  Sense strand starting at position 592 of SEQ ID NO: 1888063
ugauauguuggccagugau

SEQ ID NO: 2508047 - RNA, 19 nt, Artificial Sequence
  Description of Artificial Sequence: Synthetic oligonucleotide
  Antisense strand to SEQ ID NO: 2508046
aucacuggccaacauauca

SEQ ID NO: 2508048 - RNA, 19 nt, Artificial Sequence
  Description of Artificial Sequence: Synthetic oligonucleotide
  Sense strand starting at position 595 of SEQ ID NO: 1888063
uauguuggccagugauaaa

SEQ ID NO: 2508049 - RNA, 19 nt, Artificial Sequence
  Description of Artificial Sequence: Synthetic oligonucleotide
  Antisense strand to SEQ ID NO: 2508048
uuuaucacuggccaacaua

SEQ ID NO: 2508050 - RNA, 19 nt, Artificial Sequence
  Description of Artificial Sequence: Synthetic oligonucleotide
  Sense strand starting at position 607 of SEQ ID NO: 1888063
ugauaaacugcguaaauga

SEQ ID NO: 2508051 - RNA, 19 nt, Artificial Sequence
  Description of Artificial Sequence: Synthetic oligonucleotide
  Antisense strand to SEQ ID NO: 2508050
ucauuuacgcaguuuauca

SEQ ID NO: 2508052 - RNA, 19 nt, Artificial Sequence
  Description of Artificial Sequence: Synthetic oligonucleotide
  Sense strand starting at position 1356 of SEQ ID NO: 1888063
gggcuucuugucuaaucag

SEQ ID NO: 2508053 - RNA, 19 nt, Artificial Sequence
  Description of Artificial Sequence: Synthetic oligonucleotide
  Antisense strand to SEQ ID NO: 2508052
cugauuagacaagaagccc

SEQ ID NO: 2508054 - RNA, 19 nt, Artificial Sequence
  Description of Artificial Sequence: Synthetic oligonucleotide
  Sense strand starting at position 1826 of SEQ ID NO: 1888063
aacagauggccguauacau

SEQ ID NO: 2508055 - RNA, 19 nt, Artificial Sequence
  Description of Artificial Sequence: Synthetic oligonucleotide
  Antisense strand to SEQ ID NO: 2508054
auguauacggccaucuguu

SEQ ID NO: 2508056 - RNA, 19 nt, Artificial Sequence
  Description of Artificial Sequence: Synthetic oligonucleotide
  Sense strand starting at position 1994 of SEQ ID NO: 1888063
ugucguauuacagcuugua

SEQ ID NO: 2508057 - RNA, 19 nt, Artificial Sequence
  Description of Artificial Sequence: Synthetic oligonucleotide
  Antisense strand to SEQ ID NO: 2508056
uacaagcuguaauacgaca

SEQ ID NO: 2508058 - RNA, 19 nt, Artificial Sequence
  Description of Artificial Sequence: Synthetic oligonucleotide
  Sense strand starting at position 2204 of SEQ ID NO: 1888063
gcugccauaggccauaaau

SEQ ID NO: 2508059 - RNA, 19 nt, Artificial Sequence
  Description of Artificial Sequence: Synthetic oligonucleotide
  Antisense strand to SEQ ID NO: 2508058
auuuauggccuauggcagc

SEQ ID NO: 2508060 - RNA, 19 nt, Artificial Sequence
  Description of Artificial Sequence: Synthetic oligonucleotide
  Sense strand starting at position 2224 of SEQ ID NO: 1888063
ugaggucaugcucagcaga

SEQ ID NO: 2508061 - RNA, 19 nt, Artificial Sequence
  Description of Artificial Sequence: Synthetic oligonucleotide
  Antisense strand to SEQ ID NO: 2508060
ucugcugagcaugaccuca

SEQ ID NO: 2508062 - RNA, 19 nt, Artificial Sequence
  Description of Artificial Sequence: Synthetic oligonucleotide
  Sense strand starting at position 2226 of SEQ ID NO: 1888063
aggucaugcucagcagaga

SEQ ID NO: 2508063 - RNA, 19 nt, Artificial Sequence
  Description of Artificial Sequence: Synthetic oligonucleotide
  Antisense strand to SEQ ID NO: 2508062
ucucugcugagcaugaccu

SEQ ID NO: 2508064 - RNA, 19 nt, Artificial Sequence
  Description of Artificial Sequence: Synthetic oligonucleotide
  Sense strand starting at position 2227 of SEQ ID NO: 1888063
ggucaugcucagcagagaa

SEQ ID NO: 2508065 - RNA, 19 nt, Artificial Sequence
  Description of Artificial Sequence: Synthetic oligonucleotide
  Antisense strand to SEQ ID NO: 2508064
uucucugcugagcaugacc

SEQ ID NO: 2508066 - RNA, 19 nt, Artificial Sequence
  Description of Artificial Sequence: Synthetic oligonucleotide
  Sense strand starting at position 2609 of SEQ ID NO: 1888063
ggaacuuauuuguaagauc

SEQ ID NO: 2508067 - RNA, 19 nt, Artificial Sequence
  Description of Artificial Sequence: Synthetic oligonucleotide
  Antisense strand to SEQ ID NO: 2508066
gaucuuacaaauaaguucc

SEQ ID NO: 2508068 - RNA, 19 nt, Artificial Sequence
  Description of Artificial Sequence: Synthetic oligonucleotide
  Sense strand starting at position 2612 of SEQ ID NO: 1888063
acuuauuuguaagaucaug

SEQ ID NO: 2508069 - RNA, 19 nt, Artificial Sequence
  Description of Artificial Sequence: Synthetic oligonucleotide
  Antisense strand to SEQ ID NO: 2508068
caugaucuuacaaauaagu

SEQ ID NO: 2508070 - RNA, 19 nt, Artificial Sequence
  Description of Artificial Sequence: Synthetic oligonucleotide
  Sense strand starting at position 2667 of SEQ ID NO: 1888063
gcuguugugagacauugag

SEQ ID NO: 2508071 - RNA, 19 nt, Artificial Sequence
  Description of Artificial Sequence: Synthetic oligonucleotide
  Antisense strand to SEQ ID NO: 2508070
cucaaugucucacaacagc

SEQ ID NO: 2508072 - RNA, 19 nt, Artificial Sequence
  Description of Artificial Sequence: Synthetic oligonucleotide
  Sense strand starting at position 2673 of SEQ ID NO: 1888063
gugagacauugagcaggua

SEQ ID NO: 2508073 - RNA, 19 nt, Artificial Sequence
  Description of Artificial Sequence: Synthetic oligonucleotide
  Antisense strand to SEQ ID NO: 2508072
uaccugcucaaugucucac

SEQ ID NO: 2508074 - RNA, 19 nt, Artificial Sequence
  Description of Artificial Sequence: Synthetic oligonucleotide
  Sense strand starting at position 2751 of SEQ ID NO: 1888063
agaaacagauccuugugua

SEQ ID NO: 2508075 - RNA, 19 nt, Artificial Sequence
  Description of Artificial Sequence: Synthetic oligonucleotide
  Antisense strand to SEQ ID NO: 2508074
uacacaaggaucuguuucu

SEQ ID NO: 2508076 - RNA, 19 nt, Artificial Sequence
  Description of Artificial Sequence: Synthetic oligonucleotide
  Sense strand starting at position 2934 of SEQ ID NO: 1888063
cagugagauccacagcuga

SEQ ID NO: 2508077 - RNA, 19 nt, Artificial Sequence
  Description of Artificial Sequence: Synthetic oligonucleotide
  Antisense strand to SEQ ID NO: 2508076
ucagcuguggaucucacug

SEQ ID NO: 2508078 - RNA, 19 nt, Artificial Sequence
  Description of Artificial Sequence: Synthetic oligonucleotide
  Sense strand starting at position 2949 of SEQ ID NO: 1888063
cugauugcagauugcuaga

SEQ ID NO: 2508079 - RNA, 19 nt, Artificial Sequence
  Description of Artificial Sequence: Synthetic oligonucleotide
  Antisense strand to SEQ ID NO: 2508078
ucuagcaaucugcaaucag

SEQ ID NO: 2508080 - RNA, 19 nt, Artificial Sequence
  Description of Artificial Sequence: Synthetic oligonucleotide
  Sense strand starting at position 3025 of SEQ ID NO: 1888063
aguguuugccaugaacacu

SEQ ID NO: 2508081 - RNA, 19 nt, Artificial Sequence
  Description of Artificial Sequence: Synthetic oligonucleotide
  Antisense strand to SEQ ID NO: 2508080
aguguucauggcaaacacu

SEQ ID NO: 2508082 - RNA, 19 nt, Artificial Sequence
  Description of Artificial Sequence: Synthetic oligonucleotide
  Sense strand starting at position 3031 of SEQ ID NO: 1888063
ugccaugaacacuaauagu

SEQ ID NO: 2508083 - RNA, 19 nt, Artificial Sequence
  Description of Artificial Sequence: Synthetic oligonucleotide
  Antisense strand to SEQ ID NO: 2508082
acuauuaguguucauggca

SEQ ID NO: 2508084 - RNA, 19 nt, Artificial Sequence
  Description of Artificial Sequence: Synthetic oligonucleotide
  Sense strand starting at position 3041 of SEQ ID NO: 1888063
acuaauaguuuaccugagu

SEQ ID NO: 2508085 - RNA, 19 nt, Artificial Sequence
  Description of Artificial Sequence: Synthetic oligonucleotide
  Antisense strand to SEQ ID NO: 2508084
acucagguaaacuauuagu

SEQ ID NO: 2508086 - RNA, 19 nt, Artificial Sequence
  Description of Artificial Sequence: Synthetic oligonucleotide
  Sense strand starting at position 3044 of SEQ ID NO: 1888063
aauaguuuaccugagugau

SEQ ID NO: 2508087 - RNA, 19 nt, Artificial Sequence
  Description of Artificial Sequence: Synthetic oligonucleotide
  Antisense strand to SEQ ID NO: 2508086
aucacucagguaaacuauu

SEQ ID NO: 2508088 - RNA, 19 nt, Artificial Sequence
  Description of Artificial Sequence: Synthetic oligonucleotide
  Sense strand starting at position 3046 of SEQ ID NO: 1888063
uaguuuaccugagugauau

SEQ ID NO: 2508089 - RNA, 19 nt, Artificial Sequence
  Description of Artificial Sequence: Synthetic oligonucleotide
  Antisense strand to SEQ ID NO: 2508088
auaucacucagguaaacua

SEQ ID NO: 2508090 - RNA, 19 nt, Artificial Sequence
  Description of Artificial Sequence: Synthetic oligonucleotide
  Sense strand starting at position 3047 of SEQ ID NO: 1888063
aguuuaccugagugauaug

SEQ ID NO: 2508091 - RNA, 19 nt, Artificial Sequence
  Description of Artificial Sequence: Synthetic oligonucleotide
  Antisense strand to SEQ ID NO: 2508090
cauaucacucagguaaacu

SEQ ID NO: 2508092 - RNA, 19 nt, Artificial Sequence
  Description of Artificial Sequence: Synthetic oligonucleotide
  Sense strand starting at position 3142 of SEQ ID NO: 1888063
gguuuaaacucauuaugau

SEQ ID NO: 2508093 - RNA, 19 nt, Artificial Sequence
  Description of Artificial Sequence: Synthetic oligonucleotide
  Antisense strand to SEQ ID NO: 2508092
aucauaaugaguuuaaacc

SEQ ID NO: 2508094 - RNA, 19 nt, Artificial Sequence
  Description of Artificial Sequence: Synthetic oligonucleotide
  Sense strand starting at position 3241 of SEQ ID NO: 1888063
gucguuuauaaggaacgaa

SEQ ID NO: 2508095 - RNA, 19 nt, Artificial Sequence
  Description of Artificial Sequence: Synthetic oligonucleotide
  Antisense strand to SEQ ID NO: 2508094
uucguuccuuauaaacgac

SEQ ID NO: 2508096 - RNA, 19 nt, Artificial Sequence
  Description of Artificial Sequence: Synthetic oligonucleotide
  Sense strand starting at position 3800 of SEQ ID NO: 1888063
cuuggcuaucucuggauga

SEQ ID NO: 2508097 - RNA, 19 nt, Artificial Sequence
  Description of Artificial Sequence: Synthetic oligonucleotide
  Antisense strand to SEQ ID NO: 2508096
ucauccagagauagccaag

SEQ ID NO: 2508098 - RNA, 19 nt, Artificial Sequence
  Description of Artificial Sequence: Synthetic oligonucleotide
  Sense strand starting at position 3802 of SEQ ID NO: 1888063
uggcuaucucuggaugaua

SEQ ID NO: 2508099 - RNA, 19 nt, Artificial Sequence
  Description of Artificial Sequence: Synthetic oligonucleotide
  Antisense strand to SEQ ID NO: 2508098
uaucauccagagauagcca

SEQ ID NO: 2508100 - RNA, 19 nt, Artificial Sequence
  Description of Artificial Sequence: Synthetic oligonucleotide
  Sense strand starting at position 3804 of SEQ ID NO: 1888063
gcuaucucuggaugauaua

SEQ ID NO: 2508101 - RNA, 19 nt, Artificial Sequence
  Description of Artificial Sequence: Synthetic oligonucleotide
  Antisense strand to SEQ ID NO: 2508100
uauaucauccagagauagc

SEQ ID NO: 2508102 - RNA, 19 nt, Artificial Sequence
  Description of Artificial Sequence: Synthetic oligonucleotide
  Sense strand starting at position 3855 of SEQ ID NO: 1888063
ugagaugauguuuaaugcu

SEQ ID NO: 2508103 - RNA, 19 nt, Artificial Sequence
  Description of Artificial Sequence: Synthetic oligonucleotide
  Antisense strand to SEQ ID NO: 2508102
agcauuaaacaucaucuca

SEQ ID NO: 2508104 - RNA, 19 nt, Artificial Sequence
  Description of Artificial Sequence: Synthetic oligonucleotide
  Sense strand starting at position 3880 of SEQ ID NO: 1888063
ugugaaauaucaguggaga

SEQ ID NO: 2508105 - RNA, 19 nt, Artificial Sequence
  Description of Artificial Sequence: Synthetic oligonucleotide
  Antisense strand to SEQ ID NO: 2508104
ucuccacugauauuucaca

SEQ ID NO: 2508106 - RNA, 19 nt, Artificial Sequence
  Description of Artificial Sequence: Synthetic oligonucleotide
  Sense strand starting at position 165 of SEQ ID NO: 1888064
acacuaguauuagucacaa

SEQ ID NO: 2508107 - RNA, 19 nt, Artificial Sequence
  Description of Artificial Sequence: Synthetic oligonucleotide
  Antisense strand to SEQ ID NO: 2508106
uugugacuaauacuagugu

SEQ ID NO: 2508108 - RNA, 19 nt, Artificial Sequence
  Description of Artificial Sequence: Synthetic oligonucleotide
  Sense strand starting at position 453 of SEQ ID NO: 1888064
cugcuuuaaugguuaggaa

SEQ ID NO: 2508109 - RNA, 19 nt, Artificial Sequence
  Description of Artificial Sequence: Synthetic oligonucleotide
  Antisense strand to SEQ ID NO: 2508108
uuccuaaccauuaaagcag

SEQ ID NO: 2508110 - RNA, 19 nt, Artificial Sequence
  Description of Artificial Sequence: Synthetic oligonucleotide
  Sense strand starting at position 454 of SEQ ID NO: 1888064
ugcuuuaaugguuaggaag

SEQ ID NO: 2508111 - RNA, 19 nt, Artificial Sequence
  Description of Artificial Sequence: Synthetic oligonucleotide
  Antisense strand to SEQ ID NO: 2508110
cuuccuaaccauuaaagca

SEQ ID NO: 2508112 - RNA, 19 nt, Artificial Sequence
  Description of Artificial Sequence: Synthetic oligonucleotide
  Sense strand starting at position 457 of SEQ ID NO: 1888064
uuuaaugguuaggaagaga

SEQ ID NO: 2508113 - RNA, 19 nt, Artificial Sequence
  Description of Artificial Sequence: Synthetic oligonucleotide
  Antisense strand to SEQ ID NO: 2508112
ucucuuccuaaccauuaaa

SEQ ID NO: 2508114 - RNA, 19 nt, Artificial Sequence
  Description of Artificial Sequence: Synthetic oligonucleotide
  Sense strand starting at position 623 of SEQ ID NO: 1888064
gaagaaaguuaaugugcaa

SEQ ID NO: 2508115 - RNA, 19 nt, Artificial Sequence
  Description of Artificial Sequence: Synthetic oligonucleotide
  Antisense strand to SEQ ID NO: 2508114
uugcacauuaacuuucuuc

SEQ ID NO: 2508116 - RNA, 19 nt, Artificial Sequence
  Description of Artificial Sequence: Synthetic oligonucleotide
  Sense strand starting at position 626 of SEQ ID NO: 1888064
gaaaguuaaugugcaaagu

SEQ ID NO: 2508117 - RNA, 19 nt, Artificial Sequence
  Description of Artificial Sequence: Synthetic oligonucleotide
  Antisense strand to SEQ ID NO: 2508116
acuuugcacauuaacuuuc

SEQ ID NO: 2508118 - RNA, 19 nt, Artificial Sequence
  Description of Artificial Sequence: Synthetic oligonucleotide
  Sense strand starting at position 811 of SEQ ID NO: 1888064
ggauauaccugccacuuau

SEQ ID NO: 2508119 - RNA, 19 nt, Artificial Sequence
  Description of Artificial Sequence: Synthetic oligonucleotide
  Antisense strand to SEQ ID NO: 2508118
auaaguggcagguauaucc

SEQ ID NO: 2508120 - RNA, 19 nt, Artificial Sequence
  Description of Artificial Sequence: Synthetic oligonucleotide
  Sense strand starting at position 1136 of SEQ ID NO: 1888064
cucacaguauucuaaaggu

SEQ ID NO: 2508121 - RNA, 19 nt, Artificial Sequence
  Description of Artificial Sequence: Synthetic oligonucleotide
  Antisense strand to SEQ ID NO: 2508120
accuuuagaauacugugag

SEQ ID NO: 2508122 - RNA, 19 nt, Artificial Sequence
  Description of Artificial Sequence: Synthetic oligonucleotide
  Sense strand starting at position 1333 of SEQ ID NO: 1888064
cugugugauucaucccggu

SEQ ID NO: 2508123 - RNA, 19 nt, Artificial Sequence
  Description of Artificial Sequence: Synthetic oligonucleotide
  Antisense strand to SEQ ID NO: 2508122
accgggaugaaucacacag

SEQ ID NO: 2508124 - RNA, 19 nt, Artificial Sequence
  Description of Artificial Sequence: Synthetic oligonucleotide
  Sense strand starting at position 2080 of SEQ ID NO: 1888064
ggccgaaagguguccgcau

SEQ ID NO: 2508125 - RNA, 19 nt, Artificial Sequence
  Description of Artificial Sequence: Synthetic oligonucleotide
  Antisense strand to SEQ ID NO: 2508124
augcggacaccuuucggcc

SEQ ID NO: 2508126 - RNA, 19 nt, Artificial Sequence
  Description of Artificial Sequence: Synthetic oligonucleotide
  Sense strand starting at position 2218 of SEQ ID NO: 1888064
accuccucucgcuagagau

SEQ ID NO: 2508127 - RNA, 19 nt, Artificial Sequence
  Description of Artificial Sequence: Synthetic oligonucleotide
  Antisense strand to SEQ ID NO: 2508126
aucucuagcgagaggaggu

SEQ ID NO: 2508128 - RNA, 19 nt, Artificial Sequence
  Description of Artificial Sequence: Synthetic oligonucleotide
  Sense strand starting at position 2794 of SEQ ID NO: 1888064
ggaguaguccacggugauc

SEQ ID NO: 2508129 - RNA, 19 nt, Artificial Sequence
  Description of Artificial Sequence: Synthetic oligonucleotide
  Antisense strand to SEQ ID NO: 2508128
gaucaccguggacuacucc

SEQ ID NO: 2508130 - RNA, 19 nt, Artificial Sequence
  Description of Artificial Sequence: Synthetic oligonucleotide
  Sense strand starting at position 2826 of SEQ ID NO: 1888064
ggguauuauuaaucgcaca

SEQ ID NO: 2508131 - RNA, 19 nt, Artificial Sequence
  Description of Artificial Sequence: Synthetic oligonucleotide
  Antisense strand to SEQ ID NO: 2508130
ugugcgauuaauaauaccc

SEQ ID NO: 2508132 - RNA, 19 nt, Artificial Sequence
  Description of Artificial Sequence: Synthetic oligonucleotide
  Sense strand starting at position 2831 of SEQ ID NO: 1888064
uuauuaaucgcacauguga

SEQ ID NO: 2508133 - RNA, 19 nt, Artificial Sequence
  Description of Artificial Sequence: Synthetic oligonucleotide
  Antisense strand to SEQ ID NO: 2508132
ucacaugugcgauuaauaa

SEQ ID NO: 2508134 - RNA, 19 nt, Artificial Sequence
  Description of Artificial Sequence: Synthetic oligonucleotide
  Sense strand starting at position 3003 of SEQ ID NO: 1888064
gagucaggauuggcucauu

SEQ ID NO: 2508135 - RNA, 19 nt, Artificial Sequence
  Description of Artificial Sequence: Synthetic oligonucleotide
  Antisense strand to SEQ ID NO: 2508134
aaugagccaauccugacuc

SEQ ID NO: 2508136 - RNA, 19 nt, Artificial Sequence
  Description of Artificial Sequence: Synthetic oligonucleotide
  Sense strand starting at position 3048 of SEQ ID NO: 1888064
ucucaaugugcggagauga

SEQ ID NO: 2508137 - RNA, 19 nt, Artificial Sequence
  Description of Artificial Sequence: Synthetic oligonucleotide
  Antisense strand to SEQ ID NO: 2508136
ucaucuccgcacauugaga

SEQ ID NO: 2508138 - RNA, 19 nt, Artificial Sequence
  Description of Artificial Sequence: Synthetic oligonucleotide
  Sense strand starting at position 3245 of SEQ ID NO: 1888064
cauacaaugugguucguaa

SEQ ID NO: 2508139 - RNA, 19 nt, Artificial Sequence
  Description of Artificial Sequence: Synthetic oligonucleotide
  Antisense strand to SEQ ID NO: 2508138
uuacgaaccacauuguaug

SEQ ID NO: 2508140 - RNA, 19 nt, Artificial Sequence
  Description of Artificial Sequence: Synthetic oligonucleotide
  Sense strand starting at position 3247 of SEQ ID NO: 1888064
uacaaugugguucguaaua

SEQ ID NO: 2508141 - RNA, 19 nt, Artificial Sequence
  Description of Artificial Sequence: Synthetic oligonucleotide
  Antisense strand to SEQ ID NO: 2508140
uauuacgaaccacauugua

SEQ ID NO: 2508142 - RNA, 19 nt, Artificial Sequence
  Description of Artificial Sequence: Synthetic oligonucleotide
  Sense strand starting at position 3249 of SEQ ID NO: 1888064
caaugugguucguaauagu

SEQ ID NO: 2508143 - RNA, 19 nt, Artificial Sequence
  Description of Artificial Sequence: Synthetic oligonucleotide
  Antisense strand to SEQ ID NO: 2508142
acuauuacgaaccacauug

SEQ ID NO: 2508144 - RNA, 19 nt, Artificial Sequence
  Description of Artificial Sequence: Synthetic oligonucleotide
  Sense strand starting at position 3252 of SEQ ID NO: 1888064
ugugguucguaauaguauc

SEQ ID NO: 2508145 - RNA, 19 nt, Artificial Sequence
  Description of Artificial Sequence: Synthetic oligonucleotide
  Antisense strand to SEQ ID NO: 2508144
gauacuauuacgaaccaca

SEQ ID NO: 2508146 - RNA, 19 nt, Artificial Sequence
  Description of Artificial Sequence: Synthetic oligonucleotide
  Sense strand starting at position 3258 of SEQ ID NO: 1888064
ucguaauaguaucauuuag

SEQ ID NO: 2508147 - RNA, 19 nt, Artificial Sequence
  Description of Artificial Sequence: Synthetic oligonucleotide
  Antisense strand to SEQ ID NO: 2508146
cuaaaugauacuauuacga

SEQ ID NO: 2508148 - RNA, 19 nt, Artificial Sequence
  Description of Artificial Sequence: Synthetic oligonucleotide
  Sense strand starting at position 3793 of SEQ ID NO: 1888064
uggauuucuuucuugccca

SEQ ID NO: 2508149 - RNA, 19 nt, Artificial Sequence
  Description of Artificial Sequence: Synthetic oligonucleotide
  Antisense strand to SEQ ID NO: 2508148
ugggcaagaaagaaaucca

SEQ ID NO: 2508150 - RNA, 19 nt, Artificial Sequence
  Description of Artificial Sequence: Synthetic oligonucleotide
  Sense strand starting at position 3822 of SEQ ID NO: 1888064
augcauagaguuuggcgaa

SEQ ID NO: 2508151 - RNA, 19 nt, Artificial Sequence
  Description of Artificial Sequence: Synthetic oligonucleotide
  Antisense strand to SEQ ID NO: 2508150
uucgccaaacucuaugcau

SEQ ID NO: 2508152 - RNA, 19 nt, Artificial Sequence
  Description of Artificial Sequence: Synthetic oligonucleotide
  Sense strand starting at position 3823 of SEQ ID NO: 1888064
ugcauagaguuuggcgaaa

SEQ ID NO: 2508153 - RNA, 19 nt, Artificial Sequence
  Description of Artificial Sequence: Synthetic oligonucleotide
  Antisense strand to SEQ ID NO: 2508152
uuucgccaaacucuaugca

SEQ ID NO: 2508154 - RNA, 19 nt, Artificial Sequence
  Description of Artificial Sequence: Synthetic oligonucleotide
  Sense strand starting at position 3865 of SEQ ID NO: 1888064
ccaauuucguuuguugacu

SEQ ID NO: 2508155 - RNA, 19 nt, Artificial Sequence
  Description of Artificial Sequence: Synthetic oligonucleotide
  Antisense strand to SEQ ID NO: 2508154
agucaacaaacgaaauugg

SEQ ID NO: 2508156 - RNA, 19 nt, Artificial Sequence
  Description of Artificial Sequence: Synthetic oligonucleotide
  Sense strand starting at position 3867 of SEQ ID NO: 1888064
aauuucguuuguugacuga

SEQ ID NO: 2508157 - RNA, 19 nt, Artificial Sequence
  Description of Artificial Sequence: Synthetic oligonucleotide
  Antisense strand to SEQ ID NO: 2508156
ucagucaacaaacgaaauu

SEQ ID NO: 2508158 - RNA, 19 nt, Artificial Sequence
  Description of Artificial Sequence: Synthetic oligonucleotide
  Sense strand starting at position 3870 of SEQ ID NO: 1888064
uucguuuguugacugaaau

SEQ ID NO: 2508159 - RNA, 19 nt, Artificial Sequence
  Description of Artificial Sequence: Synthetic oligonucleotide
  Antisense strand to SEQ ID NO: 2508158
auuucagucaacaaacgaa

SEQ ID NO: 2508160 - RNA, 19 nt, Artificial Sequence
  Description of Artificial Sequence: Synthetic oligonucleotide
  Sense strand starting at position 3871 of SEQ ID NO: 1888064
ucguuuguugacugaaaua

SEQ ID NO: 2508161 - RNA, 19 nt, Artificial Sequence
  Description of Artificial Sequence: Synthetic oligonucleotide
  Antisense strand to SEQ ID NO: 2508160
uauuucagucaacaaacga

SEQ ID NO: 2508162 - RNA, 19 nt, Artificial Sequence
  Description of Artificial Sequence: Synthetic oligonucleotide
  Sense strand starting at position 3886 of SEQ ID NO: 1888064
aauacaaugcuucguguua

SEQ ID NO: 2508163 - RNA, 19 nt, Artificial Sequence
  Description of Artificial Sequence: Synthetic oligonucleotide
  Antisense strand to SEQ ID NO: 2508162
uaacacgaagcauuguauu

SEQ ID NO: 2508164 - RNA, 19 nt, Artificial Sequence
  Description of Artificial Sequence: Synthetic oligonucleotide
  Sense strand starting at position 3887 of SEQ ID NO: 1888064
auacaaugcuucguguuag

SEQ ID NO: 2508165 - RNA, 19 nt, Artificial Sequence
  Description of Artificial Sequence: Synthetic oligonucleotide
  Antisense strand to SEQ ID NO: 2508164
cuaacacgaagcauuguau

SEQ ID NO: 2508166 - RNA, 19 nt, Artificial Sequence
  Description of Artificial Sequence: Synthetic oligonucleotide
  Sense strand starting at position 3888 of SEQ ID NO: 1888064
uacaaugcuucguguuaga

SEQ ID NO: 2508167 - RNA, 19 nt, Artificial Sequence
  Description of Artificial Sequence: Synthetic oligonucleotide
  Antisense strand to SEQ ID NO: 2508166
ucuaacacgaagcauugua

SEQ ID NO: 2508168 - RNA, 19 nt, Artificial Sequence
  Description of Artificial Sequence: Synthetic oligonucleotide
  Sense strand starting at position 3891 of SEQ ID NO: 1888064
aaugcuucguguuagaauc

SEQ ID NO: 2508169 - RNA, 19 nt, Artificial Sequence
  Description of Artificial Sequence: Synthetic oligonucleotide
  Antisense strand to SEQ ID NO: 2508168
gauucuaacacgaagcauu

SEQ ID NO: 2508170 - RNA, 19 nt, Artificial Sequence
  Description of Artificial Sequence: Synthetic oligonucleotide
  Sense strand starting at position 3893 of SEQ ID NO: 1888064
ugcuucguguuagaaucaa

SEQ ID NO: 2508171 - RNA, 19 nt, Artificial Sequence
  Description of Artificial Sequence: Synthetic oligonucleotide
  Antisense strand to SEQ ID NO: 2508170
uugauucuaacacgaagca

SEQ ID NO: 2508172 - RNA, 19 nt, Artificial Sequence
  Description of Artificial Sequence: Synthetic oligonucleotide
  Sense strand starting at position 3897 of SEQ ID NO: 1888064
ucguguuagaaucaagaua

SEQ ID NO: 2508173 - RNA, 19 nt, Artificial Sequence
  Description of Artificial Sequence: Synthetic oligonucleotide
  Antisense strand to SEQ ID NO: 2508172
uaucuugauucuaacacga

SEQ ID NO: 2508174 - RNA, 19 nt, Artificial Sequence
  Description of Artificial Sequence: Synthetic oligonucleotide
  Sense strand starting at position 24 of SEQ ID NO: 1888065
uauagaaaugcacgacugu

SEQ ID NO: 2508175 - RNA, 19 nt, Artificial Sequence
  Description of Artificial Sequence: Synthetic oligonucleotide
  Antisense strand to SEQ ID NO: 2508174
acagucgugcauuucuaua

SEQ ID NO: 2508176 - RNA, 19 nt, Artificial Sequence
  Description of Artificial Sequence: Synthetic oligonucleotide
  Sense strand starting at position 33 of SEQ ID NO: 1888065
gcacgacugucaccagaca

SEQ ID NO: 2508177 - RNA, 19 nt, Artificial Sequence
  Description of Artificial Sequence: Synthetic oligonucleotide
  Antisense strand to SEQ ID NO: 2508176
ugucuggugacagucgugc

SEQ ID NO: 2508178 - RNA, 19 nt, Artificial Sequence
  Description of Artificial Sequence: Synthetic oligonucleotide
  Sense strand starting at position 34 of SEQ ID NO: 1888065
cacgacugucaccagacau

SEQ ID NO: 2508179 - RNA, 19 nt, Artificial Sequence
  Description of Artificial Sequence: Synthetic oligonucleotide
  Antisense strand to SEQ ID NO: 2508178
augucuggugacagucgug

SEQ ID NO: 2508180 - RNA, 19 nt, Artificial Sequence
  Description of Artificial Sequence: Synthetic oligonucleotide
  Sense strand starting at position 97 of SEQ ID NO: 1888065
uagccuuagcggucugcaa

SEQ ID NO: 2508181 - RNA, 19 nt, Artificial Sequence
  Description of Artificial Sequence: Synthetic oligonucleotide
  Antisense strand to SEQ ID NO: 2508180
uugcagaccgcuaaggcua

SEQ ID NO: 2508182 - RNA, 19 nt, Artificial Sequence
  Description of Artificial Sequence: Synthetic oligonucleotide
  Sense strand starting at position 98 of SEQ ID NO: 1888065
agccuuagcggucugcaaa

SEQ ID NO: 2508183 - RNA, 19 nt, Artificial Sequence
  Description of Artificial Sequence: Synthetic oligonucleotide
  Antisense strand to SEQ ID NO: 2508182
uuugcagaccgcuaaggcu

SEQ ID NO: 2508184 - RNA, 19 nt, Artificial Sequence
  Description of Artificial Sequence: Synthetic oligonucleotide
  Sense strand starting at position 126 of SEQ ID NO: 1888065
ucaccauucugaguauaga

SEQ ID NO: 2508185 - RNA, 19 nt, Artificial Sequence
  Description of Artificial Sequence: Synthetic oligonucleotide
  Antisense strand to SEQ ID NO: 2508184
ucuauacucagaaugguga

SEQ ID NO: 2508186 - RNA, 19 nt, Artificial Sequence
  Description of Artificial Sequence: Synthetic oligonucleotide
  Sense strand starting at position 136 of SEQ ID NO: 1888065
gaguauagagcucaaguuu

SEQ ID NO: 2508187 - RNA, 19 nt, Artificial Sequence
  Description of Artificial Sequence: Synthetic oligonucleotide
  Antisense strand to SEQ ID NO: 2508186
aaacuugagcucuauacuc

SEQ ID NO: 2508188 - RNA, 19 nt, Artificial Sequence
  Description of Artificial Sequence: Synthetic oligonucleotide
  Sense strand starting at position 367 of SEQ ID NO: 1888065
uucucuauccagggcugaa

SEQ ID NO: 2508189 - RNA, 19 nt, Artificial Sequence
  Description of Artificial Sequence: Synthetic oligonucleotide
  Antisense strand to SEQ ID NO: 2508188
uucagcccuggauagagaa

SEQ ID NO: 2508190 - RNA, 19 nt, Artificial Sequence
  Description of Artificial Sequence: Synthetic oligonucleotide
  Sense strand starting at position 522 of SEQ ID NO: 1888065
gcucacaggucauuggaga

SEQ ID NO: 2508191 - RNA, 19 nt, Artificial Sequence
  Description of Artificial Sequence: Synthetic oligonucleotide
  Antisense strand to SEQ ID NO: 2508190
ucuccaaugaccugugagc

SEQ ID NO: 2508192 - RNA, 19 nt, Artificial Sequence
  Description of Artificial Sequence: Synthetic oligonucleotide
  Sense strand starting at position 523 of SEQ ID NO: 1888065
cucacaggucauuggagaa

SEQ ID NO: 2508193 - RNA, 19 nt, Artificial Sequence
  Description of Artificial Sequence: Synthetic oligonucleotide
  Antisense strand to SEQ ID NO: 2508192
uucuccaaugaccugugag

SEQ ID NO: 2508194 - RNA, 19 nt, Artificial Sequence
  Description of Artificial Sequence: Synthetic oligonucleotide
  Sense strand starting at position 564 of SEQ ID NO: 1888065
ggguuaggucuugauaaac

SEQ ID NO: 2508195 - RNA, 19 nt, Artificial Sequence
  Description of Artificial Sequence: Synthetic oligonucleotide
  Antisense strand to SEQ ID NO: 2508194
guuuaucaagaccuaaccc

SEQ ID NO: 2508196 - RNA, 19 nt, Artificial Sequence
  Description of Artificial Sequence: Synthetic oligonucleotide
  Sense strand starting at position 625 of SEQ ID NO: 1888065
aagugaugguguuuggucu

SEQ ID NO: 2508197 - RNA, 19 nt, Artificial Sequence
  Description of Artificial Sequence: Synthetic oligonucleotide
  Antisense strand to SEQ ID NO: 2508196
agaccaaacaccaucacuu

SEQ ID NO: 2508198 - RNA, 19 nt, Artificial Sequence
  Description of Artificial Sequence: Synthetic oligonucleotide
  Sense strand starting at position 629 of SEQ ID NO: 1888065
gaugguguuuggucuccua

SEQ ID NO: 2508199 - RNA, 19 nt, Artificial Sequence
  Description of Artificial Sequence: Synthetic oligonucleotide
  Antisense strand to SEQ ID NO: 2508198
uaggagaccaaacaccauc

SEQ ID NO: 2508200 - RNA, 19 nt, Artificial Sequence
  Description of Artificial Sequence: Synthetic oligonucleotide
  Sense strand starting at position 793 of SEQ ID NO: 1888065
ucuggacaguucccuguaa

SEQ ID NO: 2508201 - RNA, 19 nt, Artificial Sequence
  Description of Artificial Sequence: Synthetic oligonucleotide
  Antisense strand to SEQ ID NO: 2508200
uuacagggaacuguccaga

SEQ ID NO: 2508202 - RNA, 19 nt, Artificial Sequence
  Description of Artificial Sequence: Synthetic oligonucleotide
  Sense strand starting at position 794 of SEQ ID NO: 1888065
cuggacaguucccuguaaa

SEQ ID NO: 2508203 - RNA, 19 nt, Artificial Sequence
  Description of Artificial Sequence: Synthetic oligonucleotide
  Antisense strand to SEQ ID NO: 2508202
uuuacagggaacuguccag

SEQ ID NO: 2508204 - RNA, 19 nt, Artificial Sequence
  Description of Artificial Sequence: Synthetic oligonucleotide
  Sense strand starting at position 795 of SEQ ID NO: 1888065
uggacaguucccuguaaag

SEQ ID NO: 2508205 - RNA, 19 nt, Artificial Sequence
  Description of Artificial Sequence: Synthetic oligonucleotide
  Antisense strand to SEQ ID NO: 2508204
cuuuacagggaacugucca

SEQ ID NO: 2508206 - RNA, 19 nt, Artificial Sequence
  Description of Artificial Sequence: Synthetic oligonucleotide
  Sense strand starting at position 1141 of SEQ ID NO: 1888065
ggcagcuauccuuggaacu

SEQ ID NO: 2508207 - RNA, 19 nt, Artificial Sequence
  Description of Artificial Sequence: Synthetic oligonucleotide
  Antisense strand to SEQ ID NO: 2508206
aguuccaaggauagcugcc

SEQ ID NO: 2508208 - RNA, 19 nt, Artificial Sequence
  Description of Artificial Sequence: Synthetic oligonucleotide
  Sense strand starting at position 1142 of SEQ ID NO: 1888065
gcagcuauccuuggaacug

SEQ ID NO: 2508209 - RNA, 19 nt, Artificial Sequence
  Description of Artificial Sequence: Synthetic oligonucleotide
  Antisense strand to SEQ ID NO: 2508208
caguuccaaggauagcugc

SEQ ID NO: 2508210 - RNA, 19 nt, Artificial Sequence
  Description of Artificial Sequence: Synthetic oligonucleotide
  Sense strand starting at position 1550 of SEQ ID NO: 1888065
ggcagagucccauagucua

SEQ ID NO: 2508211 - RNA, 19 nt, Artificial Sequence
  Description of Artificial Sequence: Synthetic oligonucleotide
  Antisense strand to SEQ ID NO: 2508210
uagacuaugggacucugcc

SEQ ID NO: 2508212 - RNA, 19 nt, Artificial Sequence
  Description of Artificial Sequence: Synthetic oligonucleotide
  Sense strand starting at position 1558 of SEQ ID NO: 1888065
cccauagucuaucucugau

SEQ ID NO: 2508213 - RNA, 19 nt, Artificial Sequence
  Description of Artificial Sequence: Synthetic oligonucleotide
  Antisense strand to SEQ ID NO: 2508212
aucagagauagacuauggg

SEQ ID NO: 2508214 - RNA, 19 nt, Artificial Sequence
  Description of Artificial Sequence: Synthetic oligonucleotide
  Sense strand starting at position 1561 of SEQ ID NO: 1888065
auagucuaucucugaugca

SEQ ID NO: 2508215 - RNA, 19 nt, Artificial Sequence
  Description of Artificial Sequence: Synthetic oligonucleotide
  Antisense strand to SEQ ID NO: 2508214
ugcaucagagauagacuau

SEQ ID NO: 2508216 - RNA, 19 nt, Artificial Sequence
  Description of Artificial Sequence: Synthetic oligonucleotide
  Sense strand starting at position 1715 of SEQ ID NO: 1888065
cucaguaucccugauucua

SEQ ID NO: 2508217 - RNA, 19 nt, Artificial Sequence
  Description of Artificial Sequence: Synthetic oligonucleotide
  Antisense strand to SEQ ID NO: 2508216
uagaaucagggauacugag

SEQ ID NO: 2508218 - RNA, 19 nt, Artificial Sequence
  Description of Artificial Sequence: Synthetic oligonucleotide
  Sense strand starting at position 1786 of SEQ ID NO: 1888065
gugugcuucucacuggaau

SEQ ID NO: 2508219 - RNA, 19 nt, Artificial Sequence
  Description of Artificial Sequence: Synthetic oligonucleotide
  Antisense strand to SEQ ID NO: 2508218
auuccagugagaagcacac

SEQ ID NO: 2508220 - RNA, 19 nt, Artificial Sequence
  Description of Artificial Sequence: Synthetic oligonucleotide
  Sense strand starting at position 2001 of SEQ ID NO: 1888065
guggguuauucugcuagac

SEQ ID NO: 2508221 - RNA, 19 nt, Artificial Sequence
  Description of Artificial Sequence: Synthetic oligonucleotide
  Antisense strand to SEQ ID NO: 2508220
gucuagcagaauaacccac

SEQ ID NO: 2508222 - RNA, 19 nt, Artificial Sequence
  Description of Artificial Sequence: Synthetic oligonucleotide
  Sense strand starting at position 2240 of SEQ ID NO: 1888065
uccgauuucugucccaguu

SEQ ID NO: 2508223 - RNA, 19 nt, Artificial Sequence
  Description of Artificial Sequence: Synthetic oligonucleotide
  Antisense strand to SEQ ID NO: 2508222
aacugggacagaaaucgga

SEQ ID NO: 2508224 - RNA, 19 nt, Artificial Sequence
  Description of Artificial Sequence: Synthetic oligonucleotide
  Sense strand starting at position 2255 of SEQ ID NO: 1888065
aguuccuaccuggaaguau

SEQ ID NO: 2508225 - RNA, 19 nt, Artificial Sequence
  Description of Artificial Sequence: Synthetic oligonucleotide
  Antisense strand to SEQ ID NO: 2508224
auacuuccagguaggaacu

SEQ ID NO: 2508226 - RNA, 19 nt, Artificial Sequence
  Description of Artificial Sequence: Synthetic oligonucleotide
  Sense strand starting at position 2561 of SEQ ID NO: 1888065
aauugauuagguugagcua

SEQ ID NO: 2508227 - RNA, 19 nt, Artificial Sequence
  Description of Artificial Sequence: Synthetic oligonucleotide
  Antisense strand to SEQ ID NO: 2508226
uagcucaaccuaaucaauu

SEQ ID NO: 2508228 - RNA, 19 nt, Artificial Sequence
  Description of Artificial Sequence: Synthetic oligonucleotide
  Sense strand starting at position 2658 of SEQ ID NO: 1888065
cucagucauccugggagca

SEQ ID NO: 2508229 - RNA, 19 nt, Artificial Sequence
  Description of Artificial Sequence: Synthetic oligonucleotide
  Antisense strand to SEQ ID NO: 2508228
ugcucccaggaugacugag

SEQ ID NO: 2508230 - RNA, 19 nt, Artificial Sequence
  Description of Artificial Sequence: Synthetic oligonucleotide
  Sense strand starting at position 2678 of SEQ ID NO: 1888065
cauuguguucuguggaauu

SEQ ID NO: 2508231 - RNA, 19 nt, Artificial Sequence
  Description of Artificial Sequence: Synthetic oligonucleotide
  Antisense strand to SEQ ID NO: 2508230
aauuccacagaacacaaug

SEQ ID NO: 2508232 - RNA, 19 nt, Artificial Sequence
  Description of Artificial Sequence: Synthetic oligonucleotide
  Sense strand starting at position 2821 of SEQ ID NO: 1888065
cgucaaagcccacauuauu

SEQ ID NO: 2508233 - RNA, 19 nt, Artificial Sequence
  Description of Artificial Sequence: Synthetic oligonucleotide
  Antisense strand to SEQ ID NO: 2508232
aauaaugugggcuuugacg

SEQ ID NO: 2508234 - RNA, 19 nt, Artificial Sequence
  Description of Artificial Sequence: Synthetic oligonucleotide
  Sense strand starting at position 3069 of SEQ ID NO: 1888065
gaauuucuauguuagggag

SEQ ID NO: 2508235 - RNA, 19 nt, Artificial Sequence
  Description of Artificial Sequence: Synthetic oligonucleotide
  Antisense strand to SEQ ID NO: 2508234
cucccuaacauagaaauuc

SEQ ID NO: 2508236 - RNA, 19 nt, Artificial Sequence
  Description of Artificial Sequence: Synthetic oligonucleotide
  Sense strand starting at position 3073 of SEQ ID NO: 1888065
uucuauguuagggaguacu

SEQ ID NO: 2508237 - RNA, 19 nt, Artificial Sequence
  Description of Artificial Sequence: Synthetic oligonucleotide
  Antisense strand to SEQ ID NO: 2508236
aguacucccuaacauagaa

SEQ ID NO: 2508238 - RNA, 19 nt, Artificial Sequence
  Description of Artificial Sequence: Synthetic oligonucleotide
  Sense strand starting at position 3254 of SEQ ID NO: 1888065
uagugaaauugucugaaug

SEQ ID NO: 2508239 - RNA, 19 nt, Artificial Sequence
  Description of Artificial Sequence: Synthetic oligonucleotide
  Antisense strand to SEQ ID NO: 2508238
cauucagacaauuucacua

SEQ ID NO: 2508240 - RNA, 19 nt, Artificial Sequence
  Description of Artificial Sequence: Synthetic oligonucleotide
  Sense strand starting at position 3255 of SEQ ID NO: 1888065
agugaaauugucugaaugu

SEQ ID NO: 2508241 - RNA, 19 nt, Artificial Sequence
  Description of Artificial Sequence: Synthetic oligonucleotide
  Antisense strand to SEQ ID NO: 2508240
acauucagacaauuucacu

SEQ ID NO: 2508242 - RNA, 19 nt, Artificial Sequence
  Description of Artificial Sequence: Synthetic oligonucleotide
  Sense strand starting at position 3462 of SEQ ID NO: 1888065
gucuacucuuguguaaaug

SEQ ID NO: 2508243 - RNA, 19 nt, Artificial Sequence
  Description of Artificial Sequence: Synthetic oligonucleotide
  Antisense strand to SEQ ID NO: 2508242
cauuuacacaagaguagac

SEQ ID NO: 2508244 - RNA, 19 nt, Artificial Sequence
  Description of Artificial Sequence: Synthetic oligonucleotide
  Sense strand starting at position 3463 of SEQ ID NO: 1888065
ucuacucuuguguaaauga

SEQ ID NO: 2508245 - RNA, 19 nt, Artificial Sequence
  Description of Artificial Sequence: Synthetic oligonucleotide
  Antisense strand to SEQ ID NO: 2508244
ucauuuacacaagaguaga

SEQ ID NO: 2508246 - RNA, 19 nt, Artificial Sequence
  Description of Artificial Sequence: Synthetic oligonucleotide
  Sense strand starting at position 3518 of SEQ ID NO: 1888065
gggucugcuacuuacuuga

SEQ ID NO: 2508247 - RNA, 19 nt, Artificial Sequence
  Description of Artificial Sequence: Synthetic oligonucleotide
  Antisense strand to SEQ ID NO: 2508246
ucaaguaaguagcagaccc

SEQ ID NO: 2508248 - RNA, 19 nt, Artificial Sequence
  Description of Artificial Sequence: Synthetic oligonucleotide
  Sense strand starting at position 3523 of SEQ ID NO: 1888065
ugcuacuuacuugauagua

SEQ ID NO: 2508249 - RNA, 19 nt, Artificial Sequence
  Description of Artificial Sequence: Synthetic oligonucleotide
  Antisense strand to SEQ ID NO: 2508248
uacuaucaaguaaguagca

SEQ ID NO: 2508250 - RNA, 19 nt, Artificial Sequence
  Description of Artificial Sequence: Synthetic oligonucleotide
  Sense strand starting at position 3547 of SEQ ID NO: 1888065
uugauaagacaucgacuuc

SEQ ID NO: 2508251 - RNA, 19 nt, Artificial Sequence
  Description of Artificial Sequence: Synthetic oligonucleotide
  Antisense strand to SEQ ID NO: 2508250
gaagucgaugucuuaucaa

SEQ ID NO: 2508252 - RNA, 19 nt, Artificial Sequence
  Description of Artificial Sequence: Synthetic oligonucleotide
  Sense strand starting at position 3718 of SEQ ID NO: 1888065
guuaaaguauacuccuaca

SEQ ID NO: 2508253 - RNA, 19 nt, Artificial Sequence
  Description of Artificial Sequence: Synthetic oligonucleotide
  Antisense strand to SEQ ID NO: 2508252
uguaggaguauacuuuaac

SEQ ID NO: 2508254 - RNA, 19 nt, Artificial Sequence
  Description of Artificial Sequence: Synthetic oligonucleotide
  Sense strand starting at position 265 of SEQ ID NO: 1888066
cugccaucaucaguacuuu

SEQ ID NO: 2508255 - RNA, 19 nt, Artificial Sequence
  Description of Artificial Sequence: Synthetic oligonucleotide
  Antisense strand to SEQ ID NO: 2508254
aaaguacugaugauggcag

SEQ ID NO: 2508256 - RNA, 19 nt, Artificial Sequence
  Description of Artificial Sequence: Synthetic oligonucleotide
  Sense strand starting at position 310 of SEQ ID NO: 1888066
auaauagcccucugaggaa

SEQ ID NO: 2508257 - RNA, 19 nt, Artificial Sequence
  Description of Artificial Sequence: Synthetic oligonucleotide
  Antisense strand to SEQ ID NO: 2508256
uuccucagagggcuauuau

SEQ ID NO: 2508258 - RNA, 19 nt, Artificial Sequence
  Description of Artificial Sequence: Synthetic oligonucleotide
  Sense strand starting at position 405 of SEQ ID NO: 1888066
cagugagucagugggcaau

SEQ ID NO: 2508259 - RNA, 19 nt, Artificial Sequence
  Description of Artificial Sequence: Synthetic oligonucleotide
  Antisense strand to SEQ ID NO: 2508258
auugcccacugacucacug

SEQ ID NO: 2508260 - RNA, 19 nt, Artificial Sequence
  Description of Artificial Sequence: Synthetic oligonucleotide
  Sense strand starting at position 407 of SEQ ID NO: 1888066
gugagucagugggcaauau

SEQ ID NO: 2508261 - RNA, 19 nt, Artificial Sequence
  Description of Artificial Sequence: Synthetic oligonucleotide
  Antisense strand to SEQ ID NO: 2508260
auauugcccacugacucac

SEQ ID NO: 2508262 - RNA, 19 nt, Artificial Sequence
  Description of Artificial Sequence: Synthetic oligonucleotide
  Sense strand starting at position 411 of SEQ ID NO: 1888066
gucagugggcaauaugauu

SEQ ID NO: 2508263 - RNA, 19 nt, Artificial Sequence
  Description of Artificial Sequence: Synthetic oligonucleotide
  Antisense strand to SEQ ID NO: 2508262
aaucauauugcccacugac

SEQ ID NO: 2508264 - RNA, 19 nt, Artificial Sequence
  Description of Artificial Sequence: Synthetic oligonucleotide
  Sense strand starting at position 417 of SEQ ID NO: 1888066
gggcaauaugauuggugga

SEQ ID NO: 2508265 - RNA, 19 nt, Artificial Sequence
  Description of Artificial Sequence: Synthetic oligonucleotide
  Antisense strand to SEQ ID NO: 2508264
uccaccaaucauauugccc

SEQ ID NO: 2508266 - RNA, 19 nt, Artificial Sequence
  Description of Artificial Sequence: Synthetic oligonucleotide
  Sense strand starting at position 580 of SEQ ID NO: 1888066
aaguuugaguagucccagu

SEQ ID NO: 2508267 - RNA, 19 nt, Artificial Sequence
  Description of Artificial Sequence: Synthetic oligonucleotide
  Antisense strand to SEQ ID NO: 2508266
acugggacuacucaaacuu

SEQ ID NO: 2508268 - RNA, 19 nt, Artificial Sequence
  Description of Artificial Sequence: Synthetic oligonucleotide
  Sense strand starting at position 607 of SEQ ID NO: 1888066
cuaaguuccuaaguuauau

SEQ ID NO: 2508269 - RNA, 19 nt, Artificial Sequence
  Description of Artificial Sequence: Synthetic oligonucleotide
  Antisense strand to SEQ ID NO: 2508268
auauaacuuaggaacuuag

SEQ ID NO: 2508270 - RNA, 19 nt, Artificial Sequence
  Description of Artificial Sequence: Synthetic oligonucleotide
  Sense strand starting at position 700 of SEQ ID NO: 1888066
ccgcuuuccagaugaugaa

SEQ ID NO: 2508271 - RNA, 19 nt, Artificial Sequence
  Description of Artificial Sequence: Synthetic oligonucleotide
  Antisense strand to SEQ ID NO: 2508270
uucaucaucuggaaagcgg

SEQ ID NO: 2508272 - RNA, 19 nt, Artificial Sequence
  Description of Artificial Sequence: Synthetic oligonucleotide
  Sense strand starting at position 701 of SEQ ID NO: 1888066
cgcuuuccagaugaugaaa

SEQ ID NO: 2508273 - RNA, 19 nt, Artificial Sequence
  Description of Artificial Sequence: Synthetic oligonucleotide
  Antisense strand to SEQ ID NO: 2508272
uuucaucaucuggaaagcg

SEQ ID NO: 2508274 - RNA, 19 nt, Artificial Sequence
  Description of Artificial Sequence: Synthetic oligonucleotide
  Sense strand starting at position 715 of SEQ ID NO: 1888066
ugaaaugagccuggaccaa

SEQ ID NO: 2508275 - RNA, 19 nt, Artificial Sequence
  Description of Artificial Sequence: Synthetic oligonucleotide
  Antisense strand to SEQ ID NO: 2508274
uugguccaggcucauuuca

SEQ ID NO: 2508276 - RNA, 19 nt, Artificial Sequence
  Description of Artificial Sequence: Synthetic oligonucleotide
  Sense strand starting at position 743 of SEQ ID NO: 1888066
cuaagucuuugaguuccaa

SEQ ID NO: 2508277 - RNA, 19 nt, Artificial Sequence
  Description of Artificial Sequence: Synthetic oligonucleotide
  Antisense strand to SEQ ID NO: 2508276
uuggaacucaaagacuuag

SEQ ID NO: 2508278 - RNA, 19 nt, Artificial Sequence
  Description of Artificial Sequence: Synthetic oligonucleotide
  Sense strand starting at position 1489 of SEQ ID NO: 1888066
cggcuguuucugggaggga

SEQ ID NO: 2508279 - RNA, 19 nt, Artificial Sequence
  Description of Artificial Sequence: Synthetic oligonucleotide
  Antisense strand to SEQ ID NO: 2508278
ucccucccagaaacagccg

SEQ ID NO: 2508280 - RNA, 19 nt, Artificial Sequence
  Description of Artificial Sequence: Synthetic oligonucleotide
  Sense strand starting at position 1581 of SEQ ID NO: 1888066
gugagcaguccuggaagga

SEQ ID NO: 2508281 - RNA, 19 nt, Artificial Sequence
  Description of Artificial Sequence: Synthetic oligonucleotide
  Antisense strand to SEQ ID NO: 2508280
uccuuccaggacugcucac

SEQ ID NO: 2508282 - RNA, 19 nt, Artificial Sequence
  Description of Artificial Sequence: Synthetic oligonucleotide
  Sense strand starting at position 2037 of SEQ ID NO: 1888066
ccgugaaugucauuacuca

SEQ ID NO: 2508283 - RNA, 19 nt, Artificial Sequence
  Description of Artificial Sequence: Synthetic oligonucleotide
  Antisense strand to SEQ ID NO: 2508282
ugaguaaugacauucacgg

SEQ ID NO: 2508284 - RNA, 19 nt, Artificial Sequence
  Description of Artificial Sequence: Synthetic oligonucleotide
  Sense strand starting at position 2038 of SEQ ID NO: 1888066
cgugaaugucauuacucac

SEQ ID NO: 2508285 - RNA, 19 nt, Artificial Sequence
  Description of Artificial Sequence: Synthetic oligonucleotide
  Antisense strand to SEQ ID NO: 2508284
gugaguaaugacauucacg

SEQ ID NO: 2508286 - RNA, 19 nt, Artificial Sequence
  Description of Artificial Sequence: Synthetic oligonucleotide
  Sense strand starting at position 2198 of SEQ ID NO: 1888066
ccaaacagcucaguguauu

SEQ ID NO: 2508287 - RNA, 19 nt, Artificial Sequence
  Description of Artificial Sequence: Synthetic oligonucleotide
  Antisense strand to SEQ ID NO: 2508286
aauacacugagcuguuugg

SEQ ID NO: 2508288 - RNA, 19 nt, Artificial Sequence
  Description of Artificial Sequence: Synthetic oligonucleotide
  Sense strand starting at position 2281 of SEQ ID NO: 1888066
ggcaaauacuucuuaacug

SEQ ID NO: 2508289 - RNA, 19 nt, Artificial Sequence
  Description of Artificial Sequence: Synthetic oligonucleotide
  Antisense strand to SEQ ID NO: 2508288
caguuaagaaguauuugcc

SEQ ID NO: 2508290 - RNA, 19 nt, Artificial Sequence
  Description of Artificial Sequence: Synthetic oligonucleotide
  Sense strand starting at position 2323 of SEQ ID NO: 1888066
agaaauuagugucuggaaa

SEQ ID NO: 2508291 - RNA, 19 nt, Artificial Sequence
  Description of Artificial Sequence: Synthetic oligonucleotide
  Antisense strand to SEQ ID NO: 2508290
uuuccagacacuaauuucu

SEQ ID NO: 2508292 - RNA, 19 nt, Artificial Sequence
  Description of Artificial Sequence: Synthetic oligonucleotide
  Sense strand starting at position 2324 of SEQ ID NO: 1888066
gaaauuagugucuggaaau

SEQ ID NO: 2508293 - RNA, 19 nt, Artificial Sequence
  Description of Artificial Sequence: Synthetic oligonucleotide
  Antisense strand to SEQ ID NO: 2508292
auuuccagacacuaauuuc

SEQ ID NO: 2508294 - RNA, 19 nt, Artificial Sequence
  Description of Artificial Sequence: Synthetic oligonucleotide
  Sense strand starting at position 2357 of SEQ ID NO: 1888066
ugaagcuguuaucuucuaa

SEQ ID NO: 2508295 - RNA, 19 nt, Artificial Sequence
  Description of Artificial Sequence: Synthetic oligonucleotide
  Antisense strand to SEQ ID NO: 2508294
uuagaagauaacagcuuca

SEQ ID NO: 2508296 - RNA, 19 nt, Artificial Sequence
  Description of Artificial Sequence: Synthetic oligonucleotide
  Sense strand starting at position 2407 of SEQ ID NO: 1888066
ggaacagacuaugauuuau

SEQ ID NO: 2508297 - RNA, 19 nt, Artificial Sequence
  Description of Artificial Sequence: Synthetic oligonucleotide
  Antisense strand to SEQ ID NO: 2508296
auaaaucauagucuguucc

SEQ ID NO: 2508298 - RNA, 19 nt, Artificial Sequence
  Description of Artificial Sequence: Synthetic oligonucleotide
  Sense strand starting at position 2647 of SEQ ID NO: 1888066
uagccauaaggucaugaua

SEQ ID NO: 2508299 - RNA, 19 nt, Artificial Sequence
  Description of Artificial Sequence: Synthetic oligonucleotide
  Antisense strand to SEQ ID NO: 2508298
uaucaugaccuuauggcua

SEQ ID NO: 2508300 - RNA, 19 nt, Artificial Sequence
  Description of Artificial Sequence: Synthetic oligonucleotide
  Sense strand starting at position 2771 of SEQ ID NO: 1888066
gaaggcgaggcucagaaau

SEQ ID NO: 2508301 - RNA, 19 nt, Artificial Sequence
  Description of Artificial Sequence: Synthetic oligonucleotide
  Antisense strand to SEQ ID NO: 2508300
auuucugagccucgccuuc

SEQ ID NO: 2508302 - RNA, 19 nt, Artificial Sequence
  Description of Artificial Sequence: Synthetic oligonucleotide
  Sense strand starting at position 2924 of SEQ ID NO: 1888066
accuauacuuccguuacua

SEQ ID NO: 2508303 - RNA, 19 nt, Artificial Sequence
  Description of Artificial Sequence: Synthetic oligonucleotide
  Antisense strand to SEQ ID NO: 2508302
uaguaacggaaguauaggu

SEQ ID NO: 2508304 - RNA, 19 nt, Artificial Sequence
  Description of Artificial Sequence: Synthetic oligonucleotide
  Sense strand starting at position 2926 of SEQ ID NO: 1888066
cuauacuuccguuacuaua

SEQ ID NO: 2508305 - RNA, 19 nt, Artificial Sequence
  Description of Artificial Sequence: Synthetic oligonucleotide
  Antisense strand to SEQ ID NO: 2508304
uauaguaacggaaguauag

SEQ ID NO: 2508306 - RNA, 19 nt, Artificial Sequence
  Description of Artificial Sequence: Synthetic oligonucleotide
  Sense strand starting at position 2963 of SEQ ID NO: 1888066
auuuaccauugaggaaaua

SEQ ID NO: 2508307 - RNA, 19 nt, Artificial Sequence
  Description of Artificial Sequence: Synthetic oligonucleotide
  Antisense strand to SEQ ID NO: 2508306
uauuuccucaaugguaaau

SEQ ID NO: 2508308 - RNA, 19 nt, Artificial Sequence
  Description of Artificial Sequence: Synthetic oligonucleotide
  Sense strand starting at position 3024 of SEQ ID NO: 1888066
ggaagauaagcucaguccu

SEQ ID NO: 2508309 - RNA, 19 nt, Artificial Sequence
  Description of Artificial Sequence: Synthetic oligonucleotide
  Antisense strand to SEQ ID NO: 2508308
aggacugagcuuaucuucc

SEQ ID NO: 2508310 - RNA, 19 nt, Artificial Sequence
  Description of Artificial Sequence: Synthetic oligonucleotide
  Sense strand starting at position 3382 of SEQ ID NO: 1888066
cacaaucugguagguuuaa

SEQ ID NO: 2508311 - RNA, 19 nt, Artificial Sequence
  Description of Artificial Sequence: Synthetic oligonucleotide
  Antisense strand to SEQ ID NO: 2508310
uuaaaccuaccagauugug

SEQ ID NO: 2508312 - RNA, 19 nt, Artificial Sequence
  Description of Artificial Sequence: Synthetic oligonucleotide
  Sense strand starting at position 3398 of SEQ ID NO: 1888066
uaacaagugccauagguga

SEQ ID NO: 2508313 - RNA, 19 nt, Artificial Sequence
  Description of Artificial Sequence: Synthetic oligonucleotide
  Antisense strand to SEQ ID NO: 2508312
ucaccuauggcacuuguua

SEQ ID NO: 2508314 - RNA, 19 nt, Artificial Sequence
  Description of Artificial Sequence: Synthetic oligonucleotide
  Sense strand starting at position 3400 of SEQ ID NO: 1888066
acaagugccauaggugauu

SEQ ID NO: 2508315 - RNA, 19 nt, Artificial Sequence
  Description of Artificial Sequence: Synthetic oligonucleotide
  Antisense strand to SEQ ID NO: 2508314
aaucaccuauggcacuugu

SEQ ID NO: 2508316 - RNA, 19 nt, Artificial Sequence
  Description of Artificial Sequence: Synthetic oligonucleotide
  Sense strand starting at position 3405 of SEQ ID NO: 1888066
ugccauaggugauucucau

SEQ ID NO: 2508317 - RNA, 19 nt, Artificial Sequence
  Description of Artificial Sequence: Synthetic oligonucleotide
  Antisense strand to SEQ ID NO: 2508316
augagaaucaccuauggca

SEQ ID NO: 2508318 - RNA, 19 nt, Artificial Sequence
  Description of Artificial Sequence: Synthetic oligonucleotide
  Sense strand starting at position 3418 of SEQ ID NO: 1888066
ucucaugagaugcaagguu

SEQ ID NO: 2508319 - RNA, 19 nt, Artificial Sequence
  Description of Artificial Sequence: Synthetic oligonucleotide
  Antisense strand to SEQ ID NO: 2508318
aaccuugcaucucaugaga

SEQ ID NO: 2508320 - RNA, 19 nt, Artificial Sequence
  Description of Artificial Sequence: Synthetic oligonucleotide
  Sense strand starting at position 3425 of SEQ ID NO: 1888066
agaugcaagguuggugaua

SEQ ID NO: 2508321 - RNA, 19 nt, Artificial Sequence
  Description of Artificial Sequence: Synthetic oligonucleotide
  Antisense strand to SEQ ID NO: 2508320
uaucaccaaccuugcaucu

SEQ ID NO: 2508322 - RNA, 19 nt, Artificial Sequence
  Description of Artificial Sequence: Synthetic oligonucleotide
  Sense strand starting at position 3567 of SEQ ID NO: 1888066
gcaauagucagugaguucu

SEQ ID NO: 2508323 - RNA, 19 nt, Artificial Sequence
  Description of Artificial Sequence: Synthetic oligonucleotide
  Antisense strand to SEQ ID NO: 2508322
agaacucacugacuauugc

SEQ ID NO: 2508324 - RNA, 19 nt, Artificial Sequence
  Description of Artificial Sequence: Synthetic oligonucleotide
  Sense strand starting at position 3605 of SEQ ID NO: 1888066
aaaguauguggucaggaac

SEQ ID NO: 2508325 - RNA, 19 nt, Artificial Sequence
  Description of Artificial Sequence: Synthetic oligonucleotide
  Antisense strand to SEQ ID NO: 2508324
guuccugaccacauacuuu

SEQ ID NO: 2508326 - RNA, 19 nt, Artificial Sequence
  Description of Artificial Sequence: Synthetic oligonucleotide
  Sense strand starting at position 3608 of SEQ ID NO: 1888066
guauguggucaggaacaga

SEQ ID NO: 2508327 - RNA, 19 nt, Artificial Sequence
  Description of Artificial Sequence: Synthetic oligonucleotide
  Antisense strand to SEQ ID NO: 2508326
ucuguuccugaccacauac

SEQ ID NO: 2508328 - RNA, 19 nt, Artificial Sequence
  Description of Artificial Sequence: Synthetic oligonucleotide
  Sense strand starting at position 3890 of SEQ ID NO: 1888066
ucggguauuucuuuaucac

SEQ ID NO: 2508329 - RNA, 19 nt, Artificial Sequence
  Description of Artificial Sequence: Synthetic oligonucleotide
  Antisense strand to SEQ ID NO: 2508328
gugauaaagaaauacccga

SEQ ID NO: 2508330 - RNA, 19 nt, Artificial Sequence
  Description of Artificial Sequence: Synthetic oligonucleotide
  Sense strand starting at position 3910 of SEQ ID NO: 1888066
augugagaauggucuaaca

SEQ ID NO: 2508331 - RNA, 19 nt, Artificial Sequence
  Description of Artificial Sequence: Synthetic oligonucleotide
  Antisense strand to SEQ ID NO: 2508330
uguuagaccauucucacau

SEQ ID NO: 2508332 - RNA, 19 nt, Artificial Sequence
  Description of Artificial Sequence: Synthetic oligonucleotide
  Sense strand starting at position 3921 of SEQ ID NO: 1888066
gucuaacacagcugggaaa

SEQ ID NO: 2508333 - RNA, 19 nt, Artificial Sequence
  Description of Artificial Sequence: Synthetic oligonucleotide
  Antisense strand to SEQ ID NO: 2508332
uuucccagcuguguuagac

SEQ ID NO: 2508334 - RNA, 19 nt, Artificial Sequence
  Description of Artificial Sequence: Synthetic oligonucleotide
  Sense strand starting at position 1013 of SEQ ID NO: 1888067
uugcgcuccuugucuguua

SEQ ID NO: 2508335 - RNA, 19 nt, Artificial Sequence
  Description of Artificial Sequence: Synthetic oligonucleotide
  Antisense strand to SEQ ID NO: 2508334
uaacagacaaggagcgcaa

SEQ ID NO: 2508336 - RNA, 19 nt, Artificial Sequence
  Description of Artificial Sequence: Synthetic oligonucleotide
  Sense strand starting at position 1018 of SEQ ID NO: 1888067
cuccuugucuguuaggaac

SEQ ID NO: 2508337 - RNA, 19 nt, Artificial Sequence
  Description of Artificial Sequence: Synthetic oligonucleotide
  Antisense strand to SEQ ID NO: 2508336
guuccuaacagacaaggag

SEQ ID NO: 2508338 - RNA, 19 nt, Artificial Sequence
  Description of Artificial Sequence: Synthetic oligonucleotide
  Sense strand starting at position 1070 of SEQ ID NO: 1888067
ggguucuucgcgagcuucu

SEQ ID NO: 2508339 - RNA, 19 nt, Artificial Sequence
  Description of Artificial Sequence: Synthetic oligonucleotide
  Antisense strand to SEQ ID NO: 2508338
agaagcucgcgaagaaccc

SEQ ID NO: 2508340 - RNA, 19 nt, Artificial Sequence
  Description of Artificial Sequence: Synthetic oligonucleotide
  Sense strand starting at position 1561 of SEQ ID NO: 1888067
gcaggagucuguuuacccu

SEQ ID NO: 2508341 - RNA, 19 nt, Artificial Sequence
  Description of Artificial Sequence: Synthetic oligonucleotide
  Antisense strand to SEQ ID NO: 2508340
aggguaaacagacuccugc

SEQ ID NO: 2508342 - RNA, 19 nt, Artificial Sequence
  Description of Artificial Sequence: Synthetic oligonucleotide
  Sense strand starting at position 1764 of SEQ ID NO: 1888067
ccgacuuacaugugaguga

SEQ ID NO: 2508343 - RNA, 19 nt, Artificial Sequence
  Description of Artificial Sequence: Synthetic oligonucleotide
  Antisense strand to SEQ ID NO: 2508342
ucacucacauguaagucgg

SEQ ID NO: 2508344 - RNA, 19 nt, Artificial Sequence
  Description of Artificial Sequence: Synthetic oligonucleotide
  Sense strand starting at position 2363 of SEQ ID NO: 1888067
gagagccgaauucgaauua

SEQ ID NO: 2508345 - RNA, 19 nt, Artificial Sequence
  Description of Artificial Sequence: Synthetic oligonucleotide
  Antisense strand to SEQ ID NO: 2508344
uaauucgaauucggcucuc

SEQ ID NO: 2508346 - RNA, 19 nt, Artificial Sequence
  Description of Artificial Sequence: Synthetic oligonucleotide
  Sense strand starting at position 2364 of SEQ ID NO: 1888067
agagccgaauucgaauuau

SEQ ID NO: 2508347 - RNA, 19 nt, Artificial Sequence
  Description of Artificial Sequence: Synthetic oligonucleotide
  Antisense strand to SEQ ID NO: 2508346
auaauucgaauucggcucu

SEQ ID NO: 2508348 - RNA, 19 nt, Artificial Sequence
  Description of Artificial Sequence: Synthetic oligonucleotide
  Sense strand starting at position 2398 of SEQ ID NO: 1888067
ggaguuucguaucuucgga

SEQ ID NO: 2508349 - RNA, 19 nt, Artificial Sequence
  Description of Artificial Sequence: Synthetic oligonucleotide
  Antisense strand to SEQ ID NO: 2508348
uccgaagauacgaaacucc

SEQ ID NO: 2508350 - RNA, 19 nt, Artificial Sequence
  Description of Artificial Sequence: Synthetic oligonucleotide
  Sense strand starting at position 2405 of SEQ ID NO: 1888067
cguaucuucggacgagaaa

SEQ ID NO: 2508351 - RNA, 19 nt, Artificial Sequence
  Description of Artificial Sequence: Synthetic oligonucleotide
  Antisense strand to SEQ ID NO: 2508350
uuucucguccgaagauacg

SEQ ID NO: 2508352 - RNA, 19 nt, Artificial Sequence
  Description of Artificial Sequence: Synthetic oligonucleotide
  Sense strand starting at position 2608 of SEQ ID NO: 1888067
cgugaacuuguuugagggu

SEQ ID NO: 2508353 - RNA, 19 nt, Artificial Sequence
  Description of Artificial Sequence: Synthetic oligonucleotide
  Antisense strand to SEQ ID NO: 2508352
acccucaaacaaguucacg

SEQ ID NO: 2508354 - RNA, 19 nt, Artificial Sequence
  Description of Artificial Sequence: Synthetic oligonucleotide
  Sense strand starting at position 2609 of SEQ ID NO: 1888067
gugaacuuguuugaggguu

SEQ ID NO: 2508355 - RNA, 19 nt, Artificial Sequence
  Description of Artificial Sequence: Synthetic oligonucleotide
  Antisense strand to SEQ ID NO: 2508354
aacccucaaacaaguucac

SEQ ID NO: 2508356 - RNA, 19 nt, Artificial Sequence
  Description of Artificial Sequence: Synthetic oligonucleotide
  Sense strand starting at position 2685 of SEQ ID NO: 1888067
ggagcaggguuacuaaauu

SEQ ID NO: 2508357 - RNA, 19 nt, Artificial Sequence
  Description of Artificial Sequence: Synthetic oligonucleotide
  Antisense strand to SEQ ID NO: 2508356
aauuuaguaacccugcucc

SEQ ID NO: 2508358 - RNA, 19 nt, Artificial Sequence
  Description of Artificial Sequence: Synthetic oligonucleotide
  Sense strand starting at position 2776 of SEQ ID NO: 1888067
ugggauacgguuuauucau

SEQ ID NO: 2508359 - RNA, 19 nt, Artificial Sequence
  Description of Artificial Sequence: Synthetic oligonucleotide
  Antisense strand to SEQ ID NO: 2508358
augaauaaaccguauccca

SEQ ID NO: 2508360 - RNA, 19 nt, Artificial Sequence
  Description of Artificial Sequence: Synthetic oligonucleotide
  Sense strand starting at position 2881 of SEQ ID NO: 1888067
agcagugucuuggauggga

SEQ ID NO: 2508361 - RNA, 19 nt, Artificial Sequence
  Description of Artificial Sequence: Synthetic oligonucleotide
  Antisense strand to SEQ ID NO: 2508360
ucccauccaagacacugcu

SEQ ID NO: 2508362 - RNA, 19 nt, Artificial Sequence
  Description of Artificial Sequence: Synthetic oligonucleotide
  Sense strand starting at position 2883 of SEQ ID NO: 1888067
cagugucuuggaugggaca

SEQ ID NO: 2508363 - RNA, 19 nt, Artificial Sequence
  Description of Artificial Sequence: Synthetic oligonucleotide
  Antisense strand to SEQ ID NO: 2508362
ugucccauccaagacacug

SEQ ID NO: 2508364 - RNA, 19 nt, Artificial Sequence
  Description of Artificial Sequence: Synthetic oligonucleotide
  Sense strand starting at position 2885 of SEQ ID NO: 1888067
gugucuuggaugggacaca

SEQ ID NO: 2508365 - RNA, 19 nt, Artificial Sequence
  Description of Artificial Sequence: Synthetic oligonucleotide
  Antisense strand to SEQ ID NO: 2508364
ugugucccauccaagacac

SEQ ID NO: 2508366 - RNA, 19 nt, Artificial Sequence
  Description of Artificial Sequence: Synthetic oligonucleotide
  Sense strand starting at position 2989 of SEQ ID NO: 1888067
acuuaagauguuugaugga

SEQ ID NO: 2508367 - RNA, 19 nt, Artificial Sequence
  Description of Artificial Sequence: Synthetic oligonucleotide
  Antisense strand to SEQ ID NO: 2508366
uccaucaaacaucuuaagu

SEQ ID NO: 2508368 - RNA, 19 nt, Artificial Sequence
  Description of Artificial Sequence: Synthetic oligonucleotide
  Sense strand starting at position 2992 of SEQ ID NO: 1888067
uaagauguuugauggagaa

SEQ ID NO: 2508369 - RNA, 19 nt, Artificial Sequence
  Description of Artificial Sequence: Synthetic oligonucleotide
  Antisense strand to SEQ ID NO: 2508368
uucuccaucaaacaucuua

SEQ ID NO: 2508370 - RNA, 19 nt, Artificial Sequence
  Description of Artificial Sequence: Synthetic oligonucleotide
  Sense strand starting at position 3085 of SEQ ID NO: 1888067
accagaggccuugagcaaa

SEQ ID NO: 2508371 - RNA, 19 nt, Artificial Sequence
  Description of Artificial Sequence: Synthetic oligonucleotide
  Antisense strand to SEQ ID NO: 2508370
uuugcucaaggccucuggu

SEQ ID NO: 2508372 - RNA, 19 nt, Artificial Sequence
  Description of Artificial Sequence: Synthetic oligonucleotide
  Sense strand starting at position 3190 of SEQ ID NO: 1888067
uuugcuccacuucgaguaa

SEQ ID NO: 2508373 - RNA, 19 nt, Artificial Sequence
  Description of Artificial Sequence: Synthetic oligonucleotide
  Antisense strand to SEQ ID NO: 2508372
uuacucgaaguggagcaaa

SEQ ID NO: 2508374 - RNA, 19 nt, Artificial Sequence
  Description of Artificial Sequence: Synthetic oligonucleotide
  Sense strand starting at position 3194 of SEQ ID NO: 1888067
cuccacuucgaguaagaaa

SEQ ID NO: 2508375 - RNA, 19 nt, Artificial Sequence
  Description of Artificial Sequence: Synthetic oligonucleotide
  Antisense strand to SEQ ID NO: 2508374
uuucuuacucgaaguggag

SEQ ID NO: 2508376 - RNA, 19 nt, Artificial Sequence
  Description of Artificial Sequence: Synthetic oligonucleotide
  Sense strand starting at position 3213 of SEQ ID NO: 1888067
aggugugacagaugaagau

SEQ ID NO: 2508377 - RNA, 19 nt, Artificial Sequence
  Description of Artificial Sequence: Synthetic oligonucleotide
  Antisense strand to SEQ ID NO: 2508376
aucuucaucugucacaccu

SEQ ID NO: 2508378 - RNA, 19 nt, Artificial Sequence
  Description of Artificial Sequence: Synthetic oligonucleotide
  Sense strand starting at position 3520 of SEQ ID NO: 1888067
ggaacuauccuagguugau

SEQ ID NO: 2508379 - RNA, 19 nt, Artificial Sequence
  Description of Artificial Sequence: Synthetic oligonucleotide
  Antisense strand to SEQ ID NO: 2508378
aucaaccuaggauaguucc

SEQ ID NO: 2508380 - RNA, 19 nt, Artificial Sequence
  Description of Artificial Sequence: Synthetic oligonucleotide
  Sense strand starting at position 3521 of SEQ ID NO: 1888067
gaacuauccuagguugaug

SEQ ID NO: 2508381 - RNA, 19 nt, Artificial Sequence
  Description of Artificial Sequence: Synthetic oligonucleotide
  Antisense strand to SEQ ID NO: 2508380
caucaaccuaggauaguuc

SEQ ID NO: 2508382 - RNA, 19 nt, Artificial Sequence
  Description of Artificial Sequence: Synthetic oligonucleotide
  Sense strand starting at position 3581 of SEQ ID NO: 1888067
acaccugaaugugcucaua

SEQ ID NO: 2508383 - RNA, 19 nt, Artificial Sequence
  Description of Artificial Sequence: Synthetic oligonucleotide
  Antisense strand to SEQ ID NO: 2508382
uaugagcacauucaggugu

SEQ ID NO: 2508384 - RNA, 19 nt, Artificial Sequence
  Description of Artificial Sequence: Synthetic oligonucleotide
  Sense strand starting at position 3584 of SEQ ID NO: 1888067
ccugaaugugcucauagga

SEQ ID NO: 2508385 - RNA, 19 nt, Artificial Sequence
  Description of Artificial Sequence: Synthetic oligonucleotide
  Antisense strand to SEQ ID NO: 2508384
uccuaugagcacauucagg

SEQ ID NO: 2508386 - RNA, 19 nt, Artificial Sequence
  Description of Artificial Sequence: Synthetic oligonucleotide
  Sense strand starting at position 3610 of SEQ ID NO: 1888067
gcaguaaggccucagaauc

SEQ ID NO: 2508387 - RNA, 19 nt, Artificial Sequence
  Description of Artificial Sequence: Synthetic oligonucleotide
  Antisense strand to SEQ ID NO: 2508386
gauucugaggccuuacugc

SEQ ID NO: 2508388 - RNA, 19 nt, Artificial Sequence
  Description of Artificial Sequence: Synthetic oligonucleotide
  Sense strand starting at position 3617 of SEQ ID NO: 1888067
ggccucagaaucgaugauu

SEQ ID NO: 2508389 - RNA, 19 nt, Artificial Sequence
  Description of Artificial Sequence: Synthetic oligonucleotide
  Antisense strand to SEQ ID NO: 2508388
aaucaucgauucugaggcc

SEQ ID NO: 2508390 - RNA, 19 nt, Artificial Sequence
  Description of Artificial Sequence: Synthetic oligonucleotide
  Sense strand starting at position 3620 of SEQ ID NO: 1888067
cucagaaucgaugauuccu

SEQ ID NO: 2508391 - RNA, 19 nt, Artificial Sequence
  Description of Artificial Sequence: Synthetic oligonucleotide
  Antisense strand to SEQ ID NO: 2508390
aggaaucaucgauucugag

SEQ ID NO: 2508392 - RNA, 19 nt, Artificial Sequence
  Description of Artificial Sequence: Synthetic oligonucleotide
  Sense strand starting at position 3658 of SEQ ID NO: 1888067
uagugaggcucacuaccau

SEQ ID NO: 2508393 - RNA, 19 nt, Artificial Sequence
  Description of Artificial Sequence: Synthetic oligonucleotide
  Antisense strand to SEQ ID NO: 2508392
augguagugagccucacua

SEQ ID NO: 2508394 - RNA, 19 nt, Artificial Sequence
  Description of Artificial Sequence: Synthetic oligonucleotide
  Sense strand starting at position 3715 of SEQ ID NO: 1888067
gguucuauaucuuuagaug

SEQ ID NO: 2508395 - RNA, 19 nt, Artificial Sequence
  Description of Artificial Sequence: Synthetic oligonucleotide
  Antisense strand to SEQ ID NO: 2508394
caucuaaagauauagaacc

SEQ ID NO: 2508396 - RNA, 19 nt, Artificial Sequence
  Description of Artificial Sequence: Synthetic oligonucleotide
  Sense strand starting at position 3716 of SEQ ID NO: 1888067
guucuauaucuuuagaugg

SEQ ID NO: 2508397 - RNA, 19 nt, Artificial Sequence
  Description of Artificial Sequence: Synthetic oligonucleotide
  Antisense strand to SEQ ID NO: 2508396
ccaucuaaagauauagaac

SEQ ID NO: 2508398 - RNA, 19 nt, Artificial Sequence
  Description of Artificial Sequence: Synthetic oligonucleotide
  Sense strand starting at position 3718 of SEQ ID NO: 1888067
ucuauaucuuuagauggua

SEQ ID NO: 2508399 - RNA, 19 nt, Artificial Sequence
  Description of Artificial Sequence: Synthetic oligonucleotide
  Antisense strand to SEQ ID NO: 2508398
uaccaucuaaagauauaga

SEQ ID NO: 2508400 - RNA, 19 nt, Artificial Sequence
  Description of Artificial Sequence: Synthetic oligonucleotide
  Sense strand starting at position 3749 of SEQ ID NO: 1888067
cuggcugaauuugauugau

SEQ ID NO: 2508401 - RNA, 19 nt, Artificial Sequence
  Description of Artificial Sequence: Synthetic oligonucleotide
  Antisense strand to SEQ ID NO: 2508400
aucaaucaaauucagccag

SEQ ID NO: 2508402 - RNA, 19 nt, Artificial Sequence
  Description of Artificial Sequence: Synthetic oligonucleotide
  Sense strand starting at position 3785 of SEQ ID NO: 1888067
guuaaagacuuguaagagg

SEQ ID NO: 2508403 - RNA, 19 nt, Artificial Sequence
  Description of Artificial Sequence: Synthetic oligonucleotide
  Antisense strand to SEQ ID NO: 2508402
ccucuuacaagucuuuaac

SEQ ID NO: 2508404 - RNA, 19 nt, Artificial Sequence
  Description of Artificial Sequence: Synthetic oligonucleotide
  Sense strand starting at position 3788 of SEQ ID NO: 1888067
aaagacuuguaagagggaa

SEQ ID NO: 2508405 - RNA, 19 nt, Artificial Sequence
  Description of Artificial Sequence: Synthetic oligonucleotide
  Antisense strand to SEQ ID NO: 2508404
uucccucuuacaagucuuu

SEQ ID NO: 2508406 - RNA, 19 nt, Artificial Sequence
  Description of Artificial Sequence: Synthetic oligonucleotide
  Sense strand starting at position 3823 of SEQ ID NO: 1888067
uuuguuaugcuccauuugu

SEQ ID NO: 2508407 - RNA, 19 nt, Artificial Sequence
  Description of Artificial Sequence: Synthetic oligonucleotide
  Antisense strand to SEQ ID NO: 2508406
acaaauggagcauaacaaa

SEQ ID NO: 2508408 - RNA, 19 nt, Artificial Sequence
  Description of Artificial Sequence: Synthetic oligonucleotide
  Sense strand starting at position 3860 of SEQ ID NO: 1888067
cugcuucuacuguggcaaa

SEQ ID NO: 2508409 - RNA, 19 nt, Artificial Sequence
  Description of Artificial Sequence: Synthetic oligonucleotide
  Antisense strand to SEQ ID NO: 2508408
uuugccacaguagaagcag

SEQ ID NO: 2508410 - RNA, 19 nt, Artificial Sequence
  Description of Artificial Sequence: Synthetic oligonucleotide
  Sense strand starting at position 3884 of SEQ ID NO: 1888067
gauacauugucuuuaagag

SEQ ID NO: 2508411 - RNA, 19 nt, Artificial Sequence
  Description of Artificial Sequence: Synthetic oligonucleotide
  Antisense strand to SEQ ID NO: 2508410
cucuuaaagacaauguauc

SEQ ID NO: 2508412 - RNA, 19 nt, Artificial Sequence
  Description of Artificial Sequence: Synthetic oligonucleotide
  Sense strand starting at position 3935 of SEQ ID NO: 1888067
auacuuaugccaggagcua

SEQ ID NO: 2508413 - RNA, 19 nt, Artificial Sequence
  Description of Artificial Sequence: Synthetic oligonucleotide
  Antisense strand to SEQ ID NO: 2508412
uagcuccuggcauaaguau

SEQ ID NO: 2508414 - RNA, 19 nt, Artificial Sequence
  Description of Artificial Sequence: Synthetic oligonucleotide
  Sense strand starting at position 55 of SEQ ID NO: 1888068
aggguuaaauacugggauu

SEQ ID NO: 2508415 - RNA, 19 nt, Artificial Sequence
  Description of Artificial Sequence: Synthetic oligonucleotide
  Antisense strand to SEQ ID NO: 2508414
aaucccaguauuuaacccu

SEQ ID NO: 2508416 - RNA, 19 nt, Artificial Sequence
  Description of Artificial Sequence: Synthetic oligonucleotide
  Sense strand starting at position 131 of SEQ ID NO: 1888068
gguccuuucucagcuuaua

SEQ ID NO: 2508417 - RNA, 19 nt, Artificial Sequence
  Description of Artificial Sequence: Synthetic oligonucleotide
  Antisense strand to SEQ ID NO: 2508416
uauaagcugagaaaggacc

SEQ ID NO: 2508418 - RNA, 19 nt, Artificial Sequence
  Description of Artificial Sequence: Synthetic oligonucleotide
  Sense strand starting at position 140 of SEQ ID NO: 1888068
ucagcuuauaguggugauu

SEQ ID NO: 2508419 - RNA, 19 nt, Artificial Sequence
  Description of Artificial Sequence: Synthetic oligonucleotide
  Antisense strand to SEQ ID NO: 2508418
aaucaccacuauaagcuga

SEQ ID NO: 2508420 - RNA, 19 nt, Artificial Sequence
  Description of Artificial Sequence: Synthetic oligonucleotide
  Sense strand starting at position 370 of SEQ ID NO: 1888068
ugagaugugcugagugguu

SEQ ID NO: 2508421 - RNA, 19 nt, Artificial Sequence
  Description of Artificial Sequence: Synthetic oligonucleotide
  Antisense strand to SEQ ID NO: 2508420
aaccacucagcacaucuca

SEQ ID NO: 2508422 - RNA, 19 nt, Artificial Sequence
  Description of Artificial Sequence: Synthetic oligonucleotide
  Sense strand starting at position 375 of SEQ ID NO: 1888068
ugugcugagugguucugaa

SEQ ID NO: 2508423 - RNA, 19 nt, Artificial Sequence
  Description of Artificial Sequence: Synthetic oligonucleotide
  Antisense strand to SEQ ID NO: 2508422
uucagaaccacucagcaca

SEQ ID NO: 2508424 - RNA, 19 nt, Artificial Sequence
  Description of Artificial Sequence: Synthetic oligonucleotide
  Sense strand starting at position 548 of SEQ ID NO: 1888068
ucaucuuuguaaguacgau

SEQ ID NO: 2508425 - RNA, 19 nt, Artificial Sequence
  Description of Artificial Sequence: Synthetic oligonucleotide
  Antisense strand to SEQ ID NO: 2508424
aucguacuuacaaagauga

SEQ ID NO: 2508426 - RNA, 19 nt, Artificial Sequence
  Description of Artificial Sequence: Synthetic oligonucleotide
  Sense strand starting at position 574 of SEQ ID NO: 1888068
uugaaugugugaucuuuau

SEQ ID NO: 2508427 - RNA, 19 nt, Artificial Sequence
  Description of Artificial Sequence: Synthetic oligonucleotide
  Antisense strand to SEQ ID NO: 2508426
auaaagaucacacauucaa

SEQ ID NO: 2508428 - RNA, 19 nt, Artificial Sequence
  Description of Artificial Sequence: Synthetic oligonucleotide
  Sense strand starting at position 578 of SEQ ID NO: 1888068
augugugaucuuuaucuuu

SEQ ID NO: 2508429 - RNA, 19 nt, Artificial Sequence
  Description of Artificial Sequence: Synthetic oligonucleotide
  Antisense strand to SEQ ID NO: 2508428
aaagauaaagaucacacau

SEQ ID NO: 2508430 - RNA, 19 nt, Artificial Sequence
  Description of Artificial Sequence: Synthetic oligonucleotide
  Sense strand starting at position 920 of SEQ ID NO: 1888068
uuuccuuuguucucgauca

SEQ ID NO: 2508431 - RNA, 19 nt, Artificial Sequence
  Description of Artificial Sequence: Synthetic oligonucleotide
  Antisense strand to SEQ ID NO: 2508430
ugaucgagaacaaaggaaa

SEQ ID NO: 2508432 - RNA, 19 nt, Artificial Sequence
  Description of Artificial Sequence: Synthetic oligonucleotide
  Sense strand starting at position 1069 of SEQ ID NO: 1888068
auggcauccucagagagau

SEQ ID NO: 2508433 - RNA, 19 nt, Artificial Sequence
  Description of Artificial Sequence: Synthetic oligonucleotide
  Antisense strand to SEQ ID NO: 2508432
aucucucugaggaugccau

SEQ ID NO: 2508434 - RNA, 19 nt, Artificial Sequence
  Description of Artificial Sequence: Synthetic oligonucleotide
  Sense strand starting at position 1147 of SEQ ID NO: 1888068
aguuguguuuacccagcca

SEQ ID NO: 2508435 - RNA, 19 nt, Artificial Sequence
  Description of Artificial Sequence: Synthetic oligonucleotide
  Antisense strand to SEQ ID NO: 2508434
uggcuggguaaacacaacu

SEQ ID NO: 2508436 - RNA, 19 nt, Artificial Sequence
  Description of Artificial Sequence: Synthetic oligonucleotide
  Sense strand starting at position 1379 of SEQ ID NO: 1888068
guauuugucuaacuuguua

SEQ ID NO: 2508437 - RNA, 19 nt, Artificial Sequence
  Description of Artificial Sequence: Synthetic oligonucleotide
  Antisense strand to SEQ ID NO: 2508436
uaacaaguuagacaaauac

SEQ ID NO: 2508438 - RNA, 19 nt, Artificial Sequence
  Description of Artificial Sequence: Synthetic oligonucleotide
  Sense strand starting at position 1405 of SEQ ID NO: 1888068
uuuagucaccuccaugcau

SEQ ID NO: 2508439 - RNA, 19 nt, Artificial Sequence
  Description of Artificial Sequence: Synthetic oligonucleotide
  Antisense strand to SEQ ID NO: 2508438
augcauggaggugacuaaa

SEQ ID NO: 2508440 - RNA, 19 nt, Artificial Sequence
  Description of Artificial Sequence: Synthetic oligonucleotide
  Sense strand starting at position 1431 of SEQ ID NO: 1888068
ccuggcaaagcucaugaua

SEQ ID NO: 2508441 - RNA, 19 nt, Artificial Sequence
  Description of Artificial Sequence: Synthetic oligonucleotide
  Antisense strand to SEQ ID NO: 2508440
uaucaugagcuuugccagg

SEQ ID NO: 2508442 - RNA, 19 nt, Artificial Sequence
  Description of Artificial Sequence: Synthetic oligonucleotide
  Sense strand starting at position 1439 of SEQ ID NO: 1888068
agcucaugauaucagaaag

SEQ ID NO: 2508443 - RNA, 19 nt, Artificial Sequence
  Description of Artificial Sequence: Synthetic oligonucleotide
  Antisense strand to SEQ ID NO: 2508442
cuuucugauaucaugagcu

SEQ ID NO: 2508444 - RNA, 19 nt, Artificial Sequence
  Description of Artificial Sequence: Synthetic oligonucleotide
  Sense strand starting at position 1479 of SEQ ID NO: 1888068
gacccaugagggugucgaa

SEQ ID NO: 2508445 - RNA, 19 nt, Artificial Sequence
  Description of Artificial Sequence: Synthetic oligonucleotide
  Antisense strand to SEQ ID NO: 2508444
uucgacacccucauggguc

SEQ ID NO: 2508446 - RNA, 19 nt, Artificial Sequence
  Description of Artificial Sequence: Synthetic oligonucleotide
  Sense strand starting at position 1508 of SEQ ID NO: 1888068
gaacccguuccucgacaaa

SEQ ID NO: 2508447 - RNA, 19 nt, Artificial Sequence
  Description of Artificial Sequence: Synthetic oligonucleotide
  Antisense strand to SEQ ID NO: 2508446
uuugucgaggaacggguuc

SEQ ID NO: 2508448 - RNA, 19 nt, Artificial Sequence
  Description of Artificial Sequence: Synthetic oligonucleotide
  Sense strand starting at position 1858 of SEQ ID NO: 1888068
caaccuguggcaugaggaa

SEQ ID NO: 2508449 - RNA, 19 nt, Artificial Sequence
  Description of Artificial Sequence: Synthetic oligonucleotide
  Antisense strand to SEQ ID NO: 2508448
uuccucaugccacagguug

SEQ ID NO: 2508450 - RNA, 19 nt, Artificial Sequence
  Description of Artificial Sequence: Synthetic oligonucleotide
  Sense strand starting at position 2181 of SEQ ID NO: 1888068
guggguguaguuggccaaa

SEQ ID NO: 2508451 - RNA, 19 nt, Artificial Sequence
  Description of Artificial Sequence: Synthetic oligonucleotide
  Antisense strand to SEQ ID NO: 2508450
uuuggccaacuacacccac

SEQ ID NO: 2508452 - RNA, 19 nt, Artificial Sequence
  Description of Artificial Sequence: Synthetic oligonucleotide
  Sense strand starting at position 2183 of SEQ ID NO: 1888068
ggguguaguuggccaaagu

SEQ ID NO: 2508453 - RNA, 19 nt, Artificial Sequence
  Description of Artificial Sequence: Synthetic oligonucleotide
  Antisense strand to SEQ ID NO: 2508452
acuuuggccaacuacaccc

SEQ ID NO: 2508454 - RNA, 19 nt, Artificial Sequence
  Description of Artificial Sequence: Synthetic oligonucleotide
  Sense strand starting at position 2184 of SEQ ID NO: 1888068
gguguaguuggccaaaguu

SEQ ID NO: 2508455 - RNA, 19 nt, Artificial Sequence
  Description of Artificial Sequence: Synthetic oligonucleotide
  Antisense strand to SEQ ID NO: 2508454
aacuuuggccaacuacacc

SEQ ID NO: 2508456 - RNA, 19 nt, Artificial Sequence
  Description of Artificial Sequence: Synthetic oligonucleotide
  Sense strand starting at position 2192 of SEQ ID NO: 1888068
uggccaaaguuugaaucaa

SEQ ID NO: 2508457 - RNA, 19 nt, Artificial Sequence
  Description of Artificial Sequence: Synthetic oligonucleotide
  Antisense strand to SEQ ID NO: 2508456
uugauucaaacuuuggcca

SEQ ID NO: 2508458 - RNA, 19 nt, Artificial Sequence
  Description of Artificial Sequence: Synthetic oligonucleotide
  Sense strand starting at position 2216 of SEQ ID NO: 1888068
aguguugacaucuggaagu

SEQ ID NO: 2508459 - RNA, 19 nt, Artificial Sequence
  Description of Artificial Sequence: Synthetic oligonucleotide
  Antisense strand to SEQ ID NO: 2508458
acuuccagaugucaacacu

SEQ ID NO: 2508460 - RNA, 19 nt, Artificial Sequence
  Description of Artificial Sequence: Synthetic oligonucleotide
  Sense strand starting at position 2218 of SEQ ID NO: 1888068
uguugacaucuggaagugu

SEQ ID NO: 2508461 - RNA, 19 nt, Artificial Sequence
  Description of Artificial Sequence: Synthetic oligonucleotide
  Antisense strand to SEQ ID NO: 2508460
acacuuccagaugucaaca

SEQ ID NO: 2508462 - RNA, 19 nt, Artificial Sequence
  Description of Artificial Sequence: Synthetic oligonucleotide
  Sense strand starting at position 2248 of SEQ ID NO: 1888068
gagcuaaagcgauauaucu

SEQ ID NO: 2508463 - RNA, 19 nt, Artificial Sequence
  Description of Artificial Sequence: Synthetic oligonucleotide
  Antisense strand to SEQ ID NO: 2508462
agauauaucgcuuuagcuc

SEQ ID NO: 2508464 - RNA, 19 nt, Artificial Sequence
  Description of Artificial Sequence: Synthetic oligonucleotide
  Sense strand starting at position 2382 of SEQ ID NO: 1888068
ggcucuaagagggaugcau

SEQ ID NO: 2508465 - RNA, 19 nt, Artificial Sequence
  Description of Artificial Sequence: Synthetic oligonucleotide
  Antisense strand to SEQ ID NO: 2508464
augcaucccucuuagagcc

SEQ ID NO: 2508466 - RNA, 19 nt, Artificial Sequence
  Description of Artificial Sequence: Synthetic oligonucleotide
  Sense strand starting at position 2384 of SEQ ID NO: 1888068
cucuaagagggaugcauua

SEQ ID NO: 2508467 - RNA, 19 nt, Artificial Sequence
  Description of Artificial Sequence: Synthetic oligonucleotide
  Antisense strand to SEQ ID NO: 2508466
uaaugcaucccucuuagag

SEQ ID NO: 2508468 - RNA, 19 nt, Artificial Sequence
  Description of Artificial Sequence: Synthetic oligonucleotide
  Sense strand starting at position 2391 of SEQ ID NO: 1888068
agggaugcauuagacuaaa

SEQ ID NO: 2508469 - RNA, 19 nt, Artificial Sequence
  Description of Artificial Sequence: Synthetic oligonucleotide
  Antisense strand to SEQ ID NO: 2508468
uuuagucuaaugcaucccu

SEQ ID NO: 2508470 - RNA, 19 nt, Artificial Sequence
  Description of Artificial Sequence: Synthetic oligonucleotide
  Sense strand starting at position 2523 of SEQ ID NO: 1888068
caggguucugcaggucaga

SEQ ID NO: 2508471 - RNA, 19 nt, Artificial Sequence
  Description of Artificial Sequence: Synthetic oligonucleotide
  Antisense strand to SEQ ID NO: 2508470
ucugaccugcagaacccug

SEQ ID NO: 2508472 - RNA, 19 nt, Artificial Sequence
  Description of Artificial Sequence: Synthetic oligonucleotide
  Sense strand starting at position 2590 of SEQ ID NO: 1888068
caaucugucucacugguga

SEQ ID NO: 2508473 - RNA, 19 nt, Artificial Sequence
  Description of Artificial Sequence: Synthetic oligonucleotide
  Antisense strand to SEQ ID NO: 2508472
ucaccagugagacagauug

SEQ ID NO: 2508474 - RNA, 19 nt, Artificial Sequence
  Description of Artificial Sequence: Synthetic oligonucleotide
  Sense strand starting at position 2592 of SEQ ID NO: 1888068
aucugucucacuggugaga

SEQ ID NO: 2508475 - RNA, 19 nt, Artificial Sequence
  Description of Artificial Sequence: Synthetic oligonucleotide
  Antisense strand to SEQ ID NO: 2508474
ucucaccagugagacagau

SEQ ID NO: 2508476 - RNA, 19 nt, Artificial Sequence
  Description of Artificial Sequence: Synthetic oligonucleotide
  Sense strand starting at position 3028 of SEQ ID NO: 1888068
ugguauuuaucuguggguu

SEQ ID NO: 2508477 - RNA, 19 nt, Artificial Sequence
  Description of Artificial Sequence: Synthetic oligonucleotide
  Antisense strand to SEQ ID NO: 2508476
aacccacagauaaauacca

SEQ ID NO: 2508478 - RNA, 19 nt, Artificial Sequence
  Description of Artificial Sequence: Synthetic oligonucleotide
  Sense strand starting at position 3029 of SEQ ID NO: 1888068
gguauuuaucuguggguuc

SEQ ID NO: 2508479 - RNA, 19 nt, Artificial Sequence
  Description of Artificial Sequence: Synthetic oligonucleotide
  Antisense strand to SEQ ID NO: 2508478
gaacccacagauaaauacc

SEQ ID NO: 2508480 - RNA, 19 nt, Artificial Sequence
  Description of Artificial Sequence: Synthetic oligonucleotide
  Sense strand starting at position 3056 of SEQ ID NO: 1888068
cagcguuguccagucucga

SEQ ID NO: 2508481 - RNA, 19 nt, Artificial Sequence
  Description of Artificial Sequence: Synthetic oligonucleotide
  Antisense strand to SEQ ID NO: 2508480
ucgagacuggacaacgcug

SEQ ID NO: 2508482 - RNA, 19 nt, Artificial Sequence
  Description of Artificial Sequence: Synthetic oligonucleotide
  Sense strand starting at position 3057 of SEQ ID NO: 1888068
agcguuguccagucucgaa

SEQ ID NO: 2508483 - RNA, 19 nt, Artificial Sequence
  Description of Artificial Sequence: Synthetic oligonucleotide
  Antisense strand to SEQ ID NO: 2508482
uucgagacuggacaacgcu

SEQ ID NO: 2508484 - RNA, 19 nt, Artificial Sequence
  Description of Artificial Sequence: Synthetic oligonucleotide
  Sense strand starting at position 3079 of SEQ ID NO: 1888068
acccuaaaccggcauuaaa

SEQ ID NO: 2508485 - RNA, 19 nt, Artificial Sequence
  Description of Artificial Sequence: Synthetic oligonucleotide
  Antisense strand to SEQ ID NO: 2508484
uuuaaugccgguuuagggu

SEQ ID NO: 2508486 - RNA, 19 nt, Artificial Sequence
  Description of Artificial Sequence: Synthetic oligonucleotide
  Sense strand starting at position 3368 of SEQ ID NO: 1888068
guuaaagugcuuuaccgga

SEQ ID NO: 2508487 - RNA, 19 nt, Artificial Sequence
  Description of Artificial Sequence: Synthetic oligonucleotide
  Antisense strand to SEQ ID NO: 2508486
uccgguaaagcacuuuaac

SEQ ID NO: 2508488 - RNA, 19 nt, Artificial Sequence
  Description of Artificial Sequence: Synthetic oligonucleotide
  Sense strand starting at position 3373 of SEQ ID NO: 1888068
agugcuuuaccggagccaa

SEQ ID NO: 2508489 - RNA, 19 nt, Artificial Sequence
  Description of Artificial Sequence: Synthetic oligonucleotide
  Antisense strand to SEQ ID NO: 2508488
uuggcuccgguaaagcacu

SEQ ID NO: 2508490 - RNA, 19 nt, Artificial Sequence
  Description of Artificial Sequence: Synthetic oligonucleotide
  Sense strand starting at position 3446 of SEQ ID NO: 1888068
acaaauugcgugcuugcau

SEQ ID NO: 2508491 - RNA, 19 nt, Artificial Sequence
  Description of Artificial Sequence: Synthetic oligonucleotide
  Antisense strand to SEQ ID NO: 2508490
augcaagcacgcaauuugu

SEQ ID NO: 2508492 - RNA, 19 nt, Artificial Sequence
  Description of Artificial Sequence: Synthetic oligonucleotide
  Sense strand starting at position 3447 of SEQ ID NO: 1888068
caaauugcgugcuugcaua

SEQ ID NO: 2508493 - RNA, 19 nt, Artificial Sequence
  Description of Artificial Sequence: Synthetic oligonucleotide
  Antisense strand to SEQ ID NO: 2508492
uaugcaagcacgcaauuug

SEQ ID NO: 2508494 - RNA, 19 nt, Artificial Sequence
  Description of Artificial Sequence: Synthetic oligonucleotide
  Sense strand starting at position 2958 of SEQ ID NO: 1888069
gccgaauuauuccauuaau

SEQ ID NO: 2508495 - RNA, 19 nt, Artificial Sequence
  Description of Artificial Sequence: Synthetic oligonucleotide
  Antisense strand to SEQ ID NO: 2508494
auuaauggaauaauucggc

SEQ ID NO: 2508496 - RNA, 19 nt, Artificial Sequence
  Description of Artificial Sequence: Synthetic oligonucleotide
  Sense strand starting at position 3156 of SEQ ID NO: 1888069
ucucaaagagucugugaga

SEQ ID NO: 2508497 - RNA, 19 nt, Artificial Sequence
  Description of Artificial Sequence: Synthetic oligonucleotide
  Antisense strand to SEQ ID NO: 2508496
ucucacagacucuuugaga

SEQ ID NO: 2508498 - RNA, 19 nt, Artificial Sequence
  Description of Artificial Sequence: Synthetic oligonucleotide
  Sense strand starting at position 3159 of SEQ ID NO: 1888069
caaagagucugugagagga

SEQ ID NO: 2508499 - RNA, 19 nt, Artificial Sequence
  Description of Artificial Sequence: Synthetic oligonucleotide
  Antisense strand to SEQ ID NO: 2508498
uccucucacagacucuuug

SEQ ID NO: 2508500 - RNA, 19 nt, Artificial Sequence
  Description of Artificial Sequence: Synthetic oligonucleotide
  Sense strand starting at position 3268 of SEQ ID NO: 1888069
auggaaucucugugccaca

SEQ ID NO: 2508501 - RNA, 19 nt, Artificial Sequence
  Description of Artificial Sequence: Synthetic oligonucleotide
  Antisense strand to SEQ ID NO: 2508500
uguggcacagagauuccau

SEQ ID NO: 2508502 - RNA, 19 nt, Artificial Sequence
  Description of Artificial Sequence: Synthetic oligonucleotide
  Sense strand starting at position 3385 of SEQ ID NO: 1888069
uccagagacucucagaguu

SEQ ID NO: 2508503 - RNA, 19 nt, Artificial Sequence
  Description of Artificial Sequence: Synthetic oligonucleotide
  Antisense strand to SEQ ID NO: 2508502
aacucugagagucucugga

SEQ ID NO: 2508504 - RNA, 19 nt, Artificial Sequence
  Description of Artificial Sequence: Synthetic oligonucleotide
  Sense strand starting at position 3393 of SEQ ID NO: 1888069
cucucagaguuuggcucua

SEQ ID NO: 2508505 - RNA, 19 nt, Artificial Sequence
  Description of Artificial Sequence: Synthetic oligonucleotide
  Antisense strand to SEQ ID NO: 2508504
uagagccaaacucugagag

SEQ ID NO: 2508506 - RNA, 19 nt, Artificial Sequence
  Description of Artificial Sequence: Synthetic oligonucleotide
  Sense strand starting at position 3703 of SEQ ID NO: 1888069
ccguccauugcucagucau

SEQ ID NO: 2508507 - RNA, 19 nt, Artificial Sequence
  Description of Artificial Sequence: Synthetic oligonucleotide
  Antisense strand to SEQ ID NO: 2508506
augacugagcaauggacgg

SEQ ID NO: 2508508 - RNA, 19 nt, Artificial Sequence
  Description of Artificial Sequence: Synthetic oligonucleotide
  Sense strand starting at position 3705 of SEQ ID NO: 1888069
guccauugcucagucauac

SEQ ID NO: 2508509 - RNA, 19 nt, Artificial Sequence
  Description of Artificial Sequence: Synthetic oligonucleotide
  Antisense strand to SEQ ID NO: 2508508
guaugacugagcaauggac

SEQ ID NO: 2508510 - RNA, 19 nt, Artificial Sequence
  Description of Artificial Sequence: Synthetic oligonucleotide
  Sense strand starting at position 3792 of SEQ ID NO: 1888069
ggaagaaugucugugggaa

SEQ ID NO: 2508511 - RNA, 19 nt, Artificial Sequence
  Description of Artificial Sequence: Synthetic oligonucleotide
  Antisense strand to SEQ ID NO: 2508510
uucccacagacauucuucc

SEQ ID NO: 2508512 - RNA, 19 nt, Artificial Sequence
  Description of Artificial Sequence: Synthetic oligonucleotide
  Sense strand starting at position 3793 of SEQ ID NO: 1888069
gaagaaugucugugggaac

SEQ ID NO: 2508513 - RNA, 19 nt, Artificial Sequence
  Description of Artificial Sequence: Synthetic oligonucleotide
  Antisense strand to SEQ ID NO: 2508512
guucccacagacauucuuc

SEQ ID NO: 2508514 - RNA, 19 nt, Artificial Sequence
  Description of Artificial Sequence: Synthetic oligonucleotide
  Sense strand starting at position 3818 of SEQ ID NO: 1888069
guaugaacgucacaggaga

SEQ ID NO: 2508515 - RNA, 19 nt, Artificial Sequence
  Description of Artificial Sequence: Synthetic oligonucleotide
  Antisense strand to SEQ ID NO: 2508514
ucuccugugacguucauac

SEQ ID NO: 2508516 - RNA, 19 nt, Artificial Sequence
  Description of Artificial Sequence: Synthetic oligonucleotide
  Sense strand starting at position 3863 of SEQ ID NO: 1888069
gggagcugccuugauagga

SEQ ID NO: 2508517 - RNA, 19 nt, Artificial Sequence
  Description of Artificial Sequence: Synthetic oligonucleotide
  Antisense strand to SEQ ID NO: 2508516
uccuaucaaggcagcuccc

SEQ ID NO: 2508518 - RNA, 19 nt, Artificial Sequence
  Description of Artificial Sequence: Synthetic oligonucleotide
  Sense strand starting at position 3911 of SEQ ID NO: 1888069
agaugucucccaggaggga

SEQ ID NO: 2508519 - RNA, 19 nt, Artificial Sequence
  Description of Artificial Sequence: Synthetic oligonucleotide
  Antisense strand to SEQ ID NO: 2508518
ucccuccugggagacaucu

SEQ ID NO: 2508520 - RNA, 19 nt, Artificial Sequence
  Description of Artificial Sequence: Synthetic oligonucleotide
  Sense strand starting at position 144 of SEQ ID NO: 1888070
gagugaggugccugaagag

SEQ ID NO: 2508521 - RNA, 19 nt, Artificial Sequence
  Description of Artificial Sequence: Synthetic oligonucleotide
  Antisense strand to SEQ ID NO: 2508520
cucuucaggcaccucacuc

SEQ ID NO: 2508522 - RNA, 19 nt, Artificial Sequence
  Description of Artificial Sequence: Synthetic oligonucleotide
  Sense strand starting at position 147 of SEQ ID NO: 1888070
ugaggugccugaagagaug

SEQ ID NO: 2508523 - RNA, 19 nt, Artificial Sequence
  Description of Artificial Sequence: Synthetic oligonucleotide
  Antisense strand to SEQ ID NO: 2508522
caucucuucaggcaccuca

SEQ ID NO: 2508524 - RNA, 19 nt, Artificial Sequence
  Description of Artificial Sequence: Synthetic oligonucleotide
  Sense strand starting at position 286 of SEQ ID NO: 1888070
ggaagagaucuugguaggu

SEQ ID NO: 2508525 - RNA, 19 nt, Artificial Sequence
  Description of Artificial Sequence: Synthetic oligonucleotide
  Antisense strand to SEQ ID NO: 2508524
accuaccaagaucucuucc

SEQ ID NO: 2508526 - RNA, 19 nt, Artificial Sequence
  Description of Artificial Sequence: Synthetic oligonucleotide
  Sense strand starting at position 288 of SEQ ID NO: 1888070
aagagaucuugguaggugu

SEQ ID NO: 2508527 - RNA, 19 nt, Artificial Sequence
  Description of Artificial Sequence: Synthetic oligonucleotide
  Antisense strand to SEQ ID NO: 2508526
acaccuaccaagaucucuu

SEQ ID NO: 2508528 - RNA, 19 nt, Artificial Sequence
  Description of Artificial Sequence: Synthetic oligonucleotide
  Sense strand starting at position 384 of SEQ ID NO: 1888070
gcaucuuucuccuugguaa

SEQ ID NO: 2508529 - RNA, 19 nt, Artificial Sequence
  Description of Artificial Sequence: Synthetic oligonucleotide
  Antisense strand to SEQ ID NO: 2508528
uuaccaaggagaaagaugc

SEQ ID NO: 2508530 - RNA, 19 nt, Artificial Sequence
  Description of Artificial Sequence: Synthetic oligonucleotide
  Sense strand starting at position 387 of SEQ ID NO: 1888070
ucuuucuccuugguaaaug

SEQ ID NO: 2508531 - RNA, 19 nt, Artificial Sequence
  Description of Artificial Sequence: Synthetic oligonucleotide
  Antisense strand to SEQ ID NO: 2508530
cauuuaccaaggagaaaga

SEQ ID NO: 2508532 - RNA, 19 nt, Artificial Sequence
  Description of Artificial Sequence: Synthetic oligonucleotide
  Sense strand starting at position 546 of SEQ ID NO: 1888070
accugagcucacuguggaa

SEQ ID NO: 2508533 - RNA, 19 nt, Artificial Sequence
  Description of Artificial Sequence: Synthetic oligonucleotide
  Antisense strand to SEQ ID NO: 2508532
uuccacagugagcucaggu

SEQ ID NO: 2508534 - RNA, 19 nt, Artificial Sequence
  Description of Artificial Sequence: Synthetic oligonucleotide
  Sense strand starting at position 19 of SEQ ID NO: 1888071
guggauuauuaggaaacug

SEQ ID NO: 2508535 - RNA, 19 nt, Artificial Sequence
  Description of Artificial Sequence: Synthetic oligonucleotide
  Antisense strand to SEQ ID NO: 2508534
caguuuccuaauaauccac

SEQ ID NO: 2508536 - RNA, 19 nt, Artificial Sequence
  Description of Artificial Sequence: Synthetic oligonucleotide
  Sense strand starting at position 27 of SEQ ID NO: 1888071
uuaggaaacugcucuagaa

SEQ ID NO: 2508537 - RNA, 19 nt, Artificial Sequence
  Description of Artificial Sequence: Synthetic oligonucleotide
  Antisense strand to SEQ ID NO: 2508536
uucuagagcaguuuccuaa

SEQ ID NO: 2508538 - RNA, 19 nt, Artificial Sequence
  Description of Artificial Sequence: Synthetic oligonucleotide
  Sense strand starting at position 51 of SEQ ID NO: 1888071
guucuacccugcuuuauua

SEQ ID NO: 2508539 - RNA, 19 nt, Artificial Sequence
  Description of Artificial Sequence: Synthetic oligonucleotide
  Antisense strand to SEQ ID NO: 2508538
uaauaaagcaggguagaac

SEQ ID NO: 2508540 - RNA, 19 nt, Artificial Sequence
  Description of Artificial Sequence: Synthetic oligonucleotide
  Sense strand starting at position 153 of SEQ ID NO: 1888071
gugugcacugacuguauuu

SEQ ID NO: 2508541 - RNA, 19 nt, Artificial Sequence
  Description of Artificial Sequence: Synthetic oligonucleotide
  Antisense strand to SEQ ID NO: 2508540
aaauacagucagugcacac

SEQ ID NO: 2508542 - RNA, 19 nt, Artificial Sequence
  Description of Artificial Sequence: Synthetic oligonucleotide
  Sense strand starting at position 174 of SEQ ID NO: 1888071
cgugacuagcauuaugcua

SEQ ID NO: 2508543 - RNA, 19 nt, Artificial Sequence
  Description of Artificial Sequence: Synthetic oligonucleotide
  Antisense strand to SEQ ID NO: 2508542
uagcauaaugcuagucacg

SEQ ID NO: 2508544 - RNA, 19 nt, Artificial Sequence
  Description of Artificial Sequence: Synthetic oligonucleotide
  Sense strand starting at position 339 of SEQ ID NO: 1888071
uuguauguuauacguacua

SEQ ID NO: 2508545 - RNA, 19 nt, Artificial Sequence
  Description of Artificial Sequence: Synthetic oligonucleotide
  Antisense strand to SEQ ID NO: 2508544
uaguacguauaacauacaa

SEQ ID NO: 2508546 - RNA, 19 nt, Artificial Sequence
  Description of Artificial Sequence: Synthetic oligonucleotide
  Sense strand starting at position 341 of SEQ ID NO: 1888071
guauguuauacguacuaca

SEQ ID NO: 2508547 - RNA, 19 nt, Artificial Sequence
  Description of Artificial Sequence: Synthetic oligonucleotide
  Antisense strand to SEQ ID NO: 2508546
uguaguacguauaacauac

SEQ ID NO: 2508548 - RNA, 19 nt, Artificial Sequence
  Description of Artificial Sequence: Synthetic oligonucleotide
  Sense strand starting at position 352 of SEQ ID NO: 1888071
guacuacacugucuaccau

SEQ ID NO: 2508549 - RNA, 19 nt, Artificial Sequence
  Description of Artificial Sequence: Synthetic oligonucleotide
  Antisense strand to SEQ ID NO: 2508548
augguagacaguguaguac

SEQ ID NO: 2508550 - RNA, 19 nt, Artificial Sequence
  Description of Artificial Sequence: Synthetic oligonucleotide
  Sense strand starting at position 902 of SEQ ID NO: 1888071
aguggaucaucauaaauaa

SEQ ID NO: 2508551 - RNA, 19 nt, Artificial Sequence
  Description of Artificial Sequence: Synthetic oligonucleotide
  Antisense strand to SEQ ID NO: 2508550
uuauuuaugaugauccacu

SEQ ID NO: 2508552 - RNA, 19 nt, Artificial Sequence
  Description of Artificial Sequence: Synthetic oligonucleotide
  Sense strand starting at position 1062 of SEQ ID NO: 1888071
agauuuacuuaaucguugu

SEQ ID NO: 2508553 - RNA, 19 nt, Artificial Sequence
  Description of Artificial Sequence: Synthetic oligonucleotide
  Antisense strand to SEQ ID NO: 2508552
acaacgauuaaguaaaucu

SEQ ID NO: 2508554 - RNA, 19 nt, Artificial Sequence
  Description of Artificial Sequence: Synthetic oligonucleotide
  Sense strand starting at position 1065 of SEQ ID NO: 1888071
uuuacuuaaucguuguaac

SEQ ID NO: 2508555 - RNA, 19 nt, Artificial Sequence
  Description of Artificial Sequence: Synthetic oligonucleotide
  Antisense strand to SEQ ID NO: 2508554
guuacaacgauuaaguaaa

SEQ ID NO: 2508556 - RNA, 19 nt, Artificial Sequence
  Description of Artificial Sequence: Synthetic oligonucleotide
  Sense strand starting at position 1066 of SEQ ID NO: 1888071
uuacuuaaucguuguaaca

SEQ ID NO: 2508557 - RNA, 19 nt, Artificial Sequence
  Description of Artificial Sequence: Synthetic oligonucleotide
  Antisense strand to SEQ ID NO: 2508556
uguuacaacgauuaaguaa

SEQ ID NO: 2508558 - RNA, 19 nt, Artificial Sequence
  Description of Artificial Sequence: Synthetic oligonucleotide
  Sense strand starting at position 1079 of SEQ ID NO: 1888071
guaacaacacuuugaggua

SEQ ID NO: 2508559 - RNA, 19 nt, Artificial Sequence
  Description of Artificial Sequence: Synthetic oligonucleotide
  Antisense strand to SEQ ID NO: 2508558
uaccucaaaguguuguuac

SEQ ID NO: 2508560 - RNA, 19 nt, Artificial Sequence
  Description of Artificial Sequence: Synthetic oligonucleotide
  Sense strand starting at position 1205 of SEQ ID NO: 1888071
ugccguuugacaugaucag

SEQ ID NO: 2508561 - RNA, 19 nt, Artificial Sequence
  Description of Artificial Sequence: Synthetic oligonucleotide
  Antisense strand to SEQ ID NO: 2508560
cugaucaugucaaacggca

SEQ ID NO: 2508562 - RNA, 19 nt, Artificial Sequence
  Description of Artificial Sequence: Synthetic oligonucleotide
  Sense strand starting at position 1211 of SEQ ID NO: 1888071
uugacaugaucaggauaau

SEQ ID NO: 2508563 - RNA, 19 nt, Artificial Sequence
  Description of Artificial Sequence: Synthetic oligonucleotide
  Antisense strand to SEQ ID NO: 2508562
auuauccugaucaugucaa

SEQ ID NO: 2508564 - RNA, 19 nt, Artificial Sequence
  Description of Artificial Sequence: Synthetic oligonucleotide
  Sense strand starting at position 1310 of SEQ ID NO: 1888071
gugugaaugaagcggucuu

SEQ ID NO: 2508565 - RNA, 19 nt, Artificial Sequence
  Description of Artificial Sequence: Synthetic oligonucleotide
  Antisense strand to SEQ ID NO: 2508564
aagaccgcuucauucacac

SEQ ID NO: 2508566 - RNA, 19 nt, Artificial Sequence
  Description of Artificial Sequence: Synthetic oligonucleotide
  Sense strand starting at position 1475 of SEQ ID NO: 1888071
gcgacuugaaacugcugaa

SEQ ID NO: 2508567 - RNA, 19 nt, Artificial Sequence
  Description of Artificial Sequence: Synthetic oligonucleotide
  Antisense strand to SEQ ID NO: 2508566
uucagcaguuucaagucgc

SEQ ID NO: 2508568 - RNA, 19 nt, Artificial Sequence
  Description of Artificial Sequence: Synthetic oligonucleotide
  Sense strand starting at position 1578 of SEQ ID NO: 1888071
gcaagagucggccauucag

SEQ ID NO: 2508569 - RNA, 19 nt, Artificial Sequence
  Description of Artificial Sequence: Synthetic oligonucleotide
  Antisense strand to SEQ ID NO: 2508568
cugaauggccgacucuugc

SEQ ID NO: 2508570 - RNA, 19 nt, Artificial Sequence
  Description of Artificial Sequence: Synthetic oligonucleotide
  Sense strand starting at position 1587 of SEQ ID NO: 1888071
ggccauucaggaggucaga

SEQ ID NO: 2508571 - RNA, 19 nt, Artificial Sequence
  Description of Artificial Sequence: Synthetic oligonucleotide
  Antisense strand to SEQ ID NO: 2508570
ucugaccuccugaauggcc

SEQ ID NO: 2508572 - RNA, 19 nt, Artificial Sequence
  Description of Artificial Sequence: Synthetic oligonucleotide
  Sense strand starting at position 1666 of SEQ ID NO: 1888071
ggugguaucaaauggcuau

SEQ ID NO: 2508573 - RNA, 19 nt, Artificial Sequence
  Description of Artificial Sequence: Synthetic oligonucleotide
  Antisense strand to SEQ ID NO: 2508572
auagccauuugauaccacc

SEQ ID NO: 2508574 - RNA, 19 nt, Artificial Sequence
  Description of Artificial Sequence: Synthetic oligonucleotide
  Sense strand starting at position 1731 of SEQ ID NO: 1888071
uuggauucccuccagcauu

SEQ ID NO: 2508575 - RNA, 19 nt, Artificial Sequence
  Description of Artificial Sequence: Synthetic oligonucleotide
  Antisense strand to SEQ ID NO: 2508574
aaugcuggagggaauccaa

SEQ ID NO: 2508576 - RNA, 19 nt, Artificial Sequence
  Description of Artificial Sequence: Synthetic oligonucleotide
  Sense strand starting at position 2144 of SEQ ID NO: 1888071
ggucccugccuuuacuaga

SEQ ID NO: 2508577 - RNA, 19 nt, Artificial Sequence
  Description of Artificial Sequence: Synthetic oligonucleotide
  Antisense strand to SEQ ID NO: 2508576
ucuaguaaaggcagggacc

SEQ ID NO: 2508578 - RNA, 19 nt, Artificial Sequence
  Description of Artificial Sequence: Synthetic oligonucleotide
  Sense strand starting at position 2151 of SEQ ID NO: 1888071
gccuuuacuagauggguuu

SEQ ID NO: 2508579 - RNA, 19 nt, Artificial Sequence
  Description of Artificial Sequence: Synthetic oligonucleotide
  Antisense strand to SEQ ID NO: 2508578
aaacccaucuaguaaaggc

SEQ ID NO: 2508580 - RNA, 19 nt, Artificial Sequence
  Description of Artificial Sequence: Synthetic oligonucleotide
  Sense strand starting at position 2372 of SEQ ID NO: 1888071
ggaauauagguguguccca

SEQ ID NO: 2508581 - RNA, 19 nt, Artificial Sequence
  Description of Artificial Sequence: Synthetic oligonucleotide
  Antisense strand to SEQ ID NO: 2508580
ugggacacaccuauauucc

SEQ ID NO: 2508582 - RNA, 19 nt, Artificial Sequence
  Description of Artificial Sequence: Synthetic oligonucleotide
  Sense strand starting at position 2545 of SEQ ID NO: 1888071
uuucgugugaccgugugau

SEQ ID NO: 2508583 - RNA, 19 nt, Artificial Sequence
  Description of Artificial Sequence: Synthetic oligonucleotide
  Antisense strand to SEQ ID NO: 2508582
aucacacggucacacgaaa

SEQ ID NO: 2508584 - RNA, 19 nt, Artificial Sequence
  Description of Artificial Sequence: Synthetic oligonucleotide
  Sense strand starting at position 2557 of SEQ ID NO: 1888071
gugugaucucaggacacuu

SEQ ID NO: 2508585 - RNA, 19 nt, Artificial Sequence
  Description of Artificial Sequence: Synthetic oligonucleotide
  Antisense strand to SEQ ID NO: 2508584
aaguguccugagaucacac

SEQ ID NO: 2508586 - RNA, 19 nt, Artificial Sequence
  Description of Artificial Sequence: Synthetic oligonucleotide
  Sense strand starting at position 2687 of SEQ ID NO: 1888071
uggcccauugccugaaaca

SEQ ID NO: 2508587 - RNA, 19 nt, Artificial Sequence
  Description of Artificial Sequence: Synthetic oligonucleotide
  Antisense strand to SEQ ID NO: 2508586
uguuucaggcaaugggcca

SEQ ID NO: 2508588 - RNA, 19 nt, Artificial Sequence
  Description of Artificial Sequence: Synthetic oligonucleotide
  Sense strand starting at position 2688 of SEQ ID NO: 1888071
ggcccauugccugaaacau

SEQ ID NO: 2508589 - RNA, 19 nt, Artificial Sequence
  Description of Artificial Sequence: Synthetic oligonucleotide
  Antisense strand to SEQ ID NO: 2508588
auguuucaggcaaugggcc

SEQ ID NO: 2508590 - RNA, 19 nt, Artificial Sequence
  Description of Artificial Sequence: Synthetic oligonucleotide
  Sense strand starting at position 2711 of SEQ ID NO: 1888071
gcacucaguauuuguugua

SEQ ID NO: 2508591 - RNA, 19 nt, Artificial Sequence
  Description of Artificial Sequence: Synthetic oligonucleotide
  Antisense strand to SEQ ID NO: 2508590
uacaacaaauacugagugc

SEQ ID NO: 2508592 - RNA, 19 nt, Artificial Sequence
  Description of Artificial Sequence: Synthetic oligonucleotide
  Sense strand starting at position 2716 of SEQ ID NO: 1888071
caguauuuguuguaagagu

SEQ ID NO: 2508593 - RNA, 19 nt, Artificial Sequence
  Description of Artificial Sequence: Synthetic oligonucleotide
  Antisense strand to SEQ ID NO: 2508592
acucuuacaacaaauacug

SEQ ID NO: 2508594 - RNA, 19 nt, Artificial Sequence
  Description of Artificial Sequence: Synthetic oligonucleotide
  Sense strand starting at position 2809 of SEQ ID NO: 1888071
uuaccuagagucuaauguu

SEQ ID NO: 2508595 - RNA, 19 nt, Artificial Sequence
  Description of Artificial Sequence: Synthetic oligonucleotide
  Antisense strand to SEQ ID NO: 2508594
aacauuagacucuagguaa

SEQ ID NO: 2508596 - RNA, 19 nt, Artificial Sequence
  Description of Artificial Sequence: Synthetic oligonucleotide
  Sense strand starting at position 2815 of SEQ ID NO: 1888071
agagucuaauguuuaccaa

SEQ ID NO: 2508597 - RNA, 19 nt, Artificial Sequence
  Description of Artificial Sequence: Synthetic oligonucleotide
  Antisense strand to SEQ ID NO: 2508596
uugguaaacauuagacucu

SEQ ID NO: 2508598 - RNA, 19 nt, Artificial Sequence
  Description of Artificial Sequence: Synthetic oligonucleotide
  Sense strand starting at position 2818 of SEQ ID NO: 1888071
gucuaauguuuaccaaccu

SEQ ID NO: 2508599 - RNA, 19 nt, Artificial Sequence
  Description of Artificial Sequence: Synthetic oligonucleotide
  Antisense strand to SEQ ID NO: 2508598
agguugguaaacauuagac

SEQ ID NO: 2508600 - RNA, 19 nt, Artificial Sequence
  Description of Artificial Sequence: Synthetic oligonucleotide
  Sense strand starting at position 2872 of SEQ ID NO: 1888071
ucacuuuccucgucuacau

SEQ ID NO: 2508601 - RNA, 19 nt, Artificial Sequence
  Description of Artificial Sequence: Synthetic oligonucleotide
  Antisense strand to SEQ ID NO: 2508600
auguagacgaggaaaguga

SEQ ID NO: 2508602 - RNA, 19 nt, Artificial Sequence
  Description of Artificial Sequence: Synthetic oligonucleotide
  Sense strand starting at position 2887 of SEQ ID NO: 1888071
acauaauggcugugaggau

SEQ ID NO: 2508603 - RNA, 19 nt, Artificial Sequence
  Description of Artificial Sequence: Synthetic oligonucleotide
  Antisense strand to SEQ ID NO: 2508602
auccucacagccauuaugu

SEQ ID NO: 2508604 - RNA, 19 nt, Artificial Sequence
  Description of Artificial Sequence: Synthetic oligonucleotide
  Sense strand starting at position 2894 of SEQ ID NO: 1888071
ggcugugaggauuaaguaa

SEQ ID NO: 2508605 - RNA, 19 nt, Artificial Sequence
  Description of Artificial Sequence: Synthetic oligonucleotide
  Antisense strand to SEQ ID NO: 2508604
uuacuuaauccucacagcc

SEQ ID NO: 2508606 - RNA, 19 nt, Artificial Sequence
  Description of Artificial Sequence: Synthetic oligonucleotide
  Sense strand starting at position 2938 of SEQ ID NO: 1888071
cauaguguguucucaauag

SEQ ID NO: 2508607 - RNA, 19 nt, Artificial Sequence
  Description of Artificial Sequence: Synthetic oligonucleotide
  Antisense strand to SEQ ID NO: 2508606
cuauugagaacacacuaug

SEQ ID NO: 2508608 - RNA, 19 nt, Artificial Sequence
  Description of Artificial Sequence: Synthetic oligonucleotide
  Sense strand starting at position 2942 of SEQ ID NO: 1888071
guguguucucaauagauau

SEQ ID NO: 2508609 - RNA, 19 nt, Artificial Sequence
  Description of Artificial Sequence: Synthetic oligonucleotide
  Antisense strand to SEQ ID NO: 2508608
auaucuauugagaacacac

SEQ ID NO: 2508610 - RNA, 19 nt, Artificial Sequence
  Description of Artificial Sequence: Synthetic oligonucleotide
  Sense strand starting at position 2953 of SEQ ID NO: 1888071
auagauauuuauggaagag

SEQ ID NO: 2508611 - RNA, 19 nt, Artificial Sequence
  Description of Artificial Sequence: Synthetic oligonucleotide
  Antisense strand to SEQ ID NO: 2508610
cucuuccauaaauaucuau

SEQ ID NO: 2508612 - RNA, 19 nt, Artificial Sequence
  Description of Artificial Sequence: Synthetic oligonucleotide
  Sense strand starting at position 3007 of SEQ ID NO: 1888071
gaguaaauuugagggcaag

SEQ ID NO: 2508613 - RNA, 19 nt, Artificial Sequence
  Description of Artificial Sequence: Synthetic oligonucleotide
  Antisense strand to SEQ ID NO: 2508612
cuugcccucaaauuuacuc

SEQ ID NO: 2508614 - RNA, 19 nt, Artificial Sequence
  Description of Artificial Sequence: Synthetic oligonucleotide
  Sense strand starting at position 89 of SEQ ID NO: 1888072
uguccauguccuuaagcca

SEQ ID NO: 2508615 - RNA, 19 nt, Artificial Sequence
  Description of Artificial Sequence: Synthetic oligonucleotide
  Antisense strand to SEQ ID NO: 2508614
uggcuuaaggacauggaca

SEQ ID NO: 2508616 - RNA, 19 nt, Artificial Sequence
  Description of Artificial Sequence: Synthetic oligonucleotide
  Sense strand starting at position 120 of SEQ ID NO: 1888072
guuccugggaucugcaaga

SEQ ID NO: 2508617 - RNA, 19 nt, Artificial Sequence
  Description of Artificial Sequence: Synthetic oligonucleotide
  Antisense strand to SEQ ID NO: 2508616
ucuugcagaucccaggaac

SEQ ID NO: 2508618 - RNA, 19 nt, Artificial Sequence
  Description of Artificial Sequence: Synthetic oligonucleotide
  Sense strand starting at position 295 of SEQ ID NO: 1888072
uuacaauauugggcucuga

SEQ ID NO: 2508619 - RNA, 19 nt, Artificial Sequence
  Description of Artificial Sequence: Synthetic oligonucleotide
  Antisense strand to SEQ ID NO: 2508618
ucagagcccaauauuguaa

SEQ ID NO: 2508620 - RNA, 19 nt, Artificial Sequence
  Description of Artificial Sequence: Synthetic oligonucleotide
  Sense strand starting at position 360 of SEQ ID NO: 1888072
uuuauuagcuaugugaaga

SEQ ID NO: 2508621 - RNA, 19 nt, Artificial Sequence
  Description of Artificial Sequence: Synthetic oligonucleotide
  Antisense strand to SEQ ID NO: 2508620
ucuucacauagcuaauaaa

SEQ ID NO: 2508622 - RNA, 19 nt, Artificial Sequence
  Description of Artificial Sequence: Synthetic oligonucleotide
  Sense strand starting at position 505 of SEQ ID NO: 1888072
caaggaagcuauguuugua

SEQ ID NO: 2508623 - RNA, 19 nt, Artificial Sequence
  Description of Artificial Sequence: Synthetic oligonucleotide
  Antisense strand to SEQ ID NO: 2508622
uacaaacauagcuuccuug

SEQ ID NO: 2508624 - RNA, 19 nt, Artificial Sequence
  Description of Artificial Sequence: Synthetic oligonucleotide
  Sense strand starting at position 508 of SEQ ID NO: 1888072
ggaagcuauguuuguaaua

SEQ ID NO: 2508625 - RNA, 19 nt, Artificial Sequence
  Description of Artificial Sequence: Synthetic oligonucleotide
  Antisense strand to SEQ ID NO: 2508624
uauuacaaacauagcuucc

SEQ ID NO: 2508626 - RNA, 19 nt, Artificial Sequence
  Description of Artificial Sequence: Synthetic oligonucleotide
  Sense strand starting at position 509 of SEQ ID NO: 1888072
gaagcuauguuuguaauau

SEQ ID NO: 2508627 - RNA, 19 nt, Artificial Sequence
  Description of Artificial Sequence: Synthetic oligonucleotide
  Antisense strand to SEQ ID NO: 2508626
auauuacaaacauagcuuc

SEQ ID NO: 2508628 - RNA, 19 nt, Artificial Sequence
  Description of Artificial Sequence: Synthetic oligonucleotide
  Sense strand starting at position 612 of SEQ ID NO: 1888072
gguugucaagcauauuaau

SEQ ID NO: 2508629 - RNA, 19 nt, Artificial Sequence
  Description of Artificial Sequence: Synthetic oligonucleotide
  Antisense strand to SEQ ID NO: 2508628
auuaauaugcuugacaacc

SEQ ID NO: 2508630 - RNA, 19 nt, Artificial Sequence
  Description of Artificial Sequence: Synthetic oligonucleotide
  Sense strand starting at position 654 of SEQ ID NO: 1888072
ggagaaagcuuagugcuua

SEQ ID NO: 2508631 - RNA, 19 nt, Artificial Sequence
  Description of Artificial Sequence: Synthetic oligonucleotide
  Antisense strand to SEQ ID NO: 2508630
uaagcacuaagcuuucucc

SEQ ID NO: 2508632 - RNA, 19 nt, Artificial Sequence
  Description of Artificial Sequence: Synthetic oligonucleotide
  Sense strand starting at position 659 of SEQ ID NO: 1888072
aagcuuagugcuuaugaua

SEQ ID NO: 2508633 - RNA, 19 nt, Artificial Sequence
  Description of Artificial Sequence: Synthetic oligonucleotide
  Antisense strand to SEQ ID NO: 2508632
uaucauaagcacuaagcuu

SEQ ID NO: 2508634 - RNA, 19 nt, Artificial Sequence
  Description of Artificial Sequence: Synthetic oligonucleotide
  Sense strand starting at position 667 of SEQ ID NO: 1888072
ugcuuaugauagucucaac

SEQ ID NO: 2508635 - RNA, 19 nt, Artificial Sequence
  Description of Artificial Sequence: Synthetic oligonucleotide
  Antisense strand to SEQ ID NO: 2508634
guugagacuaucauaagca

SEQ ID NO: 2508636 - RNA, 19 nt, Artificial Sequence
  Description of Artificial Sequence: Synthetic oligonucleotide
  Sense strand starting at position 670 of SEQ ID NO: 1888072
uuaugauagucucaacaag

SEQ ID NO: 2508637 - RNA, 19 nt, Artificial Sequence
  Description of Artificial Sequence: Synthetic oligonucleotide
  Antisense strand to SEQ ID NO: 2508636
cuuguugagacuaucauaa

SEQ ID NO: 2508638 - RNA, 19 nt, Artificial Sequence
  Description of Artificial Sequence: Synthetic oligonucleotide
  Sense strand starting at position 698 of SEQ ID NO: 1888072
gagagaggcuucugaagag

SEQ ID NO: 2508639 - RNA, 19 nt, Artificial Sequence
  Description of Artificial Sequence: Synthetic oligonucleotide
  Antisense strand to SEQ ID NO: 2508638
cucuucagaagccucucuc

SEQ ID NO: 2508640 - RNA, 19 nt, Artificial Sequence
  Description of Artificial Sequence: Synthetic oligonucleotide
  Sense strand starting at position 768 of SEQ ID NO: 1888072
cauccaggauuguucuaga

SEQ ID NO: 2508641 - RNA, 19 nt, Artificial Sequence
  Description of Artificial Sequence: Synthetic oligonucleotide
  Antisense strand to SEQ ID NO: 2508640
ucuagaacaauccuggaug

SEQ ID NO: 2508642 - RNA, 19 nt, Artificial Sequence
  Description of Artificial Sequence: Synthetic oligonucleotide
  Sense strand starting at position 779 of SEQ ID NO: 1888072
guucuagauuuggacuaga

SEQ ID NO: 2508643 - RNA, 19 nt, Artificial Sequence
  Description of Artificial Sequence: Synthetic oligonucleotide
  Antisense strand to SEQ ID NO: 2508642
ucuaguccaaaucuagaac

SEQ ID NO: 2508644 - RNA, 19 nt, Artificial Sequence
  Description of Artificial Sequence: Synthetic oligonucleotide
  Sense strand starting at position 879 of SEQ ID NO: 1888072
gcucaagcucugcagugau

SEQ ID NO: 2508645 - RNA, 19 nt, Artificial Sequence
  Description of Artificial Sequence: Synthetic oligonucleotide
  Antisense strand to SEQ ID NO: 2508644
aucacugcagagcuugagc

SEQ ID NO: 2508646 - RNA, 19 nt, Artificial Sequence
  Description of Artificial Sequence: Synthetic oligonucleotide
  Sense strand starting at position 882 of SEQ ID NO: 1888072
caagcucugcagugauaag

SEQ ID NO: 2508647 - RNA, 19 nt, Artificial Sequence
  Description of Artificial Sequence: Synthetic oligonucleotide
  Antisense strand to SEQ ID NO: 2508646
cuuaucacugcagagcuug

SEQ ID NO: 2508648 - RNA, 19 nt, Artificial Sequence
  Description of Artificial Sequence: Synthetic oligonucleotide
  Sense strand starting at position 891 of SEQ ID NO: 1888072
cagugauaagacugacagu

SEQ ID NO: 2508649 - RNA, 19 nt, Artificial Sequence
  Description of Artificial Sequence: Synthetic oligonucleotide
  Antisense strand to SEQ ID NO: 2508648
acugucagucuuaucacug

SEQ ID NO: 2508650 - RNA, 19 nt, Artificial Sequence
  Description of Artificial Sequence: Synthetic oligonucleotide
  Sense strand starting at position 894 of SEQ ID NO: 1888072
ugauaagacugacagugaa

SEQ ID NO: 2508651 - RNA, 19 nt, Artificial Sequence
  Description of Artificial Sequence: Synthetic oligonucleotide
  Antisense strand to SEQ ID NO: 2508650
uucacugucagucuuauca

SEQ ID NO: 2508652 - RNA, 19 nt, Artificial Sequence
  Description of Artificial Sequence: Synthetic oligonucleotide
  Sense strand starting at position 1043 of SEQ ID NO: 1888072
cacauuuaguuggaugaau

SEQ ID NO: 2508653 - RNA, 19 nt, Artificial Sequence
  Description of Artificial Sequence: Synthetic oligonucleotide
  Antisense strand to SEQ ID NO: 2508652
auucauccaacuaaaugug

SEQ ID NO: 2508654 - RNA, 19 nt, Artificial Sequence
  Description of Artificial Sequence: Synthetic oligonucleotide
  Sense strand starting at position 1421 of SEQ ID NO: 1888072
gggcauuaggaucguucuu

SEQ ID NO: 2508655 - RNA, 19 nt, Artificial Sequence
  Description of Artificial Sequence: Synthetic oligonucleotide
  Antisense strand to SEQ ID NO: 2508654
aagaacgauccuaaugccc

SEQ ID NO: 2508656 - RNA, 19 nt, Artificial Sequence
  Description of Artificial Sequence: Synthetic oligonucleotide
  Sense strand starting at position 2017 of SEQ ID NO: 1888072
acuagucuugaaggauauc

SEQ ID NO: 2508657 - RNA, 19 nt, Artificial Sequence
  Description of Artificial Sequence: Synthetic oligonucleotide
  Antisense strand to SEQ ID NO: 2508656
gauauccuucaagacuagu

SEQ ID NO: 2508658 - RNA, 19 nt, Artificial Sequence
  Description of Artificial Sequence: Synthetic oligonucleotide
  Sense strand starting at position 2085 of SEQ ID NO: 1888072
augauaauuuaccaguaga

SEQ ID NO: 2508659 - RNA, 19 nt, Artificial Sequence
  Description of Artificial Sequence: Synthetic oligonucleotide
  Antisense strand to SEQ ID NO: 2508658
ucuacugguaaauuaucau

SEQ ID NO: 2508660 - RNA, 19 nt, Artificial Sequence
  Description of Artificial Sequence: Synthetic oligonucleotide
  Sense strand starting at position 2127 of SEQ ID NO: 1888072
ucagaaucuguucguugua

SEQ ID NO: 2508661 - RNA, 19 nt, Artificial Sequence
  Description of Artificial Sequence: Synthetic oligonucleotide
  Antisense strand to SEQ ID NO: 2508660
uacaacgaacagauucuga

SEQ ID NO: 2508662 - RNA, 19 nt, Artificial Sequence
  Description of Artificial Sequence: Synthetic oligonucleotide
  Sense strand starting at position 2128 of SEQ ID NO: 1888072
cagaaucuguucguuguaa

SEQ ID NO: 2508663 - RNA, 19 nt, Artificial Sequence
  Description of Artificial Sequence: Synthetic oligonucleotide
  Antisense strand to SEQ ID NO: 2508662
uuacaacgaacagauucug

SEQ ID NO: 2508664 - RNA, 19 nt, Artificial Sequence
  Description of Artificial Sequence: Synthetic oligonucleotide
  Sense strand starting at position 2129 of SEQ ID NO: 1888072
agaaucuguucguuguaac

SEQ ID NO: 2508665 - RNA, 19 nt, Artificial Sequence
  Description of Artificial Sequence: Synthetic oligonucleotide
  Antisense strand to SEQ ID NO: 2508664
guuacaacgaacagauucu

SEQ ID NO: 2508666 - RNA, 19 nt, Artificial Sequence
  Description of Artificial Sequence: Synthetic oligonucleotide
  Sense strand starting at position 2130 of SEQ ID NO: 1888072
gaaucuguucguuguaaca

SEQ ID NO: 2508667 - RNA, 19 nt, Artificial Sequence
  Description of Artificial Sequence: Synthetic oligonucleotide
  Antisense strand to SEQ ID NO: 2508666
uguuacaacgaacagauuc

SEQ ID NO: 2508668 - RNA, 19 nt, Artificial Sequence
  Description of Artificial Sequence: Synthetic oligonucleotide
  Sense strand starting at position 2188 of SEQ ID NO: 1888072
gucacuugugcuuugcaua

SEQ ID NO: 2508669 - RNA, 19 nt, Artificial Sequence
  Description of Artificial Sequence: Synthetic oligonucleotide
  Antisense strand to SEQ ID NO: 2508668
uaugcaaagcacaagugac

SEQ ID NO: 2508670 - RNA, 19 nt, Artificial Sequence
  Description of Artificial Sequence: Synthetic oligonucleotide
  Sense strand starting at position 2189 of SEQ ID NO: 1888072
ucacuugugcuuugcauaa

SEQ ID NO: 2508671 - RNA, 19 nt, Artificial Sequence
  Description of Artificial Sequence: Synthetic oligonucleotide
  Antisense strand to SEQ ID NO: 2508670
uuaugcaaagcacaaguga

SEQ ID NO: 2508672 - RNA, 19 nt, Artificial Sequence
  Description of Artificial Sequence: Synthetic oligonucleotide
  Sense strand starting at position 2193 of SEQ ID NO: 1888072
uugugcuuugcauaaagac

SEQ ID NO: 2508673 - RNA, 19 nt, Artificial Sequence
  Description of Artificial Sequence: Synthetic oligonucleotide
  Antisense strand to SEQ ID NO: 2508672
gucuuuaugcaaagcacaa

SEQ ID NO: 2508674 - RNA, 19 nt, Artificial Sequence
  Description of Artificial Sequence: Synthetic oligonucleotide
  Sense strand starting at position 2280 of SEQ ID NO: 1888072
ugugucagcccaggaauua

SEQ ID NO: 2508675 - RNA, 19 nt, Artificial Sequence
  Description of Artificial Sequence: Synthetic oligonucleotide
  Antisense strand to SEQ ID NO: 2508674
uaauuccugggcugacaca

SEQ ID NO: 2508676 - RNA, 19 nt, Artificial Sequence
  Description of Artificial Sequence: Synthetic oligonucleotide
  Sense strand starting at position 2631 of SEQ ID NO: 1888072
guggaagaauaucaaguga

SEQ ID NO: 2508677 - RNA, 19 nt, Artificial Sequence
  Description of Artificial Sequence: Synthetic oligonucleotide
  Antisense strand to SEQ ID NO: 2508676
ucacuugauauucuuccac

SEQ ID NO: 2508678 - RNA, 19 nt, Artificial Sequence
  Description of Artificial Sequence: Synthetic oligonucleotide
  Sense strand starting at position 2760 of SEQ ID NO: 1888072
cagaaaucguaaguguaaa

SEQ ID NO: 2508679 - RNA, 19 nt, Artificial Sequence
  Description of Artificial Sequence: Synthetic oligonucleotide
  Antisense strand to SEQ ID NO: 2508678
uuuacacuuacgauuucug

SEQ ID NO: 2508680 - RNA, 19 nt, Artificial Sequence
  Description of Artificial Sequence: Synthetic oligonucleotide
  Sense strand starting at position 2761 of SEQ ID NO: 1888072
agaaaucguaaguguaaag

SEQ ID NO: 2508681 - RNA, 19 nt, Artificial Sequence
  Description of Artificial Sequence: Synthetic oligonucleotide
  Antisense strand to SEQ ID NO: 2508680
cuuuacacuuacgauuucu

SEQ ID NO: 2508682 - RNA, 19 nt, Artificial Sequence
  Description of Artificial Sequence: Synthetic oligonucleotide
  Sense strand starting at position 2770 of SEQ ID NO: 1888072
aaguguaaagccuguugaa

SEQ ID NO: 2508683 - RNA, 19 nt, Artificial Sequence
  Description of Artificial Sequence: Synthetic oligonucleotide
  Antisense strand to SEQ ID NO: 2508682
uucaacaggcuuuacacuu

SEQ ID NO: 2508684 - RNA, 19 nt, Artificial Sequence
  Description of Artificial Sequence: Synthetic oligonucleotide
  Sense strand starting at position 2921 of SEQ ID NO: 1888072
agauuagucucaccaggag

SEQ ID NO: 2508685 - RNA, 19 nt, Artificial Sequence
  Description of Artificial Sequence: Synthetic oligonucleotide
  Antisense strand to SEQ ID NO: 2508684
cuccuggugagacuaaucu

SEQ ID NO: 2508686 - RNA, 19 nt, Artificial Sequence
  Description of Artificial Sequence: Synthetic oligonucleotide
  Sense strand starting at position 2924 of SEQ ID NO: 1888072
uuagucucaccaggaguua

SEQ ID NO: 2508687 - RNA, 19 nt, Artificial Sequence
  Description of Artificial Sequence: Synthetic oligonucleotide
  Antisense strand to SEQ ID NO: 2508686
uaacuccuggugagacuaa

SEQ ID NO: 2508688 - RNA, 19 nt, Artificial Sequence
  Description of Artificial Sequence: Synthetic oligonucleotide
  Sense strand starting at position 2925 of SEQ ID NO: 1888072
uagucucaccaggaguuaa

SEQ ID NO: 2508689 - RNA, 19 nt, Artificial Sequence
  Description of Artificial Sequence: Synthetic oligonucleotide
  Antisense strand to SEQ ID NO: 2508688
uuaacuccuggugagacua

SEQ ID NO: 2508690 - RNA, 19 nt, Artificial Sequence
  Description of Artificial Sequence: Synthetic oligonucleotide
  Sense strand starting at position 2959 of SEQ ID NO: 1888072
uacauuguugcauguaguu

SEQ ID NO: 2508691 - RNA, 19 nt, Artificial Sequence
  Description of Artificial Sequence: Synthetic oligonucleotide
  Antisense strand to SEQ ID NO: 2508690
aacuacaugcaacaaugua

SEQ ID NO: 2508692 - RNA, 19 nt, Artificial Sequence
  Description of Artificial Sequence: Synthetic oligonucleotide
  Sense strand starting at position 3368 of SEQ ID NO: 1888072
gcauguggguuuccacuua

SEQ ID NO: 2508693 - RNA, 19 nt, Artificial Sequence
  Description of Artificial Sequence: Synthetic oligonucleotide
  Antisense strand to SEQ ID NO: 2508692
uaaguggaaacccacaugc

SEQ ID NO: 2508694 - RNA, 19 nt, Artificial Sequence
  Description of Artificial Sequence: Synthetic oligonucleotide
  Sense strand starting at position 36 of SEQ ID NO: 1888073
ucaugacaacccuggaagu

SEQ ID NO: 2508695 - RNA, 19 nt, Artificial Sequence
  Description of Artificial Sequence: Synthetic oligonucleotide
  Antisense strand to SEQ ID NO: 2508694
acuuccaggguugucauga

SEQ ID NO: 2508696 - RNA, 19 nt, Artificial Sequence
  Description of Artificial Sequence: Synthetic oligonucleotide
  Sense strand starting at position 46 of SEQ ID NO: 1888073
ccuggaaguuaaguauuau

SEQ ID NO: 2508697 - RNA, 19 nt, Artificial Sequence
  Description of Artificial Sequence: Synthetic oligonucleotide
  Antisense strand to SEQ ID NO: 2508696
auaauacuuaacuuccagg

SEQ ID NO: 2508698 - RNA, 19 nt, Artificial Sequence
  Description of Artificial Sequence: Synthetic oligonucleotide
  Sense strand starting at position 154 of SEQ ID NO: 1888073
gggcaucugucuuuaauuu

SEQ ID NO: 2508699 - RNA, 19 nt, Artificial Sequence
  Description of Artificial Sequence: Synthetic oligonucleotide
  Antisense strand to SEQ ID NO: 2508698
aaauuaaagacagaugccc

SEQ ID NO: 2508700 - RNA, 19 nt, Artificial Sequence
  Description of Artificial Sequence: Synthetic oligonucleotide
  Sense strand starting at position 299 of SEQ ID NO: 1888073
guggcugagauggauuaua

SEQ ID NO: 2508701 - RNA, 19 nt, Artificial Sequence
  Description of Artificial Sequence: Synthetic oligonucleotide
  Antisense strand to SEQ ID NO: 2508700
uauaauccaucucagccac

SEQ ID NO: 2508702 - RNA, 19 nt, Artificial Sequence
  Description of Artificial Sequence: Synthetic oligonucleotide
  Sense strand starting at position 399 of SEQ ID NO: 1888073
ugacuugggucuuccaaug

SEQ ID NO: 2508703 - RNA, 19 nt, Artificial Sequence
  Description of Artificial Sequence: Synthetic oligonucleotide
  Antisense strand to SEQ ID NO: 2508702
cauuggaagacccaaguca

SEQ ID NO: 2508704 - RNA, 19 nt, Artificial Sequence
  Description of Artificial Sequence: Synthetic oligonucleotide
  Sense strand starting at position 483 of SEQ ID NO: 1888073
uuugcagagccgucuuguu

SEQ ID NO: 2508705 - RNA, 19 nt, Artificial Sequence
  Description of Artificial Sequence: Synthetic oligonucleotide
  Antisense strand to SEQ ID NO: 2508704
aacaagacggcucugcaaa

SEQ ID NO: 2508706 - RNA, 19 nt, Artificial Sequence
  Description of Artificial Sequence: Synthetic oligonucleotide
  Sense strand starting at position 572 of SEQ ID NO: 1888073
cccugaauacccgagguga

SEQ ID NO: 2508707 - RNA, 19 nt, Artificial Sequence
  Description of Artificial Sequence: Synthetic oligonucleotide
  Antisense strand to SEQ ID NO: 2508706
ucaccucggguauucaggg

SEQ ID NO: 2508708 - RNA, 19 nt, Artificial Sequence
  Description of Artificial Sequence: Synthetic oligonucleotide
  Sense strand starting at position 589 of SEQ ID NO: 1888073
gaccuucuguccuuggaca

SEQ ID NO: 2508709 - RNA, 19 nt, Artificial Sequence
  Description of Artificial Sequence: Synthetic oligonucleotide
  Antisense strand to SEQ ID NO: 2508708
uguccaaggacagaagguc

SEQ ID NO: 2508710 - RNA, 19 nt, Artificial Sequence
  Description of Artificial Sequence: Synthetic oligonucleotide
  Sense strand starting at position 1162 of SEQ ID NO: 1888073
augauuagcagcuggguaa

SEQ ID NO: 2508711 - RNA, 19 nt, Artificial Sequence
  Description of Artificial Sequence: Synthetic oligonucleotide
  Antisense strand to SEQ ID NO: 2508710
uuacccagcugcuaaucau

SEQ ID NO: 2508712 - RNA, 19 nt, Artificial Sequence
  Description of Artificial Sequence: Synthetic oligonucleotide
  Sense strand starting at position 1181 of SEQ ID NO: 1888073
guuggucuuaaucaggcua

SEQ ID NO: 2508713 - RNA, 19 nt, Artificial Sequence
  Description of Artificial Sequence: Synthetic oligonucleotide
  Antisense strand to SEQ ID NO: 2508712
uagccugauuaagaccaac

SEQ ID NO: 2508714 - RNA, 19 nt, Artificial Sequence
  Description of Artificial Sequence: Synthetic oligonucleotide
  Sense strand starting at position 1246 of SEQ ID NO: 1888073
aguuaaccacaugaauguu

SEQ ID NO: 2508715 - RNA, 19 nt, Artificial Sequence
  Description of Artificial Sequence: Synthetic oligonucleotide
  Antisense strand to SEQ ID NO: 2508714
aacauucaugugguuaacu

SEQ ID NO: 2508716 - RNA, 19 nt, Artificial Sequence
  Description of Artificial Sequence: Synthetic oligonucleotide
  Sense strand starting at position 1319 of SEQ ID NO: 1888073
gaaauacuccugugacaag

SEQ ID NO: 2508717 - RNA, 19 nt, Artificial Sequence
  Description of Artificial Sequence: Synthetic oligonucleotide
  Antisense strand to SEQ ID NO: 2508716
cuugucacaggaguauuuc

SEQ ID NO: 2508718 - RNA, 19 nt, Artificial Sequence
  Description of Artificial Sequence: Synthetic oligonucleotide
  Sense strand starting at position 1378 of SEQ ID NO: 1888073
cccaucaucgggugaacaa

SEQ ID NO: 2508719 - RNA, 19 nt, Artificial Sequence
  Description of Artificial Sequence: Synthetic oligonucleotide
  Antisense strand to SEQ ID NO: 2508718
uuguucacccgaugauggg

SEQ ID NO: 2508720 - RNA, 19 nt, Artificial Sequence
  Description of Artificial Sequence: Synthetic oligonucleotide
  Sense strand starting at position 1406 of SEQ ID NO: 1888073
cacucauggucugugauga

SEQ ID NO: 2508721 - RNA, 19 nt, Artificial Sequence
  Description of Artificial Sequence: Synthetic oligonucleotide
  Antisense strand to SEQ ID NO: 2508720
ucaucacagaccaugagug

SEQ ID NO: 2508722 - RNA, 19 nt, Artificial Sequence
  Description of Artificial Sequence: Synthetic oligonucleotide
  Sense strand starting at position 1407 of SEQ ID NO: 1888073
acucauggucugugaugaa

SEQ ID NO: 2508723 - RNA, 19 nt, Artificial Sequence
  Description of Artificial Sequence: Synthetic oligonucleotide
  Antisense strand to SEQ ID NO: 2508722
uucaucacagaccaugagu

SEQ ID NO: 2508724 - RNA, 19 nt, Artificial Sequence
  Description of Artificial Sequence: Synthetic oligonucleotide
  Sense strand starting at position 1594 of SEQ ID NO: 1888073
ccacuaaauggguggguua

SEQ ID NO: 2508725 - RNA, 19 nt, Artificial Sequence
  Description of Artificial Sequence: Synthetic oligonucleotide
  Antisense strand to SEQ ID NO: 2508724
uaacccacccauuuagugg

SEQ ID NO: 2508726 - RNA, 19 nt, Artificial Sequence
  Description of Artificial Sequence: Synthetic oligonucleotide
  Sense strand starting at position 1644 of SEQ ID NO: 1888073
gugggugccugauuugauu

SEQ ID NO: 2508727 - RNA, 19 nt, Artificial Sequence
  Description of Artificial Sequence: Synthetic oligonucleotide
  Antisense strand to SEQ ID NO: 2508726
aaucaaaucaggcacccac

SEQ ID NO: 2508728 - RNA, 19 nt, Artificial Sequence
  Description of Artificial Sequence: Synthetic oligonucleotide
  Sense strand starting at position 1673 of SEQ ID NO: 1888073
ggccuuugccgagugcaga

SEQ ID NO: 2508729 - RNA, 19 nt, Artificial Sequence
  Description of Artificial Sequence: Synthetic oligonucleotide
  Antisense strand to SEQ ID NO: 2508728
ucugcacucggcaaaggcc

SEQ ID NO: 2508730 - RNA, 19 nt, Artificial Sequence
  Description of Artificial Sequence: Synthetic oligonucleotide
  Sense strand starting at position 1693 of SEQ ID NO: 1888073
ggugguaugaguggcauuu

SEQ ID NO: 2508731 - RNA, 19 nt, Artificial Sequence
  Description of Artificial Sequence: Synthetic oligonucleotide
  Antisense strand to SEQ ID NO: 2508730
aaaugccacucauaccacc

SEQ ID NO: 2508732 - RNA, 19 nt, Artificial Sequence
  Description of Artificial Sequence: Synthetic oligonucleotide
  Sense strand starting at position 1747 of SEQ ID NO: 1888073
cugguaucugccguuggua

SEQ ID NO: 2508733 - RNA, 19 nt, Artificial Sequence
  Description of Artificial Sequence: Synthetic oligonucleotide
  Antisense strand to SEQ ID NO: 2508732
uaccaacggcagauaccag

SEQ ID NO: 2508734 - RNA, 19 nt, Artificial Sequence
  Description of Artificial Sequence: Synthetic oligonucleotide
  Sense strand starting at position 1748 of SEQ ID NO: 1888073
ugguaucugccguugguau

SEQ ID NO: 2508735 - RNA, 19 nt, Artificial Sequence
  Description of Artificial Sequence: Synthetic oligonucleotide
  Antisense strand to SEQ ID NO: 2508734
auaccaacggcagauacca

SEQ ID NO: 2508736 - RNA, 19 nt, Artificial Sequence
  Description of Artificial Sequence: Synthetic oligonucleotide
  Sense strand starting at position 1956 of SEQ ID NO: 1888073
uggaguuuggucagugguu

SEQ ID NO: 2508737 - RNA, 19 nt, Artificial Sequence
  Description of Artificial Sequence: Synthetic oligonucleotide
  Antisense strand to SEQ ID NO: 2508736
aaccacugaccaaacucca

SEQ ID NO: 2508738 - RNA, 19 nt, Artificial Sequence
  Description of Artificial Sequence: Synthetic oligonucleotide
  Sense strand starting at position 1986 of SEQ ID NO: 1888073
uugugagauaguuaggacu

SEQ ID NO: 2508739 - RNA, 19 nt, Artificial Sequence
  Description of Artificial Sequence: Synthetic oligonucleotide
  Antisense strand to SEQ ID NO: 2508738
aguccuaacuaucucacaa

SEQ ID NO: 2508740 - RNA, 19 nt, Artificial Sequence
  Description of Artificial Sequence: Synthetic oligonucleotide
  Sense strand starting at position 1997 of SEQ ID NO: 1888073
uuaggacuuuguccacaaa

SEQ ID NO: 2508741 - RNA, 19 nt, Artificial Sequence
  Description of Artificial Sequence: Synthetic oligonucleotide
  Antisense strand to SEQ ID NO: 2508740
uuuguggacaaaguccuaa

SEQ ID NO: 2508742 - RNA, 19 nt, Artificial Sequence
  Description of Artificial Sequence: Synthetic oligonucleotide
  Sense strand starting at position 2273 of SEQ ID NO: 1888073
gggauaaggugcuuuacuu

SEQ ID NO: 2508743 - RNA, 19 nt, Artificial Sequence
  Description of Artificial Sequence: Synthetic oligonucleotide
  Antisense strand to SEQ ID NO: 2508742
aaguaaagcaccuuauccc

SEQ ID NO: 2508744 - RNA, 19 nt, Artificial Sequence
  Description of Artificial Sequence: Synthetic oligonucleotide
  Sense strand starting at position 2381 of SEQ ID NO: 1888073
ggagucaugaugcaggcaa

SEQ ID NO: 2508745 - RNA, 19 nt, Artificial Sequence
  Description of Artificial Sequence: Synthetic oligonucleotide
  Antisense strand to SEQ ID NO: 2508744
uugccugcaucaugacucc

SEQ ID NO: 2508746 - RNA, 19 nt, Artificial Sequence
  Description of Artificial Sequence: Synthetic oligonucleotide
  Sense strand starting at position 3024 of SEQ ID NO: 1888073
gccuacacguggucauuua

SEQ ID NO: 2508747 - RNA, 19 nt, Artificial Sequence
  Description of Artificial Sequence: Synthetic oligonucleotide
  Antisense strand to SEQ ID NO: 2508746
uaaaugaccacguguaggc

SEQ ID NO: 2508748 - RNA, 19 nt, Artificial Sequence
  Description of Artificial Sequence: Synthetic oligonucleotide
  Sense strand starting at position 3228 of SEQ ID NO: 1888073
ggcuaagaagcuuaucuac

SEQ ID NO: 2508749 - RNA, 19 nt, Artificial Sequence
  Description of Artificial Sequence: Synthetic oligonucleotide
  Antisense strand to SEQ ID NO: 2508748
guagauaagcuucuuagcc

SEQ ID NO: 2508750 - RNA, 19 nt, Artificial Sequence
  Description of Artificial Sequence: Synthetic oligonucleotide
  Sense strand starting at position 3286 of SEQ ID NO: 1888073
ccuuguacagaaggaguaa

SEQ ID NO: 2508751 - RNA, 19 nt, Artificial Sequence
  Description of Artificial Sequence: Synthetic oligonucleotide
  Antisense strand to SEQ ID NO: 2508750
uuacuccuucuguacaagg

SEQ ID NO: 2508752 - RNA, 19 nt, Artificial Sequence
  Description of Artificial Sequence: Synthetic oligonucleotide
  Sense strand starting at position 3362 of SEQ ID NO: 1888073
auaaauagucacugguaua

SEQ ID NO: 2508753 - RNA, 19 nt, Artificial Sequence
  Description of Artificial Sequence: Synthetic oligonucleotide
  Antisense strand to SEQ ID NO: 2508752
uauaccagugacuauuuau

SEQ ID NO: 2508754 - RNA, 19 nt, Artificial Sequence
  Description of Artificial Sequence: Synthetic oligonucleotide
  Sense strand starting at position 3481 of SEQ ID NO: 1888073
ugugacauuugcucuguga

SEQ ID NO: 2508755 - RNA, 19 nt, Artificial Sequence
  Description of Artificial Sequence: Synthetic oligonucleotide
  Antisense strand to SEQ ID NO: 2508754
ucacagagcaaaugucaca

SEQ ID NO: 2508756 - RNA, 19 nt, Artificial Sequence
  Description of Artificial Sequence: Synthetic oligonucleotide
  Sense strand starting at position 3483 of SEQ ID NO: 1888073
ugacauuugcucugugacu

SEQ ID NO: 2508757 - RNA, 19 nt, Artificial Sequence
  Description of Artificial Sequence: Synthetic oligonucleotide
  Antisense strand to SEQ ID NO: 2508756
agucacagagcaaauguca

SEQ ID NO: 2508758 - RNA, 19 nt, Artificial Sequence
  Description of Artificial Sequence: Synthetic oligonucleotide
  Sense strand starting at position 3484 of SEQ ID NO: 1888073
gacauuugcucugugacuu

SEQ ID NO: 2508759 - RNA, 19 nt, Artificial Sequence
  Description of Artificial Sequence: Synthetic oligonucleotide
  Antisense strand to SEQ ID NO: 2508758
aagucacagagcaaauguc

SEQ ID NO: 2508760 - RNA, 19 nt, Artificial Sequence
  Description of Artificial Sequence: Synthetic oligonucleotide
  Sense strand starting at position 3485 of SEQ ID NO: 1888073
acauuugcucugugacuuc

SEQ ID NO: 2508761 - RNA, 19 nt, Artificial Sequence
  Description of Artificial Sequence: Synthetic oligonucleotide
  Antisense strand to SEQ ID NO: 2508760
gaagucacagagcaaaugu

SEQ ID NO: 2508762 - RNA, 19 nt, Artificial Sequence
  Description of Artificial Sequence: Synthetic oligonucleotide
  Sense strand starting at position 3505 of SEQ ID NO: 1888073
uguauuuauuaugugcuca

SEQ ID NO: 2508763 - RNA, 19 nt, Artificial Sequence
  Description of Artificial Sequence: Synthetic oligonucleotide
  Antisense strand to SEQ ID NO: 2508762
ugagcacauaauaaauaca

SEQ ID NO: 2508764 - RNA, 19 nt, Artificial Sequence
  Description of Artificial Sequence: Synthetic oligonucleotide
  Sense strand starting at position 3533 of SEQ ID NO: 1888073
accuaagcauugucaggau

SEQ ID NO: 2508765 - RNA, 19 nt, Artificial Sequence
  Description of Artificial Sequence: Synthetic oligonucleotide
  Antisense strand to SEQ ID NO: 2508764
auccugacaaugcuuaggu

SEQ ID NO: 2508766 - RNA, 19 nt, Artificial Sequence
  Description of Artificial Sequence: Synthetic oligonucleotide
  Sense strand starting at position 3547 of SEQ ID NO: 1888073
aggauaauguucuuccuca

SEQ ID NO: 2508767 - RNA, 19 nt, Artificial Sequence
  Description of Artificial Sequence: Synthetic oligonucleotide
  Antisense strand to SEQ ID NO: 2508766
ugaggaagaacauuauccu

SEQ ID NO: 2508768 - RNA, 19 nt, Artificial Sequence
  Description of Artificial Sequence: Synthetic oligonucleotide
  Sense strand starting at position 3548 of SEQ ID NO: 1888073
ggauaauguucuuccucac

SEQ ID NO: 2508769 - RNA, 19 nt, Artificial Sequence
  Description of Artificial Sequence: Synthetic oligonucleotide
  Antisense strand to SEQ ID NO: 2508768
gugaggaagaacauuaucc

SEQ ID NO: 2508770 - RNA, 19 nt, Artificial Sequence
  Description of Artificial Sequence: Synthetic oligonucleotide
  Sense strand starting at position 3572 of SEQ ID NO: 1888073
ggcguuaugaaguugcuuu

SEQ ID NO: 2508771 - RNA, 19 nt, Artificial Sequence
  Description of Artificial Sequence: Synthetic oligonucleotide
  Antisense strand to SEQ ID NO: 2508770
aaagcaacuucauaacgcc

SEQ ID NO: 2508772 - RNA, 19 nt, Artificial Sequence
  Description of Artificial Sequence: Synthetic oligonucleotide
  Sense strand starting at position 3831 of SEQ ID NO: 1888073
ucuacugugcuauaagaac

SEQ ID NO: 2508773 - RNA, 19 nt, Artificial Sequence
  Description of Artificial Sequence: Synthetic oligonucleotide
  Antisense strand to SEQ ID NO: 2508772
guucuuauagcacaguaga

SEQ ID NO: 2508774 - RNA, 19 nt, Artificial Sequence
  Description of Artificial Sequence: Synthetic oligonucleotide
  Sense strand starting at position 146 of SEQ ID NO: 1888074
cguacuaucccacagauug

SEQ ID NO: 2508775 - RNA, 19 nt, Artificial Sequence
  Description of Artificial Sequence: Synthetic oligonucleotide
  Antisense strand to SEQ ID NO: 2508774
caaucugugggauaguacg

SEQ ID NO: 2508776 - RNA, 19 nt, Artificial Sequence
  Description of Artificial Sequence: Synthetic oligonucleotide
  Sense strand starting at position 269 of SEQ ID NO: 1888074
ugagaugcgguccauauga

SEQ ID NO: 2508777 - RNA, 19 nt, Artificial Sequence
  Description of Artificial Sequence: Synthetic oligonucleotide
  Antisense strand to SEQ ID NO: 2508776
ucauauggaccgcaucuca

SEQ ID NO: 2508778 - RNA, 19 nt, Artificial Sequence
  Description of Artificial Sequence: Synthetic oligonucleotide
  Sense strand starting at position 271 of SEQ ID NO: 1888074
agaugcgguccauaugaaa

SEQ ID NO: 2508779 - RNA, 19 nt, Artificial Sequence
  Description of Artificial Sequence: Synthetic oligonucleotide
  Antisense strand to SEQ ID NO: 2508778
uuucauauggaccgcaucu

SEQ ID NO: 2508780 - RNA, 19 nt, Artificial Sequence
  Description of Artificial Sequence: Synthetic oligonucleotide
  Sense strand starting at position 361 of SEQ ID NO: 1888074
agcucaauuguagacauau

SEQ ID NO: 2508781 - RNA, 19 nt, Artificial Sequence
  Description of Artificial Sequence: Synthetic oligonucleotide
  Antisense strand to SEQ ID NO: 2508780
auaugucuacaauugagcu

SEQ ID NO: 2508782 - RNA, 19 nt, Artificial Sequence
  Description of Artificial Sequence: Synthetic oligonucleotide
  Sense strand starting at position 390 of SEQ ID NO: 1888074
uaggacaucguuuacaaua

SEQ ID NO: 2508783 - RNA, 19 nt, Artificial Sequence
  Description of Artificial Sequence: Synthetic oligonucleotide
  Antisense strand to SEQ ID NO: 2508782
uauuguaaacgauguccua

SEQ ID NO: 2508784 - RNA, 19 nt, Artificial Sequence
  Description of Artificial Sequence: Synthetic oligonucleotide
  Sense strand starting at position 495 of SEQ ID NO: 1888074
gguuacauugcccaaacau

SEQ ID NO: 2508785 - RNA, 19 nt, Artificial Sequence
  Description of Artificial Sequence: Synthetic oligonucleotide
  Antisense strand to SEQ ID NO: 2508784
auguuugggcaauguaacc

SEQ ID NO: 2508786 - RNA, 19 nt, Artificial Sequence
  Description of Artificial Sequence: Synthetic oligonucleotide
  Sense strand starting at position 615 of SEQ ID NO: 1888074
cucugaaaguucuugagaa

SEQ ID NO: 2508787 - RNA, 19 nt, Artificial Sequence
  Description of Artificial Sequence: Synthetic oligonucleotide
  Antisense strand to SEQ ID NO: 2508786
uucucaagaacuuucagag

SEQ ID NO: 2508788 - RNA, 19 nt, Artificial Sequence
  Description of Artificial Sequence: Synthetic oligonucleotide
  Sense strand starting at position 838 of SEQ ID NO: 1888074
acauaauuccagugugaaa

SEQ ID NO: 2508789 - RNA, 19 nt, Artificial Sequence
  Description of Artificial Sequence: Synthetic oligonucleotide
  Antisense strand to SEQ ID NO: 2508788
uuucacacuggaauuaugu

SEQ ID NO: 2508790 - RNA, 19 nt, Artificial Sequence
  Description of Artificial Sequence: Synthetic oligonucleotide
  Sense strand starting at position 1309 of SEQ ID NO: 1888074
cugagagcuccuuacugag

SEQ ID NO: 2508791 - RNA, 19 nt, Artificial Sequence
  Description of Artificial Sequence: Synthetic oligonucleotide
  Antisense strand to SEQ ID NO: 2508790
cucaguaaggagcucucag

SEQ ID NO: 2508792 - RNA, 19 nt, Artificial Sequence
  Description of Artificial Sequence: Synthetic oligonucleotide
  Sense strand starting at position 1355 of SEQ ID NO: 1888074
ugcaauuccgaagacauca

SEQ ID NO: 2508793 - RNA, 19 nt, Artificial Sequence
  Description of Artificial Sequence: Synthetic oligonucleotide
  Antisense strand to SEQ ID NO: 2508792
ugaugucuucggaauugca

SEQ ID NO: 2508794 - RNA, 19 nt, Artificial Sequence
  Description of Artificial Sequence: Synthetic oligonucleotide
  Sense strand starting at position 1499 of SEQ ID NO: 1888074
aaaggcaaguucucaggaa

SEQ ID NO: 2508795 - RNA, 19 nt, Artificial Sequence
  Description of Artificial Sequence: Synthetic oligonucleotide
  Antisense strand to SEQ ID NO: 2508794
uuccugagaacuugccuuu

SEQ ID NO: 2508796 - RNA, 19 nt, Artificial Sequence
  Description of Artificial Sequence: Synthetic oligonucleotide
  Sense strand starting at position 1568 of SEQ ID NO: 1888074
gggacucauugcccugaaa

SEQ ID NO: 2508797 - RNA, 19 nt, Artificial Sequence
  Description of Artificial Sequence: Synthetic oligonucleotide
  Antisense strand to SEQ ID NO: 2508796
uuucagggcaaugaguccc

SEQ ID NO: 2508798 - RNA, 19 nt, Artificial Sequence
  Description of Artificial Sequence: Synthetic oligonucleotide
  Sense strand starting at position 2122 of SEQ ID NO: 1888074
uggcuaagaccauaccauu

SEQ ID NO: 2508799 - RNA, 19 nt, Artificial Sequence
  Description of Artificial Sequence: Synthetic oligonucleotide
  Antisense strand to SEQ ID NO: 2508798
aaugguauggucuuagcca

SEQ ID NO: 2508800 - RNA, 19 nt, Artificial Sequence
  Description of Artificial Sequence: Synthetic oligonucleotide
  Sense strand starting at position 2254 of SEQ ID NO: 1888074
gaauuagaguaaguguaca

SEQ ID NO: 2508801 - RNA, 19 nt, Artificial Sequence
  Description of Artificial Sequence: Synthetic oligonucleotide
  Antisense strand to SEQ ID NO: 2508800
uguacacuuacucuaauuc

SEQ ID NO: 2508802 - RNA, 19 nt, Artificial Sequence
  Description of Artificial Sequence: Synthetic oligonucleotide
  Sense strand starting at position 2259 of SEQ ID NO: 1888074
agaguaaguguacaucuaa

SEQ ID NO: 2508803 - RNA, 19 nt, Artificial Sequence
  Description of Artificial Sequence: Synthetic oligonucleotide
  Antisense strand to SEQ ID NO: 2508802
uuagauguacacuuacucu

SEQ ID NO: 2508804 - RNA, 19 nt, Artificial Sequence
  Description of Artificial Sequence: Synthetic oligonucleotide
  Sense strand starting at position 2326 of SEQ ID NO: 1888074
gcagaaagguaauuaaaug

SEQ ID NO: 2508805 - RNA, 19 nt, Artificial Sequence
  Description of Artificial Sequence: Synthetic oligonucleotide
  Antisense strand to SEQ ID NO: 2508804
cauuuaauuaccuuucugc

SEQ ID NO: 2508806 - RNA, 19 nt, Artificial Sequence
  Description of Artificial Sequence: Synthetic oligonucleotide
  Sense strand starting at position 2344 of SEQ ID NO: 1888074
ggacaugaauugucucuuu

SEQ ID NO: 2508807 - RNA, 19 nt, Artificial Sequence
  Description of Artificial Sequence: Synthetic oligonucleotide
  Antisense strand to SEQ ID NO: 2508806
aaagagacaauucaugucc

SEQ ID NO: 2508808 - RNA, 19 nt, Artificial Sequence
  Description of Artificial Sequence: Synthetic oligonucleotide
  Sense strand starting at position 2488 of SEQ ID NO: 1888074
cugugaucagcagauauug

SEQ ID NO: 2508809 - RNA, 19 nt, Artificial Sequence
  Description of Artificial Sequence: Synthetic oligonucleotide
  Antisense strand to SEQ ID NO: 2508808
caauaucugcugaucacag

SEQ ID NO: 2508810 - RNA, 19 nt, Artificial Sequence
  Description of Artificial Sequence: Synthetic oligonucleotide
  Sense strand starting at position 2606 of SEQ ID NO: 1888074
ggugcuuagcaggacauaa

SEQ ID NO: 2508811 - RNA, 19 nt, Artificial Sequence
  Description of Artificial Sequence: Synthetic oligonucleotide
  Antisense strand to SEQ ID NO: 2508810
uuauguccugcuaagcacc

SEQ ID NO: 2508812 - RNA, 19 nt, Artificial Sequence
  Description of Artificial Sequence: Synthetic oligonucleotide
  Sense strand starting at position 2733 of SEQ ID NO: 1888074
ggaccagcucugcaaagaa

SEQ ID NO: 2508813 - RNA, 19 nt, Artificial Sequence
  Description of Artificial Sequence: Synthetic oligonucleotide
  Antisense strand to SEQ ID NO: 2508812
uucuuugcagagcuggucc

SEQ ID NO: 2508814 - RNA, 19 nt, Artificial Sequence
  Description of Artificial Sequence: Synthetic oligonucleotide
  Sense strand starting at position 2786 of SEQ ID NO: 1888074
acaccaaagccuugagaua

SEQ ID NO: 2508815 - RNA, 19 nt, Artificial Sequence
  Description of Artificial Sequence: Synthetic oligonucleotide
  Antisense strand to SEQ ID NO: 2508814
uaucucaaggcuuuggugu

SEQ ID NO: 2508816 - RNA, 19 nt, Artificial Sequence
  Description of Artificial Sequence: Synthetic oligonucleotide
  Sense strand starting at position 2808 of SEQ ID NO: 1888074
aggacuuuggcaugacuaa

SEQ ID NO: 2508817 - RNA, 19 nt, Artificial Sequence
  Description of Artificial Sequence: Synthetic oligonucleotide
  Antisense strand to SEQ ID NO: 2508816
uuagucaugccaaaguccu

SEQ ID NO: 2508818 - RNA, 19 nt, Artificial Sequence
  Description of Artificial Sequence: Synthetic oligonucleotide
  Sense strand starting at position 2841 of SEQ ID NO: 1888074
acuggagaacaguguguaa

SEQ ID NO: 2508819 - RNA, 19 nt, Artificial Sequence
  Description of Artificial Sequence: Synthetic oligonucleotide
  Antisense strand to SEQ ID NO: 2508818
uuacacacuguucuccagu

SEQ ID NO: 2508820 - RNA, 19 nt, Artificial Sequence
  Description of Artificial Sequence: Synthetic oligonucleotide
  Sense strand starting at position 2979 of SEQ ID NO: 1888074
uccaucugaucaguggaua

SEQ ID NO: 2508821 - RNA, 19 nt, Artificial Sequence
  Description of Artificial Sequence: Synthetic oligonucleotide
  Antisense strand to SEQ ID NO: 2508820
uauccacugaucagaugga

SEQ ID NO: 2508822 - RNA, 19 nt, Artificial Sequence
  Description of Artificial Sequence: Synthetic oligonucleotide
  Sense strand starting at position 2980 of SEQ ID NO: 1888074
ccaucugaucaguggauaa

SEQ ID NO: 2508823 - RNA, 19 nt, Artificial Sequence
  Description of Artificial Sequence: Synthetic oligonucleotide
  Antisense strand to SEQ ID NO: 2508822
uuauccacugaucagaugg

SEQ ID NO: 2508824 - RNA, 19 nt, Artificial Sequence
  Description of Artificial Sequence: Synthetic oligonucleotide
  Sense strand starting at position 3182 of SEQ ID NO: 1888074
guuucacaaggguagaguu

SEQ ID NO: 2508825 - RNA, 19 nt, Artificial Sequence
  Description of Artificial Sequence: Synthetic oligonucleotide
  Antisense strand to SEQ ID NO: 2508824
aacucuacccuugugaaac

SEQ ID NO: 2508826 - RNA, 19 nt, Artificial Sequence
  Description of Artificial Sequence: Synthetic oligonucleotide
  Sense strand starting at position 3234 of SEQ ID NO: 1888074
augagaugccucugggaca

SEQ ID NO: 2508827 - RNA, 19 nt, Artificial Sequence
  Description of Artificial Sequence: Synthetic oligonucleotide
  Antisense strand to SEQ ID NO: 2508826
ugucccagaggcaucucau

SEQ ID NO: 2508828 - RNA, 19 nt, Artificial Sequence
  Description of Artificial Sequence: Synthetic oligonucleotide
  Sense strand starting at position 3239 of SEQ ID NO: 1888074
augccucugggacauguaa

SEQ ID NO: 2508829 - RNA, 19 nt, Artificial Sequence
  Description of Artificial Sequence: Synthetic oligonucleotide
  Antisense strand to SEQ ID NO: 2508828
uuacaugucccagaggcau

SEQ ID NO: 2508830 - RNA, 19 nt, Artificial Sequence
  Description of Artificial Sequence: Synthetic oligonucleotide
  Sense strand starting at position 3247 of SEQ ID NO: 1888074
gggacauguaagugaagau

SEQ ID NO: 2508831 - RNA, 19 nt, Artificial Sequence
  Description of Artificial Sequence: Synthetic oligonucleotide
  Antisense strand to SEQ ID NO: 2508830
aucuucacuuacauguccc

SEQ ID NO: 2508832 - RNA, 19 nt, Artificial Sequence
  Description of Artificial Sequence: Synthetic oligonucleotide
  Sense strand starting at position 3312 of SEQ ID NO: 1888074
ucaugaugaaagugguaaa

SEQ ID NO: 2508833 - RNA, 19 nt, Artificial Sequence
  Description of Artificial Sequence: Synthetic oligonucleotide
  Antisense strand to SEQ ID NO: 2508832
uuuaccacuuucaucauga

SEQ ID NO: 2508834 - RNA, 19 nt, Artificial Sequence
  Description of Artificial Sequence: Synthetic oligonucleotide
  Sense strand starting at position 3387 of SEQ ID NO: 1888074
aggacuucuaucgaaugcu

SEQ ID NO: 2508835 - RNA, 19 nt, Artificial Sequence
  Description of Artificial Sequence: Synthetic oligonucleotide
  Antisense strand to SEQ ID NO: 2508834
agcauucgauagaaguccu

SEQ ID NO: 2508836 - RNA, 19 nt, Artificial Sequence
  Description of Artificial Sequence: Synthetic oligonucleotide
  Sense strand starting at position 3464 of SEQ ID NO: 1888074
caugacuggugaccugaau

SEQ ID NO: 2508837 - RNA, 19 nt, Artificial Sequence
  Description of Artificial Sequence: Synthetic oligonucleotide
  Antisense strand to SEQ ID NO: 2508836
auucaggucaccagucaug

SEQ ID NO: 2508838 - RNA, 19 nt, Artificial Sequence
  Description of Artificial Sequence: Synthetic oligonucleotide
  Sense strand starting at position 3534 of SEQ ID NO: 1888074
gugucuauuggguaaagga

SEQ ID NO: 2508839 - RNA, 19 nt, Artificial Sequence
  Description of Artificial Sequence: Synthetic oligonucleotide
  Antisense strand to SEQ ID NO: 2508838
uccuuuacccaauagacac

SEQ ID NO: 2508840 - RNA, 19 nt, Artificial Sequence
  Description of Artificial Sequence: Synthetic oligonucleotide
  Sense strand starting at position 3688 of SEQ ID NO: 1888074
aucugugaggcugaugaga

SEQ ID NO: 2508841 - RNA, 19 nt, Artificial Sequence
  Description of Artificial Sequence: Synthetic oligonucleotide
  Antisense strand to SEQ ID NO: 2508840
ucucaucagccucacagau

SEQ ID NO: 2508842 - RNA, 19 nt, Artificial Sequence
  Description of Artificial Sequence: Synthetic oligonucleotide
  Sense strand starting at position 3696 of SEQ ID NO: 1888074
ggcugaugagaacgaucca

SEQ ID NO: 2508843 - RNA, 19 nt, Artificial Sequence
  Description of Artificial Sequence: Synthetic oligonucleotide
  Antisense strand to SEQ ID NO: 2508842
uggaucguucucaucagcc

SEQ ID NO: 2508844 - RNA, 19 nt, Artificial Sequence
  Description of Artificial Sequence: Synthetic oligonucleotide
  Sense strand starting at position 3787 of SEQ ID NO: 1888074
gggcuaugugugagcauug

SEQ ID NO: 2508845 - RNA, 19 nt, Artificial Sequence
  Description of Artificial Sequence: Synthetic oligonucleotide
  Antisense strand to SEQ ID NO: 2508844
caaugcucacacauagccc

SEQ ID NO: 2508846 - RNA, 19 nt, Artificial Sequence
  Description of Artificial Sequence: Synthetic oligonucleotide
  Sense strand starting at position 3834 of SEQ ID NO: 1888074
cuguguaacaauugggaag

SEQ ID NO: 2508847 - RNA, 19 nt, Artificial Sequence
  Description of Artificial Sequence: Synthetic oligonucleotide
  Antisense strand to SEQ ID NO: 2508846
cuucccaauuguuacacag

SEQ ID NO: 2508848 - RNA, 19 nt, Artificial Sequence
  Description of Artificial Sequence: Synthetic oligonucleotide
  Sense strand starting at position 3835 of SEQ ID NO: 1888074
uguguaacaauugggaaga

SEQ ID NO: 2508849 - RNA, 19 nt, Artificial Sequence
  Description of Artificial Sequence: Synthetic oligonucleotide
  Antisense strand to SEQ ID NO: 2508848
ucuucccaauuguuacaca

SEQ ID NO: 2508850 - RNA, 19 nt, Artificial Sequence
  Description of Artificial Sequence: Synthetic oligonucleotide
  Sense strand starting at position 3864 of SEQ ID NO: 1888074
gagcuaugcagacaggagu

SEQ ID NO: 2508851 - RNA, 19 nt, Artificial Sequence
  Description of Artificial Sequence: Synthetic oligonucleotide
  Antisense strand to SEQ ID NO: 2508850
acuccugucugcauagcuc

SEQ ID NO: 2508852 - RNA, 19 nt, Artificial Sequence
  Description of Artificial Sequence: Synthetic oligonucleotide
  Sense strand starting at position 3881 of SEQ ID NO: 1888074
guauaaauagagugauggu

SEQ ID NO: 2508853 - RNA, 19 nt, Artificial Sequence
  Description of Artificial Sequence: Synthetic oligonucleotide
  Antisense strand to SEQ ID NO: 2508852
accaucacucuauuuauac

SEQ ID NO: 2508854 - RNA, 19 nt, Artificial Sequence
  Description of Artificial Sequence: Synthetic oligonucleotide
  Sense strand starting at position 98 of SEQ ID NO: 1888075
gguuccagcuccuucuuua

SEQ ID NO: 2508855 - RNA, 19 nt, Artificial Sequence
  Description of Artificial Sequence: Synthetic oligonucleotide
  Antisense strand to SEQ ID NO: 2508854
uaaagaaggagcuggaacc

SEQ ID NO: 2508856 - RNA, 19 nt, Artificial Sequence
  Description of Artificial Sequence: Synthetic oligonucleotide
  Sense strand starting at position 111 of SEQ ID NO: 1888075
ucuuuaagugagggcaaua

SEQ ID NO: 2508857 - RNA, 19 nt, Artificial Sequence
  Description of Artificial Sequence: Synthetic oligonucleotide
  Antisense strand to SEQ ID NO: 2508856
uauugcccucacuuaaaga

SEQ ID NO: 2508858 - RNA, 19 nt, Artificial Sequence
  Description of Artificial Sequence: Synthetic oligonucleotide
  Sense strand starting at position 124 of SEQ ID NO: 1888075
gcaauauucucagccagag

SEQ ID NO: 2508859 - RNA, 19 nt, Artificial Sequence
  Description of Artificial Sequence: Synthetic oligonucleotide
  Antisense strand to SEQ ID NO: 2508858
cucuggcugagaauauugc

SEQ ID NO: 2508860 - RNA, 19 nt, Artificial Sequence
  Description of Artificial Sequence: Synthetic oligonucleotide
  Sense strand starting at position 128 of SEQ ID NO: 1888075
uauucucagccagagguuu

SEQ ID NO: 2508861 - RNA, 19 nt, Artificial Sequence
  Description of Artificial Sequence: Synthetic oligonucleotide
  Antisense strand to SEQ ID NO: 2508860
aaaccucuggcugagaaua

SEQ ID NO: 2508862 - RNA, 19 nt, Artificial Sequence
  Description of Artificial Sequence: Synthetic oligonucleotide
  Sense strand starting at position 239 of SEQ ID NO: 1888075
aggcucugguuccugagaa

SEQ ID NO: 2508863 - RNA, 19 nt, Artificial Sequence
  Description of Artificial Sequence: Synthetic oligonucleotide
  Antisense strand to SEQ ID NO: 2508862
uucucaggaaccagagccu

SEQ ID NO: 2508864 - RNA, 19 nt, Artificial Sequence
  Description of Artificial Sequence: Synthetic oligonucleotide
  Sense strand starting at position 318 of SEQ ID NO: 1888075
ggugucccuagugauuaca

SEQ ID NO: 2508865 - RNA, 19 nt, Artificial Sequence
  Description of Artificial Sequence: Synthetic oligonucleotide
  Antisense strand to SEQ ID NO: 2508864
uguaaucacuagggacacc

SEQ ID NO: 2508866 - RNA, 19 nt, Artificial Sequence
  Description of Artificial Sequence: Synthetic oligonucleotide
  Sense strand starting at position 341 of SEQ ID NO: 1888075
acuggucugccucagacau

SEQ ID NO: 2508867 - RNA, 19 nt, Artificial Sequence
  Description of Artificial Sequence: Synthetic oligonucleotide
  Antisense strand to SEQ ID NO: 2508866
augucugaggcagaccagu

SEQ ID NO: 2508868 - RNA, 19 nt, Artificial Sequence
  Description of Artificial Sequence: Synthetic oligonucleotide
  Sense strand starting at position 354 of SEQ ID NO: 1888075
agacauauccagugggugu

SEQ ID NO: 2508869 - RNA, 19 nt, Artificial Sequence
  Description of Artificial Sequence: Synthetic oligonucleotide
  Antisense strand to SEQ ID NO: 2508868
acacccacuggauaugucu

SEQ ID NO: 2508870 - RNA, 19 nt, Artificial Sequence
  Description of Artificial Sequence: Synthetic oligonucleotide
  Sense strand starting at position 404 of SEQ ID NO: 1888075
cauggcuauggcugauuga

SEQ ID NO: 2508871 - RNA, 19 nt, Artificial Sequence
  Description of Artificial Sequence: Synthetic oligonucleotide
  Antisense strand to SEQ ID NO: 2508870
ucaaucagccauagccaug

SEQ ID NO: 2508872 - RNA, 19 nt, Artificial Sequence
  Description of Artificial Sequence: Synthetic oligonucleotide
  Sense strand starting at position 405 of SEQ ID NO: 1888075
auggcuauggcugauugaa

SEQ ID NO: 2508873 - RNA, 19 nt, Artificial Sequence
  Description of Artificial Sequence: Synthetic oligonucleotide
  Antisense strand to SEQ ID NO: 2508872
uucaaucagccauagccau

SEQ ID NO: 2508874 - RNA, 19 nt, Artificial Sequence
  Description of Artificial Sequence: Synthetic oligonucleotide
  Sense strand starting at position 407 of SEQ ID NO: 1888075
ggcuauggcugauugaaca

SEQ ID NO: 2508875 - RNA, 19 nt, Artificial Sequence
  Description of Artificial Sequence: Synthetic oligonucleotide
  Antisense strand to SEQ ID NO: 2508874
uguucaaucagccauagcc

SEQ ID NO: 2508876 - RNA, 19 nt, Artificial Sequence
  Description of Artificial Sequence: Synthetic oligonucleotide
  Sense strand starting at position 458 of SEQ ID NO: 1888075
ggagcugauaucugguaga

SEQ ID NO: 2508877 - RNA, 19 nt, Artificial Sequence
  Description of Artificial Sequence: Synthetic oligonucleotide
  Antisense strand to SEQ ID NO: 2508876
ucuaccagauaucagcucc

SEQ ID NO: 2508878 - RNA, 19 nt, Artificial Sequence
  Description of Artificial Sequence: Synthetic oligonucleotide
  Sense strand starting at position 565 of SEQ ID NO: 1888075
ucagcuucuugagagaacu

SEQ ID NO: 2508879 - RNA, 19 nt, Artificial Sequence
  Description of Artificial Sequence: Synthetic oligonucleotide
  Antisense strand to SEQ ID NO: 2508878
aguucucucaagaagcuga

SEQ ID NO: 2508880 - RNA, 19 nt, Artificial Sequence
  Description of Artificial Sequence: Synthetic oligonucleotide
  Sense strand starting at position 587 of SEQ ID NO: 1888075
gguccugugggacacgaua

SEQ ID NO: 2508881 - RNA, 19 nt, Artificial Sequence
  Description of Artificial Sequence: Synthetic oligonucleotide
  Antisense strand to SEQ ID NO: 2508880
uaucgugucccacaggacc

SEQ ID NO: 2508882 - RNA, 19 nt, Artificial Sequence
  Description of Artificial Sequence: Synthetic oligonucleotide
  Sense strand starting at position 625 of SEQ ID NO: 1888075
gucaucugguggcuuacau

SEQ ID NO: 2508883 - RNA, 19 nt, Artificial Sequence
  Description of Artificial Sequence: Synthetic oligonucleotide
  Antisense strand to SEQ ID NO: 2508882
auguaagccaccagaugac

SEQ ID NO: 2508884 - RNA, 19 nt, Artificial Sequence
  Description of Artificial Sequence: Synthetic oligonucleotide
  Sense strand starting at position 642 of SEQ ID NO: 1888075
augagcucccuguguguuu

SEQ ID NO: 2508885 - RNA, 19 nt, Artificial Sequence
  Description of Artificial Sequence: Synthetic oligonucleotide
  Antisense strand to SEQ ID NO: 2508884
aaacacacagggagcucau

SEQ ID NO: 2508886 - RNA, 19 nt, Artificial Sequence
  Description of Artificial Sequence: Synthetic oligonucleotide
  Sense strand starting at position 651 of SEQ ID NO: 1888075
cuguguguuucuguuacuu

SEQ ID NO: 2508887 - RNA, 19 nt, Artificial Sequence
  Description of Artificial Sequence: Synthetic oligonucleotide
  Antisense strand to SEQ ID NO: 2508886
aaguaacagaaacacacag

SEQ ID NO: 2508888 - RNA, 19 nt, Artificial Sequence
  Description of Artificial Sequence: Synthetic oligonucleotide
  Sense strand starting at position 655 of SEQ ID NO: 1888075
guguuucuguuacuugcua

SEQ ID NO: 2508889 - RNA, 19 nt, Artificial Sequence
  Description of Artificial Sequence: Synthetic oligonucleotide
  Antisense strand to SEQ ID NO: 2508888
uagcaaguaacagaaacac

SEQ ID NO: 2508890 - RNA, 19 nt, Artificial Sequence
  Description of Artificial Sequence: Synthetic oligonucleotide
  Sense strand starting at position 663 of SEQ ID NO: 1888075
guuacuugcuagccacaaa

SEQ ID NO: 2508891 - RNA, 19 nt, Artificial Sequence
  Description of Artificial Sequence: Synthetic oligonucleotide
  Antisense strand to SEQ ID NO: 2508890
uuuguggcuagcaaguaac

SEQ ID NO: 2508892 - RNA, 19 nt, Artificial Sequence
  Description of Artificial Sequence: Synthetic oligonucleotide
  Sense strand starting at position 729 of SEQ ID NO: 1888075
ucucuauagcgcugugaag

SEQ ID NO: 2508893 - RNA, 19 nt, Artificial Sequence
  Description of Artificial Sequence: Synthetic oligonucleotide
  Antisense strand to SEQ ID NO: 2508892
cuucacagcgcuauagaga

SEQ ID NO: 2508894 - RNA, 19 nt, Artificial Sequence
  Description of Artificial Sequence: Synthetic oligonucleotide
  Sense strand starting at position 747 of SEQ ID NO: 1888075
gcaaauguccugcaucauc

SEQ ID NO: 2508895 - RNA, 19 nt, Artificial Sequence
  Description of Artificial Sequence: Synthetic oligonucleotide
  Antisense strand to SEQ ID NO: 2508894
gaugaugcaggacauuugc

SEQ ID NO: 2508896 - RNA, 19 nt, Artificial Sequence
  Description of Artificial Sequence: Synthetic oligonucleotide
  Sense strand starting at position 820 of SEQ ID NO: 1888075
cggacugcucaguguggaa

SEQ ID NO: 2508897 - RNA, 19 nt, Artificial Sequence
  Description of Artificial Sequence: Synthetic oligonucleotide
  Antisense strand to SEQ ID NO: 2508896
uuccacacugagcaguccg

SEQ ID NO: 2508898 - RNA, 19 nt, Artificial Sequence
  Description of Artificial Sequence: Synthetic oligonucleotide
  Sense strand starting at position 891 of SEQ ID NO: 1888075
guggauaagucccagaaga

SEQ ID NO: 2508899 - RNA, 19 nt, Artificial Sequence
  Description of Artificial Sequence: Synthetic oligonucleotide
  Antisense strand to SEQ ID NO: 2508898
ucuucugggacuuauccac

SEQ ID NO: 2508900 - RNA, 19 nt, Artificial Sequence
  Description of Artificial Sequence: Synthetic oligonucleotide
  Sense strand starting at position 1124 of SEQ ID NO: 1888075
cccauucuuccgggcugaa

SEQ ID NO: 2508901 - RNA, 19 nt, Artificial Sequence
  Description of Artificial Sequence: Synthetic oligonucleotide
  Antisense strand to SEQ ID NO: 2508900
uucagcccggaagaauggg

SEQ ID NO: 2508902 - RNA, 19 nt, Artificial Sequence
  Description of Artificial Sequence: Synthetic oligonucleotide
  Sense strand starting at position 1137 of SEQ ID NO: 1888075
gcugaauucuguucucucu

SEQ ID NO: 2508903 - RNA, 19 nt, Artificial Sequence
  Description of Artificial Sequence: Synthetic oligonucleotide
  Antisense strand to SEQ ID NO: 2508902
agagagaacagaauucagc

SEQ ID NO: 2508904 - RNA, 19 nt, Artificial Sequence
  Description of Artificial Sequence: Synthetic oligonucleotide
  Sense strand starting at position 1674 of SEQ ID NO: 1888075
gagguuugcgcucuccuau

SEQ ID NO: 2508905 - RNA, 19 nt, Artificial Sequence
  Description of Artificial Sequence: Synthetic oligonucleotide
  Antisense strand to SEQ ID NO: 2508904
auaggagagcgcaaaccuc

SEQ ID NO: 2508906 - RNA, 19 nt, Artificial Sequence
  Description of Artificial Sequence: Synthetic oligonucleotide
  Sense strand starting at position 1777 of SEQ ID NO: 1888075
gauccacucgacugugaac

SEQ ID NO: 2508907 - RNA, 19 nt, Artificial Sequence
  Description of Artificial Sequence: Synthetic oligonucleotide
  Antisense strand to SEQ ID NO: 2508906
guucacagucgaguggauc

SEQ ID NO: 2508908 - RNA, 19 nt, Artificial Sequence
  Description of Artificial Sequence: Synthetic oligonucleotide
  Sense strand starting at position 1780 of SEQ ID NO: 1888075
ccacucgacugugaacuua

SEQ ID NO: 2508909 - RNA, 19 nt, Artificial Sequence
  Description of Artificial Sequence: Synthetic oligonucleotide
  Antisense strand to SEQ ID NO: 2508908
uaaguucacagucgagugg

SEQ ID NO: 2508910 - RNA, 19 nt, Artificial Sequence
  Description of Artificial Sequence: Synthetic oligonucleotide
  Sense strand starting at position 2000 of SEQ ID NO: 1888075
ugcugaaccucugcugaua

SEQ ID NO: 2508911 - RNA, 19 nt, Artificial Sequence
  Description of Artificial Sequence: Synthetic oligonucleotide
  Antisense strand to SEQ ID NO: 2508910
uaucagcagagguucagca

SEQ ID NO: 2508912 - RNA, 19 nt, Artificial Sequence
  Description of Artificial Sequence: Synthetic oligonucleotide
  Sense strand starting at position 2011 of SEQ ID NO: 1888075
ugcugauacucucuuugca

SEQ ID NO: 2508913 - RNA, 19 nt, Artificial Sequence
  Description of Artificial Sequence: Synthetic oligonucleotide
  Antisense strand to SEQ ID NO: 2508912
ugcaaagagaguaucagca

SEQ ID NO: 2508914 - RNA, 19 nt, Artificial Sequence
  Description of Artificial Sequence: Synthetic oligonucleotide
  Sense strand starting at position 2137 of SEQ ID NO: 1888075
gagggagucugaguucuua

SEQ ID NO: 2508915 - RNA, 19 nt, Artificial Sequence
  Description of Artificial Sequence: Synthetic oligonucleotide
  Antisense strand to SEQ ID NO: 2508914
uaagaacucagacucccuc

SEQ ID NO: 2508916 - RNA, 19 nt, Artificial Sequence
  Description of Artificial Sequence: Synthetic oligonucleotide
  Sense strand starting at position 2141 of SEQ ID NO: 1888075
gagucugaguucuuaccaa

SEQ ID NO: 2508917 - RNA, 19 nt, Artificial Sequence
  Description of Artificial Sequence: Synthetic oligonucleotide
  Antisense strand to SEQ ID NO: 2508916
uugguaagaacucagacuc

SEQ ID NO: 2508918 - RNA, 19 nt, Artificial Sequence
  Description of Artificial Sequence: Synthetic oligonucleotide
  Sense strand starting at position 2173 of SEQ ID NO: 1888075
uucugaugcucaucaaagu

SEQ ID NO: 2508919 - RNA, 19 nt, Artificial Sequence
  Description of Artificial Sequence: Synthetic oligonucleotide
  Antisense strand to SEQ ID NO: 2508918
acuuugaugagcaucagaa

SEQ ID NO: 2508920 - RNA, 19 nt, Artificial Sequence
  Description of Artificial Sequence: Synthetic oligonucleotide
  Sense strand starting at position 2181 of SEQ ID NO: 1888075
cucaucaaagugugggaaa

SEQ ID NO: 2508921 - RNA, 19 nt, Artificial Sequence
  Description of Artificial Sequence: Synthetic oligonucleotide
  Antisense strand to SEQ ID NO: 2508920
uuucccacacuuugaugag

SEQ ID NO: 2508922 - RNA, 19 nt, Artificial Sequence
  Description of Artificial Sequence: Synthetic oligonucleotide
  Sense strand starting at position 2383 of SEQ ID NO: 1888075
ggagaaucgccugaauucg

SEQ ID NO: 2508923 - RNA, 19 nt, Artificial Sequence
  Description of Artificial Sequence: Synthetic oligonucleotide
  Antisense strand to SEQ ID NO: 2508922
cgaauucaggcgauucucc

SEQ ID NO: 2508924 - RNA, 19 nt, Artificial Sequence
  Description of Artificial Sequence: Synthetic oligonucleotide
  Sense strand starting at position 2669 of SEQ ID NO: 1888075
augccuuucuuggaucuua

SEQ ID NO: 2508925 - RNA, 19 nt, Artificial Sequence
  Description of Artificial Sequence: Synthetic oligonucleotide
  Antisense strand to SEQ ID NO: 2508924
uaagauccaagaaaggcau

SEQ ID NO: 2508926 - RNA, 19 nt, Artificial Sequence
  Description of Artificial Sequence: Synthetic oligonucleotide
  Sense strand starting at position 2752 of SEQ ID NO: 1888075
ugaccucugcacugcaaau

SEQ ID NO: 2508927 - RNA, 19 nt, Artificial Sequence
  Description of Artificial Sequence: Synthetic oligonucleotide
  Antisense strand to SEQ ID NO: 2508926
auuugcagugcagagguca

SEQ ID NO: 2508928 - RNA, 19 nt, Artificial Sequence
  Description of Artificial Sequence: Synthetic oligonucleotide
  Sense strand starting at position 3078 of SEQ ID NO: 1888075
aacuccugacgucgugaua

SEQ ID NO: 2508929 - RNA, 19 nt, Artificial Sequence
  Description of Artificial Sequence: Synthetic oligonucleotide
  Antisense strand to SEQ ID NO: 2508928
uaucacgacgucaggaguu

SEQ ID NO: 2508930 - RNA, 19 nt, Artificial Sequence
  Description of Artificial Sequence: Synthetic oligonucleotide
  Sense strand starting at position 3495 of SEQ ID NO: 1888075
guagguguucuguaaugua

SEQ ID NO: 2508931 - RNA, 19 nt, Artificial Sequence
  Description of Artificial Sequence: Synthetic oligonucleotide
  Antisense strand to SEQ ID NO: 2508930
uacauuacagaacaccuac

SEQ ID NO: 2508932 - RNA, 19 nt, Artificial Sequence
  Description of Artificial Sequence: Synthetic oligonucleotide
  Sense strand starting at position 3503 of SEQ ID NO: 1888075
ucuguaauguaagauaacu

SEQ ID NO: 2508933 - RNA, 19 nt, Artificial Sequence
  Description of Artificial Sequence: Synthetic oligonucleotide
  Antisense strand to SEQ ID NO: 2508932
aguuaucuuacauuacaga

SEQ ID NO: 2508934 - RNA, 19 nt, Artificial Sequence
  Description of Artificial Sequence: Synthetic oligonucleotide
  Sense strand starting at position 350 of SEQ ID NO: 1888077
aguccauguucuccaagga

SEQ ID NO: 2508935 - RNA, 19 nt, Artificial Sequence
  Description of Artificial Sequence: Synthetic oligonucleotide
  Antisense strand to SEQ ID NO: 2508934
uccuuggagaacauggacu

SEQ ID NO: 2508936 - RNA, 19 nt, Artificial Sequence
  Description of Artificial Sequence: Synthetic oligonucleotide
  Sense strand starting at position 718 of SEQ ID NO: 1888077
gguuccagcuccuucuuua

SEQ ID NO: 2508937 - RNA, 19 nt, Artificial Sequence
  Description of Artificial Sequence: Synthetic oligonucleotide
  Antisense strand to SEQ ID NO: 2508936
uaaagaaggagcuggaacc

SEQ ID NO: 2508938 - RNA, 19 nt, Artificial Sequence
  Description of Artificial Sequence: Synthetic oligonucleotide
  Sense strand starting at position 731 of SEQ ID NO: 1888077
ucuuuaagugagggcaaua

SEQ ID NO: 2508939 - RNA, 19 nt, Artificial Sequence
  Description of Artificial Sequence: Synthetic oligonucleotide
  Antisense strand to SEQ ID NO: 2508938
uauugcccucacuuaaaga

SEQ ID NO: 2508940 - RNA, 19 nt, Artificial Sequence
  Description of Artificial Sequence: Synthetic oligonucleotide
  Sense strand starting at position 744 of SEQ ID NO: 1888077
gcaauauucucagccagag

SEQ ID NO: 2508941 - RNA, 19 nt, Artificial Sequence
  Description of Artificial Sequence: Synthetic oligonucleotide
  Antisense strand to SEQ ID NO: 2508940
cucuggcugagaauauugc

SEQ ID NO: 2508942 - RNA, 19 nt, Artificial Sequence
  Description of Artificial Sequence: Synthetic oligonucleotide
  Sense strand starting at position 748 of SEQ ID NO: 1888077
uauucucagccagagguuu

SEQ ID NO: 2508943 - RNA, 19 nt, Artificial Sequence
  Description of Artificial Sequence: Synthetic oligonucleotide
  Antisense strand to SEQ ID NO: 2508942
aaaccucuggcugagaaua

SEQ ID NO: 2508944 - RNA, 19 nt, Artificial Sequence
  Description of Artificial Sequence: Synthetic oligonucleotide
  Sense strand starting at position 859 of SEQ ID NO: 1888077
aggcucugguuccugagaa

SEQ ID NO: 2508945 - RNA, 19 nt, Artificial Sequence
  Description of Artificial Sequence: Synthetic oligonucleotide
  Antisense strand to SEQ ID NO: 2508944
uucucaggaaccagagccu

SEQ ID NO: 2508946 - RNA, 19 nt, Artificial Sequence
  Description of Artificial Sequence: Synthetic oligonucleotide
  Sense strand starting at position 938 of SEQ ID NO: 1888077
ggugucccuagugauuaca

SEQ ID NO: 2508947 - RNA, 19 nt, Artificial Sequence
  Description of Artificial Sequence: Synthetic oligonucleotide
  Antisense strand to SEQ ID NO: 2508946
uguaaucacuagggacacc

SEQ ID NO: 2508948 - RNA, 19 nt, Artificial Sequence
  Description of Artificial Sequence: Synthetic oligonucleotide
  Sense strand starting at position 961 of SEQ ID NO: 1888077
acuggucugccucagacau

SEQ ID NO: 2508949 - RNA, 19 nt, Artificial Sequence
  Description of Artificial Sequence: Synthetic oligonucleotide
  Antisense strand to SEQ ID NO: 2508948
augucugaggcagaccagu

SEQ ID NO: 2508950 - RNA, 19 nt, Artificial Sequence
  Description of Artificial Sequence: Synthetic oligonucleotide
  Sense strand starting at position 974 of SEQ ID NO: 1888077
agacauauccagugggugu

SEQ ID NO: 2508951 - RNA, 19 nt, Artificial Sequence
  Description of Artificial Sequence: Synthetic oligonucleotide
  Antisense strand to SEQ ID NO: 2508950
acacccacuggauaugucu

SEQ ID NO: 2508952 - RNA, 19 nt, Artificial Sequence
  Description of Artificial Sequence: Synthetic oligonucleotide
  Sense strand starting at position 1024 of SEQ ID NO: 1888077
cauggcuauggcugauuga

SEQ ID NO: 2508953 - RNA, 19 nt, Artificial Sequence
  Description of Artificial Sequence: Synthetic oligonucleotide
  Antisense strand to SEQ ID NO: 2508952
ucaaucagccauagccaug

SEQ ID NO: 2508954 - RNA, 19 nt, Artificial Sequence
  Description of Artificial Sequence: Synthetic oligonucleotide
  Sense strand starting at position 1025 of SEQ ID NO: 1888077
auggcuauggcugauugaa

SEQ ID NO: 2508955 - RNA, 19 nt, Artificial Sequence
  Description of Artificial Sequence: Synthetic oligonucleotide
  Antisense strand to SEQ ID NO: 2508954
uucaaucagccauagccau

SEQ ID NO: 2508956 - RNA, 19 nt, Artificial Sequence
  Description of Artificial Sequence: Synthetic oligonucleotide
  Sense strand starting at position 1027 of SEQ ID NO: 1888077
ggcuauggcugauugaaca

SEQ ID NO: 2508957 - RNA, 19 nt, Artificial Sequence
  Description of Artificial Sequence: Synthetic oligonucleotide
  Antisense strand to SEQ ID NO: 2508956
uguucaaucagccauagcc

SEQ ID NO: 2508958 - RNA, 19 nt, Artificial Sequence
  Description of Artificial Sequence: Synthetic oligonucleotide
  Sense strand starting at position 1078 of SEQ ID NO: 1888077
ggagcugauaucugguaga

SEQ ID NO: 2508959 - RNA, 19 nt, Artificial Sequence
  Description of Artificial Sequence: Synthetic oligonucleotide
  Antisense strand to SEQ ID NO: 2508958
ucuaccagauaucagcucc

SEQ ID NO: 2508960 - RNA, 19 nt, Artificial Sequence
  Description of Artificial Sequence: Synthetic oligonucleotide
  Sense strand starting at position 1185 of SEQ ID NO: 1888077
ucagcuucuugagagaacu

SEQ ID NO: 2508961 - RNA, 19 nt, Artificial Sequence
  Description of Artificial Sequence: Synthetic oligonucleotide
  Antisense strand to SEQ ID NO: 2508960
aguucucucaagaagcuga

SEQ ID NO: 2508962 - RNA, 19 nt, Artificial Sequence
  Description of Artificial Sequence: Synthetic oligonucleotide
  Sense strand starting at position 1207 of SEQ ID NO: 1888077
gguccugugggacacgaua

SEQ ID NO: 2508963 - RNA, 19 nt, Artificial Sequence
  Description of Artificial Sequence: Synthetic oligonucleotide
  Antisense strand to SEQ ID NO: 2508962
uaucgugucccacaggacc

SEQ ID NO: 2508964 - RNA, 19 nt, Artificial Sequence
  Description of Artificial Sequence: Synthetic oligonucleotide
  Sense strand starting at position 1245 of SEQ ID NO: 1888077
gucaucugguggcuuacau

SEQ ID NO: 2508965 - RNA, 19 nt, Artificial Sequence
  Description of Artificial Sequence: Synthetic oligonucleotide
  Antisense strand to SEQ ID NO: 2508964
auguaagccaccagaugac

SEQ ID NO: 2508966 - RNA, 19 nt, Artificial Sequence
  Description of Artificial Sequence: Synthetic oligonucleotide
  Sense strand starting at position 1262 of SEQ ID NO: 1888077
augagcucccuguguguuu

SEQ ID NO: 2508967 - RNA, 19 nt, Artificial Sequence
  Description of Artificial Sequence: Synthetic oligonucleotide
  Antisense strand to SEQ ID NO: 2508966
aaacacacagggagcucau

SEQ ID NO: 2508968 - RNA, 19 nt, Artificial Sequence
  Description of Artificial Sequence: Synthetic oligonucleotide
  Sense strand starting at position 1271 of SEQ ID NO: 1888077
cuguguguuucuguuacuu

SEQ ID NO: 2508969 - RNA, 19 nt, Artificial Sequence
  Description of Artificial Sequence: Synthetic oligonucleotide
  Antisense strand to SEQ ID NO: 2508968
aaguaacagaaacacacag

SEQ ID NO: 2508970 - RNA, 19 nt, Artificial Sequence
  Description of Artificial Sequence: Synthetic oligonucleotide
  Sense strand starting at position 1275 of SEQ ID NO: 1888077
guguuucuguuacuugcua

SEQ ID NO: 2508971 - RNA, 19 nt, Artificial Sequence
  Description of Artificial Sequence: Synthetic oligonucleotide
  Antisense strand to SEQ ID NO: 2508970
uagcaaguaacagaaacac

SEQ ID NO: 2508972 - RNA, 19 nt, Artificial Sequence
  Description of Artificial Sequence: Synthetic oligonucleotide
  Sense strand starting at position 1283 of SEQ ID NO: 1888077
guuacuugcuagccacaaa

SEQ ID NO: 2508973 - RNA, 19 nt, Artificial Sequence
  Description of Artificial Sequence: Synthetic oligonucleotide
  Antisense strand to SEQ ID NO: 2508972
uuuguggcuagcaaguaac

SEQ ID NO: 2508974 - RNA, 19 nt, Artificial Sequence
  Description of Artificial Sequence: Synthetic oligonucleotide
  Sense strand starting at position 1349 of SEQ ID NO: 1888077
ucucuauagcgcugugaag

SEQ ID NO: 2508975 - RNA, 19 nt, Artificial Sequence
  Description of Artificial Sequence: Synthetic oligonucleotide
  Antisense strand to SEQ ID NO: 2508974
cuucacagcgcuauagaga

SEQ ID NO: 2508976 - RNA, 19 nt, Artificial Sequence
  Description of Artificial Sequence: Synthetic oligonucleotide
  Sense strand starting at position 1367 of SEQ ID NO: 1888077
gcaaauguccugcaucauc

SEQ ID NO: 2508977 - RNA, 19 nt, Artificial Sequence
  Description of Artificial Sequence: Synthetic oligonucleotide
  Antisense strand to SEQ ID NO: 2508976
gaugaugcaggacauuugc

SEQ ID NO: 2508978 - RNA, 19 nt, Artificial Sequence
  Description of Artificial Sequence: Synthetic oligonucleotide
  Sense strand starting at position 1440 of SEQ ID NO: 1888077
cggacugcucaguguggaa

SEQ ID NO: 2508979 - RNA, 19 nt, Artificial Sequence
  Description of Artificial Sequence: Synthetic oligonucleotide
  Antisense strand to SEQ ID NO: 2508978
uuccacacugagcaguccg

SEQ ID NO: 2508980 - RNA, 19 nt, Artificial Sequence
  Description of Artificial Sequence: Synthetic oligonucleotide
  Sense strand starting at position 1511 of SEQ ID NO: 1888077
guggauaagucccagaaga

SEQ ID NO: 2508981 - RNA, 19 nt, Artificial Sequence
  Description of Artificial Sequence: Synthetic oligonucleotide
  Antisense strand to SEQ ID NO: 2508980
ucuucugggacuuauccac

SEQ ID NO: 2508982 - RNA, 19 nt, Artificial Sequence
  Description of Artificial Sequence: Synthetic oligonucleotide
  Sense strand starting at position 1524 of SEQ ID NO: 1888077
agaagagugucgggacacu

SEQ ID NO: 2508983 - RNA, 19 nt, Artificial Sequence
  Description of Artificial Sequence: Synthetic oligonucleotide
  Antisense strand to SEQ ID NO: 2508982
agugucccgacacucuucu

SEQ ID NO: 2508984 - RNA, 19 nt, Artificial Sequence
  Description of Artificial Sequence: Synthetic oligonucleotide
  Sense strand starting at position 1744 of SEQ ID NO: 1888077
cccauucuuccgggcugaa

SEQ ID NO: 2508985 - RNA, 19 nt, Artificial Sequence
  Description of Artificial Sequence: Synthetic oligonucleotide
  Antisense strand to SEQ ID NO: 2508984
uucagcccggaagaauggg

SEQ ID NO: 2508986 - RNA, 19 nt, Artificial Sequence
  Description of Artificial Sequence: Synthetic oligonucleotide
  Sense strand starting at position 1757 of SEQ ID NO: 1888077
gcugaauucuguucucucu

SEQ ID NO: 2508987 - RNA, 19 nt, Artificial Sequence
  Description of Artificial Sequence: Synthetic oligonucleotide
  Antisense strand to SEQ ID NO: 2508986
agagagaacagaauucagc

SEQ ID NO: 2508988 - RNA, 19 nt, Artificial Sequence
  Description of Artificial Sequence: Synthetic oligonucleotide
  Sense strand starting at position 2294 of SEQ ID NO: 1888077
gagguuugcgcucuccuau

SEQ ID NO: 2508989 - RNA, 19 nt, Artificial Sequence
  Description of Artificial Sequence: Synthetic oligonucleotide
  Antisense strand to SEQ ID NO: 2508988
auaggagagcgcaaaccuc

SEQ ID NO: 2508990 - RNA, 19 nt, Artificial Sequence
  Description of Artificial Sequence: Synthetic oligonucleotide
  Sense strand starting at position 2397 of SEQ ID NO: 1888077
gauccacucgacugugaac

SEQ ID NO: 2508991 - RNA, 19 nt, Artificial Sequence
  Description of Artificial Sequence: Synthetic oligonucleotide
  Antisense strand to SEQ ID NO: 2508990
guucacagucgaguggauc

SEQ ID NO: 2508992 - RNA, 19 nt, Artificial Sequence
  Description of Artificial Sequence: Synthetic oligonucleotide
  Sense strand starting at position 2400 of SEQ ID NO: 1888077
ccacucgacugugaacuua

SEQ ID NO: 2508993 - RNA, 19 nt, Artificial Sequence
  Description of Artificial Sequence: Synthetic oligonucleotide
  Antisense strand to SEQ ID NO: 2508992
uaaguucacagucgagugg

SEQ ID NO: 2508994 - RNA, 19 nt, Artificial Sequence
  Description of Artificial Sequence: Synthetic oligonucleotide
  Sense strand starting at position 2620 of SEQ ID NO: 1888077
ugcugaaccucugcugaua

SEQ ID NO: 2508995 - RNA, 19 nt, Artificial Sequence
  Description of Artificial Sequence: Synthetic oligonucleotide
  Antisense strand to SEQ ID NO: 2508994
uaucagcagagguucagca

SEQ ID NO: 2508996 - RNA, 19 nt, Artificial Sequence
  Description of Artificial Sequence: Synthetic oligonucleotide
  Sense strand starting at position 2631 of SEQ ID NO: 1888077
ugcugauacucucuuugca

SEQ ID NO: 2508997 - RNA, 19 nt, Artificial Sequence
  Description of Artificial Sequence: Synthetic oligonucleotide
  Antisense strand to SEQ ID NO: 2508996
ugcaaagagaguaucagca

SEQ ID NO: 2508998 - RNA, 19 nt, Artificial Sequence
  Description of Artificial Sequence: Synthetic oligonucleotide
  Sense strand starting at position 2757 of SEQ ID NO: 1888077
gagggagucugaguucuua

SEQ ID NO: 2508999 - RNA, 19 nt, Artificial Sequence
  Description of Artificial Sequence: Synthetic oligonucleotide
  Antisense strand to SEQ ID NO: 2508998
uaagaacucagacucccuc

SEQ ID NO: 2509000 - RNA, 19 nt, Artificial Sequence
  Description of Artificial Sequence: Synthetic oligonucleotide
  Sense strand starting at position 2761 of SEQ ID NO: 1888077
gagucugaguucuuaccaa

SEQ ID NO: 2509001 - RNA, 19 nt, Artificial Sequence
  Description of Artificial Sequence: Synthetic oligonucleotide
  Antisense strand to SEQ ID NO: 2509000
uugguaagaacucagacuc

SEQ ID NO: 2509002 - RNA, 19 nt, Artificial Sequence
  Description of Artificial Sequence: Synthetic oligonucleotide
  Sense strand starting at position 2793 of SEQ ID NO: 1888077
uucugaugcucaucaaagu

SEQ ID NO: 2509003 - RNA, 19 nt, Artificial Sequence
  Description of Artificial Sequence: Synthetic oligonucleotide
  Antisense strand to SEQ ID NO: 2509002
acuuugaugagcaucagaa

SEQ ID NO: 2509004 - RNA, 19 nt, Artificial Sequence
  Description of Artificial Sequence: Synthetic oligonucleotide
  Sense strand starting at position 2801 of SEQ ID NO: 1888077
cucaucaaagugugggaaa

SEQ ID NO: 2509005 - RNA, 19 nt, Artificial Sequence
  Description of Artificial Sequence: Synthetic oligonucleotide
  Antisense strand to SEQ ID NO: 2509004
uuucccacacuuugaugag

SEQ ID NO: 2509006 - RNA, 19 nt, Artificial Sequence
  Description of Artificial Sequence: Synthetic oligonucleotide
  Sense strand starting at position 3003 of SEQ ID NO: 1888077
ggagaaucgccugaauucg

SEQ ID NO: 2509007 - RNA, 19 nt, Artificial Sequence
  Description of Artificial Sequence: Synthetic oligonucleotide
  Antisense strand to SEQ ID NO: 2509006
cgaauucaggcgauucucc

SEQ ID NO: 2509008 - RNA, 19 nt, Artificial Sequence
  Description of Artificial Sequence: Synthetic oligonucleotide
  Sense strand starting at position 3289 of SEQ ID NO: 1888077
augccuuucuuggaucuua

SEQ ID NO: 2509009 - RNA, 19 nt, Artificial Sequence
  Description of Artificial Sequence: Synthetic oligonucleotide
  Antisense strand to SEQ ID NO: 2509008
uaagauccaagaaaggcau

SEQ ID NO: 2509010 - RNA, 19 nt, Artificial Sequence
  Description of Artificial Sequence: Synthetic oligonucleotide
  Sense strand starting at position 3372 of SEQ ID NO: 1888077
ugaccucugcacugcaaau

SEQ ID NO: 2509011 - RNA, 19 nt, Artificial Sequence
  Description of Artificial Sequence: Synthetic oligonucleotide
  Antisense strand to SEQ ID NO: 2509010
auuugcagugcagagguca

SEQ ID NO: 2509012 - RNA, 19 nt, Artificial Sequence
  Description of Artificial Sequence: Synthetic oligonucleotide
  Sense strand starting at position 3698 of SEQ ID NO: 1888077
aacuccugacgucgugaua

SEQ ID NO: 2509013 - RNA, 19 nt, Artificial Sequence
  Description of Artificial Sequence: Synthetic oligonucleotide
  Antisense strand to SEQ ID NO: 2509012
uaucacgacgucaggaguu

SEQ ID NO: 2509014 - RNA, 19 nt, Artificial Sequence
  Description of Artificial Sequence: Synthetic oligonucleotide
  Sense strand starting at position 222 of SEQ ID NO: 1888076
aguccauguucuccaagga

SEQ ID NO: 2509015 - RNA, 19 nt, Artificial Sequence
  Description of Artificial Sequence: Synthetic oligonucleotide
  Antisense strand to SEQ ID NO: 2509014
uccuuggagaacauggacu

SEQ ID NO: 2509016 - RNA, 19 nt, Artificial Sequence
  Description of Artificial Sequence: Synthetic oligonucleotide
  Sense strand starting at position 590 of SEQ ID NO: 1888076
gguuccagcuccuucuuua

SEQ ID NO: 2509017 - RNA, 19 nt, Artificial Sequence
  Description of Artificial Sequence: Synthetic oligonucleotide
  Antisense strand to SEQ ID NO: 2509016
uaaagaaggagcuggaacc

SEQ ID NO: 2509018 - RNA, 19 nt, Artificial Sequence
  Description of Artificial Sequence: Synthetic oligonucleotide
  Sense strand starting at position 603 of SEQ ID NO: 1888076
ucuuuaagugagggcaaua

SEQ ID NO: 2509019 - RNA, 19 nt, Artificial Sequence
  Description of Artificial Sequence: Synthetic oligonucleotide
  Antisense strand to SEQ ID NO: 2509018
uauugcccucacuuaaaga

SEQ ID NO: 2509020 - RNA, 19 nt, Artificial Sequence
  Description of Artificial Sequence: Synthetic oligonucleotide
  Sense strand starting at position 616 of SEQ ID NO: 1888076
gcaauauucucagccagag

SEQ ID NO: 2509021 - RNA, 19 nt, Artificial Sequence
  Description of Artificial Sequence: Synthetic oligonucleotide
  Antisense strand to SEQ ID NO: 2509020
cucuggcugagaauauugc

SEQ ID NO: 2509022 - RNA, 19 nt, Artificial Sequence
  Description of Artificial Sequence: Synthetic oligonucleotide
  Sense strand starting at position 620 of SEQ ID NO: 1888076
uauucucagccagagguuu

SEQ ID NO: 2509023 - RNA, 19 nt, Artificial Sequence
  Description of Artificial Sequence: Synthetic oligonucleotide
  Antisense strand to SEQ ID NO: 2509022
aaaccucuggcugagaaua

SEQ ID NO: 2509024 - RNA, 19 nt, Artificial Sequence
  Description of Artificial Sequence: Synthetic oligonucleotide
  Sense strand starting at position 731 of SEQ ID NO: 1888076
aggcucugguuccugagaa

SEQ ID NO: 2509025 - RNA, 19 nt, Artificial Sequence
  Description of Artificial Sequence: Synthetic oligonucleotide
  Antisense strand to SEQ ID NO: 2509024
uucucaggaaccagagccu

SEQ ID NO: 2509026 - RNA, 19 nt, Artificial Sequence
  Description of Artificial Sequence: Synthetic oligonucleotide
  Sense strand starting at position 810 of SEQ ID NO: 1888076
ggugucccuagugauuaca

SEQ ID NO: 2509027 - RNA, 19 nt, Artificial Sequence
  Description of Artificial Sequence: Synthetic oligonucleotide
  Antisense strand to SEQ ID NO: 2509026
uguaaucacuagggacacc

SEQ ID NO: 2509028 - RNA, 19 nt, Artificial Sequence
  Description of Artificial Sequence: Synthetic oligonucleotide
  Sense strand starting at position 833 of SEQ ID NO: 1888076
acuggucugccucagacau

SEQ ID NO: 2509029 - RNA, 19 nt, Artificial Sequence
  Description of Artificial Sequence: Synthetic oligonucleotide
  Antisense strand to SEQ ID NO: 2509028
augucugaggcagaccagu

SEQ ID NO: 2509030 - RNA, 19 nt, Artificial Sequence
  Description of Artificial Sequence: Synthetic oligonucleotide
  Sense strand starting at position 846 of SEQ ID NO: 1888076
agacauauccagugggugu

SEQ ID NO: 2509031 - RNA, 19 nt, Artificial Sequence
  Description of Artificial Sequence: Synthetic oligonucleotide
  Antisense strand to SEQ ID NO: 2509030
acacccacuggauaugucu

SEQ ID NO: 2509032 - RNA, 19 nt, Artificial Sequence
  Description of Artificial Sequence: Synthetic oligonucleotide
  Sense strand starting at position 896 of SEQ ID NO: 1888076
cauggcuauggcugauuga

SEQ ID NO: 2509033 - RNA, 19 nt, Artificial Sequence
  Description of Artificial Sequence: Synthetic oligonucleotide
  Antisense strand to SEQ ID NO: 2509032
ucaaucagccauagccaug

SEQ ID NO: 2509034 - RNA, 19 nt, Artificial Sequence
  Description of Artificial Sequence: Synthetic oligonucleotide
  Sense strand starting at position 897 of SEQ ID NO: 1888076
auggcuauggcugauugaa

SEQ ID NO: 2509035 - RNA, 19 nt, Artificial Sequence
  Description of Artificial Sequence: Synthetic oligonucleotide
  Antisense strand to SEQ ID NO: 2509034
uucaaucagccauagccau

SEQ ID NO: 2509036 - RNA, 19 nt, Artificial Sequence
  Description of Artificial Sequence: Synthetic oligonucleotide
  Sense strand starting at position 899 of SEQ ID NO: 1888076
ggcuauggcugauugaaca

SEQ ID NO: 2509037 - RNA, 19 nt, Artificial Sequence
  Description of Artificial Sequence: Synthetic oligonucleotide
  Antisense strand to SEQ ID NO: 2509036
uguucaaucagccauagcc

SEQ ID NO: 2509038 - RNA, 19 nt, Artificial Sequence
  Description of Artificial Sequence: Synthetic oligonucleotide
  Sense strand starting at position 950 of SEQ ID NO: 1888076
ggagcugauaucugguaga

SEQ ID NO: 2509039 - RNA, 19 nt, Artificial Sequence
  Description of Artificial Sequence: Synthetic oligonucleotide
  Antisense strand to SEQ ID NO: 2509038
ucuaccagauaucagcucc

SEQ ID NO: 2509040 - RNA, 19 nt, Artificial Sequence
  Description of Artificial Sequence: Synthetic oligonucleotide
  Sense strand starting at position 1057 of SEQ ID NO: 1888076
ucagcuucuugagagaacu

SEQ ID NO: 2509041 - RNA, 19 nt, Artificial Sequence
  Description of Artificial Sequence: Synthetic oligonucleotide
  Antisense strand to SEQ ID NO: 2509040
aguucucucaagaagcuga

SEQ ID NO: 2509042 - RNA, 19 nt, Artificial Sequence
  Description of Artificial Sequence: Synthetic oligonucleotide
  Sense strand starting at position 1079 of SEQ ID NO: 1888076
gguccugugggacacgaua

SEQ ID NO: 2509043 - RNA, 19 nt, Artificial Sequence
  Description of Artificial Sequence: Synthetic oligonucleotide
  Antisense strand to SEQ ID NO: 2509042
uaucgugucccacaggacc

SEQ ID NO: 2509044 - RNA, 19 nt, Artificial Sequence
  Description of Artificial Sequence: Synthetic oligonucleotide
  Sense strand starting at position 1117 of SEQ ID NO: 1888076
gucaucugguggcuuacau

SEQ ID NO: 2509045 - RNA, 19 nt, Artificial Sequence
  Description of Artificial Sequence: Synthetic oligonucleotide
  Antisense strand to SEQ ID NO: 2509044
auguaagccaccagaugac

SEQ ID NO: 2509046 - RNA, 19 nt, Artificial Sequence
  Description of Artificial Sequence: Synthetic oligonucleotide
  Sense strand starting at position 1134 of SEQ ID NO: 1888076
augagcucccuguguguuu

SEQ ID NO: 2509047 - RNA, 19 nt, Artificial Sequence
  Description of Artificial Sequence: Synthetic oligonucleotide
  Antisense strand to SEQ ID NO: 2509046
aaacacacagggagcucau

SEQ ID NO: 2509048 - RNA, 19 nt, Artificial Sequence
  Description of Artificial Sequence: Synthetic oligonucleotide
  Sense strand starting at position 1143 of SEQ ID NO: 1888076
cuguguguuucuguuacuu

SEQ ID NO: 2509049 - RNA, 19 nt, Artificial Sequence
  Description of Artificial Sequence: Synthetic oligonucleotide
  Antisense strand to SEQ ID NO: 2509048
aaguaacagaaacacacag

SEQ ID NO: 2509050 - RNA, 19 nt, Artificial Sequence
  Description of Artificial Sequence: Synthetic oligonucleotide
  Sense strand starting at position 1147 of SEQ ID NO: 1888076
guguuucuguuacuugcua

SEQ ID NO: 2509051 - RNA, 19 nt, Artificial Sequence
  Description of Artificial Sequence: Synthetic oligonucleotide
  Antisense strand to SEQ ID NO: 2509050
uagcaaguaacagaaacac

SEQ ID NO: 2509052 - RNA, 19 nt, Artificial Sequence
  Description of Artificial Sequence: Synthetic oligonucleotide
  Sense strand starting at position 1155 of SEQ ID NO: 1888076
guuacuugcuagccacaaa

SEQ ID NO: 2509053 - RNA, 19 nt, Artificial Sequence
  Description of Artificial Sequence: Synthetic oligonucleotide
  Antisense strand to SEQ ID NO: 2509052
uuuguggcuagcaaguaac

SEQ ID NO: 2509054 - RNA, 19 nt, Artificial Sequence
  Description of Artificial Sequence: Synthetic oligonucleotide
  Sense strand starting at position 1221 of SEQ ID NO: 1888076
ucucuauagcgcugugaag

SEQ ID NO: 2509055 - RNA, 19 nt, Artificial Sequence
  Description of Artificial Sequence: Synthetic oligonucleotide
  Antisense strand to SEQ ID NO: 2509054
cuucacagcgcuauagaga

SEQ ID NO: 2509056 - RNA, 19 nt, Artificial Sequence
  Description of Artificial Sequence: Synthetic oligonucleotide
  Sense strand starting at position 1239 of SEQ ID NO: 1888076
gcaaauguccugcaucauc

SEQ ID NO: 2509057 - RNA, 19 nt, Artificial Sequence
  Description of Artificial Sequence: Synthetic oligonucleotide
  Antisense strand to SEQ ID NO: 2509056
gaugaugcaggacauuugc

SEQ ID NO: 2509058 - RNA, 19 nt, Artificial Sequence
  Description of Artificial Sequence: Synthetic oligonucleotide
  Sense strand starting at position 1312 of SEQ ID NO: 1888076
cggacugcucaguguggaa

SEQ ID NO: 2509059 - RNA, 19 nt, Artificial Sequence
  Description of Artificial Sequence: Synthetic oligonucleotide
  Antisense strand to SEQ ID NO: 2509058
uuccacacugagcaguccg

SEQ ID NO: 2509060 - RNA, 19 nt, Artificial Sequence
  Description of Artificial Sequence: Synthetic oligonucleotide
  Sense strand starting at position 1383 of SEQ ID NO: 1888076
guggauaagucccagaaga

SEQ ID NO: 2509061 - RNA, 19 nt, Artificial Sequence
  Description of Artificial Sequence: Synthetic oligonucleotide
  Antisense strand to SEQ ID NO: 2509060
ucuucugggacuuauccac

SEQ ID NO: 2509062 - RNA, 19 nt, Artificial Sequence
  Description of Artificial Sequence: Synthetic oligonucleotide
  Sense strand starting at position 1396 of SEQ ID NO: 1888076
agaagagugucgggacacu

SEQ ID NO: 2509063 - RNA, 19 nt, Artificial Sequence
  Description of Artificial Sequence: Synthetic oligonucleotide
  Antisense strand to SEQ ID NO: 2509062
agugucccgacacucuucu

SEQ ID NO: 2509064 - RNA, 19 nt, Artificial Sequence
  Description of Artificial Sequence: Synthetic oligonucleotide
  Sense strand starting at position 1616 of SEQ ID NO: 1888076
cccauucuuccgggcugaa

SEQ ID NO: 2509065 - RNA, 19 nt, Artificial Sequence
  Description of Artificial Sequence: Synthetic oligonucleotide
  Antisense strand to SEQ ID NO: 2509064
uucagcccggaagaauggg

SEQ ID NO: 2509066 - RNA, 19 nt, Artificial Sequence
  Description of Artificial Sequence: Synthetic oligonucleotide
  Sense strand starting at position 1629 of SEQ ID NO: 1888076
gcugaauucuguucucucu

SEQ ID NO: 2509067 - RNA, 19 nt, Artificial Sequence
  Description of Artificial Sequence: Synthetic oligonucleotide
  Antisense strand to SEQ ID NO: 2509066
agagagaacagaauucagc

SEQ ID NO: 2509068 - RNA, 19 nt, Artificial Sequence
  Description of Artificial Sequence: Synthetic oligonucleotide
  Sense strand starting at position 2166 of SEQ ID NO: 1888076
gagguuugcgcucuccuau

SEQ ID NO: 2509069 - RNA, 19 nt, Artificial Sequence
  Description of Artificial Sequence: Synthetic oligonucleotide
  Antisense strand to SEQ ID NO: 2509068
auaggagagcgcaaaccuc

SEQ ID NO: 2509070 - RNA, 19 nt, Artificial Sequence
  Description of Artificial Sequence: Synthetic oligonucleotide
  Sense strand starting at position 2269 of SEQ ID NO: 1888076
gauccacucgacugugaac

SEQ ID NO: 2509071 - RNA, 19 nt, Artificial Sequence
  Description of Artificial Sequence: Synthetic oligonucleotide
  Antisense strand to SEQ ID NO: 2509070
guucacagucgaguggauc

SEQ ID NO: 2509072 - RNA, 19 nt, Artificial Sequence
  Description of Artificial Sequence: Synthetic oligonucleotide
  Sense strand starting at position 2272 of SEQ ID NO: 1888076
ccacucgacugugaacuua

SEQ ID NO: 2509073 - RNA, 19 nt, Artificial Sequence
  Description of Artificial Sequence: Synthetic oligonucleotide
  Antisense strand to SEQ ID NO: 2509072
uaaguucacagucgagugg

SEQ ID NO: 2509074 - RNA, 19 nt, Artificial Sequence
  Description of Artificial Sequence: Synthetic oligonucleotide
  Sense strand starting at position 2492 of SEQ ID NO: 1888076
ugcugaaccucugcugaua

SEQ ID NO: 2509075 - RNA, 19 nt, Artificial Sequence
  Description of Artificial Sequence: Synthetic oligonucleotide
  Antisense strand to SEQ ID NO: 2509074
uaucagcagagguucagca

SEQ ID NO: 2509076 - RNA, 19 nt, Artificial Sequence
  Description of Artificial Sequence: Synthetic oligonucleotide
  Sense strand starting at position 2503 of SEQ ID NO: 1888076
ugcugauacucucuuugca

SEQ ID NO: 2509077 - RNA, 19 nt, Artificial Sequence
  Description of Artificial Sequence: Synthetic oligonucleotide
  Antisense strand to SEQ ID NO: 2509076
ugcaaagagaguaucagca

SEQ ID NO: 2509078 - RNA, 19 nt, Artificial Sequence
  Description of Artificial Sequence: Synthetic oligonucleotide
  Sense strand starting at position 2629 of SEQ ID NO: 1888076
gagggagucugaguucuua

SEQ ID NO: 2509079 - RNA, 19 nt, Artificial Sequence
  Description of Artificial Sequence: Synthetic oligonucleotide
  Antisense strand to SEQ ID NO: 2509078
uaagaacucagacucccuc

SEQ ID NO: 2509080 - RNA, 19 nt, Artificial Sequence
  Description of Artificial Sequence: Synthetic oligonucleotide
  Sense strand starting at position 2633 of SEQ ID NO: 1888076
gagucugaguucuuaccaa

SEQ ID NO: 2509081 - RNA, 19 nt, Artificial Sequence
  Description of Artificial Sequence: Synthetic oligonucleotide
  Antisense strand to SEQ ID NO: 2509080
uugguaagaacucagacuc

SEQ ID NO: 2509082 - RNA, 19 nt, Artificial Sequence
  Description of Artificial Sequence: Synthetic oligonucleotide
  Sense strand starting at position 2665 of SEQ ID NO: 1888076
uucugaugcucaucaaagu

SEQ ID NO: 2509083 - RNA, 19 nt, Artificial Sequence
  Description of Artificial Sequence: Synthetic oligonucleotide
  Antisense strand to SEQ ID NO: 2509082
acuuugaugagcaucagaa

SEQ ID NO: 2509084 - RNA, 19 nt, Artificial Sequence
  Description of Artificial Sequence: Synthetic oligonucleotide
  Sense strand starting at position 2673 of SEQ ID NO: 1888076
cucaucaaagugugggaaa

SEQ ID NO: 2509085 - RNA, 19 nt, Artificial Sequence
  Description of Artificial Sequence: Synthetic oligonucleotide
  Antisense strand to SEQ ID NO: 2509084
uuucccacacuuugaugag

SEQ ID NO: 2509086 - RNA, 19 nt, Artificial Sequence
  Description of Artificial Sequence: Synthetic oligonucleotide
  Sense strand starting at position 2875 of SEQ ID NO: 1888076
ggagaaucgccugaauucg

SEQ ID NO: 2509087 - RNA, 19 nt, Artificial Sequence
  Description of Artificial Sequence: Synthetic oligonucleotide
  Antisense strand to SEQ ID NO: 2509086
cgaauucaggcgauucucc

SEQ ID NO: 2509088 - RNA, 19 nt, Artificial Sequence
  Description of Artificial Sequence: Synthetic oligonucleotide
  Sense strand starting at position 3161 of SEQ ID NO: 1888076
augccuuucuuggaucuua

SEQ ID NO: 2509089 - RNA, 19 nt, Artificial Sequence
  Description of Artificial Sequence: Synthetic oligonucleotide
  Antisense strand to SEQ ID NO: 2509088
uaagauccaagaaaggcau

SEQ ID NO: 2509090 - RNA, 19 nt, Artificial Sequence
  Description of Artificial Sequence: Synthetic oligonucleotide
  Sense strand starting at position 3244 of SEQ ID NO: 1888076
ugaccucugcacugcaaau

SEQ ID NO: 2509091 - RNA, 19 nt, Artificial Sequence
  Description of Artificial Sequence: Synthetic oligonucleotide
  Antisense strand to SEQ ID NO: 2509090
auuugcagugcagagguca

SEQ ID NO: 2509092 - RNA, 19 nt, Artificial Sequence
  Description of Artificial Sequence: Synthetic oligonucleotide
  Sense strand starting at position 3570 of SEQ ID NO: 1888076
aacuccugacgucgugaua

SEQ ID NO: 2509093 - RNA, 19 nt, Artificial Sequence
  Description of Artificial Sequence: Synthetic oligonucleotide
  Antisense strand to SEQ ID NO: 2509092
uaucacgacgucaggaguu

SEQ ID NO: 2509094 - RNA, 19 nt, Artificial Sequence
  Description of Artificial Sequence: Synthetic oligonucleotide
  Sense strand starting at position 161 of SEQ ID NO: 1888078
aguuccuggcaugauuaau

SEQ ID NO: 2509095 - RNA, 19 nt, Artificial Sequence
  Description of Artificial Sequence: Synthetic oligonucleotide
  Antisense strand to SEQ ID NO: 2509094
auuaaucaugccaggaacu

SEQ ID NO: 2509096 - RNA, 19 nt, Artificial Sequence
  Description of Artificial Sequence: Synthetic oligonucleotide
  Sense strand starting at position 316 of SEQ ID NO: 1888078
caaugauauguuuauugug

SEQ ID NO: 2509097 - RNA, 19 nt, Artificial Sequence
  Description of Artificial Sequence: Synthetic oligonucleotide
  Antisense strand to SEQ ID NO: 2509096
cacaauaaacauaucauug

SEQ ID NO: 2509098 - RNA, 19 nt, Artificial Sequence
  Description of Artificial Sequence: Synthetic oligonucleotide
  Sense strand starting at position 708 of SEQ ID NO: 1888078
gcaauauggcuagaagcaa

SEQ ID NO: 2509099 - RNA, 19 nt, Artificial Sequence
  Description of Artificial Sequence: Synthetic oligonucleotide
  Antisense strand to SEQ ID NO: 2509098
uugcuucuagccauauugc

SEQ ID NO: 2509100 - RNA, 19 nt, Artificial Sequence
  Description of Artificial Sequence: Synthetic oligonucleotide
  Sense strand starting at position 879 of SEQ ID NO: 1888078
agccauacacauuguuaag

SEQ ID NO: 2509101 - RNA, 19 nt, Artificial Sequence
  Description of Artificial Sequence: Synthetic oligonucleotide
  Antisense strand to SEQ ID NO: 2509100
cuuaacaauguguauggcu

SEQ ID NO: 2509102 - RNA, 19 nt, Artificial Sequence
  Description of Artificial Sequence: Synthetic oligonucleotide
  Sense strand starting at position 975 of SEQ ID NO: 1888078
gcaccuuggcacuacuaau

SEQ ID NO: 2509103 - RNA, 19 nt, Artificial Sequence
  Description of Artificial Sequence: Synthetic oligonucleotide
  Antisense strand to SEQ ID NO: 2509102
auuaguagugccaaggugc

SEQ ID NO: 2509104 - RNA, 19 nt, Artificial Sequence
  Description of Artificial Sequence: Synthetic oligonucleotide
  Sense strand starting at position 1067 of SEQ ID NO: 1888078
gugacuuuggcauaacuau

SEQ ID NO: 2509105 - RNA, 19 nt, Artificial Sequence
  Description of Artificial Sequence: Synthetic oligonucleotide
  Antisense strand to SEQ ID NO: 2509104
auaguuaugccaaagucac

SEQ ID NO: 2509106 - RNA, 19 nt, Artificial Sequence
  Description of Artificial Sequence: Synthetic oligonucleotide
  Sense strand starting at position 1103 of SEQ ID NO: 1888078
gguagaguaaagcaaguau

SEQ ID NO: 2509107 - RNA, 19 nt, Artificial Sequence
  Description of Artificial Sequence: Synthetic oligonucleotide
  Antisense strand to SEQ ID NO: 2509106
auacuugcuuuacucuacc

SEQ ID NO: 2509108 - RNA, 19 nt, Artificial Sequence
  Description of Artificial Sequence: Synthetic oligonucleotide
  Sense strand starting at position 1107 of SEQ ID NO: 1888078
gaguaaagcaaguauguag

SEQ ID NO: 2509109 - RNA, 19 nt, Artificial Sequence
  Description of Artificial Sequence: Synthetic oligonucleotide
  Antisense strand to SEQ ID NO: 2509108
cuacauacuugcuuuacuc

SEQ ID NO: 2509110 - RNA, 19 nt, Artificial Sequence
  Description of Artificial Sequence: Synthetic oligonucleotide
  Sense strand starting at position 1124 of SEQ ID NO: 1888078
aguuuaauuuaagacagag

SEQ ID NO: 2509111 - RNA, 19 nt, Artificial Sequence
  Description of Artificial Sequence: Synthetic oligonucleotide
  Antisense strand to SEQ ID NO: 2509110
cucugucuuaaauuaaacu

SEQ ID NO: 2509112 - RNA, 19 nt, Artificial Sequence
  Description of Artificial Sequence: Synthetic oligonucleotide
  Sense strand starting at position 1422 of SEQ ID NO: 1888078
gaaaucauuugugaaagug

SEQ ID NO: 2509113 - RNA, 19 nt, Artificial Sequence
  Description of Artificial Sequence: Synthetic oligonucleotide
  Antisense strand to SEQ ID NO: 2509112
cacuuucacaaaugauuuc

SEQ ID NO: 2509114 - RNA, 19 nt, Artificial Sequence
  Description of Artificial Sequence: Synthetic oligonucleotide
  Sense strand starting at position 1489 of SEQ ID NO: 1888078
ucaugugaacauuauuagu

SEQ ID NO: 2509115 - RNA, 19 nt, Artificial Sequence
  Description of Artificial Sequence: Synthetic oligonucleotide
  Antisense strand to SEQ ID NO: 2509114
acuaauaauguucacauga

SEQ ID NO: 2509116 - RNA, 19 nt, Artificial Sequence
  Description of Artificial Sequence: Synthetic oligonucleotide
  Sense strand starting at position 1753 of SEQ ID NO: 1888078
cugcaauaccugcaagaca

SEQ ID NO: 2509117 - RNA, 19 nt, Artificial Sequence
  Description of Artificial Sequence: Synthetic oligonucleotide
  Antisense strand to SEQ ID NO: 2509116
ugucuugcagguauugcag

SEQ ID NO: 2509118 - RNA, 19 nt, Artificial Sequence
  Description of Artificial Sequence: Synthetic oligonucleotide
  Sense strand starting at position 1797 of SEQ ID NO: 1888078
uaguuucugcaagaaauug

SEQ ID NO: 2509119 - RNA, 19 nt, Artificial Sequence
  Description of Artificial Sequence: Synthetic oligonucleotide
  Antisense strand to SEQ ID NO: 2509118
caauuucuugcagaaacua

SEQ ID NO: 2509120 - RNA, 19 nt, Artificial Sequence
  Description of Artificial Sequence: Synthetic oligonucleotide
  Sense strand starting at position 1845 of SEQ ID NO: 1888078
ccaggauaguuaccuuauc

SEQ ID NO: 2509121 - RNA, 19 nt, Artificial Sequence
  Description of Artificial Sequence: Synthetic oligonucleotide
  Antisense strand to SEQ ID NO: 2509120
gauaagguaacuauccugg

SEQ ID NO: 2509122 - RNA, 19 nt, Artificial Sequence
  Description of Artificial Sequence: Synthetic oligonucleotide
  Sense strand starting at position 1908 of SEQ ID NO: 1888078
cacuuagucccaugaggac

SEQ ID NO: 2509123 - RNA, 19 nt, Artificial Sequence
  Description of Artificial Sequence: Synthetic oligonucleotide
  Antisense strand to SEQ ID NO: 2509122
guccucaugggacuaagug

SEQ ID NO: 2509124 - RNA, 19 nt, Artificial Sequence
  Description of Artificial Sequence: Synthetic oligonucleotide
  Sense strand starting at position 1967 of SEQ ID NO: 1888078
ugaagaucucauuggucaa

SEQ ID NO: 2509125 - RNA, 19 nt, Artificial Sequence
  Description of Artificial Sequence: Synthetic oligonucleotide
  Antisense strand to SEQ ID NO: 2509124
uugaccaaugagaucuuca

SEQ ID NO: 2509126 - RNA, 19 nt, Artificial Sequence
  Description of Artificial Sequence: Synthetic oligonucleotide
  Sense strand starting at position 2010 of SEQ ID NO: 1888078
ugccuaugugcccuuagua

SEQ ID NO: 2509127 - RNA, 19 nt, Artificial Sequence
  Description of Artificial Sequence: Synthetic oligonucleotide
  Antisense strand to SEQ ID NO: 2509126
uacuaagggcacauaggca

SEQ ID NO: 2509128 - RNA, 19 nt, Artificial Sequence
  Description of Artificial Sequence: Synthetic oligonucleotide
  Sense strand starting at position 2112 of SEQ ID NO: 1888078
aaguauugaugagcuaaug

SEQ ID NO: 2509129 - RNA, 19 nt, Artificial Sequence
  Description of Artificial Sequence: Synthetic oligonucleotide
  Antisense strand to SEQ ID NO: 2509128
cauuagcucaucaauacuu

SEQ ID NO: 2509130 - RNA, 19 nt, Artificial Sequence
  Description of Artificial Sequence: Synthetic oligonucleotide
  Sense strand starting at position 2148 of SEQ ID NO: 1888078
uguuauuugcaaugcucca

SEQ ID NO: 2509131 - RNA, 19 nt, Artificial Sequence
  Description of Artificial Sequence: Synthetic oligonucleotide
  Antisense strand to SEQ ID NO: 2509130
uggagcauugcaaauaaca

SEQ ID NO: 2509132 - RNA, 19 nt, Artificial Sequence
  Description of Artificial Sequence: Synthetic oligonucleotide
  Sense strand starting at position 2245 of SEQ ID NO: 1888078
ugcauagaagcauagugaa

SEQ ID NO: 2509133 - RNA, 19 nt, Artificial Sequence
  Description of Artificial Sequence: Synthetic oligonucleotide
  Antisense strand to SEQ ID NO: 2509132
uucacuaugcuucuaugca

SEQ ID NO: 2509134 - RNA, 19 nt, Artificial Sequence
  Description of Artificial Sequence: Synthetic oligonucleotide
  Sense strand starting at position 2344 of SEQ ID NO: 1888078
auggaauucuuucuguuaa

SEQ ID NO: 2509135 - RNA, 19 nt, Artificial Sequence
  Description of Artificial Sequence: Synthetic oligonucleotide
  Antisense strand to SEQ ID NO: 2509134
uuaacagaaagaauuccau

SEQ ID NO: 2509136 - RNA, 19 nt, Artificial Sequence
  Description of Artificial Sequence: Synthetic oligonucleotide
  Sense strand starting at position 2346 of SEQ ID NO: 1888078
ggaauucuuucuguuaaua

SEQ ID NO: 2509137 - RNA, 19 nt, Artificial Sequence
  Description of Artificial Sequence: Synthetic oligonucleotide
  Antisense strand to SEQ ID NO: 2509136
uauuaacagaaagaauucc

SEQ ID NO: 2509138 - RNA, 19 nt, Artificial Sequence
  Description of Artificial Sequence: Synthetic oligonucleotide
  Sense strand starting at position 2358 of SEQ ID NO: 1888078
guuaauagccaacagaauu

SEQ ID NO: 2509139 - RNA, 19 nt, Artificial Sequence
  Description of Artificial Sequence: Synthetic oligonucleotide
  Antisense strand to SEQ ID NO: 2509138
aauucuguuggcuauuaac

SEQ ID NO: 2509140 - RNA, 19 nt, Artificial Sequence
  Description of Artificial Sequence: Synthetic oligonucleotide
  Sense strand starting at position 2373 of SEQ ID NO: 1888078
aauuaauguucuguggaac

SEQ ID NO: 2509141 - RNA, 19 nt, Artificial Sequence
  Description of Artificial Sequence: Synthetic oligonucleotide
  Antisense strand to SEQ ID NO: 2509140
guuccacagaacauuaauu

SEQ ID NO: 2509142 - RNA, 19 nt, Artificial Sequence
  Description of Artificial Sequence: Synthetic oligonucleotide
  Sense strand starting at position 2374 of SEQ ID NO: 1888078
auuaauguucuguggaaca

SEQ ID NO: 2509143 - RNA, 19 nt, Artificial Sequence
  Description of Artificial Sequence: Synthetic oligonucleotide
  Antisense strand to SEQ ID NO: 2509142
uguuccacagaacauuaau

SEQ ID NO: 2509144 - RNA, 19 nt, Artificial Sequence
  Description of Artificial Sequence: Synthetic oligonucleotide
  Sense strand starting at position 2376 of SEQ ID NO: 1888078
uaauguucuguggaacaua

SEQ ID NO: 2509145 - RNA, 19 nt, Artificial Sequence
  Description of Artificial Sequence: Synthetic oligonucleotide
  Antisense strand to SEQ ID NO: 2509144
uauguuccacagaacauua

SEQ ID NO: 2509146 - RNA, 19 nt, Artificial Sequence
  Description of Artificial Sequence: Synthetic oligonucleotide
  Sense strand starting at position 2384 of SEQ ID NO: 1888078
uguggaacauacuuuguga

SEQ ID NO: 2509147 - RNA, 19 nt, Artificial Sequence
  Description of Artificial Sequence: Synthetic oligonucleotide
  Antisense strand to SEQ ID NO: 2509146
ucacaaaguauguuccaca

SEQ ID NO: 2509148 - RNA, 19 nt, Artificial Sequence
  Description of Artificial Sequence: Synthetic oligonucleotide
  Sense strand starting at position 2387 of SEQ ID NO: 1888078
ggaacauacuuugugaaac

SEQ ID NO: 2509149 - RNA, 19 nt, Artificial Sequence
  Description of Artificial Sequence: Synthetic oligonucleotide
  Antisense strand to SEQ ID NO: 2509148
guuucacaaaguauguucc

SEQ ID NO: 2509150 - RNA, 19 nt, Artificial Sequence
  Description of Artificial Sequence: Synthetic oligonucleotide
  Sense strand starting at position 2527 of SEQ ID NO: 1888078
gugcgugagauugcuuuau

SEQ ID NO: 2509151 - RNA, 19 nt, Artificial Sequence
  Description of Artificial Sequence: Synthetic oligonucleotide
  Antisense strand to SEQ ID NO: 2509150
auaaagcaaucucacgcac

SEQ ID NO: 2509152 - RNA, 19 nt, Artificial Sequence
  Description of Artificial Sequence: Synthetic oligonucleotide
  Sense strand starting at position 2531 of SEQ ID NO: 1888078
gugagauugcuuuauaaug

SEQ ID NO: 2509153 - RNA, 19 nt, Artificial Sequence
  Description of Artificial Sequence: Synthetic oligonucleotide
  Antisense strand to SEQ ID NO: 2509152
cauuauaaagcaaucucac

SEQ ID NO: 2509154 - RNA, 19 nt, Artificial Sequence
  Description of Artificial Sequence: Synthetic oligonucleotide
  Sense strand starting at position 2686 of SEQ ID NO: 1888078
uccuucugugcgucuuuau

SEQ ID NO: 2509155 - RNA, 19 nt, Artificial Sequence
  Description of Artificial Sequence: Synthetic oligonucleotide
  Antisense strand to SEQ ID NO: 2509154
auaaagacgcacagaagga

SEQ ID NO: 2509156 - RNA, 19 nt, Artificial Sequence
  Description of Artificial Sequence: Synthetic oligonucleotide
  Sense strand starting at position 2687 of SEQ ID NO: 1888078
ccuucugugcgucuuuauu

SEQ ID NO: 2509157 - RNA, 19 nt, Artificial Sequence
  Description of Artificial Sequence: Synthetic oligonucleotide
  Antisense strand to SEQ ID NO: 2509156
aauaaagacgcacagaagg

SEQ ID NO: 2509158 - RNA, 19 nt, Artificial Sequence
  Description of Artificial Sequence: Synthetic oligonucleotide
  Sense strand starting at position 2724 of SEQ ID NO: 1888078
gaagaaguauaagagaaga

SEQ ID NO: 2509159 - RNA, 19 nt, Artificial Sequence
  Description of Artificial Sequence: Synthetic oligonucleotide
  Antisense strand to SEQ ID NO: 2509158
ucuucucuuauacuucuuc

SEQ ID NO: 2509160 - RNA, 19 nt, Artificial Sequence
  Description of Artificial Sequence: Synthetic oligonucleotide
  Sense strand starting at position 2751 of SEQ ID NO: 1888078
aggugaaaucugggaaguc

SEQ ID NO: 2509161 - RNA, 19 nt, Artificial Sequence
  Description of Artificial Sequence: Synthetic oligonucleotide
  Antisense strand to SEQ ID NO: 2509160
gacuucccagauuucaccu

SEQ ID NO: 2509162 - RNA, 19 nt, Artificial Sequence
  Description of Artificial Sequence: Synthetic oligonucleotide
  Sense strand starting at position 2881 of SEQ ID NO: 1888078
ugccauauaccagguagaa

SEQ ID NO: 2509163 - RNA, 19 nt, Artificial Sequence
  Description of Artificial Sequence: Synthetic oligonucleotide
  Antisense strand to SEQ ID NO: 2509162
uucuaccugguauauggca

SEQ ID NO: 2509164 - RNA, 19 nt, Artificial Sequence
  Description of Artificial Sequence: Synthetic oligonucleotide
  Sense strand starting at position 2991 of SEQ ID NO: 1888078
gggugagugcuugaaccau

SEQ ID NO: 2509165 - RNA, 19 nt, Artificial Sequence
  Description of Artificial Sequence: Synthetic oligonucleotide
  Antisense strand to SEQ ID NO: 2509164
augguucaagcacucaccc

SEQ ID NO: 2509166 - RNA, 19 nt, Artificial Sequence
  Description of Artificial Sequence: Synthetic oligonucleotide
  Sense strand starting at position 3346 of SEQ ID NO: 1888078
agcauuguggaaggaauua

SEQ ID NO: 2509167 - RNA, 19 nt, Artificial Sequence
  Description of Artificial Sequence: Synthetic oligonucleotide
  Antisense strand to SEQ ID NO: 2509166
uaauuccuuccacaaugcu

SEQ ID NO: 2509168 - RNA, 19 nt, Artificial Sequence
  Description of Artificial Sequence: Synthetic oligonucleotide
  Sense strand starting at position 3662 of SEQ ID NO: 1888078
uuccauagccuguaugauc

SEQ ID NO: 2509169 - RNA, 19 nt, Artificial Sequence
  Description of Artificial Sequence: Synthetic oligonucleotide
  Antisense strand to SEQ ID NO: 2509168
gaucauacaggcuauggaa

SEQ ID NO: 2509170 - RNA, 19 nt, Artificial Sequence
  Description of Artificial Sequence: Synthetic oligonucleotide
  Sense strand starting at position 3681 of SEQ ID NO: 1888078
uguuguugugaauauaauc

SEQ ID NO: 2509171 - RNA, 19 nt, Artificial Sequence
  Description of Artificial Sequence: Synthetic oligonucleotide
  Antisense strand to SEQ ID NO: 2509170
gauuauauucacaacaaca

SEQ ID NO: 2509172 - RNA, 19 nt, Artificial Sequence
  Description of Artificial Sequence: Synthetic oligonucleotide
  Sense strand starting at position 3927 of SEQ ID NO: 1888078
ggcugaauccugggauacc

SEQ ID NO: 2509173 - RNA, 19 nt, Artificial Sequence
  Description of Artificial Sequence: Synthetic oligonucleotide
  Antisense strand to SEQ ID NO: 2509172
gguaucccaggauucagcc

SEQ ID NO: 2509174 - RNA, 19 nt, Artificial Sequence
  Description of Artificial Sequence: Synthetic oligonucleotide
  Sense strand starting at position 314 of SEQ ID NO: 1888079
uggcuugcaugagugugaa

SEQ ID NO: 2509175 - RNA, 19 nt, Artificial Sequence
  Description of Artificial Sequence: Synthetic oligonucleotide
  Antisense strand to SEQ ID NO: 2509174
uucacacucaugcaagcca

SEQ ID NO: 2509176 - RNA, 19 nt, Artificial Sequence
  Description of Artificial Sequence: Synthetic oligonucleotide
  Sense strand starting at position 755 of SEQ ID NO: 1888079
gggagauguccgcagcuga

SEQ ID NO: 2509177 - RNA, 19 nt, Artificial Sequence
  Description of Artificial Sequence: Synthetic oligonucleotide
  Antisense strand to SEQ ID NO: 2509176
ucagcugcggacaucuccc

SEQ ID NO: 2509178 - RNA, 19 nt, Artificial Sequence
  Description of Artificial Sequence: Synthetic oligonucleotide
  Sense strand starting at position 756 of SEQ ID NO: 1888079
ggagauguccgcagcugag

SEQ ID NO: 2509179 - RNA, 19 nt, Artificial Sequence
  Description of Artificial Sequence: Synthetic oligonucleotide
  Antisense strand to SEQ ID NO: 2509178
cucagcugcggacaucucc

SEQ ID NO: 2509180 - RNA, 19 nt, Artificial Sequence
  Description of Artificial Sequence: Synthetic oligonucleotide
  Sense strand starting at position 822 of SEQ ID NO: 1888079
uacaaagcguccugugaag

SEQ ID NO: 2509181 - RNA, 19 nt, Artificial Sequence
  Description of Artificial Sequence: Synthetic oligonucleotide
  Antisense strand to SEQ ID NO: 2509180
cuucacaggacgcuuugua

SEQ ID NO: 2509182 - RNA, 19 nt, Artificial Sequence
  Description of Artificial Sequence: Synthetic oligonucleotide
  Sense strand starting at position 824 of SEQ ID NO: 1888079
caaagcguccugugaagac

SEQ ID NO: 2509183 - RNA, 19 nt, Artificial Sequence
  Description of Artificial Sequence: Synthetic oligonucleotide
  Antisense strand to SEQ ID NO: 2509182
gucuucacaggacgcuuug

SEQ ID NO: 2509184 - RNA, 19 nt, Artificial Sequence
  Description of Artificial Sequence: Synthetic oligonucleotide
  Sense strand starting at position 1259 of SEQ ID NO: 1888079
ugaccugucagagggacua

SEQ ID NO: 2509185 - RNA, 19 nt, Artificial Sequence
  Description of Artificial Sequence: Synthetic oligonucleotide
  Antisense strand to SEQ ID NO: 2509184
uagucccucugacagguca

SEQ ID NO: 2509186 - RNA, 19 nt, Artificial Sequence
  Description of Artificial Sequence: Synthetic oligonucleotide
  Sense strand starting at position 1996 of SEQ ID NO: 1888079
ugcggucaugacugucaga

SEQ ID NO: 2509187 - RNA, 19 nt, Artificial Sequence
  Description of Artificial Sequence: Synthetic oligonucleotide
  Antisense strand to SEQ ID NO: 2509186
ucugacagucaugaccgca

SEQ ID NO: 2509188 - RNA, 19 nt, Artificial Sequence
  Description of Artificial Sequence: Synthetic oligonucleotide
  Sense strand starting at position 1999 of SEQ ID NO: 1888079
ggucaugacugucagacga

SEQ ID NO: 2509189 - RNA, 19 nt, Artificial Sequence
  Description of Artificial Sequence: Synthetic oligonucleotide
  Antisense strand to SEQ ID NO: 2509188
ucgucugacagucaugacc

SEQ ID NO: 2509190 - RNA, 19 nt, Artificial Sequence
  Description of Artificial Sequence: Synthetic oligonucleotide
  Sense strand starting at position 2093 of SEQ ID NO: 1888079
ccaggaaucucuggugcca

SEQ ID NO: 2509191 - RNA, 19 nt, Artificial Sequence
  Description of Artificial Sequence: Synthetic oligonucleotide
  Antisense strand to SEQ ID NO: 2509190
uggcaccagagauuccugg

SEQ ID NO: 2509192 - RNA, 19 nt, Artificial Sequence
  Description of Artificial Sequence: Synthetic oligonucleotide
  Sense strand starting at position 2275 of SEQ ID NO: 1888079
cagucaugcuggugggagu

SEQ ID NO: 2509193 - RNA, 19 nt, Artificial Sequence
  Description of Artificial Sequence: Synthetic oligonucleotide
  Antisense strand to SEQ ID NO: 2509192
acucccaccagcaugacug

SEQ ID NO: 2509194 - RNA, 19 nt, Artificial Sequence
  Description of Artificial Sequence: Synthetic oligonucleotide
  Sense strand starting at position 2369 of SEQ ID NO: 1888079
gggucagugaugggcagua

SEQ ID NO: 2509195 - RNA, 19 nt, Artificial Sequence
  Description of Artificial Sequence: Synthetic oligonucleotide
  Antisense strand to SEQ ID NO: 2509194
uacugcccaucacugaccc

SEQ ID NO: 2509196 - RNA, 19 nt, Artificial Sequence
  Description of Artificial Sequence: Synthetic oligonucleotide
  Sense strand starting at position 2934 of SEQ ID NO: 1888079
cguggugucccuggugaac

SEQ ID NO: 2509197 - RNA, 19 nt, Artificial Sequence
  Description of Artificial Sequence: Synthetic oligonucleotide
  Antisense strand to SEQ ID NO: 2509196
guucaccagggacaccacg

SEQ ID NO: 2509198 - RNA, 19 nt, Artificial Sequence
  Description of Artificial Sequence: Synthetic oligonucleotide
  Sense strand starting at position 3206 of SEQ ID NO: 1888079
gcaguauuauuacagcauc

SEQ ID NO: 2509199 - RNA, 19 nt, Artificial Sequence
  Description of Artificial Sequence: Synthetic oligonucleotide
  Antisense strand to SEQ ID NO: 2509198
gaugcuguaauaauacugc

SEQ ID NO: 2509200 - RNA, 19 nt, Artificial Sequence
  Description of Artificial Sequence: Synthetic oligonucleotide
  Sense strand starting at position 3209 of SEQ ID NO: 1888079
guauuauuacagcaucaag

SEQ ID NO: 2509201 - RNA, 19 nt, Artificial Sequence
  Description of Artificial Sequence: Synthetic oligonucleotide
  Antisense strand to SEQ ID NO: 2509200
cuugaugcuguaauaauac

SEQ ID NO: 2509202 - RNA, 19 nt, Artificial Sequence
  Description of Artificial Sequence: Synthetic oligonucleotide
  Sense strand starting at position 55 of SEQ ID NO: 1888080
acugaugagaacugacguu

SEQ ID NO: 2509203 - RNA, 19 nt, Artificial Sequence
  Description of Artificial Sequence: Synthetic oligonucleotide
  Antisense strand to SEQ ID NO: 2509202
aacgucaguucucaucagu

SEQ ID NO: 2509204 - RNA, 19 nt, Artificial Sequence
  Description of Artificial Sequence: Synthetic oligonucleotide
  Sense strand starting at position 149 of SEQ ID NO: 1888080
uuuguaaaguucuugagaa

SEQ ID NO: 2509205 - RNA, 19 nt, Artificial Sequence
  Description of Artificial Sequence: Synthetic oligonucleotide
  Antisense strand to SEQ ID NO: 2509204
uucucaagaacuuuacaaa

SEQ ID NO: 2509206 - RNA, 19 nt, Artificial Sequence
  Description of Artificial Sequence: Synthetic oligonucleotide
  Sense strand starting at position 163 of SEQ ID NO: 1888080
gagaaauguuuggaugaaa

SEQ ID NO: 2509207 - RNA, 19 nt, Artificial Sequence
  Description of Artificial Sequence: Synthetic oligonucleotide
  Antisense strand to SEQ ID NO: 2509206
uuucauccaaacauuucuc

SEQ ID NO: 2509208 - RNA, 19 nt, Artificial Sequence
  Description of Artificial Sequence: Synthetic oligonucleotide
  Sense strand starting at position 245 of SEQ ID NO: 1888080
uacuuugaauugcuaguga

SEQ ID NO: 2509209 - RNA, 19 nt, Artificial Sequence
  Description of Artificial Sequence: Synthetic oligonucleotide
  Antisense strand to SEQ ID NO: 2509208
ucacuagcaauucaaagua

SEQ ID NO: 2509210 - RNA, 19 nt, Artificial Sequence
  Description of Artificial Sequence: Synthetic oligonucleotide
  Sense strand starting at position 252 of SEQ ID NO: 1888080
aauugcuagugaucuaaug

SEQ ID NO: 2509211 - RNA, 19 nt, Artificial Sequence
  Description of Artificial Sequence: Synthetic oligonucleotide
  Antisense strand to SEQ ID NO: 2509210
cauuagaucacuagcaauu

SEQ ID NO: 2509212 - RNA, 19 nt, Artificial Sequence
  Description of Artificial Sequence: Synthetic oligonucleotide
  Sense strand starting at position 260 of SEQ ID NO: 1888080
gugaucuaaugauugauau

SEQ ID NO: 2509213 - RNA, 19 nt, Artificial Sequence
  Description of Artificial Sequence: Synthetic oligonucleotide
  Antisense strand to SEQ ID NO: 2509212
auaucaaucauuagaucac

SEQ ID NO: 2509214 - RNA, 19 nt, Artificial Sequence
  Description of Artificial Sequence: Synthetic oligonucleotide
  Sense strand starting at position 278 of SEQ ID NO: 1888080
uaggaauauguuugaaagc

SEQ ID NO: 2509215 - RNA, 19 nt, Artificial Sequence
  Description of Artificial Sequence: Synthetic oligonucleotide
  Antisense strand to SEQ ID NO: 2509214
gcuuucaaacauauuccua

SEQ ID NO: 2509216 - RNA, 19 nt, Artificial Sequence
  Description of Artificial Sequence: Synthetic oligonucleotide
  Sense strand starting at position 314 of SEQ ID NO: 1888080
uacuuuguggcagauaugu

SEQ ID NO: 2509217 - RNA, 19 nt, Artificial Sequence
  Description of Artificial Sequence: Synthetic oligonucleotide
  Antisense strand to SEQ ID NO: 2509216
acauaucugccacaaagua

SEQ ID NO: 2509218 - RNA, 19 nt, Artificial Sequence
  Description of Artificial Sequence: Synthetic oligonucleotide
  Sense strand starting at position 316 of SEQ ID NO: 1888080
cuuuguggcagauauguca

SEQ ID NO: 2509219 - RNA, 19 nt, Artificial Sequence
  Description of Artificial Sequence: Synthetic oligonucleotide
  Antisense strand to SEQ ID NO: 2509218
ugacauaucugccacaaag

SEQ ID NO: 2509220 - RNA, 19 nt, Artificial Sequence
  Description of Artificial Sequence: Synthetic oligonucleotide
  Sense strand starting at position 498 of SEQ ID NO: 1888080
agaguuaaagcaugugauu

SEQ ID NO: 2509221 - RNA, 19 nt, Artificial Sequence
  Description of Artificial Sequence: Synthetic oligonucleotide
  Antisense strand to SEQ ID NO: 2509220
aaucacaugcuuuaacucu

SEQ ID NO: 2509222 - RNA, 19 nt, Artificial Sequence
  Description of Artificial Sequence: Synthetic oligonucleotide
  Sense strand starting at position 530 of SEQ ID NO: 1888080
ucuaacugaccaugugaca

SEQ ID NO: 2509223 - RNA, 19 nt, Artificial Sequence
  Description of Artificial Sequence: Synthetic oligonucleotide
  Antisense strand to SEQ ID NO: 2509222
ugucacauggucaguuaga

SEQ ID NO: 2509224 - RNA, 19 nt, Artificial Sequence
  Description of Artificial Sequence: Synthetic oligonucleotide
  Sense strand starting at position 654 of SEQ ID NO: 1888080
uuagauaaugcaggugaaa

SEQ ID NO: 2509225 - RNA, 19 nt, Artificial Sequence
  Description of Artificial Sequence: Synthetic oligonucleotide
  Antisense strand to SEQ ID NO: 2509224
uuucaccugcauuaucuaa

SEQ ID NO: 2509226 - RNA, 19 nt, Artificial Sequence
  Description of Artificial Sequence: Synthetic oligonucleotide
  Sense strand starting at position 656 of SEQ ID NO: 1888080
agauaaugcaggugaaaua

SEQ ID NO: 2509227 - RNA, 19 nt, Artificial Sequence
  Description of Artificial Sequence: Synthetic oligonucleotide
  Antisense strand to SEQ ID NO: 2509226
uauuucaccugcauuaucu

SEQ ID NO: 2509228 - RNA, 19 nt, Artificial Sequence
  Description of Artificial Sequence: Synthetic oligonucleotide
  Sense strand starting at position 666 of SEQ ID NO: 1888080
ggugaaauacuuugcaauu

SEQ ID NO: 2509229 - RNA, 19 nt, Artificial Sequence
  Description of Artificial Sequence: Synthetic oligonucleotide
  Antisense strand to SEQ ID NO: 2509228
aauugcaaaguauuucacc

SEQ ID NO: 2509230 - RNA, 19 nt, Artificial Sequence
  Description of Artificial Sequence: Synthetic oligonucleotide
  Sense strand starting at position 747 of SEQ ID NO: 1888080
ugaaauaucuucuaaggaa

SEQ ID NO: 2509231 - RNA, 19 nt, Artificial Sequence
  Description of Artificial Sequence: Synthetic oligonucleotide
  Antisense strand to SEQ ID NO: 2509230
uuccuuagaagauauuuca

SEQ ID NO: 2509232 - RNA, 19 nt, Artificial Sequence
  Description of Artificial Sequence: Synthetic oligonucleotide
  Sense strand starting at position 795 of SEQ ID NO: 1888080
gaggacugcauguguauuu

SEQ ID NO: 2509233 - RNA, 19 nt, Artificial Sequence
  Description of Artificial Sequence: Synthetic oligonucleotide
  Antisense strand to SEQ ID NO: 2509232
aaauacacaugcaguccuc

SEQ ID NO: 2509234 - RNA, 19 nt, Artificial Sequence
  Description of Artificial Sequence: Synthetic oligonucleotide
  Sense strand starting at position 880 of SEQ ID NO: 1888080
caggaauuagcccaguagu

SEQ ID NO: 2509235 - RNA, 19 nt, Artificial Sequence
  Description of Artificial Sequence: Synthetic oligonucleotide
  Antisense strand to SEQ ID NO: 2509234
acuacugggcuaauuccug

SEQ ID NO: 2509236 - RNA, 19 nt, Artificial Sequence
  Description of Artificial Sequence: Synthetic oligonucleotide
  Sense strand starting at position 883 of SEQ ID NO: 1888080
gaauuagcccaguaguauu

SEQ ID NO: 2509237 - RNA, 19 nt, Artificial Sequence
  Description of Artificial Sequence: Synthetic oligonucleotide
  Antisense strand to SEQ ID NO: 2509236
aauacuacugggcuaauuc

SEQ ID NO: 2509238 - RNA, 19 nt, Artificial Sequence
  Description of Artificial Sequence: Synthetic oligonucleotide
  Sense strand starting at position 895 of SEQ ID NO: 1888080
uaguauuuguucuucuguu

SEQ ID NO: 2509239 - RNA, 19 nt, Artificial Sequence
  Description of Artificial Sequence: Synthetic oligonucleotide
  Antisense strand to SEQ ID NO: 2509238
aacagaagaacaaauacua

SEQ ID NO: 2509240 - RNA, 19 nt, Artificial Sequence
  Description of Artificial Sequence: Synthetic oligonucleotide
  Sense strand starting at position 920 of SEQ ID NO: 1888080
caggcuuuagaguaauauc

SEQ ID NO: 2509241 - RNA, 19 nt, Artificial Sequence
  Description of Artificial Sequence: Synthetic oligonucleotide
  Antisense strand to SEQ ID NO: 2509240
gauauuacucuaaagccug

SEQ ID NO: 2509242 - RNA, 19 nt, Artificial Sequence
  Description of Artificial Sequence: Synthetic oligonucleotide
  Sense strand starting at position 928 of SEQ ID NO: 1888080
agaguaauaucagugugug

SEQ ID NO: 2509243 - RNA, 19 nt, Artificial Sequence
  Description of Artificial Sequence: Synthetic oligonucleotide
  Antisense strand to SEQ ID NO: 2509242
cacacacugauauuacucu

SEQ ID NO: 2509244 - RNA, 19 nt, Artificial Sequence
  Description of Artificial Sequence: Synthetic oligonucleotide
  Sense strand starting at position 991 of SEQ ID NO: 1888080
aaauuucuguccuaggaga

SEQ ID NO: 2509245 - RNA, 19 nt, Artificial Sequence
  Description of Artificial Sequence: Synthetic oligonucleotide
  Antisense strand to SEQ ID NO: 2509244
ucuccuaggacagaaauuu

SEQ ID NO: 2509246 - RNA, 19 nt, Artificial Sequence
  Description of Artificial Sequence: Synthetic oligonucleotide
  Sense strand starting at position 1070 of SEQ ID NO: 1888080
aguauaaugcgggagggua

SEQ ID NO: 2509247 - RNA, 19 nt, Artificial Sequence
  Description of Artificial Sequence: Synthetic oligonucleotide
  Antisense strand to SEQ ID NO: 2509246
uacccucccgcauuauacu

SEQ ID NO: 2509248 - RNA, 19 nt, Artificial Sequence
  Description of Artificial Sequence: Synthetic oligonucleotide
  Sense strand starting at position 1954 of SEQ ID NO: 1888080
gcacucuuugcagagaaca

SEQ ID NO: 2509249 - RNA, 19 nt, Artificial Sequence
  Description of Artificial Sequence: Synthetic oligonucleotide
  Antisense strand to SEQ ID NO: 2509248
uguucucugcaaagagugc

SEQ ID NO: 2509250 - RNA, 19 nt, Artificial Sequence
  Description of Artificial Sequence: Synthetic oligonucleotide
  Sense strand starting at position 1986 of SEQ ID NO: 1888080
aaagucaauuagcuugaga

SEQ ID NO: 2509251 - RNA, 19 nt, Artificial Sequence
  Description of Artificial Sequence: Synthetic oligonucleotide
  Antisense strand to SEQ ID NO: 2509250
ucucaagcuaauugacuuu

SEQ ID NO: 2509252 - RNA, 19 nt, Artificial Sequence
  Description of Artificial Sequence: Synthetic oligonucleotide
  Sense strand starting at position 1988 of SEQ ID NO: 1888080
agucaauuagcuugagaua

SEQ ID NO: 2509253 - RNA, 19 nt, Artificial Sequence
  Description of Artificial Sequence: Synthetic oligonucleotide
  Antisense strand to SEQ ID NO: 2509252
uaucucaagcuaauugacu

SEQ ID NO: 2509254 - RNA, 19 nt, Artificial Sequence
  Description of Artificial Sequence: Synthetic oligonucleotide
  Sense strand starting at position 1989 of SEQ ID NO: 1888080
gucaauuagcuugagauaa

SEQ ID NO: 2509255 - RNA, 19 nt, Artificial Sequence
  Description of Artificial Sequence: Synthetic oligonucleotide
  Antisense strand to SEQ ID NO: 2509254
uuaucucaagcuaauugac

SEQ ID NO: 2509256 - RNA, 19 nt, Artificial Sequence
  Description of Artificial Sequence: Synthetic oligonucleotide
  Sense strand starting at position 2161 of SEQ ID NO: 1888080
gucagagcauuggcaagaa

SEQ ID NO: 2509257 - RNA, 19 nt, Artificial Sequence
  Description of Artificial Sequence: Synthetic oligonucleotide
  Antisense strand to SEQ ID NO: 2509256
uucuugccaaugcucugac

SEQ ID NO: 2509258 - RNA, 19 nt, Artificial Sequence
  Description of Artificial Sequence: Synthetic oligonucleotide
  Sense strand starting at position 2271 of SEQ ID NO: 1888080
auaaauuaacagcgaagga

SEQ ID NO: 2509259 - RNA, 19 nt, Artificial Sequence
  Description of Artificial Sequence: Synthetic oligonucleotide
  Antisense strand to SEQ ID NO: 2509258
uccuucgcuguuaauuuau

SEQ ID NO: 2509260 - RNA, 19 nt, Artificial Sequence
  Description of Artificial Sequence: Synthetic oligonucleotide
  Sense strand starting at position 2288 of SEQ ID NO: 1888080
gaaugaggcuuguuagacc

SEQ ID NO: 2509261 - RNA, 19 nt, Artificial Sequence
  Description of Artificial Sequence: Synthetic oligonucleotide
  Antisense strand to SEQ ID NO: 2509260
ggucuaacaagccucauuc

SEQ ID NO: 2509262 - RNA, 19 nt, Artificial Sequence
  Description of Artificial Sequence: Synthetic oligonucleotide
  Sense strand starting at position 2297 of SEQ ID NO: 1888080
uuguuagacccggguuaga

SEQ ID NO: 2509263 - RNA, 19 nt, Artificial Sequence
  Description of Artificial Sequence: Synthetic oligonucleotide
  Antisense strand to SEQ ID NO: 2509262
ucuaacccgggucuaacaa

SEQ ID NO: 2509264 - RNA, 19 nt, Artificial Sequence
  Description of Artificial Sequence: Synthetic oligonucleotide
  Sense strand starting at position 2344 of SEQ ID NO: 1888080
ggcagagaacuuugucacu

SEQ ID NO: 2509265 - RNA, 19 nt, Artificial Sequence
  Description of Artificial Sequence: Synthetic oligonucleotide
  Antisense strand to SEQ ID NO: 2509264
agugacaaaguucucugcc

SEQ ID NO: 2509266 - RNA, 19 nt, Artificial Sequence
  Description of Artificial Sequence: Synthetic oligonucleotide
  Sense strand starting at position 2442 of SEQ ID NO: 1888080
guuuguuccgcagauacaa

SEQ ID NO: 2509267 - RNA, 19 nt, Artificial Sequence
  Description of Artificial Sequence: Synthetic oligonucleotide
  Antisense strand to SEQ ID NO: 2509266
uuguaucugcggaacaaac

SEQ ID NO: 2509268 - RNA, 19 nt, Artificial Sequence
  Description of Artificial Sequence: Synthetic oligonucleotide
  Sense strand starting at position 2621 of SEQ ID NO: 1888080
cguagauguaaggaaucuu

SEQ ID NO: 2509269 - RNA, 19 nt, Artificial Sequence
  Description of Artificial Sequence: Synthetic oligonucleotide
  Antisense strand to SEQ ID NO: 2509268
aagauuccuuacaucuacg

SEQ ID NO: 2509270 - RNA, 19 nt, Artificial Sequence
  Description of Artificial Sequence: Synthetic oligonucleotide
  Sense strand starting at position 2688 of SEQ ID NO: 1888080
ccucaaggcucuucgaaga

SEQ ID NO: 2509271 - RNA, 19 nt, Artificial Sequence
  Description of Artificial Sequence: Synthetic oligonucleotide
  Antisense strand to SEQ ID NO: 2509270
ucuucgaagagccuugagg

SEQ ID NO: 2509272 - RNA, 19 nt, Artificial Sequence
  Description of Artificial Sequence: Synthetic oligonucleotide
  Sense strand starting at position 2764 of SEQ ID NO: 1888080
gggauuccagcuuguaaug

SEQ ID NO: 2509273 - RNA, 19 nt, Artificial Sequence
  Description of Artificial Sequence: Synthetic oligonucleotide
  Antisense strand to SEQ ID NO: 2509272
cauuacaagcuggaauccc

SEQ ID NO: 2509274 - RNA, 19 nt, Artificial Sequence
  Description of Artificial Sequence: Synthetic oligonucleotide
  Sense strand starting at position 2773 of SEQ ID NO: 1888080
gcuuguaaugccuucuguu

SEQ ID NO: 2509275 - RNA, 19 nt, Artificial Sequence
  Description of Artificial Sequence: Synthetic oligonucleotide
  Antisense strand to SEQ ID NO: 2509274
aacagaaggcauuacaagc

SEQ ID NO: 2509276 - RNA, 19 nt, Artificial Sequence
  Description of Artificial Sequence: Synthetic oligonucleotide
  Sense strand starting at position 3524 of SEQ ID NO: 1888080
augagucuucugggucuca

SEQ ID NO: 2509277 - RNA, 19 nt, Artificial Sequence
  Description of Artificial Sequence: Synthetic oligonucleotide
  Antisense strand to SEQ ID NO: 2509276
ugagacccagaagacucau

SEQ ID NO: 2509278 - RNA, 19 nt, Artificial Sequence
  Description of Artificial Sequence: Synthetic oligonucleotide
  Sense strand starting at position 3871 of SEQ ID NO: 1888080
uggauucugcaccauguau

SEQ ID NO: 2509279 - RNA, 19 nt, Artificial Sequence
  Description of Artificial Sequence: Synthetic oligonucleotide
  Antisense strand to SEQ ID NO: 2509278
auacauggugcagaaucca

SEQ ID NO: 2509280 - RNA, 19 nt, Artificial Sequence
  Description of Artificial Sequence: Synthetic oligonucleotide
  Sense strand starting at position 3930 of SEQ ID NO: 1888080
ccagauccuccucggcaaa

SEQ ID NO: 2509281 - RNA, 19 nt, Artificial Sequence
  Description of Artificial Sequence: Synthetic oligonucleotide
  Antisense strand to SEQ ID NO: 2509280
uuugccgaggaggaucugg

SEQ ID NO: 2509282 - RNA, 19 nt, Artificial Sequence
  Description of Artificial Sequence: Synthetic oligonucleotide
  Sense strand starting at position 22 of SEQ ID NO: 1888081
cuguguagccuuggagaga

SEQ ID NO: 2509283 - RNA, 19 nt, Artificial Sequence
  Description of Artificial Sequence: Synthetic oligonucleotide
  Antisense strand to SEQ ID NO: 2509282
ucucuccaaggcuacacag

SEQ ID NO: 2509284 - RNA, 19 nt, Artificial Sequence
  Description of Artificial Sequence: Synthetic oligonucleotide
  Sense strand starting at position 363 of SEQ ID NO: 1888081
auggauaucuauuaaugga

SEQ ID NO: 2509285 - RNA, 19 nt, Artificial Sequence
  Description of Artificial Sequence: Synthetic oligonucleotide
  Antisense strand to SEQ ID NO: 2509284
uccauuaauagauauccau

SEQ ID NO: 2509286 - RNA, 19 nt, Artificial Sequence
  Description of Artificial Sequence: Synthetic oligonucleotide
  Sense strand starting at position 974 of SEQ ID NO: 1888081
cuucuuagacacggaaagu

SEQ ID NO: 2509287 - RNA, 19 nt, Artificial Sequence
  Description of Artificial Sequence: Synthetic oligonucleotide
  Antisense strand to SEQ ID NO: 2509286
acuuuccgugucuaagaag

SEQ ID NO: 2509288 - RNA, 19 nt, Artificial Sequence
  Description of Artificial Sequence: Synthetic oligonucleotide
  Sense strand starting at position 1467 of SEQ ID NO: 1888081
uccuuauaaguuugugauu

SEQ ID NO: 2509289 - RNA, 19 nt, Artificial Sequence
  Description of Artificial Sequence: Synthetic oligonucleotide
  Antisense strand to SEQ ID NO: 2509288
aaucacaaacuuauaagga

SEQ ID NO: 2509290 - RNA, 19 nt, Artificial Sequence
  Description of Artificial Sequence: Synthetic oligonucleotide
  Sense strand starting at position 1468 of SEQ ID NO: 1888081
ccuuauaaguuugugauuc

SEQ ID NO: 2509291 - RNA, 19 nt, Artificial Sequence
  Description of Artificial Sequence: Synthetic oligonucleotide
  Antisense strand to SEQ ID NO: 2509290
gaaucacaaacuuauaagg

SEQ ID NO: 2509292 - RNA, 19 nt, Artificial Sequence
  Description of Artificial Sequence: Synthetic oligonucleotide
  Sense strand starting at position 2133 of SEQ ID NO: 1888081
aacgguuugcgucuuguuu

SEQ ID NO: 2509293 - RNA, 19 nt, Artificial Sequence
  Description of Artificial Sequence: Synthetic oligonucleotide
  Antisense strand to SEQ ID NO: 2509292
aaacaagacgcaaaccguu

SEQ ID NO: 2509294 - RNA, 19 nt, Artificial Sequence
  Description of Artificial Sequence: Synthetic oligonucleotide
  Sense strand starting at position 2363 of SEQ ID NO: 1888081
uucugccuucgggaaauga

SEQ ID NO: 2509295 - RNA, 19 nt, Artificial Sequence
  Description of Artificial Sequence: Synthetic oligonucleotide
  Antisense strand to SEQ ID NO: 2509294
ucauuucccgaaggcagaa

SEQ ID NO: 2509296 - RNA, 19 nt, Artificial Sequence
  Description of Artificial Sequence: Synthetic oligonucleotide
  Sense strand starting at position 2374 of SEQ ID NO: 1888081
ggaaaugagugaguuggau

SEQ ID NO: 2509297 - RNA, 19 nt, Artificial Sequence
  Description of Artificial Sequence: Synthetic oligonucleotide
  Antisense strand to SEQ ID NO: 2509296
auccaacucacucauuucc

SEQ ID NO: 2509298 - RNA, 19 nt, Artificial Sequence
  Description of Artificial Sequence: Synthetic oligonucleotide
  Sense strand starting at position 2376 of SEQ ID NO: 1888081
aaaugagugaguuggauua

SEQ ID NO: 2509299 - RNA, 19 nt, Artificial Sequence
  Description of Artificial Sequence: Synthetic oligonucleotide
  Antisense strand to SEQ ID NO: 2509298
uaauccaacucacucauuu

SEQ ID NO: 2509300 - RNA, 19 nt, Artificial Sequence
  Description of Artificial Sequence: Synthetic oligonucleotide
  Sense strand starting at position 2413 of SEQ ID NO: 1888081
ggauuaaugcauugaguuu

SEQ ID NO: 2509301 - RNA, 19 nt, Artificial Sequence
  Description of Artificial Sequence: Synthetic oligonucleotide
  Antisense strand to SEQ ID NO: 2509300
aaacucaaugcauuaaucc

SEQ ID NO: 2509302 - RNA, 19 nt, Artificial Sequence
  Description of Artificial Sequence: Synthetic oligonucleotide
  Sense strand starting at position 2455 of SEQ ID NO: 1888081
cuuuaaauuggaugcgaaa

SEQ ID NO: 2509303 - RNA, 19 nt, Artificial Sequence
  Description of Artificial Sequence: Synthetic oligonucleotide
  Antisense strand to SEQ ID NO: 2509302
uuucgcauccaauuuaaag

SEQ ID NO: 2509304 - RNA, 19 nt, Artificial Sequence
  Description of Artificial Sequence: Synthetic oligonucleotide
  Sense strand starting at position 2536 of SEQ ID NO: 1888081
aauggauauguuggucacu

SEQ ID NO: 2509305 - RNA, 19 nt, Artificial Sequence
  Description of Artificial Sequence: Synthetic oligonucleotide
  Antisense strand to SEQ ID NO: 2509304
agugaccaacauauccauu

SEQ ID NO: 2509306 - RNA, 19 nt, Artificial Sequence
  Description of Artificial Sequence: Synthetic oligonucleotide
  Sense strand starting at position 2537 of SEQ ID NO: 1888081
auggauauguuggucacua

SEQ ID NO: 2509307 - RNA, 19 nt, Artificial Sequence
  Description of Artificial Sequence: Synthetic oligonucleotide
  Antisense strand to SEQ ID NO: 2509306
uagugaccaacauauccau

SEQ ID NO: 2509308 - RNA, 19 nt, Artificial Sequence
  Description of Artificial Sequence: Synthetic oligonucleotide
  Sense strand starting at position 2538 of SEQ ID NO: 1888081
uggauauguuggucacuag

SEQ ID NO: 2509309 - RNA, 19 nt, Artificial Sequence
  Description of Artificial Sequence: Synthetic oligonucleotide
  Antisense strand to SEQ ID NO: 2509308
cuagugaccaacauaucca

SEQ ID NO: 2509310 - RNA, 19 nt, Artificial Sequence
  Description of Artificial Sequence: Synthetic oligonucleotide
  Sense strand starting at position 2539 of SEQ ID NO: 1888081
ggauauguuggucacuaga

SEQ ID NO: 2509311 - RNA, 19 nt, Artificial Sequence
  Description of Artificial Sequence: Synthetic oligonucleotide
  Antisense strand to SEQ ID NO: 2509310
ucuagugaccaacauaucc

SEQ ID NO: 2509312 - RNA, 19 nt, Artificial Sequence
  Description of Artificial Sequence: Synthetic oligonucleotide
  Sense strand starting at position 2541 of SEQ ID NO: 1888081
auauguuggucacuagagu

SEQ ID NO: 2509313 - RNA, 19 nt, Artificial Sequence
  Description of Artificial Sequence: Synthetic oligonucleotide
  Antisense strand to SEQ ID NO: 2509312
acucuagugaccaacauau

SEQ ID NO: 2509314 - RNA, 19 nt, Artificial Sequence
  Description of Artificial Sequence: Synthetic oligonucleotide
  Sense strand starting at position 2697 of SEQ ID NO: 1888081
gaggaauaauuguugugac

SEQ ID NO: 2509315 - RNA, 19 nt, Artificial Sequence
  Description of Artificial Sequence: Synthetic oligonucleotide
  Antisense strand to SEQ ID NO: 2509314
gucacaacaauuauuccuc

SEQ ID NO: 2509316 - RNA, 19 nt, Artificial Sequence
  Description of Artificial Sequence: Synthetic oligonucleotide
  Sense strand starting at position 2746 of SEQ ID NO: 1888081
gcaauucuauugccaggau

SEQ ID NO: 2509317 - RNA, 19 nt, Artificial Sequence
  Description of Artificial Sequence: Synthetic oligonucleotide
  Antisense strand to SEQ ID NO: 2509316
auccuggcaauagaauugc

SEQ ID NO: 2509318 - RNA, 19 nt, Artificial Sequence
  Description of Artificial Sequence: Synthetic oligonucleotide
  Sense strand starting at position 2749 of SEQ ID NO: 1888081
auucuauugccaggaugag

SEQ ID NO: 2509319 - RNA, 19 nt, Artificial Sequence
  Description of Artificial Sequence: Synthetic oligonucleotide
  Antisense strand to SEQ ID NO: 2509318
cucauccuggcaauagaau

SEQ ID NO: 2509320 - RNA, 19 nt, Artificial Sequence
  Description of Artificial Sequence: Synthetic oligonucleotide
  Sense strand starting at position 2750 of SEQ ID NO: 1888081
uucuauugccaggaugagu

SEQ ID NO: 2509321 - RNA, 19 nt, Artificial Sequence
  Description of Artificial Sequence: Synthetic oligonucleotide
  Antisense strand to SEQ ID NO: 2509320
acucauccuggcaauagaa

SEQ ID NO: 2509322 - RNA, 19 nt, Artificial Sequence
  Description of Artificial Sequence: Synthetic oligonucleotide
  Sense strand starting at position 2772 of SEQ ID NO: 1888081
gagguccuuccagacaugu

SEQ ID NO: 2509323 - RNA, 19 nt, Artificial Sequence
  Description of Artificial Sequence: Synthetic oligonucleotide
  Antisense strand to SEQ ID NO: 2509322
acaugucuggaaggaccuc

SEQ ID NO: 2509324 - RNA, 19 nt, Artificial Sequence
  Description of Artificial Sequence: Synthetic oligonucleotide
  Sense strand starting at position 2774 of SEQ ID NO: 1888081
gguccuuccagacauguga

SEQ ID NO: 2509325 - RNA, 19 nt, Artificial Sequence
  Description of Artificial Sequence: Synthetic oligonucleotide
  Antisense strand to SEQ ID NO: 2509324
ucacaugucuggaaggacc

SEQ ID NO: 2509326 - RNA, 19 nt, Artificial Sequence
  Description of Artificial Sequence: Synthetic oligonucleotide
  Sense strand starting at position 2821 of SEQ ID NO: 1888081
gaaaguagcuggucacgga

SEQ ID NO: 2509327 - RNA, 19 nt, Artificial Sequence
  Description of Artificial Sequence: Synthetic oligonucleotide
  Antisense strand to SEQ ID NO: 2509326
uccgugaccagcuacuuuc

SEQ ID NO: 2509328 - RNA, 19 nt, Artificial Sequence
  Description of Artificial Sequence: Synthetic oligonucleotide
  Sense strand starting at position 2835 of SEQ ID NO: 1888081
acggaacugugguugugau

SEQ ID NO: 2509329 - RNA, 19 nt, Artificial Sequence
  Description of Artificial Sequence: Synthetic oligonucleotide
  Antisense strand to SEQ ID NO: 2509328
aucacaaccacaguuccgu

SEQ ID NO: 2509330 - RNA, 19 nt, Artificial Sequence
  Description of Artificial Sequence: Synthetic oligonucleotide
  Sense strand starting at position 2843 of SEQ ID NO: 1888081
gugguugugauccacuguu

SEQ ID NO: 2509331 - RNA, 19 nt, Artificial Sequence
  Description of Artificial Sequence: Synthetic oligonucleotide
  Antisense strand to SEQ ID NO: 2509330
aacaguggaucacaaccac

SEQ ID NO: 2509332 - RNA, 19 nt, Artificial Sequence
  Description of Artificial Sequence: Synthetic oligonucleotide
  Sense strand starting at position 3684 of SEQ ID NO: 1888081
aagagauguguuuagucuc

SEQ ID NO: 2509333 - RNA, 19 nt, Artificial Sequence
  Description of Artificial Sequence: Synthetic oligonucleotide
  Antisense strand to SEQ ID NO: 2509332
gagacuaaacacaucucuu

SEQ ID NO: 2509334 - RNA, 19 nt, Artificial Sequence
  Description of Artificial Sequence: Synthetic oligonucleotide
  Sense strand starting at position 3687 of SEQ ID NO: 1888081
agauguguuuagucucgau

SEQ ID NO: 2509335 - RNA, 19 nt, Artificial Sequence
  Description of Artificial Sequence: Synthetic oligonucleotide
  Antisense strand to SEQ ID NO: 2509334
aucgagacuaaacacaucu

SEQ ID NO: 2509336 - RNA, 19 nt, Artificial Sequence
  Description of Artificial Sequence: Synthetic oligonucleotide
  Sense strand starting at position 3691 of SEQ ID NO: 1888081
guguuuagucucgauugga

SEQ ID NO: 2509337 - RNA, 19 nt, Artificial Sequence
  Description of Artificial Sequence: Synthetic oligonucleotide
  Antisense strand to SEQ ID NO: 2509336
uccaaucgagacuaaacac

SEQ ID NO: 2509338 - RNA, 19 nt, Artificial Sequence
  Description of Artificial Sequence: Synthetic oligonucleotide
  Sense strand starting at position 3757 of SEQ ID NO: 1888081
gauaaaucagacuggucuu

SEQ ID NO: 2509339 - RNA, 19 nt, Artificial Sequence
  Description of Artificial Sequence: Synthetic oligonucleotide
  Antisense strand to SEQ ID NO: 2509338
aagaccagucugauuuauc

SEQ ID NO: 2509340 - RNA, 19 nt, Artificial Sequence
  Description of Artificial Sequence: Synthetic oligonucleotide
  Sense strand starting at position 3760 of SEQ ID NO: 1888081
aaaucagacuggucuuuga

SEQ ID NO: 2509341 - RNA, 19 nt, Artificial Sequence
  Description of Artificial Sequence: Synthetic oligonucleotide
  Antisense strand to SEQ ID NO: 2509340
ucaaagaccagucugauuu

SEQ ID NO: 2509342 - RNA, 19 nt, Artificial Sequence
  Description of Artificial Sequence: Synthetic oligonucleotide
  Sense strand starting at position 3764 of SEQ ID NO: 1888081
cagacuggucuuugaggga

SEQ ID NO: 2509343 - RNA, 19 nt, Artificial Sequence
  Description of Artificial Sequence: Synthetic oligonucleotide
  Antisense strand to SEQ ID NO: 2509342
ucccucaaagaccagucug

SEQ ID NO: 2509344 - RNA, 19 nt, Artificial Sequence
  Description of Artificial Sequence: Synthetic oligonucleotide
  Sense strand starting at position 3817 of SEQ ID NO: 1888081
uauugaaugccagguaaag

SEQ ID NO: 2509345 - RNA, 19 nt, Artificial Sequence
  Description of Artificial Sequence: Synthetic oligonucleotide
  Antisense strand to SEQ ID NO: 2509344
cuuuaccuggcauucaaua

SEQ ID NO: 2509346 - RNA, 19 nt, Artificial Sequence
  Description of Artificial Sequence: Synthetic oligonucleotide
  Sense strand starting at position 3835 of SEQ ID NO: 1888081
gggucuaauuugcugugga

SEQ ID NO: 2509347 - RNA, 19 nt, Artificial Sequence
  Description of Artificial Sequence: Synthetic oligonucleotide
  Antisense strand to SEQ ID NO: 2509346
uccacagcaaauuagaccc

SEQ ID NO: 2509348 - RNA, 19 nt, Artificial Sequence
  Description of Artificial Sequence: Synthetic oligonucleotide
  Sense strand starting at position 3843 of SEQ ID NO: 1888081
uuugcuguggaucggaauu

SEQ ID NO: 2509349 - RNA, 19 nt, Artificial Sequence
  Description of Artificial Sequence: Synthetic oligonucleotide
  Antisense strand to SEQ ID NO: 2509348
aauuccgauccacagcaaa

SEQ ID NO: 2509350 - RNA, 19 nt, Artificial Sequence
  Description of Artificial Sequence: Synthetic oligonucleotide
  Sense strand starting at position 3863 of SEQ ID NO: 1888081
ccuggaggagcuuguuuaa

SEQ ID NO: 2509351 - RNA, 19 nt, Artificial Sequence
  Description of Artificial Sequence: Synthetic oligonucleotide
  Antisense strand to SEQ ID NO: 2509350
uuaaacaagcuccuccagg

SEQ ID NO: 2509352 - RNA, 19 nt, Artificial Sequence
  Description of Artificial Sequence: Synthetic oligonucleotide
  Sense strand starting at position 3866 of SEQ ID NO: 1888081
ggaggagcuuguuuaaaug

SEQ ID NO: 2509353 - RNA, 19 nt, Artificial Sequence
  Description of Artificial Sequence: Synthetic oligonucleotide
  Antisense strand to SEQ ID NO: 2509352
cauuuaaacaagcuccucc

SEQ ID NO: 2509354 - RNA, 19 nt, Artificial Sequence
  Description of Artificial Sequence: Synthetic oligonucleotide
  Sense strand starting at position 3930 of SEQ ID NO: 1888081
gguugaggucuggaaaucu

SEQ ID NO: 2509355 - RNA, 19 nt, Artificial Sequence
  Description of Artificial Sequence: Synthetic oligonucleotide
  Antisense strand to SEQ ID NO: 2509354
agauuuccagaccucaacc

SEQ ID NO: 2509356 - RNA, 19 nt, Artificial Sequence
  Description of Artificial Sequence: Synthetic oligonucleotide
  Sense strand starting at position 3938 of SEQ ID NO: 1888081
ucuggaaaucugugcuuua

SEQ ID NO: 2509357 - RNA, 19 nt, Artificial Sequence
  Description of Artificial Sequence: Synthetic oligonucleotide
  Antisense strand to SEQ ID NO: 2509356
uaaagcacagauuuccaga

SEQ ID NO: 2509358 - RNA, 19 nt, Artificial Sequence
  Description of Artificial Sequence: Synthetic oligonucleotide
  Sense strand starting at position 3939 of SEQ ID NO: 1888081
cuggaaaucugugcuuuaa

SEQ ID NO: 2509359 - RNA, 19 nt, Artificial Sequence
  Description of Artificial Sequence: Synthetic oligonucleotide
  Antisense strand to SEQ ID NO: 2509358
uuaaagcacagauuuccag

SEQ ID NO: 2509360 - RNA, 19 nt, Artificial Sequence
  Description of Artificial Sequence: Synthetic oligonucleotide
  Sense strand starting at position 3941 of SEQ ID NO: 1888081
ggaaaucugugcuuuaaca

SEQ ID NO: 2509361 - RNA, 19 nt, Artificial Sequence
  Description of Artificial Sequence: Synthetic oligonucleotide
  Antisense strand to SEQ ID NO: 2509360
uguuaaagcacagauuucc

SEQ ID NO: 2509362 - RNA, 19 nt, Artificial Sequence
  Description of Artificial Sequence: Synthetic oligonucleotide
  Sense strand starting at position 256 of SEQ ID NO: 1888082
ccauccuuguccuuggaga

SEQ ID NO: 2509363 - RNA, 19 nt, Artificial Sequence
  Description of Artificial Sequence: Synthetic oligonucleotide
  Antisense strand to SEQ ID NO: 2509362
ucuccaaggacaaggaugg

SEQ ID NO: 2509364 - RNA, 19 nt, Artificial Sequence
  Description of Artificial Sequence: Synthetic oligonucleotide
  Sense strand starting at position 257 of SEQ ID NO: 1888082
cauccuuguccuuggagaa

SEQ ID NO: 2509365 - RNA, 19 nt, Artificial Sequence
  Description of Artificial Sequence: Synthetic oligonucleotide
  Antisense strand to SEQ ID NO: 2509364
uucuccaaggacaaggaug

SEQ ID NO: 2509366 - RNA, 19 nt, Artificial Sequence
  Description of Artificial Sequence: Synthetic oligonucleotide
  Sense strand starting at position 258 of SEQ ID NO: 1888082
auccuuguccuuggagaaa

SEQ ID NO: 2509367 - RNA, 19 nt, Artificial Sequence
  Description of Artificial Sequence: Synthetic oligonucleotide
  Antisense strand to SEQ ID NO: 2509366
uuucuccaaggacaaggau

SEQ ID NO: 2509368 - RNA, 19 nt, Artificial Sequence
  Description of Artificial Sequence: Synthetic oligonucleotide
  Sense strand starting at position 405 of SEQ ID NO: 1888082
ugugccauccuguggacaa

SEQ ID NO: 2509369 - RNA, 19 nt, Artificial Sequence
  Description of Artificial Sequence: Synthetic oligonucleotide
  Antisense strand to SEQ ID NO: 2509368
uuguccacaggauggcaca

SEQ ID NO: 2509370 - RNA, 19 nt, Artificial Sequence
  Description of Artificial Sequence: Synthetic oligonucleotide
  Sense strand starting at position 953 of SEQ ID NO: 1888082
ugccucucugaguaaagga

SEQ ID NO: 2509371 - RNA, 19 nt, Artificial Sequence
  Description of Artificial Sequence: Synthetic oligonucleotide
  Antisense strand to SEQ ID NO: 2509370
uccuuuacucagagaggca

SEQ ID NO: 2509372 - RNA, 19 nt, Artificial Sequence
  Description of Artificial Sequence: Synthetic oligonucleotide
  Sense strand starting at position 1108 of SEQ ID NO: 1888082
aaggguuucgggugggauu

SEQ ID NO: 2509373 - RNA, 19 nt, Artificial Sequence
  Description of Artificial Sequence: Synthetic oligonucleotide
  Antisense strand to SEQ ID NO: 2509372
aaucccacccgaaacccuu

SEQ ID NO: 2509374 - RNA, 19 nt, Artificial Sequence
  Description of Artificial Sequence: Synthetic oligonucleotide
  Sense strand starting at position 1126 of SEQ ID NO: 1888082
uggccaauucccuggguca

SEQ ID NO: 2509375 - RNA, 19 nt, Artificial Sequence
  Description of Artificial Sequence: Synthetic oligonucleotide
  Antisense strand to SEQ ID NO: 2509374
ugacccagggaauuggcca

SEQ ID NO: 2509376 - RNA, 19 nt, Artificial Sequence
  Description of Artificial Sequence: Synthetic oligonucleotide
  Sense strand starting at position 1127 of SEQ ID NO: 1888082
ggccaauucccugggucau

SEQ ID NO: 2509377 - RNA, 19 nt, Artificial Sequence
  Description of Artificial Sequence: Synthetic oligonucleotide
  Antisense strand to SEQ ID NO: 2509376
augacccagggaauuggcc

SEQ ID NO: 2509378 - RNA, 19 nt, Artificial Sequence
  Description of Artificial Sequence: Synthetic oligonucleotide
  Sense strand starting at position 1128 of SEQ ID NO: 1888082
gccaauucccugggucauc

SEQ ID NO: 2509379 - RNA, 19 nt, Artificial Sequence
  Description of Artificial Sequence: Synthetic oligonucleotide
  Antisense strand to SEQ ID NO: 2509378
gaugacccagggaauuggc

SEQ ID NO: 2509380 - RNA, 19 nt, Artificial Sequence
  Description of Artificial Sequence: Synthetic oligonucleotide
  Sense strand starting at position 1133 of SEQ ID NO: 1888082
uucccugggucaucucaga

SEQ ID NO: 2509381 - RNA, 19 nt, Artificial Sequence
  Description of Artificial Sequence: Synthetic oligonucleotide
  Antisense strand to SEQ ID NO: 2509380
ucugagaugacccagggaa

SEQ ID NO: 2509382 - RNA, 19 nt, Artificial Sequence
  Description of Artificial Sequence: Synthetic oligonucleotide
  Sense strand starting at position 1160 of SEQ ID NO: 1888082
cuugucuuccuggguuaca

SEQ ID NO: 2509383 - RNA, 19 nt, Artificial Sequence
  Description of Artificial Sequence: Synthetic oligonucleotide
  Antisense strand to SEQ ID NO: 2509382
uguaacccaggaagacaag

SEQ ID NO: 2509384 - RNA, 19 nt, Artificial Sequence
  Description of Artificial Sequence: Synthetic oligonucleotide
  Sense strand starting at position 1220 of SEQ ID NO: 1888082
gugugaugacccugcauag

SEQ ID NO: 2509385 - RNA, 19 nt, Artificial Sequence
  Description of Artificial Sequence: Synthetic oligonucleotide
  Antisense strand to SEQ ID NO: 2509384
cuaugcagggucaucacac

SEQ ID NO: 2509386 - RNA, 19 nt, Artificial Sequence
  Description of Artificial Sequence: Synthetic oligonucleotide
  Sense strand starting at position 1629 of SEQ ID NO: 1888082
ccauguuucgcaguuugca

SEQ ID NO: 2509387 - RNA, 19 nt, Artificial Sequence
  Description of Artificial Sequence: Synthetic oligonucleotide
  Antisense strand to SEQ ID NO: 2509386
ugcaaacugcgaaacaugg

SEQ ID NO: 2509388 - RNA, 19 nt, Artificial Sequence
  Description of Artificial Sequence: Synthetic oligonucleotide
  Sense strand starting at position 1659 of SEQ ID NO: 1888082
ucacacuuccuuugcgaaa

SEQ ID NO: 2509389 - RNA, 19 nt, Artificial Sequence
  Description of Artificial Sequence: Synthetic oligonucleotide
  Antisense strand to SEQ ID NO: 2509388
uuucgcaaaggaaguguga

SEQ ID NO: 2509390 - RNA, 19 nt, Artificial Sequence
  Description of Artificial Sequence: Synthetic oligonucleotide
  Sense strand starting at position 1670 of SEQ ID NO: 1888082
uugcgaaauuauuccuaag

SEQ ID NO: 2509391 - RNA, 19 nt, Artificial Sequence
  Description of Artificial Sequence: Synthetic oligonucleotide
  Antisense strand to SEQ ID NO: 2509390
cuuaggaauaauuucgcaa

SEQ ID NO: 2509392 - RNA, 19 nt, Artificial Sequence
  Description of Artificial Sequence: Synthetic oligonucleotide
  Sense strand starting at position 1672 of SEQ ID NO: 1888082
gcgaaauuauuccuaagua

SEQ ID NO: 2509393 - RNA, 19 nt, Artificial Sequence
  Description of Artificial Sequence: Synthetic oligonucleotide
  Antisense strand to SEQ ID NO: 2509392
uacuuaggaauaauuucgc

SEQ ID NO: 2509394 - RNA, 19 nt, Artificial Sequence
  Description of Artificial Sequence: Synthetic oligonucleotide
  Sense strand starting at position 1751 of SEQ ID NO: 1888082
acugucagugcagaaauau

SEQ ID NO: 2509395 - RNA, 19 nt, Artificial Sequence
  Description of Artificial Sequence: Synthetic oligonucleotide
  Antisense strand to SEQ ID NO: 2509394
auauuucugcacugacagu

SEQ ID NO: 2509396 - RNA, 19 nt, Artificial Sequence
  Description of Artificial Sequence: Synthetic oligonucleotide
  Sense strand starting at position 1788 of SEQ ID NO: 1888082
guuaaacuccuucgaucau

SEQ ID NO: 2509397 - RNA, 19 nt, Artificial Sequence
  Description of Artificial Sequence: Synthetic oligonucleotide
  Antisense strand to SEQ ID NO: 2509396
augaucgaaggaguuuaac

SEQ ID NO: 2509398 - RNA, 19 nt, Artificial Sequence
  Description of Artificial Sequence: Synthetic oligonucleotide
  Sense strand starting at position 1799 of SEQ ID NO: 1888082
ucgaucaucuuaucagguu

SEQ ID NO: 2509399 - RNA, 19 nt, Artificial Sequence
  Description of Artificial Sequence: Synthetic oligonucleotide
  Antisense strand to SEQ ID NO: 2509398
aaccugauaagaugaucga

SEQ ID NO: 2509400 - RNA, 19 nt, Artificial Sequence
  Description of Artificial Sequence: Synthetic oligonucleotide
  Sense strand starting at position 1875 of SEQ ID NO: 1888082
ggcguacuucuacaucuuu

SEQ ID NO: 2509401 - RNA, 19 nt, Artificial Sequence
  Description of Artificial Sequence: Synthetic oligonucleotide
  Antisense strand to SEQ ID NO: 2509400
aaagauguagaaguacgcc

SEQ ID NO: 2509402 - RNA, 19 nt, Artificial Sequence
  Description of Artificial Sequence: Synthetic oligonucleotide
  Sense strand starting at position 1895 of SEQ ID NO: 1888082
uugcuaaucucggugauuu

SEQ ID NO: 2509403 - RNA, 19 nt, Artificial Sequence
  Description of Artificial Sequence: Synthetic oligonucleotide
  Antisense strand to SEQ ID NO: 2509402
aaaucaccgagauuagcaa

SEQ ID NO: 2509404 - RNA, 19 nt, Artificial Sequence
  Description of Artificial Sequence: Synthetic oligonucleotide
  Sense strand starting at position 1896 of SEQ ID NO: 1888082
ugcuaaucucggugauuug

SEQ ID NO: 2509405 - RNA, 19 nt, Artificial Sequence
  Description of Artificial Sequence: Synthetic oligonucleotide
  Antisense strand to SEQ ID NO: 2509404
caaaucaccgagauuagca

SEQ ID NO: 2509406 - RNA, 19 nt, Artificial Sequence
  Description of Artificial Sequence: Synthetic oligonucleotide
  Sense strand starting at position 1910 of SEQ ID NO: 1888082
auuugaguuccauguucuu

SEQ ID NO: 2509407 - RNA, 19 nt, Artificial Sequence
  Description of Artificial Sequence: Synthetic oligonucleotide
  Antisense strand to SEQ ID NO: 2509406
aagaacauggaacucaaau

SEQ ID NO: 2509408 - RNA, 19 nt, Artificial Sequence
  Description of Artificial Sequence: Synthetic oligonucleotide
  Sense strand starting at position 2038 of SEQ ID NO: 1888082
gcgugcuguagguuuccau

SEQ ID NO: 2509409 - RNA, 19 nt, Artificial Sequence
  Description of Artificial Sequence: Synthetic oligonucleotide
  Antisense strand to SEQ ID NO: 2509408
auggaaaccuacagcacgc

SEQ ID NO: 2509410 - RNA, 19 nt, Artificial Sequence
  Description of Artificial Sequence: Synthetic oligonucleotide
  Sense strand starting at position 2039 of SEQ ID NO: 1888082
cgugcuguagguuuccaua

SEQ ID NO: 2509411 - RNA, 19 nt, Artificial Sequence
  Description of Artificial Sequence: Synthetic oligonucleotide
  Antisense strand to SEQ ID NO: 2509410
uauggaaaccuacagcacg

SEQ ID NO: 2509412 - RNA, 19 nt, Artificial Sequence
  Description of Artificial Sequence: Synthetic oligonucleotide
  Sense strand starting at position 2170 of SEQ ID NO: 1888082
auuauaaaugggugucaga

SEQ ID NO: 2509413 - RNA, 19 nt, Artificial Sequence
  Description of Artificial Sequence: Synthetic oligonucleotide
  Antisense strand to SEQ ID NO: 2509412
ucugacacccauuuauaau

SEQ ID NO: 2509414 - RNA, 19 nt, Artificial Sequence
  Description of Artificial Sequence: Synthetic oligonucleotide
  Sense strand starting at position 2205 of SEQ ID NO: 1888082
uucuauaucaguugggaug

SEQ ID NO: 2509415 - RNA, 19 nt, Artificial Sequence
  Description of Artificial Sequence: Synthetic oligonucleotide
  Antisense strand to SEQ ID NO: 2509414
caucccaacugauauagaa

SEQ ID NO: 2509416 - RNA, 19 nt, Artificial Sequence
  Description of Artificial Sequence: Synthetic oligonucleotide
  Sense strand starting at position 2206 of SEQ ID NO: 1888082
ucuauaucaguugggauga

SEQ ID NO: 2509417 - RNA, 19 nt, Artificial Sequence
  Description of Artificial Sequence: Synthetic oligonucleotide
  Antisense strand to SEQ ID NO: 2509416
ucaucccaacugauauaga

SEQ ID NO: 2509418 - RNA, 19 nt, Artificial Sequence
  Description of Artificial Sequence: Synthetic oligonucleotide
  Sense strand starting at position 2273 of SEQ ID NO: 1888082
uugaguucuggcuguuaaa

SEQ ID NO: 2509419 - RNA, 19 nt, Artificial Sequence
  Description of Artificial Sequence: Synthetic oligonucleotide
  Antisense strand to SEQ ID NO: 2509418
uuuaacagccagaacucaa

SEQ ID NO: 2509420 - RNA, 19 nt, Artificial Sequence
  Description of Artificial Sequence: Synthetic oligonucleotide
  Sense strand starting at position 2324 of SEQ ID NO: 1888082
gaucaugguguacaguauu

SEQ ID NO: 2509421 - RNA, 19 nt, Artificial Sequence
  Description of Artificial Sequence: Synthetic oligonucleotide
  Antisense strand to SEQ ID NO: 2509420
aauacuguacaccaugauc

SEQ ID NO: 2509422 - RNA, 19 nt, Artificial Sequence
  Description of Artificial Sequence: Synthetic oligonucleotide
  Sense strand starting at position 2526 of SEQ ID NO: 1888082
agucgaauuugguuugcua

SEQ ID NO: 2509423 - RNA, 19 nt, Artificial Sequence
  Description of Artificial Sequence: Synthetic oligonucleotide
  Antisense strand to SEQ ID NO: 2509422
uagcaaaccaaauucgacu

SEQ ID NO: 2509424 - RNA, 19 nt, Artificial Sequence
  Description of Artificial Sequence: Synthetic oligonucleotide
  Sense strand starting at position 2529 of SEQ ID NO: 1888082
cgaauuugguuugcuaagu

SEQ ID NO: 2509425 - RNA, 19 nt, Artificial Sequence
  Description of Artificial Sequence: Synthetic oligonucleotide
  Antisense strand to SEQ ID NO: 2509424
acuuagcaaaccaaauucg

SEQ ID NO: 2509426 - RNA, 19 nt, Artificial Sequence
  Description of Artificial Sequence: Synthetic oligonucleotide
  Sense strand starting at position 2560 of SEQ ID NO: 1888082
guaagugucccgcucagca

SEQ ID NO: 2509427 - RNA, 19 nt, Artificial Sequence
  Description of Artificial Sequence: Synthetic oligonucleotide
  Antisense strand to SEQ ID NO: 2509426
ugcugagcgggacacuuac

SEQ ID NO: 2509428 - RNA, 19 nt, Artificial Sequence
  Description of Artificial Sequence: Synthetic oligonucleotide
  Sense strand starting at position 2701 of SEQ ID NO: 1888082
ccuagaauguacuuucugu

SEQ ID NO: 2509429 - RNA, 19 nt, Artificial Sequence
  Description of Artificial Sequence: Synthetic oligonucleotide
  Antisense strand to SEQ ID NO: 2509428
acagaaaguacauucuagg

SEQ ID NO: 2509430 - RNA, 19 nt, Artificial Sequence
  Description of Artificial Sequence: Synthetic oligonucleotide
  Sense strand starting at position 2711 of SEQ ID NO: 1888082
acuuucugucugugaauua

SEQ ID NO: 2509431 - RNA, 19 nt, Artificial Sequence
  Description of Artificial Sequence: Synthetic oligonucleotide
  Antisense strand to SEQ ID NO: 2509430
uaauucacagacagaaagu

SEQ ID NO: 2509432 - RNA, 19 nt, Artificial Sequence
  Description of Artificial Sequence: Synthetic oligonucleotide
  Sense strand starting at position 2958 of SEQ ID NO: 1888082
cgaggucacucagcauagu

SEQ ID NO: 2509433 - RNA, 19 nt, Artificial Sequence
  Description of Artificial Sequence: Synthetic oligonucleotide
  Antisense strand to SEQ ID NO: 2509432
acuaugcugagugaccucg

SEQ ID NO: 2509434 - RNA, 19 nt, Artificial Sequence
  Description of Artificial Sequence: Synthetic oligonucleotide
  Sense strand starting at position 3209 of SEQ ID NO: 1888082
uacccuugggaguggaauu

SEQ ID NO: 2509435 - RNA, 19 nt, Artificial Sequence
  Description of Artificial Sequence: Synthetic oligonucleotide
  Antisense strand to SEQ ID NO: 2509434
aauuccacucccaagggua

SEQ ID NO: 2509436 - RNA, 19 nt, Artificial Sequence
  Description of Artificial Sequence: Synthetic oligonucleotide
  Sense strand starting at position 3658 of SEQ ID NO: 1888082
auaucuuauuuggagaaac

SEQ ID NO: 2509437 - RNA, 19 nt, Artificial Sequence
  Description of Artificial Sequence: Synthetic oligonucleotide
  Antisense strand to SEQ ID NO: 2509436
guuucuccaaauaagauau

SEQ ID NO: 2509438 - RNA, 19 nt, Artificial Sequence
  Description of Artificial Sequence: Synthetic oligonucleotide
  Sense strand starting at position 3671 of SEQ ID NO: 1888082
agaaacaucuauucgaguc

SEQ ID NO: 2509439 - RNA, 19 nt, Artificial Sequence
  Description of Artificial Sequence: Synthetic oligonucleotide
  Antisense strand to SEQ ID NO: 2509438
gacucgaauagauguuucu

SEQ ID NO: 2509440 - RNA, 19 nt, Artificial Sequence
  Description of Artificial Sequence: Synthetic oligonucleotide
  Sense strand starting at position 3730 of SEQ ID NO: 1888082
guagcaguucuuuauaaau

SEQ ID NO: 2509441 - RNA, 19 nt, Artificial Sequence
  Description of Artificial Sequence: Synthetic oligonucleotide
  Antisense strand to SEQ ID NO: 2509440
auuuauaaagaacugcuac

SEQ ID NO: 2509442 - RNA, 19 nt, Artificial Sequence
  Description of Artificial Sequence: Synthetic oligonucleotide
  Sense strand starting at position 2374 of SEQ ID NO: 1888083
cguccuuuauccuuacaca

SEQ ID NO: 2509443 - RNA, 19 nt, Artificial Sequence
  Description of Artificial Sequence: Synthetic oligonucleotide
  Antisense strand to SEQ ID NO: 2509442
uguguaaggauaaaggacg

SEQ ID NO: 2509444 - RNA, 19 nt, Artificial Sequence
  Description of Artificial Sequence: Synthetic oligonucleotide
  Sense strand starting at position 2375 of SEQ ID NO: 1888083
guccuuuauccuuacacag

SEQ ID NO: 2509445 - RNA, 19 nt, Artificial Sequence
  Description of Artificial Sequence: Synthetic oligonucleotide
  Antisense strand to SEQ ID NO: 2509444
cuguguaaggauaaaggac

SEQ ID NO: 2509446 - RNA, 19 nt, Artificial Sequence
  Description of Artificial Sequence: Synthetic oligonucleotide
  Sense strand starting at position 2411 of SEQ ID NO: 1888083
ccaagucucucgggugauc

SEQ ID NO: 2509447 - RNA, 19 nt, Artificial Sequence
  Description of Artificial Sequence: Synthetic oligonucleotide
  Antisense strand to SEQ ID NO: 2509446
gaucacccgagagacuugg

SEQ ID NO: 2509448 - RNA, 19 nt, Artificial Sequence
  Description of Artificial Sequence: Synthetic oligonucleotide
  Sense strand starting at position 2413 of SEQ ID NO: 1888083
aagucucucgggugaucaa

SEQ ID NO: 2509449 - RNA, 19 nt, Artificial Sequence
  Description of Artificial Sequence: Synthetic oligonucleotide
  Antisense strand to SEQ ID NO: 2509448
uugaucacccgagagacuu

SEQ ID NO: 2509450 - RNA, 19 nt, Artificial Sequence
  Description of Artificial Sequence: Synthetic oligonucleotide
  Sense strand starting at position 2420 of SEQ ID NO: 1888083
ucgggugaucaacguucaa

SEQ ID NO: 2509451 - RNA, 19 nt, Artificial Sequence
  Description of Artificial Sequence: Synthetic oligonucleotide
  Antisense strand to SEQ ID NO: 2509450
uugaacguugaucacccga

SEQ ID NO: 2509452 - RNA, 19 nt, Artificial Sequence
  Description of Artificial Sequence: Synthetic oligonucleotide
  Sense strand starting at position 2497 of SEQ ID NO: 1888083
aggguuaaacugcgaauga

SEQ ID NO: 2509453 - RNA, 19 nt, Artificial Sequence
  Description of Artificial Sequence: Synthetic oligonucleotide
  Antisense strand to SEQ ID NO: 2509452
ucauucgcaguuuaacccu

SEQ ID NO: 2509454 - RNA, 19 nt, Artificial Sequence
  Description of Artificial Sequence: Synthetic oligonucleotide
  Sense strand starting at position 2498 of SEQ ID NO: 1888083
ggguuaaacugcgaaugau

SEQ ID NO: 2509455 - RNA, 19 nt, Artificial Sequence
  Description of Artificial Sequence: Synthetic oligonucleotide
  Antisense strand to SEQ ID NO: 2509454
aucauucgcaguuuaaccc

SEQ ID NO: 2509456 - RNA, 19 nt, Artificial Sequence
  Description of Artificial Sequence: Synthetic oligonucleotide
  Sense strand starting at position 2501 of SEQ ID NO: 1888083
uuaaacugcgaaugauaaa

SEQ ID NO: 2509457 - RNA, 19 nt, Artificial Sequence
  Description of Artificial Sequence: Synthetic oligonucleotide
  Antisense strand to SEQ ID NO: 2509456
uuuaucauucgcaguuuaa

SEQ ID NO: 2509458 - RNA, 19 nt, Artificial Sequence
  Description of Artificial Sequence: Synthetic oligonucleotide
  Sense strand starting at position 2790 of SEQ ID NO: 1888083
acgccucuuacuggugaca

SEQ ID NO: 2509459 - RNA, 19 nt, Artificial Sequence
  Description of Artificial Sequence: Synthetic oligonucleotide
  Antisense strand to SEQ ID NO: 2509458
ugucaccaguaagaggcgu

SEQ ID NO: 2509460 - RNA, 19 nt, Artificial Sequence
  Description of Artificial Sequence: Synthetic oligonucleotide
  Sense strand starting at position 2792 of SEQ ID NO: 1888083
gccucuuacuggugacacu

SEQ ID NO: 2509461 - RNA, 19 nt, Artificial Sequence
  Description of Artificial Sequence: Synthetic oligonucleotide
  Antisense strand to SEQ ID NO: 2509460
agugucaccaguaagaggc

SEQ ID NO: 2509462 - RNA, 19 nt, Artificial Sequence
  Description of Artificial Sequence: Synthetic oligonucleotide
  Sense strand starting at position 3080 of SEQ ID NO: 1888083
cagugccuccucugugaga

SEQ ID NO: 2509463 - RNA, 19 nt, Artificial Sequence
  Description of Artificial Sequence: Synthetic oligonucleotide
  Antisense strand to SEQ ID NO: 2509462
ucucacagaggaggcacug

SEQ ID NO: 2509464 - RNA, 19 nt, Artificial Sequence
  Description of Artificial Sequence: Synthetic oligonucleotide
  Sense strand starting at position 3111 of SEQ ID NO: 1888083
gcaagaggcuucuguccaa

SEQ ID NO: 2509465 - RNA, 19 nt, Artificial Sequence
  Description of Artificial Sequence: Synthetic oligonucleotide
  Antisense strand to SEQ ID NO: 2509464
uuggacagaagccucuugc

SEQ ID NO: 2509466 - RNA, 19 nt, Artificial Sequence
  Description of Artificial Sequence: Synthetic oligonucleotide
  Sense strand starting at position 3114 of SEQ ID NO: 1888083
agaggcuucuguccaagca

SEQ ID NO: 2509467 - RNA, 19 nt, Artificial Sequence
  Description of Artificial Sequence: Synthetic oligonucleotide
  Antisense strand to SEQ ID NO: 2509466
ugcuuggacagaagccucu

SEQ ID NO: 2509468 - RNA, 19 nt, Artificial Sequence
  Description of Artificial Sequence: Synthetic oligonucleotide
  Sense strand starting at position 3241 of SEQ ID NO: 1888083
ccuguucugacacgagaca

SEQ ID NO: 2509469 - RNA, 19 nt, Artificial Sequence
  Description of Artificial Sequence: Synthetic oligonucleotide
  Antisense strand to SEQ ID NO: 2509468
ugucucgugucagaacagg

SEQ ID NO: 2509470 - RNA, 19 nt, Artificial Sequence
  Description of Artificial Sequence: Synthetic oligonucleotide
  Sense strand starting at position 3242 of SEQ ID NO: 1888083
cuguucugacacgagacau

SEQ ID NO: 2509471 - RNA, 19 nt, Artificial Sequence
  Description of Artificial Sequence: Synthetic oligonucleotide
  Antisense strand to SEQ ID NO: 2509470
augucucgugucagaacag

SEQ ID NO: 2509472 - RNA, 19 nt, Artificial Sequence
  Description of Artificial Sequence: Synthetic oligonucleotide
  Sense strand starting at position 3663 of SEQ ID NO: 1888083
ucagguguguuccucaaag

SEQ ID NO: 2509473 - RNA, 19 nt, Artificial Sequence
  Description of Artificial Sequence: Synthetic oligonucleotide
  Antisense strand to SEQ ID NO: 2509472
cuuugaggaacacaccuga

SEQ ID NO: 2509474 - RNA, 19 nt, Artificial Sequence
  Description of Artificial Sequence: Synthetic oligonucleotide
  Sense strand starting at position 3665 of SEQ ID NO: 1888083
agguguguuccucaaagga

SEQ ID NO: 2509475 - RNA, 19 nt, Artificial Sequence
  Description of Artificial Sequence: Synthetic oligonucleotide
  Antisense strand to SEQ ID NO: 2509474
uccuuugaggaacacaccu

SEQ ID NO: 2509476 - RNA, 19 nt, Artificial Sequence
  Description of Artificial Sequence: Synthetic oligonucleotide
  Sense strand starting at position 3754 of SEQ ID NO: 1888083
augucugugccucacacaa

SEQ ID NO: 2509477 - RNA, 19 nt, Artificial Sequence
  Description of Artificial Sequence: Synthetic oligonucleotide
  Antisense strand to SEQ ID NO: 2509476
uugugugaggcacagacau

SEQ ID NO: 2509478 - RNA, 19 nt, Artificial Sequence
  Description of Artificial Sequence: Synthetic oligonucleotide
  Sense strand starting at position 21 of SEQ ID NO: 1888084
ccuucuaugccauauugag

SEQ ID NO: 2509479 - RNA, 19 nt, Artificial Sequence
  Description of Artificial Sequence: Synthetic oligonucleotide
  Antisense strand to SEQ ID NO: 2509478
cucaauauggcauagaagg

SEQ ID NO: 2509480 - RNA, 19 nt, Artificial Sequence
  Description of Artificial Sequence: Synthetic oligonucleotide
  Sense strand starting at position 27 of SEQ ID NO: 1888084
augccauauugagccuuau

SEQ ID NO: 2509481 - RNA, 19 nt, Artificial Sequence
  Description of Artificial Sequence: Synthetic oligonucleotide
  Antisense strand to SEQ ID NO: 2509480
auaaggcucaauauggcau

SEQ ID NO: 2509482 - RNA, 19 nt, Artificial Sequence
  Description of Artificial Sequence: Synthetic oligonucleotide
  Sense strand starting at position 137 of SEQ ID NO: 1888084
gauaaagauugggcguuua

SEQ ID NO: 2509483 - RNA, 19 nt, Artificial Sequence
  Description of Artificial Sequence: Synthetic oligonucleotide
  Antisense strand to SEQ ID NO: 2509482
uaaacgcccaaucuuuauc

SEQ ID NO: 2509484 - RNA, 19 nt, Artificial Sequence
  Description of Artificial Sequence: Synthetic oligonucleotide
  Sense strand starting at position 157 of SEQ ID NO: 1888084
auuggccauuuggaagauu

SEQ ID NO: 2509485 - RNA, 19 nt, Artificial Sequence
  Description of Artificial Sequence: Synthetic oligonucleotide
  Antisense strand to SEQ ID NO: 2509484
aaucuuccaaauggccaau

SEQ ID NO: 2509486 - RNA, 19 nt, Artificial Sequence
  Description of Artificial Sequence: Synthetic oligonucleotide
  Sense strand starting at position 444 of SEQ ID NO: 1888084
gcaggcgucccaucauguu

SEQ ID NO: 2509487 - RNA, 19 nt, Artificial Sequence
  Description of Artificial Sequence: Synthetic oligonucleotide
  Antisense strand to SEQ ID NO: 2509486
aacaugaugggacgccugc

SEQ ID NO: 2509488 - RNA, 19 nt, Artificial Sequence
  Description of Artificial Sequence: Synthetic oligonucleotide
  Sense strand starting at position 725 of SEQ ID NO: 1888084
gggcaauuuccaugugcca

SEQ ID NO: 2509489 - RNA, 19 nt, Artificial Sequence
  Description of Artificial Sequence: Synthetic oligonucleotide
  Antisense strand to SEQ ID NO: 2509488
uggcacauggaaauugccc

SEQ ID NO: 2509490 - RNA, 19 nt, Artificial Sequence
  Description of Artificial Sequence: Synthetic oligonucleotide
  Sense strand starting at position 812 of SEQ ID NO: 1888084
uacccaggcguuuaaagaa

SEQ ID NO: 2509491 - RNA, 19 nt, Artificial Sequence
  Description of Artificial Sequence: Synthetic oligonucleotide
  Antisense strand to SEQ ID NO: 2509490
uucuuuaaacgccugggua

SEQ ID NO: 2509492 - RNA, 19 nt, Artificial Sequence
  Description of Artificial Sequence: Synthetic oligonucleotide
  Sense strand starting at position 1331 of SEQ ID NO: 1888084
gccuguguccgagaaagag

SEQ ID NO: 2509493 - RNA, 19 nt, Artificial Sequence
  Description of Artificial Sequence: Synthetic oligonucleotide
  Antisense strand to SEQ ID NO: 2509492
cucuuucucggacacaggc

SEQ ID NO: 2509494 - RNA, 19 nt, Artificial Sequence
  Description of Artificial Sequence: Synthetic oligonucleotide
  Sense strand starting at position 1339 of SEQ ID NO: 1888084
ccgagaaagaguugagacu

SEQ ID NO: 2509495 - RNA, 19 nt, Artificial Sequence
  Description of Artificial Sequence: Synthetic oligonucleotide
  Antisense strand to SEQ ID NO: 2509494
agucucaacucuuucucgg

SEQ ID NO: 2509496 - RNA, 19 nt, Artificial Sequence
  Description of Artificial Sequence: Synthetic oligonucleotide
  Sense strand starting at position 1499 of SEQ ID NO: 1888084
ccuccacuguucucuggaa

SEQ ID NO: 2509497 - RNA, 19 nt, Artificial Sequence
  Description of Artificial Sequence: Synthetic oligonucleotide
  Antisense strand to SEQ ID NO: 2509496
uuccagagaacaguggagg

SEQ ID NO: 2509498 - RNA, 19 nt, Artificial Sequence
  Description of Artificial Sequence: Synthetic oligonucleotide
  Sense strand starting at position 1501 of SEQ ID NO: 1888084
uccacuguucucuggaaac

SEQ ID NO: 2509499 - RNA, 19 nt, Artificial Sequence
  Description of Artificial Sequence: Synthetic oligonucleotide
  Antisense strand to SEQ ID NO: 2509498
guuuccagagaacagugga

SEQ ID NO: 2509500 - RNA, 19 nt, Artificial Sequence
  Description of Artificial Sequence: Synthetic oligonucleotide
  Sense strand starting at position 1958 of SEQ ID NO: 1888084
ccgcauuuauuugagcuca

SEQ ID NO: 2509501 - RNA, 19 nt, Artificial Sequence
  Description of Artificial Sequence: Synthetic oligonucleotide
  Antisense strand to SEQ ID NO: 2509500
ugagcucaaauaaaugcgg

SEQ ID NO: 2509502 - RNA, 19 nt, Artificial Sequence
  Description of Artificial Sequence: Synthetic oligonucleotide
  Sense strand starting at position 1985 of SEQ ID NO: 1888084
gacuguugacuuuagcaca

SEQ ID NO: 2509503 - RNA, 19 nt, Artificial Sequence
  Description of Artificial Sequence: Synthetic oligonucleotide
  Antisense strand to SEQ ID NO: 2509502
ugugcuaaagucaacaguc

SEQ ID NO: 2509504 - RNA, 19 nt, Artificial Sequence
  Description of Artificial Sequence: Synthetic oligonucleotide
  Sense strand starting at position 2051 of SEQ ID NO: 1888084
caagauaucgaucagcguu

SEQ ID NO: 2509505 - RNA, 19 nt, Artificial Sequence
  Description of Artificial Sequence: Synthetic oligonucleotide
  Antisense strand to SEQ ID NO: 2509504
aacgcugaucgauaucuug

SEQ ID NO: 2509506 - RNA, 19 nt, Artificial Sequence
  Description of Artificial Sequence: Synthetic oligonucleotide
  Sense strand starting at position 2140 of SEQ ID NO: 1888084
gcaauauaauaucugugca

SEQ ID NO: 2509507 - RNA, 19 nt, Artificial Sequence
  Description of Artificial Sequence: Synthetic oligonucleotide
  Antisense strand to SEQ ID NO: 2509506
ugcacagauauuauauugc

SEQ ID NO: 2509508 - RNA, 19 nt, Artificial Sequence
  Description of Artificial Sequence: Synthetic oligonucleotide
  Sense strand starting at position 2153 of SEQ ID NO: 1888084
ugugcaaauuugcugaagu

SEQ ID NO: 2509509 - RNA, 19 nt, Artificial Sequence
  Description of Artificial Sequence: Synthetic oligonucleotide
  Antisense strand to SEQ ID NO: 2509508
acuucagcaaauuugcaca

SEQ ID NO: 2509510 - RNA, 19 nt, Artificial Sequence
  Description of Artificial Sequence: Synthetic oligonucleotide
  Sense strand starting at position 2173 of SEQ ID NO: 1888084
ugacguggcauggaaaguu

SEQ ID NO: 2509511 - RNA, 19 nt, Artificial Sequence
  Description of Artificial Sequence: Synthetic oligonucleotide
  Antisense strand to SEQ ID NO: 2509510
aacuuuccaugccacguca

SEQ ID NO: 2509512 - RNA, 19 nt, Artificial Sequence
  Description of Artificial Sequence: Synthetic oligonucleotide
  Sense strand starting at position 2232 of SEQ ID NO: 1888084
guuuacagacuuuguuuau

SEQ ID NO: 2509513 - RNA, 19 nt, Artificial Sequence
  Description of Artificial Sequence: Synthetic oligonucleotide
  Antisense strand to SEQ ID NO: 2509512
auaaacaaagucuguaaac

SEQ ID NO: 2509514 - RNA, 19 nt, Artificial Sequence
  Description of Artificial Sequence: Synthetic oligonucleotide
  Sense strand starting at position 2252 of SEQ ID NO: 1888084
cacagaucaugguugcuua

SEQ ID NO: 2509515 - RNA, 19 nt, Artificial Sequence
  Description of Artificial Sequence: Synthetic oligonucleotide
  Antisense strand to SEQ ID NO: 2509514
uaagcaaccaugaucugug

SEQ ID NO: 2509516 - RNA, 19 nt, Artificial Sequence
  Description of Artificial Sequence: Synthetic oligonucleotide
  Sense strand starting at position 2253 of SEQ ID NO: 1888084
acagaucaugguugcuuaa

SEQ ID NO: 2509517 - RNA, 19 nt, Artificial Sequence
  Description of Artificial Sequence: Synthetic oligonucleotide
  Antisense strand to SEQ ID NO: 2509516
uuaagcaaccaugaucugu

SEQ ID NO: 2509518 - RNA, 19 nt, Artificial Sequence
  Description of Artificial Sequence: Synthetic oligonucleotide
  Sense strand starting at position 2255 of SEQ ID NO: 1888084
agaucaugguugcuuaaac

SEQ ID NO: 2509519 - RNA, 19 nt, Artificial Sequence
  Description of Artificial Sequence: Synthetic oligonucleotide
  Antisense strand to SEQ ID NO: 2509518
guuuaagcaaccaugaucu

SEQ ID NO: 2509520 - RNA, 19 nt, Artificial Sequence
  Description of Artificial Sequence: Synthetic oligonucleotide
  Sense strand starting at position 2365 of SEQ ID NO: 1888084
uggcgauuugugagcucgu

SEQ ID NO: 2509521 - RNA, 19 nt, Artificial Sequence
  Description of Artificial Sequence: Synthetic oligonucleotide
  Antisense strand to SEQ ID NO: 2509520
acgagcucacaaaucgcca

SEQ ID NO: 2509522 - RNA, 19 nt, Artificial Sequence
  Description of Artificial Sequence: Synthetic oligonucleotide
  Sense strand starting at position 2490 of SEQ ID NO: 1888084
uauguauucggacagaacu

SEQ ID NO: 2509523 - RNA, 19 nt, Artificial Sequence
  Description of Artificial Sequence: Synthetic oligonucleotide
  Antisense strand to SEQ ID NO: 2509522
aguucuguccgaauacaua

SEQ ID NO: 2509524 - RNA, 19 nt, Artificial Sequence
  Description of Artificial Sequence: Synthetic oligonucleotide
  Sense strand starting at position 2492 of SEQ ID NO: 1888084
uguauucggacagaacuau

SEQ ID NO: 2509525 - RNA, 19 nt, Artificial Sequence
  Description of Artificial Sequence: Synthetic oligonucleotide
  Antisense strand to SEQ ID NO: 2509524
auaguucuguccgaauaca

SEQ ID NO: 2509526 - RNA, 19 nt, Artificial Sequence
  Description of Artificial Sequence: Synthetic oligonucleotide
  Sense strand starting at position 2540 of SEQ ID NO: 1888084
gcgcgcuaaguaguuuaaa

SEQ ID NO: 2509527 - RNA, 19 nt, Artificial Sequence
  Description of Artificial Sequence: Synthetic oligonucleotide
  Antisense strand to SEQ ID NO: 2509526
uuuaaacuacuuagcgcgc

SEQ ID NO: 2509528 - RNA, 19 nt, Artificial Sequence
  Description of Artificial Sequence: Synthetic oligonucleotide
  Sense strand starting at position 2802 of SEQ ID NO: 1888084
uguguucuucgggacaaug

SEQ ID NO: 2509529 - RNA, 19 nt, Artificial Sequence
  Description of Artificial Sequence: Synthetic oligonucleotide
  Antisense strand to SEQ ID NO: 2509528
cauugucccgaagaacaca

SEQ ID NO: 2509530 - RNA, 19 nt, Artificial Sequence
  Description of Artificial Sequence: Synthetic oligonucleotide
  Sense strand starting at position 2814 of SEQ ID NO: 1888084
gacaauguggcauguuaag

SEQ ID NO: 2509531 - RNA, 19 nt, Artificial Sequence
  Description of Artificial Sequence: Synthetic oligonucleotide
  Antisense strand to SEQ ID NO: 2509530
cuuaacaugccacauuguc

SEQ ID NO: 2509532 - RNA, 19 nt, Artificial Sequence
  Description of Artificial Sequence: Synthetic oligonucleotide
  Sense strand starting at position 3009 of SEQ ID NO: 1888084
gcuggaacacuccagguua

SEQ ID NO: 2509533 - RNA, 19 nt, Artificial Sequence
  Description of Artificial Sequence: Synthetic oligonucleotide
  Antisense strand to SEQ ID NO: 2509532
uaaccuggaguguuccagc

SEQ ID NO: 2509534 - RNA, 19 nt, Artificial Sequence
  Description of Artificial Sequence: Synthetic oligonucleotide
  Sense strand starting at position 3319 of SEQ ID NO: 1888084
ggcagcaugguguauaaga

SEQ ID NO: 2509535 - RNA, 19 nt, Artificial Sequence
  Description of Artificial Sequence: Synthetic oligonucleotide
  Antisense strand to SEQ ID NO: 2509534
ucuuauacaccaugcugcc

SEQ ID NO: 2509536 - RNA, 19 nt, Artificial Sequence
  Description of Artificial Sequence: Synthetic oligonucleotide
  Sense strand starting at position 3321 of SEQ ID NO: 1888084
cagcaugguguauaagaau

SEQ ID NO: 2509537 - RNA, 19 nt, Artificial Sequence
  Description of Artificial Sequence: Synthetic oligonucleotide
  Antisense strand to SEQ ID NO: 2509536
auucuuauacaccaugcug

SEQ ID NO: 2509538 - RNA, 19 nt, Artificial Sequence
  Description of Artificial Sequence: Synthetic oligonucleotide
  Sense strand starting at position 3365 of SEQ ID NO: 1888084
uuuagaguccuugaaggcu

SEQ ID NO: 2509539 - RNA, 19 nt, Artificial Sequence
  Description of Artificial Sequence: Synthetic oligonucleotide
  Antisense strand to SEQ ID NO: 2509538
agccuucaaggacucuaaa

SEQ ID NO: 2509540 - RNA, 19 nt, Artificial Sequence
  Description of Artificial Sequence: Synthetic oligonucleotide
  Sense strand starting at position 3595 of SEQ ID NO: 1888084
uuggauuguuacccugacu

SEQ ID NO: 2509541 - RNA, 19 nt, Artificial Sequence
  Description of Artificial Sequence: Synthetic oligonucleotide
  Antisense strand to SEQ ID NO: 2509540
agucaggguaacaauccaa

SEQ ID NO: 2509542 - RNA, 19 nt, Artificial Sequence
  Description of Artificial Sequence: Synthetic oligonucleotide
  Sense strand starting at position 3673 of SEQ ID NO: 1888084
ucgccauuucuggguuagu

SEQ ID NO: 2509543 - RNA, 19 nt, Artificial Sequence
  Description of Artificial Sequence: Synthetic oligonucleotide
  Antisense strand to SEQ ID NO: 2509542
acuaacccagaaauggcga

SEQ ID NO: 2509544 - RNA, 19 nt, Artificial Sequence
  Description of Artificial Sequence: Synthetic oligonucleotide
  Sense strand starting at position 3674 of SEQ ID NO: 1888084
cgccauuucuggguuagua

SEQ ID NO: 2509545 - RNA, 19 nt, Artificial Sequence
  Description of Artificial Sequence: Synthetic oligonucleotide
  Antisense strand to SEQ ID NO: 2509544
uacuaacccagaaauggcg

SEQ ID NO: 2509546 - RNA, 19 nt, Artificial Sequence
  Description of Artificial Sequence: Synthetic oligonucleotide
  Sense strand starting at position 3692 of SEQ ID NO: 1888084
aaggucuuucuggguuaga

SEQ ID NO: 2509547 - RNA, 19 nt, Artificial Sequence
  Description of Artificial Sequence: Synthetic oligonucleotide
  Antisense strand to SEQ ID NO: 2509546
ucuaacccagaaagaccuu

SEQ ID NO: 2509548 - RNA, 19 nt, Artificial Sequence
  Description of Artificial Sequence: Synthetic oligonucleotide
  Sense strand starting at position 3693 of SEQ ID NO: 1888084
aggucuuucuggguuagaa

SEQ ID NO: 2509549 - RNA, 19 nt, Artificial Sequence
  Description of Artificial Sequence: Synthetic oligonucleotide
  Antisense strand to SEQ ID NO: 2509548
uucuaacccagaaagaccu

SEQ ID NO: 2509550 - RNA, 19 nt, Artificial Sequence
  Description of Artificial Sequence: Synthetic oligonucleotide
  Sense strand starting at position 3695 of SEQ ID NO: 1888084
gucuuucuggguuagaaag

SEQ ID NO: 2509551 - RNA, 19 nt, Artificial Sequence
  Description of Artificial Sequence: Synthetic oligonucleotide
  Antisense strand to SEQ ID NO: 2509550
cuuucuaacccagaaagac

SEQ ID NO: 2509552 - RNA, 19 nt, Artificial Sequence
  Description of Artificial Sequence: Synthetic oligonucleotide
  Sense strand starting at position 3705 of SEQ ID NO: 1888084
guuagaaaggucugccaug

SEQ ID NO: 2509553 - RNA, 19 nt, Artificial Sequence
  Description of Artificial Sequence: Synthetic oligonucleotide
  Antisense strand to SEQ ID NO: 2509552
cauggcagaccuuucuaac

SEQ ID NO: 2509554 - RNA, 19 nt, Artificial Sequence
  Description of Artificial Sequence: Synthetic oligonucleotide
  Sense strand starting at position 3734 of SEQ ID NO: 1888084
auaccugcuccagggagaa

SEQ ID NO: 2509555 - RNA, 19 nt, Artificial Sequence
  Description of Artificial Sequence: Synthetic oligonucleotide
  Antisense strand to SEQ ID NO: 2509554
uucucccuggagcagguau

SEQ ID NO: 2509556 - RNA, 19 nt, Artificial Sequence
  Description of Artificial Sequence: Synthetic oligonucleotide
  Sense strand starting at position 3867 of SEQ ID NO: 1888084
aaguuugauccaggcucau

SEQ ID NO: 2509557 - RNA, 19 nt, Artificial Sequence
  Description of Artificial Sequence: Synthetic oligonucleotide
  Antisense strand to SEQ ID NO: 2509556
augagccuggaucaaacuu

SEQ ID NO: 2509558 - RNA, 19 nt, Artificial Sequence
  Description of Artificial Sequence: Synthetic oligonucleotide
  Sense strand starting at position 3806 of SEQ ID NO: 1888085
gacacuaggccuggaaaua

SEQ ID NO: 2509559 - RNA, 19 nt, Artificial Sequence
  Description of Artificial Sequence: Synthetic oligonucleotide
  Antisense strand to SEQ ID NO: 2509558
uauuuccaggccuaguguc

SEQ ID NO: 2509560 - RNA, 19 nt, Artificial Sequence
  Description of Artificial Sequence: Synthetic oligonucleotide
  Sense strand starting at position 3939 of SEQ ID NO: 1888085
aagacagaguugguaagua

SEQ ID NO: 2509561 - RNA, 19 nt, Artificial Sequence
  Description of Artificial Sequence: Synthetic oligonucleotide
  Antisense strand to SEQ ID NO: 2509560
uacuuaccaacucugucuu

SEQ ID NO: 2509562 - RNA, 19 nt, Artificial Sequence
  Description of Artificial Sequence: Synthetic oligonucleotide
  Sense strand starting at position 93 of SEQ ID NO: 1888086
cucagaguuccucauaaug

SEQ ID NO: 2509563 - RNA, 19 nt, Artificial Sequence
  Description of Artificial Sequence: Synthetic oligonucleotide
  Antisense strand to SEQ ID NO: 2509562
cauuaugaggaacucugag

SEQ ID NO: 2509564 - RNA, 19 nt, Artificial Sequence
  Description of Artificial Sequence: Synthetic oligonucleotide
  Sense strand starting at position 144 of SEQ ID NO: 1888086
agcauuuguuaugugauua

SEQ ID NO: 2509565 - RNA, 19 nt, Artificial Sequence
  Description of Artificial Sequence: Synthetic oligonucleotide
  Antisense strand to SEQ ID NO: 2509564
uaaucacauaacaaaugcu

SEQ ID NO: 2509566 - RNA, 19 nt, Artificial Sequence
  Description of Artificial Sequence: Synthetic oligonucleotide
  Sense strand starting at position 148 of SEQ ID NO: 1888086
uuuguuaugugauuaacuc

SEQ ID NO: 2509567 - RNA, 19 nt, Artificial Sequence
  Description of Artificial Sequence: Synthetic oligonucleotide
  Antisense strand to SEQ ID NO: 2509566
gaguuaaucacauaacaaa

SEQ ID NO: 2509568 - RNA, 19 nt, Artificial Sequence
  Description of Artificial Sequence: Synthetic oligonucleotide
  Sense strand starting at position 149 of SEQ ID NO: 1888086
uuguuaugugauuaacucu

SEQ ID NO: 2509569 - RNA, 19 nt, Artificial Sequence
  Description of Artificial Sequence: Synthetic oligonucleotide
  Antisense strand to SEQ ID NO: 2509568
agaguuaaucacauaacaa

SEQ ID NO: 2509570 - RNA, 19 nt, Artificial Sequence
  Description of Artificial Sequence: Synthetic oligonucleotide
  Sense strand starting at position 735 of SEQ ID NO: 1888086
guugaaauuacaggcgaga

SEQ ID NO: 2509571 - RNA, 19 nt, Artificial Sequence
  Description of Artificial Sequence: Synthetic oligonucleotide
  Antisense strand to SEQ ID NO: 2509570
ucucgccuguaauuucaac

SEQ ID NO: 2509572 - RNA, 19 nt, Artificial Sequence
  Description of Artificial Sequence: Synthetic oligonucleotide
  Sense strand starting at position 805 of SEQ ID NO: 1888086
uauaauucguggucuagag

SEQ ID NO: 2509573 - RNA, 19 nt, Artificial Sequence
  Description of Artificial Sequence: Synthetic oligonucleotide
  Antisense strand to SEQ ID NO: 2509572
cucuagaccacgaauuaua

SEQ ID NO: 2509574 - RNA, 19 nt, Artificial Sequence
  Description of Artificial Sequence: Synthetic oligonucleotide
  Sense strand starting at position 853 of SEQ ID NO: 1888086
ucucuuaggcuugaguuua

SEQ ID NO: 2509575 - RNA, 19 nt, Artificial Sequence
  Description of Artificial Sequence: Synthetic oligonucleotide
  Antisense strand to SEQ ID NO: 2509574
uaaacucaagccuaagaga

SEQ ID NO: 2509576 - RNA, 19 nt, Artificial Sequence
  Description of Artificial Sequence: Synthetic oligonucleotide
  Sense strand starting at position 1096 of SEQ ID NO: 1888086
agagauauguucccuuaug

SEQ ID NO: 2509577 - RNA, 19 nt, Artificial Sequence
  Description of Artificial Sequence: Synthetic oligonucleotide
  Antisense strand to SEQ ID NO: 2509576
cauaagggaacauaucucu

SEQ ID NO: 2509578 - RNA, 19 nt, Artificial Sequence
  Description of Artificial Sequence: Synthetic oligonucleotide
  Sense strand starting at position 1097 of SEQ ID NO: 1888086
gagauauguucccuuaugg

SEQ ID NO: 2509579 - RNA, 19 nt, Artificial Sequence
  Description of Artificial Sequence: Synthetic oligonucleotide
  Antisense strand to SEQ ID NO: 2509578
ccauaagggaacauaucuc

SEQ ID NO: 2509580 - RNA, 19 nt, Artificial Sequence
  Description of Artificial Sequence: Synthetic oligonucleotide
  Sense strand starting at position 1107 of SEQ ID NO: 1888086
cccuuaugguacuuacagu

SEQ ID NO: 2509581 - RNA, 19 nt, Artificial Sequence
  Description of Artificial Sequence: Synthetic oligonucleotide
  Antisense strand to SEQ ID NO: 2509580
acuguaaguaccauaaggg

SEQ ID NO: 2509582 - RNA, 19 nt, Artificial Sequence
  Description of Artificial Sequence: Synthetic oligonucleotide
  Sense strand starting at position 1208 of SEQ ID NO: 1888086
agcuuccguggugaagaau

SEQ ID NO: 2509583 - RNA, 19 nt, Artificial Sequence
  Description of Artificial Sequence: Synthetic oligonucleotide
  Antisense strand to SEQ ID NO: 2509582
auucuucaccacggaagcu

SEQ ID NO: 2509584 - RNA, 19 nt, Artificial Sequence
  Description of Artificial Sequence: Synthetic oligonucleotide
  Sense strand starting at position 1211 of SEQ ID NO: 1888086
uuccguggugaagaauaaa

SEQ ID NO: 2509585 - RNA, 19 nt, Artificial Sequence
  Description of Artificial Sequence: Synthetic oligonucleotide
  Antisense strand to SEQ ID NO: 2509584
uuuauucuucaccacggaa

SEQ ID NO: 2509586 - RNA, 19 nt, Artificial Sequence
  Description of Artificial Sequence: Synthetic oligonucleotide
  Sense strand starting at position 1268 of SEQ ID NO: 1888086
aggagaugugaaggaguuu

SEQ ID NO: 2509587 - RNA, 19 nt, Artificial Sequence
  Description of Artificial Sequence: Synthetic oligonucleotide
  Antisense strand to SEQ ID NO: 2509586
aaacuccuucacaucuccu

SEQ ID NO: 2509588 - RNA, 19 nt, Artificial Sequence
  Description of Artificial Sequence: Synthetic oligonucleotide
  Sense strand starting at position 1277 of SEQ ID NO: 1888086
gaaggaguuugccuuggag

SEQ ID NO: 2509589 - RNA, 19 nt, Artificial Sequence
  Description of Artificial Sequence: Synthetic oligonucleotide
  Antisense strand to SEQ ID NO: 2509588
cuccaaggcaaacuccuuc

SEQ ID NO: 2509590 - RNA, 19 nt, Artificial Sequence
  Description of Artificial Sequence: Synthetic oligonucleotide
  Sense strand starting at position 1311 of SEQ ID NO: 1888086
gggaaugugucggucagag

SEQ ID NO: 2509591 - RNA, 19 nt, Artificial Sequence
  Description of Artificial Sequence: Synthetic oligonucleotide
  Antisense strand to SEQ ID NO: 2509590
cucugaccgacacauuccc

SEQ ID NO: 2509592 - RNA, 19 nt, Artificial Sequence
  Description of Artificial Sequence: Synthetic oligonucleotide
  Sense strand starting at position 1313 of SEQ ID NO: 1888086
gaaugugucggucagagag

SEQ ID NO: 2509593 - RNA, 19 nt, Artificial Sequence
  Description of Artificial Sequence: Synthetic oligonucleotide
  Antisense strand to SEQ ID NO: 2509592
cucucugaccgacacauuc

SEQ ID NO: 2509594 - RNA, 19 nt, Artificial Sequence
  Description of Artificial Sequence: Synthetic oligonucleotide
  Sense strand starting at position 1370 of SEQ ID NO: 1888086
gggagcuuugaauguuggu

SEQ ID NO: 2509595 - RNA, 19 nt, Artificial Sequence
  Description of Artificial Sequence: Synthetic oligonucleotide
  Antisense strand to SEQ ID NO: 2509594
accaacauucaaagcuccc

SEQ ID NO: 2509596 - RNA, 19 nt, Artificial Sequence
  Description of Artificial Sequence: Synthetic oligonucleotide
  Sense strand starting at position 1504 of SEQ ID NO: 1888086
gugugcgugcucaggaaau

SEQ ID NO: 2509597 - RNA, 19 nt, Artificial Sequence
  Description of Artificial Sequence: Synthetic oligonucleotide
  Antisense strand to SEQ ID NO: 2509596
auuuccugagcacgcacac

SEQ ID NO: 2509598 - RNA, 19 nt, Artificial Sequence
  Description of Artificial Sequence: Synthetic oligonucleotide
  Sense strand starting at position 1636 of SEQ ID NO: 1888086
gguagcuaugacgaugaau

SEQ ID NO: 2509599 - RNA, 19 nt, Artificial Sequence
  Description of Artificial Sequence: Synthetic oligonucleotide
  Antisense strand to SEQ ID NO: 2509598
auucaucgucauagcuacc

SEQ ID NO: 2509600 - RNA, 19 nt, Artificial Sequence
  Description of Artificial Sequence: Synthetic oligonucleotide
  Sense strand starting at position 2123 of SEQ ID NO: 1888086
ccaggauucugaccucgga

SEQ ID NO: 2509601 - RNA, 19 nt, Artificial Sequence
  Description of Artificial Sequence: Synthetic oligonucleotide
  Antisense strand to SEQ ID NO: 2509600
uccgaggucagaauccugg

SEQ ID NO: 2509602 - RNA, 19 nt, Artificial Sequence
  Description of Artificial Sequence: Synthetic oligonucleotide
  Sense strand starting at position 2215 of SEQ ID NO: 1888086
ugaaacaucuggcccugau

SEQ ID NO: 2509603 - RNA, 19 nt, Artificial Sequence
  Description of Artificial Sequence: Synthetic oligonucleotide
  Antisense strand to SEQ ID NO: 2509602
aucagggccagauguuuca

SEQ ID NO: 2509604 - RNA, 19 nt, Artificial Sequence
  Description of Artificial Sequence: Synthetic oligonucleotide
  Sense strand starting at position 2258 of SEQ ID NO: 1888086
gagcucagguuguccaaau

SEQ ID NO: 2509605 - RNA, 19 nt, Artificial Sequence
  Description of Artificial Sequence: Synthetic oligonucleotide
  Antisense strand to SEQ ID NO: 2509604
auuuggacaaccugagcuc

SEQ ID NO: 2509606 - RNA, 19 nt, Artificial Sequence
  Description of Artificial Sequence: Synthetic oligonucleotide
  Sense strand starting at position 2259 of SEQ ID NO: 1888086
agcucagguuguccaaaua

SEQ ID NO: 2509607 - RNA, 19 nt, Artificial Sequence
  Description of Artificial Sequence: Synthetic oligonucleotide
  Antisense strand to SEQ ID NO: 2509606
uauuuggacaaccugagcu

SEQ ID NO: 2509608 - RNA, 19 nt, Artificial Sequence
  Description of Artificial Sequence: Synthetic oligonucleotide
  Sense strand starting at position 2480 of SEQ ID NO: 1888086
cgagucuuugcaccugcua

SEQ ID NO: 2509609 - RNA, 19 nt, Artificial Sequence
  Description of Artificial Sequence: Synthetic oligonucleotide
  Antisense strand to SEQ ID NO: 2509608
uagcaggugcaaagacucg

SEQ ID NO: 2509610 - RNA, 19 nt, Artificial Sequence
  Description of Artificial Sequence: Synthetic oligonucleotide
  Sense strand starting at position 2526 of SEQ ID NO: 1888086
gcauuucucugcuuuguga

SEQ ID NO: 2509611 - RNA, 19 nt, Artificial Sequence
  Description of Artificial Sequence: Synthetic oligonucleotide
  Antisense strand to SEQ ID NO: 2509610
ucacaaagcagagaaaugc

SEQ ID NO: 2509612 - RNA, 19 nt, Artificial Sequence
  Description of Artificial Sequence: Synthetic oligonucleotide
  Sense strand starting at position 2528 of SEQ ID NO: 1888086
auuucucugcuuugugaau

SEQ ID NO: 2509613 - RNA, 19 nt, Artificial Sequence
  Description of Artificial Sequence: Synthetic oligonucleotide
  Antisense strand to SEQ ID NO: 2509612
auucacaaagcagagaaau

SEQ ID NO: 2509614 - RNA, 19 nt, Artificial Sequence
  Description of Artificial Sequence: Synthetic oligonucleotide
  Sense strand starting at position 2540 of SEQ ID NO: 1888086
ugugaauuccuaugcaugg

SEQ ID NO: 2509615 - RNA, 19 nt, Artificial Sequence
  Description of Artificial Sequence: Synthetic oligonucleotide
  Antisense strand to SEQ ID NO: 2509614
ccaugcauaggaauucaca

SEQ ID NO: 2509616 - RNA, 19 nt, Artificial Sequence
  Description of Artificial Sequence: Synthetic oligonucleotide
  Sense strand starting at position 2659 of SEQ ID NO: 1888086
cuggcaacucuaugaggua

SEQ ID NO: 2509617 - RNA, 19 nt, Artificial Sequence
  Description of Artificial Sequence: Synthetic oligonucleotide
  Antisense strand to SEQ ID NO: 2509616
uaccucauagaguugccag

SEQ ID NO: 2509618 - RNA, 19 nt, Artificial Sequence
  Description of Artificial Sequence: Synthetic oligonucleotide
  Sense strand starting at position 2744 of SEQ ID NO: 1888086
cuaguaacuggugaagcua

SEQ ID NO: 2509619 - RNA, 19 nt, Artificial Sequence
  Description of Artificial Sequence: Synthetic oligonucleotide
  Antisense strand to SEQ ID NO: 2509618
uagcuucaccaguuacuag

SEQ ID NO: 2509620 - RNA, 19 nt, Artificial Sequence
  Description of Artificial Sequence: Synthetic oligonucleotide
  Sense strand starting at position 2800 of SEQ ID NO: 1888086
aggucucucuguuuccaga

SEQ ID NO: 2509621 - RNA, 19 nt, Artificial Sequence
  Description of Artificial Sequence: Synthetic oligonucleotide
  Antisense strand to SEQ ID NO: 2509620
ucuggaaacagagagaccu

SEQ ID NO: 2509622 - RNA, 19 nt, Artificial Sequence
  Description of Artificial Sequence: Synthetic oligonucleotide
  Sense strand starting at position 2832 of SEQ ID NO: 1888086
ggagucaccucuccaugau

SEQ ID NO: 2509623 - RNA, 19 nt, Artificial Sequence
  Description of Artificial Sequence: Synthetic oligonucleotide
  Antisense strand to SEQ ID NO: 2509622
aucauggagaggugacucc

SEQ ID NO: 2509624 - RNA, 19 nt, Artificial Sequence
  Description of Artificial Sequence: Synthetic oligonucleotide
  Sense strand starting at position 2833 of SEQ ID NO: 1888086
gagucaccucuccaugaug

SEQ ID NO: 2509625 - RNA, 19 nt, Artificial Sequence
  Description of Artificial Sequence: Synthetic oligonucleotide
  Antisense strand to SEQ ID NO: 2509624
caucauggagaggugacuc

SEQ ID NO: 2509626 - RNA, 19 nt, Artificial Sequence
  Description of Artificial Sequence: Synthetic oligonucleotide
  Sense strand starting at position 2849 of SEQ ID NO: 1888086
augcuucuugcagaauucu

SEQ ID NO: 2509627 - RNA, 19 nt, Artificial Sequence
  Description of Artificial Sequence: Synthetic oligonucleotide
  Antisense strand to SEQ ID NO: 2509626
agaauucugcaagaagcau

SEQ ID NO: 2509628 - RNA, 19 nt, Artificial Sequence
  Description of Artificial Sequence: Synthetic oligonucleotide
  Sense strand starting at position 3037 of SEQ ID NO: 1888086
agguaaagggacuggucua

SEQ ID NO: 2509629 - RNA, 19 nt, Artificial Sequence
  Description of Artificial Sequence: Synthetic oligonucleotide
  Antisense strand to SEQ ID NO: 2509628
uagaccagucccuuuaccu

SEQ ID NO: 2509630 - RNA, 19 nt, Artificial Sequence
  Description of Artificial Sequence: Synthetic oligonucleotide
  Sense strand starting at position 3038 of SEQ ID NO: 1888086
gguaaagggacuggucuaa

SEQ ID NO: 2509631 - RNA, 19 nt, Artificial Sequence
  Description of Artificial Sequence: Synthetic oligonucleotide
  Antisense strand to SEQ ID NO: 2509630
uuagaccagucccuuuacc

SEQ ID NO: 2509632 - RNA, 19 nt, Artificial Sequence
  Description of Artificial Sequence: Synthetic oligonucleotide
  Sense strand starting at position 3542 of SEQ ID NO: 1888086
gugcuaacugcacagggau

SEQ ID NO: 2509633 - RNA, 19 nt, Artificial Sequence
  Description of Artificial Sequence: Synthetic oligonucleotide
  Antisense strand to SEQ ID NO: 2509632
aucccugugcaguuagcac

SEQ ID NO: 2509634 - RNA, 19 nt, Artificial Sequence
  Description of Artificial Sequence: Synthetic oligonucleotide
  Sense strand starting at position 3780 of SEQ ID NO: 1888086
uccugucugcauguuugua

SEQ ID NO: 2509635 - RNA, 19 nt, Artificial Sequence
  Description of Artificial Sequence: Synthetic oligonucleotide
  Antisense strand to SEQ ID NO: 2509634
uacaaacaugcagacagga

SEQ ID NO: 2509636 - RNA, 19 nt, Artificial Sequence
  Description of Artificial Sequence: Synthetic oligonucleotide
  Sense strand starting at position 3817 of SEQ ID NO: 1888086
uuauuuaaguggcagaauu

SEQ ID NO: 2509637 - RNA, 19 nt, Artificial Sequence
  Description of Artificial Sequence: Synthetic oligonucleotide
  Antisense strand to SEQ ID NO: 2509636
aauucugccacuuaaauaa

SEQ ID NO: 2509638 - RNA, 19 nt, Artificial Sequence
  Description of Artificial Sequence: Synthetic oligonucleotide
  Sense strand starting at position 3844 of SEQ ID NO: 1888086
aggugaguaguaugaccuu

SEQ ID NO: 2509639 - RNA, 19 nt, Artificial Sequence
  Description of Artificial Sequence: Synthetic oligonucleotide
  Antisense strand to SEQ ID NO: 2509638
aaggucauacuacucaccu

SEQ ID NO: 2509640 - RNA, 19 nt, Artificial Sequence
  Description of Artificial Sequence: Synthetic oligonucleotide
  Sense strand starting at position 3850 of SEQ ID NO: 1888086
guaguaugaccuuggucaa

SEQ ID NO: 2509641 - RNA, 19 nt, Artificial Sequence
  Description of Artificial Sequence: Synthetic oligonucleotide
  Antisense strand to SEQ ID NO: 2509640
uugaccaaggucauacuac

SEQ ID NO: 2509642 - RNA, 19 nt, Artificial Sequence
  Description of Artificial Sequence: Synthetic oligonucleotide
  Sense strand starting at position 188 of SEQ ID NO: 1888087
uggucuacuuuaucaccau

SEQ ID NO: 2509643 - RNA, 19 nt, Artificial Sequence
  Description of Artificial Sequence: Synthetic oligonucleotide
  Antisense strand to SEQ ID NO: 2509642
auggugauaaaguagacca

SEQ ID NO: 2509644 - RNA, 19 nt, Artificial Sequence
  Description of Artificial Sequence: Synthetic oligonucleotide
  Sense strand starting at position 248 of SEQ ID NO: 1888087
gaaagcagucauuaaaguc

SEQ ID NO: 2509645 - RNA, 19 nt, Artificial Sequence
  Description of Artificial Sequence: Synthetic oligonucleotide
  Antisense strand to SEQ ID NO: 2509644
gacuuuaaugacugcuuuc

SEQ ID NO: 2509646 - RNA, 19 nt, Artificial Sequence
  Description of Artificial Sequence: Synthetic oligonucleotide
  Sense strand starting at position 548 of SEQ ID NO: 1888087
gacugcuugaguugggaga

SEQ ID NO: 2509647 - RNA, 19 nt, Artificial Sequence
  Description of Artificial Sequence: Synthetic oligonucleotide
  Antisense strand to SEQ ID NO: 2509646
ucucccaacucaagcaguc

SEQ ID NO: 2509648 - RNA, 19 nt, Artificial Sequence
  Description of Artificial Sequence: Synthetic oligonucleotide
  Sense strand starting at position 549 of SEQ ID NO: 1888087
acugcuugaguugggagau

SEQ ID NO: 2509649 - RNA, 19 nt, Artificial Sequence
  Description of Artificial Sequence: Synthetic oligonucleotide
  Antisense strand to SEQ ID NO: 2509648
aucucccaacucaagcagu

SEQ ID NO: 2509650 - RNA, 19 nt, Artificial Sequence
  Description of Artificial Sequence: Synthetic oligonucleotide
  Sense strand starting at position 1083 of SEQ ID NO: 1888087
augcuuaaugcuggacaca

SEQ ID NO: 2509651 - RNA, 19 nt, Artificial Sequence
  Description of Artificial Sequence: Synthetic oligonucleotide
  Antisense strand to SEQ ID NO: 2509650
uguguccagcauuaagcau

SEQ ID NO: 2509652 - RNA, 19 nt, Artificial Sequence
  Description of Artificial Sequence: Synthetic oligonucleotide
  Sense strand starting at position 1084 of SEQ ID NO: 1888087
ugcuuaaugcuggacacau

SEQ ID NO: 2509653 - RNA, 19 nt, Artificial Sequence
  Description of Artificial Sequence: Synthetic oligonucleotide
  Antisense strand to SEQ ID NO: 2509652
auguguccagcauuaagca

SEQ ID NO: 2509654 - RNA, 19 nt, Artificial Sequence
  Description of Artificial Sequence: Synthetic oligonucleotide
  Sense strand starting at position 1414 of SEQ ID NO: 1888087
cucccuuugcgcuuaguaa

SEQ ID NO: 2509655 - RNA, 19 nt, Artificial Sequence
  Description of Artificial Sequence: Synthetic oligonucleotide
  Antisense strand to SEQ ID NO: 2509654
uuacuaagcgcaaagggag

SEQ ID NO: 2509656 - RNA, 19 nt, Artificial Sequence
  Description of Artificial Sequence: Synthetic oligonucleotide
  Sense strand starting at position 1480 of SEQ ID NO: 1888087
cgccauauacgaugaggga

SEQ ID NO: 2509657 - RNA, 19 nt, Artificial Sequence
  Description of Artificial Sequence: Synthetic oligonucleotide
  Antisense strand to SEQ ID NO: 2509656
ucccucaucguauauggcg

SEQ ID NO: 2509658 - RNA, 19 nt, Artificial Sequence
  Description of Artificial Sequence: Synthetic oligonucleotide
  Sense strand starting at position 1599 of SEQ ID NO: 1888087
ggcccuauccaguaaauga

SEQ ID NO: 2509659 - RNA, 19 nt, Artificial Sequence
  Description of Artificial Sequence: Synthetic oligonucleotide
  Antisense strand to SEQ ID NO: 2509658
ucauuuacuggauagggcc

SEQ ID NO: 2509660 - RNA, 19 nt, Artificial Sequence
  Description of Artificial Sequence: Synthetic oligonucleotide
  Sense strand starting at position 1649 of SEQ ID NO: 1888087
uuaauaauuccuggagucu

SEQ ID NO: 2509661 - RNA, 19 nt, Artificial Sequence
  Description of Artificial Sequence: Synthetic oligonucleotide
  Antisense strand to SEQ ID NO: 2509660
agacuccaggaauuauuaa

SEQ ID NO: 2509662 - RNA, 19 nt, Artificial Sequence
  Description of Artificial Sequence: Synthetic oligonucleotide
  Sense strand starting at position 1752 of SEQ ID NO: 1888087
cagggaaguuguuuccaug

SEQ ID NO: 2509663 - RNA, 19 nt, Artificial Sequence
  Description of Artificial Sequence: Synthetic oligonucleotide
  Antisense strand to SEQ ID NO: 2509662
cauggaaacaacuucccug

SEQ ID NO: 2509664 - RNA, 19 nt, Artificial Sequence
  Description of Artificial Sequence: Synthetic oligonucleotide
  Sense strand starting at position 2134 of SEQ ID NO: 1888087
gacuuucggguguagaacu

SEQ ID NO: 2509665 - RNA, 19 nt, Artificial Sequence
  Description of Artificial Sequence: Synthetic oligonucleotide
  Antisense strand to SEQ ID NO: 2509664
aguucuacacccgaaaguc

SEQ ID NO: 2509666 - RNA, 19 nt, Artificial Sequence
  Description of Artificial Sequence: Synthetic oligonucleotide
  Sense strand starting at position 2174 of SEQ ID NO: 1888087
ccacgugacgaggacuaaa

SEQ ID NO: 2509667 - RNA, 19 nt, Artificial Sequence
  Description of Artificial Sequence: Synthetic oligonucleotide
  Antisense strand to SEQ ID NO: 2509666
uuuaguccucgucacgugg

SEQ ID NO: 2509668 - RNA, 19 nt, Artificial Sequence
  Description of Artificial Sequence: Synthetic oligonucleotide
  Sense strand starting at position 2204 of SEQ ID NO: 1888087
aggagaagcuucucacuug

SEQ ID NO: 2509669 - RNA, 19 nt, Artificial Sequence
  Description of Artificial Sequence: Synthetic oligonucleotide
  Antisense strand to SEQ ID NO: 2509668
caagugagaagcuucuccu

SEQ ID NO: 2509670 - RNA, 19 nt, Artificial Sequence
  Description of Artificial Sequence: Synthetic oligonucleotide
  Sense strand starting at position 2207 of SEQ ID NO: 1888087
agaagcuucucacuugcaa

SEQ ID NO: 2509671 - RNA, 19 nt, Artificial Sequence
  Description of Artificial Sequence: Synthetic oligonucleotide
  Antisense strand to SEQ ID NO: 2509670
uugcaagugagaagcuucu

SEQ ID NO: 2509672 - RNA, 19 nt, Artificial Sequence
  Description of Artificial Sequence: Synthetic oligonucleotide
  Sense strand starting at position 2355 of SEQ ID NO: 1888087
ccggaacucugggugaacu

SEQ ID NO: 2509673 - RNA, 19 nt, Artificial Sequence
  Description of Artificial Sequence: Synthetic oligonucleotide
  Antisense strand to SEQ ID NO: 2509672
aguucacccagaguuccgg

SEQ ID NO: 2509674 - RNA, 19 nt, Artificial Sequence
  Description of Artificial Sequence: Synthetic oligonucleotide
  Sense strand starting at position 2356 of SEQ ID NO: 1888087
cggaacucugggugaacuu

SEQ ID NO: 2509675 - RNA, 19 nt, Artificial Sequence
  Description of Artificial Sequence: Synthetic oligonucleotide
  Antisense strand to SEQ ID NO: 2509674
aaguucacccagaguuccg

SEQ ID NO: 2509676 - RNA, 19 nt, Artificial Sequence
  Description of Artificial Sequence: Synthetic oligonucleotide
  Sense strand starting at position 2407 of SEQ ID NO: 1888087
cuaggcucuggguacuauu

SEQ ID NO: 2509677 - RNA, 19 nt, Artificial Sequence
  Description of Artificial Sequence: Synthetic oligonucleotide
  Antisense strand to SEQ ID NO: 2509676
aauaguacccagagccuag

SEQ ID NO: 2509678 - RNA, 19 nt, Artificial Sequence
  Description of Artificial Sequence: Synthetic oligonucleotide
  Sense strand starting at position 2590 of SEQ ID NO: 1888087
gcaagaugcccucaauaga

SEQ ID NO: 2509679 - RNA, 19 nt, Artificial Sequence
  Description of Artificial Sequence: Synthetic oligonucleotide
  Antisense strand to SEQ ID NO: 2509678
ucuauugagggcaucuugc

SEQ ID NO: 2509680 - RNA, 19 nt, Artificial Sequence
  Description of Artificial Sequence: Synthetic oligonucleotide
  Sense strand starting at position 2658 of SEQ ID NO: 1888087
guaaauuaacguuaaguac

SEQ ID NO: 2509681 - RNA, 19 nt, Artificial Sequence
  Description of Artificial Sequence: Synthetic oligonucleotide
  Antisense strand to SEQ ID NO: 2509680
guacuuaacguuaauuuac

SEQ ID NO: 2509682 - RNA, 19 nt, Artificial Sequence
  Description of Artificial Sequence: Synthetic oligonucleotide
  Sense strand starting at position 2688 of SEQ ID NO: 1888087
acucaaacuugguuucgaa

SEQ ID NO: 2509683 - RNA, 19 nt, Artificial Sequence
  Description of Artificial Sequence: Synthetic oligonucleotide
  Antisense strand to SEQ ID NO: 2509682
uucgaaaccaaguuugagu

SEQ ID NO: 2509684 - RNA, 19 nt, Artificial Sequence
  Description of Artificial Sequence: Synthetic oligonucleotide
  Sense strand starting at position 2813 of SEQ ID NO: 1888087
gauguucugcccuacagaa

SEQ ID NO: 2509685 - RNA, 19 nt, Artificial Sequence
  Description of Artificial Sequence: Synthetic oligonucleotide
  Antisense strand to SEQ ID NO: 2509684
uucuguagggcagaacauc

SEQ ID NO: 2509686 - RNA, 19 nt, Artificial Sequence
  Description of Artificial Sequence: Synthetic oligonucleotide
  Sense strand starting at position 2815 of SEQ ID NO: 1888087
uguucugcccuacagaaau

SEQ ID NO: 2509687 - RNA, 19 nt, Artificial Sequence
  Description of Artificial Sequence: Synthetic oligonucleotide
  Antisense strand to SEQ ID NO: 2509686
auuucuguagggcagaaca

SEQ ID NO: 2509688 - RNA, 19 nt, Artificial Sequence
  Description of Artificial Sequence: Synthetic oligonucleotide
  Sense strand starting at position 2851 of SEQ ID NO: 1888087
cugaauggaucgcugacuu

SEQ ID NO: 2509689 - RNA, 19 nt, Artificial Sequence
  Description of Artificial Sequence: Synthetic oligonucleotide
  Antisense strand to SEQ ID NO: 2509688
aagucagcgauccauucag

SEQ ID NO: 2509690 - RNA, 19 nt, Artificial Sequence
  Description of Artificial Sequence: Synthetic oligonucleotide
  Sense strand starting at position 2855 of SEQ ID NO: 1888087
auggaucgcugacuuaaau

SEQ ID NO: 2509691 - RNA, 19 nt, Artificial Sequence
  Description of Artificial Sequence: Synthetic oligonucleotide
  Antisense strand to SEQ ID NO: 2509690
auuuaagucagcgauccau

SEQ ID NO: 2509692 - RNA, 19 nt, Artificial Sequence
  Description of Artificial Sequence: Synthetic oligonucleotide
  Sense strand starting at position 2915 of SEQ ID NO: 1888087
aggagaauauguuugccau

SEQ ID NO: 2509693 - RNA, 19 nt, Artificial Sequence
  Description of Artificial Sequence: Synthetic oligonucleotide
  Antisense strand to SEQ ID NO: 2509692
auggcaaacauauucuccu

SEQ ID NO: 2509694 - RNA, 19 nt, Artificial Sequence
  Description of Artificial Sequence: Synthetic oligonucleotide
  Sense strand starting at position 2916 of SEQ ID NO: 1888087
ggagaauauguuugccauc

SEQ ID NO: 2509695 - RNA, 19 nt, Artificial Sequence
  Description of Artificial Sequence: Synthetic oligonucleotide
  Antisense strand to SEQ ID NO: 2509694
gauggcaaacauauucucc

SEQ ID NO: 2509696 - RNA, 19 nt, Artificial Sequence
  Description of Artificial Sequence: Synthetic oligonucleotide
  Sense strand starting at position 2917 of SEQ ID NO: 1888087
gagaauauguuugccaucu

SEQ ID NO: 2509697 - RNA, 19 nt, Artificial Sequence
  Description of Artificial Sequence: Synthetic oligonucleotide
  Antisense strand to SEQ ID NO: 2509696
agauggcaaacauauucuc

SEQ ID NO: 2509698 - RNA, 19 nt, Artificial Sequence
  Description of Artificial Sequence: Synthetic oligonucleotide
  Sense strand starting at position 2925 of SEQ ID NO: 1888087
guuugccaucuuggaauaa

SEQ ID NO: 2509699 - RNA, 19 nt, Artificial Sequence
  Description of Artificial Sequence: Synthetic oligonucleotide
  Antisense strand to SEQ ID NO: 2509698
uuauuccaagauggcaaac

SEQ ID NO: 2509700 - RNA, 19 nt, Artificial Sequence
  Description of Artificial Sequence: Synthetic oligonucleotide
  Sense strand starting at position 2943 of SEQ ID NO: 1888087
agcacagaauucuuagaau

SEQ ID NO: 2509701 - RNA, 19 nt, Artificial Sequence
  Description of Artificial Sequence: Synthetic oligonucleotide
  Antisense strand to SEQ ID NO: 2509700
auucuaagaauucugugcu

SEQ ID NO: 2509702 - RNA, 19 nt, Artificial Sequence
  Description of Artificial Sequence: Synthetic oligonucleotide
  Sense strand starting at position 3249 of SEQ ID NO: 1888087
aauauaugaggacgcuuua

SEQ ID NO: 2509703 - RNA, 19 nt, Artificial Sequence
  Description of Artificial Sequence: Synthetic oligonucleotide
  Antisense strand to SEQ ID NO: 2509702
uaaagcguccucauauauu

SEQ ID NO: 2509704 - RNA, 19 nt, Artificial Sequence
  Description of Artificial Sequence: Synthetic oligonucleotide
  Sense strand starting at position 3305 of SEQ ID NO: 1888087
ggcaauaaauuugaauaga

SEQ ID NO: 2509705 - RNA, 19 nt, Artificial Sequence
  Description of Artificial Sequence: Synthetic oligonucleotide
  Antisense strand to SEQ ID NO: 2509704
ucuauucaaauuuauugcc

SEQ ID NO: 2509706 - RNA, 19 nt, Artificial Sequence
  Description of Artificial Sequence: Synthetic oligonucleotide
  Sense strand starting at position 3451 of SEQ ID NO: 1888087
ugccaagagcuguaaggau

SEQ ID NO: 2509707 - RNA, 19 nt, Artificial Sequence
  Description of Artificial Sequence: Synthetic oligonucleotide
  Antisense strand to SEQ ID NO: 2509706
auccuuacagcucuuggca

SEQ ID NO: 2509708 - RNA, 19 nt, Artificial Sequence
  Description of Artificial Sequence: Synthetic oligonucleotide
  Sense strand starting at position 3460 of SEQ ID NO: 1888087
cuguaaggauuuggaauaa

SEQ ID NO: 2509709 - RNA, 19 nt, Artificial Sequence
  Description of Artificial Sequence: Synthetic oligonucleotide
  Antisense strand to SEQ ID NO: 2509708
uuauuccaaauccuuacag

SEQ ID NO: 2509710 - RNA, 19 nt, Artificial Sequence
  Description of Artificial Sequence: Synthetic oligonucleotide
  Sense strand starting at position 3484 of SEQ ID NO: 1888087
acuguuauugaugggaaca

SEQ ID NO: 2509711 - RNA, 19 nt, Artificial Sequence
  Description of Artificial Sequence: Synthetic oligonucleotide
  Antisense strand to SEQ ID NO: 2509710
uguucccaucaauaacagu

SEQ ID NO: 2509712 - RNA, 19 nt, Artificial Sequence
  Description of Artificial Sequence: Synthetic oligonucleotide
  Sense strand starting at position 3485 of SEQ ID NO: 1888087
cuguuauugaugggaacau

SEQ ID NO: 2509713 - RNA, 19 nt, Artificial Sequence
  Description of Artificial Sequence: Synthetic oligonucleotide
  Antisense strand to SEQ ID NO: 2509712
auguucccaucaauaacag

SEQ ID NO: 2509714 - RNA, 19 nt, Artificial Sequence
  Description of Artificial Sequence: Synthetic oligonucleotide
  Sense strand starting at position 3583 of SEQ ID NO: 1888087
ucuaguuauccaugagaaa

SEQ ID NO: 2509715 - RNA, 19 nt, Artificial Sequence
  Description of Artificial Sequence: Synthetic oligonucleotide
  Antisense strand to SEQ ID NO: 2509714
uuucucauggauaacuaga

SEQ ID NO: 2509716 - RNA, 19 nt, Artificial Sequence
  Description of Artificial Sequence: Synthetic oligonucleotide
  Sense strand starting at position 3623 of SEQ ID NO: 1888087
agccauguacaugaauguu

SEQ ID NO: 2509717 - RNA, 19 nt, Artificial Sequence
  Description of Artificial Sequence: Synthetic oligonucleotide
  Antisense strand to SEQ ID NO: 2509716
aacauucauguacauggcu

SEQ ID NO: 2509718 - RNA, 19 nt, Artificial Sequence
  Description of Artificial Sequence: Synthetic oligonucleotide
  Sense strand starting at position 3680 of SEQ ID NO: 1888087
cccaauacccaucgaguaa

SEQ ID NO: 2509719 - RNA, 19 nt, Artificial Sequence
  Description of Artificial Sequence: Synthetic oligonucleotide
  Antisense strand to SEQ ID NO: 2509718
uuacucgauggguauuggg

SEQ ID NO: 2509720 - RNA, 19 nt, Artificial Sequence
  Description of Artificial Sequence: Synthetic oligonucleotide
  Sense strand starting at position 3691 of SEQ ID NO: 1888087
ucgaguaaauggcuaaaca

SEQ ID NO: 2509721 - RNA, 19 nt, Artificial Sequence
  Description of Artificial Sequence: Synthetic oligonucleotide
  Antisense strand to SEQ ID NO: 2509720
uguuuagccauuuacucga

SEQ ID NO: 2509722 - RNA, 19 nt, Artificial Sequence
  Description of Artificial Sequence: Synthetic oligonucleotide
  Sense strand starting at position 75 of SEQ ID NO: 1888088
acuggcauccagcaauaga

SEQ ID NO: 2509723 - RNA, 19 nt, Artificial Sequence
  Description of Artificial Sequence: Synthetic oligonucleotide
  Antisense strand to SEQ ID NO: 2509722
ucuauugcuggaugccagu

SEQ ID NO: 2509724 - RNA, 19 nt, Artificial Sequence
  Description of Artificial Sequence: Synthetic oligonucleotide
  Sense strand starting at position 112 of SEQ ID NO: 1888088
aucauauaucuaugugaug

SEQ ID NO: 2509725 - RNA, 19 nt, Artificial Sequence
  Description of Artificial Sequence: Synthetic oligonucleotide
  Antisense strand to SEQ ID NO: 2509724
caucacauagauauaugau

SEQ ID NO: 2509726 - RNA, 19 nt, Artificial Sequence
  Description of Artificial Sequence: Synthetic oligonucleotide
  Sense strand starting at position 118 of SEQ ID NO: 1888088
uaucuaugugauggaauau

SEQ ID NO: 2509727 - RNA, 19 nt, Artificial Sequence
  Description of Artificial Sequence: Synthetic oligonucleotide
  Antisense strand to SEQ ID NO: 2509726
auauuccaucacauagaua

SEQ ID NO: 2509728 - RNA, 19 nt, Artificial Sequence
  Description of Artificial Sequence: Synthetic oligonucleotide
  Sense strand starting at position 128 of SEQ ID NO: 1888088
auggaauauucugaagaga

SEQ ID NO: 2509729 - RNA, 19 nt, Artificial Sequence
  Description of Artificial Sequence: Synthetic oligonucleotide
  Antisense strand to SEQ ID NO: 2509728
ucucuucagaauauuccau

SEQ ID NO: 2509730 - RNA, 19 nt, Artificial Sequence
  Description of Artificial Sequence: Synthetic oligonucleotide
  Sense strand starting at position 160 of SEQ ID NO: 1888088
uuugaagccugcuuuauga

SEQ ID NO: 2509731 - RNA, 19 nt, Artificial Sequence
  Description of Artificial Sequence: Synthetic oligonucleotide
  Antisense strand to SEQ ID NO: 2509730
ucauaaagcaggcuucaaa

SEQ ID NO: 2509732 - RNA, 19 nt, Artificial Sequence
  Description of Artificial Sequence: Synthetic oligonucleotide
  Sense strand starting at position 162 of SEQ ID NO: 1888088
ugaagccugcuuuaugaca

SEQ ID NO: 2509733 - RNA, 19 nt, Artificial Sequence
  Description of Artificial Sequence: Synthetic oligonucleotide
  Antisense strand to SEQ ID NO: 2509732
ugucauaaagcaggcuuca

SEQ ID NO: 2509734 - RNA, 19 nt, Artificial Sequence
  Description of Artificial Sequence: Synthetic oligonucleotide
  Sense strand starting at position 291 of SEQ ID NO: 1888088
cgggaauugcuugaaccuu

SEQ ID NO: 2509735 - RNA, 19 nt, Artificial Sequence
  Description of Artificial Sequence: Synthetic oligonucleotide
  Antisense strand to SEQ ID NO: 2509734
aagguucaagcaauucccg

SEQ ID NO: 2509736 - RNA, 19 nt, Artificial Sequence
  Description of Artificial Sequence: Synthetic oligonucleotide
  Sense strand starting at position 408 of SEQ ID NO: 1888088
ugaauaaauguaggugaug

SEQ ID NO: 2509737 - RNA, 19 nt, Artificial Sequence
  Description of Artificial Sequence: Synthetic oligonucleotide
  Antisense strand to SEQ ID NO: 2509736
caucaccuacauuuauuca

SEQ ID NO: 2509738 - RNA, 19 nt, Artificial Sequence
  Description of Artificial Sequence: Synthetic oligonucleotide
  Sense strand starting at position 409 of SEQ ID NO: 1888088
gaauaaauguaggugaugu

SEQ ID NO: 2509739 - RNA, 19 nt, Artificial Sequence
  Description of Artificial Sequence: Synthetic oligonucleotide
  Antisense strand to SEQ ID NO: 2509738
acaucaccuacauuuauuc

SEQ ID NO: 2509740 - RNA, 19 nt, Artificial Sequence
  Description of Artificial Sequence: Synthetic oligonucleotide
  Sense strand starting at position 426 of SEQ ID NO: 1888088
guaauuugaugucaacuca

SEQ ID NO: 2509741 - RNA, 19 nt, Artificial Sequence
  Description of Artificial Sequence: Synthetic oligonucleotide
  Antisense strand to SEQ ID NO: 2509740
ugaguugacaucaaauuac

SEQ ID NO: 2509742 - RNA, 19 nt, Artificial Sequence
  Description of Artificial Sequence: Synthetic oligonucleotide
  Sense strand starting at position 841 of SEQ ID NO: 1888088
caaguagaguucuuacaug

SEQ ID NO: 2509743 - RNA, 19 nt, Artificial Sequence
  Description of Artificial Sequence: Synthetic oligonucleotide
  Antisense strand to SEQ ID NO: 2509742
cauguaagaacucuacuug

SEQ ID NO: 2509744 - RNA, 19 nt, Artificial Sequence
  Description of Artificial Sequence: Synthetic oligonucleotide
  Sense strand starting at position 899 of SEQ ID NO: 1888088
gucuauauucuaggaauag

SEQ ID NO: 2509745 - RNA, 19 nt, Artificial Sequence
  Description of Artificial Sequence: Synthetic oligonucleotide
  Antisense strand to SEQ ID NO: 2509744
cuauuccuagaauauagac

SEQ ID NO: 2509746 - RNA, 19 nt, Artificial Sequence
  Description of Artificial Sequence: Synthetic oligonucleotide
  Sense strand starting at position 1003 of SEQ ID NO: 1888088
ugagguaugacguguaacu

SEQ ID NO: 2509747 - RNA, 19 nt, Artificial Sequence
  Description of Artificial Sequence: Synthetic oligonucleotide
  Antisense strand to SEQ ID NO: 2509746
aguuacacgucauaccuca

SEQ ID NO: 2509748 - RNA, 19 nt, Artificial Sequence
  Description of Artificial Sequence: Synthetic oligonucleotide
  Sense strand starting at position 1005 of SEQ ID NO: 1888088
agguaugacguguaacugu

SEQ ID NO: 2509749 - RNA, 19 nt, Artificial Sequence
  Description of Artificial Sequence: Synthetic oligonucleotide
  Antisense strand to SEQ ID NO: 2509748
acaguuacacgucauaccu

SEQ ID NO: 2509750 - RNA, 19 nt, Artificial Sequence
  Description of Artificial Sequence: Synthetic oligonucleotide
  Sense strand starting at position 1024 of SEQ ID NO: 1888088
uuuaccaucugggacauuu

SEQ ID NO: 2509751 - RNA, 19 nt, Artificial Sequence
  Description of Artificial Sequence: Synthetic oligonucleotide
  Antisense strand to SEQ ID NO: 2509750
aaaugucccagaugguaaa

SEQ ID NO: 2509752 - RNA, 19 nt, Artificial Sequence
  Description of Artificial Sequence: Synthetic oligonucleotide
  Sense strand starting at position 1499 of SEQ ID NO: 1888088
ggcucugaggcauaugauc

SEQ ID NO: 2509753 - RNA, 19 nt, Artificial Sequence
  Description of Artificial Sequence: Synthetic oligonucleotide
  Antisense strand to SEQ ID NO: 2509752
gaucauaugccucagagcc

SEQ ID NO: 2509754 - RNA, 19 nt, Artificial Sequence
  Description of Artificial Sequence: Synthetic oligonucleotide
  Sense strand starting at position 1504 of SEQ ID NO: 1888088
ugaggcauaugaucuaaga

SEQ ID NO: 2509755 - RNA, 19 nt, Artificial Sequence
  Description of Artificial Sequence: Synthetic oligonucleotide
  Antisense strand to SEQ ID NO: 2509754
ucuuagaucauaugccuca

SEQ ID NO: 2509756 - RNA, 19 nt, Artificial Sequence
  Description of Artificial Sequence: Synthetic oligonucleotide
  Sense strand starting at position 1569 of SEQ ID NO: 1888088
guauaagaaagguggacuu

SEQ ID NO: 2509757 - RNA, 19 nt, Artificial Sequence
  Description of Artificial Sequence: Synthetic oligonucleotide
  Antisense strand to SEQ ID NO: 2509756
aaguccaccuuucuuauac

SEQ ID NO: 2509758 - RNA, 19 nt, Artificial Sequence
  Description of Artificial Sequence: Synthetic oligonucleotide
  Sense strand starting at position 1747 of SEQ ID NO: 1888088
ucacgaguuacucacgagu

SEQ ID NO: 2509759 - RNA, 19 nt, Artificial Sequence
  Description of Artificial Sequence: Synthetic oligonucleotide
  Antisense strand to SEQ ID NO: 2509758
acucgugaguaacucguga

SEQ ID NO: 2509760 - RNA, 19 nt, Artificial Sequence
  Description of Artificial Sequence: Synthetic oligonucleotide
  Sense strand starting at position 2464 of SEQ ID NO: 1888088
guuccuuggacaggaaagu

SEQ ID NO: 2509761 - RNA, 19 nt, Artificial Sequence
  Description of Artificial Sequence: Synthetic oligonucleotide
  Antisense strand to SEQ ID NO: 2509760
acuuuccuguccaaggaac

SEQ ID NO: 2509762 - RNA, 19 nt, Artificial Sequence
  Description of Artificial Sequence: Synthetic oligonucleotide
  Sense strand starting at position 2493 of SEQ ID NO: 1888088
gcugccuuagcguuggaga

SEQ ID NO: 2509763 - RNA, 19 nt, Artificial Sequence
  Description of Artificial Sequence: Synthetic oligonucleotide
  Antisense strand to SEQ ID NO: 2509762
ucuccaacgcuaaggcagc

SEQ ID NO: 2509764 - RNA, 19 nt, Artificial Sequence
  Description of Artificial Sequence: Synthetic oligonucleotide
  Sense strand starting at position 2690 of SEQ ID NO: 1888088
guggaagaaccuuggcaua

SEQ ID NO: 2509765 - RNA, 19 nt, Artificial Sequence
  Description of Artificial Sequence: Synthetic oligonucleotide
  Antisense strand to SEQ ID NO: 2509764
uaugccaagguucuuccac

SEQ ID NO: 2509766 - RNA, 19 nt, Artificial Sequence
  Description of Artificial Sequence: Synthetic oligonucleotide
  Sense strand starting at position 2692 of SEQ ID NO: 1888088
ggaagaaccuuggcauaug

SEQ ID NO: 2509767 - RNA, 19 nt, Artificial Sequence
  Description of Artificial Sequence: Synthetic oligonucleotide
  Antisense strand to SEQ ID NO: 2509766
cauaugccaagguucuucc

SEQ ID NO: 2509768 - RNA, 19 nt, Artificial Sequence
  Description of Artificial Sequence: Synthetic oligonucleotide
  Sense strand starting at position 2884 of SEQ ID NO: 1888088
cccagagagucuuccgaga

SEQ ID NO: 2509769 - RNA, 19 nt, Artificial Sequence
  Description of Artificial Sequence: Synthetic oligonucleotide
  Antisense strand to SEQ ID NO: 2509768
ucucggaagacucucuggg

SEQ ID NO: 2509770 - RNA, 19 nt, Artificial Sequence
  Description of Artificial Sequence: Synthetic oligonucleotide
  Sense strand starting at position 2891 of SEQ ID NO: 1888088
agucuuccgagauggaaau

SEQ ID NO: 2509771 - RNA, 19 nt, Artificial Sequence
  Description of Artificial Sequence: Synthetic oligonucleotide
  Antisense strand to SEQ ID NO: 2509770
auuuccaucucggaagacu

SEQ ID NO: 2509772 - RNA, 19 nt, Artificial Sequence
  Description of Artificial Sequence: Synthetic oligonucleotide
  Sense strand starting at position 3037 of SEQ ID NO: 1888088
gcaggagaugcucaaaggu

SEQ ID NO: 2509773 - RNA, 19 nt, Artificial Sequence
  Description of Artificial Sequence: Synthetic oligonucleotide
  Antisense strand to SEQ ID NO: 2509772
accuuugagcaucuccugc

SEQ ID NO: 2509774 - RNA, 19 nt, Artificial Sequence
  Description of Artificial Sequence: Synthetic oligonucleotide
  Sense strand starting at position 3133 of SEQ ID NO: 1888088
ggcuaaacaugacuggauu

SEQ ID NO: 2509775 - RNA, 19 nt, Artificial Sequence
  Description of Artificial Sequence: Synthetic oligonucleotide
  Antisense strand to SEQ ID NO: 2509774
aauccagucauguuuagcc

SEQ ID NO: 2509776 - RNA, 19 nt, Artificial Sequence
  Description of Artificial Sequence: Synthetic oligonucleotide
  Sense strand starting at position 3244 of SEQ ID NO: 1888088
ucauuacccucagugacau

SEQ ID NO: 2509777 - RNA, 19 nt, Artificial Sequence
  Description of Artificial Sequence: Synthetic oligonucleotide
  Antisense strand to SEQ ID NO: 2509776
augucacugaggguaauga

SEQ ID NO: 2509778 - RNA, 19 nt, Artificial Sequence
  Description of Artificial Sequence: Synthetic oligonucleotide
  Sense strand starting at position 3350 of SEQ ID NO: 1888088
cgugucuaagcccauauuu

SEQ ID NO: 2509779 - RNA, 19 nt, Artificial Sequence
  Description of Artificial Sequence: Synthetic oligonucleotide
  Antisense strand to SEQ ID NO: 2509778
aaauaugggcuuagacacg

SEQ ID NO: 2509780 - RNA, 19 nt, Artificial Sequence
  Description of Artificial Sequence: Synthetic oligonucleotide
  Sense strand starting at position 3444 of SEQ ID NO: 1888088
gcaggagcuacuugagaga

SEQ ID NO: 2509781 - RNA, 19 nt, Artificial Sequence
  Description of Artificial Sequence: Synthetic oligonucleotide
  Antisense strand to SEQ ID NO: 2509780
ucucucaaguagcuccugc

SEQ ID NO: 2509782 - RNA, 19 nt, Artificial Sequence
  Description of Artificial Sequence: Synthetic oligonucleotide
  Sense strand starting at position 3608 of SEQ ID NO: 1888088
gcgggagucacuggauucu

SEQ ID NO: 2509783 - RNA, 19 nt, Artificial Sequence
  Description of Artificial Sequence: Synthetic oligonucleotide
  Antisense strand to SEQ ID NO: 2509782
agaauccagugacucccgc

SEQ ID NO: 2509784 - RNA, 19 nt, Artificial Sequence
  Description of Artificial Sequence: Synthetic oligonucleotide
  Sense strand starting at position 3711 of SEQ ID NO: 1888088
gguuauauguuagugacau

SEQ ID NO: 2509785 - RNA, 19 nt, Artificial Sequence
  Description of Artificial Sequence: Synthetic oligonucleotide
  Antisense strand to SEQ ID NO: 2509784
augucacuaacauauaacc

SEQ ID NO: 2509786 - RNA, 19 nt, Artificial Sequence
  Description of Artificial Sequence: Synthetic oligonucleotide
  Sense strand starting at position 3719 of SEQ ID NO: 1888088
guuagugacaucugggaag

SEQ ID NO: 2509787 - RNA, 19 nt, Artificial Sequence
  Description of Artificial Sequence: Synthetic oligonucleotide
  Antisense strand to SEQ ID NO: 2509786
cuucccagaugucacuaac

SEQ ID NO: 2509788 - RNA, 19 nt, Artificial Sequence
  Description of Artificial Sequence: Synthetic oligonucleotide
  Sense strand starting at position 3783 of SEQ ID NO: 1888088
ucagaucaucuggguagaa

SEQ ID NO: 2509789 - RNA, 19 nt, Artificial Sequence
  Description of Artificial Sequence: Synthetic oligonucleotide
  Antisense strand to SEQ ID NO: 2509788
uucuacccagaugaucuga

SEQ ID NO: 2509790 - RNA, 19 nt, Artificial Sequence
  Description of Artificial Sequence: Synthetic oligonucleotide
  Sense strand starting at position 3784 of SEQ ID NO: 1888088
cagaucaucuggguagaac

SEQ ID NO: 2509791 - RNA, 19 nt, Artificial Sequence
  Description of Artificial Sequence: Synthetic oligonucleotide
  Antisense strand to SEQ ID NO: 2509790
guucuacccagaugaucug

SEQ ID NO: 2509792 - RNA, 19 nt, Artificial Sequence
  Description of Artificial Sequence: Synthetic oligonucleotide
  Sense strand starting at position 3818 of SEQ ID NO: 1888088
ucgauaaugucccucaggu

SEQ ID NO: 2509793 - RNA, 19 nt, Artificial Sequence
  Description of Artificial Sequence: Synthetic oligonucleotide
  Antisense strand to SEQ ID NO: 2509792
accugagggacauuaucga

SEQ ID NO: 2509794 - RNA, 19 nt, Artificial Sequence
  Description of Artificial Sequence: Synthetic oligonucleotide
  Sense strand starting at position 3820 of SEQ ID NO: 1888088
gauaaugucccucagguga

SEQ ID NO: 2509795 - RNA, 19 nt, Artificial Sequence
  Description of Artificial Sequence: Synthetic oligonucleotide
  Antisense strand to SEQ ID NO: 2509794
ucaccugagggacauuauc

SEQ ID NO: 2509796 - RNA, 19 nt, Artificial Sequence
  Description of Artificial Sequence: Synthetic oligonucleotide
  Sense strand starting at position 3877 of SEQ ID NO: 1888088
cuaaguccuguuuaugaga

SEQ ID NO: 2509797 - RNA, 19 nt, Artificial Sequence
  Description of Artificial Sequence: Synthetic oligonucleotide
  Antisense strand to SEQ ID NO: 2509796
ucucauaaacaggacuuag

SEQ ID NO: 2509798 - RNA, 19 nt, Artificial Sequence
  Description of Artificial Sequence: Synthetic oligonucleotide
  Sense strand starting at position 3885 of SEQ ID NO: 1888088
uguuuaugagaauguugag

SEQ ID NO: 2509799 - RNA, 19 nt, Artificial Sequence
  Description of Artificial Sequence: Synthetic oligonucleotide
  Antisense strand to SEQ ID NO: 2509798
cucaacauucucauaaaca

SEQ ID NO: 2509800 - RNA, 19 nt, Artificial Sequence
  Description of Artificial Sequence: Synthetic oligonucleotide
  Sense strand starting at position 3905 of SEQ ID NO: 1888088
ccaugaaaugcuuagagca

SEQ ID NO: 2509801 - RNA, 19 nt, Artificial Sequence
  Description of Artificial Sequence: Synthetic oligonucleotide
  Antisense strand to SEQ ID NO: 2509800
ugcucuaagcauuucaugg

SEQ ID NO: 2509802 - RNA, 19 nt, Artificial Sequence
  Description of Artificial Sequence: Synthetic oligonucleotide
  Sense strand starting at position 259 of SEQ ID NO: 1888090
cccaaucaguauuucggua

SEQ ID NO: 2509803 - RNA, 19 nt, Artificial Sequence
  Description of Artificial Sequence: Synthetic oligonucleotide
  Antisense strand to SEQ ID NO: 2509802
uaccgaaauacugauuggg

SEQ ID NO: 2509804 - RNA, 19 nt, Artificial Sequence
  Description of Artificial Sequence: Synthetic oligonucleotide
  Sense strand starting at position 263 of SEQ ID NO: 1888090
aucaguauuucgguaucua

SEQ ID NO: 2509805 - RNA, 19 nt, Artificial Sequence
  Description of Artificial Sequence: Synthetic oligonucleotide
  Antisense strand to SEQ ID NO: 2509804
uagauaccgaaauacugau

SEQ ID NO: 2509806 - RNA, 19 nt, Artificial Sequence
  Description of Artificial Sequence: Synthetic oligonucleotide
  Sense strand starting at position 267 of SEQ ID NO: 1888090
guauuucgguaucuaucua

SEQ ID NO: 2509807 - RNA, 19 nt, Artificial Sequence
  Description of Artificial Sequence: Synthetic oligonucleotide
  Antisense strand to SEQ ID NO: 2509806
uagauagauaccgaaauac

SEQ ID NO: 2509808 - RNA, 19 nt, Artificial Sequence
  Description of Artificial Sequence: Synthetic oligonucleotide
  Sense strand starting at position 274 of SEQ ID NO: 1888090
gguaucuaucuaugacuau

SEQ ID NO: 2509809 - RNA, 19 nt, Artificial Sequence
  Description of Artificial Sequence: Synthetic oligonucleotide
  Antisense strand to SEQ ID NO: 2509808
auagucauagauagauacc

SEQ ID NO: 2509810 - RNA, 19 nt, Artificial Sequence
  Description of Artificial Sequence: Synthetic oligonucleotide
  Sense strand starting at position 305 of SEQ ID NO: 1888090
uccaucugucuaugacuca

SEQ ID NO: 2509811 - RNA, 19 nt, Artificial Sequence
  Description of Artificial Sequence: Synthetic oligonucleotide
  Antisense strand to SEQ ID NO: 2509810
ugagucauagacagaugga

SEQ ID NO: 2509812 - RNA, 19 nt, Artificial Sequence
  Description of Artificial Sequence: Synthetic oligonucleotide
  Sense strand starting at position 339 of SEQ ID NO: 1888090
auauacucgccacauagau

SEQ ID NO: 2509813 - RNA, 19 nt, Artificial Sequence
  Description of Artificial Sequence: Synthetic oligonucleotide
  Antisense strand to SEQ ID NO: 2509812
aucuauguggcgaguauau

SEQ ID NO: 2509814 - RNA, 19 nt, Artificial Sequence
  Description of Artificial Sequence: Synthetic oligonucleotide
  Sense strand starting at position 387 of SEQ ID NO: 1888090
uuauguauaugucuaccua

SEQ ID NO: 2509815 - RNA, 19 nt, Artificial Sequence
  Description of Artificial Sequence: Synthetic oligonucleotide
  Antisense strand to SEQ ID NO: 2509814
uagguagacauauacauaa

SEQ ID NO: 2509816 - RNA, 19 nt, Artificial Sequence
  Description of Artificial Sequence: Synthetic oligonucleotide
  Sense strand starting at position 510 of SEQ ID NO: 1888090
acucauuaucccugaaggu

SEQ ID NO: 2509817 - RNA, 19 nt, Artificial Sequence
  Description of Artificial Sequence: Synthetic oligonucleotide
  Antisense strand to SEQ ID NO: 2509816
accuucagggauaaugagu

SEQ ID NO: 2509818 - RNA, 19 nt, Artificial Sequence
  Description of Artificial Sequence: Synthetic oligonucleotide
  Sense strand starting at position 572 of SEQ ID NO: 1888090
ggugaacucuauucugauu

SEQ ID NO: 2509819 - RNA, 19 nt, Artificial Sequence
  Description of Artificial Sequence: Synthetic oligonucleotide
  Antisense strand to SEQ ID NO: 2509818
aaucagaauagaguucacc

SEQ ID NO: 2509820 - RNA, 19 nt, Artificial Sequence
  Description of Artificial Sequence: Synthetic oligonucleotide
  Sense strand starting at position 640 of SEQ ID NO: 1888090
gaaauuguacaugguguaa

SEQ ID NO: 2509821 - RNA, 19 nt, Artificial Sequence
  Description of Artificial Sequence: Synthetic oligonucleotide
  Antisense strand to SEQ ID NO: 2509820
uuacaccauguacaauuuc

SEQ ID NO: 2509822 - RNA, 19 nt, Artificial Sequence
  Description of Artificial Sequence: Synthetic oligonucleotide
  Sense strand starting at position 644 of SEQ ID NO: 1888090
uuguacaugguguaaucuu

SEQ ID NO: 2509823 - RNA, 19 nt, Artificial Sequence
  Description of Artificial Sequence: Synthetic oligonucleotide
  Antisense strand to SEQ ID NO: 2509822
aagauuacaccauguacaa

SEQ ID NO: 2509824 - RNA, 19 nt, Artificial Sequence
  Description of Artificial Sequence: Synthetic oligonucleotide
  Sense strand starting at position 735 of SEQ ID NO: 1888090
cgaauaauuugacaagauc

SEQ ID NO: 2509825 - RNA, 19 nt, Artificial Sequence
  Description of Artificial Sequence: Synthetic oligonucleotide
  Antisense strand to SEQ ID NO: 2509824
gaucuugucaaauuauucg

SEQ ID NO: 2509826 - RNA, 19 nt, Artificial Sequence
  Description of Artificial Sequence: Synthetic oligonucleotide
  Sense strand starting at position 743 of SEQ ID NO: 1888090
uugacaagaucuuugcaaa

SEQ ID NO: 2509827 - RNA, 19 nt, Artificial Sequence
  Description of Artificial Sequence: Synthetic oligonucleotide
  Antisense strand to SEQ ID NO: 2509826
uuugcaaagaucuugucaa

SEQ ID NO: 2509828 - RNA, 19 nt, Artificial Sequence
  Description of Artificial Sequence: Synthetic oligonucleotide
  Sense strand starting at position 744 of SEQ ID NO: 1888090
ugacaagaucuuugcaaac

SEQ ID NO: 2509829 - RNA, 19 nt, Artificial Sequence
  Description of Artificial Sequence: Synthetic oligonucleotide
  Antisense strand to SEQ ID NO: 2509828
guuugcaaagaucuuguca

SEQ ID NO: 2509830 - RNA, 19 nt, Artificial Sequence
  Description of Artificial Sequence: Synthetic oligonucleotide
  Sense strand starting at position 788 of SEQ ID NO: 1888090
uucucugauguguauguaa

SEQ ID NO: 2509831 - RNA, 19 nt, Artificial Sequence
  Description of Artificial Sequence: Synthetic oligonucleotide
  Antisense strand to SEQ ID NO: 2509830
uuacauacacaucagagaa

SEQ ID NO: 2509832 - RNA, 19 nt, Artificial Sequence
  Description of Artificial Sequence: Synthetic oligonucleotide
  Sense strand starting at position 791 of SEQ ID NO: 1888090
ucugauguguauguaaaua

SEQ ID NO: 2509833 - RNA, 19 nt, Artificial Sequence
  Description of Artificial Sequence: Synthetic oligonucleotide
  Antisense strand to SEQ ID NO: 2509832
uauuuacauacacaucaga

SEQ ID NO: 2509834 - RNA, 19 nt, Artificial Sequence
  Description of Artificial Sequence: Synthetic oligonucleotide
  Sense strand starting at position 939 of SEQ ID NO: 1888090
cuuguuuagcauugauaaa

SEQ ID NO: 2509835 - RNA, 19 nt, Artificial Sequence
  Description of Artificial Sequence: Synthetic oligonucleotide
  Antisense strand to SEQ ID NO: 2509834
uuuaucaaugcuaaacaag

SEQ ID NO: 2509836 - RNA, 19 nt, Artificial Sequence
  Description of Artificial Sequence: Synthetic oligonucleotide
  Sense strand starting at position 1107 of SEQ ID NO: 1888090
cuuaguaggccucacaaua

SEQ ID NO: 2509837 - RNA, 19 nt, Artificial Sequence
  Description of Artificial Sequence: Synthetic oligonucleotide
  Antisense strand to SEQ ID NO: 2509836
uauugugaggccuacuaag

SEQ ID NO: 2509838 - RNA, 19 nt, Artificial Sequence
  Description of Artificial Sequence: Synthetic oligonucleotide
  Sense strand starting at position 1120 of SEQ ID NO: 1888090
acaauaguguguccacaau

SEQ ID NO: 2509839 - RNA, 19 nt, Artificial Sequence
  Description of Artificial Sequence: Synthetic oligonucleotide
  Antisense strand to SEQ ID NO: 2509838
auuguggacacacuauugu

SEQ ID NO: 2509840 - RNA, 19 nt, Artificial Sequence
  Description of Artificial Sequence: Synthetic oligonucleotide
  Sense strand starting at position 1142 of SEQ ID NO: 1888090
gguuagugggagugauuga

SEQ ID NO: 2509841 - RNA, 19 nt, Artificial Sequence
  Description of Artificial Sequence: Synthetic oligonucleotide
  Antisense strand to SEQ ID NO: 2509840
ucaaucacucccacuaacc

SEQ ID NO: 2509842 - RNA, 19 nt, Artificial Sequence
  Description of Artificial Sequence: Synthetic oligonucleotide
  Sense strand starting at position 1143 of SEQ ID NO: 1888090
guuagugggagugauugaa

SEQ ID NO: 2509843 - RNA, 19 nt, Artificial Sequence
  Description of Artificial Sequence: Synthetic oligonucleotide
  Antisense strand to SEQ ID NO: 2509842
uucaaucacucccacuaac

SEQ ID NO: 2509844 - RNA, 19 nt, Artificial Sequence
  Description of Artificial Sequence: Synthetic oligonucleotide
  Sense strand starting at position 1149 of SEQ ID NO: 1888090
gggagugauugaaaggcuu

SEQ ID NO: 2509845 - RNA, 19 nt, Artificial Sequence
  Description of Artificial Sequence: Synthetic oligonucleotide
  Antisense strand to SEQ ID NO: 2509844
aagccuuucaaucacuccc

SEQ ID NO: 2509846 - RNA, 19 nt, Artificial Sequence
  Description of Artificial Sequence: Synthetic oligonucleotide
  Sense strand starting at position 1156 of SEQ ID NO: 1888090
auugaaaggcuuggagagu

SEQ ID NO: 2509847 - RNA, 19 nt, Artificial Sequence
  Description of Artificial Sequence: Synthetic oligonucleotide
  Antisense strand to SEQ ID NO: 2509846
acucuccaagccuuucaau

SEQ ID NO: 2509848 - RNA, 19 nt, Artificial Sequence
  Description of Artificial Sequence: Synthetic oligonucleotide
  Sense strand starting at position 1248 of SEQ ID NO: 1888090
gugaaagugacauguuccu

SEQ ID NO: 2509849 - RNA, 19 nt, Artificial Sequence
  Description of Artificial Sequence: Synthetic oligonucleotide
  Antisense strand to SEQ ID NO: 2509848
aggaacaugucacuuucac

SEQ ID NO: 2509850 - RNA, 19 nt, Artificial Sequence
  Description of Artificial Sequence: Synthetic oligonucleotide
  Sense strand starting at position 1253 of SEQ ID NO: 1888090
agugacauguuccuccaga

SEQ ID NO: 2509851 - RNA, 19 nt, Artificial Sequence
  Description of Artificial Sequence: Synthetic oligonucleotide
  Antisense strand to SEQ ID NO: 2509850
ucuggaggaacaugucacu

SEQ ID NO: 2509852 - RNA, 19 nt, Artificial Sequence
  Description of Artificial Sequence: Synthetic oligonucleotide
  Sense strand starting at position 1254 of SEQ ID NO: 1888090
gugacauguuccuccagaa

SEQ ID NO: 2509853 - RNA, 19 nt, Artificial Sequence
  Description of Artificial Sequence: Synthetic oligonucleotide
  Antisense strand to SEQ ID NO: 2509852
uucuggaggaacaugucac

SEQ ID NO: 2509854 - RNA, 19 nt, Artificial Sequence
  Description of Artificial Sequence: Synthetic oligonucleotide
  Sense strand starting at position 1306 of SEQ ID NO: 1888090
cuguauucccuagacuuag

SEQ ID NO: 2509855 - RNA, 19 nt, Artificial Sequence
  Description of Artificial Sequence: Synthetic oligonucleotide
  Antisense strand to SEQ ID NO: 2509854
cuaagucuagggaauacag

SEQ ID NO: 2509856 - RNA, 19 nt, Artificial Sequence
  Description of Artificial Sequence: Synthetic oligonucleotide
  Sense strand starting at position 1402 of SEQ ID NO: 1888090
ggaacuacguuucccagaa

SEQ ID NO: 2509857 - RNA, 19 nt, Artificial Sequence
  Description of Artificial Sequence: Synthetic oligonucleotide
  Antisense strand to SEQ ID NO: 2509856
uucugggaaacguaguucc

SEQ ID NO: 2509858 - RNA, 19 nt, Artificial Sequence
  Description of Artificial Sequence: Synthetic oligonucleotide
  Sense strand starting at position 1403 of SEQ ID NO: 1888090
gaacuacguuucccagaau

SEQ ID NO: 2509859 - RNA, 19 nt, Artificial Sequence
  Description of Artificial Sequence: Synthetic oligonucleotide
  Antisense strand to SEQ ID NO: 2509858
auucugggaaacguaguuc

SEQ ID NO: 2509860 - RNA, 19 nt, Artificial Sequence
  Description of Artificial Sequence: Synthetic oligonucleotide
  Sense strand starting at position 3537 of SEQ ID NO: 1888090
gccagauuccugcagugau

SEQ ID NO: 2509861 - RNA, 19 nt, Artificial Sequence
  Description of Artificial Sequence: Synthetic oligonucleotide
  Antisense strand to SEQ ID NO: 2509860
aucacugcaggaaucuggc

SEQ ID NO: 2509862 - RNA, 19 nt, Artificial Sequence
  Description of Artificial Sequence: Synthetic oligonucleotide
  Sense strand starting at position 3540 of SEQ ID NO: 1888090
agauuccugcagugaugau

SEQ ID NO: 2509863 - RNA, 19 nt, Artificial Sequence
  Description of Artificial Sequence: Synthetic oligonucleotide
  Antisense strand to SEQ ID NO: 2509862
aucaucacugcaggaaucu

SEQ ID NO: 2509864 - RNA, 19 nt, Artificial Sequence
  Description of Artificial Sequence: Synthetic oligonucleotide
  Sense strand starting at position 3553 of SEQ ID NO: 1888090
gaugauaucugggaaggaa

SEQ ID NO: 2509865 - RNA, 19 nt, Artificial Sequence
  Description of Artificial Sequence: Synthetic oligonucleotide
  Antisense strand to SEQ ID NO: 2509864
uuccuucccagauaucauc

SEQ ID NO: 2509866 - RNA, 19 nt, Artificial Sequence
  Description of Artificial Sequence: Synthetic oligonucleotide
  Sense strand starting at position 3609 of SEQ ID NO: 1888090
ucaaaugaguuacugggau

SEQ ID NO: 2509867 - RNA, 19 nt, Artificial Sequence
  Description of Artificial Sequence: Synthetic oligonucleotide
  Antisense strand to SEQ ID NO: 2509866
aucccaguaacucauuuga

SEQ ID NO: 2509868 - RNA, 19 nt, Artificial Sequence
  Description of Artificial Sequence: Synthetic oligonucleotide
  Sense strand starting at position 3611 of SEQ ID NO: 1888090
aaaugaguuacugggaugu

SEQ ID NO: 2509869 - RNA, 19 nt, Artificial Sequence
  Description of Artificial Sequence: Synthetic oligonucleotide
  Antisense strand to SEQ ID NO: 2509868
acaucccaguaacucauuu

SEQ ID NO: 2509870 - RNA, 19 nt, Artificial Sequence
  Description of Artificial Sequence: Synthetic oligonucleotide
  Sense strand starting at position 3634 of SEQ ID NO: 1888090
aauauauucgcacaugagu

SEQ ID NO: 2509871 - RNA, 19 nt, Artificial Sequence
  Description of Artificial Sequence: Synthetic oligonucleotide
  Antisense strand to SEQ ID NO: 2509870
acucaugugcgaauauauu

SEQ ID NO: 2509872 - RNA, 19 nt, Artificial Sequence
  Description of Artificial Sequence: Synthetic oligonucleotide
  Sense strand starting at position 3654 of SEQ ID NO: 1888090
ugguacaguucggugauuu

SEQ ID NO: 2509873 - RNA, 19 nt, Artificial Sequence
  Description of Artificial Sequence: Synthetic oligonucleotide
  Antisense strand to SEQ ID NO: 2509872
aaaucaccgaacuguacca

SEQ ID NO: 2509874 - RNA, 19 nt, Artificial Sequence
  Description of Artificial Sequence: Synthetic oligonucleotide
  Sense strand starting at position 3746 of SEQ ID NO: 1888090
auuauuggucccgacucuu

SEQ ID NO: 2509875 - RNA, 19 nt, Artificial Sequence
  Description of Artificial Sequence: Synthetic oligonucleotide
  Antisense strand to SEQ ID NO: 2509874
aagagucgggaccaauaau

SEQ ID NO: 2509876 - RNA, 19 nt, Artificial Sequence
  Description of Artificial Sequence: Synthetic oligonucleotide
  Sense strand starting at position 3795 of SEQ ID NO: 1888090
guggccucucacuaugaca

SEQ ID NO: 2509877 - RNA, 19 nt, Artificial Sequence
  Description of Artificial Sequence: Synthetic oligonucleotide
  Antisense strand to SEQ ID NO: 2509876
ugucauagugagaggccac

SEQ ID NO: 2509878 - RNA, 19 nt, Artificial Sequence
  Description of Artificial Sequence: Synthetic oligonucleotide
  Sense strand starting at position 3968 of SEQ ID NO: 1888090
ccacuauugccacagcuga

SEQ ID NO: 2509879 - RNA, 19 nt, Artificial Sequence
  Description of Artificial Sequence: Synthetic oligonucleotide
  Antisense strand to SEQ ID NO: 2509878
ucagcuguggcaauagugg

SEQ ID NO: 2509880 - RNA, 19 nt, Artificial Sequence
  Description of Artificial Sequence: Synthetic oligonucleotide
  Sense strand starting at position 3981 of SEQ ID NO: 1888090
agcugaugauaagucagau

SEQ ID NO: 2509881 - RNA, 19 nt, Artificial Sequence
  Description of Artificial Sequence: Synthetic oligonucleotide
  Antisense strand to SEQ ID NO: 2509880
aucugacuuaucaucagcu

SEQ ID NO: 2509882 - RNA, 19 nt, Artificial Sequence
  Description of Artificial Sequence: Synthetic oligonucleotide
  Sense strand starting at position 52 of SEQ ID NO: 1888089
ugcagucaucaucaugaga

SEQ ID NO: 2509883 - RNA, 19 nt, Artificial Sequence
  Description of Artificial Sequence: Synthetic oligonucleotide
  Antisense strand to SEQ ID NO: 2509882
ucucaugaugaugacugca

SEQ ID NO: 2509884 - RNA, 19 nt, Artificial Sequence
  Description of Artificial Sequence: Synthetic oligonucleotide
  Sense strand starting at position 198 of SEQ ID NO: 1888089
ucagaucaccacugaguuu

SEQ ID NO: 2509885 - RNA, 19 nt, Artificial Sequence
  Description of Artificial Sequence: Synthetic oligonucleotide
  Antisense strand to SEQ ID NO: 2509884
aaacucaguggugaucuga

SEQ ID NO: 2509886 - RNA, 19 nt, Artificial Sequence
  Description of Artificial Sequence: Synthetic oligonucleotide
  Sense strand starting at position 217 of SEQ ID NO: 1888089
ugugguggucuguuaugca

SEQ ID NO: 2509887 - RNA, 19 nt, Artificial Sequence
  Description of Artificial Sequence: Synthetic oligonucleotide
  Antisense strand to SEQ ID NO: 2509886
ugcauaacagaccaccaca

SEQ ID NO: 2509888 - RNA, 19 nt, Artificial Sequence
  Description of Artificial Sequence: Synthetic oligonucleotide
  Sense strand starting at position 287 of SEQ ID NO: 1888089
agaggaggauucuuagcgu

SEQ ID NO: 2509889 - RNA, 19 nt, Artificial Sequence
  Description of Artificial Sequence: Synthetic oligonucleotide
  Antisense strand to SEQ ID NO: 2509888
acgcuaagaauccuccucu

SEQ ID NO: 2509890 - RNA, 19 nt, Artificial Sequence
  Description of Artificial Sequence: Synthetic oligonucleotide
  Sense strand starting at position 334 of SEQ ID NO: 1888089
ggcuuaggguagucacaua

SEQ ID NO: 2509891 - RNA, 19 nt, Artificial Sequence
  Description of Artificial Sequence: Synthetic oligonucleotide
  Antisense strand to SEQ ID NO: 2509890
uaugugacuacccuaagcc

SEQ ID NO: 2509892 - RNA, 19 nt, Artificial Sequence
  Description of Artificial Sequence: Synthetic oligonucleotide
  Sense strand starting at position 339 of SEQ ID NO: 1888089
aggguagucacauagcaag

SEQ ID NO: 2509893 - RNA, 19 nt, Artificial Sequence
  Description of Artificial Sequence: Synthetic oligonucleotide
  Antisense strand to SEQ ID NO: 2509892
cuugcuaugugacuacccu

SEQ ID NO: 2509894 - RNA, 19 nt, Artificial Sequence
  Description of Artificial Sequence: Synthetic oligonucleotide
  Sense strand starting at position 384 of SEQ ID NO: 1888089
gcucaucagguugauugua

SEQ ID NO: 2509895 - RNA, 19 nt, Artificial Sequence
  Description of Artificial Sequence: Synthetic oligonucleotide
  Antisense strand to SEQ ID NO: 2509894
uacaaucaaccugaugagc

SEQ ID NO: 2509896 - RNA, 19 nt, Artificial Sequence
  Description of Artificial Sequence: Synthetic oligonucleotide
  Sense strand starting at position 386 of SEQ ID NO: 1888089
ucaucagguugauuguaua

SEQ ID NO: 2509897 - RNA, 19 nt, Artificial Sequence
  Description of Artificial Sequence: Synthetic oligonucleotide
  Antisense strand to SEQ ID NO: 2509896
uauacaaucaaccugauga

SEQ ID NO: 2509898 - RNA, 19 nt, Artificial Sequence
  Description of Artificial Sequence: Synthetic oligonucleotide
  Sense strand starting at position 412 of SEQ ID NO: 1888089
auuuaaagguuagagugaa

SEQ ID NO: 2509899 - RNA, 19 nt, Artificial Sequence
  Description of Artificial Sequence: Synthetic oligonucleotide
  Antisense strand to SEQ ID NO: 2509898
uucacucuaaccuuuaaau

SEQ ID NO: 2509900 - RNA, 19 nt, Artificial Sequence
  Description of Artificial Sequence: Synthetic oligonucleotide
  Sense strand starting at position 452 of SEQ ID NO: 1888089
ucuggacugucuguugaua

SEQ ID NO: 2509901 - RNA, 19 nt, Artificial Sequence
  Description of Artificial Sequence: Synthetic oligonucleotide
  Antisense strand to SEQ ID NO: 2509900
uaucaacagacaguccaga

SEQ ID NO: 2509902 - RNA, 19 nt, Artificial Sequence
  Description of Artificial Sequence: Synthetic oligonucleotide
  Sense strand starting at position 861 of SEQ ID NO: 1888089
cccaaucaguauuucggua

SEQ ID NO: 2509903 - RNA, 19 nt, Artificial Sequence
  Description of Artificial Sequence: Synthetic oligonucleotide
  Antisense strand to SEQ ID NO: 2509902
uaccgaaauacugauuggg

SEQ ID NO: 2509904 - RNA, 19 nt, Artificial Sequence
  Description of Artificial Sequence: Synthetic oligonucleotide
  Sense strand starting at position 865 of SEQ ID NO: 1888089
aucaguauuucgguaucua

SEQ ID NO: 2509905 - RNA, 19 nt, Artificial Sequence
  Description of Artificial Sequence: Synthetic oligonucleotide
  Antisense strand to SEQ ID NO: 2509904
uagauaccgaaauacugau

SEQ ID NO: 2509906 - RNA, 19 nt, Artificial Sequence
  Description of Artificial Sequence: Synthetic oligonucleotide
  Sense strand starting at position 869 of SEQ ID NO: 1888089
guauuucgguaucuaucua

SEQ ID NO: 2509907 - RNA, 19 nt, Artificial Sequence
  Description of Artificial Sequence: Synthetic oligonucleotide
  Antisense strand to SEQ ID NO: 2509906
uagauagauaccgaaauac

SEQ ID NO: 2509908 - RNA, 19 nt, Artificial Sequence
  Description of Artificial Sequence: Synthetic oligonucleotide
  Sense strand starting at position 876 of SEQ ID NO: 1888089
gguaucuaucuaugacuau

SEQ ID NO: 2509909 - RNA, 19 nt, Artificial Sequence
  Description of Artificial Sequence: Synthetic oligonucleotide
  Antisense strand to SEQ ID NO: 2509908
auagucauagauagauacc

SEQ ID NO: 2509910 - RNA, 19 nt, Artificial Sequence
  Description of Artificial Sequence: Synthetic oligonucleotide
  Sense strand starting at position 907 of SEQ ID NO: 1888089
uccaucugucuaugacuca

SEQ ID NO: 2509911 - RNA, 19 nt, Artificial Sequence
  Description of Artificial Sequence: Synthetic oligonucleotide
  Antisense strand to SEQ ID NO: 2509910
ugagucauagacagaugga

SEQ ID NO: 2509912 - RNA, 19 nt, Artificial Sequence
  Description of Artificial Sequence: Synthetic oligonucleotide
  Sense strand starting at position 941 of SEQ ID NO: 1888089
auauacucgccacauagau

SEQ ID NO: 2509913 - RNA, 19 nt, Artificial Sequence
  Description of Artificial Sequence: Synthetic oligonucleotide
  Antisense strand to SEQ ID NO: 2509912
aucuauguggcgaguauau

SEQ ID NO: 2509914 - RNA, 19 nt, Artificial Sequence
  Description of Artificial Sequence: Synthetic oligonucleotide
  Sense strand starting at position 989 of SEQ ID NO: 1888089
uuauguauaugucuaccua

SEQ ID NO: 2509915 - RNA, 19 nt, Artificial Sequence
  Description of Artificial Sequence: Synthetic oligonucleotide
  Antisense strand to SEQ ID NO: 2509914
uagguagacauauacauaa

SEQ ID NO: 2509916 - RNA, 19 nt, Artificial Sequence
  Description of Artificial Sequence: Synthetic oligonucleotide
  Sense strand starting at position 1112 of SEQ ID NO: 1888089
acucauuaucccugaaggu

SEQ ID NO: 2509917 - RNA, 19 nt, Artificial Sequence
  Description of Artificial Sequence: Synthetic oligonucleotide
  Antisense strand to SEQ ID NO: 2509916
accuucagggauaaugagu

SEQ ID NO: 2509918 - RNA, 19 nt, Artificial Sequence
  Description of Artificial Sequence: Synthetic oligonucleotide
  Sense strand starting at position 1174 of SEQ ID NO: 1888089
ggugaacucuauucugauu

SEQ ID NO: 2509919 - RNA, 19 nt, Artificial Sequence
  Description of Artificial Sequence: Synthetic oligonucleotide
  Antisense strand to SEQ ID NO: 2509918
aaucagaauagaguucacc

SEQ ID NO: 2509920 - RNA, 19 nt, Artificial Sequence
  Description of Artificial Sequence: Synthetic oligonucleotide
  Sense strand starting at position 1242 of SEQ ID NO: 1888089
gaaauuguacaugguguaa

SEQ ID NO: 2509921 - RNA, 19 nt, Artificial Sequence
  Description of Artificial Sequence: Synthetic oligonucleotide
  Antisense strand to SEQ ID NO: 2509920
uuacaccauguacaauuuc

SEQ ID NO: 2509922 - RNA, 19 nt, Artificial Sequence
  Description of Artificial Sequence: Synthetic oligonucleotide
  Sense strand starting at position 1246 of SEQ ID NO: 1888089
uuguacaugguguaaucuu

SEQ ID NO: 2509923 - RNA, 19 nt, Artificial Sequence
  Description of Artificial Sequence: Synthetic oligonucleotide
  Antisense strand to SEQ ID NO: 2509922
aagauuacaccauguacaa

SEQ ID NO: 2509924 - RNA, 19 nt, Artificial Sequence
  Description of Artificial Sequence: Synthetic oligonucleotide
  Sense strand starting at position 1337 of SEQ ID NO: 1888089
cgaauaauuugacaagauc

SEQ ID NO: 2509925 - RNA, 19 nt, Artificial Sequence
  Description of Artificial Sequence: Synthetic oligonucleotide
  Antisense strand to SEQ ID NO: 2509924
gaucuugucaaauuauucg

SEQ ID NO: 2509926 - RNA, 19 nt, Artificial Sequence
  Description of Artificial Sequence: Synthetic oligonucleotide
  Sense strand starting at position 1345 of SEQ ID NO: 1888089
uugacaagaucuuugcaaa

SEQ ID NO: 2509927 - RNA, 19 nt, Artificial Sequence
  Description of Artificial Sequence: Synthetic oligonucleotide
  Antisense strand to SEQ ID NO: 2509926
uuugcaaagaucuugucaa

SEQ ID NO: 2509928 - RNA, 19 nt, Artificial Sequence
  Description of Artificial Sequence: Synthetic oligonucleotide
  Sense strand starting at position 1346 of SEQ ID NO: 1888089
ugacaagaucuuugcaaac

SEQ ID NO: 2509929 - RNA, 19 nt, Artificial Sequence
  Description of Artificial Sequence: Synthetic oligonucleotide
  Antisense strand to SEQ ID NO: 2509928
guuugcaaagaucuuguca

SEQ ID NO: 2509930 - RNA, 19 nt, Artificial Sequence
  Description of Artificial Sequence: Synthetic oligonucleotide
  Sense strand starting at position 1390 of SEQ ID NO: 1888089
uucucugauguguauguaa

SEQ ID NO: 2509931 - RNA, 19 nt, Artificial Sequence
  Description of Artificial Sequence: Synthetic oligonucleotide
  Antisense strand to SEQ ID NO: 2509930
uuacauacacaucagagaa

SEQ ID NO: 2509932 - RNA, 19 nt, Artificial Sequence
  Description of Artificial Sequence: Synthetic oligonucleotide
  Sense strand starting at position 1393 of SEQ ID NO: 1888089
ucugauguguauguaaaua

SEQ ID NO: 2509933 - RNA, 19 nt, Artificial Sequence
  Description of Artificial Sequence: Synthetic oligonucleotide
  Antisense strand to SEQ ID NO: 2509932
uauuuacauacacaucaga

SEQ ID NO: 2509934 - RNA, 19 nt, Artificial Sequence
  Description of Artificial Sequence: Synthetic oligonucleotide
  Sense strand starting at position 1541 of SEQ ID NO: 1888089
cuuguuuagcauugauaaa

SEQ ID NO: 2509935 - RNA, 19 nt, Artificial Sequence
  Description of Artificial Sequence: Synthetic oligonucleotide
  Antisense strand to SEQ ID NO: 2509934
uuuaucaaugcuaaacaag

SEQ ID NO: 2509936 - RNA, 19 nt, Artificial Sequence
  Description of Artificial Sequence: Synthetic oligonucleotide
  Sense strand starting at position 1709 of SEQ ID NO: 1888089
cuuaguaggccucacaaua

SEQ ID NO: 2509937 - RNA, 19 nt, Artificial Sequence
  Description of Artificial Sequence: Synthetic oligonucleotide
  Antisense strand to SEQ ID NO: 2509936
uauugugaggccuacuaag

SEQ ID NO: 2509938 - RNA, 19 nt, Artificial Sequence
  Description of Artificial Sequence: Synthetic oligonucleotide
  Sense strand starting at position 1720 of SEQ ID NO: 1888089
ucacaauaguguguccaca

SEQ ID NO: 2509939 - RNA, 19 nt, Artificial Sequence
  Description of Artificial Sequence: Synthetic oligonucleotide
  Antisense strand to SEQ ID NO: 2509938
uguggacacacuauuguga

SEQ ID NO: 2509940 - RNA, 19 nt, Artificial Sequence
  Description of Artificial Sequence: Synthetic oligonucleotide
  Sense strand starting at position 1722 of SEQ ID NO: 1888089
acaauaguguguccacaau

SEQ ID NO: 2509941 - RNA, 19 nt, Artificial Sequence
  Description of Artificial Sequence: Synthetic oligonucleotide
  Antisense strand to SEQ ID NO: 2509940
auuguggacacacuauugu

SEQ ID NO: 2509942 - RNA, 19 nt, Artificial Sequence
  Description of Artificial Sequence: Synthetic oligonucleotide
  Sense strand starting at position 1744 of SEQ ID NO: 1888089
gguuagugggagugauuga

SEQ ID NO: 2509943 - RNA, 19 nt, Artificial Sequence
  Description of Artificial Sequence: Synthetic oligonucleotide
  Antisense strand to SEQ ID NO: 2509942
ucaaucacucccacuaacc

SEQ ID NO: 2509944 - RNA, 19 nt, Artificial Sequence
  Description of Artificial Sequence: Synthetic oligonucleotide
  Sense strand starting at position 1745 of SEQ ID NO: 1888089
guuagugggagugauugaa

SEQ ID NO: 2509945 - RNA, 19 nt, Artificial Sequence
  Description of Artificial Sequence: Synthetic oligonucleotide
  Antisense strand to SEQ ID NO: 2509944
uucaaucacucccacuaac

SEQ ID NO: 2509946 - RNA, 19 nt, Artificial Sequence
  Description of Artificial Sequence: Synthetic oligonucleotide
  Sense strand starting at position 1751 of SEQ ID NO: 1888089
gggagugauugaaaggcuu

SEQ ID NO: 2509947 - RNA, 19 nt, Artificial Sequence
  Description of Artificial Sequence: Synthetic oligonucleotide
  Antisense strand to SEQ ID NO: 2509946
aagccuuucaaucacuccc

SEQ ID NO: 2509948 - RNA, 19 nt, Artificial Sequence
  Description of Artificial Sequence: Synthetic oligonucleotide
  Sense strand starting at position 1758 of SEQ ID NO: 1888089
auugaaaggcuuggagagu

SEQ ID NO: 2509949 - RNA, 19 nt, Artificial Sequence
  Description of Artificial Sequence: Synthetic oligonucleotide
  Antisense strand to SEQ ID NO: 2509948
acucuccaagccuuucaau

SEQ ID NO: 2509950 - RNA, 19 nt, Artificial Sequence
  Description of Artificial Sequence: Synthetic oligonucleotide
  Sense strand starting at position 1850 of SEQ ID NO: 1888089
gugaaagugacauguuccu

SEQ ID NO: 2509951 - RNA, 19 nt, Artificial Sequence
  Description of Artificial Sequence: Synthetic oligonucleotide
  Antisense strand to SEQ ID NO: 2509950
aggaacaugucacuuucac

SEQ ID NO: 2509952 - RNA, 19 nt, Artificial Sequence
  Description of Artificial Sequence: Synthetic oligonucleotide
  Sense strand starting at position 1855 of SEQ ID NO: 1888089
agugacauguuccuccaga

SEQ ID NO: 2509953 - RNA, 19 nt, Artificial Sequence
  Description of Artificial Sequence: Synthetic oligonucleotide
  Antisense strand to SEQ ID NO: 2509952
ucuggaggaacaugucacu

SEQ ID NO: 2509954 - RNA, 19 nt, Artificial Sequence
  Description of Artificial Sequence: Synthetic oligonucleotide
  Sense strand starting at position 1856 of SEQ ID NO: 1888089
gugacauguuccuccagaa

SEQ ID NO: 2509955 - RNA, 19 nt, Artificial Sequence
  Description of Artificial Sequence: Synthetic oligonucleotide
  Antisense strand to SEQ ID NO: 2509954
uucuggaggaacaugucac

SEQ ID NO: 2509956 - RNA, 19 nt, Artificial Sequence
  Description of Artificial Sequence: Synthetic oligonucleotide
  Sense strand starting at position 1908 of SEQ ID NO: 1888089
cuguauucccuagacuuag

SEQ ID NO: 2509957 - RNA, 19 nt, Artificial Sequence
  Description of Artificial Sequence: Synthetic oligonucleotide
  Antisense strand to SEQ ID NO: 2509956
cuaagucuagggaauacag

SEQ ID NO: 2509958 - RNA, 19 nt, Artificial Sequence
  Description of Artificial Sequence: Synthetic oligonucleotide
  Sense strand starting at position 2004 of SEQ ID NO: 1888089
ggaacuacguuucccagaa

SEQ ID NO: 2509959 - RNA, 19 nt, Artificial Sequence
  Description of Artificial Sequence: Synthetic oligonucleotide
  Antisense strand to SEQ ID NO: 2509958
uucugggaaacguaguucc

SEQ ID NO: 2509960 - RNA, 19 nt, Artificial Sequence
  Description of Artificial Sequence: Synthetic oligonucleotide
  Sense strand starting at position 2005 of SEQ ID NO: 1888089
gaacuacguuucccagaau

SEQ ID NO: 2509961 - RNA, 19 nt, Artificial Sequence
  Description of Artificial Sequence: Synthetic oligonucleotide
  Antisense strand to SEQ ID NO: 2509960
auucugggaaacguaguuc

SEQ ID NO: 2509962 - RNA, 19 nt, Artificial Sequence
  Description of Artificial Sequence: Synthetic oligonucleotide
  Sense strand starting at position 12 of SEQ ID NO: 1888091
acugacauuuguugagaac

SEQ ID NO: 2509963 - RNA, 19 nt, Artificial Sequence
  Description of Artificial Sequence: Synthetic oligonucleotide
  Antisense strand to SEQ ID NO: 2509962
guucucaacaaaugucagu

SEQ ID NO: 2509964 - RNA, 19 nt, Artificial Sequence
  Description of Artificial Sequence: Synthetic oligonucleotide
  Sense strand starting at position 239 of SEQ ID NO: 1888091
gggauuaaugccugugugu

SEQ ID NO: 2509965 - RNA, 19 nt, Artificial Sequence
  Description of Artificial Sequence: Synthetic oligonucleotide
  Antisense strand to SEQ ID NO: 2509964
acacacaggcauuaauccc

SEQ ID NO: 2509966 - RNA, 19 nt, Artificial Sequence
  Description of Artificial Sequence: Synthetic oligonucleotide
  Sense strand starting at position 250 of SEQ ID NO: 1888091
cuguguguccuuguuccau

SEQ ID NO: 2509967 - RNA, 19 nt, Artificial Sequence
  Description of Artificial Sequence: Synthetic oligonucleotide
  Antisense strand to SEQ ID NO: 2509966
auggaacaaggacacacag

SEQ ID NO: 2509968 - RNA, 19 nt, Artificial Sequence
  Description of Artificial Sequence: Synthetic oligonucleotide
  Sense strand starting at position 1203 of SEQ ID NO: 1888091
aggacucugugcuuucuua

SEQ ID NO: 2509969 - RNA, 19 nt, Artificial Sequence
  Description of Artificial Sequence: Synthetic oligonucleotide
  Antisense strand to SEQ ID NO: 2509968
uaagaaagcacagaguccu

SEQ ID NO: 2509970 - RNA, 19 nt, Artificial Sequence
  Description of Artificial Sequence: Synthetic oligonucleotide
  Sense strand starting at position 1216 of SEQ ID NO: 1888091
uucuuaacuccuugaugga

SEQ ID NO: 2509971 - RNA, 19 nt, Artificial Sequence
  Description of Artificial Sequence: Synthetic oligonucleotide
  Antisense strand to SEQ ID NO: 2509970
uccaucaaggaguuaagaa

SEQ ID NO: 2509972 - RNA, 19 nt, Artificial Sequence
  Description of Artificial Sequence: Synthetic oligonucleotide
  Sense strand starting at position 1229 of SEQ ID NO: 1888091
gauggaguuccuggaguug

SEQ ID NO: 2509973 - RNA, 19 nt, Artificial Sequence
  Description of Artificial Sequence: Synthetic oligonucleotide
  Antisense strand to SEQ ID NO: 2509972
caacuccaggaacuccauc

SEQ ID NO: 2509974 - RNA, 19 nt, Artificial Sequence
  Description of Artificial Sequence: Synthetic oligonucleotide
  Sense strand starting at position 1329 of SEQ ID NO: 1888091
cuauguuacgugucugucu

SEQ ID NO: 2509975 - RNA, 19 nt, Artificial Sequence
  Description of Artificial Sequence: Synthetic oligonucleotide
  Antisense strand to SEQ ID NO: 2509974
agacagacacguaacauag

SEQ ID NO: 2509976 - RNA, 19 nt, Artificial Sequence
  Description of Artificial Sequence: Synthetic oligonucleotide
  Sense strand starting at position 1341 of SEQ ID NO: 1888091
ucugucucuggucacuuaa

SEQ ID NO: 2509977 - RNA, 19 nt, Artificial Sequence
  Description of Artificial Sequence: Synthetic oligonucleotide
  Antisense strand to SEQ ID NO: 2509976
uuaagugaccagagacaga

SEQ ID NO: 2509978 - RNA, 19 nt, Artificial Sequence
  Description of Artificial Sequence: Synthetic oligonucleotide
  Sense strand starting at position 1845 of SEQ ID NO: 1888091
ccacgaauacucugccaac

SEQ ID NO: 2509979 - RNA, 19 nt, Artificial Sequence
  Description of Artificial Sequence: Synthetic oligonucleotide
  Antisense strand to SEQ ID NO: 2509978
guuggcagaguauucgugg

SEQ ID NO: 2509980 - RNA, 19 nt, Artificial Sequence
  Description of Artificial Sequence: Synthetic oligonucleotide
  Sense strand starting at position 1879 of SEQ ID NO: 1888091
cgagacagcucagucuaga

SEQ ID NO: 2509981 - RNA, 19 nt, Artificial Sequence
  Description of Artificial Sequence: Synthetic oligonucleotide
  Antisense strand to SEQ ID NO: 2509980
ucuagacugagcugucucg

SEQ ID NO: 2509982 - RNA, 19 nt, Artificial Sequence
  Description of Artificial Sequence: Synthetic oligonucleotide
  Sense strand starting at position 1958 of SEQ ID NO: 1888091
ugggcuuugucaguuuaac

SEQ ID NO: 2509983 - RNA, 19 nt, Artificial Sequence
  Description of Artificial Sequence: Synthetic oligonucleotide
  Antisense strand to SEQ ID NO: 2509982
guuaaacugacaaagccca

SEQ ID NO: 2509984 - RNA, 19 nt, Artificial Sequence
  Description of Artificial Sequence: Synthetic oligonucleotide
  Sense strand starting at position 1993 of SEQ ID NO: 1888091
aaccaacugccgggagauu

SEQ ID NO: 2509985 - RNA, 19 nt, Artificial Sequence
  Description of Artificial Sequence: Synthetic oligonucleotide
  Antisense strand to SEQ ID NO: 2509984
aaucucccggcaguugguu

SEQ ID NO: 2509986 - RNA, 19 nt, Artificial Sequence
  Description of Artificial Sequence: Synthetic oligonucleotide
  Sense strand starting at position 2202 of SEQ ID NO: 1888091
ccagcagcuuuauuaaguu

SEQ ID NO: 2509987 - RNA, 19 nt, Artificial Sequence
  Description of Artificial Sequence: Synthetic oligonucleotide
  Antisense strand to SEQ ID NO: 2509986
aacuuaauaaagcugcugg

SEQ ID NO: 2509988 - RNA, 19 nt, Artificial Sequence
  Description of Artificial Sequence: Synthetic oligonucleotide
  Sense strand starting at position 2233 of SEQ ID NO: 1888091
cgauguaauucgcccauuu

SEQ ID NO: 2509989 - RNA, 19 nt, Artificial Sequence
  Description of Artificial Sequence: Synthetic oligonucleotide
  Antisense strand to SEQ ID NO: 2509988
aaaugggcgaauuacaucg

SEQ ID NO: 2509990 - RNA, 19 nt, Artificial Sequence
  Description of Artificial Sequence: Synthetic oligonucleotide
  Sense strand starting at position 2500 of SEQ ID NO: 1888091
guugcugugaccugaaauc

SEQ ID NO: 2509991 - RNA, 19 nt, Artificial Sequence
  Description of Artificial Sequence: Synthetic oligonucleotide
  Antisense strand to SEQ ID NO: 2509990
gauuucaggucacagcaac

SEQ ID NO: 2509992 - RNA, 19 nt, Artificial Sequence
  Description of Artificial Sequence: Synthetic oligonucleotide
  Sense strand starting at position 2590 of SEQ ID NO: 1888091
auacacugguucuuaguau

SEQ ID NO: 2509993 - RNA, 19 nt, Artificial Sequence
  Description of Artificial Sequence: Synthetic oligonucleotide
  Antisense strand to SEQ ID NO: 2509992
auacuaagaaccaguguau

SEQ ID NO: 2509994 - RNA, 19 nt, Artificial Sequence
  Description of Artificial Sequence: Synthetic oligonucleotide
  Sense strand starting at position 2599 of SEQ ID NO: 1888091
uucuuaguauagucacaga

SEQ ID NO: 2509995 - RNA, 19 nt, Artificial Sequence
  Description of Artificial Sequence: Synthetic oligonucleotide
  Antisense strand to SEQ ID NO: 2509994
ucugugacuauacuaagaa

SEQ ID NO: 2509996 - RNA, 19 nt, Artificial Sequence
  Description of Artificial Sequence: Synthetic oligonucleotide
  Sense strand starting at position 2780 of SEQ ID NO: 1888091
gcauuacaggcaugagaug

SEQ ID NO: 2509997 - RNA, 19 nt, Artificial Sequence
  Description of Artificial Sequence: Synthetic oligonucleotide
  Antisense strand to SEQ ID NO: 2509996
caucucaugccuguaaugc

SEQ ID NO: 2509998 - RNA, 19 nt, Artificial Sequence
  Description of Artificial Sequence: Synthetic oligonucleotide
  Sense strand starting at position 2895 of SEQ ID NO: 1888091
guuuccacuucuguuuauu

SEQ ID NO: 2509999 - RNA, 19 nt, Artificial Sequence
  Description of Artificial Sequence: Synthetic oligonucleotide
  Antisense strand to SEQ ID NO: 2509998
aauaaacagaaguggaaac

SEQ ID NO: 2510000 - RNA, 19 nt, Artificial Sequence
  Description of Artificial Sequence: Synthetic oligonucleotide
  Sense strand starting at position 2941 of SEQ ID NO: 1888091
guagaaguuuguguagauu

SEQ ID NO: 2510001 - RNA, 19 nt, Artificial Sequence
  Description of Artificial Sequence: Synthetic oligonucleotide
  Antisense strand to SEQ ID NO: 2510000
aaucuacacaaacuucuac

SEQ ID NO: 2510002 - RNA, 19 nt, Artificial Sequence
  Description of Artificial Sequence: Synthetic oligonucleotide
  Sense strand starting at position 2974 of SEQ ID NO: 1888091
ugcuuauauaaguaggagu

SEQ ID NO: 2510003 - RNA, 19 nt, Artificial Sequence
  Description of Artificial Sequence: Synthetic oligonucleotide
  Antisense strand to SEQ ID NO: 2510002
acuccuacuuauauaagca

SEQ ID NO: 2510004 - RNA, 19 nt, Artificial Sequence
  Description of Artificial Sequence: Synthetic oligonucleotide
  Sense strand starting at position 2976 of SEQ ID NO: 1888091
cuuauauaaguaggaguau

SEQ ID NO: 2510005 - RNA, 19 nt, Artificial Sequence
  Description of Artificial Sequence: Synthetic oligonucleotide
  Antisense strand to SEQ ID NO: 2510004
auacuccuacuuauauaag

SEQ ID NO: 2510006 - RNA, 19 nt, Artificial Sequence
  Description of Artificial Sequence: Synthetic oligonucleotide
  Sense strand starting at position 2990 of SEQ ID NO: 1888091
aguauaauuucugggucaa

SEQ ID NO: 2510007 - RNA, 19 nt, Artificial Sequence
  Description of Artificial Sequence: Synthetic oligonucleotide
  Antisense strand to SEQ ID NO: 2510006
uugacccagaaauuauacu

SEQ ID NO: 2510008 - RNA, 19 nt, Artificial Sequence
  Description of Artificial Sequence: Synthetic oligonucleotide
  Sense strand starting at position 3004 of SEQ ID NO: 1888091
gucaaaguauaacugugua

SEQ ID NO: 2510009 - RNA, 19 nt, Artificial Sequence
  Description of Artificial Sequence: Synthetic oligonucleotide
  Antisense strand to SEQ ID NO: 2510008
uacacaguuauacuuugac

SEQ ID NO: 2510010 - RNA, 19 nt, Artificial Sequence
  Description of Artificial Sequence: Synthetic oligonucleotide
  Sense strand starting at position 3007 of SEQ ID NO: 1888091
aaaguauaacuguguaguu

SEQ ID NO: 2510011 - RNA, 19 nt, Artificial Sequence
  Description of Artificial Sequence: Synthetic oligonucleotide
  Antisense strand to SEQ ID NO: 2510010
aacuacacaguuauacuuu

SEQ ID NO: 2510012 - RNA, 19 nt, Artificial Sequence
  Description of Artificial Sequence: Synthetic oligonucleotide
  Sense strand starting at position 3008 of SEQ ID NO: 1888091
aaguauaacuguguaguuu

SEQ ID NO: 2510013 - RNA, 19 nt, Artificial Sequence
  Description of Artificial Sequence: Synthetic oligonucleotide
  Antisense strand to SEQ ID NO: 2510012
aaacuacacaguuauacuu

SEQ ID NO: 2510014 - RNA, 19 nt, Artificial Sequence
  Description of Artificial Sequence: Synthetic oligonucleotide
  Sense strand starting at position 3185 of SEQ ID NO: 1888091
ugucucagcuccuuaagua

SEQ ID NO: 2510015 - RNA, 19 nt, Artificial Sequence
  Description of Artificial Sequence: Synthetic oligonucleotide
  Antisense strand to SEQ ID NO: 2510014
uacuuaaggagcugagaca

SEQ ID NO: 2510016 - RNA, 19 nt, Artificial Sequence
  Description of Artificial Sequence: Synthetic oligonucleotide
  Sense strand starting at position 3186 of SEQ ID NO: 1888091
gucucagcuccuuaaguag

SEQ ID NO: 2510017 - RNA, 19 nt, Artificial Sequence
  Description of Artificial Sequence: Synthetic oligonucleotide
  Antisense strand to SEQ ID NO: 2510016
cuacuuaaggagcugagac

SEQ ID NO: 2510018 - RNA, 19 nt, Artificial Sequence
  Description of Artificial Sequence: Synthetic oligonucleotide
  Sense strand starting at position 3482 of SEQ ID NO: 1888091
acuuguucuugucuguaga

SEQ ID NO: 2510019 - RNA, 19 nt, Artificial Sequence
  Description of Artificial Sequence: Synthetic oligonucleotide
  Antisense strand to SEQ ID NO: 2510018
ucuacagacaagaacaagu

SEQ ID NO: 2510020 - RNA, 19 nt, Artificial Sequence
  Description of Artificial Sequence: Synthetic oligonucleotide
  Sense strand starting at position 3537 of SEQ ID NO: 1888091
ucucauugugcguuugauu

SEQ ID NO: 2510021 - RNA, 19 nt, Artificial Sequence
  Description of Artificial Sequence: Synthetic oligonucleotide
  Antisense strand to SEQ ID NO: 2510020
aaucaaacgcacaaugaga

SEQ ID NO: 2510022 - RNA, 19 nt, Artificial Sequence
  Description of Artificial Sequence: Synthetic oligonucleotide
  Sense strand starting at position 3544 of SEQ ID NO: 1888091
gugcguuugauuugccuuu

SEQ ID NO: 2510023 - RNA, 19 nt, Artificial Sequence
  Description of Artificial Sequence: Synthetic oligonucleotide
  Antisense strand to SEQ ID NO: 2510022
aaaggcaaaucaaacgcac

SEQ ID NO: 2510024 - RNA, 19 nt, Artificial Sequence
  Description of Artificial Sequence: Synthetic oligonucleotide
  Sense strand starting at position 3574 of SEQ ID NO: 1888091
aaugguguugagcaucaua

SEQ ID NO: 2510025 - RNA, 19 nt, Artificial Sequence
  Description of Artificial Sequence: Synthetic oligonucleotide
  Antisense strand to SEQ ID NO: 2510024
uaugaugcucaacaccauu

SEQ ID NO: 2510026 - RNA, 19 nt, Artificial Sequence
  Description of Artificial Sequence: Synthetic oligonucleotide
  Sense strand starting at position 3577 of SEQ ID NO: 1888091
gguguugagcaucauauca

SEQ ID NO: 2510027 - RNA, 19 nt, Artificial Sequence
  Description of Artificial Sequence: Synthetic oligonucleotide
  Antisense strand to SEQ ID NO: 2510026
ugauaugaugcucaacacc

SEQ ID NO: 2510028 - RNA, 19 nt, Artificial Sequence
  Description of Artificial Sequence: Synthetic oligonucleotide
  Sense strand starting at position 3604 of SEQ ID NO: 1888091
uuggcaauuuguguauuau

SEQ ID NO: 2510029 - RNA, 19 nt, Artificial Sequence
  Description of Artificial Sequence: Synthetic oligonucleotide
  Antisense strand to SEQ ID NO: 2510028
auaauacacaaauugccaa

SEQ ID NO: 2510030 - RNA, 19 nt, Artificial Sequence
  Description of Artificial Sequence: Synthetic oligonucleotide
  Sense strand starting at position 3626 of SEQ ID NO: 1888091
uggagaaauguccaugcac

SEQ ID NO: 2510031 - RNA, 19 nt, Artificial Sequence
  Description of Artificial Sequence: Synthetic oligonucleotide
  Antisense strand to SEQ ID NO: 2510030
gugcauggacauuucucca

SEQ ID NO: 2510032 - RNA, 19 nt, Artificial Sequence
  Description of Artificial Sequence: Synthetic oligonucleotide
  Sense strand starting at position 3691 of SEQ ID NO: 1888091
guaagaguucccuguguau

SEQ ID NO: 2510033 - RNA, 19 nt, Artificial Sequence
  Description of Artificial Sequence: Synthetic oligonucleotide
  Antisense strand to SEQ ID NO: 2510032
auacacagggaacucuuac

SEQ ID NO: 2510034 - RNA, 19 nt, Artificial Sequence
  Description of Artificial Sequence: Synthetic oligonucleotide
  Sense strand starting at position 3693 of SEQ ID NO: 1888091
aagaguucccuguguauuc

SEQ ID NO: 2510035 - RNA, 19 nt, Artificial Sequence
  Description of Artificial Sequence: Synthetic oligonucleotide
  Antisense strand to SEQ ID NO: 2510034
gaauacacagggaacucuu

SEQ ID NO: 2510036 - RNA, 19 nt, Artificial Sequence
  Description of Artificial Sequence: Synthetic oligonucleotide
  Sense strand starting at position 3695 of SEQ ID NO: 1888091
gaguucccuguguauucua

SEQ ID NO: 2510037 - RNA, 19 nt, Artificial Sequence
  Description of Artificial Sequence: Synthetic oligonucleotide
  Antisense strand to SEQ ID NO: 2510036
uagaauacacagggaacuc

SEQ ID NO: 2510038 - RNA, 19 nt, Artificial Sequence
  Description of Artificial Sequence: Synthetic oligonucleotide
  Sense strand starting at position 3778 of SEQ ID NO: 1888091
uacuuucugggugguguua

SEQ ID NO: 2510039 - RNA, 19 nt, Artificial Sequence
  Description of Artificial Sequence: Synthetic oligonucleotide
  Antisense strand to SEQ ID NO: 2510038
uaacaccacccagaaagua

SEQ ID NO: 2510040 - RNA, 19 nt, Artificial Sequence
  Description of Artificial Sequence: Synthetic oligonucleotide
  Sense strand starting at position 3787 of SEQ ID NO: 1888091
ggugguguuauuugaaguc

SEQ ID NO: 2510041 - RNA, 19 nt, Artificial Sequence
  Description of Artificial Sequence: Synthetic oligonucleotide
  Antisense strand to SEQ ID NO: 2510040
gacuucaaauaacaccacc

SEQ ID NO: 2510042 - RNA, 19 nt, Artificial Sequence
  Description of Artificial Sequence: Synthetic oligonucleotide
  Sense strand starting at position 192 of SEQ ID NO: 1888092
acaugaugcaaagguguua

SEQ ID NO: 2510043 - RNA, 19 nt, Artificial Sequence
  Description of Artificial Sequence: Synthetic oligonucleotide
  Antisense strand to SEQ ID NO: 2510042
uaacaccuuugcaucaugu

SEQ ID NO: 2510044 - RNA, 19 nt, Artificial Sequence
  Description of Artificial Sequence: Synthetic oligonucleotide
  Sense strand starting at position 308 of SEQ ID NO: 1888092
cacgacuaagugugaaaga

SEQ ID NO: 2510045 - RNA, 19 nt, Artificial Sequence
  Description of Artificial Sequence: Synthetic oligonucleotide
  Antisense strand to SEQ ID NO: 2510044
ucuuucacacuuagucgug

SEQ ID NO: 2510046 - RNA, 19 nt, Artificial Sequence
  Description of Artificial Sequence: Synthetic oligonucleotide
  Sense strand starting at position 453 of SEQ ID NO: 1888092
ucaaauuaugcuugagcau

SEQ ID NO: 2510047 - RNA, 19 nt, Artificial Sequence
  Description of Artificial Sequence: Synthetic oligonucleotide
  Antisense strand to SEQ ID NO: 2510046
augcucaagcauaauuuga

SEQ ID NO: 2510048 - RNA, 19 nt, Artificial Sequence
  Description of Artificial Sequence: Synthetic oligonucleotide
  Sense strand starting at position 465 of SEQ ID NO: 1888092
ugagcauagcuguauacuu

SEQ ID NO: 2510049 - RNA, 19 nt, Artificial Sequence
  Description of Artificial Sequence: Synthetic oligonucleotide
  Antisense strand to SEQ ID NO: 2510048
aaguauacagcuaugcuca

SEQ ID NO: 2510050 - RNA, 19 nt, Artificial Sequence
  Description of Artificial Sequence: Synthetic oligonucleotide
  Sense strand starting at position 565 of SEQ ID NO: 1888092
agcaguguuguccauugga

SEQ ID NO: 2510051 - RNA, 19 nt, Artificial Sequence
  Description of Artificial Sequence: Synthetic oligonucleotide
  Antisense strand to SEQ ID NO: 2510050
uccaauggacaacacugcu

SEQ ID NO: 2510052 - RNA, 19 nt, Artificial Sequence
  Description of Artificial Sequence: Synthetic oligonucleotide
  Sense strand starting at position 615 of SEQ ID NO: 1888092
cuguguaauccguagagag

SEQ ID NO: 2510053 - RNA, 19 nt, Artificial Sequence
  Description of Artificial Sequence: Synthetic oligonucleotide
  Antisense strand to SEQ ID NO: 2510052
cucucuacggauuacacag

SEQ ID NO: 2510054 - RNA, 19 nt, Artificial Sequence
  Description of Artificial Sequence: Synthetic oligonucleotide
  Sense strand starting at position 629 of SEQ ID NO: 1888092
gagagcucacucuggauga

SEQ ID NO: 2510055 - RNA, 19 nt, Artificial Sequence
  Description of Artificial Sequence: Synthetic oligonucleotide
  Antisense strand to SEQ ID NO: 2510054
ucauccagagugagcucuc

SEQ ID NO: 2510056 - RNA, 19 nt, Artificial Sequence
  Description of Artificial Sequence: Synthetic oligonucleotide
  Sense strand starting at position 631 of SEQ ID NO: 1888092
gagcucacucuggaugacu

SEQ ID NO: 2510057 - RNA, 19 nt, Artificial Sequence
  Description of Artificial Sequence: Synthetic oligonucleotide
  Antisense strand to SEQ ID NO: 2510056
agucauccagagugagcuc

SEQ ID NO: 2510058 - RNA, 19 nt, Artificial Sequence
  Description of Artificial Sequence: Synthetic oligonucleotide
  Sense strand starting at position 633 of SEQ ID NO: 1888092
gcucacucuggaugacuua

SEQ ID NO: 2510059 - RNA, 19 nt, Artificial Sequence
  Description of Artificial Sequence: Synthetic oligonucleotide
  Antisense strand to SEQ ID NO: 2510058
uaagucauccagagugagc

SEQ ID NO: 2510060 - RNA, 19 nt, Artificial Sequence
  Description of Artificial Sequence: Synthetic oligonucleotide
  Sense strand starting at position 676 of SEQ ID NO: 1888092
uccguaucuugauccagau

SEQ ID NO: 2510061 - RNA, 19 nt, Artificial Sequence
  Description of Artificial Sequence: Synthetic oligonucleotide
  Antisense strand to SEQ ID NO: 2510060
aucuggaucaagauacgga

SEQ ID NO: 2510062 - RNA, 19 nt, Artificial Sequence
  Description of Artificial Sequence: Synthetic oligonucleotide
  Sense strand starting at position 678 of SEQ ID NO: 1888092
cguaucuugauccagaugu

SEQ ID NO: 2510063 - RNA, 19 nt, Artificial Sequence
  Description of Artificial Sequence: Synthetic oligonucleotide
  Antisense strand to SEQ ID NO: 2510062
acaucuggaucaagauacg

SEQ ID NO: 2510064 - RNA, 19 nt, Artificial Sequence
  Description of Artificial Sequence: Synthetic oligonucleotide
  Sense strand starting at position 685 of SEQ ID NO: 1888092
ugauccagauguuugacau

SEQ ID NO: 2510065 - RNA, 19 nt, Artificial Sequence
  Description of Artificial Sequence: Synthetic oligonucleotide
  Antisense strand to SEQ ID NO: 2510064
augucaaacaucuggauca

SEQ ID NO: 2510066 - RNA, 19 nt, Artificial Sequence
  Description of Artificial Sequence: Synthetic oligonucleotide
  Sense strand starting at position 686 of SEQ ID NO: 1888092
gauccagauguuugacauc

SEQ ID NO: 2510067 - RNA, 19 nt, Artificial Sequence
  Description of Artificial Sequence: Synthetic oligonucleotide
  Antisense strand to SEQ ID NO: 2510066
gaugucaaacaucuggauc

SEQ ID NO: 2510068 - RNA, 19 nt, Artificial Sequence
  Description of Artificial Sequence: Synthetic oligonucleotide
  Sense strand starting at position 905 of SEQ ID NO: 1888092
gugggaggaucguuugauu

SEQ ID NO: 2510069 - RNA, 19 nt, Artificial Sequence
  Description of Artificial Sequence: Synthetic oligonucleotide
  Antisense strand to SEQ ID NO: 2510068
aaucaaacgauccucccac

SEQ ID NO: 2510070 - RNA, 19 nt, Artificial Sequence
  Description of Artificial Sequence: Synthetic oligonucleotide
  Sense strand starting at position 1064 of SEQ ID NO: 1888092
acugaaggguccuuuaucu

SEQ ID NO: 2510071 - RNA, 19 nt, Artificial Sequence
  Description of Artificial Sequence: Synthetic oligonucleotide
  Antisense strand to SEQ ID NO: 2510070
agauaaaggacccuucagu

SEQ ID NO: 2510072 - RNA, 19 nt, Artificial Sequence
  Description of Artificial Sequence: Synthetic oligonucleotide
  Sense strand starting at position 1141 of SEQ ID NO: 1888092
gguauuuauuucugugaua

SEQ ID NO: 2510073 - RNA, 19 nt, Artificial Sequence
  Description of Artificial Sequence: Synthetic oligonucleotide
  Antisense strand to SEQ ID NO: 2510072
uaucacagaaauaaauacc

SEQ ID NO: 2510074 - RNA, 19 nt, Artificial Sequence
  Description of Artificial Sequence: Synthetic oligonucleotide
  Sense strand starting at position 1146 of SEQ ID NO: 1888092
uuauuucugugauaacuga

SEQ ID NO: 2510075 - RNA, 19 nt, Artificial Sequence
  Description of Artificial Sequence: Synthetic oligonucleotide
  Antisense strand to SEQ ID NO: 2510074
ucaguuaucacagaaauaa

SEQ ID NO: 2510076 - RNA, 19 nt, Artificial Sequence
  Description of Artificial Sequence: Synthetic oligonucleotide
  Sense strand starting at position 1245 of SEQ ID NO: 1888092
agcuuaaauugaccucaga

SEQ ID NO: 2510077 - RNA, 19 nt, Artificial Sequence
  Description of Artificial Sequence: Synthetic oligonucleotide
  Antisense strand to SEQ ID NO: 2510076
ucugaggucaauuuaagcu

SEQ ID NO: 2510078 - RNA, 19 nt, Artificial Sequence
  Description of Artificial Sequence: Synthetic oligonucleotide
  Sense strand starting at position 1277 of SEQ ID NO: 1888092
cugauaaucugaccacgau

SEQ ID NO: 2510079 - RNA, 19 nt, Artificial Sequence
  Description of Artificial Sequence: Synthetic oligonucleotide
  Antisense strand to SEQ ID NO: 2510078
aucguggucagauuaucag

SEQ ID NO: 2510080 - RNA, 19 nt, Artificial Sequence
  Description of Artificial Sequence: Synthetic oligonucleotide
  Sense strand starting at position 1280 of SEQ ID NO: 1888092
auaaucugaccacgauuaa

SEQ ID NO: 2510081 - RNA, 19 nt, Artificial Sequence
  Description of Artificial Sequence: Synthetic oligonucleotide
  Antisense strand to SEQ ID NO: 2510080
uuaaucguggucagauuau

SEQ ID NO: 2510082 - RNA, 19 nt, Artificial Sequence
  Description of Artificial Sequence: Synthetic oligonucleotide
  Sense strand starting at position 1335 of SEQ ID NO: 1888092
uggccaggcuuuccaagaa

SEQ ID NO: 2510083 - RNA, 19 nt, Artificial Sequence
  Description of Artificial Sequence: Synthetic oligonucleotide
  Antisense strand to SEQ ID NO: 2510082
uucuuggaaagccuggcca

SEQ ID NO: 2510084 - RNA, 19 nt, Artificial Sequence
  Description of Artificial Sequence: Synthetic oligonucleotide
  Sense strand starting at position 1374 of SEQ ID NO: 1888092
acaagaagcugaccucuua

SEQ ID NO: 2510085 - RNA, 19 nt, Artificial Sequence
  Description of Artificial Sequence: Synthetic oligonucleotide
  Antisense strand to SEQ ID NO: 2510084
uaagaggucagcuucuugu

SEQ ID NO: 2510086 - RNA, 19 nt, Artificial Sequence
  Description of Artificial Sequence: Synthetic oligonucleotide
  Sense strand starting at position 1582 of SEQ ID NO: 1888092
uuuauucugccuggaaggu

SEQ ID NO: 2510087 - RNA, 19 nt, Artificial Sequence
  Description of Artificial Sequence: Synthetic oligonucleotide
  Antisense strand to SEQ ID NO: 2510086
accuuccaggcagaauaaa

SEQ ID NO: 2510088 - RNA, 19 nt, Artificial Sequence
  Description of Artificial Sequence: Synthetic oligonucleotide
  Sense strand starting at position 1615 of SEQ ID NO: 1888092
cuaguacagaggugacaaa

SEQ ID NO: 2510089 - RNA, 19 nt, Artificial Sequence
  Description of Artificial Sequence: Synthetic oligonucleotide
  Antisense strand to SEQ ID NO: 2510088
uuugucaccucuguacuag

SEQ ID NO: 2510090 - RNA, 19 nt, Artificial Sequence
  Description of Artificial Sequence: Synthetic oligonucleotide
  Sense strand starting at position 1637 of SEQ ID NO: 1888092
auguguguccagcaacuaa

SEQ ID NO: 2510091 - RNA, 19 nt, Artificial Sequence
  Description of Artificial Sequence: Synthetic oligonucleotide
  Antisense strand to SEQ ID NO: 2510090
uuaguugcuggacacacau

SEQ ID NO: 2510092 - RNA, 19 nt, Artificial Sequence
  Description of Artificial Sequence: Synthetic oligonucleotide
  Sense strand starting at position 1706 of SEQ ID NO: 1888092
acuuguuucccaggagagg

SEQ ID NO: 2510093 - RNA, 19 nt, Artificial Sequence
  Description of Artificial Sequence: Synthetic oligonucleotide
  Antisense strand to SEQ ID NO: 2510092
ccucuccugggaaacaagu

SEQ ID NO: 2510094 - RNA, 19 nt, Artificial Sequence
  Description of Artificial Sequence: Synthetic oligonucleotide
  Sense strand starting at position 1883 of SEQ ID NO: 1888092
ucguguucugcagugguua

SEQ ID NO: 2510095 - RNA, 19 nt, Artificial Sequence
  Description of Artificial Sequence: Synthetic oligonucleotide
  Antisense strand to SEQ ID NO: 2510094
uaaccacugcagaacacga

SEQ ID NO: 2510096 - RNA, 19 nt, Artificial Sequence
  Description of Artificial Sequence: Synthetic oligonucleotide
  Sense strand starting at position 2016 of SEQ ID NO: 1888092
uaugucucauggguuacua

SEQ ID NO: 2510097 - RNA, 19 nt, Artificial Sequence
  Description of Artificial Sequence: Synthetic oligonucleotide
  Antisense strand to SEQ ID NO: 2510096
uaguaacccaugagacaua

SEQ ID NO: 2510098 - RNA, 19 nt, Artificial Sequence
  Description of Artificial Sequence: Synthetic oligonucleotide
  Sense strand starting at position 2037 of SEQ ID NO: 1888092
gucagagucaaaugaggua

SEQ ID NO: 2510099 - RNA, 19 nt, Artificial Sequence
  Description of Artificial Sequence: Synthetic oligonucleotide
  Antisense strand to SEQ ID NO: 2510098
uaccucauuugacucugac

SEQ ID NO: 2510100 - RNA, 19 nt, Artificial Sequence
  Description of Artificial Sequence: Synthetic oligonucleotide
  Sense strand starting at position 2042 of SEQ ID NO: 1888092
agucaaaugagguaauugu

SEQ ID NO: 2510101 - RNA, 19 nt, Artificial Sequence
  Description of Artificial Sequence: Synthetic oligonucleotide
  Antisense strand to SEQ ID NO: 2510100
acaauuaccucauuugacu

SEQ ID NO: 2510102 - RNA, 19 nt, Artificial Sequence
  Description of Artificial Sequence: Synthetic oligonucleotide
  Sense strand starting at position 2177 of SEQ ID NO: 1888092
ugugaagagggaugaguuu

SEQ ID NO: 2510103 - RNA, 19 nt, Artificial Sequence
  Description of Artificial Sequence: Synthetic oligonucleotide
  Antisense strand to SEQ ID NO: 2510102
aaacucaucccucuucaca

SEQ ID NO: 2510104 - RNA, 19 nt, Artificial Sequence
  Description of Artificial Sequence: Synthetic oligonucleotide
  Sense strand starting at position 2205 of SEQ ID NO: 1888092
uagagagucccuuaagcua

SEQ ID NO: 2510105 - RNA, 19 nt, Artificial Sequence
  Description of Artificial Sequence: Synthetic oligonucleotide
  Antisense strand to SEQ ID NO: 2510104
uagcuuaagggacucucua

SEQ ID NO: 2510106 - RNA, 19 nt, Artificial Sequence
  Description of Artificial Sequence: Synthetic oligonucleotide
  Sense strand starting at position 2258 of SEQ ID NO: 1888092
acgagaaccuucucuaucu

SEQ ID NO: 2510107 - RNA, 19 nt, Artificial Sequence
  Description of Artificial Sequence: Synthetic oligonucleotide
  Antisense strand to SEQ ID NO: 2510106
agauagagaagguucucgu

SEQ ID NO: 2510108 - RNA, 19 nt, Artificial Sequence
  Description of Artificial Sequence: Synthetic oligonucleotide
  Sense strand starting at position 2290 of SEQ ID NO: 1888092
uugcuuccacauuguggaa

SEQ ID NO: 2510109 - RNA, 19 nt, Artificial Sequence
  Description of Artificial Sequence: Synthetic oligonucleotide
  Antisense strand to SEQ ID NO: 2510108
uuccacaauguggaagcaa

SEQ ID NO: 2510110 - RNA, 19 nt, Artificial Sequence
  Description of Artificial Sequence: Synthetic oligonucleotide
  Sense strand starting at position 2475 of SEQ ID NO: 1888092
cuaacaauuccuggaacug

SEQ ID NO: 2510111 - RNA, 19 nt, Artificial Sequence
  Description of Artificial Sequence: Synthetic oligonucleotide
  Antisense strand to SEQ ID NO: 2510110
caguuccaggaauuguuag

SEQ ID NO: 2510112 - RNA, 19 nt, Artificial Sequence
  Description of Artificial Sequence: Synthetic oligonucleotide
  Sense strand starting at position 2521 of SEQ ID NO: 1888092
gagugaggucaugggccua

SEQ ID NO: 2510113 - RNA, 19 nt, Artificial Sequence
  Description of Artificial Sequence: Synthetic oligonucleotide
  Antisense strand to SEQ ID NO: 2510112
uaggcccaugaccucacuc

SEQ ID NO: 2510114 - RNA, 19 nt, Artificial Sequence
  Description of Artificial Sequence: Synthetic oligonucleotide
  Sense strand starting at position 2644 of SEQ ID NO: 1888092
agaugauggcacugacaau

SEQ ID NO: 2510115 - RNA, 19 nt, Artificial Sequence
  Description of Artificial Sequence: Synthetic oligonucleotide
  Antisense strand to SEQ ID NO: 2510114
auugucagugccaucaucu

SEQ ID NO: 2510116 - RNA, 19 nt, Artificial Sequence
  Description of Artificial Sequence: Synthetic oligonucleotide
  Sense strand starting at position 2668 of SEQ ID NO: 1888092
gugggucuccucuacacuu

SEQ ID NO: 2510117 - RNA, 19 nt, Artificial Sequence
  Description of Artificial Sequence: Synthetic oligonucleotide
  Antisense strand to SEQ ID NO: 2510116
aaguguagaggagacccac

SEQ ID NO: 2510118 - RNA, 19 nt, Artificial Sequence
  Description of Artificial Sequence: Synthetic oligonucleotide
  Sense strand starting at position 3136 of SEQ ID NO: 1888092
uuaucaaccgguuaucaga

SEQ ID NO: 2510119 - RNA, 19 nt, Artificial Sequence
  Description of Artificial Sequence: Synthetic oligonucleotide
  Antisense strand to SEQ ID NO: 2510118
ucugauaaccgguugauaa

SEQ ID NO: 2510120 - RNA, 19 nt, Artificial Sequence
  Description of Artificial Sequence: Synthetic oligonucleotide
  Sense strand starting at position 3184 of SEQ ID NO: 1888092
cuaugagucuguucuggaa

SEQ ID NO: 2510121 - RNA, 19 nt, Artificial Sequence
  Description of Artificial Sequence: Synthetic oligonucleotide
  Antisense strand to SEQ ID NO: 2510120
uuccagaacagacucauag

SEQ ID NO: 2510122 - RNA, 19 nt, Artificial Sequence
  Description of Artificial Sequence: Synthetic oligonucleotide
  Sense strand starting at position 537 of SEQ ID NO: 1888093
guccuuuauguacacuaua

SEQ ID NO: 2510123 - RNA, 19 nt, Artificial Sequence
  Description of Artificial Sequence: Synthetic oligonucleotide
  Antisense strand to SEQ ID NO: 2510122
uauaguguacauaaaggac

SEQ ID NO: 2510124 - RNA, 19 nt, Artificial Sequence
  Description of Artificial Sequence: Synthetic oligonucleotide
  Sense strand starting at position 595 of SEQ ID NO: 1888093
ucaucuugccucgcuguaa

SEQ ID NO: 2510125 - RNA, 19 nt, Artificial Sequence
  Description of Artificial Sequence: Synthetic oligonucleotide
  Antisense strand to SEQ ID NO: 2510124
uuacagcgaggcaagauga

SEQ ID NO: 2510126 - RNA, 19 nt, Artificial Sequence
  Description of Artificial Sequence: Synthetic oligonucleotide
  Sense strand starting at position 1850 of SEQ ID NO: 1888093
agcagaggccuccguuauc

SEQ ID NO: 2510127 - RNA, 19 nt, Artificial Sequence
  Description of Artificial Sequence: Synthetic oligonucleotide
  Antisense strand to SEQ ID NO: 2510126
gauaacggaggccucugcu

SEQ ID NO: 2510128 - RNA, 19 nt, Artificial Sequence
  Description of Artificial Sequence: Synthetic oligonucleotide
  Sense strand starting at position 1861 of SEQ ID NO: 1888093
ccguuaucugcagggcaga

SEQ ID NO: 2510129 - RNA, 19 nt, Artificial Sequence
  Description of Artificial Sequence: Synthetic oligonucleotide
  Antisense strand to SEQ ID NO: 2510128
ucugcccugcagauaacgg

SEQ ID NO: 2510130 - RNA, 19 nt, Artificial Sequence
  Description of Artificial Sequence: Synthetic oligonucleotide
  Sense strand starting at position 2164 of SEQ ID NO: 1888093
ugcucuucgcaacggaaau

SEQ ID NO: 2510131 - RNA, 19 nt, Artificial Sequence
  Description of Artificial Sequence: Synthetic oligonucleotide
  Antisense strand to SEQ ID NO: 2510130
auuuccguugcgaagagca

SEQ ID NO: 2510132 - RNA, 19 nt, Artificial Sequence
  Description of Artificial Sequence: Synthetic oligonucleotide
  Sense strand starting at position 2165 of SEQ ID NO: 1888093
gcucuucgcaacggaaauu

SEQ ID NO: 2510133 - RNA, 19 nt, Artificial Sequence
  Description of Artificial Sequence: Synthetic oligonucleotide
  Antisense strand to SEQ ID NO: 2510132
aauuuccguugcgaagagc

SEQ ID NO: 2510134 - RNA, 19 nt, Artificial Sequence
  Description of Artificial Sequence: Synthetic oligonucleotide
  Sense strand starting at position 2193 of SEQ ID NO: 1888093
cucagaauucccugagcaa

SEQ ID NO: 2510135 - RNA, 19 nt, Artificial Sequence
  Description of Artificial Sequence: Synthetic oligonucleotide
  Antisense strand to SEQ ID NO: 2510134
uugcucagggaauucugag

SEQ ID NO: 2510136 - RNA, 19 nt, Artificial Sequence
  Description of Artificial Sequence: Synthetic oligonucleotide
  Sense strand starting at position 2378 of SEQ ID NO: 1888093
uuuacauucuaguaaggga

SEQ ID NO: 2510137 - RNA, 19 nt, Artificial Sequence
  Description of Artificial Sequence: Synthetic oligonucleotide
  Antisense strand to SEQ ID NO: 2510136
ucccuuacuagaauguaaa

SEQ ID NO: 2510138 - RNA, 19 nt, Artificial Sequence
  Description of Artificial Sequence: Synthetic oligonucleotide
  Sense strand starting at position 2439 of SEQ ID NO: 1888093
uagcgaaagugcuuuggaa

SEQ ID NO: 2510139 - RNA, 19 nt, Artificial Sequence
  Description of Artificial Sequence: Synthetic oligonucleotide
  Antisense strand to SEQ ID NO: 2510138
uuccaaagcacuuucgcua

SEQ ID NO: 2510140 - RNA, 19 nt, Artificial Sequence
  Description of Artificial Sequence: Synthetic oligonucleotide
  Sense strand starting at position 2441 of SEQ ID NO: 1888093
gcgaaagugcuuuggaaac

SEQ ID NO: 2510141 - RNA, 19 nt, Artificial Sequence
  Description of Artificial Sequence: Synthetic oligonucleotide
  Antisense strand to SEQ ID NO: 2510140
guuuccaaagcacuuucgc

SEQ ID NO: 2510142 - RNA, 19 nt, Artificial Sequence
  Description of Artificial Sequence: Synthetic oligonucleotide
  Sense strand starting at position 2443 of SEQ ID NO: 1888093
gaaagugcuuuggaaacau

SEQ ID NO: 2510143 - RNA, 19 nt, Artificial Sequence
  Description of Artificial Sequence: Synthetic oligonucleotide
  Antisense strand to SEQ ID NO: 2510142
auguuuccaaagcacuuuc

SEQ ID NO: 2510144 - RNA, 19 nt, Artificial Sequence
  Description of Artificial Sequence: Synthetic oligonucleotide
  Sense strand starting at position 2491 of SEQ ID NO: 1888093
ugcggaaugcuuuauagua

SEQ ID NO: 2510145 - RNA, 19 nt, Artificial Sequence
  Description of Artificial Sequence: Synthetic oligonucleotide
  Antisense strand to SEQ ID NO: 2510144
uacuauaaagcauuccgca

SEQ ID NO: 2510146 - RNA, 19 nt, Artificial Sequence
  Description of Artificial Sequence: Synthetic oligonucleotide
  Sense strand starting at position 2553 of SEQ ID NO: 1888093
augagccaugcuuggagau

SEQ ID NO: 2510147 - RNA, 19 nt, Artificial Sequence
  Description of Artificial Sequence: Synthetic oligonucleotide
  Antisense strand to SEQ ID NO: 2510146
aucuccaagcauggcucau

SEQ ID NO: 2510148 - RNA, 19 nt, Artificial Sequence
  Description of Artificial Sequence: Synthetic oligonucleotide
  Sense strand starting at position 2744 of SEQ ID NO: 1888093
cugauaacugacuguugca

SEQ ID NO: 2510149 - RNA, 19 nt, Artificial Sequence
  Description of Artificial Sequence: Synthetic oligonucleotide
  Antisense strand to SEQ ID NO: 2510148
ugcaacagucaguuaucag

SEQ ID NO: 2510150 - RNA, 19 nt, Artificial Sequence
  Description of Artificial Sequence: Synthetic oligonucleotide
  Sense strand starting at position 2773 of SEQ ID NO: 1888093
ugagcuaugauagggacuu

SEQ ID NO: 2510151 - RNA, 19 nt, Artificial Sequence
  Description of Artificial Sequence: Synthetic oligonucleotide
  Antisense strand to SEQ ID NO: 2510150
aagucccuaucauagcuca

SEQ ID NO: 2510152 - RNA, 19 nt, Artificial Sequence
  Description of Artificial Sequence: Synthetic oligonucleotide
  Sense strand starting at position 2774 of SEQ ID NO: 1888093
gagcuaugauagggacuua

SEQ ID NO: 2510153 - RNA, 19 nt, Artificial Sequence
  Description of Artificial Sequence: Synthetic oligonucleotide
  Antisense strand to SEQ ID NO: 2510152
uaagucccuaucauagcuc

SEQ ID NO: 2510154 - RNA, 19 nt, Artificial Sequence
  Description of Artificial Sequence: Synthetic oligonucleotide
  Sense strand starting at position 2850 of SEQ ID NO: 1888093
agcucaagucuauaagauu

SEQ ID NO: 2510155 - RNA, 19 nt, Artificial Sequence
  Description of Artificial Sequence: Synthetic oligonucleotide
  Antisense strand to SEQ ID NO: 2510154
aaucuuauagacuugagcu

SEQ ID NO: 2510156 - RNA, 19 nt, Artificial Sequence
  Description of Artificial Sequence: Synthetic oligonucleotide
  Sense strand starting at position 3033 of SEQ ID NO: 1888093
guuugagaugucuguuuga

SEQ ID NO: 2510157 - RNA, 19 nt, Artificial Sequence
  Description of Artificial Sequence: Synthetic oligonucleotide
  Antisense strand to SEQ ID NO: 2510156
ucaaacagacaucucaaac

SEQ ID NO: 2510158 - RNA, 19 nt, Artificial Sequence
  Description of Artificial Sequence: Synthetic oligonucleotide
  Sense strand starting at position 3036 of SEQ ID NO: 1888093
ugagaugucuguuugacau

SEQ ID NO: 2510159 - RNA, 19 nt, Artificial Sequence
  Description of Artificial Sequence: Synthetic oligonucleotide
  Antisense strand to SEQ ID NO: 2510158
augucaaacagacaucuca

SEQ ID NO: 2510160 - RNA, 19 nt, Artificial Sequence
  Description of Artificial Sequence: Synthetic oligonucleotide
  Sense strand starting at position 3122 of SEQ ID NO: 1888093
agaugaaucuuugggaguc

SEQ ID NO: 2510161 - RNA, 19 nt, Artificial Sequence
  Description of Artificial Sequence: Synthetic oligonucleotide
  Antisense strand to SEQ ID NO: 2510160
gacucccaaagauucaucu

SEQ ID NO: 2510162 - RNA, 19 nt, Artificial Sequence
  Description of Artificial Sequence: Synthetic oligonucleotide
  Sense strand starting at position 3134 of SEQ ID NO: 1888093
gggagucgucagcauauag

SEQ ID NO: 2510163 - RNA, 19 nt, Artificial Sequence
  Description of Artificial Sequence: Synthetic oligonucleotide
  Antisense strand to SEQ ID NO: 2510162
cuauaugcugacgacuccc

SEQ ID NO: 2510164 - RNA, 19 nt, Artificial Sequence
  Description of Artificial Sequence: Synthetic oligonucleotide
  Sense strand starting at position 3145 of SEQ ID NO: 1888093
gcauauagaugucuuuaaa

SEQ ID NO: 2510165 - RNA, 19 nt, Artificial Sequence
  Description of Artificial Sequence: Synthetic oligonucleotide
  Antisense strand to SEQ ID NO: 2510164
uuuaaagacaucuauaugc

SEQ ID NO: 2510166 - RNA, 19 nt, Artificial Sequence
  Description of Artificial Sequence: Synthetic oligonucleotide
  Sense strand starting at position 3206 of SEQ ID NO: 1888093
gaggucugaucccugggua

SEQ ID NO: 2510167 - RNA, 19 nt, Artificial Sequence
  Description of Artificial Sequence: Synthetic oligonucleotide
  Antisense strand to SEQ ID NO: 2510166
uacccagggaucagaccuc

SEQ ID NO: 2510168 - RNA, 19 nt, Artificial Sequence
  Description of Artificial Sequence: Synthetic oligonucleotide
  Sense strand starting at position 3207 of SEQ ID NO: 1888093
aggucugaucccuggguaa

SEQ ID NO: 2510169 - RNA, 19 nt, Artificial Sequence
  Description of Artificial Sequence: Synthetic oligonucleotide
  Antisense strand to SEQ ID NO: 2510168
uuacccagggaucagaccu

SEQ ID NO: 2510170 - RNA, 19 nt, Artificial Sequence
  Description of Artificial Sequence: Synthetic oligonucleotide
  Sense strand starting at position 3225 of SEQ ID NO: 1888093
acguuuacaggucagggaa

SEQ ID NO: 2510171 - RNA, 19 nt, Artificial Sequence
  Description of Artificial Sequence: Synthetic oligonucleotide
  Antisense strand to SEQ ID NO: 2510170
uucccugaccuguaaacgu

SEQ ID NO: 2510172 - RNA, 19 nt, Artificial Sequence
  Description of Artificial Sequence: Synthetic oligonucleotide
  Sense strand starting at position 3306 of SEQ ID NO: 1888093
gugugguguccuggaagua

SEQ ID NO: 2510173 - RNA, 19 nt, Artificial Sequence
  Description of Artificial Sequence: Synthetic oligonucleotide
  Antisense strand to SEQ ID NO: 2510172
uacuuccaggacaccacac

SEQ ID NO: 2510174 - RNA, 19 nt, Artificial Sequence
  Description of Artificial Sequence: Synthetic oligonucleotide
  Sense strand starting at position 3307 of SEQ ID NO: 1888093
ugugguguccuggaaguaa

SEQ ID NO: 2510175 - RNA, 19 nt, Artificial Sequence
  Description of Artificial Sequence: Synthetic oligonucleotide
  Antisense strand to SEQ ID NO: 2510174
uuacuuccaggacaccaca

SEQ ID NO: 2510176 - RNA, 19 nt, Artificial Sequence
  Description of Artificial Sequence: Synthetic oligonucleotide
  Sense strand starting at position 3311 of SEQ ID NO: 1888093
guguccuggaaguaaauga

SEQ ID NO: 2510177 - RNA, 19 nt, Artificial Sequence
  Description of Artificial Sequence: Synthetic oligonucleotide
  Antisense strand to SEQ ID NO: 2510176
ucauuuacuuccaggacac

SEQ ID NO: 2510178 - RNA, 19 nt, Artificial Sequence
  Description of Artificial Sequence: Synthetic oligonucleotide
  Sense strand starting at position 3318 of SEQ ID NO: 1888093
ggaaguaaaugaggaaagu

SEQ ID NO: 2510179 - RNA, 19 nt, Artificial Sequence
  Description of Artificial Sequence: Synthetic oligonucleotide
  Antisense strand to SEQ ID NO: 2510178
acuuuccucauuuacuucc

SEQ ID NO: 2510180 - RNA, 19 nt, Artificial Sequence
  Description of Artificial Sequence: Synthetic oligonucleotide
  Sense strand starting at position 3368 of SEQ ID NO: 1888093
ugcugcugaugugucaauu

SEQ ID NO: 2510181 - RNA, 19 nt, Artificial Sequence
  Description of Artificial Sequence: Synthetic oligonucleotide
  Antisense strand to SEQ ID NO: 2510180
aauugacacaucagcagca

SEQ ID NO: 2510182 - RNA, 19 nt, Artificial Sequence
  Description of Artificial Sequence: Synthetic oligonucleotide
  Sense strand starting at position 3387 of SEQ ID NO: 1888093
aagauaagguuggaaauga

SEQ ID NO: 2510183 - RNA, 19 nt, Artificial Sequence
  Description of Artificial Sequence: Synthetic oligonucleotide
  Antisense strand to SEQ ID NO: 2510182
ucauuuccaaccuuaucuu

SEQ ID NO: 2510184 - RNA, 19 nt, Artificial Sequence
  Description of Artificial Sequence: Synthetic oligonucleotide
  Sense strand starting at position 3421 of SEQ ID NO: 1888093
gaauuaaugcugugaugaa

SEQ ID NO: 2510185 - RNA, 19 nt, Artificial Sequence
  Description of Artificial Sequence: Synthetic oligonucleotide
  Antisense strand to SEQ ID NO: 2510184
uucaucacagcauuaauuc

SEQ ID NO: 2510186 - RNA, 19 nt, Artificial Sequence
  Description of Artificial Sequence: Synthetic oligonucleotide
  Sense strand starting at position 3434 of SEQ ID NO: 1888093
gaugaacuuccucgugaau

SEQ ID NO: 2510187 - RNA, 19 nt, Artificial Sequence
  Description of Artificial Sequence: Synthetic oligonucleotide
  Antisense strand to SEQ ID NO: 2510186
auucacgaggaaguucauc

SEQ ID NO: 2510188 - RNA, 19 nt, Artificial Sequence
  Description of Artificial Sequence: Synthetic oligonucleotide
  Sense strand starting at position 3436 of SEQ ID NO: 1888093
ugaacuuccucgugaauuu

SEQ ID NO: 2510189 - RNA, 19 nt, Artificial Sequence
  Description of Artificial Sequence: Synthetic oligonucleotide
  Antisense strand to SEQ ID NO: 2510188
aaauucacgaggaaguuca

SEQ ID NO: 2510190 - RNA, 19 nt, Artificial Sequence
  Description of Artificial Sequence: Synthetic oligonucleotide
  Sense strand starting at position 3473 of SEQ ID NO: 1888093
ucugaauuccuuuggguuu

SEQ ID NO: 2510191 - RNA, 19 nt, Artificial Sequence
  Description of Artificial Sequence: Synthetic oligonucleotide
  Antisense strand to SEQ ID NO: 2510190
aaacccaaaggaauucaga

SEQ ID NO: 2510192 - RNA, 19 nt, Artificial Sequence
  Description of Artificial Sequence: Synthetic oligonucleotide
  Sense strand starting at position 3519 of SEQ ID NO: 1888093
ugcgcugucaccuagucua

SEQ ID NO: 2510193 - RNA, 19 nt, Artificial Sequence
  Description of Artificial Sequence: Synthetic oligonucleotide
  Antisense strand to SEQ ID NO: 2510192
uagacuaggugacagcgca

SEQ ID NO: 2510194 - RNA, 19 nt, Artificial Sequence
  Description of Artificial Sequence: Synthetic oligonucleotide
  Sense strand starting at position 3786 of SEQ ID NO: 1888093
gccucugaguuccuuuguu

SEQ ID NO: 2510195 - RNA, 19 nt, Artificial Sequence
  Description of Artificial Sequence: Synthetic oligonucleotide
  Antisense strand to SEQ ID NO: 2510194
aacaaaggaacucagaggc

SEQ ID NO: 2510196 - RNA, 19 nt, Artificial Sequence
  Description of Artificial Sequence: Synthetic oligonucleotide
  Sense strand starting at position 3790 of SEQ ID NO: 1888093
cugaguuccuuuguuugua

SEQ ID NO: 2510197 - RNA, 19 nt, Artificial Sequence
  Description of Artificial Sequence: Synthetic oligonucleotide
  Antisense strand to SEQ ID NO: 2510196
uacaaacaaaggaacucag

SEQ ID NO: 2510198 - RNA, 19 nt, Artificial Sequence
  Description of Artificial Sequence: Synthetic oligonucleotide
  Sense strand starting at position 3791 of SEQ ID NO: 1888093
ugaguuccuuuguuuguau

SEQ ID NO: 2510199 - RNA, 19 nt, Artificial Sequence
  Description of Artificial Sequence: Synthetic oligonucleotide
  Antisense strand to SEQ ID NO: 2510198
auacaaacaaaggaacuca

SEQ ID NO: 2510200 - RNA, 19 nt, Artificial Sequence
  Description of Artificial Sequence: Synthetic oligonucleotide
  Sense strand starting at position 3792 of SEQ ID NO: 1888093
gaguuccuuuguuuguauu

SEQ ID NO: 2510201 - RNA, 19 nt, Artificial Sequence
  Description of Artificial Sequence: Synthetic oligonucleotide
  Antisense strand to SEQ ID NO: 2510200
aauacaaacaaaggaacuc

SEQ ID NO: 2510202 - RNA, 19 nt, Artificial Sequence
  Description of Artificial Sequence: Synthetic oligonucleotide
  Sense strand starting at position 139 of SEQ ID NO: 1888094
ccuauauggccagaguucu

SEQ ID NO: 2510203 - RNA, 19 nt, Artificial Sequence
  Description of Artificial Sequence: Synthetic oligonucleotide
  Antisense strand to SEQ ID NO: 2510202
agaacucuggccauauagg

SEQ ID NO: 2510204 - RNA, 19 nt, Artificial Sequence
  Description of Artificial Sequence: Synthetic oligonucleotide
  Sense strand starting at position 152 of SEQ ID NO: 1888094
aguucuuagaguugggaga

SEQ ID NO: 2510205 - RNA, 19 nt, Artificial Sequence
  Description of Artificial Sequence: Synthetic oligonucleotide
  Antisense strand to SEQ ID NO: 2510204
ucucccaacucuaagaacu

SEQ ID NO: 2510206 - RNA, 19 nt, Artificial Sequence
  Description of Artificial Sequence: Synthetic oligonucleotide
  Sense strand starting at position 153 of SEQ ID NO: 1888094
guucuuagaguugggagaa

SEQ ID NO: 2510207 - RNA, 19 nt, Artificial Sequence
  Description of Artificial Sequence: Synthetic oligonucleotide
  Antisense strand to SEQ ID NO: 2510206
uucucccaacucuaagaac

SEQ ID NO: 2510208 - RNA, 19 nt, Artificial Sequence
  Description of Artificial Sequence: Synthetic oligonucleotide
  Sense strand starting at position 250 of SEQ ID NO: 1888094
ggauaaagagcucaugcau

SEQ ID NO: 2510209 - RNA, 19 nt, Artificial Sequence
  Description of Artificial Sequence: Synthetic oligonucleotide
  Antisense strand to SEQ ID NO: 2510208
augcaugagcucuuuaucc

SEQ ID NO: 2510210 - RNA, 19 nt, Artificial Sequence
  Description of Artificial Sequence: Synthetic oligonucleotide
  Sense strand starting at position 396 of SEQ ID NO: 1888094
agauauucucuauggcacu

SEQ ID NO: 2510211 - RNA, 19 nt, Artificial Sequence
  Description of Artificial Sequence: Synthetic oligonucleotide
  Antisense strand to SEQ ID NO: 2510210
agugccauagagaauaucu

SEQ ID NO: 2510212 - RNA, 19 nt, Artificial Sequence
  Description of Artificial Sequence: Synthetic oligonucleotide
  Sense strand starting at position 431 of SEQ ID NO: 1888094
caugaugaguuggcaggau

SEQ ID NO: 2510213 - RNA, 19 nt, Artificial Sequence
  Description of Artificial Sequence: Synthetic oligonucleotide
  Antisense strand to SEQ ID NO: 2510212
auccugccaacucaucaug

SEQ ID NO: 2510214 - RNA, 19 nt, Artificial Sequence
  Description of Artificial Sequence: Synthetic oligonucleotide
  Sense strand starting at position 482 of SEQ ID NO: 1888094
gaagguugcaguggauacu

SEQ ID NO: 2510215 - RNA, 19 nt, Artificial Sequence
  Description of Artificial Sequence: Synthetic oligonucleotide
  Antisense strand to SEQ ID NO: 2510214
aguauccacugcaaccuuc

SEQ ID NO: 2510216 - RNA, 19 nt, Artificial Sequence
  Description of Artificial Sequence: Synthetic oligonucleotide
  Sense strand starting at position 626 of SEQ ID NO: 1888094
aggcccugauauccuaaga

SEQ ID NO: 2510217 - RNA, 19 nt, Artificial Sequence
  Description of Artificial Sequence: Synthetic oligonucleotide
  Antisense strand to SEQ ID NO: 2510216
ucuuaggauaucagggccu

SEQ ID NO: 2510218 - RNA, 19 nt, Artificial Sequence
  Description of Artificial Sequence: Synthetic oligonucleotide
  Sense strand starting at position 673 of SEQ ID NO: 1888094
ucaucagagcaguggagua

SEQ ID NO: 2510219 - RNA, 19 nt, Artificial Sequence
  Description of Artificial Sequence: Synthetic oligonucleotide
  Antisense strand to SEQ ID NO: 2510218
uacuccacugcucugauga

SEQ ID NO: 2510220 - RNA, 19 nt, Artificial Sequence
  Description of Artificial Sequence: Synthetic oligonucleotide
  Sense strand starting at position 879 of SEQ ID NO: 1888094
cugauacuagcuggucuaa

SEQ ID NO: 2510221 - RNA, 19 nt, Artificial Sequence
  Description of Artificial Sequence: Synthetic oligonucleotide
  Antisense strand to SEQ ID NO: 2510220
uuagaccagcuaguaucag

SEQ ID NO: 2510222 - RNA, 19 nt, Artificial Sequence
  Description of Artificial Sequence: Synthetic oligonucleotide
  Sense strand starting at position 891 of SEQ ID NO: 1888094
ggucuaagucuccauccuu

SEQ ID NO: 2510223 - RNA, 19 nt, Artificial Sequence
  Description of Artificial Sequence: Synthetic oligonucleotide
  Antisense strand to SEQ ID NO: 2510222
aaggauggagacuuagacc

SEQ ID NO: 2510224 - RNA, 19 nt, Artificial Sequence
  Description of Artificial Sequence: Synthetic oligonucleotide
  Sense strand starting at position 921 of SEQ ID NO: 1888094
agcacuuucccucagucau

SEQ ID NO: 2510225 - RNA, 19 nt, Artificial Sequence
  Description of Artificial Sequence: Synthetic oligonucleotide
  Antisense strand to SEQ ID NO: 2510224
augacugagggaaagugcu

SEQ ID NO: 2510226 - RNA, 19 nt, Artificial Sequence
  Description of Artificial Sequence: Synthetic oligonucleotide
  Sense strand starting at position 960 of SEQ ID NO: 1888094
ugucuugcagucuagaaca

SEQ ID NO: 2510227 - RNA, 19 nt, Artificial Sequence
  Description of Artificial Sequence: Synthetic oligonucleotide
  Antisense strand to SEQ ID NO: 2510226
uguucuagacugcaagaca

SEQ ID NO: 2510228 - RNA, 19 nt, Artificial Sequence
  Description of Artificial Sequence: Synthetic oligonucleotide
  Sense strand starting at position 962 of SEQ ID NO: 1888094
ucuugcagucuagaacauu

SEQ ID NO: 2510229 - RNA, 19 nt, Artificial Sequence
  Description of Artificial Sequence: Synthetic oligonucleotide
  Antisense strand to SEQ ID NO: 2510228
aauguucuagacugcaaga

SEQ ID NO: 2510230 - RNA, 19 nt, Artificial Sequence
  Description of Artificial Sequence: Synthetic oligonucleotide
  Sense strand starting at position 1058 of SEQ ID NO: 1888094
cuuggauguucuccagaca

SEQ ID NO: 2510231 - RNA, 19 nt, Artificial Sequence
  Description of Artificial Sequence: Synthetic oligonucleotide
  Antisense strand to SEQ ID NO: 2510230
ugucuggagaacauccaag

SEQ ID NO: 2510232 - RNA, 19 nt, Artificial Sequence
  Description of Artificial Sequence: Synthetic oligonucleotide
  Sense strand starting at position 1189 of SEQ ID NO: 1888094
auuuguucucugugauucu

SEQ ID NO: 2510233 - RNA, 19 nt, Artificial Sequence
  Description of Artificial Sequence: Synthetic oligonucleotide
  Antisense strand to SEQ ID NO: 2510232
agaaucacagagaacaaau

SEQ ID NO: 2510234 - RNA, 19 nt, Artificial Sequence
  Description of Artificial Sequence: Synthetic oligonucleotide
  Sense strand starting at position 1200 of SEQ ID NO: 1888094
gugauucuuagagaugggu

SEQ ID NO: 2510235 - RNA, 19 nt, Artificial Sequence
  Description of Artificial Sequence: Synthetic oligonucleotide
  Antisense strand to SEQ ID NO: 2510234
acccaucucuaagaaucac

SEQ ID NO: 2510236 - RNA, 19 nt, Artificial Sequence
  Description of Artificial Sequence: Synthetic oligonucleotide
  Sense strand starting at position 1463 of SEQ ID NO: 1888094
gaaauaauuugagggcaag

SEQ ID NO: 2510237 - RNA, 19 nt, Artificial Sequence
  Description of Artificial Sequence: Synthetic oligonucleotide
  Antisense strand to SEQ ID NO: 2510236
cuugcccucaaauuauuuc

SEQ ID NO: 2510238 - RNA, 19 nt, Artificial Sequence
  Description of Artificial Sequence: Synthetic oligonucleotide
  Sense strand starting at position 1509 of SEQ ID NO: 1888094
uuugauuugucuuugcaag

SEQ ID NO: 2510239 - RNA, 19 nt, Artificial Sequence
  Description of Artificial Sequence: Synthetic oligonucleotide
  Antisense strand to SEQ ID NO: 2510238
cuugcaaagacaaaucaaa

SEQ ID NO: 2510240 - RNA, 19 nt, Artificial Sequence
  Description of Artificial Sequence: Synthetic oligonucleotide
  Sense strand starting at position 1669 of SEQ ID NO: 1888094
cccaauacuuagguuaagu

SEQ ID NO: 2510241 - RNA, 19 nt, Artificial Sequence
  Description of Artificial Sequence: Synthetic oligonucleotide
  Antisense strand to SEQ ID NO: 2510240
acuuaaccuaaguauuggg

SEQ ID NO: 2510242 - RNA, 19 nt, Artificial Sequence
  Description of Artificial Sequence: Synthetic oligonucleotide
  Sense strand starting at position 1826 of SEQ ID NO: 1888094
gucagaugucaguaggaac

SEQ ID NO: 2510243 - RNA, 19 nt, Artificial Sequence
  Description of Artificial Sequence: Synthetic oligonucleotide
  Antisense strand to SEQ ID NO: 2510242
guuccuacugacaucugac

SEQ ID NO: 2510244 - RNA, 19 nt, Artificial Sequence
  Description of Artificial Sequence: Synthetic oligonucleotide
  Sense strand starting at position 1926 of SEQ ID NO: 1888094
ccaugugaaucuguagaug

SEQ ID NO: 2510245 - RNA, 19 nt, Artificial Sequence
  Description of Artificial Sequence: Synthetic oligonucleotide
  Antisense strand to SEQ ID NO: 2510244
caucuacagauucacaugg

SEQ ID NO: 2510246 - RNA, 19 nt, Artificial Sequence
  Description of Artificial Sequence: Synthetic oligonucleotide
  Sense strand starting at position 2270 of SEQ ID NO: 1888094
uguggaucccucuaagugu

SEQ ID NO: 2510247 - RNA, 19 nt, Artificial Sequence
  Description of Artificial Sequence: Synthetic oligonucleotide
  Antisense strand to SEQ ID NO: 2510246
acacuuagagggauccaca

SEQ ID NO: 2510248 - RNA, 19 nt, Artificial Sequence
  Description of Artificial Sequence: Synthetic oligonucleotide
  Sense strand starting at position 2273 of SEQ ID NO: 1888094
ggaucccucuaaguguaau

SEQ ID NO: 2510249 - RNA, 19 nt, Artificial Sequence
  Description of Artificial Sequence: Synthetic oligonucleotide
  Antisense strand to SEQ ID NO: 2510248
auuacacuuagagggaucc

SEQ ID NO: 2510250 - RNA, 19 nt, Artificial Sequence
  Description of Artificial Sequence: Synthetic oligonucleotide
  Sense strand starting at position 2369 of SEQ ID NO: 1888094
aggcuccuugagcaugauu

SEQ ID NO: 2510251 - RNA, 19 nt, Artificial Sequence
  Description of Artificial Sequence: Synthetic oligonucleotide
  Antisense strand to SEQ ID NO: 2510250
aaucaugcucaaggagccu

SEQ ID NO: 2510252 - RNA, 19 nt, Artificial Sequence
  Description of Artificial Sequence: Synthetic oligonucleotide
  Sense strand starting at position 2372 of SEQ ID NO: 1888094
cuccuugagcaugauuaua

SEQ ID NO: 2510253 - RNA, 19 nt, Artificial Sequence
  Description of Artificial Sequence: Synthetic oligonucleotide
  Antisense strand to SEQ ID NO: 2510252
uauaaucaugcucaaggag

SEQ ID NO: 2510254 - RNA, 19 nt, Artificial Sequence
  Description of Artificial Sequence: Synthetic oligonucleotide
  Sense strand starting at position 2374 of SEQ ID NO: 1888094
ccuugagcaugauuauaaa

SEQ ID NO: 2510255 - RNA, 19 nt, Artificial Sequence
  Description of Artificial Sequence: Synthetic oligonucleotide
  Antisense strand to SEQ ID NO: 2510254
uuuauaaucaugcucaagg

SEQ ID NO: 2510256 - RNA, 19 nt, Artificial Sequence
  Description of Artificial Sequence: Synthetic oligonucleotide
  Sense strand starting at position 2446 of SEQ ID NO: 1888094
gguuaacuaucccuaacug

SEQ ID NO: 2510257 - RNA, 19 nt, Artificial Sequence
  Description of Artificial Sequence: Synthetic oligonucleotide
  Antisense strand to SEQ ID NO: 2510256
caguuagggauaguuaacc

SEQ ID NO: 2510258 - RNA, 19 nt, Artificial Sequence
  Description of Artificial Sequence: Synthetic oligonucleotide
  Sense strand starting at position 2518 of SEQ ID NO: 1888094
ugaguuucugagcacucuu

SEQ ID NO: 2510259 - RNA, 19 nt, Artificial Sequence
  Description of Artificial Sequence: Synthetic oligonucleotide
  Antisense strand to SEQ ID NO: 2510258
aagagugcucagaaacuca

SEQ ID NO: 2510260 - RNA, 19 nt, Artificial Sequence
  Description of Artificial Sequence: Synthetic oligonucleotide
  Sense strand starting at position 2613 of SEQ ID NO: 1888094
aauagaaauugacugguuu

SEQ ID NO: 2510261 - RNA, 19 nt, Artificial Sequence
  Description of Artificial Sequence: Synthetic oligonucleotide
  Antisense strand to SEQ ID NO: 2510260
aaaccagucaauuucuauu

SEQ ID NO: 2510262 - RNA, 19 nt, Artificial Sequence
  Description of Artificial Sequence: Synthetic oligonucleotide
  Sense strand starting at position 2614 of SEQ ID NO: 1888094
auagaaauugacugguuuc

SEQ ID NO: 2510263 - RNA, 19 nt, Artificial Sequence
  Description of Artificial Sequence: Synthetic oligonucleotide
  Antisense strand to SEQ ID NO: 2510262
gaaaccagucaauuucuau

SEQ ID NO: 2510264 - RNA, 19 nt, Artificial Sequence
  Description of Artificial Sequence: Synthetic oligonucleotide
  Sense strand starting at position 2637 of SEQ ID NO: 1888094
ccagaaagucuauagccua

SEQ ID NO: 2510265 - RNA, 19 nt, Artificial Sequence
  Description of Artificial Sequence: Synthetic oligonucleotide
  Antisense strand to SEQ ID NO: 2510264
uaggcuauagacuuucugg

SEQ ID NO: 2510266 - RNA, 19 nt, Artificial Sequence
  Description of Artificial Sequence: Synthetic oligonucleotide
  Sense strand starting at position 2798 of SEQ ID NO: 1888094
uaaugaauguuucuuuggu

SEQ ID NO: 2510267 - RNA, 19 nt, Artificial Sequence
  Description of Artificial Sequence: Synthetic oligonucleotide
  Antisense strand to SEQ ID NO: 2510266
accaaagaaacauucauua

SEQ ID NO: 2510268 - RNA, 19 nt, Artificial Sequence
  Description of Artificial Sequence: Synthetic oligonucleotide
  Sense strand starting at position 2974 of SEQ ID NO: 1888094
cccucaagucaguaucuua

SEQ ID NO: 2510269 - RNA, 19 nt, Artificial Sequence
  Description of Artificial Sequence: Synthetic oligonucleotide
  Antisense strand to SEQ ID NO: 2510268
uaagauacugacuugaggg

SEQ ID NO: 2510270 - RNA, 19 nt, Artificial Sequence
  Description of Artificial Sequence: Synthetic oligonucleotide
  Sense strand starting at position 3481 of SEQ ID NO: 1888094
acuaaauaauaccugugua

SEQ ID NO: 2510271 - RNA, 19 nt, Artificial Sequence
  Description of Artificial Sequence: Synthetic oligonucleotide
  Antisense strand to SEQ ID NO: 2510270
uacacagguauuauuuagu

SEQ ID NO: 2510272 - RNA, 19 nt, Artificial Sequence
  Description of Artificial Sequence: Synthetic oligonucleotide
  Sense strand starting at position 3576 of SEQ ID NO: 1888094
ggacaaacgucaucccuau

SEQ ID NO: 2510273 - RNA, 19 nt, Artificial Sequence
  Description of Artificial Sequence: Synthetic oligonucleotide
  Antisense strand to SEQ ID NO: 2510272
auagggaugacguuugucc

SEQ ID NO: 2510274 - RNA, 19 nt, Artificial Sequence
  Description of Artificial Sequence: Synthetic oligonucleotide
  Sense strand starting at position 3669 of SEQ ID NO: 1888094
agaucucccucccuuagua

SEQ ID NO: 2510275 - RNA, 19 nt, Artificial Sequence
  Description of Artificial Sequence: Synthetic oligonucleotide
  Antisense strand to SEQ ID NO: 2510274
uacuaagggagggagaucu

SEQ ID NO: 2510276 - RNA, 19 nt, Artificial Sequence
  Description of Artificial Sequence: Synthetic oligonucleotide
  Sense strand starting at position 3714 of SEQ ID NO: 1888094
accuaaagauacuuuguga

SEQ ID NO: 2510277 - RNA, 19 nt, Artificial Sequence
  Description of Artificial Sequence: Synthetic oligonucleotide
  Antisense strand to SEQ ID NO: 2510276
ucacaaaguaucuuuaggu

SEQ ID NO: 2510278 - RNA, 19 nt, Artificial Sequence
  Description of Artificial Sequence: Synthetic oligonucleotide
  Sense strand starting at position 3754 of SEQ ID NO: 1888094
aagcucugcuaguuaaaga

SEQ ID NO: 2510279 - RNA, 19 nt, Artificial Sequence
  Description of Artificial Sequence: Synthetic oligonucleotide
  Antisense strand to SEQ ID NO: 2510278
ucuuuaacuagcagagcuu

SEQ ID NO: 2510280 - RNA, 19 nt, Artificial Sequence
  Description of Artificial Sequence: Synthetic oligonucleotide
  Sense strand starting at position 3909 of SEQ ID NO: 1888094
ucagauuuaucugagguga

SEQ ID NO: 2510281 - RNA, 19 nt, Artificial Sequence
  Description of Artificial Sequence: Synthetic oligonucleotide
  Antisense strand to SEQ ID NO: 2510280
ucaccucagauaaaucuga

SEQ ID NO: 2510282 - RNA, 19 nt, Artificial Sequence
  Description of Artificial Sequence: Synthetic oligonucleotide
  Sense strand starting at position 58 of SEQ ID NO: 1888095
gaaggcugagugugcaaau

SEQ ID NO: 2510283 - RNA, 19 nt, Artificial Sequence
  Description of Artificial Sequence: Synthetic oligonucleotide
  Antisense strand to SEQ ID NO: 2510282
auuugcacacucagccuuc

SEQ ID NO: 2510284 - RNA, 19 nt, Artificial Sequence
  Description of Artificial Sequence: Synthetic oligonucleotide
  Sense strand starting at position 61 of SEQ ID NO: 1888095
ggcugagugugcaaaugug

SEQ ID NO: 2510285 - RNA, 19 nt, Artificial Sequence
  Description of Artificial Sequence: Synthetic oligonucleotide
  Antisense strand to SEQ ID NO: 2510284
cacauuugcacacucagcc

SEQ ID NO: 2510286 - RNA, 19 nt, Artificial Sequence
  Description of Artificial Sequence: Synthetic oligonucleotide
  Sense strand starting at position 70 of SEQ ID NO: 1888095
ugcaaauguggguggaguu

SEQ ID NO: 2510287 - RNA, 19 nt, Artificial Sequence
  Description of Artificial Sequence: Synthetic oligonucleotide
  Antisense strand to SEQ ID NO: 2510286
aacuccacccacauuugca

SEQ ID NO: 2510288 - RNA, 19 nt, Artificial Sequence
  Description of Artificial Sequence: Synthetic oligonucleotide
  Sense strand starting at position 222 of SEQ ID NO: 1888095
gacccugaguccuggacau

SEQ ID NO: 2510289 - RNA, 19 nt, Artificial Sequence
  Description of Artificial Sequence: Synthetic oligonucleotide
  Antisense strand to SEQ ID NO: 2510288
auguccaggacucaggguc

SEQ ID NO: 2510290 - RNA, 19 nt, Artificial Sequence
  Description of Artificial Sequence: Synthetic oligonucleotide
  Sense strand starting at position 274 of SEQ ID NO: 1888095
uccugucucugucuuaaga

SEQ ID NO: 2510291 - RNA, 19 nt, Artificial Sequence
  Description of Artificial Sequence: Synthetic oligonucleotide
  Antisense strand to SEQ ID NO: 2510290
ucuuaagacagagacagga

SEQ ID NO: 2510292 - RNA, 19 nt, Artificial Sequence
  Description of Artificial Sequence: Synthetic oligonucleotide
  Sense strand starting at position 276 of SEQ ID NO: 1888095
cugucucugucuuaagagu

SEQ ID NO: 2510293 - RNA, 19 nt, Artificial Sequence
  Description of Artificial Sequence: Synthetic oligonucleotide
  Antisense strand to SEQ ID NO: 2510292
acucuuaagacagagacag

SEQ ID NO: 2510294 - RNA, 19 nt, Artificial Sequence
  Description of Artificial Sequence: Synthetic oligonucleotide
  Sense strand starting at position 282 of SEQ ID NO: 1888095
cugucuuaagaguggagca

SEQ ID NO: 2510295 - RNA, 19 nt, Artificial Sequence
  Description of Artificial Sequence: Synthetic oligonucleotide
  Antisense strand to SEQ ID NO: 2510294
ugcuccacucuuaagacag

SEQ ID NO: 2510296 - RNA, 19 nt, Artificial Sequence
  Description of Artificial Sequence: Synthetic oligonucleotide
  Sense strand starting at position 283 of SEQ ID NO: 1888095
ugucuuaagaguggagcau

SEQ ID NO: 2510297 - RNA, 19 nt, Artificial Sequence
  Description of Artificial Sequence: Synthetic oligonucleotide
  Antisense strand to SEQ ID NO: 2510296
augcuccacucuuaagaca

SEQ ID NO: 2510298 - RNA, 19 nt, Artificial Sequence
  Description of Artificial Sequence: Synthetic oligonucleotide
  Sense strand starting at position 289 of SEQ ID NO: 1888095
aagaguggagcaugucuua

SEQ ID NO: 2510299 - RNA, 19 nt, Artificial Sequence
  Description of Artificial Sequence: Synthetic oligonucleotide
  Antisense strand to SEQ ID NO: 2510298
uaagacaugcuccacucuu

SEQ ID NO: 2510300 - RNA, 19 nt, Artificial Sequence
  Description of Artificial Sequence: Synthetic oligonucleotide
  Sense strand starting at position 292 of SEQ ID NO: 1888095
aguggagcaugucuuaaga

SEQ ID NO: 2510301 - RNA, 19 nt, Artificial Sequence
  Description of Artificial Sequence: Synthetic oligonucleotide
  Antisense strand to SEQ ID NO: 2510300
ucuuaagacaugcuccacu

SEQ ID NO: 2510302 - RNA, 19 nt, Artificial Sequence
  Description of Artificial Sequence: Synthetic oligonucleotide
  Sense strand starting at position 302 of SEQ ID NO: 1888095
gucuuaagagcuggcauga

SEQ ID NO: 2510303 - RNA, 19 nt, Artificial Sequence
  Description of Artificial Sequence: Synthetic oligonucleotide
  Antisense strand to SEQ ID NO: 2510302
ucaugccagcucuuaagac

SEQ ID NO: 2510304 - RNA, 19 nt, Artificial Sequence
  Description of Artificial Sequence: Synthetic oligonucleotide
  Sense strand starting at position 473 of SEQ ID NO: 1888095
ggagccuccuguuaagcau

SEQ ID NO: 2510305 - RNA, 19 nt, Artificial Sequence
  Description of Artificial Sequence: Synthetic oligonucleotide
  Antisense strand to SEQ ID NO: 2510304
augcuuaacaggaggcucc

SEQ ID NO: 2510306 - RNA, 19 nt, Artificial Sequence
  Description of Artificial Sequence: Synthetic oligonucleotide
  Sense strand starting at position 539 of SEQ ID NO: 1888095
ggagacaucucauucuggu

SEQ ID NO: 2510307 - RNA, 19 nt, Artificial Sequence
  Description of Artificial Sequence: Synthetic oligonucleotide
  Antisense strand to SEQ ID NO: 2510306
accagaaugagaugucucc

SEQ ID NO: 2510308 - RNA, 19 nt, Artificial Sequence
  Description of Artificial Sequence: Synthetic oligonucleotide
  Sense strand starting at position 605 of SEQ ID NO: 1888095
acccaauuccuucgaguca

SEQ ID NO: 2510309 - RNA, 19 nt, Artificial Sequence
  Description of Artificial Sequence: Synthetic oligonucleotide
  Antisense strand to SEQ ID NO: 2510308
ugacucgaaggaauugggu

SEQ ID NO: 2510310 - RNA, 19 nt, Artificial Sequence
  Description of Artificial Sequence: Synthetic oligonucleotide
  Sense strand starting at position 612 of SEQ ID NO: 1888095
uccuucgagucacugagau

SEQ ID NO: 2510311 - RNA, 19 nt, Artificial Sequence
  Description of Artificial Sequence: Synthetic oligonucleotide
  Antisense strand to SEQ ID NO: 2510310
aucucagugacucgaagga

SEQ ID NO: 2510312 - RNA, 19 nt, Artificial Sequence
  Description of Artificial Sequence: Synthetic oligonucleotide
  Sense strand starting at position 742 of SEQ ID NO: 1888095
cauggcaaccugugugaau

SEQ ID NO: 2510313 - RNA, 19 nt, Artificial Sequence
  Description of Artificial Sequence: Synthetic oligonucleotide
  Antisense strand to SEQ ID NO: 2510312
auucacacagguugccaug

SEQ ID NO: 2510314 - RNA, 19 nt, Artificial Sequence
  Description of Artificial Sequence: Synthetic oligonucleotide
  Sense strand starting at position 744 of SEQ ID NO: 1888095
uggcaaccugugugaauga

SEQ ID NO: 2510315 - RNA, 19 nt, Artificial Sequence
  Description of Artificial Sequence: Synthetic oligonucleotide
  Antisense strand to SEQ ID NO: 2510314
ucauucacacagguugcca

SEQ ID NO: 2510316 - RNA, 19 nt, Artificial Sequence
  Description of Artificial Sequence: Synthetic oligonucleotide
  Sense strand starting at position 833 of SEQ ID NO: 1888095
gagauuguguccucgccuu

SEQ ID NO: 2510317 - RNA, 19 nt, Artificial Sequence
  Description of Artificial Sequence: Synthetic oligonucleotide
  Antisense strand to SEQ ID NO: 2510316
aaggcgaggacacaaucuc

SEQ ID NO: 2510318 - RNA, 19 nt, Artificial Sequence
  Description of Artificial Sequence: Synthetic oligonucleotide
  Sense strand starting at position 1168 of SEQ ID NO: 1888095
acaguugccucuugaaugu

SEQ ID NO: 2510319 - RNA, 19 nt, Artificial Sequence
  Description of Artificial Sequence: Synthetic oligonucleotide
  Antisense strand to SEQ ID NO: 2510318
acauucaagaggcaacugu

SEQ ID NO: 2510320 - RNA, 19 nt, Artificial Sequence
  Description of Artificial Sequence: Synthetic oligonucleotide
  Sense strand starting at position 1187 of SEQ ID NO: 1888095
gcacaugugugaggagagu

SEQ ID NO: 2510321 - RNA, 19 nt, Artificial Sequence
  Description of Artificial Sequence: Synthetic oligonucleotide
  Antisense strand to SEQ ID NO: 2510320
acucuccucacacaugugc

SEQ ID NO: 2510322 - RNA, 19 nt, Artificial Sequence
  Description of Artificial Sequence: Synthetic oligonucleotide
  Sense strand starting at position 1202 of SEQ ID NO: 1888095
gagugucacacccgucgaa

SEQ ID NO: 2510323 - RNA, 19 nt, Artificial Sequence
  Description of Artificial Sequence: Synthetic oligonucleotide
  Antisense strand to SEQ ID NO: 2510322
uucgacgggugugacacuc

SEQ ID NO: 2510324 - RNA, 19 nt, Artificial Sequence
  Description of Artificial Sequence: Synthetic oligonucleotide
  Sense strand starting at position 1205 of SEQ ID NO: 1888095
ugucacacccgucgaauua

SEQ ID NO: 2510325 - RNA, 19 nt, Artificial Sequence
  Description of Artificial Sequence: Synthetic oligonucleotide
  Antisense strand to SEQ ID NO: 2510324
uaauucgacgggugugaca

SEQ ID NO: 2510326 - RNA, 19 nt, Artificial Sequence
  Description of Artificial Sequence: Synthetic oligonucleotide
  Sense strand starting at position 1206 of SEQ ID NO: 1888095
gucacacccgucgaauuaa

SEQ ID NO: 2510327 - RNA, 19 nt, Artificial Sequence
  Description of Artificial Sequence: Synthetic oligonucleotide
  Antisense strand to SEQ ID NO: 2510326
uuaauucgacgggugugac

SEQ ID NO: 2510328 - RNA, 19 nt, Artificial Sequence
  Description of Artificial Sequence: Synthetic oligonucleotide
  Sense strand starting at position 1734 of SEQ ID NO: 1888095
aggagucuuggccgcagaa

SEQ ID NO: 2510329 - RNA, 19 nt, Artificial Sequence
  Description of Artificial Sequence: Synthetic oligonucleotide
  Antisense strand to SEQ ID NO: 2510328
uucugcggccaagacuccu

SEQ ID NO: 2510330 - RNA, 19 nt, Artificial Sequence
  Description of Artificial Sequence: Synthetic oligonucleotide
  Sense strand starting at position 1736 of SEQ ID NO: 1888095
gagucuuggccgcagaacu

SEQ ID NO: 2510331 - RNA, 19 nt, Artificial Sequence
  Description of Artificial Sequence: Synthetic oligonucleotide
  Antisense strand to SEQ ID NO: 2510330
aguucugcggccaagacuc

SEQ ID NO: 2510332 - RNA, 19 nt, Artificial Sequence
  Description of Artificial Sequence: Synthetic oligonucleotide
  Sense strand starting at position 1790 of SEQ ID NO: 1888095
gagcucaggucacaaacuu

SEQ ID NO: 2510333 - RNA, 19 nt, Artificial Sequence
  Description of Artificial Sequence: Synthetic oligonucleotide
  Antisense strand to SEQ ID NO: 2510332
aaguuugugaccugagcuc

SEQ ID NO: 2510334 - RNA, 19 nt, Artificial Sequence
  Description of Artificial Sequence: Synthetic oligonucleotide
  Sense strand starting at position 2486 of SEQ ID NO: 1888095
ggaucaggguccuauucua

SEQ ID NO: 2510335 - RNA, 19 nt, Artificial Sequence
  Description of Artificial Sequence: Synthetic oligonucleotide
  Antisense strand to SEQ ID NO: 2510334
uagaauaggacccugaucc

SEQ ID NO: 2510336 - RNA, 19 nt, Artificial Sequence
  Description of Artificial Sequence: Synthetic oligonucleotide
  Sense strand starting at position 2747 of SEQ ID NO: 1888095
ccagccaucugucugcauu

SEQ ID NO: 2510337 - RNA, 19 nt, Artificial Sequence
  Description of Artificial Sequence: Synthetic oligonucleotide
  Antisense strand to SEQ ID NO: 2510336
aaugcagacagauggcugg

SEQ ID NO: 2510338 - RNA, 19 nt, Artificial Sequence
  Description of Artificial Sequence: Synthetic oligonucleotide
  Sense strand starting at position 2750 of SEQ ID NO: 1888095
gccaucugucugcauuaga

SEQ ID NO: 2510339 - RNA, 19 nt, Artificial Sequence
  Description of Artificial Sequence: Synthetic oligonucleotide
  Antisense strand to SEQ ID NO: 2510338
ucuaaugcagacagauggc

SEQ ID NO: 2510340 - RNA, 19 nt, Artificial Sequence
  Description of Artificial Sequence: Synthetic oligonucleotide
  Sense strand starting at position 2753 of SEQ ID NO: 1888095
aucugucugcauuagagaa

SEQ ID NO: 2510341 - RNA, 19 nt, Artificial Sequence
  Description of Artificial Sequence: Synthetic oligonucleotide
  Antisense strand to SEQ ID NO: 2510340
uucucuaaugcagacagau

SEQ ID NO: 2510342 - RNA, 19 nt, Artificial Sequence
  Description of Artificial Sequence: Synthetic oligonucleotide
  Sense strand starting at position 2757 of SEQ ID NO: 1888095
gucugcauuagagaaugau

SEQ ID NO: 2510343 - RNA, 19 nt, Artificial Sequence
  Description of Artificial Sequence: Synthetic oligonucleotide
  Antisense strand to SEQ ID NO: 2510342
aucauucucuaaugcagac

SEQ ID NO: 2510344 - RNA, 19 nt, Artificial Sequence
  Description of Artificial Sequence: Synthetic oligonucleotide
  Sense strand starting at position 2760 of SEQ ID NO: 1888095
ugcauuagagaaugaugcu

SEQ ID NO: 2510345 - RNA, 19 nt, Artificial Sequence
  Description of Artificial Sequence: Synthetic oligonucleotide
  Antisense strand to SEQ ID NO: 2510344
agcaucauucucuaaugca

SEQ ID NO: 2510346 - RNA, 19 nt, Artificial Sequence
  Description of Artificial Sequence: Synthetic oligonucleotide
  Sense strand starting at position 2761 of SEQ ID NO: 1888095
gcauuagagaaugaugcuu

SEQ ID NO: 2510347 - RNA, 19 nt, Artificial Sequence
  Description of Artificial Sequence: Synthetic oligonucleotide
  Antisense strand to SEQ ID NO: 2510346
aagcaucauucucuaaugc

SEQ ID NO: 2510348 - RNA, 19 nt, Artificial Sequence
  Description of Artificial Sequence: Synthetic oligonucleotide
  Sense strand starting at position 3173 of SEQ ID NO: 1888095
uggcuuggucccuggucua

SEQ ID NO: 2510349 - RNA, 19 nt, Artificial Sequence
  Description of Artificial Sequence: Synthetic oligonucleotide
  Antisense strand to SEQ ID NO: 2510348
uagaccagggaccaagcca

SEQ ID NO: 2510350 - RNA, 19 nt, Artificial Sequence
  Description of Artificial Sequence: Synthetic oligonucleotide
  Sense strand starting at position 3573 of SEQ ID NO: 1888095
gugugauccugccucuugu

SEQ ID NO: 2510351 - RNA, 19 nt, Artificial Sequence
  Description of Artificial Sequence: Synthetic oligonucleotide
  Antisense strand to SEQ ID NO: 2510350
acaagaggcaggaucacac

SEQ ID NO: 2510352 - RNA, 19 nt, Artificial Sequence
  Description of Artificial Sequence: Synthetic oligonucleotide
  Sense strand starting at position 3900 of SEQ ID NO: 1888095
accgcagugucugggagaa

SEQ ID NO: 2510353 - RNA, 19 nt, Artificial Sequence
  Description of Artificial Sequence: Synthetic oligonucleotide
  Antisense strand to SEQ ID NO: 2510352
uucucccagacacugcggu

SEQ ID NO: 2510354 - RNA, 19 nt, Artificial Sequence
  Description of Artificial Sequence: Synthetic oligonucleotide
  Sense strand starting at position 10 of SEQ ID NO: 1888096
ggagcaauagucuauauca

SEQ ID NO: 2510355 - RNA, 19 nt, Artificial Sequence
  Description of Artificial Sequence: Synthetic oligonucleotide
  Antisense strand to SEQ ID NO: 2510354
ugauauagacuauugcucc

SEQ ID NO: 2510356 - RNA, 19 nt, Artificial Sequence
  Description of Artificial Sequence: Synthetic oligonucleotide
  Sense strand starting at position 70 of SEQ ID NO: 1888096
guaaguacacaccauuauu

SEQ ID NO: 2510357 - RNA, 19 nt, Artificial Sequence
  Description of Artificial Sequence: Synthetic oligonucleotide
  Antisense strand to SEQ ID NO: 2510356
aauaaugguguguacuuac

SEQ ID NO: 2510358 - RNA, 19 nt, Artificial Sequence
  Description of Artificial Sequence: Synthetic oligonucleotide
  Sense strand starting at position 159 of SEQ ID NO: 1888096
cuguauuagguuuacuagu

SEQ ID NO: 2510359 - RNA, 19 nt, Artificial Sequence
  Description of Artificial Sequence: Synthetic oligonucleotide
  Antisense strand to SEQ ID NO: 2510358
acuaguaaaccuaauacag

SEQ ID NO: 2510360 - RNA, 19 nt, Artificial Sequence
  Description of Artificial Sequence: Synthetic oligonucleotide
  Sense strand starting at position 262 of SEQ ID NO: 1888096
gcugccaguauauaggaua

SEQ ID NO: 2510361 - RNA, 19 nt, Artificial Sequence
  Description of Artificial Sequence: Synthetic oligonucleotide
  Antisense strand to SEQ ID NO: 2510360
uauccuauauacuggcagc

SEQ ID NO: 2510362 - RNA, 19 nt, Artificial Sequence
  Description of Artificial Sequence: Synthetic oligonucleotide
  Sense strand starting at position 498 of SEQ ID NO: 1888096
ucaguaaaugcagacuauu

SEQ ID NO: 2510363 - RNA, 19 nt, Artificial Sequence
  Description of Artificial Sequence: Synthetic oligonucleotide
  Antisense strand to SEQ ID NO: 2510362
aauagucugcauuuacuga

SEQ ID NO: 2510364 - RNA, 19 nt, Artificial Sequence
  Description of Artificial Sequence: Synthetic oligonucleotide
  Sense strand starting at position 626 of SEQ ID NO: 1888096
agcuuaauugcugaaucaa

SEQ ID NO: 2510365 - RNA, 19 nt, Artificial Sequence
  Description of Artificial Sequence: Synthetic oligonucleotide
  Antisense strand to SEQ ID NO: 2510364
uugauucagcaauuaagcu

SEQ ID NO: 2510366 - RNA, 19 nt, Artificial Sequence
  Description of Artificial Sequence: Synthetic oligonucleotide
  Sense strand starting at position 724 of SEQ ID NO: 1888096
uuuacacuuccaggaguga

SEQ ID NO: 2510367 - RNA, 19 nt, Artificial Sequence
  Description of Artificial Sequence: Synthetic oligonucleotide
  Antisense strand to SEQ ID NO: 2510366
ucacuccuggaaguguaaa

SEQ ID NO: 2510368 - RNA, 19 nt, Artificial Sequence
  Description of Artificial Sequence: Synthetic oligonucleotide
  Sense strand starting at position 765 of SEQ ID NO: 1888096
ccauaucaacaguaguuau

SEQ ID NO: 2510369 - RNA, 19 nt, Artificial Sequence
  Description of Artificial Sequence: Synthetic oligonucleotide
  Antisense strand to SEQ ID NO: 2510368
auaacuacuguugauaugg

SEQ ID NO: 2510370 - RNA, 19 nt, Artificial Sequence
  Description of Artificial Sequence: Synthetic oligonucleotide
  Sense strand starting at position 1064 of SEQ ID NO: 1888096
cugcccauagucuagagaa

SEQ ID NO: 2510371 - RNA, 19 nt, Artificial Sequence
  Description of Artificial Sequence: Synthetic oligonucleotide
  Antisense strand to SEQ ID NO: 2510370
uucucuagacuaugggcag

SEQ ID NO: 2510372 - RNA, 19 nt, Artificial Sequence
  Description of Artificial Sequence: Synthetic oligonucleotide
  Sense strand starting at position 1124 of SEQ ID NO: 1888096
aggucuuucuggguuuaga

SEQ ID NO: 2510373 - RNA, 19 nt, Artificial Sequence
  Description of Artificial Sequence: Synthetic oligonucleotide
  Antisense strand to SEQ ID NO: 2510372
ucuaaacccagaaagaccu

SEQ ID NO: 2510374 - RNA, 19 nt, Artificial Sequence
  Description of Artificial Sequence: Synthetic oligonucleotide
  Sense strand starting at position 1359 of SEQ ID NO: 1888096
gggccauuccagcaaauua

SEQ ID NO: 2510375 - RNA, 19 nt, Artificial Sequence
  Description of Artificial Sequence: Synthetic oligonucleotide
  Antisense strand to SEQ ID NO: 2510374
uaauuugcuggaauggccc

SEQ ID NO: 2510376 - RNA, 19 nt, Artificial Sequence
  Description of Artificial Sequence: Synthetic oligonucleotide
  Sense strand starting at position 1514 of SEQ ID NO: 1888096
gcuaucucuggguagauag

SEQ ID NO: 2510377 - RNA, 19 nt, Artificial Sequence
  Description of Artificial Sequence: Synthetic oligonucleotide
  Antisense strand to SEQ ID NO: 2510376
cuaucuacccagagauagc

SEQ ID NO: 2510378 - RNA, 19 nt, Artificial Sequence
  Description of Artificial Sequence: Synthetic oligonucleotide
  Sense strand starting at position 1762 of SEQ ID NO: 1888096
uaggucauaugguuuaaag

SEQ ID NO: 2510379 - RNA, 19 nt, Artificial Sequence
  Description of Artificial Sequence: Synthetic oligonucleotide
  Antisense strand to SEQ ID NO: 2510378
cuuuaaaccauaugaccua

SEQ ID NO: 2510380 - RNA, 19 nt, Artificial Sequence
  Description of Artificial Sequence: Synthetic oligonucleotide
  Sense strand starting at position 1764 of SEQ ID NO: 1888096
ggucauaugguuuaaaguu

SEQ ID NO: 2510381 - RNA, 19 nt, Artificial Sequence
  Description of Artificial Sequence: Synthetic oligonucleotide
  Antisense strand to SEQ ID NO: 2510380
aacuuuaaaccauaugacc

SEQ ID NO: 2510382 - RNA, 19 nt, Artificial Sequence
  Description of Artificial Sequence: Synthetic oligonucleotide
  Sense strand starting at position 1928 of SEQ ID NO: 1888096
accuguuugccauagaggu

SEQ ID NO: 2510383 - RNA, 19 nt, Artificial Sequence
  Description of Artificial Sequence: Synthetic oligonucleotide
  Antisense strand to SEQ ID NO: 2510382
accucuauggcaaacaggu

SEQ ID NO: 2510384 - RNA, 19 nt, Artificial Sequence
  Description of Artificial Sequence: Synthetic oligonucleotide
  Sense strand starting at position 1936 of SEQ ID NO: 1888096
gccauagaggucuaggcau

SEQ ID NO: 2510385 - RNA, 19 nt, Artificial Sequence
  Description of Artificial Sequence: Synthetic oligonucleotide
  Antisense strand to SEQ ID NO: 2510384
augccuagaccucuauggc

SEQ ID NO: 2510386 - RNA, 19 nt, Artificial Sequence
  Description of Artificial Sequence: Synthetic oligonucleotide
  Sense strand starting at position 2565 of SEQ ID NO: 1888096
gccugauuagcauaucaau

SEQ ID NO: 2510387 - RNA, 19 nt, Artificial Sequence
  Description of Artificial Sequence: Synthetic oligonucleotide
  Antisense strand to SEQ ID NO: 2510386
auugauaugcuaaucaggc

SEQ ID NO: 2510388 - RNA, 19 nt, Artificial Sequence
  Description of Artificial Sequence: Synthetic oligonucleotide
  Sense strand starting at position 2610 of SEQ ID NO: 1888096
cuuuaucauucucuguaga

SEQ ID NO: 2510389 - RNA, 19 nt, Artificial Sequence
  Description of Artificial Sequence: Synthetic oligonucleotide
  Antisense strand to SEQ ID NO: 2510388
ucuacagagaaugauaaag

SEQ ID NO: 2510390 - RNA, 19 nt, Artificial Sequence
  Description of Artificial Sequence: Synthetic oligonucleotide
  Sense strand starting at position 2612 of SEQ ID NO: 1888096
uuaucauucucuguagaca

SEQ ID NO: 2510391 - RNA, 19 nt, Artificial Sequence
  Description of Artificial Sequence: Synthetic oligonucleotide
  Antisense strand to SEQ ID NO: 2510390
ugucuacagagaaugauaa

SEQ ID NO: 2510392 - RNA, 19 nt, Artificial Sequence
  Description of Artificial Sequence: Synthetic oligonucleotide
  Sense strand starting at position 2717 of SEQ ID NO: 1888096
gacauacccugaguuaaug

SEQ ID NO: 2510393 - RNA, 19 nt, Artificial Sequence
  Description of Artificial Sequence: Synthetic oligonucleotide
  Antisense strand to SEQ ID NO: 2510392
cauuaacucaggguauguc

SEQ ID NO: 2510394 - RNA, 19 nt, Artificial Sequence
  Description of Artificial Sequence: Synthetic oligonucleotide
  Sense strand starting at position 2830 of SEQ ID NO: 1888096
cugagaaacuuaguccuuu

SEQ ID NO: 2510395 - RNA, 19 nt, Artificial Sequence
  Description of Artificial Sequence: Synthetic oligonucleotide
  Antisense strand to SEQ ID NO: 2510394
aaaggacuaaguuucucag

SEQ ID NO: 2510396 - RNA, 19 nt, Artificial Sequence
  Description of Artificial Sequence: Synthetic oligonucleotide
  Sense strand starting at position 2899 of SEQ ID NO: 1888096
uauguaaucugccuaaagg

SEQ ID NO: 2510397 - RNA, 19 nt, Artificial Sequence
  Description of Artificial Sequence: Synthetic oligonucleotide
  Antisense strand to SEQ ID NO: 2510396
ccuuuaggcagauuacaua

SEQ ID NO: 2510398 - RNA, 19 nt, Artificial Sequence
  Description of Artificial Sequence: Synthetic oligonucleotide
  Sense strand starting at position 2941 of SEQ ID NO: 1888096
augucaauguccucugaga

SEQ ID NO: 2510399 - RNA, 19 nt, Artificial Sequence
  Description of Artificial Sequence: Synthetic oligonucleotide
  Antisense strand to SEQ ID NO: 2510398
ucucagaggacauugacau

SEQ ID NO: 2510400 - RNA, 19 nt, Artificial Sequence
  Description of Artificial Sequence: Synthetic oligonucleotide
  Sense strand starting at position 2943 of SEQ ID NO: 1888096
gucaauguccucugagaag

SEQ ID NO: 2510401 - RNA, 19 nt, Artificial Sequence
  Description of Artificial Sequence: Synthetic oligonucleotide
  Antisense strand to SEQ ID NO: 2510400
cuucucagaggacauugac

SEQ ID NO: 2510402 - RNA, 19 nt, Artificial Sequence
  Description of Artificial Sequence: Synthetic oligonucleotide
  Sense strand starting at position 3000 of SEQ ID NO: 1888096
agaauugacuuggcucuga

SEQ ID NO: 2510403 - RNA, 19 nt, Artificial Sequence
  Description of Artificial Sequence: Synthetic oligonucleotide
  Antisense strand to SEQ ID NO: 2510402
ucagagccaagucaauucu

SEQ ID NO: 2510404 - RNA, 19 nt, Artificial Sequence
  Description of Artificial Sequence: Synthetic oligonucleotide
  Sense strand starting at position 3004 of SEQ ID NO: 1888096
uugacuuggcucugagaaa

SEQ ID NO: 2510405 - RNA, 19 nt, Artificial Sequence
  Description of Artificial Sequence: Synthetic oligonucleotide
  Antisense strand to SEQ ID NO: 2510404
uuucucagagccaagucaa

SEQ ID NO: 2510406 - RNA, 19 nt, Artificial Sequence
  Description of Artificial Sequence: Synthetic oligonucleotide
  Sense strand starting at position 3157 of SEQ ID NO: 1888096
ggaggaugguccuccucua

SEQ ID NO: 2510407 - RNA, 19 nt, Artificial Sequence
  Description of Artificial Sequence: Synthetic oligonucleotide
  Antisense strand to SEQ ID NO: 2510406
uagaggaggaccauccucc

SEQ ID NO: 2510408 - RNA, 19 nt, Artificial Sequence
  Description of Artificial Sequence: Synthetic oligonucleotide
  Sense strand starting at position 3464 of SEQ ID NO: 1888096
aguuuauuccuguaccuac

SEQ ID NO: 2510409 - RNA, 19 nt, Artificial Sequence
  Description of Artificial Sequence: Synthetic oligonucleotide
  Antisense strand to SEQ ID NO: 2510408
guagguacaggaauaaacu

SEQ ID NO: 2510410 - RNA, 19 nt, Artificial Sequence
  Description of Artificial Sequence: Synthetic oligonucleotide
  Sense strand starting at position 3538 of SEQ ID NO: 1888096
gucacuuaguuaucacaag

SEQ ID NO: 2510411 - RNA, 19 nt, Artificial Sequence
  Description of Artificial Sequence: Synthetic oligonucleotide
  Antisense strand to SEQ ID NO: 2510410
cuugugauaacuaagugac

SEQ ID NO: 2510412 - RNA, 19 nt, Artificial Sequence
  Description of Artificial Sequence: Synthetic oligonucleotide
  Sense strand starting at position 3571 of SEQ ID NO: 1888096
aguguugugauuugccaaa

SEQ ID NO: 2510413 - RNA, 19 nt, Artificial Sequence
  Description of Artificial Sequence: Synthetic oligonucleotide
  Antisense strand to SEQ ID NO: 2510412
uuuggcaaaucacaacacu

SEQ ID NO: 2510414 - RNA, 19 nt, Artificial Sequence
  Description of Artificial Sequence: Synthetic oligonucleotide
  Sense strand starting at position 3606 of SEQ ID NO: 1888096
guuaaagcucugcaaauaa

SEQ ID NO: 2510415 - RNA, 19 nt, Artificial Sequence
  Description of Artificial Sequence: Synthetic oligonucleotide
  Antisense strand to SEQ ID NO: 2510414
uuauuugcagagcuuuaac

SEQ ID NO: 2510416 - RNA, 19 nt, Artificial Sequence
  Description of Artificial Sequence: Synthetic oligonucleotide
  Sense strand starting at position 3694 of SEQ ID NO: 1888096
uguguaauuuguguggaua

SEQ ID NO: 2510417 - RNA, 19 nt, Artificial Sequence
  Description of Artificial Sequence: Synthetic oligonucleotide
  Antisense strand to SEQ ID NO: 2510416
uauccacacaaauuacaca

SEQ ID NO: 2510418 - RNA, 19 nt, Artificial Sequence
  Description of Artificial Sequence: Synthetic oligonucleotide
  Sense strand starting at position 3695 of SEQ ID NO: 1888096
guguaauuuguguggauau

SEQ ID NO: 2510419 - RNA, 19 nt, Artificial Sequence
  Description of Artificial Sequence: Synthetic oligonucleotide
  Antisense strand to SEQ ID NO: 2510418
auauccacacaaauuacac

SEQ ID NO: 2510420 - RNA, 19 nt, Artificial Sequence
  Description of Artificial Sequence: Synthetic oligonucleotide
  Sense strand starting at position 3765 of SEQ ID NO: 1888096
gaaugucugguggaauauu

SEQ ID NO: 2510421 - RNA, 19 nt, Artificial Sequence
  Description of Artificial Sequence: Synthetic oligonucleotide
  Antisense strand to SEQ ID NO: 2510420
aauauuccaccagacauuc

SEQ ID NO: 2510422 - RNA, 19 nt, Artificial Sequence
  Description of Artificial Sequence: Synthetic oligonucleotide
  Sense strand starting at position 3781 of SEQ ID NO: 1888096
auuugauugccaugcuacu

SEQ ID NO: 2510423 - RNA, 19 nt, Artificial Sequence
  Description of Artificial Sequence: Synthetic oligonucleotide
  Antisense strand to SEQ ID NO: 2510422
aguagcauggcaaucaaau

SEQ ID NO: 2510424 - RNA, 19 nt, Artificial Sequence
  Description of Artificial Sequence: Synthetic oligonucleotide
  Sense strand starting at position 3835 of SEQ ID NO: 1888096
acauauuugucucuagccu

SEQ ID NO: 2510425 - RNA, 19 nt, Artificial Sequence
  Description of Artificial Sequence: Synthetic oligonucleotide
  Antisense strand to SEQ ID NO: 2510424
aggcuagagacaaauaugu

SEQ ID NO: 2510426 - RNA, 19 nt, Artificial Sequence
  Description of Artificial Sequence: Synthetic oligonucleotide
  Sense strand starting at position 3839 of SEQ ID NO: 1888096
auuugucucuagccuauua

SEQ ID NO: 2510427 - RNA, 19 nt, Artificial Sequence
  Description of Artificial Sequence: Synthetic oligonucleotide
  Antisense strand to SEQ ID NO: 2510426
uaauaggcuagagacaaau

SEQ ID NO: 2510428 - RNA, 19 nt, Artificial Sequence
  Description of Artificial Sequence: Synthetic oligonucleotide
  Sense strand starting at position 3931 of SEQ ID NO: 1888096
ugagcaguauuucucuguu

SEQ ID NO: 2510429 - RNA, 19 nt, Artificial Sequence
  Description of Artificial Sequence: Synthetic oligonucleotide
  Antisense strand to SEQ ID NO: 2510428
aacagagaaauacugcuca

SEQ ID NO: 2510430 - RNA, 19 nt, Artificial Sequence
  Description of Artificial Sequence: Synthetic oligonucleotide
  Sense strand starting at position 3933 of SEQ ID NO: 1888096
agcaguauuucucuguuga

SEQ ID NO: 2510431 - RNA, 19 nt, Artificial Sequence
  Description of Artificial Sequence: Synthetic oligonucleotide
  Antisense strand to SEQ ID NO: 2510430
ucaacagagaaauacugcu

SEQ ID NO: 2510432 - RNA, 19 nt, Artificial Sequence
  Description of Artificial Sequence: Synthetic oligonucleotide
  Sense strand starting at position 3934 of SEQ ID NO: 1888096
gcaguauuucucuguugag

SEQ ID NO: 2510433 - RNA, 19 nt, Artificial Sequence
  Description of Artificial Sequence: Synthetic oligonucleotide
  Antisense strand to SEQ ID NO: 2510432
cucaacagagaaauacugc

SEQ ID NO: 2510434 - RNA, 19 nt, Artificial Sequence
  Description of Artificial Sequence: Synthetic oligonucleotide
  Sense strand starting at position 265 of SEQ ID NO: 1888097
gacagugcuguccaauaga

SEQ ID NO: 2510435 - RNA, 19 nt, Artificial Sequence
  Description of Artificial Sequence: Synthetic oligonucleotide
  Antisense strand to SEQ ID NO: 2510434
ucuauuggacagcacuguc

SEQ ID NO: 2510436 - RNA, 19 nt, Artificial Sequence
  Description of Artificial Sequence: Synthetic oligonucleotide
  Sense strand starting at position 404 of SEQ ID NO: 1888097
acauacuuguggccagaaa

SEQ ID NO: 2510437 - RNA, 19 nt, Artificial Sequence
  Description of Artificial Sequence: Synthetic oligonucleotide
  Antisense strand to SEQ ID NO: 2510436
uuucuggccacaaguaugu

SEQ ID NO: 2510438 - RNA, 19 nt, Artificial Sequence
  Description of Artificial Sequence: Synthetic oligonucleotide
  Sense strand starting at position 405 of SEQ ID NO: 1888097
cauacuuguggccagaaag

SEQ ID NO: 2510439 - RNA, 19 nt, Artificial Sequence
  Description of Artificial Sequence: Synthetic oligonucleotide
  Antisense strand to SEQ ID NO: 2510438
cuuucuggccacaaguaug

SEQ ID NO: 2510440 - RNA, 19 nt, Artificial Sequence
  Description of Artificial Sequence: Synthetic oligonucleotide
  Sense strand starting at position 864 of SEQ ID NO: 1888097
acaagaacaugucuguugu

SEQ ID NO: 2510441 - RNA, 19 nt, Artificial Sequence
  Description of Artificial Sequence: Synthetic oligonucleotide
  Antisense strand to SEQ ID NO: 2510440
acaacagacauguucuugu

SEQ ID NO: 2510442 - RNA, 19 nt, Artificial Sequence
  Description of Artificial Sequence: Synthetic oligonucleotide
  Sense strand starting at position 1997 of SEQ ID NO: 1888097
gcuacagcauaguucuaga

SEQ ID NO: 2510443 - RNA, 19 nt, Artificial Sequence
  Description of Artificial Sequence: Synthetic oligonucleotide
  Antisense strand to SEQ ID NO: 2510442
ucuagaacuaugcuguagc

SEQ ID NO: 2510444 - RNA, 19 nt, Artificial Sequence
  Description of Artificial Sequence: Synthetic oligonucleotide
  Sense strand starting at position 2002 of SEQ ID NO: 1888097
agcauaguucuagaaccuu

SEQ ID NO: 2510445 - RNA, 19 nt, Artificial Sequence
  Description of Artificial Sequence: Synthetic oligonucleotide
  Antisense strand to SEQ ID NO: 2510444
aagguucuagaacuaugcu

SEQ ID NO: 2510446 - RNA, 19 nt, Artificial Sequence
  Description of Artificial Sequence: Synthetic oligonucleotide
  Sense strand starting at position 2034 of SEQ ID NO: 1888097
aacacacaucgaggucauu

SEQ ID NO: 2510447 - RNA, 19 nt, Artificial Sequence
  Description of Artificial Sequence: Synthetic oligonucleotide
  Antisense strand to SEQ ID NO: 2510446
aaugaccucgauguguguu

SEQ ID NO: 2510448 - RNA, 19 nt, Artificial Sequence
  Description of Artificial Sequence: Synthetic oligonucleotide
  Sense strand starting at position 2088 of SEQ ID NO: 1888097
cgcagauacgcucacuuga

SEQ ID NO: 2510449 - RNA, 19 nt, Artificial Sequence
  Description of Artificial Sequence: Synthetic oligonucleotide
  Antisense strand to SEQ ID NO: 2510448
ucaagugagcguaucugcg

SEQ ID NO: 2510450 - RNA, 19 nt, Artificial Sequence
  Description of Artificial Sequence: Synthetic oligonucleotide
  Sense strand starting at position 2202 of SEQ ID NO: 1888097
caaggugcccaguaggaua

SEQ ID NO: 2510451 - RNA, 19 nt, Artificial Sequence
  Description of Artificial Sequence: Synthetic oligonucleotide
  Antisense strand to SEQ ID NO: 2510450
uauccuacugggcaccuug

SEQ ID NO: 2510452 - RNA, 19 nt, Artificial Sequence
  Description of Artificial Sequence: Synthetic oligonucleotide
  Sense strand starting at position 2241 of SEQ ID NO: 1888097
uuauuucuguugucuccaa

SEQ ID NO: 2510453 - RNA, 19 nt, Artificial Sequence
  Description of Artificial Sequence: Synthetic oligonucleotide
  Antisense strand to SEQ ID NO: 2510452
uuggagacaacagaaauaa

SEQ ID NO: 2510454 - RNA, 19 nt, Artificial Sequence
  Description of Artificial Sequence: Synthetic oligonucleotide
  Sense strand starting at position 2245 of SEQ ID NO: 1888097
uucuguugucuccaagaca

SEQ ID NO: 2510455 - RNA, 19 nt, Artificial Sequence
  Description of Artificial Sequence: Synthetic oligonucleotide
  Antisense strand to SEQ ID NO: 2510454
ugucuuggagacaacagaa

SEQ ID NO: 2510456 - RNA, 19 nt, Artificial Sequence
  Description of Artificial Sequence: Synthetic oligonucleotide
  Sense strand starting at position 2248 of SEQ ID NO: 1888097
uguugucuccaagacaucu

SEQ ID NO: 2510457 - RNA, 19 nt, Artificial Sequence
  Description of Artificial Sequence: Synthetic oligonucleotide
  Antisense strand to SEQ ID NO: 2510456
agaugucuuggagacaaca

SEQ ID NO: 2510458 - RNA, 19 nt, Artificial Sequence
  Description of Artificial Sequence: Synthetic oligonucleotide
  Sense strand starting at position 2258 of SEQ ID NO: 1888097
aagacaucucuucggagga

SEQ ID NO: 2510459 - RNA, 19 nt, Artificial Sequence
  Description of Artificial Sequence: Synthetic oligonucleotide
  Antisense strand to SEQ ID NO: 2510458
uccuccgaagagaugucuu

SEQ ID NO: 2510460 - RNA, 19 nt, Artificial Sequence
  Description of Artificial Sequence: Synthetic oligonucleotide
  Sense strand starting at position 2372 of SEQ ID NO: 1888097
agagcaucucuuggauucu

SEQ ID NO: 2510461 - RNA, 19 nt, Artificial Sequence
  Description of Artificial Sequence: Synthetic oligonucleotide
  Antisense strand to SEQ ID NO: 2510460
agaauccaagagaugcucu

SEQ ID NO: 2510462 - RNA, 19 nt, Artificial Sequence
  Description of Artificial Sequence: Synthetic oligonucleotide
  Sense strand starting at position 2577 of SEQ ID NO: 1888097
caggaaaugaaguguguua

SEQ ID NO: 2510463 - RNA, 19 nt, Artificial Sequence
  Description of Artificial Sequence: Synthetic oligonucleotide
  Antisense strand to SEQ ID NO: 2510462
uaacacacuucauuuccug

SEQ ID NO: 2510464 - RNA, 19 nt, Artificial Sequence
  Description of Artificial Sequence: Synthetic oligonucleotide
  Sense strand starting at position 2589 of SEQ ID NO: 1888097
uguguuaccuucucaauug

SEQ ID NO: 2510465 - RNA, 19 nt, Artificial Sequence
  Description of Artificial Sequence: Synthetic oligonucleotide
  Antisense strand to SEQ ID NO: 2510464
caauugagaagguaacaca

SEQ ID NO: 2510466 - RNA, 19 nt, Artificial Sequence
  Description of Artificial Sequence: Synthetic oligonucleotide
  Sense strand starting at position 2620 of SEQ ID NO: 1888097
caguuaacugcuguguguu

SEQ ID NO: 2510467 - RNA, 19 nt, Artificial Sequence
  Description of Artificial Sequence: Synthetic oligonucleotide
  Antisense strand to SEQ ID NO: 2510466
aacacacagcaguuaacug

SEQ ID NO: 2510468 - RNA, 19 nt, Artificial Sequence
  Description of Artificial Sequence: Synthetic oligonucleotide
  Sense strand starting at position 2770 of SEQ ID NO: 1888097
gccagaucugggugaacug

SEQ ID NO: 2510469 - RNA, 19 nt, Artificial Sequence
  Description of Artificial Sequence: Synthetic oligonucleotide
  Antisense strand to SEQ ID NO: 2510468
caguucacccagaucuggc

SEQ ID NO: 2510470 - RNA, 19 nt, Artificial Sequence
  Description of Artificial Sequence: Synthetic oligonucleotide
  Sense strand starting at position 2784 of SEQ ID NO: 1888097
aacugagugcugggaauuc

SEQ ID NO: 2510471 - RNA, 19 nt, Artificial Sequence
  Description of Artificial Sequence: Synthetic oligonucleotide
  Antisense strand to SEQ ID NO: 2510470
gaauucccagcacucaguu

SEQ ID NO: 2510472 - RNA, 19 nt, Artificial Sequence
  Description of Artificial Sequence: Synthetic oligonucleotide
  Sense strand starting at position 2816 of SEQ ID NO: 1888097
gauuuagacugcuaaguau

SEQ ID NO: 2510473 - RNA, 19 nt, Artificial Sequence
  Description of Artificial Sequence: Synthetic oligonucleotide
  Antisense strand to SEQ ID NO: 2510472
auacuuagcagucuaaauc

SEQ ID NO: 2510474 - RNA, 19 nt, Artificial Sequence
  Description of Artificial Sequence: Synthetic oligonucleotide
  Sense strand starting at position 2825 of SEQ ID NO: 1888097
ugcuaaguauguccacaga

SEQ ID NO: 2510475 - RNA, 19 nt, Artificial Sequence
  Description of Artificial Sequence: Synthetic oligonucleotide
  Antisense strand to SEQ ID NO: 2510474
ucuguggacauacuuagca

SEQ ID NO: 2510476 - RNA, 19 nt, Artificial Sequence
  Description of Artificial Sequence: Synthetic oligonucleotide
  Sense strand starting at position 2828 of SEQ ID NO: 1888097
uaaguauguccacagaguu

SEQ ID NO: 2510477 - RNA, 19 nt, Artificial Sequence
  Description of Artificial Sequence: Synthetic oligonucleotide
  Antisense strand to SEQ ID NO: 2510476
aacucuguggacauacuua

SEQ ID NO: 2510478 - RNA, 19 nt, Artificial Sequence
  Description of Artificial Sequence: Synthetic oligonucleotide
  Sense strand starting at position 2836 of SEQ ID NO: 1888097
uccacagaguucccgaaau

SEQ ID NO: 2510479 - RNA, 19 nt, Artificial Sequence
  Description of Artificial Sequence: Synthetic oligonucleotide
  Antisense strand to SEQ ID NO: 2510478
auuucgggaacucugugga

SEQ ID NO: 2510480 - RNA, 19 nt, Artificial Sequence
  Description of Artificial Sequence: Synthetic oligonucleotide
  Sense strand starting at position 2838 of SEQ ID NO: 1888097
cacagaguucccgaaauac

SEQ ID NO: 2510481 - RNA, 19 nt, Artificial Sequence
  Description of Artificial Sequence: Synthetic oligonucleotide
  Antisense strand to SEQ ID NO: 2510480
guauuucgggaacucugug

SEQ ID NO: 2510482 - RNA, 19 nt, Artificial Sequence
  Description of Artificial Sequence: Synthetic oligonucleotide
  Sense strand starting at position 2886 of SEQ ID NO: 1888097
uuuggacauuccgugggaa

SEQ ID NO: 2510483 - RNA, 19 nt, Artificial Sequence
  Description of Artificial Sequence: Synthetic oligonucleotide
  Antisense strand to SEQ ID NO: 2510482
uucccacggaauguccaaa

SEQ ID NO: 2510484 - RNA, 19 nt, Artificial Sequence
  Description of Artificial Sequence: Synthetic oligonucleotide
  Sense strand starting at position 2900 of SEQ ID NO: 1888097
gggaacgcuccugagaugu

SEQ ID NO: 2510485 - RNA, 19 nt, Artificial Sequence
  Description of Artificial Sequence: Synthetic oligonucleotide
  Antisense strand to SEQ ID NO: 2510484
acaucucaggagcguuccc

SEQ ID NO: 2510486 - RNA, 19 nt, Artificial Sequence
  Description of Artificial Sequence: Synthetic oligonucleotide
  Sense strand starting at position 2910 of SEQ ID NO: 1888097
cugagaugucuugguucuu

SEQ ID NO: 2510487 - RNA, 19 nt, Artificial Sequence
  Description of Artificial Sequence: Synthetic oligonucleotide
  Antisense strand to SEQ ID NO: 2510486
aagaaccaagacaucucag

SEQ ID NO: 2510488 - RNA, 19 nt, Artificial Sequence
  Description of Artificial Sequence: Synthetic oligonucleotide
  Sense strand starting at position 2911 of SEQ ID NO: 1888097
ugagaugucuugguucuua

SEQ ID NO: 2510489 - RNA, 19 nt, Artificial Sequence
  Description of Artificial Sequence: Synthetic oligonucleotide
  Antisense strand to SEQ ID NO: 2510488
uaagaaccaagacaucuca

SEQ ID NO: 2510490 - RNA, 19 nt, Artificial Sequence
  Description of Artificial Sequence: Synthetic oligonucleotide
  Sense strand starting at position 2919 of SEQ ID NO: 1888097
cuugguucuuacuugaauu

SEQ ID NO: 2510491 - RNA, 19 nt, Artificial Sequence
  Description of Artificial Sequence: Synthetic oligonucleotide
  Antisense strand to SEQ ID NO: 2510490
aauucaaguaagaaccaag

SEQ ID NO: 2510492 - RNA, 19 nt, Artificial Sequence
  Description of Artificial Sequence: Synthetic oligonucleotide
  Sense strand starting at position 3138 of SEQ ID NO: 1888097
ucucuugugaagugaugga

SEQ ID NO: 2510493 - RNA, 19 nt, Artificial Sequence
  Description of Artificial Sequence: Synthetic oligonucleotide
  Antisense strand to SEQ ID NO: 2510492
uccaucacuucacaagaga

SEQ ID NO: 2510494 - RNA, 19 nt, Artificial Sequence
  Description of Artificial Sequence: Synthetic oligonucleotide
  Sense strand starting at position 3142 of SEQ ID NO: 1888097
uugugaagugauggaaaug

SEQ ID NO: 2510495 - RNA, 19 nt, Artificial Sequence
  Description of Artificial Sequence: Synthetic oligonucleotide
  Antisense strand to SEQ ID NO: 2510494
cauuuccaucacuucacaa

SEQ ID NO: 2510496 - RNA, 19 nt, Artificial Sequence
  Description of Artificial Sequence: Synthetic oligonucleotide
  Sense strand starting at position 3151 of SEQ ID NO: 1888097
gauggaaaugcaugguauu

SEQ ID NO: 2510497 - RNA, 19 nt, Artificial Sequence
  Description of Artificial Sequence: Synthetic oligonucleotide
  Antisense strand to SEQ ID NO: 2510496
aauaccaugcauuuccauc

SEQ ID NO: 2510498 - RNA, 19 nt, Artificial Sequence
  Description of Artificial Sequence: Synthetic oligonucleotide
  Sense strand starting at position 3152 of SEQ ID NO: 1888097
auggaaaugcaugguauua

SEQ ID NO: 2510499 - RNA, 19 nt, Artificial Sequence
  Description of Artificial Sequence: Synthetic oligonucleotide
  Antisense strand to SEQ ID NO: 2510498
uaauaccaugcauuuccau

SEQ ID NO: 2510500 - RNA, 19 nt, Artificial Sequence
  Description of Artificial Sequence: Synthetic oligonucleotide
  Sense strand starting at position 3248 of SEQ ID NO: 1888097
ucuguuuaccuagacuaca

SEQ ID NO: 2510501 - RNA, 19 nt, Artificial Sequence
  Description of Artificial Sequence: Synthetic oligonucleotide
  Antisense strand to SEQ ID NO: 2510500
uguagucuagguaaacaga

SEQ ID NO: 2510502 - RNA, 19 nt, Artificial Sequence
  Description of Artificial Sequence: Synthetic oligonucleotide
  Sense strand starting at position 3283 of SEQ ID NO: 1888097
uauuucuguuaguaaggau

SEQ ID NO: 2510503 - RNA, 19 nt, Artificial Sequence
  Description of Artificial Sequence: Synthetic oligonucleotide
  Antisense strand to SEQ ID NO: 2510502
auccuuacuaacagaaaua

SEQ ID NO: 2510504 - RNA, 19 nt, Artificial Sequence
  Description of Artificial Sequence: Synthetic oligonucleotide
  Sense strand starting at position 3314 of SEQ ID NO: 1888097
gcuuuaauagaacguugua

SEQ ID NO: 2510505 - RNA, 19 nt, Artificial Sequence
  Description of Artificial Sequence: Synthetic oligonucleotide
  Antisense strand to SEQ ID NO: 2510504
uacaacguucuauuaaagc

SEQ ID NO: 2510506 - RNA, 19 nt, Artificial Sequence
  Description of Artificial Sequence: Synthetic oligonucleotide
  Sense strand starting at position 3442 of SEQ ID NO: 1888097
guccuauuucuguggcucu

SEQ ID NO: 2510507 - RNA, 19 nt, Artificial Sequence
  Description of Artificial Sequence: Synthetic oligonucleotide
  Antisense strand to SEQ ID NO: 2510506
agagccacagaaauaggac

SEQ ID NO: 2510508 - RNA, 19 nt, Artificial Sequence
  Description of Artificial Sequence: Synthetic oligonucleotide
  Sense strand starting at position 3471 of SEQ ID NO: 1888097
agcaguaaccacuguuagu

SEQ ID NO: 2510509 - RNA, 19 nt, Artificial Sequence
  Description of Artificial Sequence: Synthetic oligonucleotide
  Antisense strand to SEQ ID NO: 2510508
acuaacagugguuacugcu

SEQ ID NO: 2510510 - RNA, 19 nt, Artificial Sequence
  Description of Artificial Sequence: Synthetic oligonucleotide
  Sense strand starting at position 3717 of SEQ ID NO: 1888097
guaauuauucuguaauugg

SEQ ID NO: 2510511 - RNA, 19 nt, Artificial Sequence
  Description of Artificial Sequence: Synthetic oligonucleotide
  Antisense strand to SEQ ID NO: 2510510
ccaauuacagaauaauuac

SEQ ID NO: 2510512 - RNA, 19 nt, Artificial Sequence
  Description of Artificial Sequence: Synthetic oligonucleotide
  Sense strand starting at position 3766 of SEQ ID NO: 1888097
uccauuauuugugaauuga

SEQ ID NO: 2510513 - RNA, 19 nt, Artificial Sequence
  Description of Artificial Sequence: Synthetic oligonucleotide
  Antisense strand to SEQ ID NO: 2510512
ucaauucacaaauaaugga

SEQ ID NO: 2510514 - RNA, 19 nt, Artificial Sequence
  Description of Artificial Sequence: Synthetic oligonucleotide
  Sense strand starting at position 398 of SEQ ID NO: 1888098
ggcaaauuaucacgaccuu

SEQ ID NO: 2510515 - RNA, 19 nt, Artificial Sequence
  Description of Artificial Sequence: Synthetic oligonucleotide
  Antisense strand to SEQ ID NO: 2510514
aaggucgugauaauuugcc

SEQ ID NO: 2510516 - RNA, 19 nt, Artificial Sequence
  Description of Artificial Sequence: Synthetic oligonucleotide
  Sense strand starting at position 416 of SEQ ID NO: 1888098
ucaacauggcaaugguaaa

SEQ ID NO: 2510517 - RNA, 19 nt, Artificial Sequence
  Description of Artificial Sequence: Synthetic oligonucleotide
  Antisense strand to SEQ ID NO: 2510516
uuuaccauugccauguuga

SEQ ID NO: 2510518 - RNA, 19 nt, Artificial Sequence
  Description of Artificial Sequence: Synthetic oligonucleotide
  Sense strand starting at position 1298 of SEQ ID NO: 1888098
ucgaauagauguuucucca

SEQ ID NO: 2510519 - RNA, 19 nt, Artificial Sequence
  Description of Artificial Sequence: Synthetic oligonucleotide
  Antisense strand to SEQ ID NO: 2510518
uggagaaacaucuauucga

SEQ ID NO: 2510520 - RNA, 19 nt, Artificial Sequence
  Description of Artificial Sequence: Synthetic oligonucleotide
  Sense strand starting at position 1659 of SEQ ID NO: 1888098
uggaauugauggcgggaau

SEQ ID NO: 2510521 - RNA, 19 nt, Artificial Sequence
  Description of Artificial Sequence: Synthetic oligonucleotide
  Antisense strand to SEQ ID NO: 2510520
auucccgccaucaauucca

SEQ ID NO: 2510522 - RNA, 19 nt, Artificial Sequence
  Description of Artificial Sequence: Synthetic oligonucleotide
  Sense strand starting at position 1660 of SEQ ID NO: 1888098
ggaauugauggcgggaaug

SEQ ID NO: 2510523 - RNA, 19 nt, Artificial Sequence
  Description of Artificial Sequence: Synthetic oligonucleotide
  Antisense strand to SEQ ID NO: 2510522
cauucccgccaucaauucc

SEQ ID NO: 2510524 - RNA, 19 nt, Artificial Sequence
  Description of Artificial Sequence: Synthetic oligonucleotide
  Sense strand starting at position 1662 of SEQ ID NO: 1888098
aauugauggcgggaaugua

SEQ ID NO: 2510525 - RNA, 19 nt, Artificial Sequence
  Description of Artificial Sequence: Synthetic oligonucleotide
  Antisense strand to SEQ ID NO: 2510524
uacauucccgccaucaauu

SEQ ID NO: 2510526 - RNA, 19 nt, Artificial Sequence
  Description of Artificial Sequence: Synthetic oligonucleotide
  Sense strand starting at position 1708 of SEQ ID NO: 1888098
uuuggcagcuccucaaaua

SEQ ID NO: 2510527 - RNA, 19 nt, Artificial Sequence
  Description of Artificial Sequence: Synthetic oligonucleotide
  Antisense strand to SEQ ID NO: 2510526
uauuugaggagcugccaaa

SEQ ID NO: 2510528 - RNA, 19 nt, Artificial Sequence
  Description of Artificial Sequence: Synthetic oligonucleotide
  Sense strand starting at position 1769 of SEQ ID NO: 1888098
aaggguagguccggaagaa

SEQ ID NO: 2510529 - RNA, 19 nt, Artificial Sequence
  Description of Artificial Sequence: Synthetic oligonucleotide
  Antisense strand to SEQ ID NO: 2510528
uucuuccggaccuacccuu

SEQ ID NO: 2510530 - RNA, 19 nt, Artificial Sequence
  Description of Artificial Sequence: Synthetic oligonucleotide
  Sense strand starting at position 2175 of SEQ ID NO: 1888098
cauugugcugagugacaua

SEQ ID NO: 2510531 - RNA, 19 nt, Artificial Sequence
  Description of Artificial Sequence: Synthetic oligonucleotide
  Antisense strand to SEQ ID NO: 2510530
uaugucacucagcacaaug

SEQ ID NO: 2510532 - RNA, 19 nt, Artificial Sequence
  Description of Artificial Sequence: Synthetic oligonucleotide
  Sense strand starting at position 2219 of SEQ ID NO: 1888098
guaugauucuacuugcauc

SEQ ID NO: 2510533 - RNA, 19 nt, Artificial Sequence
  Description of Artificial Sequence: Synthetic oligonucleotide
  Antisense strand to SEQ ID NO: 2510532
gaugcaaguagaaucauac

SEQ ID NO: 2510534 - RNA, 19 nt, Artificial Sequence
  Description of Artificial Sequence: Synthetic oligonucleotide
  Sense strand starting at position 2222 of SEQ ID NO: 1888098
ugauucuacuugcaucaga

SEQ ID NO: 2510535 - RNA, 19 nt, Artificial Sequence
  Description of Artificial Sequence: Synthetic oligonucleotide
  Antisense strand to SEQ ID NO: 2510534
ucugaugcaaguagaauca

SEQ ID NO: 2510536 - RNA, 19 nt, Artificial Sequence
  Description of Artificial Sequence: Synthetic oligonucleotide
  Sense strand starting at position 2268 of SEQ ID NO: 1888098
gaaaguacauucuagguua

SEQ ID NO: 2510537 - RNA, 19 nt, Artificial Sequence
  Description of Artificial Sequence: Synthetic oligonucleotide
  Antisense strand to SEQ ID NO: 2510536
uaaccuagaauguacuuuc

SEQ ID NO: 2510538 - RNA, 19 nt, Artificial Sequence
  Description of Artificial Sequence: Synthetic oligonucleotide
  Sense strand starting at position 2271 of SEQ ID NO: 1888098
aguacauucuagguuaaga

SEQ ID NO: 2510539 - RNA, 19 nt, Artificial Sequence
  Description of Artificial Sequence: Synthetic oligonucleotide
  Antisense strand to SEQ ID NO: 2510538
ucuuaaccuagaauguacu

SEQ ID NO: 2510540 - RNA, 19 nt, Artificial Sequence
  Description of Artificial Sequence: Synthetic oligonucleotide
  Sense strand starting at position 2306 of SEQ ID NO: 1888098
aggaauggguaguuguuau

SEQ ID NO: 2510541 - RNA, 19 nt, Artificial Sequence
  Description of Artificial Sequence: Synthetic oligonucleotide
  Antisense strand to SEQ ID NO: 2510540
auaacaacuacccauuccu

SEQ ID NO: 2510542 - RNA, 19 nt, Artificial Sequence
  Description of Artificial Sequence: Synthetic oligonucleotide
  Sense strand starting at position 2313 of SEQ ID NO: 1888098
gguaguuguuauucaugga

SEQ ID NO: 2510543 - RNA, 19 nt, Artificial Sequence
  Description of Artificial Sequence: Synthetic oligonucleotide
  Antisense strand to SEQ ID NO: 2510542
uccaugaauaacaacuacc

SEQ ID NO: 2510544 - RNA, 19 nt, Artificial Sequence
  Description of Artificial Sequence: Synthetic oligonucleotide
  Sense strand starting at position 2376 of SEQ ID NO: 1888098
gugacacaacaucgugaau

SEQ ID NO: 2510545 - RNA, 19 nt, Artificial Sequence
  Description of Artificial Sequence: Synthetic oligonucleotide
  Antisense strand to SEQ ID NO: 2510544
auucacgauguugugucac

SEQ ID NO: 2510546 - RNA, 19 nt, Artificial Sequence
  Description of Artificial Sequence: Synthetic oligonucleotide
  Sense strand starting at position 2378 of SEQ ID NO: 1888098
gacacaacaucgugaaugu

SEQ ID NO: 2510547 - RNA, 19 nt, Artificial Sequence
  Description of Artificial Sequence: Synthetic oligonucleotide
  Antisense strand to SEQ ID NO: 2510546
acauucacgauguuguguc

SEQ ID NO: 2510548 - RNA, 19 nt, Artificial Sequence
  Description of Artificial Sequence: Synthetic oligonucleotide
  Sense strand starting at position 2388 of SEQ ID NO: 1888098
cgugaauguaauuaaugcu

SEQ ID NO: 2510549 - RNA, 19 nt, Artificial Sequence
  Description of Artificial Sequence: Synthetic oligonucleotide
  Antisense strand to SEQ ID NO: 2510548
agcauuaauuacauucacg

SEQ ID NO: 2510550 - RNA, 19 nt, Artificial Sequence
  Description of Artificial Sequence: Synthetic oligonucleotide
  Sense strand starting at position 2412 of SEQ ID NO: 1888098
gcgggacacuuacuuaauu

SEQ ID NO: 2510551 - RNA, 19 nt, Artificial Sequence
  Description of Artificial Sequence: Synthetic oligonucleotide
  Antisense strand to SEQ ID NO: 2510550
aauuaaguaagugucccgc

SEQ ID NO: 2510552 - RNA, 19 nt, Artificial Sequence
  Description of Artificial Sequence: Synthetic oligonucleotide
  Sense strand starting at position 2654 of SEQ ID NO: 1888098
caugaucaagugggauauu

SEQ ID NO: 2510553 - RNA, 19 nt, Artificial Sequence
  Description of Artificial Sequence: Synthetic oligonucleotide
  Antisense strand to SEQ ID NO: 2510552
aauaucccacuugaucaug

SEQ ID NO: 2510554 - RNA, 19 nt, Artificial Sequence
  Description of Artificial Sequence: Synthetic oligonucleotide
  Sense strand starting at position 2655 of SEQ ID NO: 1888098
augaucaagugggauauuu

SEQ ID NO: 2510555 - RNA, 19 nt, Artificial Sequence
  Description of Artificial Sequence: Synthetic oligonucleotide
  Antisense strand to SEQ ID NO: 2510554
aaauaucccacuugaucau

SEQ ID NO: 2510556 - RNA, 19 nt, Artificial Sequence
  Description of Artificial Sequence: Synthetic oligonucleotide
  Sense strand starting at position 2664 of SEQ ID NO: 1888098
ugggauauuucccaggacu

SEQ ID NO: 2510557 - RNA, 19 nt, Artificial Sequence
  Description of Artificial Sequence: Synthetic oligonucleotide
  Antisense strand to SEQ ID NO: 2510556
aguccugggaaauauccca

SEQ ID NO: 2510558 - RNA, 19 nt, Artificial Sequence
  Description of Artificial Sequence: Synthetic oligonucleotide
  Sense strand starting at position 2680 of SEQ ID NO: 1888098
acugaaagauugguuuaac

SEQ ID NO: 2510559 - RNA, 19 nt, Artificial Sequence
  Description of Artificial Sequence: Synthetic oligonucleotide
  Antisense strand to SEQ ID NO: 2510558
guuaaaccaaucuuucagu

SEQ ID NO: 2510560 - RNA, 19 nt, Artificial Sequence
  Description of Artificial Sequence: Synthetic oligonucleotide
  Sense strand starting at position 2681 of SEQ ID NO: 1888098
cugaaagauugguuuaaca

SEQ ID NO: 2510561 - RNA, 19 nt, Artificial Sequence
  Description of Artificial Sequence: Synthetic oligonucleotide
  Antisense strand to SEQ ID NO: 2510560
uguuaaaccaaucuuucag

SEQ ID NO: 2510562 - RNA, 19 nt, Artificial Sequence
  Description of Artificial Sequence: Synthetic oligonucleotide
  Sense strand starting at position 2915 of SEQ ID NO: 1888098
ccgucucgaaucuauggaa

SEQ ID NO: 2510563 - RNA, 19 nt, Artificial Sequence
  Description of Artificial Sequence: Synthetic oligonucleotide
  Antisense strand to SEQ ID NO: 2510562
uuccauagauucgagacgg

SEQ ID NO: 2510564 - RNA, 19 nt, Artificial Sequence
  Description of Artificial Sequence: Synthetic oligonucleotide
  Sense strand starting at position 3120 of SEQ ID NO: 1888098
gguggaaucgccuaaggaa

SEQ ID NO: 2510565 - RNA, 19 nt, Artificial Sequence
  Description of Artificial Sequence: Synthetic oligonucleotide
  Antisense strand to SEQ ID NO: 2510564
uuccuuaggcgauuccacc

SEQ ID NO: 2510566 - RNA, 19 nt, Artificial Sequence
  Description of Artificial Sequence: Synthetic oligonucleotide
  Sense strand starting at position 3184 of SEQ ID NO: 1888098
gaaggaguuuaacaagauc

SEQ ID NO: 2510567 - RNA, 19 nt, Artificial Sequence
  Description of Artificial Sequence: Synthetic oligonucleotide
  Antisense strand to SEQ ID NO: 2510566
gaucuuguuaaacuccuuc

SEQ ID NO: 2510568 - RNA, 19 nt, Artificial Sequence
  Description of Artificial Sequence: Synthetic oligonucleotide
  Sense strand starting at position 3210 of SEQ ID NO: 1888098
guaggauauuucugcacug

SEQ ID NO: 2510569 - RNA, 19 nt, Artificial Sequence
  Description of Artificial Sequence: Synthetic oligonucleotide
  Antisense strand to SEQ ID NO: 2510568
cagugcagaaauauccuac

SEQ ID NO: 2510570 - RNA, 19 nt, Artificial Sequence
  Description of Artificial Sequence: Synthetic oligonucleotide
  Sense strand starting at position 3288 of SEQ ID NO: 1888098
auaagcuacuuaggaauaa

SEQ ID NO: 2510571 - RNA, 19 nt, Artificial Sequence
  Description of Artificial Sequence: Synthetic oligonucleotide
  Antisense strand to SEQ ID NO: 2510570
uuauuccuaaguagcuuau

SEQ ID NO: 2510572 - RNA, 19 nt, Artificial Sequence
  Description of Artificial Sequence: Synthetic oligonucleotide
  Sense strand starting at position 3298 of SEQ ID NO: 1888098
uaggaauaauuucgcaaag

SEQ ID NO: 2510573 - RNA, 19 nt, Artificial Sequence
  Description of Artificial Sequence: Synthetic oligonucleotide
  Antisense strand to SEQ ID NO: 2510572
cuuugcgaaauuauuccua

SEQ ID NO: 2510574 - RNA, 19 nt, Artificial Sequence
  Description of Artificial Sequence: Synthetic oligonucleotide
  Sense strand starting at position 3300 of SEQ ID NO: 1888098
ggaauaauuucgcaaagga

SEQ ID NO: 2510575 - RNA, 19 nt, Artificial Sequence
  Description of Artificial Sequence: Synthetic oligonucleotide
  Antisense strand to SEQ ID NO: 2510574
uccuuugcgaaauuauucc

SEQ ID NO: 2510576 - RNA, 19 nt, Artificial Sequence
  Description of Artificial Sequence: Synthetic oligonucleotide
  Sense strand starting at position 3323 of SEQ ID NO: 1888098
ugagacuuguacgcugcaa

SEQ ID NO: 2510577 - RNA, 19 nt, Artificial Sequence
  Description of Artificial Sequence: Synthetic oligonucleotide
  Antisense strand to SEQ ID NO: 2510576
uugcagcguacaagucuca

SEQ ID NO: 2510578 - RNA, 19 nt, Artificial Sequence
  Description of Artificial Sequence: Synthetic oligonucleotide
  Sense strand starting at position 3325 of SEQ ID NO: 1888098
agacuuguacgcugcaaac

SEQ ID NO: 2510579 - RNA, 19 nt, Artificial Sequence
  Description of Artificial Sequence: Synthetic oligonucleotide
  Antisense strand to SEQ ID NO: 2510578
guuugcagcguacaagucu

SEQ ID NO: 2510580 - RNA, 19 nt, Artificial Sequence
  Description of Artificial Sequence: Synthetic oligonucleotide
  Sense strand starting at position 3344 of SEQ ID NO: 1888098
ugcgaaacauggcugguaa

SEQ ID NO: 2510581 - RNA, 19 nt, Artificial Sequence
  Description of Artificial Sequence: Synthetic oligonucleotide
  Antisense strand to SEQ ID NO: 2510580
uuaccagccauguuucgca

SEQ ID NO: 2510582 - RNA, 19 nt, Artificial Sequence
  Description of Artificial Sequence: Synthetic oligonucleotide
  Sense strand starting at position 3345 of SEQ ID NO: 1888098
gcgaaacauggcugguaaa

SEQ ID NO: 2510583 - RNA, 19 nt, Artificial Sequence
  Description of Artificial Sequence: Synthetic oligonucleotide
  Antisense strand to SEQ ID NO: 2510582
uuuaccagccauguuucgc

SEQ ID NO: 2510584 - RNA, 19 nt, Artificial Sequence
  Description of Artificial Sequence: Synthetic oligonucleotide
  Sense strand starting at position 3389 of SEQ ID NO: 1888098
uggagagacuucccacauc

SEQ ID NO: 2510585 - RNA, 19 nt, Artificial Sequence
  Description of Artificial Sequence: Synthetic oligonucleotide
  Antisense strand to SEQ ID NO: 2510584
gaugugggaagucucucca

SEQ ID NO: 2510586 - RNA, 19 nt, Artificial Sequence
  Description of Artificial Sequence: Synthetic oligonucleotide
  Sense strand starting at position 3711 of SEQ ID NO: 1888098
cucacuugauuuggaagga

SEQ ID NO: 2510587 - RNA, 19 nt, Artificial Sequence
  Description of Artificial Sequence: Synthetic oligonucleotide
  Antisense strand to SEQ ID NO: 2510586
uccuuccaaaucaagugag

SEQ ID NO: 2510588 - RNA, 19 nt, Artificial Sequence
  Description of Artificial Sequence: Synthetic oligonucleotide
  Sense strand starting at position 3828 of SEQ ID NO: 1888098
gugguucugagaugaccca

SEQ ID NO: 2510589 - RNA, 19 nt, Artificial Sequence
  Description of Artificial Sequence: Synthetic oligonucleotide
  Antisense strand to SEQ ID NO: 2510588
ugggucaucucagaaccac

SEQ ID NO: 2510590 - RNA, 19 nt, Artificial Sequence
  Description of Artificial Sequence: Synthetic oligonucleotide
  Sense strand starting at position 3892 of SEQ ID NO: 1888098
cauugacguuccucccaga

SEQ ID NO: 2510591 - RNA, 19 nt, Artificial Sequence
  Description of Artificial Sequence: Synthetic oligonucleotide
  Antisense strand to SEQ ID NO: 2510590
ucugggaggaacgucaaug

SEQ ID NO: 2510592 - RNA, 19 nt, Artificial Sequence
  Description of Artificial Sequence: Synthetic oligonucleotide
  Sense strand starting at position 3926 of SEQ ID NO: 1888098
cgcagauccuuccacuacu

SEQ ID NO: 2510593 - RNA, 19 nt, Artificial Sequence
  Description of Artificial Sequence: Synthetic oligonucleotide
  Antisense strand to SEQ ID NO: 2510592
aguaguggaaggaucugcg

SEQ ID NO: 2510594 - RNA, 19 nt, Artificial Sequence
  Description of Artificial Sequence: Synthetic oligonucleotide
  Sense strand starting at position 12 of SEQ ID NO: 1888099
acuagauagucacauaguu

SEQ ID NO: 2510595 - RNA, 19 nt, Artificial Sequence
  Description of Artificial Sequence: Synthetic oligonucleotide
  Antisense strand to SEQ ID NO: 2510594
aacuaugugacuaucuagu

SEQ ID NO: 2510596 - RNA, 19 nt, Artificial Sequence
  Description of Artificial Sequence: Synthetic oligonucleotide
  Sense strand starting at position 392 of SEQ ID NO: 1888099
ugaguaaacugcugcuaaa

SEQ ID NO: 2510597 - RNA, 19 nt, Artificial Sequence
  Description of Artificial Sequence: Synthetic oligonucleotide
  Antisense strand to SEQ ID NO: 2510596
uuuagcagcaguuuacuca

SEQ ID NO: 2510598 - RNA, 19 nt, Artificial Sequence
  Description of Artificial Sequence: Synthetic oligonucleotide
  Sense strand starting at position 445 of SEQ ID NO: 1888099
gagagacauucuguugguc

SEQ ID NO: 2510599 - RNA, 19 nt, Artificial Sequence
  Description of Artificial Sequence: Synthetic oligonucleotide
  Antisense strand to SEQ ID NO: 2510598
gaccaacagaaugucucuc

SEQ ID NO: 2510600 - RNA, 19 nt, Artificial Sequence
  Description of Artificial Sequence: Synthetic oligonucleotide
  Sense strand starting at position 447 of SEQ ID NO: 1888099
gagacauucuguuggucuc

SEQ ID NO: 2510601 - RNA, 19 nt, Artificial Sequence
  Description of Artificial Sequence: Synthetic oligonucleotide
  Antisense strand to SEQ ID NO: 2510600
gagaccaacagaaugucuc

SEQ ID NO: 2510602 - RNA, 19 nt, Artificial Sequence
  Description of Artificial Sequence: Synthetic oligonucleotide
  Sense strand starting at position 448 of SEQ ID NO: 1888099
agacauucuguuggucuca

SEQ ID NO: 2510603 - RNA, 19 nt, Artificial Sequence
  Description of Artificial Sequence: Synthetic oligonucleotide
  Antisense strand to SEQ ID NO: 2510602
ugagaccaacagaaugucu

SEQ ID NO: 2510604 - RNA, 19 nt, Artificial Sequence
  Description of Artificial Sequence: Synthetic oligonucleotide
  Sense strand starting at position 449 of SEQ ID NO: 1888099
gacauucuguuggucucaa

SEQ ID NO: 2510605 - RNA, 19 nt, Artificial Sequence
  Description of Artificial Sequence: Synthetic oligonucleotide
  Antisense strand to SEQ ID NO: 2510604
uugagaccaacagaauguc

SEQ ID NO: 2510606 - RNA, 19 nt, Artificial Sequence
  Description of Artificial Sequence: Synthetic oligonucleotide
  Sense strand starting at position 936 of SEQ ID NO: 1888099
cacagaugcgugugacauu

SEQ ID NO: 2510607 - RNA, 19 nt, Artificial Sequence
  Description of Artificial Sequence: Synthetic oligonucleotide
  Antisense strand to SEQ ID NO: 2510606
aaugucacacgcaucugug

SEQ ID NO: 2510608 - RNA, 19 nt, Artificial Sequence
  Description of Artificial Sequence: Synthetic oligonucleotide
  Sense strand starting at position 937 of SEQ ID NO: 1888099
acagaugcgugugacauuu

SEQ ID NO: 2510609 - RNA, 19 nt, Artificial Sequence
  Description of Artificial Sequence: Synthetic oligonucleotide
  Antisense strand to SEQ ID NO: 2510608
aaaugucacacgcaucugu

SEQ ID NO: 2510610 - RNA, 19 nt, Artificial Sequence
  Description of Artificial Sequence: Synthetic oligonucleotide
  Sense strand starting at position 1252 of SEQ ID NO: 1888099
acagucuucccuugccauu

SEQ ID NO: 2510611 - RNA, 19 nt, Artificial Sequence
  Description of Artificial Sequence: Synthetic oligonucleotide
  Antisense strand to SEQ ID NO: 2510610
aauggcaagggaagacugu

SEQ ID NO: 2510612 - RNA, 19 nt, Artificial Sequence
  Description of Artificial Sequence: Synthetic oligonucleotide
  Sense strand starting at position 1254 of SEQ ID NO: 1888099
agucuucccuugccauuua

SEQ ID NO: 2510613 - RNA, 19 nt, Artificial Sequence
  Description of Artificial Sequence: Synthetic oligonucleotide
  Antisense strand to SEQ ID NO: 2510612
uaaauggcaagggaagacu

SEQ ID NO: 2510614 - RNA, 19 nt, Artificial Sequence
  Description of Artificial Sequence: Synthetic oligonucleotide
  Sense strand starting at position 1310 of SEQ ID NO: 1888099
uuccauugguguccgauca

SEQ ID NO: 2510615 - RNA, 19 nt, Artificial Sequence
  Description of Artificial Sequence: Synthetic oligonucleotide
  Antisense strand to SEQ ID NO: 2510614
ugaucggacaccaauggaa

SEQ ID NO: 2510616 - RNA, 19 nt, Artificial Sequence
  Description of Artificial Sequence: Synthetic oligonucleotide
  Sense strand starting at position 1669 of SEQ ID NO: 1888099
auuucuccguccuacaaga

SEQ ID NO: 2510617 - RNA, 19 nt, Artificial Sequence
  Description of Artificial Sequence: Synthetic oligonucleotide
  Antisense strand to SEQ ID NO: 2510616
ucuuguaggacggagaaau

SEQ ID NO: 2510618 - RNA, 19 nt, Artificial Sequence
  Description of Artificial Sequence: Synthetic oligonucleotide
  Sense strand starting at position 1717 of SEQ ID NO: 1888099
aauggucugaggugucuua

SEQ ID NO: 2510619 - RNA, 19 nt, Artificial Sequence
  Description of Artificial Sequence: Synthetic oligonucleotide
  Antisense strand to SEQ ID NO: 2510618
uaagacaccucagaccauu

SEQ ID NO: 2510620 - RNA, 19 nt, Artificial Sequence
  Description of Artificial Sequence: Synthetic oligonucleotide
  Sense strand starting at position 1847 of SEQ ID NO: 1888099
cgucgcugagucuugugaa

SEQ ID NO: 2510621 - RNA, 19 nt, Artificial Sequence
  Description of Artificial Sequence: Synthetic oligonucleotide
  Antisense strand to SEQ ID NO: 2510620
uucacaagacucagcgacg

SEQ ID NO: 2510622 - RNA, 19 nt, Artificial Sequence
  Description of Artificial Sequence: Synthetic oligonucleotide
  Sense strand starting at position 1848 of SEQ ID NO: 1888099
gucgcugagucuugugaau

SEQ ID NO: 2510623 - RNA, 19 nt, Artificial Sequence
  Description of Artificial Sequence: Synthetic oligonucleotide
  Antisense strand to SEQ ID NO: 2510622
auucacaagacucagcgac

SEQ ID NO: 2510624 - RNA, 19 nt, Artificial Sequence
  Description of Artificial Sequence: Synthetic oligonucleotide
  Sense strand starting at position 1850 of SEQ ID NO: 1888099
cgcugagucuugugaaucu

SEQ ID NO: 2510625 - RNA, 19 nt, Artificial Sequence
  Description of Artificial Sequence: Synthetic oligonucleotide
  Antisense strand to SEQ ID NO: 2510624
agauucacaagacucagcg

SEQ ID NO: 2510626 - RNA, 19 nt, Artificial Sequence
  Description of Artificial Sequence: Synthetic oligonucleotide
  Sense strand starting at position 2418 of SEQ ID NO: 1888099
auggcuaggcgagauuaca

SEQ ID NO: 2510627 - RNA, 19 nt, Artificial Sequence
  Description of Artificial Sequence: Synthetic oligonucleotide
  Antisense strand to SEQ ID NO: 2510626
uguaaucucgccuagccau

SEQ ID NO: 2510628 - RNA, 19 nt, Artificial Sequence
  Description of Artificial Sequence: Synthetic oligonucleotide
  Sense strand starting at position 2635 of SEQ ID NO: 1888099
cccagcuccugacauuaga

SEQ ID NO: 2510629 - RNA, 19 nt, Artificial Sequence
  Description of Artificial Sequence: Synthetic oligonucleotide
  Antisense strand to SEQ ID NO: 2510628
ucuaaugucaggagcuggg

SEQ ID NO: 2510630 - RNA, 19 nt, Artificial Sequence
  Description of Artificial Sequence: Synthetic oligonucleotide
  Sense strand starting at position 3148 of SEQ ID NO: 1888099
ucggguaacucuuaaagug

SEQ ID NO: 2510631 - RNA, 19 nt, Artificial Sequence
  Description of Artificial Sequence: Synthetic oligonucleotide
  Antisense strand to SEQ ID NO: 2510630
cacuuuaagaguuacccga

SEQ ID NO: 2510632 - RNA, 19 nt, Artificial Sequence
  Description of Artificial Sequence: Synthetic oligonucleotide
  Sense strand starting at position 3178 of SEQ ID NO: 1888099
caucccguuuaaucgauau

SEQ ID NO: 2510633 - RNA, 19 nt, Artificial Sequence
  Description of Artificial Sequence: Synthetic oligonucleotide
  Antisense strand to SEQ ID NO: 2510632
auaucgauuaaacgggaug

SEQ ID NO: 2510634 - RNA, 19 nt, Artificial Sequence
  Description of Artificial Sequence: Synthetic oligonucleotide
  Sense strand starting at position 3370 of SEQ ID NO: 1888099
cuuccuuauuaggcugaga

SEQ ID NO: 2510635 - RNA, 19 nt, Artificial Sequence
  Description of Artificial Sequence: Synthetic oligonucleotide
  Antisense strand to SEQ ID NO: 2510634
ucucagccuaauaaggaag

SEQ ID NO: 2510636 - RNA, 19 nt, Artificial Sequence
  Description of Artificial Sequence: Synthetic oligonucleotide
  Sense strand starting at position 3410 of SEQ ID NO: 1888099
uucccugauuauuccugua

SEQ ID NO: 2510637 - RNA, 19 nt, Artificial Sequence
  Description of Artificial Sequence: Synthetic oligonucleotide
  Antisense strand to SEQ ID NO: 2510636
uacaggaauaaucagggaa

SEQ ID NO: 2510638 - RNA, 19 nt, Artificial Sequence
  Description of Artificial Sequence: Synthetic oligonucleotide
  Sense strand starting at position 3412 of SEQ ID NO: 1888099
cccugauuauuccuguacu

SEQ ID NO: 2510639 - RNA, 19 nt, Artificial Sequence
  Description of Artificial Sequence: Synthetic oligonucleotide
  Antisense strand to SEQ ID NO: 2510638
aguacaggaauaaucaggg

SEQ ID NO: 2510640 - RNA, 19 nt, Artificial Sequence
  Description of Artificial Sequence: Synthetic oligonucleotide
  Sense strand starting at position 3413 of SEQ ID NO: 1888099
ccugauuauuccuguacua

SEQ ID NO: 2510641 - RNA, 19 nt, Artificial Sequence
  Description of Artificial Sequence: Synthetic oligonucleotide
  Antisense strand to SEQ ID NO: 2510640
uaguacaggaauaaucagg

SEQ ID NO: 2510642 - RNA, 19 nt, Artificial Sequence
  Description of Artificial Sequence: Synthetic oligonucleotide
  Sense strand starting at position 3415 of SEQ ID NO: 1888099
ugauuauuccuguacuaca

SEQ ID NO: 2510643 - RNA, 19 nt, Artificial Sequence
  Description of Artificial Sequence: Synthetic oligonucleotide
  Antisense strand to SEQ ID NO: 2510642
uguaguacaggaauaauca

SEQ ID NO: 2510644 - RNA, 19 nt, Artificial Sequence
  Description of Artificial Sequence: Synthetic oligonucleotide
  Sense strand starting at position 208 of SEQ ID NO: 1888100
guugaacucccucgauucu

SEQ ID NO: 2510645 - RNA, 19 nt, Artificial Sequence
  Description of Artificial Sequence: Synthetic oligonucleotide
  Antisense strand to SEQ ID NO: 2510644
agaaucgagggaguucaac

SEQ ID NO: 2510646 - RNA, 19 nt, Artificial Sequence
  Description of Artificial Sequence: Synthetic oligonucleotide
  Sense strand starting at position 276 of SEQ ID NO: 1888100
cugagcucaucugugagau

SEQ ID NO: 2510647 - RNA, 19 nt, Artificial Sequence
  Description of Artificial Sequence: Synthetic oligonucleotide
  Antisense strand to SEQ ID NO: 2510646
aucucacagaugagcucag

SEQ ID NO: 2510648 - RNA, 19 nt, Artificial Sequence
  Description of Artificial Sequence: Synthetic oligonucleotide
  Sense strand starting at position 277 of SEQ ID NO: 1888100
ugagcucaucugugagaug

SEQ ID NO: 2510649 - RNA, 19 nt, Artificial Sequence
  Description of Artificial Sequence: Synthetic oligonucleotide
  Antisense strand to SEQ ID NO: 2510648
caucucacagaugagcuca

SEQ ID NO: 2510650 - RNA, 19 nt, Artificial Sequence
  Description of Artificial Sequence: Synthetic oligonucleotide
  Sense strand starting at position 284 of SEQ ID NO: 1888100
aucugugagauggguagaa

SEQ ID NO: 2510651 - RNA, 19 nt, Artificial Sequence
  Description of Artificial Sequence: Synthetic oligonucleotide
  Antisense strand to SEQ ID NO: 2510650
uucuacccaucucacagau

SEQ ID NO: 2510652 - RNA, 19 nt, Artificial Sequence
  Description of Artificial Sequence: Synthetic oligonucleotide
  Sense strand starting at position 286 of SEQ ID NO: 1888100
cugugagauggguagaagu

SEQ ID NO: 2510653 - RNA, 19 nt, Artificial Sequence
  Description of Artificial Sequence: Synthetic oligonucleotide
  Antisense strand to SEQ ID NO: 2510652
acuucuacccaucucacag

SEQ ID NO: 2510654 - RNA, 19 nt, Artificial Sequence
  Description of Artificial Sequence: Synthetic oligonucleotide
  Sense strand starting at position 299 of SEQ ID NO: 1888100
agaaguucugaaugcgauc

SEQ ID NO: 2510655 - RNA, 19 nt, Artificial Sequence
  Description of Artificial Sequence: Synthetic oligonucleotide
  Antisense strand to SEQ ID NO: 2510654
gaucgcauucagaacuucu

SEQ ID NO: 2510656 - RNA, 19 nt, Artificial Sequence
  Description of Artificial Sequence: Synthetic oligonucleotide
  Sense strand starting at position 531 of SEQ ID NO: 1888100
ugaguuucccucugcugga

SEQ ID NO: 2510657 - RNA, 19 nt, Artificial Sequence
  Description of Artificial Sequence: Synthetic oligonucleotide
  Antisense strand to SEQ ID NO: 2510656
uccagcagagggaaacuca

SEQ ID NO: 2510658 - RNA, 19 nt, Artificial Sequence
  Description of Artificial Sequence: Synthetic oligonucleotide
  Sense strand starting at position 532 of SEQ ID NO: 1888100
gaguuucccucugcuggaa

SEQ ID NO: 2510659 - RNA, 19 nt, Artificial Sequence
  Description of Artificial Sequence: Synthetic oligonucleotide
  Antisense strand to SEQ ID NO: 2510658
uuccagcagagggaaacuc

SEQ ID NO: 2510660 - RNA, 19 nt, Artificial Sequence
  Description of Artificial Sequence: Synthetic oligonucleotide
  Sense strand starting at position 667 of SEQ ID NO: 1888100
ggcccuucucucuggugaa

SEQ ID NO: 2510661 - RNA, 19 nt, Artificial Sequence
  Description of Artificial Sequence: Synthetic oligonucleotide
  Antisense strand to SEQ ID NO: 2510660
uucaccagagagaagggcc

SEQ ID NO: 2510662 - RNA, 19 nt, Artificial Sequence
  Description of Artificial Sequence: Synthetic oligonucleotide
  Sense strand starting at position 703 of SEQ ID NO: 1888100
agcauuugcucaccgaugu

SEQ ID NO: 2510663 - RNA, 19 nt, Artificial Sequence
  Description of Artificial Sequence: Synthetic oligonucleotide
  Antisense strand to SEQ ID NO: 2510662
acaucggugagcaaaugcu

SEQ ID NO: 2510664 - RNA, 19 nt, Artificial Sequence
  Description of Artificial Sequence: Synthetic oligonucleotide
  Sense strand starting at position 704 of SEQ ID NO: 1888100
gcauuugcucaccgauguu

SEQ ID NO: 2510665 - RNA, 19 nt, Artificial Sequence
  Description of Artificial Sequence: Synthetic oligonucleotide
  Antisense strand to SEQ ID NO: 2510664
aacaucggugagcaaaugc

SEQ ID NO: 2510666 - RNA, 19 nt, Artificial Sequence
  Description of Artificial Sequence: Synthetic oligonucleotide
  Sense strand starting at position 716 of SEQ ID NO: 1888100
cgauguuuaucuccuccau

SEQ ID NO: 2510667 - RNA, 19 nt, Artificial Sequence
  Description of Artificial Sequence: Synthetic oligonucleotide
  Antisense strand to SEQ ID NO: 2510666
auggaggagauaaacaucg

SEQ ID NO: 2510668 - RNA, 19 nt, Artificial Sequence
  Description of Artificial Sequence: Synthetic oligonucleotide
  Sense strand starting at position 1071 of SEQ ID NO: 1888100
gccaaugaaagucaguguu

SEQ ID NO: 2510669 - RNA, 19 nt, Artificial Sequence
  Description of Artificial Sequence: Synthetic oligonucleotide
  Antisense strand to SEQ ID NO: 2510668
aacacugacuuucauuggc

SEQ ID NO: 2510670 - RNA, 19 nt, Artificial Sequence
  Description of Artificial Sequence: Synthetic oligonucleotide
  Sense strand starting at position 1147 of SEQ ID NO: 1888100
cacugcaguucugcaagau

SEQ ID NO: 2510671 - RNA, 19 nt, Artificial Sequence
  Description of Artificial Sequence: Synthetic oligonucleotide
  Antisense strand to SEQ ID NO: 2510670
aucuugcagaacugcagug

SEQ ID NO: 2510672 - RNA, 19 nt, Artificial Sequence
  Description of Artificial Sequence: Synthetic oligonucleotide
  Sense strand starting at position 1148 of SEQ ID NO: 1888100
acugcaguucugcaagauc

SEQ ID NO: 2510673 - RNA, 19 nt, Artificial Sequence
  Description of Artificial Sequence: Synthetic oligonucleotide
  Antisense strand to SEQ ID NO: 2510672
gaucuugcagaacugcagu

SEQ ID NO: 2510674 - RNA, 19 nt, Artificial Sequence
  Description of Artificial Sequence: Synthetic oligonucleotide
  Sense strand starting at position 1253 of SEQ ID NO: 1888100
aggugaagucagcauugga

SEQ ID NO: 2510675 - RNA, 19 nt, Artificial Sequence
  Description of Artificial Sequence: Synthetic oligonucleotide
  Antisense strand to SEQ ID NO: 2510674
uccaaugcugacuucaccu

SEQ ID NO: 2510676 - RNA, 19 nt, Artificial Sequence
  Description of Artificial Sequence: Synthetic oligonucleotide
  Sense strand starting at position 1435 of SEQ ID NO: 1888100
uuucuccagcugugaaaca

SEQ ID NO: 2510677 - RNA, 19 nt, Artificial Sequence
  Description of Artificial Sequence: Synthetic oligonucleotide
  Antisense strand to SEQ ID NO: 2510676
uguuucacagcuggagaaa

SEQ ID NO: 2510678 - RNA, 19 nt, Artificial Sequence
  Description of Artificial Sequence: Synthetic oligonucleotide
  Sense strand starting at position 1496 of SEQ ID NO: 1888100
ggaaauuauuuccagucaa

SEQ ID NO: 2510679 - RNA, 19 nt, Artificial Sequence
  Description of Artificial Sequence: Synthetic oligonucleotide
  Antisense strand to SEQ ID NO: 2510678
uugacuggaaauaauuucc

SEQ ID NO: 2510680 - RNA, 19 nt, Artificial Sequence
  Description of Artificial Sequence: Synthetic oligonucleotide
  Sense strand starting at position 1512 of SEQ ID NO: 1888100
caaacagagugcucuuguu

SEQ ID NO: 2510681 - RNA, 19 nt, Artificial Sequence
  Description of Artificial Sequence: Synthetic oligonucleotide
  Antisense strand to SEQ ID NO: 2510680
aacaagagcacucuguuug

SEQ ID NO: 2510682 - RNA, 19 nt, Artificial Sequence
  Description of Artificial Sequence: Synthetic oligonucleotide
  Sense strand starting at position 1528 of SEQ ID NO: 1888100
guugcaugcccuugggaga

SEQ ID NO: 2510683 - RNA, 19 nt, Artificial Sequence
  Description of Artificial Sequence: Synthetic oligonucleotide
  Antisense strand to SEQ ID NO: 2510682
ucucccaagggcaugcaac

SEQ ID NO: 2510684 - RNA, 19 nt, Artificial Sequence
  Description of Artificial Sequence: Synthetic oligonucleotide
  Sense strand starting at position 1529 of SEQ ID NO: 1888100
uugcaugcccuugggagaa

SEQ ID NO: 2510685 - RNA, 19 nt, Artificial Sequence
  Description of Artificial Sequence: Synthetic oligonucleotide
  Antisense strand to SEQ ID NO: 2510684
uucucccaagggcaugcaa

SEQ ID NO: 2510686 - RNA, 19 nt, Artificial Sequence
  Description of Artificial Sequence: Synthetic oligonucleotide
  Sense strand starting at position 1623 of SEQ ID NO: 1888100
cgagacuaacgugacguau

SEQ ID NO: 2510687 - RNA, 19 nt, Artificial Sequence
  Description of Artificial Sequence: Synthetic oligonucleotide
  Antisense strand to SEQ ID NO: 2510686
auacgucacguuagucucg

SEQ ID NO: 2510688 - RNA, 19 nt, Artificial Sequence
  Description of Artificial Sequence: Synthetic oligonucleotide
  Sense strand starting at position 1725 of SEQ ID NO: 1888100
ucuguaaucccagaaggca

SEQ ID NO: 2510689 - RNA, 19 nt, Artificial Sequence
  Description of Artificial Sequence: Synthetic oligonucleotide
  Antisense strand to SEQ ID NO: 2510688
ugccuucugggauuacaga

SEQ ID NO: 2510690 - RNA, 19 nt, Artificial Sequence
  Description of Artificial Sequence: Synthetic oligonucleotide
  Sense strand starting at position 1992 of SEQ ID NO: 1888100
ggucauuaauacccgaguu

SEQ ID NO: 2510691 - RNA, 19 nt, Artificial Sequence
  Description of Artificial Sequence: Synthetic oligonucleotide
  Antisense strand to SEQ ID NO: 2510690
aacucggguauuaaugacc

SEQ ID NO: 2510692 - RNA, 19 nt, Artificial Sequence
  Description of Artificial Sequence: Synthetic oligonucleotide
  Sense strand starting at position 1994 of SEQ ID NO: 1888100
ucauuaauacccgaguucu

SEQ ID NO: 2510693 - RNA, 19 nt, Artificial Sequence
  Description of Artificial Sequence: Synthetic oligonucleotide
  Antisense strand to SEQ ID NO: 2510692
agaacucggguauuaauga

SEQ ID NO: 2510694 - RNA, 19 nt, Artificial Sequence
  Description of Artificial Sequence: Synthetic oligonucleotide
  Sense strand starting at position 2002 of SEQ ID NO: 1888100
acccgaguucugggaagcu

SEQ ID NO: 2510695 - RNA, 19 nt, Artificial Sequence
  Description of Artificial Sequence: Synthetic oligonucleotide
  Antisense strand to SEQ ID NO: 2510694
agcuucccagaacucgggu

SEQ ID NO: 2510696 - RNA, 19 nt, Artificial Sequence
  Description of Artificial Sequence: Synthetic oligonucleotide
  Sense strand starting at position 2199 of SEQ ID NO: 1888100
ccaggcucugcagaugaaa

SEQ ID NO: 2510697 - RNA, 19 nt, Artificial Sequence
  Description of Artificial Sequence: Synthetic oligonucleotide
  Antisense strand to SEQ ID NO: 2510696
uuucaucugcagagccugg

SEQ ID NO: 2510698 - RNA, 19 nt, Artificial Sequence
  Description of Artificial Sequence: Synthetic oligonucleotide
  Sense strand starting at position 2246 of SEQ ID NO: 1888100
gcaguugccagagaucaca

SEQ ID NO: 2510699 - RNA, 19 nt, Artificial Sequence
  Description of Artificial Sequence: Synthetic oligonucleotide
  Antisense strand to SEQ ID NO: 2510698
ugugaucucuggcaacugc

SEQ ID NO: 2510700 - RNA, 19 nt, Artificial Sequence
  Description of Artificial Sequence: Synthetic oligonucleotide
  Sense strand starting at position 2286 of SEQ ID NO: 1888100
cuagaauucuggucuuauc

SEQ ID NO: 2510701 - RNA, 19 nt, Artificial Sequence
  Description of Artificial Sequence: Synthetic oligonucleotide
  Antisense strand to SEQ ID NO: 2510700
gauaagaccagaauucuag

SEQ ID NO: 2510702 - RNA, 19 nt, Artificial Sequence
  Description of Artificial Sequence: Synthetic oligonucleotide
  Sense strand starting at position 2316 of SEQ ID NO: 1888100
ucagcaucacucugacuga

SEQ ID NO: 2510703 - RNA, 19 nt, Artificial Sequence
  Description of Artificial Sequence: Synthetic oligonucleotide
  Antisense strand to SEQ ID NO: 2510702
ucagucagagugaugcuga

SEQ ID NO: 2510704 - RNA, 19 nt, Artificial Sequence
  Description of Artificial Sequence: Synthetic oligonucleotide
  Sense strand starting at position 2528 of SEQ ID NO: 1888100
guguuucuugagcaucuau

SEQ ID NO: 2510705 - RNA, 19 nt, Artificial Sequence
  Description of Artificial Sequence: Synthetic oligonucleotide
  Antisense strand to SEQ ID NO: 2510704
auagaugcucaagaaacac

SEQ ID NO: 2510706 - RNA, 19 nt, Artificial Sequence
  Description of Artificial Sequence: Synthetic oligonucleotide
  Sense strand starting at position 2658 of SEQ ID NO: 1888100
ggcacugagcugggugauu

SEQ ID NO: 2510707 - RNA, 19 nt, Artificial Sequence
  Description of Artificial Sequence: Synthetic oligonucleotide
  Antisense strand to SEQ ID NO: 2510706
aaucacccagcucagugcc

SEQ ID NO: 2510708 - RNA, 19 nt, Artificial Sequence
  Description of Artificial Sequence: Synthetic oligonucleotide
  Sense strand starting at position 2660 of SEQ ID NO: 1888100
cacugagcugggugauuga

SEQ ID NO: 2510709 - RNA, 19 nt, Artificial Sequence
  Description of Artificial Sequence: Synthetic oligonucleotide
  Antisense strand to SEQ ID NO: 2510708
ucaaucacccagcucagug

SEQ ID NO: 2510710 - RNA, 19 nt, Artificial Sequence
  Description of Artificial Sequence: Synthetic oligonucleotide
  Sense strand starting at position 2663 of SEQ ID NO: 1888100
ugagcugggugauugacau

SEQ ID NO: 2510711 - RNA, 19 nt, Artificial Sequence
  Description of Artificial Sequence: Synthetic oligonucleotide
  Antisense strand to SEQ ID NO: 2510710
augucaaucacccagcuca

SEQ ID NO: 2510712 - RNA, 19 nt, Artificial Sequence
  Description of Artificial Sequence: Synthetic oligonucleotide
  Sense strand starting at position 3074 of SEQ ID NO: 1888100
gacucaguguccucuguaa

SEQ ID NO: 2510713 - RNA, 19 nt, Artificial Sequence
  Description of Artificial Sequence: Synthetic oligonucleotide
  Antisense strand to SEQ ID NO: 2510712
uuacagaggacacugaguc

SEQ ID NO: 2510714 - RNA, 19 nt, Artificial Sequence
  Description of Artificial Sequence: Synthetic oligonucleotide
  Sense strand starting at position 3194 of SEQ ID NO: 1888100
gcaggugacuuguucuuau

SEQ ID NO: 2510715 - RNA, 19 nt, Artificial Sequence
  Description of Artificial Sequence: Synthetic oligonucleotide
  Antisense strand to SEQ ID NO: 2510714
auaagaacaagucaccugc

SEQ ID NO: 2510716 - RNA, 19 nt, Artificial Sequence
  Description of Artificial Sequence: Synthetic oligonucleotide
  Sense strand starting at position 3373 of SEQ ID NO: 1888100
aggcuuggcgugaaugguu

SEQ ID NO: 2510717 - RNA, 19 nt, Artificial Sequence
  Description of Artificial Sequence: Synthetic oligonucleotide
  Antisense strand to SEQ ID NO: 2510716
aaccauucacgccaagccu

SEQ ID NO: 2510718 - RNA, 19 nt, Artificial Sequence
  Description of Artificial Sequence: Synthetic oligonucleotide
  Sense strand starting at position 3727 of SEQ ID NO: 1888100
gggagacugcccugauccu

SEQ ID NO: 2510719 - RNA, 19 nt, Artificial Sequence
  Description of Artificial Sequence: Synthetic oligonucleotide
  Antisense strand to SEQ ID NO: 2510718
aggaucagggcagucuccc

SEQ ID NO: 2510720 - RNA, 19 nt, Artificial Sequence
  Description of Artificial Sequence: Synthetic oligonucleotide
  Sense strand starting at position 3756 of SEQ ID NO: 1888100
agcgaacucuuucuagacu

SEQ ID NO: 2510721 - RNA, 19 nt, Artificial Sequence
  Description of Artificial Sequence: Synthetic oligonucleotide
  Antisense strand to SEQ ID NO: 2510720
agucuagaaagaguucgcu

SEQ ID NO: 2510722 - RNA, 19 nt, Artificial Sequence
  Description of Artificial Sequence: Synthetic oligonucleotide
  Sense strand starting at position 3794 of SEQ ID NO: 1888100
acuuacgucuuucuaucau

SEQ ID NO: 2510723 - RNA, 19 nt, Artificial Sequence
  Description of Artificial Sequence: Synthetic oligonucleotide
  Antisense strand to SEQ ID NO: 2510722
augauagaaagacguaagu

SEQ ID NO: 2510724 - RNA, 19 nt, Artificial Sequence
  Description of Artificial Sequence: Synthetic oligonucleotide
  Sense strand starting at position 218 of SEQ ID NO: 1888101
uggccagaaggucacauau

SEQ ID NO: 2510725 - RNA, 19 nt, Artificial Sequence
  Description of Artificial Sequence: Synthetic oligonucleotide
  Antisense strand to SEQ ID NO: 2510724
auaugugaccuucuggcca

SEQ ID NO: 2510726 - RNA, 19 nt, Artificial Sequence
  Description of Artificial Sequence: Synthetic oligonucleotide
  Sense strand starting at position 236 of SEQ ID NO: 1888101
uuguaugauucccuuucca

SEQ ID NO: 2510727 - RNA, 19 nt, Artificial Sequence
  Description of Artificial Sequence: Synthetic oligonucleotide
  Antisense strand to SEQ ID NO: 2510726
uggaaagggaaucauacaa

SEQ ID NO: 2510728 - RNA, 19 nt, Artificial Sequence
  Description of Artificial Sequence: Synthetic oligonucleotide
  Sense strand starting at position 240 of SEQ ID NO: 1888101
augauucccuuuccaggaa

SEQ ID NO: 2510729 - RNA, 19 nt, Artificial Sequence
  Description of Artificial Sequence: Synthetic oligonucleotide
  Antisense strand to SEQ ID NO: 2510728
uuccuggaaagggaaucau

SEQ ID NO: 2510730 - RNA, 19 nt, Artificial Sequence
  Description of Artificial Sequence: Synthetic oligonucleotide
  Sense strand starting at position 292 of SEQ ID NO: 1888101
gaagaauggugguuguuag

SEQ ID NO: 2510731 - RNA, 19 nt, Artificial Sequence
  Description of Artificial Sequence: Synthetic oligonucleotide
  Antisense strand to SEQ ID NO: 2510730
cuaacaaccaccauucuuc

SEQ ID NO: 2510732 - RNA, 19 nt, Artificial Sequence
  Description of Artificial Sequence: Synthetic oligonucleotide
  Sense strand starting at position 372 of SEQ ID NO: 1888101
ugugauuagcuagagguga

SEQ ID NO: 2510733 - RNA, 19 nt, Artificial Sequence
  Description of Artificial Sequence: Synthetic oligonucleotide
  Antisense strand to SEQ ID NO: 2510732
ucaccucuagcuaaucaca

SEQ ID NO: 2510734 - RNA, 19 nt, Artificial Sequence
  Description of Artificial Sequence: Synthetic oligonucleotide
  Sense strand starting at position 374 of SEQ ID NO: 1888101
ugauuagcuagaggugaug

SEQ ID NO: 2510735 - RNA, 19 nt, Artificial Sequence
  Description of Artificial Sequence: Synthetic oligonucleotide
  Antisense strand to SEQ ID NO: 2510734
caucaccucuagcuaauca

SEQ ID NO: 2510736 - RNA, 19 nt, Artificial Sequence
  Description of Artificial Sequence: Synthetic oligonucleotide
  Sense strand starting at position 446 of SEQ ID NO: 1888101
auaugaugcuaugugaacu

SEQ ID NO: 2510737 - RNA, 19 nt, Artificial Sequence
  Description of Artificial Sequence: Synthetic oligonucleotide
  Antisense strand to SEQ ID NO: 2510736
aguucacauagcaucauau

SEQ ID NO: 2510738 - RNA, 19 nt, Artificial Sequence
  Description of Artificial Sequence: Synthetic oligonucleotide
  Sense strand starting at position 465 of SEQ ID NO: 1888101
ucgucucaguaaguuauuu

SEQ ID NO: 2510739 - RNA, 19 nt, Artificial Sequence
  Description of Artificial Sequence: Synthetic oligonucleotide
  Antisense strand to SEQ ID NO: 2510738
aaauaacuuacugagacga

SEQ ID NO: 2510740 - RNA, 19 nt, Artificial Sequence
  Description of Artificial Sequence: Synthetic oligonucleotide
  Sense strand starting at position 532 of SEQ ID NO: 1888101
agguaugaauggcuuuaaa

SEQ ID NO: 2510741 - RNA, 19 nt, Artificial Sequence
  Description of Artificial Sequence: Synthetic oligonucleotide
  Antisense strand to SEQ ID NO: 2510740
uuuaaagccauucauaccu

SEQ ID NO: 2510742 - RNA, 19 nt, Artificial Sequence
  Description of Artificial Sequence: Synthetic oligonucleotide
  Sense strand starting at position 541 of SEQ ID NO: 1888101
uggcuuuaaagauggcuuu

SEQ ID NO: 2510743 - RNA, 19 nt, Artificial Sequence
  Description of Artificial Sequence: Synthetic oligonucleotide
  Antisense strand to SEQ ID NO: 2510742
aaagccaucuuuaaagcca

SEQ ID NO: 2510744 - RNA, 19 nt, Artificial Sequence
  Description of Artificial Sequence: Synthetic oligonucleotide
  Sense strand starting at position 559 of SEQ ID NO: 1888101
uuaagugacgugugggaga

SEQ ID NO: 2510745 - RNA, 19 nt, Artificial Sequence
  Description of Artificial Sequence: Synthetic oligonucleotide
  Antisense strand to SEQ ID NO: 2510744
ucucccacacgucacuuaa

SEQ ID NO: 2510746 - RNA, 19 nt, Artificial Sequence
  Description of Artificial Sequence: Synthetic oligonucleotide
  Sense strand starting at position 664 of SEQ ID NO: 1888101
gugaaauuccaucaguuaa

SEQ ID NO: 2510747 - RNA, 19 nt, Artificial Sequence
  Description of Artificial Sequence: Synthetic oligonucleotide
  Antisense strand to SEQ ID NO: 2510746
uuaacugauggaauuucac

SEQ ID NO: 2510748 - RNA, 19 nt, Artificial Sequence
  Description of Artificial Sequence: Synthetic oligonucleotide
  Sense strand starting at position 676 of SEQ ID NO: 1888101
caguuaacacuguagguga

SEQ ID NO: 2510749 - RNA, 19 nt, Artificial Sequence
  Description of Artificial Sequence: Synthetic oligonucleotide
  Antisense strand to SEQ ID NO: 2510748
ucaccuacaguguuaacug

SEQ ID NO: 2510750 - RNA, 19 nt, Artificial Sequence
  Description of Artificial Sequence: Synthetic oligonucleotide
  Sense strand starting at position 761 of SEQ ID NO: 1888101
gugugucuugaacacacau

SEQ ID NO: 2510751 - RNA, 19 nt, Artificial Sequence
  Description of Artificial Sequence: Synthetic oligonucleotide
  Antisense strand to SEQ ID NO: 2510750
auguguguucaagacacac

SEQ ID NO: 2510752 - RNA, 19 nt, Artificial Sequence
  Description of Artificial Sequence: Synthetic oligonucleotide
  Sense strand starting at position 924 of SEQ ID NO: 1888101
uucagacccgguugugaau

SEQ ID NO: 2510753 - RNA, 19 nt, Artificial Sequence
  Description of Artificial Sequence: Synthetic oligonucleotide
  Antisense strand to SEQ ID NO: 2510752
auucacaaccgggucugaa

SEQ ID NO: 2510754 - RNA, 19 nt, Artificial Sequence
  Description of Artificial Sequence: Synthetic oligonucleotide
  Sense strand starting at position 982 of SEQ ID NO: 1888101
uuagacauauuguuugacu

SEQ ID NO: 2510755 - RNA, 19 nt, Artificial Sequence
  Description of Artificial Sequence: Synthetic oligonucleotide
  Antisense strand to SEQ ID NO: 2510754
agucaaacaauaugucuaa

SEQ ID NO: 2510756 - RNA, 19 nt, Artificial Sequence
  Description of Artificial Sequence: Synthetic oligonucleotide
  Sense strand starting at position 984 of SEQ ID NO: 1888101
agacauauuguuugacuaa

SEQ ID NO: 2510757 - RNA, 19 nt, Artificial Sequence
  Description of Artificial Sequence: Synthetic oligonucleotide
  Antisense strand to SEQ ID NO: 2510756
uuagucaaacaauaugucu

SEQ ID NO: 2510758 - RNA, 19 nt, Artificial Sequence
  Description of Artificial Sequence: Synthetic oligonucleotide
  Sense strand starting at position 987 of SEQ ID NO: 1888101
cauauuguuugacuaagag

SEQ ID NO: 2510759 - RNA, 19 nt, Artificial Sequence
  Description of Artificial Sequence: Synthetic oligonucleotide
  Antisense strand to SEQ ID NO: 2510758
cucuuagucaaacaauaug

SEQ ID NO: 2510760 - RNA, 19 nt, Artificial Sequence
  Description of Artificial Sequence: Synthetic oligonucleotide
  Sense strand starting at position 1132 of SEQ ID NO: 1888101
gucugacacugaucacauc

SEQ ID NO: 2510761 - RNA, 19 nt, Artificial Sequence
  Description of Artificial Sequence: Synthetic oligonucleotide
  Antisense strand to SEQ ID NO: 2510760
gaugugaucagugucagac

SEQ ID NO: 2510762 - RNA, 19 nt, Artificial Sequence
  Description of Artificial Sequence: Synthetic oligonucleotide
  Sense strand starting at position 1205 of SEQ ID NO: 1888101
uugugaucucuguaucaug

SEQ ID NO: 2510763 - RNA, 19 nt, Artificial Sequence
  Description of Artificial Sequence: Synthetic oligonucleotide
  Antisense strand to SEQ ID NO: 2510762
caugauacagagaucacaa

SEQ ID NO: 2510764 - RNA, 19 nt, Artificial Sequence
  Description of Artificial Sequence: Synthetic oligonucleotide
  Sense strand starting at position 1348 of SEQ ID NO: 1888101
auggcuuaccuggacuauu

SEQ ID NO: 2510765 - RNA, 19 nt, Artificial Sequence
  Description of Artificial Sequence: Synthetic oligonucleotide
  Antisense strand to SEQ ID NO: 2510764
aauaguccagguaagccau

SEQ ID NO: 2510766 - RNA, 19 nt, Artificial Sequence
  Description of Artificial Sequence: Synthetic oligonucleotide
  Sense strand starting at position 1359 of SEQ ID NO: 1888101
ggacuauuguggucuccuc

SEQ ID NO: 2510767 - RNA, 19 nt, Artificial Sequence
  Description of Artificial Sequence: Synthetic oligonucleotide
  Antisense strand to SEQ ID NO: 2510766
gaggagaccacaauagucc

SEQ ID NO: 2510768 - RNA, 19 nt, Artificial Sequence
  Description of Artificial Sequence: Synthetic oligonucleotide
  Sense strand starting at position 1392 of SEQ ID NO: 1888101
ggcuucuguccugaauccu

SEQ ID NO: 2510769 - RNA, 19 nt, Artificial Sequence
  Description of Artificial Sequence: Synthetic oligonucleotide
  Antisense strand to SEQ ID NO: 2510768
aggauucaggacagaagcc

SEQ ID NO: 2510770 - RNA, 19 nt, Artificial Sequence
  Description of Artificial Sequence: Synthetic oligonucleotide
  Sense strand starting at position 1452 of SEQ ID NO: 1888101
gugagaaucuaagucagau

SEQ ID NO: 2510771 - RNA, 19 nt, Artificial Sequence
  Description of Artificial Sequence: Synthetic oligonucleotide
  Antisense strand to SEQ ID NO: 2510770
aucugacuuagauucucac

SEQ ID NO: 2510772 - RNA, 19 nt, Artificial Sequence
  Description of Artificial Sequence: Synthetic oligonucleotide
  Sense strand starting at position 1475 of SEQ ID NO: 1888101
ucccuucucugccuggaaa

SEQ ID NO: 2510773 - RNA, 19 nt, Artificial Sequence
  Description of Artificial Sequence: Synthetic oligonucleotide
  Antisense strand to SEQ ID NO: 2510772
uuuccaggcagagaaggga

SEQ ID NO: 2510774 - RNA, 19 nt, Artificial Sequence
  Description of Artificial Sequence: Synthetic oligonucleotide
  Sense strand starting at position 1477 of SEQ ID NO: 1888101
ccuucucugccuggaaacu

SEQ ID NO: 2510775 - RNA, 19 nt, Artificial Sequence
  Description of Artificial Sequence: Synthetic oligonucleotide
  Antisense strand to SEQ ID NO: 2510774
aguuuccaggcagagaagg

SEQ ID NO: 2510776 - RNA, 19 nt, Artificial Sequence
  Description of Artificial Sequence: Synthetic oligonucleotide
  Sense strand starting at position 1478 of SEQ ID NO: 1888101
cuucucugccuggaaacuu

SEQ ID NO: 2510777 - RNA, 19 nt, Artificial Sequence
  Description of Artificial Sequence: Synthetic oligonucleotide
  Antisense strand to SEQ ID NO: 2510776
aaguuuccaggcagagaag

SEQ ID NO: 2510778 - RNA, 19 nt, Artificial Sequence
  Description of Artificial Sequence: Synthetic oligonucleotide
  Sense strand starting at position 1738 of SEQ ID NO: 1888101
ccaggccucugcucaaaua

SEQ ID NO: 2510779 - RNA, 19 nt, Artificial Sequence
  Description of Artificial Sequence: Synthetic oligonucleotide
  Antisense strand to SEQ ID NO: 2510778
uauuugagcagaggccugg

SEQ ID NO: 2510780 - RNA, 19 nt, Artificial Sequence
  Description of Artificial Sequence: Synthetic oligonucleotide
  Sense strand starting at position 2563 of SEQ ID NO: 1888101
ggcacagaguggucaguau

SEQ ID NO: 2510781 - RNA, 19 nt, Artificial Sequence
  Description of Artificial Sequence: Synthetic oligonucleotide
  Antisense strand to SEQ ID NO: 2510780
auacugaccacucugugcc

SEQ ID NO: 2510782 - RNA, 19 nt, Artificial Sequence
  Description of Artificial Sequence: Synthetic oligonucleotide
  Sense strand starting at position 2856 of SEQ ID NO: 1888101
gcuuguucccuccauugga

SEQ ID NO: 2510783 - RNA, 19 nt, Artificial Sequence
  Description of Artificial Sequence: Synthetic oligonucleotide
  Antisense strand to SEQ ID NO: 2510782
uccaauggagggaacaagc

SEQ ID NO: 2510784 - RNA, 19 nt, Artificial Sequence
  Description of Artificial Sequence: Synthetic oligonucleotide
  Sense strand starting at position 3195 of SEQ ID NO: 1888101
cacagcaucucagugaaga

SEQ ID NO: 2510785 - RNA, 19 nt, Artificial Sequence
  Description of Artificial Sequence: Synthetic oligonucleotide
  Antisense strand to SEQ ID NO: 2510784
ucuucacugagaugcugug

SEQ ID NO: 2510786 - RNA, 19 nt, Artificial Sequence
  Description of Artificial Sequence: Synthetic oligonucleotide
  Sense strand starting at position 3196 of SEQ ID NO: 1888101
acagcaucucagugaagaa

SEQ ID NO: 2510787 - RNA, 19 nt, Artificial Sequence
  Description of Artificial Sequence: Synthetic oligonucleotide
  Antisense strand to SEQ ID NO: 2510786
uucuucacugagaugcugu

SEQ ID NO: 2510788 - RNA, 19 nt, Artificial Sequence
  Description of Artificial Sequence: Synthetic oligonucleotide
  Sense strand starting at position 3739 of SEQ ID NO: 1888101
uugaaugacagcugugaug

SEQ ID NO: 2510789 - RNA, 19 nt, Artificial Sequence
  Description of Artificial Sequence: Synthetic oligonucleotide
  Antisense strand to SEQ ID NO: 2510788
caucacagcugucauucaa

SEQ ID NO: 2510790 - RNA, 19 nt, Artificial Sequence
  Description of Artificial Sequence: Synthetic oligonucleotide
  Sense strand starting at position 3778 of SEQ ID NO: 1888101
ugccuugagccaggagaaa

SEQ ID NO: 2510791 - RNA, 19 nt, Artificial Sequence
  Description of Artificial Sequence: Synthetic oligonucleotide
  Antisense strand to SEQ ID NO: 2510790
uuucuccuggcucaaggca

SEQ ID NO: 2510792 - RNA, 19 nt, Artificial Sequence
  Description of Artificial Sequence: Synthetic oligonucleotide
  Sense strand starting at position 3802 of SEQ ID NO: 1888101
cuaauuagguuucuguuua

SEQ ID NO: 2510793 - RNA, 19 nt, Artificial Sequence
  Description of Artificial Sequence: Synthetic oligonucleotide
  Antisense strand to SEQ ID NO: 2510792
uaaacagaaaccuaauuag

SEQ ID NO: 2510794 - RNA, 19 nt, Artificial Sequence
  Description of Artificial Sequence: Synthetic oligonucleotide
  Sense strand starting at position 3806 of SEQ ID NO: 1888101
uuagguuucuguuuauuug

SEQ ID NO: 2510795 - RNA, 19 nt, Artificial Sequence
  Description of Artificial Sequence: Synthetic oligonucleotide
  Antisense strand to SEQ ID NO: 2510794
caaauaaacagaaaccuaa

SEQ ID NO: 2510796 - RNA, 19 nt, Artificial Sequence
  Description of Artificial Sequence: Synthetic oligonucleotide
  Sense strand starting at position 3816 of SEQ ID NO: 1888101
guuuauuuguuguuccaag

SEQ ID NO: 2510797 - RNA, 19 nt, Artificial Sequence
  Description of Artificial Sequence: Synthetic oligonucleotide
  Antisense strand to SEQ ID NO: 2510796
cuuggaacaacaaauaaac

SEQ ID NO: 2510798 - RNA, 19 nt, Artificial Sequence
  Description of Artificial Sequence: Synthetic oligonucleotide
  Sense strand starting at position 3841 of SEQ ID NO: 1888101
aauugugggcuuuguaaac

SEQ ID NO: 2510799 - RNA, 19 nt, Artificial Sequence
  Description of Artificial Sequence: Synthetic oligonucleotide
  Antisense strand to SEQ ID NO: 2510798
guuuacaaagcccacaauu

SEQ ID NO: 2510800 - RNA, 19 nt, Artificial Sequence
  Description of Artificial Sequence: Synthetic oligonucleotide
  Sense strand starting at position 3861 of SEQ ID NO: 1888101
gcccuuugauggcugagga

SEQ ID NO: 2510801 - RNA, 19 nt, Artificial Sequence
  Description of Artificial Sequence: Synthetic oligonucleotide
  Antisense strand to SEQ ID NO: 2510800
uccucagccaucaaagggc

SEQ ID NO: 2510802 - RNA, 19 nt, Artificial Sequence
  Description of Artificial Sequence: Synthetic oligonucleotide
  Sense strand starting at position 3880 of SEQ ID NO: 1888101
guuacuuuaggaggacagu

SEQ ID NO: 2510803 - RNA, 19 nt, Artificial Sequence
  Description of Artificial Sequence: Synthetic oligonucleotide
  Antisense strand to SEQ ID NO: 2510802
acuguccuccuaaaguaac

SEQ ID NO: 2510804 - RNA, 19 nt, Artificial Sequence
  Description of Artificial Sequence: Synthetic oligonucleotide
  Sense strand starting at position 442 of SEQ ID NO: 1888102
gagacaguguuacaccauu

SEQ ID NO: 2510805 - RNA, 19 nt, Artificial Sequence
  Description of Artificial Sequence: Synthetic oligonucleotide
  Antisense strand to SEQ ID NO: 2510804
aaugguguaacacugucuc

SEQ ID NO: 2510806 - RNA, 19 nt, Artificial Sequence
  Description of Artificial Sequence: Synthetic oligonucleotide
  Sense strand starting at position 576 of SEQ ID NO: 1888102
agucuuucuuuaucaggca

SEQ ID NO: 2510807 - RNA, 19 nt, Artificial Sequence
  Description of Artificial Sequence: Synthetic oligonucleotide
  Antisense strand to SEQ ID NO: 2510806
ugccugauaaagaaagacu

SEQ ID NO: 2510808 - RNA, 19 nt, Artificial Sequence
  Description of Artificial Sequence: Synthetic oligonucleotide
  Sense strand starting at position 626 of SEQ ID NO: 1888102
gccucuauuugugaagguu

SEQ ID NO: 2510809 - RNA, 19 nt, Artificial Sequence
  Description of Artificial Sequence: Synthetic oligonucleotide
  Antisense strand to SEQ ID NO: 2510808
aaccuucacaaauagaggc

SEQ ID NO: 2510810 - RNA, 19 nt, Artificial Sequence
  Description of Artificial Sequence: Synthetic oligonucleotide
  Sense strand starting at position 1410 of SEQ ID NO: 1888102
gcuguauacucgucauaac

SEQ ID NO: 2510811 - RNA, 19 nt, Artificial Sequence
  Description of Artificial Sequence: Synthetic oligonucleotide
  Antisense strand to SEQ ID NO: 2510810
guuaugacgaguauacagc

SEQ ID NO: 2510812 - RNA, 19 nt, Artificial Sequence
  Description of Artificial Sequence: Synthetic oligonucleotide
  Sense strand starting at position 1411 of SEQ ID NO: 1888102
cuguauacucgucauaacu

SEQ ID NO: 2510813 - RNA, 19 nt, Artificial Sequence
  Description of Artificial Sequence: Synthetic oligonucleotide
  Antisense strand to SEQ ID NO: 2510812
aguuaugacgaguauacag

SEQ ID NO: 2510814 - RNA, 19 nt, Artificial Sequence
  Description of Artificial Sequence: Synthetic oligonucleotide
  Sense strand starting at position 1420 of SEQ ID NO: 1888102
cgucauaacucucuguauc

SEQ ID NO: 2510815 - RNA, 19 nt, Artificial Sequence
  Description of Artificial Sequence: Synthetic oligonucleotide
  Antisense strand to SEQ ID NO: 2510814
gauacagagaguuaugacg

SEQ ID NO: 2510816 - RNA, 19 nt, Artificial Sequence
  Description of Artificial Sequence: Synthetic oligonucleotide
  Sense strand starting at position 1639 of SEQ ID NO: 1888102
aauguucuuccugggacaa

SEQ ID NO: 2510817 - RNA, 19 nt, Artificial Sequence
  Description of Artificial Sequence: Synthetic oligonucleotide
  Antisense strand to SEQ ID NO: 2510816
uugucccaggaagaacauu

SEQ ID NO: 2510818 - RNA, 19 nt, Artificial Sequence
  Description of Artificial Sequence: Synthetic oligonucleotide
  Sense strand starting at position 1640 of SEQ ID NO: 1888102
auguucuuccugggacaaa

SEQ ID NO: 2510819 - RNA, 19 nt, Artificial Sequence
  Description of Artificial Sequence: Synthetic oligonucleotide
  Antisense strand to SEQ ID NO: 2510818
uuugucccaggaagaacau

SEQ ID NO: 2510820 - RNA, 19 nt, Artificial Sequence
  Description of Artificial Sequence: Synthetic oligonucleotide
  Sense strand starting at position 1727 of SEQ ID NO: 1888102
cucagugcuucugucugua

SEQ ID NO: 2510821 - RNA, 19 nt, Artificial Sequence
  Description of Artificial Sequence: Synthetic oligonucleotide
  Antisense strand to SEQ ID NO: 2510820
uacagacagaagcacugag

SEQ ID NO: 2510822 - RNA, 19 nt, Artificial Sequence
  Description of Artificial Sequence: Synthetic oligonucleotide
  Sense strand starting at position 1730 of SEQ ID NO: 1888102
agugcuucugucuguagga

SEQ ID NO: 2510823 - RNA, 19 nt, Artificial Sequence
  Description of Artificial Sequence: Synthetic oligonucleotide
  Antisense strand to SEQ ID NO: 2510822
uccuacagacagaagcacu

SEQ ID NO: 2510824 - RNA, 19 nt, Artificial Sequence
  Description of Artificial Sequence: Synthetic oligonucleotide
  Sense strand starting at position 1731 of SEQ ID NO: 1888102
gugcuucugucuguaggaa

SEQ ID NO: 2510825 - RNA, 19 nt, Artificial Sequence
  Description of Artificial Sequence: Synthetic oligonucleotide
  Antisense strand to SEQ ID NO: 2510824
uuccuacagacagaagcac

SEQ ID NO: 2510826 - RNA, 19 nt, Artificial Sequence
  Description of Artificial Sequence: Synthetic oligonucleotide
  Sense strand starting at position 2128 of SEQ ID NO: 1888102
cagggucagcucugggaua

SEQ ID NO: 2510827 - RNA, 19 nt, Artificial Sequence
  Description of Artificial Sequence: Synthetic oligonucleotide
  Antisense strand to SEQ ID NO: 2510826
uaucccagagcugacccug

SEQ ID NO: 2510828 - RNA, 19 nt, Artificial Sequence
  Description of Artificial Sequence: Synthetic oligonucleotide
  Sense strand starting at position 2130 of SEQ ID NO: 1888102
gggucagcucugggauaca

SEQ ID NO: 2510829 - RNA, 19 nt, Artificial Sequence
  Description of Artificial Sequence: Synthetic oligonucleotide
  Antisense strand to SEQ ID NO: 2510828
uguaucccagagcugaccc

SEQ ID NO: 2510830 - RNA, 19 nt, Artificial Sequence
  Description of Artificial Sequence: Synthetic oligonucleotide
  Sense strand starting at position 2370 of SEQ ID NO: 1888102
ccguccucuguguaagcaa

SEQ ID NO: 2510831 - RNA, 19 nt, Artificial Sequence
  Description of Artificial Sequence: Synthetic oligonucleotide
  Antisense strand to SEQ ID NO: 2510830
uugcuuacacagaggacgg

SEQ ID NO: 2510832 - RNA, 19 nt, Artificial Sequence
  Description of Artificial Sequence: Synthetic oligonucleotide
  Sense strand starting at position 2401 of SEQ ID NO: 1888102
aucccuucugucugaaaug

SEQ ID NO: 2510833 - RNA, 19 nt, Artificial Sequence
  Description of Artificial Sequence: Synthetic oligonucleotide
  Antisense strand to SEQ ID NO: 2510832
cauuucagacagaagggau

SEQ ID NO: 2510834 - RNA, 19 nt, Artificial Sequence
  Description of Artificial Sequence: Synthetic oligonucleotide
  Sense strand starting at position 2465 of SEQ ID NO: 1888102
aguggugcugucguuuaca

SEQ ID NO: 2510835 - RNA, 19 nt, Artificial Sequence
  Description of Artificial Sequence: Synthetic oligonucleotide
  Antisense strand to SEQ ID NO: 2510834
uguaaacgacagcaccacu

SEQ ID NO: 2510836 - RNA, 19 nt, Artificial Sequence
  Description of Artificial Sequence: Synthetic oligonucleotide
  Sense strand starting at position 2468 of SEQ ID NO: 1888102
ggugcugucguuuacagag

SEQ ID NO: 2510837 - RNA, 19 nt, Artificial Sequence
  Description of Artificial Sequence: Synthetic oligonucleotide
  Antisense strand to SEQ ID NO: 2510836
cucuguaaacgacagcacc

SEQ ID NO: 2510838 - RNA, 19 nt, Artificial Sequence
  Description of Artificial Sequence: Synthetic oligonucleotide
  Sense strand starting at position 2514 of SEQ ID NO: 1888102
guggauggcugagucauga

SEQ ID NO: 2510839 - RNA, 19 nt, Artificial Sequence
  Description of Artificial Sequence: Synthetic oligonucleotide
  Antisense strand to SEQ ID NO: 2510838
ucaugacucagccauccac

SEQ ID NO: 2510840 - RNA, 19 nt, Artificial Sequence
  Description of Artificial Sequence: Synthetic oligonucleotide
  Sense strand starting at position 2546 of SEQ ID NO: 1888102
gcagaagugaggugagaug

SEQ ID NO: 2510841 - RNA, 19 nt, Artificial Sequence
  Description of Artificial Sequence: Synthetic oligonucleotide
  Antisense strand to SEQ ID NO: 2510840
caucucaccucacuucugc

SEQ ID NO: 2510842 - RNA, 19 nt, Artificial Sequence
  Description of Artificial Sequence: Synthetic oligonucleotide
  Sense strand starting at position 2578 of SEQ ID NO: 1888102
gggccacuccgugguaagu

SEQ ID NO: 2510843 - RNA, 19 nt, Artificial Sequence
  Description of Artificial Sequence: Synthetic oligonucleotide
  Antisense strand to SEQ ID NO: 2510842
acuuaccacggaguggccc

SEQ ID NO: 2510844 - RNA, 19 nt, Artificial Sequence
  Description of Artificial Sequence: Synthetic oligonucleotide
  Sense strand starting at position 2631 of SEQ ID NO: 1888102
gacguugaguggccacaau

SEQ ID NO: 2510845 - RNA, 19 nt, Artificial Sequence
  Description of Artificial Sequence: Synthetic oligonucleotide
  Antisense strand to SEQ ID NO: 2510844
auuguggccacucaacguc

SEQ ID NO: 2510846 - RNA, 19 nt, Artificial Sequence
  Description of Artificial Sequence: Synthetic oligonucleotide
  Sense strand starting at position 2725 of SEQ ID NO: 1888102
cugugugcccagcuguauu

SEQ ID NO: 2510847 - RNA, 19 nt, Artificial Sequence
  Description of Artificial Sequence: Synthetic oligonucleotide
  Antisense strand to SEQ ID NO: 2510846
aauacagcugggcacacag

SEQ ID NO: 2510848 - RNA, 19 nt, Artificial Sequence
  Description of Artificial Sequence: Synthetic oligonucleotide
  Sense strand starting at position 2736 of SEQ ID NO: 1888102
gcuguauucccacgucaac

SEQ ID NO: 2510849 - RNA, 19 nt, Artificial Sequence
  Description of Artificial Sequence: Synthetic oligonucleotide
  Antisense strand to SEQ ID NO: 2510848
guugacgugggaauacagc

SEQ ID NO: 2510850 - RNA, 19 nt, Artificial Sequence
  Description of Artificial Sequence: Synthetic oligonucleotide
  Sense strand starting at position 2769 of SEQ ID NO: 1888102
cagggcucaccguaauaga

SEQ ID NO: 2510851 - RNA, 19 nt, Artificial Sequence
  Description of Artificial Sequence: Synthetic oligonucleotide
  Antisense strand to SEQ ID NO: 2510850
ucuauuacggugagcccug

SEQ ID NO: 2510852 - RNA, 19 nt, Artificial Sequence
  Description of Artificial Sequence: Synthetic oligonucleotide
  Sense strand starting at position 2794 of SEQ ID NO: 1888102
cagacugugugguuuaauc

SEQ ID NO: 2510853 - RNA, 19 nt, Artificial Sequence
  Description of Artificial Sequence: Synthetic oligonucleotide
  Antisense strand to SEQ ID NO: 2510852
gauuaaaccacacagucug

SEQ ID NO: 2510854 - RNA, 19 nt, Artificial Sequence
  Description of Artificial Sequence: Synthetic oligonucleotide
  Sense strand starting at position 2796 of SEQ ID NO: 1888102
gacugugugguuuaaucaa

SEQ ID NO: 2510855 - RNA, 19 nt, Artificial Sequence
  Description of Artificial Sequence: Synthetic oligonucleotide
  Antisense strand to SEQ ID NO: 2510854
uugauuaaaccacacaguc

SEQ ID NO: 2510856 - RNA, 19 nt, Artificial Sequence
  Description of Artificial Sequence: Synthetic oligonucleotide
  Sense strand starting at position 2815 of SEQ ID NO: 1888102
cagagauuguugucaaggu

SEQ ID NO: 2510857 - RNA, 19 nt, Artificial Sequence
  Description of Artificial Sequence: Synthetic oligonucleotide
  Antisense strand to SEQ ID NO: 2510856
accuugacaacaaucucug

SEQ ID NO: 2510858 - RNA, 19 nt, Artificial Sequence
  Description of Artificial Sequence: Synthetic oligonucleotide
  Sense strand starting at position 2819 of SEQ ID NO: 1888102
gauuguugucaagguguga

SEQ ID NO: 2510859 - RNA, 19 nt, Artificial Sequence
  Description of Artificial Sequence: Synthetic oligonucleotide
  Antisense strand to SEQ ID NO: 2510858
ucacaccuugacaacaauc

SEQ ID NO: 2510860 - RNA, 19 nt, Artificial Sequence
  Description of Artificial Sequence: Synthetic oligonucleotide
  Sense strand starting at position 3443 of SEQ ID NO: 1888102
ggcauuaucggcccuguuu

SEQ ID NO: 2510861 - RNA, 19 nt, Artificial Sequence
  Description of Artificial Sequence: Synthetic oligonucleotide
  Antisense strand to SEQ ID NO: 2510860
aaacagggccgauaaugcc

SEQ ID NO: 2510862 - RNA, 19 nt, Artificial Sequence
  Description of Artificial Sequence: Synthetic oligonucleotide
  Sense strand starting at position 3587 of SEQ ID NO: 1888102
agggaaucuucugucacuc

SEQ ID NO: 2510863 - RNA, 19 nt, Artificial Sequence
  Description of Artificial Sequence: Synthetic oligonucleotide
  Antisense strand to SEQ ID NO: 2510862
gagugacagaagauucccu

SEQ ID NO: 2510864 - RNA, 19 nt, Artificial Sequence
  Description of Artificial Sequence: Synthetic oligonucleotide
  Sense strand starting at position 3658 of SEQ ID NO: 1888102
uucccucugcuguguguaa

SEQ ID NO: 2510865 - RNA, 19 nt, Artificial Sequence
  Description of Artificial Sequence: Synthetic oligonucleotide
  Antisense strand to SEQ ID NO: 2510864
uuacacacagcagagggaa

SEQ ID NO: 2510866 - RNA, 19 nt, Artificial Sequence
  Description of Artificial Sequence: Synthetic oligonucleotide
  Sense strand starting at position 3659 of SEQ ID NO: 1888102
ucccucugcuguguguaau

SEQ ID NO: 2510867 - RNA, 19 nt, Artificial Sequence
  Description of Artificial Sequence: Synthetic oligonucleotide
  Antisense strand to SEQ ID NO: 2510866
auuacacacagcagaggga

SEQ ID NO: 2510868 - RNA, 19 nt, Artificial Sequence
  Description of Artificial Sequence: Synthetic oligonucleotide
  Sense strand starting at position 3660 of SEQ ID NO: 1888102
cccucugcuguguguaaua

SEQ ID NO: 2510869 - RNA, 19 nt, Artificial Sequence
  Description of Artificial Sequence: Synthetic oligonucleotide
  Antisense strand to SEQ ID NO: 2510868
uauuacacacagcagaggg

SEQ ID NO: 2510870 - RNA, 19 nt, Artificial Sequence
  Description of Artificial Sequence: Synthetic oligonucleotide
  Sense strand starting at position 3670 of SEQ ID NO: 1888102
uguguaauaagaugaugac

SEQ ID NO: 2510871 - RNA, 19 nt, Artificial Sequence
  Description of Artificial Sequence: Synthetic oligonucleotide
  Antisense strand to SEQ ID NO: 2510870
gucaucaucuuauuacaca

SEQ ID NO: 2510872 - RNA, 19 nt, Artificial Sequence
  Description of Artificial Sequence: Synthetic oligonucleotide
  Sense strand starting at position 3701 of SEQ ID NO: 1888102
ggcccuuuccuauguguga

SEQ ID NO: 2510873 - RNA, 19 nt, Artificial Sequence
  Description of Artificial Sequence: Synthetic oligonucleotide
  Antisense strand to SEQ ID NO: 2510872
ucacacauaggaaagggcc

SEQ ID NO: 2510874 - RNA, 19 nt, Artificial Sequence
  Description of Artificial Sequence: Synthetic oligonucleotide
  Sense strand starting at position 3714 of SEQ ID NO: 1888102
gugugaggcucuuccacua

SEQ ID NO: 2510875 - RNA, 19 nt, Artificial Sequence
  Description of Artificial Sequence: Synthetic oligonucleotide
  Antisense strand to SEQ ID NO: 2510874
uaguggaagagccucacac

SEQ ID NO: 2510876 - RNA, 19 nt, Artificial Sequence
  Description of Artificial Sequence: Synthetic oligonucleotide
  Sense strand starting at position 3719 of SEQ ID NO: 1888102
aggcucuuccacuagcauu

SEQ ID NO: 2510877 - RNA, 19 nt, Artificial Sequence
  Description of Artificial Sequence: Synthetic oligonucleotide
  Antisense strand to SEQ ID NO: 2510876
aaugcuaguggaagagccu

SEQ ID NO: 2510878 - RNA, 19 nt, Artificial Sequence
  Description of Artificial Sequence: Synthetic oligonucleotide
  Sense strand starting at position 3783 of SEQ ID NO: 1888102
gcucaagccuccucagaga

SEQ ID NO: 2510879 - RNA, 19 nt, Artificial Sequence
  Description of Artificial Sequence: Synthetic oligonucleotide
  Antisense strand to SEQ ID NO: 2510878
ucucugaggaggcuugagc

SEQ ID NO: 2510880 - RNA, 19 nt, Artificial Sequence
  Description of Artificial Sequence: Synthetic oligonucleotide
  Sense strand starting at position 3889 of SEQ ID NO: 1888102
accugaaauuaggcuggau

SEQ ID NO: 2510881 - RNA, 19 nt, Artificial Sequence
  Description of Artificial Sequence: Synthetic oligonucleotide
  Antisense strand to SEQ ID NO: 2510880
auccagccuaauuucaggu

SEQ ID NO: 2510882 - RNA, 19 nt, Artificial Sequence
  Description of Artificial Sequence: Synthetic oligonucleotide
  Sense strand starting at position 3891 of SEQ ID NO: 1888102
cugaaauuaggcuggauac

SEQ ID NO: 2510883 - RNA, 19 nt, Artificial Sequence
  Description of Artificial Sequence: Synthetic oligonucleotide
  Antisense strand to SEQ ID NO: 2510882
guauccagccuaauuucag

SEQ ID NO: 2510884 - RNA, 19 nt, Artificial Sequence
  Description of Artificial Sequence: Synthetic oligonucleotide
  Sense strand starting at position 211 of SEQ ID NO: 1888103
ggaagagauuuauggauau

SEQ ID NO: 2510885 - RNA, 19 nt, Artificial Sequence
  Description of Artificial Sequence: Synthetic oligonucleotide
  Antisense strand to SEQ ID NO: 2510884
auauccauaaaucucuucc

SEQ ID NO: 2510886 - RNA, 19 nt, Artificial Sequence
  Description of Artificial Sequence: Synthetic oligonucleotide
  Sense strand starting at position 244 of SEQ ID NO: 1888103
ucugaaaugucauuaaguc

SEQ ID NO: 2510887 - RNA, 19 nt, Artificial Sequence
  Description of Artificial Sequence: Synthetic oligonucleotide
  Antisense strand to SEQ ID NO: 2510886
gacuuaaugacauuucaga

SEQ ID NO: 2510888 - RNA, 19 nt, Artificial Sequence
  Description of Artificial Sequence: Synthetic oligonucleotide
  Sense strand starting at position 245 of SEQ ID NO: 1888103
cugaaaugucauuaaguca

SEQ ID NO: 2510889 - RNA, 19 nt, Artificial Sequence
  Description of Artificial Sequence: Synthetic oligonucleotide
  Antisense strand to SEQ ID NO: 2510888
ugacuuaaugacauuucag

SEQ ID NO: 2510890 - RNA, 19 nt, Artificial Sequence
  Description of Artificial Sequence: Synthetic oligonucleotide
  Sense strand starting at position 304 of SEQ ID NO: 1888103
aagucuuugcuaggcauuu

SEQ ID NO: 2510891 - RNA, 19 nt, Artificial Sequence
  Description of Artificial Sequence: Synthetic oligonucleotide
  Antisense strand to SEQ ID NO: 2510890
aaaugccuagcaaagacuu

SEQ ID NO: 2510892 - RNA, 19 nt, Artificial Sequence
  Description of Artificial Sequence: Synthetic oligonucleotide
  Sense strand starting at position 336 of SEQ ID NO: 1888103
uuaauauucuugguaagca

SEQ ID NO: 2510893 - RNA, 19 nt, Artificial Sequence
  Description of Artificial Sequence: Synthetic oligonucleotide
  Antisense strand to SEQ ID NO: 2510892
ugcuuaccaagaauauuaa

SEQ ID NO: 2510894 - RNA, 19 nt, Artificial Sequence
  Description of Artificial Sequence: Synthetic oligonucleotide
  Sense strand starting at position 340 of SEQ ID NO: 1888103
uauucuugguaagcaaaga

SEQ ID NO: 2510895 - RNA, 19 nt, Artificial Sequence
  Description of Artificial Sequence: Synthetic oligonucleotide
  Antisense strand to SEQ ID NO: 2510894
ucuuugcuuaccaagaaua

SEQ ID NO: 2510896 - RNA, 19 nt, Artificial Sequence
  Description of Artificial Sequence: Synthetic oligonucleotide
  Sense strand starting at position 642 of SEQ ID NO: 1888103
acauaaacauacguguaaa

SEQ ID NO: 2510897 - RNA, 19 nt, Artificial Sequence
  Description of Artificial Sequence: Synthetic oligonucleotide
  Antisense strand to SEQ ID NO: 2510896
uuuacacguauguuuaugu

SEQ ID NO: 2510898 - RNA, 19 nt, Artificial Sequence
  Description of Artificial Sequence: Synthetic oligonucleotide
  Sense strand starting at position 675 of SEQ ID NO: 1888103
cucaauagauaggaaagau

SEQ ID NO: 2510899 - RNA, 19 nt, Artificial Sequence
  Description of Artificial Sequence: Synthetic oligonucleotide
  Antisense strand to SEQ ID NO: 2510898
aucuuuccuaucuauugag

SEQ ID NO: 2510900 - RNA, 19 nt, Artificial Sequence
  Description of Artificial Sequence: Synthetic oligonucleotide
  Sense strand starting at position 1220 of SEQ ID NO: 1888103
gaaacuguauugguaaauu

SEQ ID NO: 2510901 - RNA, 19 nt, Artificial Sequence
  Description of Artificial Sequence: Synthetic oligonucleotide
  Antisense strand to SEQ ID NO: 2510900
aauuuaccaauacaguuuc

SEQ ID NO: 2510902 - RNA, 19 nt, Artificial Sequence
  Description of Artificial Sequence: Synthetic oligonucleotide
  Sense strand starting at position 1242 of SEQ ID NO: 1888103
gagauuuacugagaaguac

SEQ ID NO: 2510903 - RNA, 19 nt, Artificial Sequence
  Description of Artificial Sequence: Synthetic oligonucleotide
  Antisense strand to SEQ ID NO: 2510902
guacuucucaguaaaucuc

SEQ ID NO: 2510904 - RNA, 19 nt, Artificial Sequence
  Description of Artificial Sequence: Synthetic oligonucleotide
  Sense strand starting at position 1281 of SEQ ID NO: 1888103
ggucuauauucuuuaccuu

SEQ ID NO: 2510905 - RNA, 19 nt, Artificial Sequence
  Description of Artificial Sequence: Synthetic oligonucleotide
  Antisense strand to SEQ ID NO: 2510904
aagguaaagaauauagacc

SEQ ID NO: 2510906 - RNA, 19 nt, Artificial Sequence
  Description of Artificial Sequence: Synthetic oligonucleotide
  Sense strand starting at position 1382 of SEQ ID NO: 1888103
acaaauauguuggcaucuu

SEQ ID NO: 2510907 - RNA, 19 nt, Artificial Sequence
  Description of Artificial Sequence: Synthetic oligonucleotide
  Antisense strand to SEQ ID NO: 2510906
aagaugccaacauauuugu

SEQ ID NO: 2510908 - RNA, 19 nt, Artificial Sequence
  Description of Artificial Sequence: Synthetic oligonucleotide
  Sense strand starting at position 1393 of SEQ ID NO: 1888103
ggcaucuugggaggaacaa

SEQ ID NO: 2510909 - RNA, 19 nt, Artificial Sequence
  Description of Artificial Sequence: Synthetic oligonucleotide
  Antisense strand to SEQ ID NO: 2510908
uuguuccucccaagaugcc

SEQ ID NO: 2510910 - RNA, 19 nt, Artificial Sequence
  Description of Artificial Sequence: Synthetic oligonucleotide
  Sense strand starting at position 1467 of SEQ ID NO: 1888103
uagccaugucgauaaaguu

SEQ ID NO: 2510911 - RNA, 19 nt, Artificial Sequence
  Description of Artificial Sequence: Synthetic oligonucleotide
  Antisense strand to SEQ ID NO: 2510910
aacuuuaucgacauggcua

SEQ ID NO: 2510912 - RNA, 19 nt, Artificial Sequence
  Description of Artificial Sequence: Synthetic oligonucleotide
  Sense strand starting at position 1491 of SEQ ID NO: 1888103
aagaauaagcuguguacuu

SEQ ID NO: 2510913 - RNA, 19 nt, Artificial Sequence
  Description of Artificial Sequence: Synthetic oligonucleotide
  Antisense strand to SEQ ID NO: 2510912
aaguacacagcuuauucuu

SEQ ID NO: 2510914 - RNA, 19 nt, Artificial Sequence
  Description of Artificial Sequence: Synthetic oligonucleotide
  Sense strand starting at position 1574 of SEQ ID NO: 1888103
guugcuuuacccuaaagga

SEQ ID NO: 2510915 - RNA, 19 nt, Artificial Sequence
  Description of Artificial Sequence: Synthetic oligonucleotide
  Antisense strand to SEQ ID NO: 2510914
uccuuuaggguaaagcaac

SEQ ID NO: 2510916 - RNA, 19 nt, Artificial Sequence
  Description of Artificial Sequence: Synthetic oligonucleotide
  Sense strand starting at position 2054 of SEQ ID NO: 1888103
cuaagauaauggccauuau

SEQ ID NO: 2510917 - RNA, 19 nt, Artificial Sequence
  Description of Artificial Sequence: Synthetic oligonucleotide
  Antisense strand to SEQ ID NO: 2510916
auaauggccauuaucuuag

SEQ ID NO: 2510918 - RNA, 19 nt, Artificial Sequence
  Description of Artificial Sequence: Synthetic oligonucleotide
  Sense strand starting at position 2295 of SEQ ID NO: 1888103
augacauguuuaccuaagu

SEQ ID NO: 2510919 - RNA, 19 nt, Artificial Sequence
  Description of Artificial Sequence: Synthetic oligonucleotide
  Antisense strand to SEQ ID NO: 2510918
acuuagguaaacaugucau

SEQ ID NO: 2510920 - RNA, 19 nt, Artificial Sequence
  Description of Artificial Sequence: Synthetic oligonucleotide
  Sense strand starting at position 2296 of SEQ ID NO: 1888103
ugacauguuuaccuaagua

SEQ ID NO: 2510921 - RNA, 19 nt, Artificial Sequence
  Description of Artificial Sequence: Synthetic oligonucleotide
  Antisense strand to SEQ ID NO: 2510920
uacuuagguaaacauguca

SEQ ID NO: 2510922 - RNA, 19 nt, Artificial Sequence
  Description of Artificial Sequence: Synthetic oligonucleotide
  Sense strand starting at position 2395 of SEQ ID NO: 1888103
aacaguaugcuggagaagu

SEQ ID NO: 2510923 - RNA, 19 nt, Artificial Sequence
  Description of Artificial Sequence: Synthetic oligonucleotide
  Antisense strand to SEQ ID NO: 2510922
acuucuccagcauacuguu

SEQ ID NO: 2510924 - RNA, 19 nt, Artificial Sequence
  Description of Artificial Sequence: Synthetic oligonucleotide
  Sense strand starting at position 2540 of SEQ ID NO: 1888103
ugcugcuaucaccaugaua

SEQ ID NO: 2510925 - RNA, 19 nt, Artificial Sequence
  Description of Artificial Sequence: Synthetic oligonucleotide
  Antisense strand to SEQ ID NO: 2510924
uaucauggugauagcagca

SEQ ID NO: 2510926 - RNA, 19 nt, Artificial Sequence
  Description of Artificial Sequence: Synthetic oligonucleotide
  Sense strand starting at position 2659 of SEQ ID NO: 1888103
accaaaucauguguuuauc

SEQ ID NO: 2510927 - RNA, 19 nt, Artificial Sequence
  Description of Artificial Sequence: Synthetic oligonucleotide
  Antisense strand to SEQ ID NO: 2510926
gauaaacacaugauuuggu

SEQ ID NO: 2510928 - RNA, 19 nt, Artificial Sequence
  Description of Artificial Sequence: Synthetic oligonucleotide
  Sense strand starting at position 2762 of SEQ ID NO: 1888103
gcaucuugucuuuauaaga

SEQ ID NO: 2510929 - RNA, 19 nt, Artificial Sequence
  Description of Artificial Sequence: Synthetic oligonucleotide
  Antisense strand to SEQ ID NO: 2510928
ucuuauaaagacaagaugc

SEQ ID NO: 2510930 - RNA, 19 nt, Artificial Sequence
  Description of Artificial Sequence: Synthetic oligonucleotide
  Sense strand starting at position 2974 of SEQ ID NO: 1888103
ucacgugccacugauaaga

SEQ ID NO: 2510931 - RNA, 19 nt, Artificial Sequence
  Description of Artificial Sequence: Synthetic oligonucleotide
  Antisense strand to SEQ ID NO: 2510930
ucuuaucaguggcacguga

SEQ ID NO: 2510932 - RNA, 19 nt, Artificial Sequence
  Description of Artificial Sequence: Synthetic oligonucleotide
  Sense strand starting at position 3083 of SEQ ID NO: 1888103
cucauaguucugcaaguug

SEQ ID NO: 2510933 - RNA, 19 nt, Artificial Sequence
  Description of Artificial Sequence: Synthetic oligonucleotide
  Antisense strand to SEQ ID NO: 2510932
caacuugcagaacuaugag

SEQ ID NO: 2510934 - RNA, 19 nt, Artificial Sequence
  Description of Artificial Sequence: Synthetic oligonucleotide
  Sense strand starting at position 3259 of SEQ ID NO: 1888103
caggauaagucacucaugu

SEQ ID NO: 2510935 - RNA, 19 nt, Artificial Sequence
  Description of Artificial Sequence: Synthetic oligonucleotide
  Antisense strand to SEQ ID NO: 2510934
acaugagugacuuauccug

SEQ ID NO: 2510936 - RNA, 19 nt, Artificial Sequence
  Description of Artificial Sequence: Synthetic oligonucleotide
  Sense strand starting at position 3437 of SEQ ID NO: 1888103
acaugaccucugugguauu

SEQ ID NO: 2510937 - RNA, 19 nt, Artificial Sequence
  Description of Artificial Sequence: Synthetic oligonucleotide
  Antisense strand to SEQ ID NO: 2510936
aauaccacagaggucaugu

SEQ ID NO: 2510938 - RNA, 19 nt, Artificial Sequence
  Description of Artificial Sequence: Synthetic oligonucleotide
  Sense strand starting at position 3468 of SEQ ID NO: 1888103
uuaauaaccucagucuguu

SEQ ID NO: 2510939 - RNA, 19 nt, Artificial Sequence
  Description of Artificial Sequence: Synthetic oligonucleotide
  Antisense strand to SEQ ID NO: 2510938
aacagacugagguuauuaa

SEQ ID NO: 2510940 - RNA, 19 nt, Artificial Sequence
  Description of Artificial Sequence: Synthetic oligonucleotide
  Sense strand starting at position 3629 of SEQ ID NO: 1888103
aaugcaauaugucuuggau

SEQ ID NO: 2510941 - RNA, 19 nt, Artificial Sequence
  Description of Artificial Sequence: Synthetic oligonucleotide
  Antisense strand to SEQ ID NO: 2510940
auccaagacauauugcauu

SEQ ID NO: 2510942 - RNA, 19 nt, Artificial Sequence
  Description of Artificial Sequence: Synthetic oligonucleotide
  Sense strand starting at position 3632 of SEQ ID NO: 1888103
gcaauaugucuuggauuag

SEQ ID NO: 2510943 - RNA, 19 nt, Artificial Sequence
  Description of Artificial Sequence: Synthetic oligonucleotide
  Antisense strand to SEQ ID NO: 2510942
cuaauccaagacauauugc

SEQ ID NO: 2510944 - RNA, 19 nt, Artificial Sequence
  Description of Artificial Sequence: Synthetic oligonucleotide
  Sense strand starting at position 3704 of SEQ ID NO: 1888103
uaguuaauaguguacauga

SEQ ID NO: 2510945 - RNA, 19 nt, Artificial Sequence
  Description of Artificial Sequence: Synthetic oligonucleotide
  Antisense strand to SEQ ID NO: 2510944
ucauguacacuauuaacua

SEQ ID NO: 2510946 - RNA, 19 nt, Artificial Sequence
  Description of Artificial Sequence: Synthetic oligonucleotide
  Sense strand starting at position 3706 of SEQ ID NO: 1888103
guuaauaguguacaugaau

SEQ ID NO: 2510947 - RNA, 19 nt, Artificial Sequence
  Description of Artificial Sequence: Synthetic oligonucleotide
  Antisense strand to SEQ ID NO: 2510946
auucauguacacuauuaac

SEQ ID NO: 2510948 - RNA, 19 nt, Artificial Sequence
  Description of Artificial Sequence: Synthetic oligonucleotide
  Sense strand starting at position 3709 of SEQ ID NO: 1888103
aauaguguacaugaauguu

SEQ ID NO: 2510949 - RNA, 19 nt, Artificial Sequence
  Description of Artificial Sequence: Synthetic oligonucleotide
  Antisense strand to SEQ ID NO: 2510948
aacauucauguacacuauu

SEQ ID NO: 2510950 - RNA, 19 nt, Artificial Sequence
  Description of Artificial Sequence: Synthetic oligonucleotide
  Sense strand starting at position 3712 of SEQ ID NO: 1888103
aguguacaugaauguuaau

SEQ ID NO: 2510951 - RNA, 19 nt, Artificial Sequence
  Description of Artificial Sequence: Synthetic oligonucleotide
  Antisense strand to SEQ ID NO: 2510950
auuaacauucauguacacu

SEQ ID NO: 2510952 - RNA, 19 nt, Artificial Sequence
  Description of Artificial Sequence: Synthetic oligonucleotide
  Sense strand starting at position 3754 of SEQ ID NO: 1888103
gugguuauagaagauguua

SEQ ID NO: 2510953 - RNA, 19 nt, Artificial Sequence
  Description of Artificial Sequence: Synthetic oligonucleotide
  Antisense strand to SEQ ID NO: 2510952
uaacaucuucuauaaccac

SEQ ID NO: 2510954 - RNA, 19 nt, Artificial Sequence
  Description of Artificial Sequence: Synthetic oligonucleotide
  Sense strand starting at position 3783 of SEQ ID NO: 1888103
cuaggugaaggcuguauga

SEQ ID NO: 2510955 - RNA, 19 nt, Artificial Sequence
  Description of Artificial Sequence: Synthetic oligonucleotide
  Antisense strand to SEQ ID NO: 2510954
ucauacagccuucaccuag

SEQ ID NO: 2510956 - RNA, 19 nt, Artificial Sequence
  Description of Artificial Sequence: Synthetic oligonucleotide
  Sense strand starting at position 3785 of SEQ ID NO: 1888103
aggugaaggcuguaugaca

SEQ ID NO: 2510957 - RNA, 19 nt, Artificial Sequence
  Description of Artificial Sequence: Synthetic oligonucleotide
  Antisense strand to SEQ ID NO: 2510956
ugucauacagccuucaccu

SEQ ID NO: 2510958 - RNA, 19 nt, Artificial Sequence
  Description of Artificial Sequence: Synthetic oligonucleotide
  Sense strand starting at position 3793 of SEQ ID NO: 1888103
gcuguaugacaacacuaca

SEQ ID NO: 2510959 - RNA, 19 nt, Artificial Sequence
  Description of Artificial Sequence: Synthetic oligonucleotide
  Antisense strand to SEQ ID NO: 2510958
uguaguguugucauacagc

SEQ ID NO: 2510960 - RNA, 19 nt, Artificial Sequence
  Description of Artificial Sequence: Synthetic oligonucleotide
  Sense strand starting at position 3878 of SEQ ID NO: 1888103
gaaggcaaccuacgauuau

SEQ ID NO: 2510961 - RNA, 19 nt, Artificial Sequence
  Description of Artificial Sequence: Synthetic oligonucleotide
  Antisense strand to SEQ ID NO: 2510960
auaaucguagguugccuuc

SEQ ID NO: 2510962 - RNA, 19 nt, Artificial Sequence
  Description of Artificial Sequence: Synthetic oligonucleotide
  Sense strand starting at position 3915 of SEQ ID NO: 1888103
uuaauuccgguauacaagu

SEQ ID NO: 2510963 - RNA, 19 nt, Artificial Sequence
  Description of Artificial Sequence: Synthetic oligonucleotide
  Antisense strand to SEQ ID NO: 2510962
acuuguauaccggaauuaa

SEQ ID NO: 2510964 - RNA, 19 nt, Artificial Sequence
  Description of Artificial Sequence: Synthetic oligonucleotide
  Sense strand starting at position 1 of SEQ ID NO: 1888104
gguagauuaaccugcuaga

SEQ ID NO: 2510965 - RNA, 19 nt, Artificial Sequence
  Description of Artificial Sequence: Synthetic oligonucleotide
  Antisense strand to SEQ ID NO: 2510964
ucuagcagguuaaucuacc

SEQ ID NO: 2510966 - RNA, 19 nt, Artificial Sequence
  Description of Artificial Sequence: Synthetic oligonucleotide
  Sense strand starting at position 62 of SEQ ID NO: 1888104
acagauggacuuugcagua

SEQ ID NO: 2510967 - RNA, 19 nt, Artificial Sequence
  Description of Artificial Sequence: Synthetic oligonucleotide
  Antisense strand to SEQ ID NO: 2510966
uacugcaaaguccaucugu

SEQ ID NO: 2510968 - RNA, 19 nt, Artificial Sequence
  Description of Artificial Sequence: Synthetic oligonucleotide
  Sense strand starting at position 67 of SEQ ID NO: 1888104
uggacuuugcaguaaucca

SEQ ID NO: 2510969 - RNA, 19 nt, Artificial Sequence
  Description of Artificial Sequence: Synthetic oligonucleotide
  Antisense strand to SEQ ID NO: 2510968
uggauuacugcaaagucca

SEQ ID NO: 2510970 - RNA, 19 nt, Artificial Sequence
  Description of Artificial Sequence: Synthetic oligonucleotide
  Sense strand starting at position 74 of SEQ ID NO: 1888104
ugcaguaauccagaugcaa

SEQ ID NO: 2510971 - RNA, 19 nt, Artificial Sequence
  Description of Artificial Sequence: Synthetic oligonucleotide
  Antisense strand to SEQ ID NO: 2510970
uugcaucuggauuacugca

SEQ ID NO: 2510972 - RNA, 19 nt, Artificial Sequence
  Description of Artificial Sequence: Synthetic oligonucleotide
  Sense strand starting at position 289 of SEQ ID NO: 1888104
ggacaaaccucauugguuc

SEQ ID NO: 2510973 - RNA, 19 nt, Artificial Sequence
  Description of Artificial Sequence: Synthetic oligonucleotide
  Antisense strand to SEQ ID NO: 2510972
gaaccaaugagguuugucc

SEQ ID NO: 2510974 - RNA, 19 nt, Artificial Sequence
  Description of Artificial Sequence: Synthetic oligonucleotide
  Sense strand starting at position 318 of SEQ ID NO: 1888104
gcaucauuagcguauuuau

SEQ ID NO: 2510975 - RNA, 19 nt, Artificial Sequence
  Description of Artificial Sequence: Synthetic oligonucleotide
  Antisense strand to SEQ ID NO: 2510974
auaaauacgcuaaugaugc

SEQ ID NO: 2510976 - RNA, 19 nt, Artificial Sequence
  Description of Artificial Sequence: Synthetic oligonucleotide
  Sense strand starting at position 321 of SEQ ID NO: 1888104
ucauuagcguauuuauacu

SEQ ID NO: 2510977 - RNA, 19 nt, Artificial Sequence
  Description of Artificial Sequence: Synthetic oligonucleotide
  Antisense strand to SEQ ID NO: 2510976
aguauaaauacgcuaauga

SEQ ID NO: 2510978 - RNA, 19 nt, Artificial Sequence
  Description of Artificial Sequence: Synthetic oligonucleotide
  Sense strand starting at position 374 of SEQ ID NO: 1888104
aagauaagagaguguuauu

SEQ ID NO: 2510979 - RNA, 19 nt, Artificial Sequence
  Description of Artificial Sequence: Synthetic oligonucleotide
  Antisense strand to SEQ ID NO: 2510978
aauaacacucucuuaucuu

SEQ ID NO: 2510980 - RNA, 19 nt, Artificial Sequence
  Description of Artificial Sequence: Synthetic oligonucleotide
  Sense strand starting at position 416 of SEQ ID NO: 1888104
guggaagagcuagaauagu

SEQ ID NO: 2510981 - RNA, 19 nt, Artificial Sequence
  Description of Artificial Sequence: Synthetic oligonucleotide
  Antisense strand to SEQ ID NO: 2510980
acuauucuagcucuuccac

SEQ ID NO: 2510982 - RNA, 19 nt, Artificial Sequence
  Description of Artificial Sequence: Synthetic oligonucleotide
  Sense strand starting at position 425 of SEQ ID NO: 1888104
cuagaauagugagugacaa

SEQ ID NO: 2510983 - RNA, 19 nt, Artificial Sequence
  Description of Artificial Sequence: Synthetic oligonucleotide
  Antisense strand to SEQ ID NO: 2510982
uugucacucacuauucuag

SEQ ID NO: 2510984 - RNA, 19 nt, Artificial Sequence
  Description of Artificial Sequence: Synthetic oligonucleotide
  Sense strand starting at position 426 of SEQ ID NO: 1888104
uagaauagugagugacaau

SEQ ID NO: 2510985 - RNA, 19 nt, Artificial Sequence
  Description of Artificial Sequence: Synthetic oligonucleotide
  Antisense strand to SEQ ID NO: 2510984
auugucacucacuauucua

SEQ ID NO: 2510986 - RNA, 19 nt, Artificial Sequence
  Description of Artificial Sequence: Synthetic oligonucleotide
  Sense strand starting at position 570 of SEQ ID NO: 1888104
guggcucucgugaggugaa

SEQ ID NO: 2510987 - RNA, 19 nt, Artificial Sequence
  Description of Artificial Sequence: Synthetic oligonucleotide
  Antisense strand to SEQ ID NO: 2510986
uucaccucacgagagccac

SEQ ID NO: 2510988 - RNA, 19 nt, Artificial Sequence
  Description of Artificial Sequence: Synthetic oligonucleotide
  Sense strand starting at position 582 of SEQ ID NO: 1888104
aggugaauguccuuuauga

SEQ ID NO: 2510989 - RNA, 19 nt, Artificial Sequence
  Description of Artificial Sequence: Synthetic oligonucleotide
  Antisense strand to SEQ ID NO: 2510988
ucauaaaggacauucaccu

SEQ ID NO: 2510990 - RNA, 19 nt, Artificial Sequence
  Description of Artificial Sequence: Synthetic oligonucleotide
  Sense strand starting at position 584 of SEQ ID NO: 1888104
gugaauguccuuuaugaag

SEQ ID NO: 2510991 - RNA, 19 nt, Artificial Sequence
  Description of Artificial Sequence: Synthetic oligonucleotide
  Antisense strand to SEQ ID NO: 2510990
cuucauaaaggacauucac

SEQ ID NO: 2510992 - RNA, 19 nt, Artificial Sequence
  Description of Artificial Sequence: Synthetic oligonucleotide
  Sense strand starting at position 682 of SEQ ID NO: 1888104
ggagccaucuauuccacau

SEQ ID NO: 2510993 - RNA, 19 nt, Artificial Sequence
  Description of Artificial Sequence: Synthetic oligonucleotide
  Antisense strand to SEQ ID NO: 2510992
auguggaauagauggcucc

SEQ ID NO: 2510994 - RNA, 19 nt, Artificial Sequence
  Description of Artificial Sequence: Synthetic oligonucleotide
  Sense strand starting at position 725 of SEQ ID NO: 1888104
gcaugcugucuuggauuua

SEQ ID NO: 2510995 - RNA, 19 nt, Artificial Sequence
  Description of Artificial Sequence: Synthetic oligonucleotide
  Antisense strand to SEQ ID NO: 2510994
uaaauccaagacagcaugc

SEQ ID NO: 2510996 - RNA, 19 nt, Artificial Sequence
  Description of Artificial Sequence: Synthetic oligonucleotide
  Sense strand starting at position 922 of SEQ ID NO: 1888104
gggcccacucuugaacuaa

SEQ ID NO: 2510997 - RNA, 19 nt, Artificial Sequence
  Description of Artificial Sequence: Synthetic oligonucleotide
  Antisense strand to SEQ ID NO: 2510996
uuaguucaagagugggccc

SEQ ID NO: 2510998 - RNA, 19 nt, Artificial Sequence
  Description of Artificial Sequence: Synthetic oligonucleotide
  Sense strand starting at position 981 of SEQ ID NO: 1888104
gagugaacucuuuaugcca

SEQ ID NO: 2510999 - RNA, 19 nt, Artificial Sequence
  Description of Artificial Sequence: Synthetic oligonucleotide
  Antisense strand to SEQ ID NO: 2510998
uggcauaaagaguucacuc

SEQ ID NO: 2511000 - RNA, 19 nt, Artificial Sequence
  Description of Artificial Sequence: Synthetic oligonucleotide
  Sense strand starting at position 1010 of SEQ ID NO: 1888104
acaggcugcagguauuaga

SEQ ID NO: 2511001 - RNA, 19 nt, Artificial Sequence
  Description of Artificial Sequence: Synthetic oligonucleotide
  Antisense strand to SEQ ID NO: 2511000
ucuaauaccugcagccugu

SEQ ID NO: 2511002 - RNA, 19 nt, Artificial Sequence
  Description of Artificial Sequence: Synthetic oligonucleotide
  Sense strand starting at position 1085 of SEQ ID NO: 1888104
guggaagaaacuuguaauc

SEQ ID NO: 2511003 - RNA, 19 nt, Artificial Sequence
  Description of Artificial Sequence: Synthetic oligonucleotide
  Antisense strand to SEQ ID NO: 2511002
gauuacaaguuucuuccac

SEQ ID NO: 2511004 - RNA, 19 nt, Artificial Sequence
  Description of Artificial Sequence: Synthetic oligonucleotide
  Sense strand starting at position 1094 of SEQ ID NO: 1888104
acuuguaaucaugagagcu

SEQ ID NO: 2511005 - RNA, 19 nt, Artificial Sequence
  Description of Artificial Sequence: Synthetic oligonucleotide
  Antisense strand to SEQ ID NO: 2511004
agcucucaugauuacaagu

SEQ ID NO: 2511006 - RNA, 19 nt, Artificial Sequence
  Description of Artificial Sequence: Synthetic oligonucleotide
  Sense strand starting at position 1250 of SEQ ID NO: 1888104
uuaugugaucccugaaagg

SEQ ID NO: 2511007 - RNA, 19 nt, Artificial Sequence
  Description of Artificial Sequence: Synthetic oligonucleotide
  Antisense strand to SEQ ID NO: 2511006
ccuuucagggaucacauaa

SEQ ID NO: 2511008 - RNA, 19 nt, Artificial Sequence
  Description of Artificial Sequence: Synthetic oligonucleotide
  Sense strand starting at position 1330 of SEQ ID NO: 1888104
cuaaucuuauuggcagaaa

SEQ ID NO: 2511009 - RNA, 19 nt, Artificial Sequence
  Description of Artificial Sequence: Synthetic oligonucleotide
  Antisense strand to SEQ ID NO: 2511008
uuucugccaauaagauuag

SEQ ID NO: 2511010 - RNA, 19 nt, Artificial Sequence
  Description of Artificial Sequence: Synthetic oligonucleotide
  Sense strand starting at position 1801 of SEQ ID NO: 1888104
ggaacacagucacauuuga

SEQ ID NO: 2511011 - RNA, 19 nt, Artificial Sequence
  Description of Artificial Sequence: Synthetic oligonucleotide
  Antisense strand to SEQ ID NO: 2511010
ucaaaugugacuguguucc

SEQ ID NO: 2511012 - RNA, 19 nt, Artificial Sequence
  Description of Artificial Sequence: Synthetic oligonucleotide
  Sense strand starting at position 1952 of SEQ ID NO: 1888104
aggcauuuggguugguuua

SEQ ID NO: 2511013 - RNA, 19 nt, Artificial Sequence
  Description of Artificial Sequence: Synthetic oligonucleotide
  Antisense strand to SEQ ID NO: 2511012
uaaaccaacccaaaugccu

SEQ ID NO: 2511014 - RNA, 19 nt, Artificial Sequence
  Description of Artificial Sequence: Synthetic oligonucleotide
  Sense strand starting at position 1953 of SEQ ID NO: 1888104
ggcauuuggguugguuuaa

SEQ ID NO: 2511015 - RNA, 19 nt, Artificial Sequence
  Description of Artificial Sequence: Synthetic oligonucleotide
  Antisense strand to SEQ ID NO: 2511014
uuaaaccaacccaaaugcc

SEQ ID NO: 2511016 - RNA, 19 nt, Artificial Sequence
  Description of Artificial Sequence: Synthetic oligonucleotide
  Sense strand starting at position 2125 of SEQ ID NO: 1888104
ggagucaagguaugaauau

SEQ ID NO: 2511017 - RNA, 19 nt, Artificial Sequence
  Description of Artificial Sequence: Synthetic oligonucleotide
  Antisense strand to SEQ ID NO: 2511016
auauucauaccuugacucc

SEQ ID NO: 2511018 - RNA, 19 nt, Artificial Sequence
  Description of Artificial Sequence: Synthetic oligonucleotide
  Sense strand starting at position 2338 of SEQ ID NO: 1888104
guguccuuuggaggaaaga

SEQ ID NO: 2511019 - RNA, 19 nt, Artificial Sequence
  Description of Artificial Sequence: Synthetic oligonucleotide
  Antisense strand to SEQ ID NO: 2511018
ucuuuccuccaaaggacac

SEQ ID NO: 2511020 - RNA, 19 nt, Artificial Sequence
  Description of Artificial Sequence: Synthetic oligonucleotide
  Sense strand starting at position 2476 of SEQ ID NO: 1888104
ggcagaaauuaggugucaa

SEQ ID NO: 2511021 - RNA, 19 nt, Artificial Sequence
  Description of Artificial Sequence: Synthetic oligonucleotide
  Antisense strand to SEQ ID NO: 2511020
uugacaccuaauuucugcc

SEQ ID NO: 2511022 - RNA, 19 nt, Artificial Sequence
  Description of Artificial Sequence: Synthetic oligonucleotide
  Sense strand starting at position 2917 of SEQ ID NO: 1888104
auaaguucuuuccugaaga

SEQ ID NO: 2511023 - RNA, 19 nt, Artificial Sequence
  Description of Artificial Sequence: Synthetic oligonucleotide
  Antisense strand to SEQ ID NO: 2511022
ucuucaggaaagaacuuau

SEQ ID NO: 2511024 - RNA, 19 nt, Artificial Sequence
  Description of Artificial Sequence: Synthetic oligonucleotide
  Sense strand starting at position 2927 of SEQ ID NO: 1888104
uccugaagacucuguagaa

SEQ ID NO: 2511025 - RNA, 19 nt, Artificial Sequence
  Description of Artificial Sequence: Synthetic oligonucleotide
  Antisense strand to SEQ ID NO: 2511024
uucuacagagucuucagga

SEQ ID NO: 2511026 - RNA, 19 nt, Artificial Sequence
  Description of Artificial Sequence: Synthetic oligonucleotide
  Sense strand starting at position 2928 of SEQ ID NO: 1888104
ccugaagacucuguagaag

SEQ ID NO: 2511027 - RNA, 19 nt, Artificial Sequence
  Description of Artificial Sequence: Synthetic oligonucleotide
  Antisense strand to SEQ ID NO: 2511026
cuucuacagagucuucagg

SEQ ID NO: 2511028 - RNA, 19 nt, Artificial Sequence
  Description of Artificial Sequence: Synthetic oligonucleotide
  Sense strand starting at position 3082 of SEQ ID NO: 1888104
ggaagaaaguuucugagcu

SEQ ID NO: 2511029 - RNA, 19 nt, Artificial Sequence
  Description of Artificial Sequence: Synthetic oligonucleotide
  Antisense strand to SEQ ID NO: 2511028
agcucagaaacuuucuucc

SEQ ID NO: 2511030 - RNA, 19 nt, Artificial Sequence
  Description of Artificial Sequence: Synthetic oligonucleotide
  Sense strand starting at position 3146 of SEQ ID NO: 1888104
guacauuacccuugagaag

SEQ ID NO: 2511031 - RNA, 19 nt, Artificial Sequence
  Description of Artificial Sequence: Synthetic oligonucleotide
  Antisense strand to SEQ ID NO: 2511030
cuucucaaggguaauguac

SEQ ID NO: 2511032 - RNA, 19 nt, Artificial Sequence
  Description of Artificial Sequence: Synthetic oligonucleotide
  Sense strand starting at position 3157 of SEQ ID NO: 1888104
uugagaagaugcucugaaa

SEQ ID NO: 2511033 - RNA, 19 nt, Artificial Sequence
  Description of Artificial Sequence: Synthetic oligonucleotide
  Antisense strand to SEQ ID NO: 2511032
uuucagagcaucuucucaa

SEQ ID NO: 2511034 - RNA, 19 nt, Artificial Sequence
  Description of Artificial Sequence: Synthetic oligonucleotide
  Sense strand starting at position 3486 of SEQ ID NO: 1888104
aaguauugagauugcagau

SEQ ID NO: 2511035 - RNA, 19 nt, Artificial Sequence
  Description of Artificial Sequence: Synthetic oligonucleotide
  Antisense strand to SEQ ID NO: 2511034
aucugcaaucucaauacuu

SEQ ID NO: 2511036 - RNA, 19 nt, Artificial Sequence
  Description of Artificial Sequence: Synthetic oligonucleotide
  Sense strand starting at position 3579 of SEQ ID NO: 1888104
agauuccaccugugagaag

SEQ ID NO: 2511037 - RNA, 19 nt, Artificial Sequence
  Description of Artificial Sequence: Synthetic oligonucleotide
  Antisense strand to SEQ ID NO: 2511036
cuucucacagguggaaucu

SEQ ID NO: 2511038 - RNA, 19 nt, Artificial Sequence
  Description of Artificial Sequence: Synthetic oligonucleotide
  Sense strand starting at position 3605 of SEQ ID NO: 1888104
acaucagauguaugcaaau

SEQ ID NO: 2511039 - RNA, 19 nt, Artificial Sequence
  Description of Artificial Sequence: Synthetic oligonucleotide
  Antisense strand to SEQ ID NO: 2511038
auuugcauacaucugaugu

SEQ ID NO: 2511040 - RNA, 19 nt, Artificial Sequence
  Description of Artificial Sequence: Synthetic oligonucleotide
  Sense strand starting at position 3885 of SEQ ID NO: 1888104
gcuaaucagcaggagacua

SEQ ID NO: 2511041 - RNA, 19 nt, Artificial Sequence
  Description of Artificial Sequence: Synthetic oligonucleotide
  Antisense strand to SEQ ID NO: 2511040
uagucuccugcugauuagc

SEQ ID NO: 2511042 - RNA, 19 nt, Artificial Sequence
  Description of Artificial Sequence: Synthetic oligonucleotide
  Sense strand starting at position 3893 of SEQ ID NO: 1888104
gcaggagacuaguuacaua

SEQ ID NO: 2511043 - RNA, 19 nt, Artificial Sequence
  Description of Artificial Sequence: Synthetic oligonucleotide
  Antisense strand to SEQ ID NO: 2511042
uauguaacuagucuccugc

SEQ ID NO: 2511044 - RNA, 19 nt, Artificial Sequence
  Description of Artificial Sequence: Synthetic oligonucleotide
  Sense strand starting at position 109 of SEQ ID NO: 1888105
aaggaugugagcugguaua

SEQ ID NO: 2511045 - RNA, 19 nt, Artificial Sequence
  Description of Artificial Sequence: Synthetic oligonucleotide
  Antisense strand to SEQ ID NO: 2511044
uauaccagcucacauccuu

SEQ ID NO: 2511046 - RNA, 19 nt, Artificial Sequence
  Description of Artificial Sequence: Synthetic oligonucleotide
  Sense strand starting at position 443 of SEQ ID NO: 1888105
ggugccauauuuguuugaa

SEQ ID NO: 2511047 - RNA, 19 nt, Artificial Sequence
  Description of Artificial Sequence: Synthetic oligonucleotide
  Antisense strand to SEQ ID NO: 2511046
uucaaacaaauauggcacc

SEQ ID NO: 2511048 - RNA, 19 nt, Artificial Sequence
  Description of Artificial Sequence: Synthetic oligonucleotide
  Sense strand starting at position 444 of SEQ ID NO: 1888105
gugccauauuuguuugaac

SEQ ID NO: 2511049 - RNA, 19 nt, Artificial Sequence
  Description of Artificial Sequence: Synthetic oligonucleotide
  Antisense strand to SEQ ID NO: 2511048
guucaaacaaauauggcac

SEQ ID NO: 2511050 - RNA, 19 nt, Artificial Sequence
  Description of Artificial Sequence: Synthetic oligonucleotide
  Sense strand starting at position 598 of SEQ ID NO: 1888105
uguguaaguaacuauugua

SEQ ID NO: 2511051 - RNA, 19 nt, Artificial Sequence
  Description of Artificial Sequence: Synthetic oligonucleotide
  Antisense strand to SEQ ID NO: 2511050
uacaauaguuacuuacaca

SEQ ID NO: 2511052 - RNA, 19 nt, Artificial Sequence
  Description of Artificial Sequence: Synthetic oligonucleotide
  Sense strand starting at position 758 of SEQ ID NO: 1888105
uuaacaacuguguaguagu

SEQ ID NO: 2511053 - RNA, 19 nt, Artificial Sequence
  Description of Artificial Sequence: Synthetic oligonucleotide
  Antisense strand to SEQ ID NO: 2511052
acuacuacacaguuguuaa

SEQ ID NO: 2511054 - RNA, 19 nt, Artificial Sequence
  Description of Artificial Sequence: Synthetic oligonucleotide
  Sense strand starting at position 923 of SEQ ID NO: 1888105
gagagauggguaggucuca

SEQ ID NO: 2511055 - RNA, 19 nt, Artificial Sequence
  Description of Artificial Sequence: Synthetic oligonucleotide
  Antisense strand to SEQ ID NO: 2511054
ugagaccuacccaucucuc

SEQ ID NO: 2511056 - RNA, 19 nt, Artificial Sequence
  Description of Artificial Sequence: Synthetic oligonucleotide
  Sense strand starting at position 936 of SEQ ID NO: 1888105
gucucagaguaucucauga

SEQ ID NO: 2511057 - RNA, 19 nt, Artificial Sequence
  Description of Artificial Sequence: Synthetic oligonucleotide
  Antisense strand to SEQ ID NO: 2511056
ucaugagauacucugagac

SEQ ID NO: 2511058 - RNA, 19 nt, Artificial Sequence
  Description of Artificial Sequence: Synthetic oligonucleotide
  Sense strand starting at position 966 of SEQ ID NO: 1888105
acuagaugauagccaaauu

SEQ ID NO: 2511059 - RNA, 19 nt, Artificial Sequence
  Description of Artificial Sequence: Synthetic oligonucleotide
  Antisense strand to SEQ ID NO: 2511058
aauuuggcuaucaucuagu

SEQ ID NO: 2511060 - RNA, 19 nt, Artificial Sequence
  Description of Artificial Sequence: Synthetic oligonucleotide
  Sense strand starting at position 988 of SEQ ID NO: 1888105
cucugaagugcuuauacua

SEQ ID NO: 2511061 - RNA, 19 nt, Artificial Sequence
  Description of Artificial Sequence: Synthetic oligonucleotide
  Antisense strand to SEQ ID NO: 2511060
uaguauaagcacuucagag

SEQ ID NO: 2511062 - RNA, 19 nt, Artificial Sequence
  Description of Artificial Sequence: Synthetic oligonucleotide
  Sense strand starting at position 1158 of SEQ ID NO: 1888105
ucagguccuccugaaaugu

SEQ ID NO: 2511063 - RNA, 19 nt, Artificial Sequence
  Description of Artificial Sequence: Synthetic oligonucleotide
  Antisense strand to SEQ ID NO: 2511062
acauuucaggaggaccuga

SEQ ID NO: 2511064 - RNA, 19 nt, Artificial Sequence
  Description of Artificial Sequence: Synthetic oligonucleotide
  Sense strand starting at position 1168 of SEQ ID NO: 1888105
cugaaauguccugacuuua

SEQ ID NO: 2511065 - RNA, 19 nt, Artificial Sequence
  Description of Artificial Sequence: Synthetic oligonucleotide
  Antisense strand to SEQ ID NO: 2511064
uaaagucaggacauuucag

SEQ ID NO: 2511066 - RNA, 19 nt, Artificial Sequence
  Description of Artificial Sequence: Synthetic oligonucleotide
  Sense strand starting at position 1306 of SEQ ID NO: 1888105
cggccauaaccucaaauau

SEQ ID NO: 2511067 - RNA, 19 nt, Artificial Sequence
  Description of Artificial Sequence: Synthetic oligonucleotide
  Antisense strand to SEQ ID NO: 2511066
auauuugagguuauggccg

SEQ ID NO: 2511068 - RNA, 19 nt, Artificial Sequence
  Description of Artificial Sequence: Synthetic oligonucleotide
  Sense strand starting at position 1363 of SEQ ID NO: 1888105
cuaagaaucaggugugggu

SEQ ID NO: 2511069 - RNA, 19 nt, Artificial Sequence
  Description of Artificial Sequence: Synthetic oligonucleotide
  Antisense strand to SEQ ID NO: 2511068
acccacaccugauucuuag

SEQ ID NO: 2511070 - RNA, 19 nt, Artificial Sequence
  Description of Artificial Sequence: Synthetic oligonucleotide
  Sense strand starting at position 1463 of SEQ ID NO: 1888105
ugagaaauguucccuguuc

SEQ ID NO: 2511071 - RNA, 19 nt, Artificial Sequence
  Description of Artificial Sequence: Synthetic oligonucleotide
  Antisense strand to SEQ ID NO: 2511070
gaacagggaacauuucuca

SEQ ID NO: 2511072 - RNA, 19 nt, Artificial Sequence
  Description of Artificial Sequence: Synthetic oligonucleotide
  Sense strand starting at position 1568 of SEQ ID NO: 1888105
augggugauuguuccauca

SEQ ID NO: 2511073 - RNA, 19 nt, Artificial Sequence
  Description of Artificial Sequence: Synthetic oligonucleotide
  Antisense strand to SEQ ID NO: 2511072
ugauggaacaaucacccau

SEQ ID NO: 2511074 - RNA, 19 nt, Artificial Sequence
  Description of Artificial Sequence: Synthetic oligonucleotide
  Sense strand starting at position 1599 of SEQ ID NO: 1888105
aaugguuucgguuaaucug

SEQ ID NO: 2511075 - RNA, 19 nt, Artificial Sequence
  Description of Artificial Sequence: Synthetic oligonucleotide
  Antisense strand to SEQ ID NO: 2511074
cagauuaaccgaaaccauu

SEQ ID NO: 2511076 - RNA, 19 nt, Artificial Sequence
  Description of Artificial Sequence: Synthetic oligonucleotide
  Sense strand starting at position 1675 of SEQ ID NO: 1888105
cucacuguucuggguaaag

SEQ ID NO: 2511077 - RNA, 19 nt, Artificial Sequence
  Description of Artificial Sequence: Synthetic oligonucleotide
  Antisense strand to SEQ ID NO: 2511076
cuuuacccagaacagugag

SEQ ID NO: 2511078 - RNA, 19 nt, Artificial Sequence
  Description of Artificial Sequence: Synthetic oligonucleotide
  Sense strand starting at position 1790 of SEQ ID NO: 1888105
uggauacucgaguacugga

SEQ ID NO: 2511079 - RNA, 19 nt, Artificial Sequence
  Description of Artificial Sequence: Synthetic oligonucleotide
  Antisense strand to SEQ ID NO: 2511078
uccaguacucgaguaucca

SEQ ID NO: 2511080 - RNA, 19 nt, Artificial Sequence
  Description of Artificial Sequence: Synthetic oligonucleotide
  Sense strand starting at position 1821 of SEQ ID NO: 1888105
auacguucuagagacgguu

SEQ ID NO: 2511081 - RNA, 19 nt, Artificial Sequence
  Description of Artificial Sequence: Synthetic oligonucleotide
  Antisense strand to SEQ ID NO: 2511080
aaccgucucuagaacguau

SEQ ID NO: 2511082 - RNA, 19 nt, Artificial Sequence
  Description of Artificial Sequence: Synthetic oligonucleotide
  Sense strand starting at position 1953 of SEQ ID NO: 1888105
ccaaguagcuauuugcuga

SEQ ID NO: 2511083 - RNA, 19 nt, Artificial Sequence
  Description of Artificial Sequence: Synthetic oligonucleotide
  Antisense strand to SEQ ID NO: 2511082
ucagcaaauagcuacuugg

SEQ ID NO: 2511084 - RNA, 19 nt, Artificial Sequence
  Description of Artificial Sequence: Synthetic oligonucleotide
  Sense strand starting at position 1956 of SEQ ID NO: 1888105
aguagcuauuugcugacua

SEQ ID NO: 2511085 - RNA, 19 nt, Artificial Sequence
  Description of Artificial Sequence: Synthetic oligonucleotide
  Antisense strand to SEQ ID NO: 2511084
uagucagcaaauagcuacu

SEQ ID NO: 2511086 - RNA, 19 nt, Artificial Sequence
  Description of Artificial Sequence: Synthetic oligonucleotide
  Sense strand starting at position 2106 of SEQ ID NO: 1888105
uugaccaaucaggguuuau

SEQ ID NO: 2511087 - RNA, 19 nt, Artificial Sequence
  Description of Artificial Sequence: Synthetic oligonucleotide
  Antisense strand to SEQ ID NO: 2511086
auaaacccugauuggucaa

SEQ ID NO: 2511088 - RNA, 19 nt, Artificial Sequence
  Description of Artificial Sequence: Synthetic oligonucleotide
  Sense strand starting at position 2462 of SEQ ID NO: 1888105
ugaggaagguguguacaua

SEQ ID NO: 2511089 - RNA, 19 nt, Artificial Sequence
  Description of Artificial Sequence: Synthetic oligonucleotide
  Antisense strand to SEQ ID NO: 2511088
uauguacacaccuuccuca

SEQ ID NO: 2511090 - RNA, 19 nt, Artificial Sequence
  Description of Artificial Sequence: Synthetic oligonucleotide
  Sense strand starting at position 2518 of SEQ ID NO: 1888105
acaugugaucuggagccuu

SEQ ID NO: 2511091 - RNA, 19 nt, Artificial Sequence
  Description of Artificial Sequence: Synthetic oligonucleotide
  Antisense strand to SEQ ID NO: 2511090
aaggcuccagaucacaugu

SEQ ID NO: 2511092 - RNA, 19 nt, Artificial Sequence
  Description of Artificial Sequence: Synthetic oligonucleotide
  Sense strand starting at position 2848 of SEQ ID NO: 1888105
gagaacucugacuggguca

SEQ ID NO: 2511093 - RNA, 19 nt, Artificial Sequence
  Description of Artificial Sequence: Synthetic oligonucleotide
  Antisense strand to SEQ ID NO: 2511092
ugacccagucagaguucuc

SEQ ID NO: 2511094 - RNA, 19 nt, Artificial Sequence
  Description of Artificial Sequence: Synthetic oligonucleotide
  Sense strand starting at position 2909 of SEQ ID NO: 1888105
gaugauugauaguuccaac

SEQ ID NO: 2511095 - RNA, 19 nt, Artificial Sequence
  Description of Artificial Sequence: Synthetic oligonucleotide
  Antisense strand to SEQ ID NO: 2511094
guuggaacuaucaaucauc

SEQ ID NO: 2511096 - RNA, 19 nt, Artificial Sequence
  Description of Artificial Sequence: Synthetic oligonucleotide
  Sense strand starting at position 2981 of SEQ ID NO: 1888105
ggcuguucuggacagacaa

SEQ ID NO: 2511097 - RNA, 19 nt, Artificial Sequence
  Description of Artificial Sequence: Synthetic oligonucleotide
  Antisense strand to SEQ ID NO: 2511096
uugucuguccagaacagcc

SEQ ID NO: 2511098 - RNA, 19 nt, Artificial Sequence
  Description of Artificial Sequence: Synthetic oligonucleotide
  Sense strand starting at position 3036 of SEQ ID NO: 1888105
ggcuuuaugccacaacaua

SEQ ID NO: 2511099 - RNA, 19 nt, Artificial Sequence
  Description of Artificial Sequence: Synthetic oligonucleotide
  Antisense strand to SEQ ID NO: 2511098
uauguuguggcauaaagcc

SEQ ID NO: 2511100 - RNA, 19 nt, Artificial Sequence
  Description of Artificial Sequence: Synthetic oligonucleotide
  Sense strand starting at position 3092 of SEQ ID NO: 1888105
aauguugcacgguaaagaa

SEQ ID NO: 2511101 - RNA, 19 nt, Artificial Sequence
  Description of Artificial Sequence: Synthetic oligonucleotide
  Antisense strand to SEQ ID NO: 2511100
uucuuuaccgugcaacauu

SEQ ID NO: 2511102 - RNA, 19 nt, Artificial Sequence
  Description of Artificial Sequence: Synthetic oligonucleotide
  Sense strand starting at position 3182 of SEQ ID NO: 1888105
cugagcauccucugaacuu

SEQ ID NO: 2511103 - RNA, 19 nt, Artificial Sequence
  Description of Artificial Sequence: Synthetic oligonucleotide
  Antisense strand to SEQ ID NO: 2511102
aaguucagaggaugcucag

SEQ ID NO: 2511104 - RNA, 19 nt, Artificial Sequence
  Description of Artificial Sequence: Synthetic oligonucleotide
  Sense strand starting at position 3211 of SEQ ID NO: 1888105
uauguaucucuugaaggca

SEQ ID NO: 2511105 - RNA, 19 nt, Artificial Sequence
  Description of Artificial Sequence: Synthetic oligonucleotide
  Antisense strand to SEQ ID NO: 2511104
ugccuucaagagauacaua

SEQ ID NO: 2511106 - RNA, 19 nt, Artificial Sequence
  Description of Artificial Sequence: Synthetic oligonucleotide
  Sense strand starting at position 3214 of SEQ ID NO: 1888105
guaucucuugaaggcaaau

SEQ ID NO: 2511107 - RNA, 19 nt, Artificial Sequence
  Description of Artificial Sequence: Synthetic oligonucleotide
  Antisense strand to SEQ ID NO: 2511106
auuugccuucaagagauac

SEQ ID NO: 2511108 - RNA, 19 nt, Artificial Sequence
  Description of Artificial Sequence: Synthetic oligonucleotide
  Sense strand starting at position 3226 of SEQ ID NO: 1888105
ggcaaauacuugcuccaaa

SEQ ID NO: 2511109 - RNA, 19 nt, Artificial Sequence
  Description of Artificial Sequence: Synthetic oligonucleotide
  Antisense strand to SEQ ID NO: 2511108
uuuggagcaaguauuugcc

SEQ ID NO: 2511110 - RNA, 19 nt, Artificial Sequence
  Description of Artificial Sequence: Synthetic oligonucleotide
  Sense strand starting at position 3521 of SEQ ID NO: 1888105
uuggauuuaauguguguuu

SEQ ID NO: 2511111 - RNA, 19 nt, Artificial Sequence
  Description of Artificial Sequence: Synthetic oligonucleotide
  Antisense strand to SEQ ID NO: 2511110
aaacacacauuaaauccaa

SEQ ID NO: 2511112 - RNA, 19 nt, Artificial Sequence
  Description of Artificial Sequence: Synthetic oligonucleotide
  Sense strand starting at position 3710 of SEQ ID NO: 1888105
gggcccuuugaguaggaua

SEQ ID NO: 2511113 - RNA, 19 nt, Artificial Sequence
  Description of Artificial Sequence: Synthetic oligonucleotide
  Antisense strand to SEQ ID NO: 2511112
uauccuacucaaagggccc

SEQ ID NO: 2511114 - RNA, 19 nt, Artificial Sequence
  Description of Artificial Sequence: Synthetic oligonucleotide
  Sense strand starting at position 3712 of SEQ ID NO: 1888105
gcccuuugaguaggauaga

SEQ ID NO: 2511115 - RNA, 19 nt, Artificial Sequence
  Description of Artificial Sequence: Synthetic oligonucleotide
  Antisense strand to SEQ ID NO: 2511114
ucuauccuacucaaagggc

SEQ ID NO: 2511116 - RNA, 19 nt, Artificial Sequence
  Description of Artificial Sequence: Synthetic oligonucleotide
  Sense strand starting at position 3883 of SEQ ID NO: 1888105
ucagguugucaccaaccau

SEQ ID NO: 2511117 - RNA, 19 nt, Artificial Sequence
  Description of Artificial Sequence: Synthetic oligonucleotide
  Antisense strand to SEQ ID NO: 2511116
augguuggugacaaccuga

SEQ ID NO: 2511118 - RNA, 19 nt, Artificial Sequence
  Description of Artificial Sequence: Synthetic oligonucleotide
  Sense strand starting at position 3898 of SEQ ID NO: 1888105
ccaucuaucccguauguag

SEQ ID NO: 2511119 - RNA, 19 nt, Artificial Sequence
  Description of Artificial Sequence: Synthetic oligonucleotide
  Antisense strand to SEQ ID NO: 2511118
cuacauacgggauagaugg

SEQ ID NO: 2511120 - RNA, 19 nt, Artificial Sequence
  Description of Artificial Sequence: Synthetic oligonucleotide
  Sense strand starting at position 3941 of SEQ ID NO: 1888105
uuuauuacagcacggagau

SEQ ID NO: 2511121 - RNA, 19 nt, Artificial Sequence
  Description of Artificial Sequence: Synthetic oligonucleotide
  Antisense strand to SEQ ID NO: 2511120
aucuccgugcuguaauaaa

SEQ ID NO: 2511122 - RNA, 19 nt, Artificial Sequence
  Description of Artificial Sequence: Synthetic oligonucleotide
  Sense strand starting at position 3942 of SEQ ID NO: 1888105
uuauuacagcacggagaua

SEQ ID NO: 2511123 - RNA, 19 nt, Artificial Sequence
  Description of Artificial Sequence: Synthetic oligonucleotide
  Antisense strand to SEQ ID NO: 2511122
uaucuccgugcuguaauaa

SEQ ID NO: 2511124 - RNA, 19 nt, Artificial Sequence
  Description of Artificial Sequence: Synthetic oligonucleotide
  Sense strand starting at position 74 of SEQ ID NO: 1888106
ucaagucuugucuaggaau

SEQ ID NO: 2511125 - RNA, 19 nt, Artificial Sequence
  Description of Artificial Sequence: Synthetic oligonucleotide
  Antisense strand to SEQ ID NO: 2511124
auuccuagacaagacuuga

SEQ ID NO: 2511126 - RNA, 19 nt, Artificial Sequence
  Description of Artificial Sequence: Synthetic oligonucleotide
  Sense strand starting at position 76 of SEQ ID NO: 1888106
aagucuugucuaggaauuc

SEQ ID NO: 2511127 - RNA, 19 nt, Artificial Sequence
  Description of Artificial Sequence: Synthetic oligonucleotide
  Antisense strand to SEQ ID NO: 2511126
gaauuccuagacaagacuu

SEQ ID NO: 2511128 - RNA, 19 nt, Artificial Sequence
  Description of Artificial Sequence: Synthetic oligonucleotide
  Sense strand starting at position 150 of SEQ ID NO: 1888106
ucugauuuaugagauuaug

SEQ ID NO: 2511129 - RNA, 19 nt, Artificial Sequence
  Description of Artificial Sequence: Synthetic oligonucleotide
  Antisense strand to SEQ ID NO: 2511128
cauaaucucauaaaucaga

SEQ ID NO: 2511130 - RNA, 19 nt, Artificial Sequence
  Description of Artificial Sequence: Synthetic oligonucleotide
  Sense strand starting at position 305 of SEQ ID NO: 1888106
aguggcuuuccacaaugaa

SEQ ID NO: 2511131 - RNA, 19 nt, Artificial Sequence
  Description of Artificial Sequence: Synthetic oligonucleotide
  Antisense strand to SEQ ID NO: 2511130
uucauuguggaaagccacu

SEQ ID NO: 2511132 - RNA, 19 nt, Artificial Sequence
  Description of Artificial Sequence: Synthetic oligonucleotide
  Sense strand starting at position 360 of SEQ ID NO: 1888106
auuggcuuuccacaaugaa

SEQ ID NO: 2511133 - RNA, 19 nt, Artificial Sequence
  Description of Artificial Sequence: Synthetic oligonucleotide
  Antisense strand to SEQ ID NO: 2511132
uucauuguggaaagccaau

SEQ ID NO: 2511134 - RNA, 19 nt, Artificial Sequence
  Description of Artificial Sequence: Synthetic oligonucleotide
  Sense strand starting at position 421 of SEQ ID NO: 1888106
ccgaguuugacucagaguu

SEQ ID NO: 2511135 - RNA, 19 nt, Artificial Sequence
  Description of Artificial Sequence: Synthetic oligonucleotide
  Antisense strand to SEQ ID NO: 2511134
aacucugagucaaacucgg

SEQ ID NO: 2511136 - RNA, 19 nt, Artificial Sequence
  Description of Artificial Sequence: Synthetic oligonucleotide
  Sense strand starting at position 458 of SEQ ID NO: 1888106
uggguauagaucugccaug

SEQ ID NO: 2511137 - RNA, 19 nt, Artificial Sequence
  Description of Artificial Sequence: Synthetic oligonucleotide
  Antisense strand to SEQ ID NO: 2511136
cauggcagaucuauaccca

SEQ ID NO: 2511138 - RNA, 19 nt, Artificial Sequence
  Description of Artificial Sequence: Synthetic oligonucleotide
  Sense strand starting at position 459 of SEQ ID NO: 1888106
ggguauagaucugccauga

SEQ ID NO: 2511139 - RNA, 19 nt, Artificial Sequence
  Description of Artificial Sequence: Synthetic oligonucleotide
  Antisense strand to SEQ ID NO: 2511138
ucauggcagaucuauaccc

SEQ ID NO: 2511140 - RNA, 19 nt, Artificial Sequence
  Description of Artificial Sequence: Synthetic oligonucleotide
  Sense strand starting at position 463 of SEQ ID NO: 1888106
auagaucugccaugacuau

SEQ ID NO: 2511141 - RNA, 19 nt, Artificial Sequence
  Description of Artificial Sequence: Synthetic oligonucleotide
  Antisense strand to SEQ ID NO: 2511140
auagucauggcagaucuau

SEQ ID NO: 2511142 - RNA, 19 nt, Artificial Sequence
  Description of Artificial Sequence: Synthetic oligonucleotide
  Sense strand starting at position 713 of SEQ ID NO: 1888106
uugaacguauaaucaaagu

SEQ ID NO: 2511143 - RNA, 19 nt, Artificial Sequence
  Description of Artificial Sequence: Synthetic oligonucleotide
  Antisense strand to SEQ ID NO: 2511142
acuuugauuauacguucaa

SEQ ID NO: 2511144 - RNA, 19 nt, Artificial Sequence
  Description of Artificial Sequence: Synthetic oligonucleotide
  Sense strand starting at position 745 of SEQ ID NO: 1888106
gaaucacuugaguagcuuu

SEQ ID NO: 2511145 - RNA, 19 nt, Artificial Sequence
  Description of Artificial Sequence: Synthetic oligonucleotide
  Antisense strand to SEQ ID NO: 2511144
aaagcuacucaagugauuc

SEQ ID NO: 2511146 - RNA, 19 nt, Artificial Sequence
  Description of Artificial Sequence: Synthetic oligonucleotide
  Sense strand starting at position 816 of SEQ ID NO: 1888106
gggcucaaauaaucuauaa

SEQ ID NO: 2511147 - RNA, 19 nt, Artificial Sequence
  Description of Artificial Sequence: Synthetic oligonucleotide
  Antisense strand to SEQ ID NO: 2511146
uuauagauuauuugagccc

SEQ ID NO: 2511148 - RNA, 19 nt, Artificial Sequence
  Description of Artificial Sequence: Synthetic oligonucleotide
  Sense strand starting at position 1025 of SEQ ID NO: 1888106
guuauuagaggccaauugu

SEQ ID NO: 2511149 - RNA, 19 nt, Artificial Sequence
  Description of Artificial Sequence: Synthetic oligonucleotide
  Antisense strand to SEQ ID NO: 2511148
acaauuggccucuaauaac

SEQ ID NO: 2511150 - RNA, 19 nt, Artificial Sequence
  Description of Artificial Sequence: Synthetic oligonucleotide
  Sense strand starting at position 1169 of SEQ ID NO: 1888106
guguuaguuauuggagaaa

SEQ ID NO: 2511151 - RNA, 19 nt, Artificial Sequence
  Description of Artificial Sequence: Synthetic oligonucleotide
  Antisense strand to SEQ ID NO: 2511150
uuucuccaauaacuaacac

SEQ ID NO: 2511152 - RNA, 19 nt, Artificial Sequence
  Description of Artificial Sequence: Synthetic oligonucleotide
  Sense strand starting at position 1183 of SEQ ID NO: 1888106
agaaacaaccguugacuuu

SEQ ID NO: 2511153 - RNA, 19 nt, Artificial Sequence
  Description of Artificial Sequence: Synthetic oligonucleotide
  Antisense strand to SEQ ID NO: 2511152
aaagucaacgguuguuucu

SEQ ID NO: 2511154 - RNA, 19 nt, Artificial Sequence
  Description of Artificial Sequence: Synthetic oligonucleotide
  Sense strand starting at position 1184 of SEQ ID NO: 1888106
gaaacaaccguugacuuua

SEQ ID NO: 2511155 - RNA, 19 nt, Artificial Sequence
  Description of Artificial Sequence: Synthetic oligonucleotide
  Antisense strand to SEQ ID NO: 2511154
uaaagucaacgguuguuuc

SEQ ID NO: 2511156 - RNA, 19 nt, Artificial Sequence
  Description of Artificial Sequence: Synthetic oligonucleotide
  Sense strand starting at position 1346 of SEQ ID NO: 1888106
cuaaguuuccaggaguaca

SEQ ID NO: 2511157 - RNA, 19 nt, Artificial Sequence
  Description of Artificial Sequence: Synthetic oligonucleotide
  Antisense strand to SEQ ID NO: 2511156
uguacuccuggaaacuuag

SEQ ID NO: 2511158 - RNA, 19 nt, Artificial Sequence
  Description of Artificial Sequence: Synthetic oligonucleotide
  Sense strand starting at position 1380 of SEQ ID NO: 1888106
ugagcaauccuagguagac

SEQ ID NO: 2511159 - RNA, 19 nt, Artificial Sequence
  Description of Artificial Sequence: Synthetic oligonucleotide
  Antisense strand to SEQ ID NO: 2511158
gucuaccuaggauugcuca

SEQ ID NO: 2511160 - RNA, 19 nt, Artificial Sequence
  Description of Artificial Sequence: Synthetic oligonucleotide
  Sense strand starting at position 1381 of SEQ ID NO: 1888106
gagcaauccuagguagaca

SEQ ID NO: 2511161 - RNA, 19 nt, Artificial Sequence
  Description of Artificial Sequence: Synthetic oligonucleotide
  Antisense strand to SEQ ID NO: 2511160
ugucuaccuaggauugcuc

SEQ ID NO: 2511162 - RNA, 19 nt, Artificial Sequence
  Description of Artificial Sequence: Synthetic oligonucleotide
  Sense strand starting at position 1493 of SEQ ID NO: 1888106
gguugagaauuauuccaau

SEQ ID NO: 2511163 - RNA, 19 nt, Artificial Sequence
  Description of Artificial Sequence: Synthetic oligonucleotide
  Antisense strand to SEQ ID NO: 2511162
auuggaauaauucucaacc

SEQ ID NO: 2511164 - RNA, 19 nt, Artificial Sequence
  Description of Artificial Sequence: Synthetic oligonucleotide
  Sense strand starting at position 2075 of SEQ ID NO: 1888106
uaaagauguuaugugagag

SEQ ID NO: 2511165 - RNA, 19 nt, Artificial Sequence
  Description of Artificial Sequence: Synthetic oligonucleotide
  Antisense strand to SEQ ID NO: 2511164
cucucacauaacaucuuua

SEQ ID NO: 2511166 - RNA, 19 nt, Artificial Sequence
  Description of Artificial Sequence: Synthetic oligonucleotide
  Sense strand starting at position 2174 of SEQ ID NO: 1888106
cugagaugcuuucuacuag

SEQ ID NO: 2511167 - RNA, 19 nt, Artificial Sequence
  Description of Artificial Sequence: Synthetic oligonucleotide
  Antisense strand to SEQ ID NO: 2511166
cuaguagaaagcaucucag

SEQ ID NO: 2511168 - RNA, 19 nt, Artificial Sequence
  Description of Artificial Sequence: Synthetic oligonucleotide
  Sense strand starting at position 2209 of SEQ ID NO: 1888106
uaaagaguucgauacaguu

SEQ ID NO: 2511169 - RNA, 19 nt, Artificial Sequence
  Description of Artificial Sequence: Synthetic oligonucleotide
  Antisense strand to SEQ ID NO: 2511168
aacuguaucgaacucuuua

SEQ ID NO: 2511170 - RNA, 19 nt, Artificial Sequence
  Description of Artificial Sequence: Synthetic oligonucleotide
  Sense strand starting at position 2239 of SEQ ID NO: 1888106
gugacaauuagugaaggca

SEQ ID NO: 2511171 - RNA, 19 nt, Artificial Sequence
  Description of Artificial Sequence: Synthetic oligonucleotide
  Antisense strand to SEQ ID NO: 2511170
ugccuucacuaauugucac

SEQ ID NO: 2511172 - RNA, 19 nt, Artificial Sequence
  Description of Artificial Sequence: Synthetic oligonucleotide
  Sense strand starting at position 2529 of SEQ ID NO: 1888106
augguuugacccuaguaau

SEQ ID NO: 2511173 - RNA, 19 nt, Artificial Sequence
  Description of Artificial Sequence: Synthetic oligonucleotide
  Antisense strand to SEQ ID NO: 2511172
auuacuagggucaaaccau

SEQ ID NO: 2511174 - RNA, 19 nt, Artificial Sequence
  Description of Artificial Sequence: Synthetic oligonucleotide
  Sense strand starting at position 2550 of SEQ ID NO: 1888106
aguuauauuuaugcugcua

SEQ ID NO: 2511175 - RNA, 19 nt, Artificial Sequence
  Description of Artificial Sequence: Synthetic oligonucleotide
  Antisense strand to SEQ ID NO: 2511174
uagcagcauaaauauaacu

SEQ ID NO: 2511176 - RNA, 19 nt, Artificial Sequence
  Description of Artificial Sequence: Synthetic oligonucleotide
  Sense strand starting at position 2759 of SEQ ID NO: 1888106
uuagaaauuccuggauacu

SEQ ID NO: 2511177 - RNA, 19 nt, Artificial Sequence
  Description of Artificial Sequence: Synthetic oligonucleotide
  Antisense strand to SEQ ID NO: 2511176
aguauccaggaauuucuaa

SEQ ID NO: 2511178 - RNA, 19 nt, Artificial Sequence
  Description of Artificial Sequence: Synthetic oligonucleotide
  Sense strand starting at position 2806 of SEQ ID NO: 1888106
gcuuucuggucugugauuu

SEQ ID NO: 2511179 - RNA, 19 nt, Artificial Sequence
  Description of Artificial Sequence: Synthetic oligonucleotide
  Antisense strand to SEQ ID NO: 2511178
aaaucacagaccagaaagc

SEQ ID NO: 2511180 - RNA, 19 nt, Artificial Sequence
  Description of Artificial Sequence: Synthetic oligonucleotide
  Sense strand starting at position 2932 of SEQ ID NO: 1888106
gggacacuuauucggcaau

SEQ ID NO: 2511181 - RNA, 19 nt, Artificial Sequence
  Description of Artificial Sequence: Synthetic oligonucleotide
  Antisense strand to SEQ ID NO: 2511180
auugccgaauaaguguccc

SEQ ID NO: 2511182 - RNA, 19 nt, Artificial Sequence
  Description of Artificial Sequence: Synthetic oligonucleotide
  Sense strand starting at position 2935 of SEQ ID NO: 1888106
acacuuauucggcaauccu

SEQ ID NO: 2511183 - RNA, 19 nt, Artificial Sequence
  Description of Artificial Sequence: Synthetic oligonucleotide
  Antisense strand to SEQ ID NO: 2511182
aggauugccgaauaagugu

SEQ ID NO: 2511184 - RNA, 19 nt, Artificial Sequence
  Description of Artificial Sequence: Synthetic oligonucleotide
  Sense strand starting at position 2995 of SEQ ID NO: 1888106
ggguuuguucaagauguug

SEQ ID NO: 2511185 - RNA, 19 nt, Artificial Sequence
  Description of Artificial Sequence: Synthetic oligonucleotide
  Antisense strand to SEQ ID NO: 2511184
caacaucuugaacaaaccc

SEQ ID NO: 2511186 - RNA, 19 nt, Artificial Sequence
  Description of Artificial Sequence: Synthetic oligonucleotide
  Sense strand starting at position 3145 of SEQ ID NO: 1888106
gugcaaguugauuaacaag

SEQ ID NO: 2511187 - RNA, 19 nt, Artificial Sequence
  Description of Artificial Sequence: Synthetic oligonucleotide
  Antisense strand to SEQ ID NO: 2511186
cuuguuaaucaacuugcac

SEQ ID NO: 2511188 - RNA, 19 nt, Artificial Sequence
  Description of Artificial Sequence: Synthetic oligonucleotide
  Sense strand starting at position 3186 of SEQ ID NO: 1888106
aaaggaaggguuuggcuau

SEQ ID NO: 2511189 - RNA, 19 nt, Artificial Sequence
  Description of Artificial Sequence: Synthetic oligonucleotide
  Antisense strand to SEQ ID NO: 2511188
auagccaaacccuuccuuu

SEQ ID NO: 2511190 - RNA, 19 nt, Artificial Sequence
  Description of Artificial Sequence: Synthetic oligonucleotide
  Sense strand starting at position 3201 of SEQ ID NO: 1888106
cuaucaaguguugacaaua

SEQ ID NO: 2511191 - RNA, 19 nt, Artificial Sequence
  Description of Artificial Sequence: Synthetic oligonucleotide
  Antisense strand to SEQ ID NO: 2511190
uauugucaacacuugauag

SEQ ID NO: 2511192 - RNA, 19 nt, Artificial Sequence
  Description of Artificial Sequence: Synthetic oligonucleotide
  Sense strand starting at position 3489 of SEQ ID NO: 1888106
uggcuaugacucugagaag

SEQ ID NO: 2511193 - RNA, 19 nt, Artificial Sequence
  Description of Artificial Sequence: Synthetic oligonucleotide
  Antisense strand to SEQ ID NO: 2511192
cuucucagagucauagcca

SEQ ID NO: 2511194 - RNA, 19 nt, Artificial Sequence
  Description of Artificial Sequence: Synthetic oligonucleotide
  Sense strand starting at position 3618 of SEQ ID NO: 1888106
guuaucaauuucuaagaag

SEQ ID NO: 2511195 - RNA, 19 nt, Artificial Sequence
  Description of Artificial Sequence: Synthetic oligonucleotide
  Antisense strand to SEQ ID NO: 2511194
cuucuuagaaauugauaac

SEQ ID NO: 2511196 - RNA, 19 nt, Artificial Sequence
  Description of Artificial Sequence: Synthetic oligonucleotide
  Sense strand starting at position 3621 of SEQ ID NO: 1888106
aucaauuucuaagaaggau

SEQ ID NO: 2511197 - RNA, 19 nt, Artificial Sequence
  Description of Artificial Sequence: Synthetic oligonucleotide
  Antisense strand to SEQ ID NO: 2511196
auccuucuuagaaauugau

SEQ ID NO: 2511198 - RNA, 19 nt, Artificial Sequence
  Description of Artificial Sequence: Synthetic oligonucleotide
  Sense strand starting at position 3702 of SEQ ID NO: 1888106
guuaaauuaucugugacua

SEQ ID NO: 2511199 - RNA, 19 nt, Artificial Sequence
  Description of Artificial Sequence: Synthetic oligonucleotide
  Antisense strand to SEQ ID NO: 2511198
uagucacagauaauuuaac

SEQ ID NO: 2511200 - RNA, 19 nt, Artificial Sequence
  Description of Artificial Sequence: Synthetic oligonucleotide
  Sense strand starting at position 3841 of SEQ ID NO: 1888106
ugcauaucuggguagcaga

SEQ ID NO: 2511201 - RNA, 19 nt, Artificial Sequence
  Description of Artificial Sequence: Synthetic oligonucleotide
  Antisense strand to SEQ ID NO: 2511200
ucugcuacccagauaugca

SEQ ID NO: 2511202 - RNA, 19 nt, Artificial Sequence
  Description of Artificial Sequence: Synthetic oligonucleotide
  Sense strand starting at position 3978 of SEQ ID NO: 1888106
gcauuuguaugcucccuaa

SEQ ID NO: 2511203 - RNA, 19 nt, Artificial Sequence
  Description of Artificial Sequence: Synthetic oligonucleotide
  Antisense strand to SEQ ID NO: 2511202
uuagggagcauacaaaugc

SEQ ID NO: 2511204 - RNA, 19 nt, Artificial Sequence
  Description of Artificial Sequence: Synthetic oligonucleotide
  Sense strand starting at position 232 of SEQ ID NO: 1888107
uuuguauauccuuggagca

SEQ ID NO: 2511205 - RNA, 19 nt, Artificial Sequence
  Description of Artificial Sequence: Synthetic oligonucleotide
  Antisense strand to SEQ ID NO: 2511204
ugcuccaaggauauacaaa

SEQ ID NO: 2511206 - RNA, 19 nt, Artificial Sequence
  Description of Artificial Sequence: Synthetic oligonucleotide
  Sense strand starting at position 233 of SEQ ID NO: 1888107
uuguauauccuuggagcaa

SEQ ID NO: 2511207 - RNA, 19 nt, Artificial Sequence
  Description of Artificial Sequence: Synthetic oligonucleotide
  Antisense strand to SEQ ID NO: 2511206
uugcuccaaggauauacaa

SEQ ID NO: 2511208 - RNA, 19 nt, Artificial Sequence
  Description of Artificial Sequence: Synthetic oligonucleotide
  Sense strand starting at position 298 of SEQ ID NO: 1888107
ucagcauuaggguauaaua

SEQ ID NO: 2511209 - RNA, 19 nt, Artificial Sequence
  Description of Artificial Sequence: Synthetic oligonucleotide
  Antisense strand to SEQ ID NO: 2511208
uauuauacccuaaugcuga

SEQ ID NO: 2511210 - RNA, 19 nt, Artificial Sequence
  Description of Artificial Sequence: Synthetic oligonucleotide
  Sense strand starting at position 300 of SEQ ID NO: 1888107
agcauuaggguauaauagu

SEQ ID NO: 2511211 - RNA, 19 nt, Artificial Sequence
  Description of Artificial Sequence: Synthetic oligonucleotide
  Antisense strand to SEQ ID NO: 2511210
acuauuauacccuaaugcu

SEQ ID NO: 2511212 - RNA, 19 nt, Artificial Sequence
  Description of Artificial Sequence: Synthetic oligonucleotide
  Sense strand starting at position 306 of SEQ ID NO: 1888107
aggguauaauaguuuagaa

SEQ ID NO: 2511213 - RNA, 19 nt, Artificial Sequence
  Description of Artificial Sequence: Synthetic oligonucleotide
  Antisense strand to SEQ ID NO: 2511212
uucuaaacuauuauacccu

SEQ ID NO: 2511214 - RNA, 19 nt, Artificial Sequence
  Description of Artificial Sequence: Synthetic oligonucleotide
  Sense strand starting at position 332 of SEQ ID NO: 1888107
ucaggagucuaaucgacuu

SEQ ID NO: 2511215 - RNA, 19 nt, Artificial Sequence
  Description of Artificial Sequence: Synthetic oligonucleotide
  Antisense strand to SEQ ID NO: 2511214
aagucgauuagacuccuga

SEQ ID NO: 2511216 - RNA, 19 nt, Artificial Sequence
  Description of Artificial Sequence: Synthetic oligonucleotide
  Sense strand starting at position 403 of SEQ ID NO: 1888107
guugaaagucauggaggaa

SEQ ID NO: 2511217 - RNA, 19 nt, Artificial Sequence
  Description of Artificial Sequence: Synthetic oligonucleotide
  Antisense strand to SEQ ID NO: 2511216
uuccuccaugacuuucaac

SEQ ID NO: 2511218 - RNA, 19 nt, Artificial Sequence
  Description of Artificial Sequence: Synthetic oligonucleotide
  Sense strand starting at position 440 of SEQ ID NO: 1888107
guguaaauugccuggaaca

SEQ ID NO: 2511219 - RNA, 19 nt, Artificial Sequence
  Description of Artificial Sequence: Synthetic oligonucleotide
  Antisense strand to SEQ ID NO: 2511218
uguuccaggcaauuuacac

SEQ ID NO: 2511220 - RNA, 19 nt, Artificial Sequence
  Description of Artificial Sequence: Synthetic oligonucleotide
  Sense strand starting at position 441 of SEQ ID NO: 1888107
uguaaauugccuggaacau

SEQ ID NO: 2511221 - RNA, 19 nt, Artificial Sequence
  Description of Artificial Sequence: Synthetic oligonucleotide
  Antisense strand to SEQ ID NO: 2511220
auguuccaggcaauuuaca

SEQ ID NO: 2511222 - RNA, 19 nt, Artificial Sequence
  Description of Artificial Sequence: Synthetic oligonucleotide
  Sense strand starting at position 442 of SEQ ID NO: 1888107
guaaauugccuggaacaua

SEQ ID NO: 2511223 - RNA, 19 nt, Artificial Sequence
  Description of Artificial Sequence: Synthetic oligonucleotide
  Antisense strand to SEQ ID NO: 2511222
uauguuccaggcaauuuac

SEQ ID NO: 2511224 - RNA, 19 nt, Artificial Sequence
  Description of Artificial Sequence: Synthetic oligonucleotide
  Sense strand starting at position 490 of SEQ ID NO: 1888107
gucuaucauccaugcauuc

SEQ ID NO: 2511225 - RNA, 19 nt, Artificial Sequence
  Description of Artificial Sequence: Synthetic oligonucleotide
  Antisense strand to SEQ ID NO: 2511224
gaaugcauggaugauagac

SEQ ID NO: 2511226 - RNA, 19 nt, Artificial Sequence
  Description of Artificial Sequence: Synthetic oligonucleotide
  Sense strand starting at position 787 of SEQ ID NO: 1888107
ccugguacucuaugccaga

SEQ ID NO: 2511227 - RNA, 19 nt, Artificial Sequence
  Description of Artificial Sequence: Synthetic oligonucleotide
  Antisense strand to SEQ ID NO: 2511226
ucuggcauagaguaccagg

SEQ ID NO: 2511228 - RNA, 19 nt, Artificial Sequence
  Description of Artificial Sequence: Synthetic oligonucleotide
  Sense strand starting at position 788 of SEQ ID NO: 1888107
cugguacucuaugccagau

SEQ ID NO: 2511229 - RNA, 19 nt, Artificial Sequence
  Description of Artificial Sequence: Synthetic oligonucleotide
  Antisense strand to SEQ ID NO: 2511228
aucuggcauagaguaccag

SEQ ID NO: 2511230 - RNA, 19 nt, Artificial Sequence
  Description of Artificial Sequence: Synthetic oligonucleotide
  Sense strand starting at position 797 of SEQ ID NO: 1888107
uaugccagauuguugagau

SEQ ID NO: 2511231 - RNA, 19 nt, Artificial Sequence
  Description of Artificial Sequence: Synthetic oligonucleotide
  Antisense strand to SEQ ID NO: 2511230
aucucaacaaucuggcaua

SEQ ID NO: 2511232 - RNA, 19 nt, Artificial Sequence
  Description of Artificial Sequence: Synthetic oligonucleotide
  Sense strand starting at position 853 of SEQ ID NO: 1888107
aucccaguuuagcuggaaa

SEQ ID NO: 2511233 - RNA, 19 nt, Artificial Sequence
  Description of Artificial Sequence: Synthetic oligonucleotide
  Antisense strand to SEQ ID NO: 2511232
uuuccagcuaaacugggau

SEQ ID NO: 2511234 - RNA, 19 nt, Artificial Sequence
  Description of Artificial Sequence: Synthetic oligonucleotide
  Sense strand starting at position 855 of SEQ ID NO: 1888107
cccaguuuagcuggaaaga

SEQ ID NO: 2511235 - RNA, 19 nt, Artificial Sequence
  Description of Artificial Sequence: Synthetic oligonucleotide
  Antisense strand to SEQ ID NO: 2511234
ucuuuccagcuaaacuggg

SEQ ID NO: 2511236 - RNA, 19 nt, Artificial Sequence
  Description of Artificial Sequence: Synthetic oligonucleotide
  Sense strand starting at position 856 of SEQ ID NO: 1888107
ccaguuuagcuggaaagac

SEQ ID NO: 2511237 - RNA, 19 nt, Artificial Sequence
  Description of Artificial Sequence: Synthetic oligonucleotide
  Antisense strand to SEQ ID NO: 2511236
gucuuuccagcuaaacugg

SEQ ID NO: 2511238 - RNA, 19 nt, Artificial Sequence
  Description of Artificial Sequence: Synthetic oligonucleotide
  Sense strand starting at position 896 of SEQ ID NO: 1888107
ggcagcaucugauccugaa

SEQ ID NO: 2511239 - RNA, 19 nt, Artificial Sequence
  Description of Artificial Sequence: Synthetic oligonucleotide
  Antisense strand to SEQ ID NO: 2511238
uucaggaucagaugcugcc

SEQ ID NO: 2511240 - RNA, 19 nt, Artificial Sequence
  Description of Artificial Sequence: Synthetic oligonucleotide
  Sense strand starting at position 969 of SEQ ID NO: 1888107
gauuuaagaugauauguga

SEQ ID NO: 2511241 - RNA, 19 nt, Artificial Sequence
  Description of Artificial Sequence: Synthetic oligonucleotide
  Antisense strand to SEQ ID NO: 2511240
ucacauaucaucuuaaauc

SEQ ID NO: 2511242 - RNA, 19 nt, Artificial Sequence
  Description of Artificial Sequence: Synthetic oligonucleotide
  Sense strand starting at position 1022 of SEQ ID NO: 1888107
gagcucaguggaugaacau

SEQ ID NO: 2511243 - RNA, 19 nt, Artificial Sequence
  Description of Artificial Sequence: Synthetic oligonucleotide
  Antisense strand to SEQ ID NO: 2511242
auguucauccacugagcuc

SEQ ID NO: 2511244 - RNA, 19 nt, Artificial Sequence
  Description of Artificial Sequence: Synthetic oligonucleotide
  Sense strand starting at position 1057 of SEQ ID NO: 1888107
ucaguuacacggugagacu

SEQ ID NO: 2511245 - RNA, 19 nt, Artificial Sequence
  Description of Artificial Sequence: Synthetic oligonucleotide
  Antisense strand to SEQ ID NO: 2511244
agucucaccguguaacuga

SEQ ID NO: 2511246 - RNA, 19 nt, Artificial Sequence
  Description of Artificial Sequence: Synthetic oligonucleotide
  Sense strand starting at position 1450 of SEQ ID NO: 1888107
guacgauugcgagaaccau

SEQ ID NO: 2511247 - RNA, 19 nt, Artificial Sequence
  Description of Artificial Sequence: Synthetic oligonucleotide
  Antisense strand to SEQ ID NO: 2511246
augguucucgcaaucguac

SEQ ID NO: 2511248 - RNA, 19 nt, Artificial Sequence
  Description of Artificial Sequence: Synthetic oligonucleotide
  Sense strand starting at position 2084 of SEQ ID NO: 1888107
aggauuuagucacgagacc

SEQ ID NO: 2511249 - RNA, 19 nt, Artificial Sequence
  Description of Artificial Sequence: Synthetic oligonucleotide
  Antisense strand to SEQ ID NO: 2511248
ggucucgugacuaaauccu

SEQ ID NO: 2511250 - RNA, 19 nt, Artificial Sequence
  Description of Artificial Sequence: Synthetic oligonucleotide
  Sense strand starting at position 2210 of SEQ ID NO: 1888107
cuccuauggccuugaucca

SEQ ID NO: 2511251 - RNA, 19 nt, Artificial Sequence
  Description of Artificial Sequence: Synthetic oligonucleotide
  Antisense strand to SEQ ID NO: 2511250
uggaucaaggccauaggag

SEQ ID NO: 2511252 - RNA, 19 nt, Artificial Sequence
  Description of Artificial Sequence: Synthetic oligonucleotide
  Sense strand starting at position 2211 of SEQ ID NO: 1888107
uccuauggccuugauccau

SEQ ID NO: 2511253 - RNA, 19 nt, Artificial Sequence
  Description of Artificial Sequence: Synthetic oligonucleotide
  Antisense strand to SEQ ID NO: 2511252
auggaucaaggccauagga

SEQ ID NO: 2511254 - RNA, 19 nt, Artificial Sequence
  Description of Artificial Sequence: Synthetic oligonucleotide
  Sense strand starting at position 2318 of SEQ ID NO: 1888107
cauugagagucuuuaggcu

SEQ ID NO: 2511255 - RNA, 19 nt, Artificial Sequence
  Description of Artificial Sequence: Synthetic oligonucleotide
  Antisense strand to SEQ ID NO: 2511254
agccuaaagacucucaaug

SEQ ID NO: 2511256 - RNA, 19 nt, Artificial Sequence
  Description of Artificial Sequence: Synthetic oligonucleotide
  Sense strand starting at position 2441 of SEQ ID NO: 1888107
gucugagaccuuggacuca

SEQ ID NO: 2511257 - RNA, 19 nt, Artificial Sequence
  Description of Artificial Sequence: Synthetic oligonucleotide
  Antisense strand to SEQ ID NO: 2511256
ugaguccaaggucucagac

SEQ ID NO: 2511258 - RNA, 19 nt, Artificial Sequence
  Description of Artificial Sequence: Synthetic oligonucleotide
  Sense strand starting at position 2474 of SEQ ID NO: 1888107
cucugaaccucagugaaau

SEQ ID NO: 2511259 - RNA, 19 nt, Artificial Sequence
  Description of Artificial Sequence: Synthetic oligonucleotide
  Antisense strand to SEQ ID NO: 2511258
auuucacugagguucagag

SEQ ID NO: 2511260 - RNA, 19 nt, Artificial Sequence
  Description of Artificial Sequence: Synthetic oligonucleotide
  Sense strand starting at position 2475 of SEQ ID NO: 1888107
ucugaaccucagugaaaug

SEQ ID NO: 2511261 - RNA, 19 nt, Artificial Sequence
  Description of Artificial Sequence: Synthetic oligonucleotide
  Antisense strand to SEQ ID NO: 2511260
cauuucacugagguucaga

SEQ ID NO: 2511262 - RNA, 19 nt, Artificial Sequence
  Description of Artificial Sequence: Synthetic oligonucleotide
  Sense strand starting at position 2503 of SEQ ID NO: 1888107
auaaaugacuuccauagag

SEQ ID NO: 2511263 - RNA, 19 nt, Artificial Sequence
  Description of Artificial Sequence: Synthetic oligonucleotide
  Antisense strand to SEQ ID NO: 2511262
cucuauggaagucauuuau

SEQ ID NO: 2511264 - RNA, 19 nt, Artificial Sequence
  Description of Artificial Sequence: Synthetic oligonucleotide
  Sense strand starting at position 2564 of SEQ ID NO: 1888107
aggugaaaguucuccaaau

SEQ ID NO: 2511265 - RNA, 19 nt, Artificial Sequence
  Description of Artificial Sequence: Synthetic oligonucleotide
  Antisense strand to SEQ ID NO: 2511264
auuuggagaacuuucaccu

SEQ ID NO: 2511266 - RNA, 19 nt, Artificial Sequence
  Description of Artificial Sequence: Synthetic oligonucleotide
  Sense strand starting at position 2565 of SEQ ID NO: 1888107
ggugaaaguucuccaaaug

SEQ ID NO: 2511267 - RNA, 19 nt, Artificial Sequence
  Description of Artificial Sequence: Synthetic oligonucleotide
  Antisense strand to SEQ ID NO: 2511266
cauuuggagaacuuucacc

SEQ ID NO: 2511268 - RNA, 19 nt, Artificial Sequence
  Description of Artificial Sequence: Synthetic oligonucleotide
  Sense strand starting at position 2574 of SEQ ID NO: 1888107
ucuccaaaugauugugugu

SEQ ID NO: 2511269 - RNA, 19 nt, Artificial Sequence
  Description of Artificial Sequence: Synthetic oligonucleotide
  Antisense strand to SEQ ID NO: 2511268
acacacaaucauuuggaga

SEQ ID NO: 2511270 - RNA, 19 nt, Artificial Sequence
  Description of Artificial Sequence: Synthetic oligonucleotide
  Sense strand starting at position 2944 of SEQ ID NO: 1888107
uguagcugaauuuguguaa

SEQ ID NO: 2511271 - RNA, 19 nt, Artificial Sequence
  Description of Artificial Sequence: Synthetic oligonucleotide
  Antisense strand to SEQ ID NO: 2511270
uuacacaaauucagcuaca

SEQ ID NO: 2511272 - RNA, 19 nt, Artificial Sequence
  Description of Artificial Sequence: Synthetic oligonucleotide
  Sense strand starting at position 2947 of SEQ ID NO: 1888107
agcugaauuuguguaagua

SEQ ID NO: 2511273 - RNA, 19 nt, Artificial Sequence
  Description of Artificial Sequence: Synthetic oligonucleotide
  Antisense strand to SEQ ID NO: 2511272
uacuuacacaaauucagcu

SEQ ID NO: 2511274 - RNA, 19 nt, Artificial Sequence
  Description of Artificial Sequence: Synthetic oligonucleotide
  Sense strand starting at position 3416 of SEQ ID NO: 1888107
ggaagauucuaugaacagg

SEQ ID NO: 2511275 - RNA, 19 nt, Artificial Sequence
  Description of Artificial Sequence: Synthetic oligonucleotide
  Antisense strand to SEQ ID NO: 2511274
ccuguucauagaaucuucc

SEQ ID NO: 2511276 - RNA, 19 nt, Artificial Sequence
  Description of Artificial Sequence: Synthetic oligonucleotide
  Sense strand starting at position 3468 of SEQ ID NO: 1888107
gucuucucaccaggagcaa

SEQ ID NO: 2511277 - RNA, 19 nt, Artificial Sequence
  Description of Artificial Sequence: Synthetic oligonucleotide
  Antisense strand to SEQ ID NO: 2511276
uugcuccuggugagaagac

SEQ ID NO: 2511278 - RNA, 19 nt, Artificial Sequence
  Description of Artificial Sequence: Synthetic oligonucleotide
  Sense strand starting at position 3469 of SEQ ID NO: 1888107
ucuucucaccaggagcaau

SEQ ID NO: 2511279 - RNA, 19 nt, Artificial Sequence
  Description of Artificial Sequence: Synthetic oligonucleotide
  Antisense strand to SEQ ID NO: 2511278
auugcuccuggugagaaga

SEQ ID NO: 2511280 - RNA, 19 nt, Artificial Sequence
  Description of Artificial Sequence: Synthetic oligonucleotide
  Sense strand starting at position 3480 of SEQ ID NO: 1888107
ggagcaauaucccuaggaa

SEQ ID NO: 2511281 - RNA, 19 nt, Artificial Sequence
  Description of Artificial Sequence: Synthetic oligonucleotide
  Antisense strand to SEQ ID NO: 2511280
uuccuagggauauugcucc

SEQ ID NO: 2511282 - RNA, 19 nt, Artificial Sequence
  Description of Artificial Sequence: Synthetic oligonucleotide
  Sense strand starting at position 3483 of SEQ ID NO: 1888107
gcaauaucccuaggaaacc

SEQ ID NO: 2511283 - RNA, 19 nt, Artificial Sequence
  Description of Artificial Sequence: Synthetic oligonucleotide
  Antisense strand to SEQ ID NO: 2511282
gguuuccuagggauauugc

SEQ ID NO: 2511284 - RNA, 19 nt, Artificial Sequence
  Description of Artificial Sequence: Synthetic oligonucleotide
  Sense strand starting at position 286 of SEQ ID NO: 1888108
augauaucaccauaugugu

SEQ ID NO: 2511285 - RNA, 19 nt, Artificial Sequence
  Description of Artificial Sequence: Synthetic oligonucleotide
  Antisense strand to SEQ ID NO: 2511284
acacauauggugauaucau

SEQ ID NO: 2511286 - RNA, 19 nt, Artificial Sequence
  Description of Artificial Sequence: Synthetic oligonucleotide
  Sense strand starting at position 292 of SEQ ID NO: 1888108
ucaccauauguguaggaug

SEQ ID NO: 2511287 - RNA, 19 nt, Artificial Sequence
  Description of Artificial Sequence: Synthetic oligonucleotide
  Antisense strand to SEQ ID NO: 2511286
cauccuacacauaugguga

SEQ ID NO: 2511288 - RNA, 19 nt, Artificial Sequence
  Description of Artificial Sequence: Synthetic oligonucleotide
  Sense strand starting at position 358 of SEQ ID NO: 1888108
uuguuuacaaagugaggau

SEQ ID NO: 2511289 - RNA, 19 nt, Artificial Sequence
  Description of Artificial Sequence: Synthetic oligonucleotide
  Antisense strand to SEQ ID NO: 2511288
auccucacuuuguaaacaa

SEQ ID NO: 2511290 - RNA, 19 nt, Artificial Sequence
  Description of Artificial Sequence: Synthetic oligonucleotide
  Sense strand starting at position 439 of SEQ ID NO: 1888108
acagaaaugugguccauca

SEQ ID NO: 2511291 - RNA, 19 nt, Artificial Sequence
  Description of Artificial Sequence: Synthetic oligonucleotide
  Antisense strand to SEQ ID NO: 2511290
ugauggaccacauuucugu

SEQ ID NO: 2511292 - RNA, 19 nt, Artificial Sequence
  Description of Artificial Sequence: Synthetic oligonucleotide
  Sense strand starting at position 473 of SEQ ID NO: 1888108
ucuggaagugcucaacaca

SEQ ID NO: 2511293 - RNA, 19 nt, Artificial Sequence
  Description of Artificial Sequence: Synthetic oligonucleotide
  Antisense strand to SEQ ID NO: 2511292
uguguugagcacuuccaga

SEQ ID NO: 2511294 - RNA, 19 nt, Artificial Sequence
  Description of Artificial Sequence: Synthetic oligonucleotide
  Sense strand starting at position 646 of SEQ ID NO: 1888108
gguuguuugcuuccgggua

SEQ ID NO: 2511295 - RNA, 19 nt, Artificial Sequence
  Description of Artificial Sequence: Synthetic oligonucleotide
  Antisense strand to SEQ ID NO: 2511294
uacccggaagcaaacaacc

SEQ ID NO: 2511296 - RNA, 19 nt, Artificial Sequence
  Description of Artificial Sequence: Synthetic oligonucleotide
  Sense strand starting at position 674 of SEQ ID NO: 1888108
uuacauguuguuuguggaa

SEQ ID NO: 2511297 - RNA, 19 nt, Artificial Sequence
  Description of Artificial Sequence: Synthetic oligonucleotide
  Antisense strand to SEQ ID NO: 2511296
uuccacaaacaacauguaa

SEQ ID NO: 2511298 - RNA, 19 nt, Artificial Sequence
  Description of Artificial Sequence: Synthetic oligonucleotide
  Sense strand starting at position 788 of SEQ ID NO: 1888108
uggucuucccuggacugau

SEQ ID NO: 2511299 - RNA, 19 nt, Artificial Sequence
  Description of Artificial Sequence: Synthetic oligonucleotide
  Antisense strand to SEQ ID NO: 2511298
aucaguccagggaagacca

SEQ ID NO: 2511300 - RNA, 19 nt, Artificial Sequence
  Description of Artificial Sequence: Synthetic oligonucleotide
  Sense strand starting at position 867 of SEQ ID NO: 1888108
ggcauucccuucuuagaca

SEQ ID NO: 2511301 - RNA, 19 nt, Artificial Sequence
  Description of Artificial Sequence: Synthetic oligonucleotide
  Antisense strand to SEQ ID NO: 2511300
ugucuaagaagggaaugcc

SEQ ID NO: 2511302 - RNA, 19 nt, Artificial Sequence
  Description of Artificial Sequence: Synthetic oligonucleotide
  Sense strand starting at position 909 of SEQ ID NO: 1888108
aagagcaagucuuuggaga

SEQ ID NO: 2511303 - RNA, 19 nt, Artificial Sequence
  Description of Artificial Sequence: Synthetic oligonucleotide
  Antisense strand to SEQ ID NO: 2511302
ucuccaaagacuugcucuu

SEQ ID NO: 2511304 - RNA, 19 nt, Artificial Sequence
  Description of Artificial Sequence: Synthetic oligonucleotide
  Sense strand starting at position 910 of SEQ ID NO: 1888108
agagcaagucuuuggagac

SEQ ID NO: 2511305 - RNA, 19 nt, Artificial Sequence
  Description of Artificial Sequence: Synthetic oligonucleotide
  Antisense strand to SEQ ID NO: 2511304
gucuccaaagacuugcucu

SEQ ID NO: 2511306 - RNA, 19 nt, Artificial Sequence
  Description of Artificial Sequence: Synthetic oligonucleotide
  Sense strand starting at position 985 of SEQ ID NO: 1888108
augugucuccugcauucua

SEQ ID NO: 2511307 - RNA, 19 nt, Artificial Sequence
  Description of Artificial Sequence: Synthetic oligonucleotide
  Antisense strand to SEQ ID NO: 2511306
uagaaugcaggagacacau

SEQ ID NO: 2511308 - RNA, 19 nt, Artificial Sequence
  Description of Artificial Sequence: Synthetic oligonucleotide
  Sense strand starting at position 1535 of SEQ ID NO: 1888108
uguaaacacccgugaaauu

SEQ ID NO: 2511309 - RNA, 19 nt, Artificial Sequence
  Description of Artificial Sequence: Synthetic oligonucleotide
  Antisense strand to SEQ ID NO: 2511308
aauuucacggguguuuaca

SEQ ID NO: 2511310 - RNA, 19 nt, Artificial Sequence
  Description of Artificial Sequence: Synthetic oligonucleotide
  Sense strand starting at position 1536 of SEQ ID NO: 1888108
guaaacacccgugaaauua

SEQ ID NO: 2511311 - RNA, 19 nt, Artificial Sequence
  Description of Artificial Sequence: Synthetic oligonucleotide
  Antisense strand to SEQ ID NO: 2511310
uaauuucacggguguuuac

SEQ ID NO: 2511312 - RNA, 19 nt, Artificial Sequence
  Description of Artificial Sequence: Synthetic oligonucleotide
  Sense strand starting at position 1625 of SEQ ID NO: 1888108
cggagagugagauggcuuu

SEQ ID NO: 2511313 - RNA, 19 nt, Artificial Sequence
  Description of Artificial Sequence: Synthetic oligonucleotide
  Antisense strand to SEQ ID NO: 2511312
aaagccaucucacucuccg

SEQ ID NO: 2511314 - RNA, 19 nt, Artificial Sequence
  Description of Artificial Sequence: Synthetic oligonucleotide
  Sense strand starting at position 1856 of SEQ ID NO: 1888108
gugagauacuguuucccag

SEQ ID NO: 2511315 - RNA, 19 nt, Artificial Sequence
  Description of Artificial Sequence: Synthetic oligonucleotide
  Antisense strand to SEQ ID NO: 2511314
cugggaaacaguaucucac

SEQ ID NO: 2511316 - RNA, 19 nt, Artificial Sequence
  Description of Artificial Sequence: Synthetic oligonucleotide
  Sense strand starting at position 2113 of SEQ ID NO: 1888108
gggagaacugggcauguuu

SEQ ID NO: 2511317 - RNA, 19 nt, Artificial Sequence
  Description of Artificial Sequence: Synthetic oligonucleotide
  Antisense strand to SEQ ID NO: 2511316
aaacaugcccaguucuccc

SEQ ID NO: 2511318 - RNA, 19 nt, Artificial Sequence
  Description of Artificial Sequence: Synthetic oligonucleotide
  Sense strand starting at position 2115 of SEQ ID NO: 1888108
gagaacugggcauguuuau

SEQ ID NO: 2511319 - RNA, 19 nt, Artificial Sequence
  Description of Artificial Sequence: Synthetic oligonucleotide
  Antisense strand to SEQ ID NO: 2511318
auaaacaugcccaguucuc

SEQ ID NO: 2511320 - RNA, 19 nt, Artificial Sequence
  Description of Artificial Sequence: Synthetic oligonucleotide
  Sense strand starting at position 2204 of SEQ ID NO: 1888108
cugucuuagccucacuuau

SEQ ID NO: 2511321 - RNA, 19 nt, Artificial Sequence
  Description of Artificial Sequence: Synthetic oligonucleotide
  Antisense strand to SEQ ID NO: 2511320
auaagugaggcuaagacag

SEQ ID NO: 2511322 - RNA, 19 nt, Artificial Sequence
  Description of Artificial Sequence: Synthetic oligonucleotide
  Sense strand starting at position 2218 of SEQ ID NO: 1888108
cuuauauggcuccagcuau

SEQ ID NO: 2511323 - RNA, 19 nt, Artificial Sequence
  Description of Artificial Sequence: Synthetic oligonucleotide
  Antisense strand to SEQ ID NO: 2511322
auagcuggagccauauaag

SEQ ID NO: 2511324 - RNA, 19 nt, Artificial Sequence
  Description of Artificial Sequence: Synthetic oligonucleotide
  Sense strand starting at position 2228 of SEQ ID NO: 1888108
uccagcuaucucuggguca

SEQ ID NO: 2511325 - RNA, 19 nt, Artificial Sequence
  Description of Artificial Sequence: Synthetic oligonucleotide
  Antisense strand to SEQ ID NO: 2511324
ugacccagagauagcugga

SEQ ID NO: 2511326 - RNA, 19 nt, Artificial Sequence
  Description of Artificial Sequence: Synthetic oligonucleotide
  Sense strand starting at position 2230 of SEQ ID NO: 1888108
cagcuaucucugggucaag

SEQ ID NO: 2511327 - RNA, 19 nt, Artificial Sequence
  Description of Artificial Sequence: Synthetic oligonucleotide
  Antisense strand to SEQ ID NO: 2511326
cuugacccagagauagcug

SEQ ID NO: 2511328 - RNA, 19 nt, Artificial Sequence
  Description of Artificial Sequence: Synthetic oligonucleotide
  Sense strand starting at position 2231 of SEQ ID NO: 1888108
agcuaucucugggucaagu

SEQ ID NO: 2511329 - RNA, 19 nt, Artificial Sequence
  Description of Artificial Sequence: Synthetic oligonucleotide
  Antisense strand to SEQ ID NO: 2511328
acuugacccagagauagcu

SEQ ID NO: 2511330 - RNA, 19 nt, Artificial Sequence
  Description of Artificial Sequence: Synthetic oligonucleotide
  Sense strand starting at position 2233 of SEQ ID NO: 1888108
cuaucucugggucaaguaa

SEQ ID NO: 2511331 - RNA, 19 nt, Artificial Sequence
  Description of Artificial Sequence: Synthetic oligonucleotide
  Antisense strand to SEQ ID NO: 2511330
uuacuugacccagagauag

SEQ ID NO: 2511332 - RNA, 19 nt, Artificial Sequence
  Description of Artificial Sequence: Synthetic oligonucleotide
  Sense strand starting at position 2404 of SEQ ID NO: 1888108
gggacauucggugaugucu

SEQ ID NO: 2511333 - RNA, 19 nt, Artificial Sequence
  Description of Artificial Sequence: Synthetic oligonucleotide
  Antisense strand to SEQ ID NO: 2511332
agacaucaccgaauguccc

SEQ ID NO: 2511334 - RNA, 19 nt, Artificial Sequence
  Description of Artificial Sequence: Synthetic oligonucleotide
  Sense strand starting at position 2412 of SEQ ID NO: 1888108
cggugaugucuggagacac

SEQ ID NO: 2511335 - RNA, 19 nt, Artificial Sequence
  Description of Artificial Sequence: Synthetic oligonucleotide
  Antisense strand to SEQ ID NO: 2511334
gugucuccagacaucaccg

SEQ ID NO: 2511336 - RNA, 19 nt, Artificial Sequence
  Description of Artificial Sequence: Synthetic oligonucleotide
  Sense strand starting at position 2426 of SEQ ID NO: 1888108
gacacuuuagguugucaug

SEQ ID NO: 2511337 - RNA, 19 nt, Artificial Sequence
  Description of Artificial Sequence: Synthetic oligonucleotide
  Antisense strand to SEQ ID NO: 2511336
caugacaaccuaaaguguc

SEQ ID NO: 2511338 - RNA, 19 nt, Artificial Sequence
  Description of Artificial Sequence: Synthetic oligonucleotide
  Sense strand starting at position 2435 of SEQ ID NO: 1888108
gguugucaugacugguaga

SEQ ID NO: 2511339 - RNA, 19 nt, Artificial Sequence
  Description of Artificial Sequence: Synthetic oligonucleotide
  Antisense strand to SEQ ID NO: 2511338
ucuaccagucaugacaacc

SEQ ID NO: 2511340 - RNA, 19 nt, Artificial Sequence
  Description of Artificial Sequence: Synthetic oligonucleotide
  Sense strand starting at position 2436 of SEQ ID NO: 1888108
guugucaugacugguagag

SEQ ID NO: 2511341 - RNA, 19 nt, Artificial Sequence
  Description of Artificial Sequence: Synthetic oligonucleotide
  Antisense strand to SEQ ID NO: 2511340
cucuaccagucaugacaac

SEQ ID NO: 2511342 - RNA, 19 nt, Artificial Sequence
  Description of Artificial Sequence: Synthetic oligonucleotide
  Sense strand starting at position 2542 of SEQ ID NO: 1888108
uaucaauagcacggagacu

SEQ ID NO: 2511343 - RNA, 19 nt, Artificial Sequence
  Description of Artificial Sequence: Synthetic oligonucleotide
  Antisense strand to SEQ ID NO: 2511342
agucuccgugcuauugaua

SEQ ID NO: 2511344 - RNA, 19 nt, Artificial Sequence
  Description of Artificial Sequence: Synthetic oligonucleotide
  Sense strand starting at position 2594 of SEQ ID NO: 1888108
acaguucauggcugggauu

SEQ ID NO: 2511345 - RNA, 19 nt, Artificial Sequence
  Description of Artificial Sequence: Synthetic oligonucleotide
  Antisense strand to SEQ ID NO: 2511344
aaucccagccaugaacugu

SEQ ID NO: 2511346 - RNA, 19 nt, Artificial Sequence
  Description of Artificial Sequence: Synthetic oligonucleotide
  Sense strand starting at position 2791 of SEQ ID NO: 1888108
ggcaaagucucuuugucag

SEQ ID NO: 2511347 - RNA, 19 nt, Artificial Sequence
  Description of Artificial Sequence: Synthetic oligonucleotide
  Antisense strand to SEQ ID NO: 2511346
cugacaaagagacuuugcc

SEQ ID NO: 2511348 - RNA, 19 nt, Artificial Sequence
  Description of Artificial Sequence: Synthetic oligonucleotide
  Sense strand starting at position 3222 of SEQ ID NO: 1888108
acagaagguuaggcucaau

SEQ ID NO: 2511349 - RNA, 19 nt, Artificial Sequence
  Description of Artificial Sequence: Synthetic oligonucleotide
  Antisense strand to SEQ ID NO: 2511348
auugagccuaaccuucugu

SEQ ID NO: 2511350 - RNA, 19 nt, Artificial Sequence
  Description of Artificial Sequence: Synthetic oligonucleotide
  Sense strand starting at position 3254 of SEQ ID NO: 1888108
ccaggaaacccuggugagu

SEQ ID NO: 2511351 - RNA, 19 nt, Artificial Sequence
  Description of Artificial Sequence: Synthetic oligonucleotide
  Antisense strand to SEQ ID NO: 2511350
acucaccaggguuuccugg

SEQ ID NO: 2511352 - RNA, 19 nt, Artificial Sequence
  Description of Artificial Sequence: Synthetic oligonucleotide
  Sense strand starting at position 3268 of SEQ ID NO: 1888108
ugaguuucccuguaacaaa

SEQ ID NO: 2511353 - RNA, 19 nt, Artificial Sequence
  Description of Artificial Sequence: Synthetic oligonucleotide
  Antisense strand to SEQ ID NO: 2511352
uuuguuacagggaaacuca

SEQ ID NO: 2511354 - RNA, 19 nt, Artificial Sequence
  Description of Artificial Sequence: Synthetic oligonucleotide
  Sense strand starting at position 3465 of SEQ ID NO: 1888108
caguguuaccuagggcaua

SEQ ID NO: 2511355 - RNA, 19 nt, Artificial Sequence
  Description of Artificial Sequence: Synthetic oligonucleotide
  Antisense strand to SEQ ID NO: 2511354
uaugcccuagguaacacug

SEQ ID NO: 2511356 - RNA, 19 nt, Artificial Sequence
  Description of Artificial Sequence: Synthetic oligonucleotide
  Sense strand starting at position 3664 of SEQ ID NO: 1888108
auaucauagggaugcuuga

SEQ ID NO: 2511357 - RNA, 19 nt, Artificial Sequence
  Description of Artificial Sequence: Synthetic oligonucleotide
  Antisense strand to SEQ ID NO: 2511356
ucaagcaucccuaugauau

SEQ ID NO: 2511358 - RNA, 19 nt, Artificial Sequence
  Description of Artificial Sequence: Synthetic oligonucleotide
  Sense strand starting at position 3749 of SEQ ID NO: 1888108
aaaggucagucuguuaaac

SEQ ID NO: 2511359 - RNA, 19 nt, Artificial Sequence
  Description of Artificial Sequence: Synthetic oligonucleotide
  Antisense strand to SEQ ID NO: 2511358
guuuaacagacugaccuuu

SEQ ID NO: 2511360 - RNA, 19 nt, Artificial Sequence
  Description of Artificial Sequence: Synthetic oligonucleotide
  Sense strand starting at position 3757 of SEQ ID NO: 1888108
gucuguuaaacuggaggga

SEQ ID NO: 2511361 - RNA, 19 nt, Artificial Sequence
  Description of Artificial Sequence: Synthetic oligonucleotide
  Antisense strand to SEQ ID NO: 2511360
ucccuccaguuuaacagac

SEQ ID NO: 2511362 - RNA, 19 nt, Artificial Sequence
  Description of Artificial Sequence: Synthetic oligonucleotide
  Sense strand starting at position 3772 of SEQ ID NO: 1888108
gggaaauauuaccaucagg

SEQ ID NO: 2511363 - RNA, 19 nt, Artificial Sequence
  Description of Artificial Sequence: Synthetic oligonucleotide
  Antisense strand to SEQ ID NO: 2511362
ccugaugguaauauuuccc

SEQ ID NO: 2511364 - RNA, 19 nt, Artificial Sequence
  Description of Artificial Sequence: Synthetic oligonucleotide
  Sense strand starting at position 39 of SEQ ID NO: 1888109
caguaauccuaagugagga

SEQ ID NO: 2511365 - RNA, 19 nt, Artificial Sequence
  Description of Artificial Sequence: Synthetic oligonucleotide
  Antisense strand to SEQ ID NO: 2511364
uccucacuuaggauuacug

SEQ ID NO: 2511366 - RNA, 19 nt, Artificial Sequence
  Description of Artificial Sequence: Synthetic oligonucleotide
  Sense strand starting at position 40 of SEQ ID NO: 1888109
aguaauccuaagugaggaa

SEQ ID NO: 2511367 - RNA, 19 nt, Artificial Sequence
  Description of Artificial Sequence: Synthetic oligonucleotide
  Antisense strand to SEQ ID NO: 2511366
uuccucacuuaggauuacu

SEQ ID NO: 2511368 - RNA, 19 nt, Artificial Sequence
  Description of Artificial Sequence: Synthetic oligonucleotide
  Sense strand starting at position 534 of SEQ ID NO: 1888109
augaauugugcugaggagu

SEQ ID NO: 2511369 - RNA, 19 nt, Artificial Sequence
  Description of Artificial Sequence: Synthetic oligonucleotide
  Antisense strand to SEQ ID NO: 2511368
acuccucagcacaauucau

SEQ ID NO: 2511370 - RNA, 19 nt, Artificial Sequence
  Description of Artificial Sequence: Synthetic oligonucleotide
  Sense strand starting at position 537 of SEQ ID NO: 1888109
aauugugcugaggaguaua

SEQ ID NO: 2511371 - RNA, 19 nt, Artificial Sequence
  Description of Artificial Sequence: Synthetic oligonucleotide
  Antisense strand to SEQ ID NO: 2511370
uauacuccucagcacaauu

SEQ ID NO: 2511372 - RNA, 19 nt, Artificial Sequence
  Description of Artificial Sequence: Synthetic oligonucleotide
  Sense strand starting at position 540 of SEQ ID NO: 1888109
ugugcugaggaguauaauc

SEQ ID NO: 2511373 - RNA, 19 nt, Artificial Sequence
  Description of Artificial Sequence: Synthetic oligonucleotide
  Antisense strand to SEQ ID NO: 2511372
gauuauacuccucagcaca

SEQ ID NO: 2511374 - RNA, 19 nt, Artificial Sequence
  Description of Artificial Sequence: Synthetic oligonucleotide
  Sense strand starting at position 561 of SEQ ID NO: 1888109
cacgcagugcgaguucuua

SEQ ID NO: 2511375 - RNA, 19 nt, Artificial Sequence
  Description of Artificial Sequence: Synthetic oligonucleotide
  Antisense strand to SEQ ID NO: 2511374
uaagaacucgcacugcgug

SEQ ID NO: 2511376 - RNA, 19 nt, Artificial Sequence
  Description of Artificial Sequence: Synthetic oligonucleotide
  Sense strand starting at position 563 of SEQ ID NO: 1888109
cgcagugcgaguucuuaua

SEQ ID NO: 2511377 - RNA, 19 nt, Artificial Sequence
  Description of Artificial Sequence: Synthetic oligonucleotide
  Antisense strand to SEQ ID NO: 2511376
uauaagaacucgcacugcg

SEQ ID NO: 2511378 - RNA, 19 nt, Artificial Sequence
  Description of Artificial Sequence: Synthetic oligonucleotide
  Sense strand starting at position 599 of SEQ ID NO: 1888109
cccuguguuguggaagaac

SEQ ID NO: 2511379 - RNA, 19 nt, Artificial Sequence
  Description of Artificial Sequence: Synthetic oligonucleotide
  Antisense strand to SEQ ID NO: 2511378
guucuuccacaacacaggg

SEQ ID NO: 2511380 - RNA, 19 nt, Artificial Sequence
  Description of Artificial Sequence: Synthetic oligonucleotide
  Sense strand starting at position 602 of SEQ ID NO: 1888109
uguguuguggaagaacaga

SEQ ID NO: 2511381 - RNA, 19 nt, Artificial Sequence
  Description of Artificial Sequence: Synthetic oligonucleotide
  Antisense strand to SEQ ID NO: 2511380
ucuguucuuccacaacaca

SEQ ID NO: 2511382 - RNA, 19 nt, Artificial Sequence
  Description of Artificial Sequence: Synthetic oligonucleotide
  Sense strand starting at position 711 of SEQ ID NO: 1888109
uugguuuagguuugaugaa

SEQ ID NO: 2511383 - RNA, 19 nt, Artificial Sequence
  Description of Artificial Sequence: Synthetic oligonucleotide
  Antisense strand to SEQ ID NO: 2511382
uucaucaaaccuaaaccaa

SEQ ID NO: 2511384 - RNA, 19 nt, Artificial Sequence
  Description of Artificial Sequence: Synthetic oligonucleotide
  Sense strand starting at position 822 of SEQ ID NO: 1888109
gggagaguggcuuggagaa

SEQ ID NO: 2511385 - RNA, 19 nt, Artificial Sequence
  Description of Artificial Sequence: Synthetic oligonucleotide
  Antisense strand to SEQ ID NO: 2511384
uucuccaagccacucuccc

SEQ ID NO: 2511386 - RNA, 19 nt, Artificial Sequence
  Description of Artificial Sequence: Synthetic oligonucleotide
  Sense strand starting at position 904 of SEQ ID NO: 1888109
guccuagugaaccauguua

SEQ ID NO: 2511387 - RNA, 19 nt, Artificial Sequence
  Description of Artificial Sequence: Synthetic oligonucleotide
  Antisense strand to SEQ ID NO: 2511386
uaacaugguucacuaggac

SEQ ID NO: 2511388 - RNA, 19 nt, Artificial Sequence
  Description of Artificial Sequence: Synthetic oligonucleotide
  Sense strand starting at position 915 of SEQ ID NO: 1888109
ccauguuaccucugaucca

SEQ ID NO: 2511389 - RNA, 19 nt, Artificial Sequence
  Description of Artificial Sequence: Synthetic oligonucleotide
  Antisense strand to SEQ ID NO: 2511388
uggaucagagguaacaugg

SEQ ID NO: 2511390 - RNA, 19 nt, Artificial Sequence
  Description of Artificial Sequence: Synthetic oligonucleotide
  Sense strand starting at position 918 of SEQ ID NO: 1888109
uguuaccucugauccagau

SEQ ID NO: 2511391 - RNA, 19 nt, Artificial Sequence
  Description of Artificial Sequence: Synthetic oligonucleotide
  Antisense strand to SEQ ID NO: 2511390
aucuggaucagagguaaca

SEQ ID NO: 2511392 - RNA, 19 nt, Artificial Sequence
  Description of Artificial Sequence: Synthetic oligonucleotide
  Sense strand starting at position 1460 of SEQ ID NO: 1888109
ccuugugagaaaugguuua

SEQ ID NO: 2511393 - RNA, 19 nt, Artificial Sequence
  Description of Artificial Sequence: Synthetic oligonucleotide
  Antisense strand to SEQ ID NO: 2511392
uaaaccauuucucacaagg

SEQ ID NO: 2511394 - RNA, 19 nt, Artificial Sequence
  Description of Artificial Sequence: Synthetic oligonucleotide
  Sense strand starting at position 1465 of SEQ ID NO: 1888109
ugagaaaugguuuaacguu

SEQ ID NO: 2511395 - RNA, 19 nt, Artificial Sequence
  Description of Artificial Sequence: Synthetic oligonucleotide
  Antisense strand to SEQ ID NO: 2511394
aacguuaaaccauuucuca

SEQ ID NO: 2511396 - RNA, 19 nt, Artificial Sequence
  Description of Artificial Sequence: Synthetic oligonucleotide
  Sense strand starting at position 1484 of SEQ ID NO: 1888109
gugauaccuugcccaauuu

SEQ ID NO: 2511397 - RNA, 19 nt, Artificial Sequence
  Description of Artificial Sequence: Synthetic oligonucleotide
  Antisense strand to SEQ ID NO: 2511396
aaauugggcaagguaucac

SEQ ID NO: 2511398 - RNA, 19 nt, Artificial Sequence
  Description of Artificial Sequence: Synthetic oligonucleotide
  Sense strand starting at position 1657 of SEQ ID NO: 1888109
gcguucuuucucguucgga

SEQ ID NO: 2511399 - RNA, 19 nt, Artificial Sequence
  Description of Artificial Sequence: Synthetic oligonucleotide
  Antisense strand to SEQ ID NO: 2511398
uccgaacgagaaagaacgc

SEQ ID NO: 2511400 - RNA, 19 nt, Artificial Sequence
  Description of Artificial Sequence: Synthetic oligonucleotide
  Sense strand starting at position 1848 of SEQ ID NO: 1888109
gggugguaacguugaggaa

SEQ ID NO: 2511401 - RNA, 19 nt, Artificial Sequence
  Description of Artificial Sequence: Synthetic oligonucleotide
  Antisense strand to SEQ ID NO: 2511400
uuccucaacguuaccaccc

SEQ ID NO: 2511402 - RNA, 19 nt, Artificial Sequence
  Description of Artificial Sequence: Synthetic oligonucleotide
  Sense strand starting at position 1849 of SEQ ID NO: 1888109
ggugguaacguugaggaaa

SEQ ID NO: 2511403 - RNA, 19 nt, Artificial Sequence
  Description of Artificial Sequence: Synthetic oligonucleotide
  Antisense strand to SEQ ID NO: 2511402
uuuccucaacguuaccacc

SEQ ID NO: 2511404 - RNA, 19 nt, Artificial Sequence
  Description of Artificial Sequence: Synthetic oligonucleotide
  Sense strand starting at position 2431 of SEQ ID NO: 1888109
uuauaacauggugagcauu

SEQ ID NO: 2511405 - RNA, 19 nt, Artificial Sequence
  Description of Artificial Sequence: Synthetic oligonucleotide
  Antisense strand to SEQ ID NO: 2511404
aaugcucaccauguuauaa

SEQ ID NO: 2511406 - RNA, 19 nt, Artificial Sequence
  Description of Artificial Sequence: Synthetic oligonucleotide
  Sense strand starting at position 2484 of SEQ ID NO: 1888109
uuuaaugaccggcauaaua

SEQ ID NO: 2511407 - RNA, 19 nt, Artificial Sequence
  Description of Artificial Sequence: Synthetic oligonucleotide
  Antisense strand to SEQ ID NO: 2511406
uauuaugccggucauuaaa

SEQ ID NO: 2511408 - RNA, 19 nt, Artificial Sequence
  Description of Artificial Sequence: Synthetic oligonucleotide
  Sense strand starting at position 2500 of SEQ ID NO: 1888109
auaauccagugcuuggaua

SEQ ID NO: 2511409 - RNA, 19 nt, Artificial Sequence
  Description of Artificial Sequence: Synthetic oligonucleotide
  Antisense strand to SEQ ID NO: 2511408
uauccaagcacuggauuau

SEQ ID NO: 2511410 - RNA, 19 nt, Artificial Sequence
  Description of Artificial Sequence: Synthetic oligonucleotide
  Sense strand starting at position 2501 of SEQ ID NO: 1888109
uaauccagugcuuggauau

SEQ ID NO: 2511411 - RNA, 19 nt, Artificial Sequence
  Description of Artificial Sequence: Synthetic oligonucleotide
  Antisense strand to SEQ ID NO: 2511410
auauccaagcacuggauua

SEQ ID NO: 2511412 - RNA, 19 nt, Artificial Sequence
  Description of Artificial Sequence: Synthetic oligonucleotide
  Sense strand starting at position 2502 of SEQ ID NO: 1888109
aauccagugcuuggauaua

SEQ ID NO: 2511413 - RNA, 19 nt, Artificial Sequence
  Description of Artificial Sequence: Synthetic oligonucleotide
  Antisense strand to SEQ ID NO: 2511412
uauauccaagcacuggauu

SEQ ID NO: 2511414 - RNA, 19 nt, Artificial Sequence
  Description of Artificial Sequence: Synthetic oligonucleotide
  Sense strand starting at position 2536 of SEQ ID NO: 1888109
aucuccuuauaggugagau

SEQ ID NO: 2511415 - RNA, 19 nt, Artificial Sequence
  Description of Artificial Sequence: Synthetic oligonucleotide
  Antisense strand to SEQ ID NO: 2511414
aucucaccuauaaggagau

SEQ ID NO: 2511416 - RNA, 19 nt, Artificial Sequence
  Description of Artificial Sequence: Synthetic oligonucleotide
  Sense strand starting at position 2546 of SEQ ID NO: 1888109
aggugagauuguuuccaaa

SEQ ID NO: 2511417 - RNA, 19 nt, Artificial Sequence
  Description of Artificial Sequence: Synthetic oligonucleotide
  Antisense strand to SEQ ID NO: 2511416
uuuggaaacaaucucaccu

SEQ ID NO: 2511418 - RNA, 19 nt, Artificial Sequence
  Description of Artificial Sequence: Synthetic oligonucleotide
  Sense strand starting at position 2548 of SEQ ID NO: 1888109
gugagauuguuuccaaagu

SEQ ID NO: 2511419 - RNA, 19 nt, Artificial Sequence
  Description of Artificial Sequence: Synthetic oligonucleotide
  Antisense strand to SEQ ID NO: 2511418
acuuuggaaacaaucucac

SEQ ID NO: 2511420 - RNA, 19 nt, Artificial Sequence
  Description of Artificial Sequence: Synthetic oligonucleotide
  Sense strand starting at position 2637 of SEQ ID NO: 1888109
ugcagaguucuacagcaug

SEQ ID NO: 2511421 - RNA, 19 nt, Artificial Sequence
  Description of Artificial Sequence: Synthetic oligonucleotide
  Antisense strand to SEQ ID NO: 2511420
caugcuguagaacucugca

SEQ ID NO: 2511422 - RNA, 19 nt, Artificial Sequence
  Description of Artificial Sequence: Synthetic oligonucleotide
  Sense strand starting at position 2642 of SEQ ID NO: 1888109
aguucuacagcaugaaaca

SEQ ID NO: 2511423 - RNA, 19 nt, Artificial Sequence
  Description of Artificial Sequence: Synthetic oligonucleotide
  Antisense strand to SEQ ID NO: 2511422
uguuucaugcuguagaacu

SEQ ID NO: 2511424 - RNA, 19 nt, Artificial Sequence
  Description of Artificial Sequence: Synthetic oligonucleotide
  Sense strand starting at position 2677 of SEQ ID NO: 1888109
cagguugauguuuaucagu

SEQ ID NO: 2511425 - RNA, 19 nt, Artificial Sequence
  Description of Artificial Sequence: Synthetic oligonucleotide
  Antisense strand to SEQ ID NO: 2511424
acugauaaacaucaaccug

SEQ ID NO: 2511426 - RNA, 19 nt, Artificial Sequence
  Description of Artificial Sequence: Synthetic oligonucleotide
  Sense strand starting at position 2720 of SEQ ID NO: 1888109
uccauugucagugaaguau

SEQ ID NO: 2511427 - RNA, 19 nt, Artificial Sequence
  Description of Artificial Sequence: Synthetic oligonucleotide
  Antisense strand to SEQ ID NO: 2511426
auacuucacugacaaugga

SEQ ID NO: 2511428 - RNA, 19 nt, Artificial Sequence
  Description of Artificial Sequence: Synthetic oligonucleotide
  Sense strand starting at position 2817 of SEQ ID NO: 1888109
uucuuuaaacggugauaac

SEQ ID NO: 2511429 - RNA, 19 nt, Artificial Sequence
  Description of Artificial Sequence: Synthetic oligonucleotide
  Antisense strand to SEQ ID NO: 2511428
guuaucaccguuuaaagaa

SEQ ID NO: 2511430 - RNA, 19 nt, Artificial Sequence
  Description of Artificial Sequence: Synthetic oligonucleotide
  Sense strand starting at position 3021 of SEQ ID NO: 1888109
uggacaaacgugcauguua

SEQ ID NO: 2511431 - RNA, 19 nt, Artificial Sequence
  Description of Artificial Sequence: Synthetic oligonucleotide
  Antisense strand to SEQ ID NO: 2511430
uaacaugcacguuugucca

SEQ ID NO: 2511432 - RNA, 19 nt, Artificial Sequence
  Description of Artificial Sequence: Synthetic oligonucleotide
  Sense strand starting at position 3093 of SEQ ID NO: 1888109
guauuacauuuagacccua

SEQ ID NO: 2511433 - RNA, 19 nt, Artificial Sequence
  Description of Artificial Sequence: Synthetic oligonucleotide
  Antisense strand to SEQ ID NO: 2511432
uagggucuaaauguaauac

SEQ ID NO: 2511434 - RNA, 19 nt, Artificial Sequence
  Description of Artificial Sequence: Synthetic oligonucleotide
  Sense strand starting at position 3323 of SEQ ID NO: 1888109
uugaauauugcuuaucuag

SEQ ID NO: 2511435 - RNA, 19 nt, Artificial Sequence
  Description of Artificial Sequence: Synthetic oligonucleotide
  Antisense strand to SEQ ID NO: 2511434
cuagauaagcaauauucaa

SEQ ID NO: 2511436 - RNA, 19 nt, Artificial Sequence
  Description of Artificial Sequence: Synthetic oligonucleotide
  Sense strand starting at position 3473 of SEQ ID NO: 1888109
ccacaaagagucugugagu

SEQ ID NO: 2511437 - RNA, 19 nt, Artificial Sequence
  Description of Artificial Sequence: Synthetic oligonucleotide
  Antisense strand to SEQ ID NO: 2511436
acucacagacucuuugugg

SEQ ID NO: 2511438 - RNA, 19 nt, Artificial Sequence
  Description of Artificial Sequence: Synthetic oligonucleotide
  Sense strand starting at position 3558 of SEQ ID NO: 1888109
auaagcuagcauuauguua

SEQ ID NO: 2511439 - RNA, 19 nt, Artificial Sequence
  Description of Artificial Sequence: Synthetic oligonucleotide
  Antisense strand to SEQ ID NO: 2511438
uaacauaaugcuagcuuau

SEQ ID NO: 2511440 - RNA, 19 nt, Artificial Sequence
  Description of Artificial Sequence: Synthetic oligonucleotide
  Sense strand starting at position 3628 of SEQ ID NO: 1888109
gugcaauggcaugaucgaa

SEQ ID NO: 2511441 - RNA, 19 nt, Artificial Sequence
  Description of Artificial Sequence: Synthetic oligonucleotide
  Antisense strand to SEQ ID NO: 2511440
uucgaucaugccauugcac

SEQ ID NO: 2511442 - RNA, 19 nt, Artificial Sequence
  Description of Artificial Sequence: Synthetic oligonucleotide
  Sense strand starting at position 3915 of SEQ ID NO: 1888109
guauuauuagcagggaaag

SEQ ID NO: 2511443 - RNA, 19 nt, Artificial Sequence
  Description of Artificial Sequence: Synthetic oligonucleotide
  Antisense strand to SEQ ID NO: 2511442
cuuucccugcuaauaauac

SEQ ID NO: 2511444 - RNA, 19 nt, Artificial Sequence
  Description of Artificial Sequence: Synthetic oligonucleotide
  Sense strand starting at position 45 of SEQ ID NO: 1888110
auacaucccuaugugaaga

SEQ ID NO: 2511445 - RNA, 19 nt, Artificial Sequence
  Description of Artificial Sequence: Synthetic oligonucleotide
  Antisense strand to SEQ ID NO: 2511444
ucuucacauagggauguau

SEQ ID NO: 2511446 - RNA, 19 nt, Artificial Sequence
  Description of Artificial Sequence: Synthetic oligonucleotide
  Sense strand starting at position 109 of SEQ ID NO: 1888110
auuguaagaugucccaaac

SEQ ID NO: 2511447 - RNA, 19 nt, Artificial Sequence
  Description of Artificial Sequence: Synthetic oligonucleotide
  Antisense strand to SEQ ID NO: 2511446
guuugggacaucuuacaau

SEQ ID NO: 2511448 - RNA, 19 nt, Artificial Sequence
  Description of Artificial Sequence: Synthetic oligonucleotide
  Sense strand starting at position 128 of SEQ ID NO: 1888110
agaacagauugcucuauug

SEQ ID NO: 2511449 - RNA, 19 nt, Artificial Sequence
  Description of Artificial Sequence: Synthetic oligonucleotide
  Antisense strand to SEQ ID NO: 2511448
caauagagcaaucuguucu

SEQ ID NO: 2511450 - RNA, 19 nt, Artificial Sequence
  Description of Artificial Sequence: Synthetic oligonucleotide
  Sense strand starting at position 201 of SEQ ID NO: 1888110
auggcuaaguugucccaga

SEQ ID NO: 2511451 - RNA, 19 nt, Artificial Sequence
  Description of Artificial Sequence: Synthetic oligonucleotide
  Antisense strand to SEQ ID NO: 2511450
ucugggacaacuuagccau

SEQ ID NO: 2511452 - RNA, 19 nt, Artificial Sequence
  Description of Artificial Sequence: Synthetic oligonucleotide
  Sense strand starting at position 202 of SEQ ID NO: 1888110
uggcuaaguugucccagau

SEQ ID NO: 2511453 - RNA, 19 nt, Artificial Sequence
  Description of Artificial Sequence: Synthetic oligonucleotide
  Antisense strand to SEQ ID NO: 2511452
aucugggacaacuuagcca

SEQ ID NO: 2511454 - RNA, 19 nt, Artificial Sequence
  Description of Artificial Sequence: Synthetic oligonucleotide
  Sense strand starting at position 391 of SEQ ID NO: 1888110
uugggugccagucauacaa

SEQ ID NO: 2511455 - RNA, 19 nt, Artificial Sequence
  Description of Artificial Sequence: Synthetic oligonucleotide
  Antisense strand to SEQ ID NO: 2511454
uuguaugacuggcacccaa

SEQ ID NO: 2511456 - RNA, 19 nt, Artificial Sequence
  Description of Artificial Sequence: Synthetic oligonucleotide
  Sense strand starting at position 513 of SEQ ID NO: 1888110
ggguccugcuuugcaagaa

SEQ ID NO: 2511457 - RNA, 19 nt, Artificial Sequence
  Description of Artificial Sequence: Synthetic oligonucleotide
  Antisense strand to SEQ ID NO: 2511456
uucuugcaaagcaggaccc

SEQ ID NO: 2511458 - RNA, 19 nt, Artificial Sequence
  Description of Artificial Sequence: Synthetic oligonucleotide
  Sense strand starting at position 525 of SEQ ID NO: 1888110
gcaagaauuuauguugucu

SEQ ID NO: 2511459 - RNA, 19 nt, Artificial Sequence
  Description of Artificial Sequence: Synthetic oligonucleotide
  Antisense strand to SEQ ID NO: 2511458
agacaacauaaauucuugc

SEQ ID NO: 2511460 - RNA, 19 nt, Artificial Sequence
  Description of Artificial Sequence: Synthetic oligonucleotide
  Sense strand starting at position 872 of SEQ ID NO: 1888110
ucaucuauuguguaaaguu

SEQ ID NO: 2511461 - RNA, 19 nt, Artificial Sequence
  Description of Artificial Sequence: Synthetic oligonucleotide
  Antisense strand to SEQ ID NO: 2511460
aacuuuacacaauagauga

SEQ ID NO: 2511462 - RNA, 19 nt, Artificial Sequence
  Description of Artificial Sequence: Synthetic oligonucleotide
  Sense strand starting at position 893 of SEQ ID NO: 1888110
guacaaccacauuguuaga

SEQ ID NO: 2511463 - RNA, 19 nt, Artificial Sequence
  Description of Artificial Sequence: Synthetic oligonucleotide
  Antisense strand to SEQ ID NO: 2511462
ucuaacaaugugguuguac

SEQ ID NO: 2511464 - RNA, 19 nt, Artificial Sequence
  Description of Artificial Sequence: Synthetic oligonucleotide
  Sense strand starting at position 904 of SEQ ID NO: 1888110
uuguuagagucaucauaau

SEQ ID NO: 2511465 - RNA, 19 nt, Artificial Sequence
  Description of Artificial Sequence: Synthetic oligonucleotide
  Antisense strand to SEQ ID NO: 2511464
auuaugaugacucuaacaa

SEQ ID NO: 2511466 - RNA, 19 nt, Artificial Sequence
  Description of Artificial Sequence: Synthetic oligonucleotide
  Sense strand starting at position 916 of SEQ ID NO: 1888110
ucauaauuagauugguuag

SEQ ID NO: 2511467 - RNA, 19 nt, Artificial Sequence
  Description of Artificial Sequence: Synthetic oligonucleotide
  Antisense strand to SEQ ID NO: 2511466
cuaaccaaucuaauuauga

SEQ ID NO: 2511468 - RNA, 19 nt, Artificial Sequence
  Description of Artificial Sequence: Synthetic oligonucleotide
  Sense strand starting at position 919 of SEQ ID NO: 1888110
uaauuagauugguuaguuc

SEQ ID NO: 2511469 - RNA, 19 nt, Artificial Sequence
  Description of Artificial Sequence: Synthetic oligonucleotide
  Antisense strand to SEQ ID NO: 2511468
gaacuaaccaaucuaauua

SEQ ID NO: 2511470 - RNA, 19 nt, Artificial Sequence
  Description of Artificial Sequence: Synthetic oligonucleotide
  Sense strand starting at position 963 of SEQ ID NO: 1888110
ugugucuuaugguugacaa

SEQ ID NO: 2511471 - RNA, 19 nt, Artificial Sequence
  Description of Artificial Sequence: Synthetic oligonucleotide
  Antisense strand to SEQ ID NO: 2511470
uugucaaccauaagacaca

SEQ ID NO: 2511472 - RNA, 19 nt, Artificial Sequence
  Description of Artificial Sequence: Synthetic oligonucleotide
  Sense strand starting at position 964 of SEQ ID NO: 1888110
gugucuuaugguugacaaa

SEQ ID NO: 2511473 - RNA, 19 nt, Artificial Sequence
  Description of Artificial Sequence: Synthetic oligonucleotide
  Antisense strand to SEQ ID NO: 2511472
uuugucaaccauaagacac

SEQ ID NO: 2511474 - RNA, 19 nt, Artificial Sequence
  Description of Artificial Sequence: Synthetic oligonucleotide
  Sense strand starting at position 965 of SEQ ID NO: 1888110
ugucuuaugguugacaaag

SEQ ID NO: 2511475 - RNA, 19 nt, Artificial Sequence
  Description of Artificial Sequence: Synthetic oligonucleotide
  Antisense strand to SEQ ID NO: 2511474
cuuugucaaccauaagaca

SEQ ID NO: 2511476 - RNA, 19 nt, Artificial Sequence
  Description of Artificial Sequence: Synthetic oligonucleotide
  Sense strand starting at position 1044 of SEQ ID NO: 1888110
ccuccagugagguaguaau

SEQ ID NO: 2511477 - RNA, 19 nt, Artificial Sequence
  Description of Artificial Sequence: Synthetic oligonucleotide
  Antisense strand to SEQ ID NO: 2511476
auuacuaccucacuggagg

SEQ ID NO: 2511478 - RNA, 19 nt, Artificial Sequence
  Description of Artificial Sequence: Synthetic oligonucleotide
  Sense strand starting at position 1133 of SEQ ID NO: 1888110
acagcucguggaugauaga

SEQ ID NO: 2511479 - RNA, 19 nt, Artificial Sequence
  Description of Artificial Sequence: Synthetic oligonucleotide
  Antisense strand to SEQ ID NO: 2511478
ucuaucauccacgagcugu

SEQ ID NO: 2511480 - RNA, 19 nt, Artificial Sequence
  Description of Artificial Sequence: Synthetic oligonucleotide
  Sense strand starting at position 1252 of SEQ ID NO: 1888110
guaucacccguuuaagacu

SEQ ID NO: 2511481 - RNA, 19 nt, Artificial Sequence
  Description of Artificial Sequence: Synthetic oligonucleotide
  Antisense strand to SEQ ID NO: 2511480
agucuuaaacgggugauac

SEQ ID NO: 2511482 - RNA, 19 nt, Artificial Sequence
  Description of Artificial Sequence: Synthetic oligonucleotide
  Sense strand starting at position 1313 of SEQ ID NO: 1888110
cgaaauugacccuguuugu

SEQ ID NO: 2511483 - RNA, 19 nt, Artificial Sequence
  Description of Artificial Sequence: Synthetic oligonucleotide
  Antisense strand to SEQ ID NO: 2511482
acaaacagggucaauuucg

SEQ ID NO: 2511484 - RNA, 19 nt, Artificial Sequence
  Description of Artificial Sequence: Synthetic oligonucleotide
  Sense strand starting at position 1375 of SEQ ID NO: 1888110
gcuguaagauuucuuguga

SEQ ID NO: 2511485 - RNA, 19 nt, Artificial Sequence
  Description of Artificial Sequence: Synthetic oligonucleotide
  Antisense strand to SEQ ID NO: 2511484
ucacaagaaaucuuacagc

SEQ ID NO: 2511486 - RNA, 19 nt, Artificial Sequence
  Description of Artificial Sequence: Synthetic oligonucleotide
  Sense strand starting at position 1389 of SEQ ID NO: 1888110
ugugaugccacauagggau

SEQ ID NO: 2511487 - RNA, 19 nt, Artificial Sequence
  Description of Artificial Sequence: Synthetic oligonucleotide
  Antisense strand to SEQ ID NO: 2511486
aucccuauguggcaucaca

SEQ ID NO: 2511488 - RNA, 19 nt, Artificial Sequence
  Description of Artificial Sequence: Synthetic oligonucleotide
  Sense strand starting at position 1442 of SEQ ID NO: 1888110
gcuaaagaaucccuaauug

SEQ ID NO: 2511489 - RNA, 19 nt, Artificial Sequence
  Description of Artificial Sequence: Synthetic oligonucleotide
  Antisense strand to SEQ ID NO: 2511488
caauuagggauucuuuagc

SEQ ID NO: 2511490 - RNA, 19 nt, Artificial Sequence
  Description of Artificial Sequence: Synthetic oligonucleotide
  Sense strand starting at position 2153 of SEQ ID NO: 1888110
gggaaaucauuacaaacca

SEQ ID NO: 2511491 - RNA, 19 nt, Artificial Sequence
  Description of Artificial Sequence: Synthetic oligonucleotide
  Antisense strand to SEQ ID NO: 2511490
ugguuuguaaugauuuccc

SEQ ID NO: 2511492 - RNA, 19 nt, Artificial Sequence
  Description of Artificial Sequence: Synthetic oligonucleotide
  Sense strand starting at position 2227 of SEQ ID NO: 1888110
auaacuccaggcugguaaa

SEQ ID NO: 2511493 - RNA, 19 nt, Artificial Sequence
  Description of Artificial Sequence: Synthetic oligonucleotide
  Antisense strand to SEQ ID NO: 2511492
uuuaccagccuggaguuau

SEQ ID NO: 2511494 - RNA, 19 nt, Artificial Sequence
  Description of Artificial Sequence: Synthetic oligonucleotide
  Sense strand starting at position 2237 of SEQ ID NO: 1888110
gcugguaaacuagauaacu

SEQ ID NO: 2511495 - RNA, 19 nt, Artificial Sequence
  Description of Artificial Sequence: Synthetic oligonucleotide
  Antisense strand to SEQ ID NO: 2511494
aguuaucuaguuuaccagc

SEQ ID NO: 2511496 - RNA, 19 nt, Artificial Sequence
  Description of Artificial Sequence: Synthetic oligonucleotide
  Sense strand starting at position 2365 of SEQ ID NO: 1888110
gugagaacacgugguagua

SEQ ID NO: 2511497 - RNA, 19 nt, Artificial Sequence
  Description of Artificial Sequence: Synthetic oligonucleotide
  Antisense strand to SEQ ID NO: 2511496
uacuaccacguguucucac

SEQ ID NO: 2511498 - RNA, 19 nt, Artificial Sequence
  Description of Artificial Sequence: Synthetic oligonucleotide
  Sense strand starting at position 2637 of SEQ ID NO: 1888110
uuacuuaagguguacaaau

SEQ ID NO: 2511499 - RNA, 19 nt, Artificial Sequence
  Description of Artificial Sequence: Synthetic oligonucleotide
  Antisense strand to SEQ ID NO: 2511498
auuuguacaccuuaaguaa

SEQ ID NO: 2511500 - RNA, 19 nt, Artificial Sequence
  Description of Artificial Sequence: Synthetic oligonucleotide
  Sense strand starting at position 2810 of SEQ ID NO: 1888110
guggcuauuucuguugauc

SEQ ID NO: 2511501 - RNA, 19 nt, Artificial Sequence
  Description of Artificial Sequence: Synthetic oligonucleotide
  Antisense strand to SEQ ID NO: 2511500
gaucaacagaaauagccac

SEQ ID NO: 2511502 - RNA, 19 nt, Artificial Sequence
  Description of Artificial Sequence: Synthetic oligonucleotide
  Sense strand starting at position 2915 of SEQ ID NO: 1888110
gucugauggcaauaaacuc

SEQ ID NO: 2511503 - RNA, 19 nt, Artificial Sequence
  Description of Artificial Sequence: Synthetic oligonucleotide
  Antisense strand to SEQ ID NO: 2511502
gaguuuauugccaucagac

SEQ ID NO: 2511504 - RNA, 19 nt, Artificial Sequence
  Description of Artificial Sequence: Synthetic oligonucleotide
  Sense strand starting at position 3160 of SEQ ID NO: 1888110
caauguaucuaggcauuga

SEQ ID NO: 2511505 - RNA, 19 nt, Artificial Sequence
  Description of Artificial Sequence: Synthetic oligonucleotide
  Antisense strand to SEQ ID NO: 2511504
ucaaugccuagauacauug

SEQ ID NO: 2511506 - RNA, 19 nt, Artificial Sequence
  Description of Artificial Sequence: Synthetic oligonucleotide
  Sense strand starting at position 3188 of SEQ ID NO: 1888110
guuuauuaugcguuggguu

SEQ ID NO: 2511507 - RNA, 19 nt, Artificial Sequence
  Description of Artificial Sequence: Synthetic oligonucleotide
  Antisense strand to SEQ ID NO: 2511506
aacccaacgcauaauaaac

SEQ ID NO: 2511508 - RNA, 19 nt, Artificial Sequence
  Description of Artificial Sequence: Synthetic oligonucleotide
  Sense strand starting at position 3235 of SEQ ID NO: 1888110
ucucuuuaccaaugcgaaa

SEQ ID NO: 2511509 - RNA, 19 nt, Artificial Sequence
  Description of Artificial Sequence: Synthetic oligonucleotide
  Antisense strand to SEQ ID NO: 2511508
uuucgcauugguaaagaga

SEQ ID NO: 2511510 - RNA, 19 nt, Artificial Sequence
  Description of Artificial Sequence: Synthetic oligonucleotide
  Sense strand starting at position 3493 of SEQ ID NO: 1888110
gaguuuaggucuucuuaua

SEQ ID NO: 2511511 - RNA, 19 nt, Artificial Sequence
  Description of Artificial Sequence: Synthetic oligonucleotide
  Antisense strand to SEQ ID NO: 2511510
uauaagaagaccuaaacuc

SEQ ID NO: 2511512 - RNA, 19 nt, Artificial Sequence
  Description of Artificial Sequence: Synthetic oligonucleotide
  Sense strand starting at position 3512 of SEQ ID NO: 1888110
gcuucuauuuguuugcuga

SEQ ID NO: 2511513 - RNA, 19 nt, Artificial Sequence
  Description of Artificial Sequence: Synthetic oligonucleotide
  Antisense strand to SEQ ID NO: 2511512
ucagcaaacaaauagaagc

SEQ ID NO: 2511514 - RNA, 19 nt, Artificial Sequence
  Description of Artificial Sequence: Synthetic oligonucleotide
  Sense strand starting at position 3514 of SEQ ID NO: 1888110
uucuauuuguuugcugaga

SEQ ID NO: 2511515 - RNA, 19 nt, Artificial Sequence
  Description of Artificial Sequence: Synthetic oligonucleotide
  Antisense strand to SEQ ID NO: 2511514
ucucagcaaacaaauagaa

SEQ ID NO: 2511516 - RNA, 19 nt, Artificial Sequence
  Description of Artificial Sequence: Synthetic oligonucleotide
  Sense strand starting at position 3626 of SEQ ID NO: 1888110
agcaucuguguguugucau

SEQ ID NO: 2511517 - RNA, 19 nt, Artificial Sequence
  Description of Artificial Sequence: Synthetic oligonucleotide
  Antisense strand to SEQ ID NO: 2511516
augacaacacacagaugcu

SEQ ID NO: 2511518 - RNA, 19 nt, Artificial Sequence
  Description of Artificial Sequence: Synthetic oligonucleotide
  Sense strand starting at position 3633 of SEQ ID NO: 1888110
guguguugucaucuguuga

SEQ ID NO: 2511519 - RNA, 19 nt, Artificial Sequence
  Description of Artificial Sequence: Synthetic oligonucleotide
  Antisense strand to SEQ ID NO: 2511518
ucaacagaugacaacacac

SEQ ID NO: 2511520 - RNA, 19 nt, Artificial Sequence
  Description of Artificial Sequence: Synthetic oligonucleotide
  Sense strand starting at position 3795 of SEQ ID NO: 1888110
guggcaaauugaccugaua

SEQ ID NO: 2511521 - RNA, 19 nt, Artificial Sequence
  Description of Artificial Sequence: Synthetic oligonucleotide
  Antisense strand to SEQ ID NO: 2511520
uaucaggucaauuugccac

SEQ ID NO: 2511522 - RNA, 19 nt, Artificial Sequence
  Description of Artificial Sequence: Synthetic oligonucleotide
  Sense strand starting at position 3817 of SEQ ID NO: 1888110
uuaggcaacuguuccaauu

SEQ ID NO: 2511523 - RNA, 19 nt, Artificial Sequence
  Description of Artificial Sequence: Synthetic oligonucleotide
  Antisense strand to SEQ ID NO: 2511522
aauuggaacaguugccuaa

SEQ ID NO: 2511524 - RNA, 19 nt, Artificial Sequence
  Description of Artificial Sequence: Synthetic oligonucleotide
  Sense strand starting at position 146 of SEQ ID NO: 1888111
caggaagucuucccaaaga

SEQ ID NO: 2511525 - RNA, 19 nt, Artificial Sequence
  Description of Artificial Sequence: Synthetic oligonucleotide
  Antisense strand to SEQ ID NO: 2511524
ucuuugggaagacuuccug

SEQ ID NO: 2511526 - RNA, 19 nt, Artificial Sequence
  Description of Artificial Sequence: Synthetic oligonucleotide
  Sense strand starting at position 162 of SEQ ID NO: 1888111
agaagugacaucugaguag

SEQ ID NO: 2511527 - RNA, 19 nt, Artificial Sequence
  Description of Artificial Sequence: Synthetic oligonucleotide
  Antisense strand to SEQ ID NO: 2511526
cuacucagaugucacuucu

SEQ ID NO: 2511528 - RNA, 19 nt, Artificial Sequence
  Description of Artificial Sequence: Synthetic oligonucleotide
  Sense strand starting at position 165 of SEQ ID NO: 1888111
agugacaucugaguagaga

SEQ ID NO: 2511529 - RNA, 19 nt, Artificial Sequence
  Description of Artificial Sequence: Synthetic oligonucleotide
  Antisense strand to SEQ ID NO: 2511528
ucucuacucagaugucacu

SEQ ID NO: 2511530 - RNA, 19 nt, Artificial Sequence
  Description of Artificial Sequence: Synthetic oligonucleotide
  Sense strand starting at position 370 of SEQ ID NO: 1888111
guggcguggcuggauuuau

SEQ ID NO: 2511531 - RNA, 19 nt, Artificial Sequence
  Description of Artificial Sequence: Synthetic oligonucleotide
  Antisense strand to SEQ ID NO: 2511530
auaaauccagccacgccac

SEQ ID NO: 2511532 - RNA, 19 nt, Artificial Sequence
  Description of Artificial Sequence: Synthetic oligonucleotide
  Sense strand starting at position 514 of SEQ ID NO: 1888111
ggcucaaagucaucagacu

SEQ ID NO: 2511533 - RNA, 19 nt, Artificial Sequence
  Description of Artificial Sequence: Synthetic oligonucleotide
  Antisense strand to SEQ ID NO: 2511532
agucugaugacuuugagcc

SEQ ID NO: 2511534 - RNA, 19 nt, Artificial Sequence
  Description of Artificial Sequence: Synthetic oligonucleotide
  Sense strand starting at position 689 of SEQ ID NO: 1888111
agauuagauuuaggaagaa

SEQ ID NO: 2511535 - RNA, 19 nt, Artificial Sequence
  Description of Artificial Sequence: Synthetic oligonucleotide
  Antisense strand to SEQ ID NO: 2511534
uucuuccuaaaucuaaucu

SEQ ID NO: 2511536 - RNA, 19 nt, Artificial Sequence
  Description of Artificial Sequence: Synthetic oligonucleotide
  Sense strand starting at position 727 of SEQ ID NO: 1888111
uauguuaagucccuggaaa

SEQ ID NO: 2511537 - RNA, 19 nt, Artificial Sequence
  Description of Artificial Sequence: Synthetic oligonucleotide
  Antisense strand to SEQ ID NO: 2511536
uuuccagggacuuaacaua

SEQ ID NO: 2511538 - RNA, 19 nt, Artificial Sequence
  Description of Artificial Sequence: Synthetic oligonucleotide
  Sense strand starting at position 728 of SEQ ID NO: 1888111
auguuaagucccuggaaag

SEQ ID NO: 2511539 - RNA, 19 nt, Artificial Sequence
  Description of Artificial Sequence: Synthetic oligonucleotide
  Antisense strand to SEQ ID NO: 2511538
cuuuccagggacuuaacau

SEQ ID NO: 2511540 - RNA, 19 nt, Artificial Sequence
  Description of Artificial Sequence: Synthetic oligonucleotide
  Sense strand starting at position 729 of SEQ ID NO: 1888111
uguuaagucccuggaaaga

SEQ ID NO: 2511541 - RNA, 19 nt, Artificial Sequence
  Description of Artificial Sequence: Synthetic oligonucleotide
  Antisense strand to SEQ ID NO: 2511540
ucuuuccagggacuuaaca

SEQ ID NO: 2511542 - RNA, 19 nt, Artificial Sequence
  Description of Artificial Sequence: Synthetic oligonucleotide
  Sense strand starting at position 740 of SEQ ID NO: 1888111
uggaaagauucugcaggca

SEQ ID NO: 2511543 - RNA, 19 nt, Artificial Sequence
  Description of Artificial Sequence: Synthetic oligonucleotide
  Antisense strand to SEQ ID NO: 2511542
ugccugcagaaucuuucca

SEQ ID NO: 2511544 - RNA, 19 nt, Artificial Sequence
  Description of Artificial Sequence: Synthetic oligonucleotide
  Sense strand starting at position 845 of SEQ ID NO: 1888111
acugaaugcugauuggaau

SEQ ID NO: 2511545 - RNA, 19 nt, Artificial Sequence
  Description of Artificial Sequence: Synthetic oligonucleotide
  Antisense strand to SEQ ID NO: 2511544
auuccaaucagcauucagu

SEQ ID NO: 2511546 - RNA, 19 nt, Artificial Sequence
  Description of Artificial Sequence: Synthetic oligonucleotide
  Sense strand starting at position 846 of SEQ ID NO: 1888111
cugaaugcugauuggaauu

SEQ ID NO: 2511547 - RNA, 19 nt, Artificial Sequence
  Description of Artificial Sequence: Synthetic oligonucleotide
  Antisense strand to SEQ ID NO: 2511546
aauuccaaucagcauucag

SEQ ID NO: 2511548 - RNA, 19 nt, Artificial Sequence
  Description of Artificial Sequence: Synthetic oligonucleotide
  Sense strand starting at position 867 of SEQ ID NO: 1888111
gucaauuggcuuuaacaaa

SEQ ID NO: 2511549 - RNA, 19 nt, Artificial Sequence
  Description of Artificial Sequence: Synthetic oligonucleotide
  Antisense strand to SEQ ID NO: 2511548
uuuguuaaagccaauugac

SEQ ID NO: 2511550 - RNA, 19 nt, Artificial Sequence
  Description of Artificial Sequence: Synthetic oligonucleotide
  Sense strand starting at position 1066 of SEQ ID NO: 1888111
acccaaguagcucauagaa

SEQ ID NO: 2511551 - RNA, 19 nt, Artificial Sequence
  Description of Artificial Sequence: Synthetic oligonucleotide
  Antisense strand to SEQ ID NO: 2511550
uucuaugagcuacuugggu

SEQ ID NO: 2511552 - RNA, 19 nt, Artificial Sequence
  Description of Artificial Sequence: Synthetic oligonucleotide
  Sense strand starting at position 1274 of SEQ ID NO: 1888111
aacacagaguuugcagaaa

SEQ ID NO: 2511553 - RNA, 19 nt, Artificial Sequence
  Description of Artificial Sequence: Synthetic oligonucleotide
  Antisense strand to SEQ ID NO: 2511552
uuucugcaaacucuguguu

SEQ ID NO: 2511554 - RNA, 19 nt, Artificial Sequence
  Description of Artificial Sequence: Synthetic oligonucleotide
  Sense strand starting at position 1309 of SEQ ID NO: 1888111
cuuugcauucucugagaga

SEQ ID NO: 2511555 - RNA, 19 nt, Artificial Sequence
  Description of Artificial Sequence: Synthetic oligonucleotide
  Antisense strand to SEQ ID NO: 2511554
ucucucagagaaugcaaag

SEQ ID NO: 2511556 - RNA, 19 nt, Artificial Sequence
  Description of Artificial Sequence: Synthetic oligonucleotide
  Sense strand starting at position 1375 of SEQ ID NO: 1888111
gcuagaaucaugggaagug

SEQ ID NO: 2511557 - RNA, 19 nt, Artificial Sequence
  Description of Artificial Sequence: Synthetic oligonucleotide
  Antisense strand to SEQ ID NO: 2511556
cacuucccaugauucuagc

SEQ ID NO: 2511558 - RNA, 19 nt, Artificial Sequence
  Description of Artificial Sequence: Synthetic oligonucleotide
  Sense strand starting at position 1421 of SEQ ID NO: 1888111
agcugaacaguaugaaaca

SEQ ID NO: 2511559 - RNA, 19 nt, Artificial Sequence
  Description of Artificial Sequence: Synthetic oligonucleotide
  Antisense strand to SEQ ID NO: 2511558
uguuucauacuguucagcu

SEQ ID NO: 2511560 - RNA, 19 nt, Artificial Sequence
  Description of Artificial Sequence: Synthetic oligonucleotide
  Sense strand starting at position 1583 of SEQ ID NO: 1888111
ccagccagucauuauaaag

SEQ ID NO: 2511561 - RNA, 19 nt, Artificial Sequence
  Description of Artificial Sequence: Synthetic oligonucleotide
  Antisense strand to SEQ ID NO: 2511560
cuuuauaaugacuggcugg

SEQ ID NO: 2511562 - RNA, 19 nt, Artificial Sequence
  Description of Artificial Sequence: Synthetic oligonucleotide
  Sense strand starting at position 1622 of SEQ ID NO: 1888111
uaccauuaaguuuggcaga

SEQ ID NO: 2511563 - RNA, 19 nt, Artificial Sequence
  Description of Artificial Sequence: Synthetic oligonucleotide
  Antisense strand to SEQ ID NO: 2511562
ucugccaaacuuaauggua

SEQ ID NO: 2511564 - RNA, 19 nt, Artificial Sequence
  Description of Artificial Sequence: Synthetic oligonucleotide
  Sense strand starting at position 1627 of SEQ ID NO: 1888111
uuaaguuuggcagaccacu

SEQ ID NO: 2511565 - RNA, 19 nt, Artificial Sequence
  Description of Artificial Sequence: Synthetic oligonucleotide
  Antisense strand to SEQ ID NO: 2511564
aguggucugccaaacuuaa

SEQ ID NO: 2511566 - RNA, 19 nt, Artificial Sequence
  Description of Artificial Sequence: Synthetic oligonucleotide
  Sense strand starting at position 1636 of SEQ ID NO: 1888111
gcagaccacuaauuagaca

SEQ ID NO: 2511567 - RNA, 19 nt, Artificial Sequence
  Description of Artificial Sequence: Synthetic oligonucleotide
  Antisense strand to SEQ ID NO: 2511566
ugucuaauuaguggucugc

SEQ ID NO: 2511568 - RNA, 19 nt, Artificial Sequence
  Description of Artificial Sequence: Synthetic oligonucleotide
  Sense strand starting at position 1702 of SEQ ID NO: 1888111
ggaguuacccuugagcuca

SEQ ID NO: 2511569 - RNA, 19 nt, Artificial Sequence
  Description of Artificial Sequence: Synthetic oligonucleotide
  Antisense strand to SEQ ID NO: 2511568
ugagcucaaggguaacucc

SEQ ID NO: 2511570 - RNA, 19 nt, Artificial Sequence
  Description of Artificial Sequence: Synthetic oligonucleotide
  Sense strand starting at position 1737 of SEQ ID NO: 1888111
guaaguuaaggugacucaa

SEQ ID NO: 2511571 - RNA, 19 nt, Artificial Sequence
  Description of Artificial Sequence: Synthetic oligonucleotide
  Antisense strand to SEQ ID NO: 2511570
uugagucaccuuaacuuac

SEQ ID NO: 2511572 - RNA, 19 nt, Artificial Sequence
  Description of Artificial Sequence: Synthetic oligonucleotide
  Sense strand starting at position 2291 of SEQ ID NO: 1888111
ugguauccacauuaugcaa

SEQ ID NO: 2511573 - RNA, 19 nt, Artificial Sequence
  Description of Artificial Sequence: Synthetic oligonucleotide
  Antisense strand to SEQ ID NO: 2511572
uugcauaauguggauacca

SEQ ID NO: 2511574 - RNA, 19 nt, Artificial Sequence
  Description of Artificial Sequence: Synthetic oligonucleotide
  Sense strand starting at position 2491 of SEQ ID NO: 1888111
uccucugcuguggaacaau

SEQ ID NO: 2511575 - RNA, 19 nt, Artificial Sequence
  Description of Artificial Sequence: Synthetic oligonucleotide
  Antisense strand to SEQ ID NO: 2511574
auuguuccacagcagagga

SEQ ID NO: 2511576 - RNA, 19 nt, Artificial Sequence
  Description of Artificial Sequence: Synthetic oligonucleotide
  Sense strand starting at position 2587 of SEQ ID NO: 1888111
cuauauuaauuugagguca

SEQ ID NO: 2511577 - RNA, 19 nt, Artificial Sequence
  Description of Artificial Sequence: Synthetic oligonucleotide
  Antisense strand to SEQ ID NO: 2511576
ugaccucaaauuaauauag

SEQ ID NO: 2511578 - RNA, 19 nt, Artificial Sequence
  Description of Artificial Sequence: Synthetic oligonucleotide
  Sense strand starting at position 2691 of SEQ ID NO: 1888111
aggaaauuagcugggccaa

SEQ ID NO: 2511579 - RNA, 19 nt, Artificial Sequence
  Description of Artificial Sequence: Synthetic oligonucleotide
  Antisense strand to SEQ ID NO: 2511578
uuggcccagcuaauuuccu

SEQ ID NO: 2511580 - RNA, 19 nt, Artificial Sequence
  Description of Artificial Sequence: Synthetic oligonucleotide
  Sense strand starting at position 2692 of SEQ ID NO: 1888111
ggaaauuagcugggccaau

SEQ ID NO: 2511581 - RNA, 19 nt, Artificial Sequence
  Description of Artificial Sequence: Synthetic oligonucleotide
  Antisense strand to SEQ ID NO: 2511580
auuggcccagcuaauuucc

SEQ ID NO: 2511582 - RNA, 19 nt, Artificial Sequence
  Description of Artificial Sequence: Synthetic oligonucleotide
  Sense strand starting at position 2693 of SEQ ID NO: 1888111
gaaauuagcugggccaaua

SEQ ID NO: 2511583 - RNA, 19 nt, Artificial Sequence
  Description of Artificial Sequence: Synthetic oligonucleotide
  Antisense strand to SEQ ID NO: 2511582
uauuggcccagcuaauuuc

SEQ ID NO: 2511584 - RNA, 19 nt, Artificial Sequence
  Description of Artificial Sequence: Synthetic oligonucleotide
  Sense strand starting at position 2704 of SEQ ID NO: 1888111
ggccaauaugaccauguuu

SEQ ID NO: 2511585 - RNA, 19 nt, Artificial Sequence
  Description of Artificial Sequence: Synthetic oligonucleotide
  Antisense strand to SEQ ID NO: 2511584
aaacauggucauauuggcc

SEQ ID NO: 2511586 - RNA, 19 nt, Artificial Sequence
  Description of Artificial Sequence: Synthetic oligonucleotide
  Sense strand starting at position 2936 of SEQ ID NO: 1888111
guucuugaacguuacauaa

SEQ ID NO: 2511587 - RNA, 19 nt, Artificial Sequence
  Description of Artificial Sequence: Synthetic oligonucleotide
  Antisense strand to SEQ ID NO: 2511586
uuauguaacguucaagaac

SEQ ID NO: 2511588 - RNA, 19 nt, Artificial Sequence
  Description of Artificial Sequence: Synthetic oligonucleotide
  Sense strand starting at position 3306 of SEQ ID NO: 1888111
ggguacaugagccaucaua

SEQ ID NO: 2511589 - RNA, 19 nt, Artificial Sequence
  Description of Artificial Sequence: Synthetic oligonucleotide
  Antisense strand to SEQ ID NO: 2511588
uaugauggcucauguaccc

SEQ ID NO: 2511590 - RNA, 19 nt, Artificial Sequence
  Description of Artificial Sequence: Synthetic oligonucleotide
  Sense strand starting at position 3411 of SEQ ID NO: 1888111
gugagugcacuggaauuca

SEQ ID NO: 2511591 - RNA, 19 nt, Artificial Sequence
  Description of Artificial Sequence: Synthetic oligonucleotide
  Antisense strand to SEQ ID NO: 2511590
ugaauuccagugcacucac

SEQ ID NO: 2511592 - RNA, 19 nt, Artificial Sequence
  Description of Artificial Sequence: Synthetic oligonucleotide
  Sense strand starting at position 3483 of SEQ ID NO: 1888111
cauguuacuguggacacau

SEQ ID NO: 2511593 - RNA, 19 nt, Artificial Sequence
  Description of Artificial Sequence: Synthetic oligonucleotide
  Antisense strand to SEQ ID NO: 2511592
auguguccacaguaacaug

SEQ ID NO: 2511594 - RNA, 19 nt, Artificial Sequence
  Description of Artificial Sequence: Synthetic oligonucleotide
  Sense strand starting at position 3492 of SEQ ID NO: 1888111
guggacacauugguauaua

SEQ ID NO: 2511595 - RNA, 19 nt, Artificial Sequence
  Description of Artificial Sequence: Synthetic oligonucleotide
  Antisense strand to SEQ ID NO: 2511594
uauauaccaauguguccac

SEQ ID NO: 2511596 - RNA, 19 nt, Artificial Sequence
  Description of Artificial Sequence: Synthetic oligonucleotide
  Sense strand starting at position 3495 of SEQ ID NO: 1888111
gacacauugguauauaugu

SEQ ID NO: 2511597 - RNA, 19 nt, Artificial Sequence
  Description of Artificial Sequence: Synthetic oligonucleotide
  Antisense strand to SEQ ID NO: 2511596
acauauauaccaauguguc

SEQ ID NO: 2511598 - RNA, 19 nt, Artificial Sequence
  Description of Artificial Sequence: Synthetic oligonucleotide
  Sense strand starting at position 3772 of SEQ ID NO: 1888111
acuuaacuucucugagguu

SEQ ID NO: 2511599 - RNA, 19 nt, Artificial Sequence
  Description of Artificial Sequence: Synthetic oligonucleotide
  Antisense strand to SEQ ID NO: 2511598
aaccucagagaaguuaagu

SEQ ID NO: 2511600 - RNA, 19 nt, Artificial Sequence
  Description of Artificial Sequence: Synthetic oligonucleotide
  Sense strand starting at position 3832 of SEQ ID NO: 1888111
cugucaaaucaguaucaca

SEQ ID NO: 2511601 - RNA, 19 nt, Artificial Sequence
  Description of Artificial Sequence: Synthetic oligonucleotide
  Antisense strand to SEQ ID NO: 2511600
ugugauacugauuugacag

SEQ ID NO: 2511602 - RNA, 19 nt, Artificial Sequence
  Description of Artificial Sequence: Synthetic oligonucleotide
  Sense strand starting at position 3870 of SEQ ID NO: 1888111
ggcaauuggcacuaaguga

SEQ ID NO: 2511603 - RNA, 19 nt, Artificial Sequence
  Description of Artificial Sequence: Synthetic oligonucleotide
  Antisense strand to SEQ ID NO: 2511602
ucacuuagugccaauugcc

SEQ ID NO: 2511604 - RNA, 19 nt, Artificial Sequence
  Description of Artificial Sequence: Synthetic oligonucleotide
  Sense strand starting at position 128 of SEQ ID NO: 1888112
uuacuuaauccacaugggu

SEQ ID NO: 2511605 - RNA, 19 nt, Artificial Sequence
  Description of Artificial Sequence: Synthetic oligonucleotide
  Antisense strand to SEQ ID NO: 2511604
acccauguggauuaaguaa

SEQ ID NO: 2511606 - RNA, 19 nt, Artificial Sequence
  Description of Artificial Sequence: Synthetic oligonucleotide
  Sense strand starting at position 399 of SEQ ID NO: 1888112
guguuucuugaccaugaag

SEQ ID NO: 2511607 - RNA, 19 nt, Artificial Sequence
  Description of Artificial Sequence: Synthetic oligonucleotide
  Antisense strand to SEQ ID NO: 2511606
cuucauggucaagaaacac

SEQ ID NO: 2511608 - RNA, 19 nt, Artificial Sequence
  Description of Artificial Sequence: Synthetic oligonucleotide
  Sense strand starting at position 449 of SEQ ID NO: 1888112
gggaaauacacgugaccag

SEQ ID NO: 2511609 - RNA, 19 nt, Artificial Sequence
  Description of Artificial Sequence: Synthetic oligonucleotide
  Antisense strand to SEQ ID NO: 2511608
cuggucacguguauuuccc

SEQ ID NO: 2511610 - RNA, 19 nt, Artificial Sequence
  Description of Artificial Sequence: Synthetic oligonucleotide
  Sense strand starting at position 482 of SEQ ID NO: 1888112
gguccuucucuuuagggau

SEQ ID NO: 2511611 - RNA, 19 nt, Artificial Sequence
  Description of Artificial Sequence: Synthetic oligonucleotide
  Antisense strand to SEQ ID NO: 2511610
aucccuaaagagaaggacc

SEQ ID NO: 2511612 - RNA, 19 nt, Artificial Sequence
  Description of Artificial Sequence: Synthetic oligonucleotide
  Sense strand starting at position 603 of SEQ ID NO: 1888112
gagcuugguagugaucaug

SEQ ID NO: 2511613 - RNA, 19 nt, Artificial Sequence
  Description of Artificial Sequence: Synthetic oligonucleotide
  Antisense strand to SEQ ID NO: 2511612
caugaucacuaccaagcuc

SEQ ID NO: 2511614 - RNA, 19 nt, Artificial Sequence
  Description of Artificial Sequence: Synthetic oligonucleotide
  Sense strand starting at position 687 of SEQ ID NO: 1888112
aaaucuguagggugggaau

SEQ ID NO: 2511615 - RNA, 19 nt, Artificial Sequence
  Description of Artificial Sequence: Synthetic oligonucleotide
  Antisense strand to SEQ ID NO: 2511614
auucccacccuacagauuu

SEQ ID NO: 2511616 - RNA, 19 nt, Artificial Sequence
  Description of Artificial Sequence: Synthetic oligonucleotide
  Sense strand starting at position 689 of SEQ ID NO: 1888112
aucuguagggugggaauaa

SEQ ID NO: 2511617 - RNA, 19 nt, Artificial Sequence
  Description of Artificial Sequence: Synthetic oligonucleotide
  Antisense strand to SEQ ID NO: 2511616
uuauucccacccuacagau

SEQ ID NO: 2511618 - RNA, 19 nt, Artificial Sequence
  Description of Artificial Sequence: Synthetic oligonucleotide
  Sense strand starting at position 717 of SEQ ID NO: 1888112
uuugacuaauaucugaguu

SEQ ID NO: 2511619 - RNA, 19 nt, Artificial Sequence
  Description of Artificial Sequence: Synthetic oligonucleotide
  Antisense strand to SEQ ID NO: 2511618
aacucagauauuagucaaa

SEQ ID NO: 2511620 - RNA, 19 nt, Artificial Sequence
  Description of Artificial Sequence: Synthetic oligonucleotide
  Sense strand starting at position 804 of SEQ ID NO: 1888112
ucaggaagccucuagucua

SEQ ID NO: 2511621 - RNA, 19 nt, Artificial Sequence
  Description of Artificial Sequence: Synthetic oligonucleotide
  Antisense strand to SEQ ID NO: 2511620
uagacuagaggcuuccuga

SEQ ID NO: 2511622 - RNA, 19 nt, Artificial Sequence
  Description of Artificial Sequence: Synthetic oligonucleotide
  Sense strand starting at position 815 of SEQ ID NO: 1888112
cuagucuaggacuguaaua

SEQ ID NO: 2511623 - RNA, 19 nt, Artificial Sequence
  Description of Artificial Sequence: Synthetic oligonucleotide
  Antisense strand to SEQ ID NO: 2511622
uauuacaguccuagacuag

SEQ ID NO: 2511624 - RNA, 19 nt, Artificial Sequence
  Description of Artificial Sequence: Synthetic oligonucleotide
  Sense strand starting at position 846 of SEQ ID NO: 1888112
uuagguuacugauuaugac

SEQ ID NO: 2511625 - RNA, 19 nt, Artificial Sequence
  Description of Artificial Sequence: Synthetic oligonucleotide
  Antisense strand to SEQ ID NO: 2511624
gucauaaucaguaaccuaa

SEQ ID NO: 2511626 - RNA, 19 nt, Artificial Sequence
  Description of Artificial Sequence: Synthetic oligonucleotide
  Sense strand starting at position 853 of SEQ ID NO: 1888112
acugauuaugacgggauau

SEQ ID NO: 2511627 - RNA, 19 nt, Artificial Sequence
  Description of Artificial Sequence: Synthetic oligonucleotide
  Antisense strand to SEQ ID NO: 2511626
auaucccgucauaaucagu

SEQ ID NO: 2511628 - RNA, 19 nt, Artificial Sequence
  Description of Artificial Sequence: Synthetic oligonucleotide
  Sense strand starting at position 854 of SEQ ID NO: 1888112
cugauuaugacgggauauu

SEQ ID NO: 2511629 - RNA, 19 nt, Artificial Sequence
  Description of Artificial Sequence: Synthetic oligonucleotide
  Antisense strand to SEQ ID NO: 2511628
aauaucccgucauaaucag

SEQ ID NO: 2511630 - RNA, 19 nt, Artificial Sequence
  Description of Artificial Sequence: Synthetic oligonucleotide
  Sense strand starting at position 918 of SEQ ID NO: 1888112
cugacaaugguggaguauu

SEQ ID NO: 2511631 - RNA, 19 nt, Artificial Sequence
  Description of Artificial Sequence: Synthetic oligonucleotide
  Antisense strand to SEQ ID NO: 2511630
aauacuccaccauugucag

SEQ ID NO: 2511632 - RNA, 19 nt, Artificial Sequence
  Description of Artificial Sequence: Synthetic oligonucleotide
  Sense strand starting at position 965 of SEQ ID NO: 1888112
aagauuauugaggguguga

SEQ ID NO: 2511633 - RNA, 19 nt, Artificial Sequence
  Description of Artificial Sequence: Synthetic oligonucleotide
  Antisense strand to SEQ ID NO: 2511632
ucacacccucaauaaucuu

SEQ ID NO: 2511634 - RNA, 19 nt, Artificial Sequence
  Description of Artificial Sequence: Synthetic oligonucleotide
  Sense strand starting at position 967 of SEQ ID NO: 1888112
gauuauugagggugugaag

SEQ ID NO: 2511635 - RNA, 19 nt, Artificial Sequence
  Description of Artificial Sequence: Synthetic oligonucleotide
  Antisense strand to SEQ ID NO: 2511634
cuucacacccucaauaauc

SEQ ID NO: 2511636 - RNA, 19 nt, Artificial Sequence
  Description of Artificial Sequence: Synthetic oligonucleotide
  Sense strand starting at position 1210 of SEQ ID NO: 1888112
uauuaacguggguaauuau

SEQ ID NO: 2511637 - RNA, 19 nt, Artificial Sequence
  Description of Artificial Sequence: Synthetic oligonucleotide
  Antisense strand to SEQ ID NO: 2511636
auaauuacccacguuaaua

SEQ ID NO: 2511638 - RNA, 19 nt, Artificial Sequence
  Description of Artificial Sequence: Synthetic oligonucleotide
  Sense strand starting at position 1323 of SEQ ID NO: 1888112
agggcaguugcccaaugaa

SEQ ID NO: 2511639 - RNA, 19 nt, Artificial Sequence
  Description of Artificial Sequence: Synthetic oligonucleotide
  Antisense strand to SEQ ID NO: 2511638
uucauugggcaacugcccu

SEQ ID NO: 2511640 - RNA, 19 nt, Artificial Sequence
  Description of Artificial Sequence: Synthetic oligonucleotide
  Sense strand starting at position 1341 of SEQ ID NO: 1888112
aggccugagagauguacau

SEQ ID NO: 2511641 - RNA, 19 nt, Artificial Sequence
  Description of Artificial Sequence: Synthetic oligonucleotide
  Antisense strand to SEQ ID NO: 2511640
auguacaucucucaggccu

SEQ ID NO: 2511642 - RNA, 19 nt, Artificial Sequence
  Description of Artificial Sequence: Synthetic oligonucleotide
  Sense strand starting at position 1343 of SEQ ID NO: 1888112
gccugagagauguacauac

SEQ ID NO: 2511643 - RNA, 19 nt, Artificial Sequence
  Description of Artificial Sequence: Synthetic oligonucleotide
  Antisense strand to SEQ ID NO: 2511642
guauguacaucucucaggc

SEQ ID NO: 2511644 - RNA, 19 nt, Artificial Sequence
  Description of Artificial Sequence: Synthetic oligonucleotide
  Sense strand starting at position 1383 of SEQ ID NO: 1888112
gagcauauugagcaauaug

SEQ ID NO: 2511645 - RNA, 19 nt, Artificial Sequence
  Description of Artificial Sequence: Synthetic oligonucleotide
  Antisense strand to SEQ ID NO: 2511644
cauauugcucaauaugcuc

SEQ ID NO: 2511646 - RNA, 19 nt, Artificial Sequence
  Description of Artificial Sequence: Synthetic oligonucleotide
  Sense strand starting at position 1504 of SEQ ID NO: 1888112
caagauaacucacugugag

SEQ ID NO: 2511647 - RNA, 19 nt, Artificial Sequence
  Description of Artificial Sequence: Synthetic oligonucleotide
  Antisense strand to SEQ ID NO: 2511646
cucacagugaguuaucuug

SEQ ID NO: 2511648 - RNA, 19 nt, Artificial Sequence
  Description of Artificial Sequence: Synthetic oligonucleotide
  Sense strand starting at position 1505 of SEQ ID NO: 1888112
aagauaacucacugugagu

SEQ ID NO: 2511649 - RNA, 19 nt, Artificial Sequence
  Description of Artificial Sequence: Synthetic oligonucleotide
  Antisense strand to SEQ ID NO: 2511648
acucacagugaguuaucuu

SEQ ID NO: 2511650 - RNA, 19 nt, Artificial Sequence
  Description of Artificial Sequence: Synthetic oligonucleotide
  Sense strand starting at position 1507 of SEQ ID NO: 1888112
gauaacucacugugaguca

SEQ ID NO: 2511651 - RNA, 19 nt, Artificial Sequence
  Description of Artificial Sequence: Synthetic oligonucleotide
  Antisense strand to SEQ ID NO: 2511650
ugacucacagugaguuauc

SEQ ID NO: 2511652 - RNA, 19 nt, Artificial Sequence
  Description of Artificial Sequence: Synthetic oligonucleotide
  Sense strand starting at position 1520 of SEQ ID NO: 1888112
gagucaauugcaggacaga

SEQ ID NO: 2511653 - RNA, 19 nt, Artificial Sequence
  Description of Artificial Sequence: Synthetic oligonucleotide
  Antisense strand to SEQ ID NO: 2511652
ucuguccugcaauugacuc

SEQ ID NO: 2511654 - RNA, 19 nt, Artificial Sequence
  Description of Artificial Sequence: Synthetic oligonucleotide
  Sense strand starting at position 2096 of SEQ ID NO: 1888112
guucgugucagagaauaaa

SEQ ID NO: 2511655 - RNA, 19 nt, Artificial Sequence
  Description of Artificial Sequence: Synthetic oligonucleotide
  Antisense strand to SEQ ID NO: 2511654
uuuauucucugacacgaac

SEQ ID NO: 2511656 - RNA, 19 nt, Artificial Sequence
  Description of Artificial Sequence: Synthetic oligonucleotide
  Sense strand starting at position 2293 of SEQ ID NO: 1888112
agaguaggcacuuagaguu

SEQ ID NO: 2511657 - RNA, 19 nt, Artificial Sequence
  Description of Artificial Sequence: Synthetic oligonucleotide
  Antisense strand to SEQ ID NO: 2511656
aacucuaagugccuacucu

SEQ ID NO: 2511658 - RNA, 19 nt, Artificial Sequence
  Description of Artificial Sequence: Synthetic oligonucleotide
  Sense strand starting at position 2325 of SEQ ID NO: 1888112
ucuguagggcgauaaauca

SEQ ID NO: 2511659 - RNA, 19 nt, Artificial Sequence
  Description of Artificial Sequence: Synthetic oligonucleotide
  Antisense strand to SEQ ID NO: 2511658
ugauuuaucgcccuacaga

SEQ ID NO: 2511660 - RNA, 19 nt, Artificial Sequence
  Description of Artificial Sequence: Synthetic oligonucleotide
  Sense strand starting at position 2406 of SEQ ID NO: 1888112
acagguuagucaccuuaga

SEQ ID NO: 2511661 - RNA, 19 nt, Artificial Sequence
  Description of Artificial Sequence: Synthetic oligonucleotide
  Antisense strand to SEQ ID NO: 2511660
ucuaaggugacuaaccugu

SEQ ID NO: 2511662 - RNA, 19 nt, Artificial Sequence
  Description of Artificial Sequence: Synthetic oligonucleotide
  Sense strand starting at position 2414 of SEQ ID NO: 1888112
gucaccuuagauuagcaua

SEQ ID NO: 2511663 - RNA, 19 nt, Artificial Sequence
  Description of Artificial Sequence: Synthetic oligonucleotide
  Antisense strand to SEQ ID NO: 2511662
uaugcuaaucuaaggugac

SEQ ID NO: 2511664 - RNA, 19 nt, Artificial Sequence
  Description of Artificial Sequence: Synthetic oligonucleotide
  Sense strand starting at position 2449 of SEQ ID NO: 1888112
ucugauagcccagacucau

SEQ ID NO: 2511665 - RNA, 19 nt, Artificial Sequence
  Description of Artificial Sequence: Synthetic oligonucleotide
  Antisense strand to SEQ ID NO: 2511664
augagucugggcuaucaga

SEQ ID NO: 2511666 - RNA, 19 nt, Artificial Sequence
  Description of Artificial Sequence: Synthetic oligonucleotide
  Sense strand starting at position 2493 of SEQ ID NO: 1888112
ggucucaggcaagauuaca

SEQ ID NO: 2511667 - RNA, 19 nt, Artificial Sequence
  Description of Artificial Sequence: Synthetic oligonucleotide
  Antisense strand to SEQ ID NO: 2511666
uguaaucuugccugagacc

SEQ ID NO: 2511668 - RNA, 19 nt, Artificial Sequence
  Description of Artificial Sequence: Synthetic oligonucleotide
  Sense strand starting at position 2558 of SEQ ID NO: 1888112
guccauauuguggacauau

SEQ ID NO: 2511669 - RNA, 19 nt, Artificial Sequence
  Description of Artificial Sequence: Synthetic oligonucleotide
  Antisense strand to SEQ ID NO: 2511668
auauguccacaauauggac

SEQ ID NO: 2511670 - RNA, 19 nt, Artificial Sequence
  Description of Artificial Sequence: Synthetic oligonucleotide
  Sense strand starting at position 2681 of SEQ ID NO: 1888112
ggcaaagaaauguggauau

SEQ ID NO: 2511671 - RNA, 19 nt, Artificial Sequence
  Description of Artificial Sequence: Synthetic oligonucleotide
  Antisense strand to SEQ ID NO: 2511670
auauccacauuucuuugcc

SEQ ID NO: 2511672 - RNA, 19 nt, Artificial Sequence
  Description of Artificial Sequence: Synthetic oligonucleotide
  Sense strand starting at position 2853 of SEQ ID NO: 1888112
cagaguugaccaggaagca

SEQ ID NO: 2511673 - RNA, 19 nt, Artificial Sequence
  Description of Artificial Sequence: Synthetic oligonucleotide
  Antisense strand to SEQ ID NO: 2511672
ugcuuccuggucaacucug

SEQ ID NO: 2511674 - RNA, 19 nt, Artificial Sequence
  Description of Artificial Sequence: Synthetic oligonucleotide
  Sense strand starting at position 2967 of SEQ ID NO: 1888112
aucucaagccgucaaagau

SEQ ID NO: 2511675 - RNA, 19 nt, Artificial Sequence
  Description of Artificial Sequence: Synthetic oligonucleotide
  Antisense strand to SEQ ID NO: 2511674
aucuuugacggcuugagau

SEQ ID NO: 2511676 - RNA, 19 nt, Artificial Sequence
  Description of Artificial Sequence: Synthetic oligonucleotide
  Sense strand starting at position 3199 of SEQ ID NO: 1888112
aguucuagacgugauauaa

SEQ ID NO: 2511677 - RNA, 19 nt, Artificial Sequence
  Description of Artificial Sequence: Synthetic oligonucleotide
  Antisense strand to SEQ ID NO: 2511676
uuauaucacgucuagaacu

SEQ ID NO: 2511678 - RNA, 19 nt, Artificial Sequence
  Description of Artificial Sequence: Synthetic oligonucleotide
  Sense strand starting at position 3391 of SEQ ID NO: 1888112
agggcacaccucuaacuau

SEQ ID NO: 2511679 - RNA, 19 nt, Artificial Sequence
  Description of Artificial Sequence: Synthetic oligonucleotide
  Antisense strand to SEQ ID NO: 2511678
auaguuagaggugugcccu

SEQ ID NO: 2511680 - RNA, 19 nt, Artificial Sequence
  Description of Artificial Sequence: Synthetic oligonucleotide
  Sense strand starting at position 3735 of SEQ ID NO: 1888112
gcagcaucaccauaggaau

SEQ ID NO: 2511681 - RNA, 19 nt, Artificial Sequence
  Description of Artificial Sequence: Synthetic oligonucleotide
  Antisense strand to SEQ ID NO: 2511680
auuccuauggugaugcugc

SEQ ID NO: 2511682 - RNA, 19 nt, Artificial Sequence
  Description of Artificial Sequence: Synthetic oligonucleotide
  Sense strand starting at position 3961 of SEQ ID NO: 1888112
uuagcaauugcagauauaa

SEQ ID NO: 2511683 - RNA, 19 nt, Artificial Sequence
  Description of Artificial Sequence: Synthetic oligonucleotide
  Antisense strand to SEQ ID NO: 2511682
uuauaucugcaauugcuaa

SEQ ID NO: 2511684 - RNA, 19 nt, Artificial Sequence
  Description of Artificial Sequence: Synthetic oligonucleotide
  Sense strand starting at position 95 of SEQ ID NO: 1888113
cuaaacagugcuuagaaau

SEQ ID NO: 2511685 - RNA, 19 nt, Artificial Sequence
  Description of Artificial Sequence: Synthetic oligonucleotide
  Antisense strand to SEQ ID NO: 2511684
auuucuaagcacuguuuag

SEQ ID NO: 2511686 - RNA, 19 nt, Artificial Sequence
  Description of Artificial Sequence: Synthetic oligonucleotide
  Sense strand starting at position 307 of SEQ ID NO: 1888113
agaggugauaugugaauau

SEQ ID NO: 2511687 - RNA, 19 nt, Artificial Sequence
  Description of Artificial Sequence: Synthetic oligonucleotide
  Antisense strand to SEQ ID NO: 2511686
auauucacauaucaccucu

SEQ ID NO: 2511688 - RNA, 19 nt, Artificial Sequence
  Description of Artificial Sequence: Synthetic oligonucleotide
  Sense strand starting at position 311 of SEQ ID NO: 1888113
gugauaugugaauauggua

SEQ ID NO: 2511689 - RNA, 19 nt, Artificial Sequence
  Description of Artificial Sequence: Synthetic oligonucleotide
  Antisense strand to SEQ ID NO: 2511688
uaccauauucacauaucac

SEQ ID NO: 2511690 - RNA, 19 nt, Artificial Sequence
  Description of Artificial Sequence: Synthetic oligonucleotide
  Sense strand starting at position 520 of SEQ ID NO: 1888113
uggauauaguauguggaca

SEQ ID NO: 2511691 - RNA, 19 nt, Artificial Sequence
  Description of Artificial Sequence: Synthetic oligonucleotide
  Antisense strand to SEQ ID NO: 2511690
uguccacauacuauaucca

SEQ ID NO: 2511692 - RNA, 19 nt, Artificial Sequence
  Description of Artificial Sequence: Synthetic oligonucleotide
  Sense strand starting at position 525 of SEQ ID NO: 1888113
auaguauguggacaguauu

SEQ ID NO: 2511693 - RNA, 19 nt, Artificial Sequence
  Description of Artificial Sequence: Synthetic oligonucleotide
  Antisense strand to SEQ ID NO: 2511692
aauacuguccacauacuau

SEQ ID NO: 2511694 - RNA, 19 nt, Artificial Sequence
  Description of Artificial Sequence: Synthetic oligonucleotide
  Sense strand starting at position 890 of SEQ ID NO: 1888113
uuaagagcugcauaauauu

SEQ ID NO: 2511695 - RNA, 19 nt, Artificial Sequence
  Description of Artificial Sequence: Synthetic oligonucleotide
  Antisense strand to SEQ ID NO: 2511694
aauauuaugcagcucuuaa

SEQ ID NO: 2511696 - RNA, 19 nt, Artificial Sequence
  Description of Artificial Sequence: Synthetic oligonucleotide
  Sense strand starting at position 1119 of SEQ ID NO: 1888113
uucuuacuaguagggagau

SEQ ID NO: 2511697 - RNA, 19 nt, Artificial Sequence
  Description of Artificial Sequence: Synthetic oligonucleotide
  Antisense strand to SEQ ID NO: 2511696
aucucccuacuaguaagaa

SEQ ID NO: 2511698 - RNA, 19 nt, Artificial Sequence
  Description of Artificial Sequence: Synthetic oligonucleotide
  Sense strand starting at position 1590 of SEQ ID NO: 1888113
acauguauuaugugggaaa

SEQ ID NO: 2511699 - RNA, 19 nt, Artificial Sequence
  Description of Artificial Sequence: Synthetic oligonucleotide
  Antisense strand to SEQ ID NO: 2511698
uuucccacauaauacaugu

SEQ ID NO: 2511700 - RNA, 19 nt, Artificial Sequence
  Description of Artificial Sequence: Synthetic oligonucleotide
  Sense strand starting at position 1592 of SEQ ID NO: 1888113
auguauuaugugggaaaga

SEQ ID NO: 2511701 - RNA, 19 nt, Artificial Sequence
  Description of Artificial Sequence: Synthetic oligonucleotide
  Antisense strand to SEQ ID NO: 2511700
ucuuucccacauaauacau

SEQ ID NO: 2511702 - RNA, 19 nt, Artificial Sequence
  Description of Artificial Sequence: Synthetic oligonucleotide
  Sense strand starting at position 1612 of SEQ ID NO: 1888113
ugagauaaauacuuggcau

SEQ ID NO: 2511703 - RNA, 19 nt, Artificial Sequence
  Description of Artificial Sequence: Synthetic oligonucleotide
  Antisense strand to SEQ ID NO: 2511702
augccaaguauuuaucuca

SEQ ID NO: 2511704 - RNA, 19 nt, Artificial Sequence
  Description of Artificial Sequence: Synthetic oligonucleotide
  Sense strand starting at position 1753 of SEQ ID NO: 1888113
agaaguagugagugacaga

SEQ ID NO: 2511705 - RNA, 19 nt, Artificial Sequence
  Description of Artificial Sequence: Synthetic oligonucleotide
  Antisense strand to SEQ ID NO: 2511704
ucugucacucacuacuucu

SEQ ID NO: 2511706 - RNA, 19 nt, Artificial Sequence
  Description of Artificial Sequence: Synthetic oligonucleotide
  Sense strand starting at position 1770 of SEQ ID NO: 1888113
gaggaagacuuagcucaca

SEQ ID NO: 2511707 - RNA, 19 nt, Artificial Sequence
  Description of Artificial Sequence: Synthetic oligonucleotide
  Antisense strand to SEQ ID NO: 2511706
ugugagcuaagucuuccuc

SEQ ID NO: 2511708 - RNA, 19 nt, Artificial Sequence
  Description of Artificial Sequence: Synthetic oligonucleotide
  Sense strand starting at position 2027 of SEQ ID NO: 1888113
gcaaauauuuagcugcuua

SEQ ID NO: 2511709 - RNA, 19 nt, Artificial Sequence
  Description of Artificial Sequence: Synthetic oligonucleotide
  Antisense strand to SEQ ID NO: 2511708
uaagcagcuaaauauuugc

SEQ ID NO: 2511710 - RNA, 19 nt, Artificial Sequence
  Description of Artificial Sequence: Synthetic oligonucleotide
  Sense strand starting at position 2086 of SEQ ID NO: 1888113
agaauuggccuuuacuuaa

SEQ ID NO: 2511711 - RNA, 19 nt, Artificial Sequence
  Description of Artificial Sequence: Synthetic oligonucleotide
  Antisense strand to SEQ ID NO: 2511710
uuaaguaaaggccaauucu

SEQ ID NO: 2511712 - RNA, 19 nt, Artificial Sequence
  Description of Artificial Sequence: Synthetic oligonucleotide
  Sense strand starting at position 2161 of SEQ ID NO: 1888113
gugagcauccugcauuucu

SEQ ID NO: 2511713 - RNA, 19 nt, Artificial Sequence
  Description of Artificial Sequence: Synthetic oligonucleotide
  Antisense strand to SEQ ID NO: 2511712
agaaaugcaggaugcucac

SEQ ID NO: 2511714 - RNA, 19 nt, Artificial Sequence
  Description of Artificial Sequence: Synthetic oligonucleotide
  Sense strand starting at position 2177 of SEQ ID NO: 1888113
ucuauagcuccagauuaug

SEQ ID NO: 2511715 - RNA, 19 nt, Artificial Sequence
  Description of Artificial Sequence: Synthetic oligonucleotide
  Antisense strand to SEQ ID NO: 2511714
cauaaucuggagcuauaga

SEQ ID NO: 2511716 - RNA, 19 nt, Artificial Sequence
  Description of Artificial Sequence: Synthetic oligonucleotide
  Sense strand starting at position 2237 of SEQ ID NO: 1888113
acaauuugaugauggaaga

SEQ ID NO: 2511717 - RNA, 19 nt, Artificial Sequence
  Description of Artificial Sequence: Synthetic oligonucleotide
  Antisense strand to SEQ ID NO: 2511716
ucuuccaucaucaaauugu

SEQ ID NO: 2511718 - RNA, 19 nt, Artificial Sequence
  Description of Artificial Sequence: Synthetic oligonucleotide
  Sense strand starting at position 2262 of SEQ ID NO: 1888113
ggcaguguuggagauaaug

SEQ ID NO: 2511719 - RNA, 19 nt, Artificial Sequence
  Description of Artificial Sequence: Synthetic oligonucleotide
  Antisense strand to SEQ ID NO: 2511718
cauuaucuccaacacugcc

SEQ ID NO: 2511720 - RNA, 19 nt, Artificial Sequence
  Description of Artificial Sequence: Synthetic oligonucleotide
  Sense strand starting at position 2298 of SEQ ID NO: 1888113
uuguuauuugagugcuuga

SEQ ID NO: 2511721 - RNA, 19 nt, Artificial Sequence
  Description of Artificial Sequence: Synthetic oligonucleotide
  Antisense strand to SEQ ID NO: 2511720
ucaagcacucaaauaacaa

SEQ ID NO: 2511722 - RNA, 19 nt, Artificial Sequence
  Description of Artificial Sequence: Synthetic oligonucleotide
  Sense strand starting at position 2667 of SEQ ID NO: 1888113
agagaagucuuccucuaag

SEQ ID NO: 2511723 - RNA, 19 nt, Artificial Sequence
  Description of Artificial Sequence: Synthetic oligonucleotide
  Antisense strand to SEQ ID NO: 2511722
cuuagaggaagacuucucu

SEQ ID NO: 2511724 - RNA, 19 nt, Artificial Sequence
  Description of Artificial Sequence: Synthetic oligonucleotide
  Sense strand starting at position 2670 of SEQ ID NO: 1888113
gaagucuuccucuaagacg

SEQ ID NO: 2511725 - RNA, 19 nt, Artificial Sequence
  Description of Artificial Sequence: Synthetic oligonucleotide
  Antisense strand to SEQ ID NO: 2511724
cgucuuagaggaagacuuc

SEQ ID NO: 2511726 - RNA, 19 nt, Artificial Sequence
  Description of Artificial Sequence: Synthetic oligonucleotide
  Sense strand starting at position 2677 of SEQ ID NO: 1888113
uccucuaagacggaauguu

SEQ ID NO: 2511727 - RNA, 19 nt, Artificial Sequence
  Description of Artificial Sequence: Synthetic oligonucleotide
  Antisense strand to SEQ ID NO: 2511726
aacauuccgucuuagagga

SEQ ID NO: 2511728 - RNA, 19 nt, Artificial Sequence
  Description of Artificial Sequence: Synthetic oligonucleotide
  Sense strand starting at position 2719 of SEQ ID NO: 1888113
aagaguuuaccaggcagaa

SEQ ID NO: 2511729 - RNA, 19 nt, Artificial Sequence
  Description of Artificial Sequence: Synthetic oligonucleotide
  Antisense strand to SEQ ID NO: 2511728
uucugccugguaaacucuu

SEQ ID NO: 2511730 - RNA, 19 nt, Artificial Sequence
  Description of Artificial Sequence: Synthetic oligonucleotide
  Sense strand starting at position 2740 of SEQ ID NO: 1888113
guagaacucagaggagguu

SEQ ID NO: 2511731 - RNA, 19 nt, Artificial Sequence
  Description of Artificial Sequence: Synthetic oligonucleotide
  Antisense strand to SEQ ID NO: 2511730
aaccuccucugaguucuac

SEQ ID NO: 2511732 - RNA, 19 nt, Artificial Sequence
  Description of Artificial Sequence: Synthetic oligonucleotide
  Sense strand starting at position 2754 of SEQ ID NO: 1888113
agguuacaggcaugggaau

SEQ ID NO: 2511733 - RNA, 19 nt, Artificial Sequence
  Description of Artificial Sequence: Synthetic oligonucleotide
  Antisense strand to SEQ ID NO: 2511732
auucccaugccuguaaccu

SEQ ID NO: 2511734 - RNA, 19 nt, Artificial Sequence
  Description of Artificial Sequence: Synthetic oligonucleotide
  Sense strand starting at position 2755 of SEQ ID NO: 1888113
gguuacaggcaugggaaua

SEQ ID NO: 2511735 - RNA, 19 nt, Artificial Sequence
  Description of Artificial Sequence: Synthetic oligonucleotide
  Antisense strand to SEQ ID NO: 2511734
uauucccaugccuguaacc

SEQ ID NO: 2511736 - RNA, 19 nt, Artificial Sequence
  Description of Artificial Sequence: Synthetic oligonucleotide
  Sense strand starting at position 2756 of SEQ ID NO: 1888113
guuacaggcaugggaauaa

SEQ ID NO: 2511737 - RNA, 19 nt, Artificial Sequence
  Description of Artificial Sequence: Synthetic oligonucleotide
  Antisense strand to SEQ ID NO: 2511736
uuauucccaugccuguaac

SEQ ID NO: 2511738 - RNA, 19 nt, Artificial Sequence
  Description of Artificial Sequence: Synthetic oligonucleotide
  Sense strand starting at position 2792 of SEQ ID NO: 1888113
guacuuucuagacaucgga

SEQ ID NO: 2511739 - RNA, 19 nt, Artificial Sequence
  Description of Artificial Sequence: Synthetic oligonucleotide
  Antisense strand to SEQ ID NO: 2511738
uccgaugucuagaaaguac

SEQ ID NO: 2511740 - RNA, 19 nt, Artificial Sequence
  Description of Artificial Sequence: Synthetic oligonucleotide
  Sense strand starting at position 2887 of SEQ ID NO: 1888113
cuuguaaagcuugauaaag

SEQ ID NO: 2511741 - RNA, 19 nt, Artificial Sequence
  Description of Artificial Sequence: Synthetic oligonucleotide
  Antisense strand to SEQ ID NO: 2511740
cuuuaucaagcuuuacaag

SEQ ID NO: 2511742 - RNA, 19 nt, Artificial Sequence
  Description of Artificial Sequence: Synthetic oligonucleotide
  Sense strand starting at position 2910 of SEQ ID NO: 1888113
ugaacauucgcucaagaac

SEQ ID NO: 2511743 - RNA, 19 nt, Artificial Sequence
  Description of Artificial Sequence: Synthetic oligonucleotide
  Antisense strand to SEQ ID NO: 2511742
guucuugagcgaauguuca

SEQ ID NO: 2511744 - RNA, 19 nt, Artificial Sequence
  Description of Artificial Sequence: Synthetic oligonucleotide
  Sense strand starting at position 2975 of SEQ ID NO: 1888113
gacucaggauugucaagau

SEQ ID NO: 2511745 - RNA, 19 nt, Artificial Sequence
  Description of Artificial Sequence: Synthetic oligonucleotide
  Antisense strand to SEQ ID NO: 2511744
aucuugacaauccugaguc

SEQ ID NO: 2511746 - RNA, 19 nt, Artificial Sequence
  Description of Artificial Sequence: Synthetic oligonucleotide
  Sense strand starting at position 2985 of SEQ ID NO: 1888113
ugucaagauuauucuggau

SEQ ID NO: 2511747 - RNA, 19 nt, Artificial Sequence
  Description of Artificial Sequence: Synthetic oligonucleotide
  Antisense strand to SEQ ID NO: 2511746
auccagaauaaucuugaca

SEQ ID NO: 2511748 - RNA, 19 nt, Artificial Sequence
  Description of Artificial Sequence: Synthetic oligonucleotide
  Sense strand starting at position 3086 of SEQ ID NO: 1888113
agaccugguccggaagagu

SEQ ID NO: 2511749 - RNA, 19 nt, Artificial Sequence
  Description of Artificial Sequence: Synthetic oligonucleotide
  Antisense strand to SEQ ID NO: 2511748
acucuuccggaccaggucu

SEQ ID NO: 2511750 - RNA, 19 nt, Artificial Sequence
  Description of Artificial Sequence: Synthetic oligonucleotide
  Sense strand starting at position 3203 of SEQ ID NO: 1888113
agaugucaagacugacuua

SEQ ID NO: 2511751 - RNA, 19 nt, Artificial Sequence
  Description of Artificial Sequence: Synthetic oligonucleotide
  Antisense strand to SEQ ID NO: 2511750
uaagucagucuugacaucu

SEQ ID NO: 2511752 - RNA, 19 nt, Artificial Sequence
  Description of Artificial Sequence: Synthetic oligonucleotide
  Sense strand starting at position 3214 of SEQ ID NO: 1888113
cugacuuagagaugcauga

SEQ ID NO: 2511753 - RNA, 19 nt, Artificial Sequence
  Description of Artificial Sequence: Synthetic oligonucleotide
  Antisense strand to SEQ ID NO: 2511752
ucaugcaucucuaagucag

SEQ ID NO: 2511754 - RNA, 19 nt, Artificial Sequence
  Description of Artificial Sequence: Synthetic oligonucleotide
  Sense strand starting at position 3221 of SEQ ID NO: 1888113
agagaugcaugacuugaca

SEQ ID NO: 2511755 - RNA, 19 nt, Artificial Sequence
  Description of Artificial Sequence: Synthetic oligonucleotide
  Antisense strand to SEQ ID NO: 2511754
ugucaagucaugcaucucu

SEQ ID NO: 2511756 - RNA, 19 nt, Artificial Sequence
  Description of Artificial Sequence: Synthetic oligonucleotide
  Sense strand starting at position 3223 of SEQ ID NO: 1888113
agaugcaugacuugacaag

SEQ ID NO: 2511757 - RNA, 19 nt, Artificial Sequence
  Description of Artificial Sequence: Synthetic oligonucleotide
  Antisense strand to SEQ ID NO: 2511756
cuugucaagucaugcaucu

SEQ ID NO: 2511758 - RNA, 19 nt, Artificial Sequence
  Description of Artificial Sequence: Synthetic oligonucleotide
  Sense strand starting at position 3382 of SEQ ID NO: 1888113
accucuucagggugaggaa

SEQ ID NO: 2511759 - RNA, 19 nt, Artificial Sequence
  Description of Artificial Sequence: Synthetic oligonucleotide
  Antisense strand to SEQ ID NO: 2511758
uuccucacccugaagaggu

SEQ ID NO: 2511760 - RNA, 19 nt, Artificial Sequence
  Description of Artificial Sequence: Synthetic oligonucleotide
  Sense strand starting at position 3461 of SEQ ID NO: 1888113
agaguagguguccaaucau

SEQ ID NO: 2511761 - RNA, 19 nt, Artificial Sequence
  Description of Artificial Sequence: Synthetic oligonucleotide
  Antisense strand to SEQ ID NO: 2511760
augauuggacaccuacucu

SEQ ID NO: 2511762 - RNA, 19 nt, Artificial Sequence
  Description of Artificial Sequence: Synthetic oligonucleotide
  Sense strand starting at position 3605 of SEQ ID NO: 1888113
aguuacucauuugugaguu

SEQ ID NO: 2511763 - RNA, 19 nt, Artificial Sequence
  Description of Artificial Sequence: Synthetic oligonucleotide
  Antisense strand to SEQ ID NO: 2511762
aacucacaaaugaguaacu

SEQ ID NO: 2511764 - RNA, 19 nt, Artificial Sequence
  Description of Artificial Sequence: Synthetic oligonucleotide
  Sense strand starting at position 168 of SEQ ID NO: 1888114
uuuauugagguccaguuga

SEQ ID NO: 2511765 - RNA, 19 nt, Artificial Sequence
  Description of Artificial Sequence: Synthetic oligonucleotide
  Antisense strand to SEQ ID NO: 2511764
ucaacuggaccucaauaaa

SEQ ID NO: 2511766 - RNA, 19 nt, Artificial Sequence
  Description of Artificial Sequence: Synthetic oligonucleotide
  Sense strand starting at position 173 of SEQ ID NO: 1888114
ugagguccaguugaucaau

SEQ ID NO: 2511767 - RNA, 19 nt, Artificial Sequence
  Description of Artificial Sequence: Synthetic oligonucleotide
  Antisense strand to SEQ ID NO: 2511766
auugaucaacuggaccuca

SEQ ID NO: 2511768 - RNA, 19 nt, Artificial Sequence
  Description of Artificial Sequence: Synthetic oligonucleotide
  Sense strand starting at position 216 of SEQ ID NO: 1888114
cugugucaagucuaagaac

SEQ ID NO: 2511769 - RNA, 19 nt, Artificial Sequence
  Description of Artificial Sequence: Synthetic oligonucleotide
  Antisense strand to SEQ ID NO: 2511768
guucuuagacuugacacag

SEQ ID NO: 2511770 - RNA, 19 nt, Artificial Sequence
  Description of Artificial Sequence: Synthetic oligonucleotide
  Sense strand starting at position 305 of SEQ ID NO: 1888114
guuacauuaugaguccaaa

SEQ ID NO: 2511771 - RNA, 19 nt, Artificial Sequence
  Description of Artificial Sequence: Synthetic oligonucleotide
  Antisense strand to SEQ ID NO: 2511770
uuuggacucauaauguaac

SEQ ID NO: 2511772 - RNA, 19 nt, Artificial Sequence
  Description of Artificial Sequence: Synthetic oligonucleotide
  Sense strand starting at position 379 of SEQ ID NO: 1888114
gucuauguaugcccaauuu

SEQ ID NO: 2511773 - RNA, 19 nt, Artificial Sequence
  Description of Artificial Sequence: Synthetic oligonucleotide
  Antisense strand to SEQ ID NO: 2511772
aaauugggcauacauagac

SEQ ID NO: 2511774 - RNA, 19 nt, Artificial Sequence
  Description of Artificial Sequence: Synthetic oligonucleotide
  Sense strand starting at position 695 of SEQ ID NO: 1888114
cccggaagccucuaguaga

SEQ ID NO: 2511775 - RNA, 19 nt, Artificial Sequence
  Description of Artificial Sequence: Synthetic oligonucleotide
  Antisense strand to SEQ ID NO: 2511774
ucuacuagaggcuuccggg

SEQ ID NO: 2511776 - RNA, 19 nt, Artificial Sequence
  Description of Artificial Sequence: Synthetic oligonucleotide
  Sense strand starting at position 789 of SEQ ID NO: 1888114
agaggauuacugugauugg

SEQ ID NO: 2511777 - RNA, 19 nt, Artificial Sequence
  Description of Artificial Sequence: Synthetic oligonucleotide
  Antisense strand to SEQ ID NO: 2511776
ccaaucacaguaauccucu

SEQ ID NO: 2511778 - RNA, 19 nt, Artificial Sequence
  Description of Artificial Sequence: Synthetic oligonucleotide
  Sense strand starting at position 909 of SEQ ID NO: 1888114
cucuguuaccaaggaagaa

SEQ ID NO: 2511779 - RNA, 19 nt, Artificial Sequence
  Description of Artificial Sequence: Synthetic oligonucleotide
  Antisense strand to SEQ ID NO: 2511778
uucuuccuugguaacagag

SEQ ID NO: 2511780 - RNA, 19 nt, Artificial Sequence
  Description of Artificial Sequence: Synthetic oligonucleotide
  Sense strand starting at position 1204 of SEQ ID NO: 1888114
gacucuggauuccuugauu

SEQ ID NO: 2511781 - RNA, 19 nt, Artificial Sequence
  Description of Artificial Sequence: Synthetic oligonucleotide
  Antisense strand to SEQ ID NO: 2511780
aaucaaggaauccagaguc

SEQ ID NO: 2511782 - RNA, 19 nt, Artificial Sequence
  Description of Artificial Sequence: Synthetic oligonucleotide
  Sense strand starting at position 1254 of SEQ ID NO: 1888114
ggguuaagucuguaggaaa

SEQ ID NO: 2511783 - RNA, 19 nt, Artificial Sequence
  Description of Artificial Sequence: Synthetic oligonucleotide
  Antisense strand to SEQ ID NO: 2511782
uuuccuacagacuuaaccc

SEQ ID NO: 2511784 - RNA, 19 nt, Artificial Sequence
  Description of Artificial Sequence: Synthetic oligonucleotide
  Sense strand starting at position 1348 of SEQ ID NO: 1888114
ggugaauccacucaugugu

SEQ ID NO: 2511785 - RNA, 19 nt, Artificial Sequence
  Description of Artificial Sequence: Synthetic oligonucleotide
  Antisense strand to SEQ ID NO: 2511784
acacaugaguggauucacc

SEQ ID NO: 2511786 - RNA, 19 nt, Artificial Sequence
  Description of Artificial Sequence: Synthetic oligonucleotide
  Sense strand starting at position 1446 of SEQ ID NO: 1888114
aguguugucauuugacuga

SEQ ID NO: 2511787 - RNA, 19 nt, Artificial Sequence
  Description of Artificial Sequence: Synthetic oligonucleotide
  Antisense strand to SEQ ID NO: 2511786
ucagucaaaugacaacacu

SEQ ID NO: 2511788 - RNA, 19 nt, Artificial Sequence
  Description of Artificial Sequence: Synthetic oligonucleotide
  Sense strand starting at position 1987 of SEQ ID NO: 1888114
gaaccugagucacuaagau

SEQ ID NO: 2511789 - RNA, 19 nt, Artificial Sequence
  Description of Artificial Sequence: Synthetic oligonucleotide
  Antisense strand to SEQ ID NO: 2511788
aucuuagugacucagguuc

SEQ ID NO: 2511790 - RNA, 19 nt, Artificial Sequence
  Description of Artificial Sequence: Synthetic oligonucleotide
  Sense strand starting at position 2020 of SEQ ID NO: 1888114
acuuaauuacauugugaug

SEQ ID NO: 2511791 - RNA, 19 nt, Artificial Sequence
  Description of Artificial Sequence: Synthetic oligonucleotide
  Antisense strand to SEQ ID NO: 2511790
caucacaauguaauuaagu

SEQ ID NO: 2511792 - RNA, 19 nt, Artificial Sequence
  Description of Artificial Sequence: Synthetic oligonucleotide
  Sense strand starting at position 2236 of SEQ ID NO: 1888114
guaccaugucuggaugcaa

SEQ ID NO: 2511793 - RNA, 19 nt, Artificial Sequence
  Description of Artificial Sequence: Synthetic oligonucleotide
  Antisense strand to SEQ ID NO: 2511792
uugcauccagacaugguac

SEQ ID NO: 2511794 - RNA, 19 nt, Artificial Sequence
  Description of Artificial Sequence: Synthetic oligonucleotide
  Sense strand starting at position 2653 of SEQ ID NO: 1888114
auguaacuuguaggaaaug

SEQ ID NO: 2511795 - RNA, 19 nt, Artificial Sequence
  Description of Artificial Sequence: Synthetic oligonucleotide
  Antisense strand to SEQ ID NO: 2511794
cauuuccuacaaguuacau

SEQ ID NO: 2511796 - RNA, 19 nt, Artificial Sequence
  Description of Artificial Sequence: Synthetic oligonucleotide
  Sense strand starting at position 2757 of SEQ ID NO: 1888114
guggauacaucacuuuacu

SEQ ID NO: 2511797 - RNA, 19 nt, Artificial Sequence
  Description of Artificial Sequence: Synthetic oligonucleotide
  Antisense strand to SEQ ID NO: 2511796
aguaaagugauguauccac

SEQ ID NO: 2511798 - RNA, 19 nt, Artificial Sequence
  Description of Artificial Sequence: Synthetic oligonucleotide
  Sense strand starting at position 2782 of SEQ ID NO: 1888114
ucuugacagcgauaagauc

SEQ ID NO: 2511799 - RNA, 19 nt, Artificial Sequence
  Description of Artificial Sequence: Synthetic oligonucleotide
  Antisense strand to SEQ ID NO: 2511798
gaucuuaucgcugucaaga

SEQ ID NO: 2511800 - RNA, 19 nt, Artificial Sequence
  Description of Artificial Sequence: Synthetic oligonucleotide
  Sense strand starting at position 2789 of SEQ ID NO: 1888114
agcgauaagaucugcauuu

SEQ ID NO: 2511801 - RNA, 19 nt, Artificial Sequence
  Description of Artificial Sequence: Synthetic oligonucleotide
  Antisense strand to SEQ ID NO: 2511800
aaaugcagaucuuaucgcu

SEQ ID NO: 2511802 - RNA, 19 nt, Artificial Sequence
  Description of Artificial Sequence: Synthetic oligonucleotide
  Sense strand starting at position 2853 of SEQ ID NO: 1888114
gcaggaacucaucauuauu

SEQ ID NO: 2511803 - RNA, 19 nt, Artificial Sequence
  Description of Artificial Sequence: Synthetic oligonucleotide
  Antisense strand to SEQ ID NO: 2511802
aauaaugaugaguuccugc

SEQ ID NO: 2511804 - RNA, 19 nt, Artificial Sequence
  Description of Artificial Sequence: Synthetic oligonucleotide
  Sense strand starting at position 2967 of SEQ ID NO: 1888114
agggcuaaauguuugauca

SEQ ID NO: 2511805 - RNA, 19 nt, Artificial Sequence
  Description of Artificial Sequence: Synthetic oligonucleotide
  Antisense strand to SEQ ID NO: 2511804
ugaucaaacauuuagcccu

SEQ ID NO: 2511806 - RNA, 19 nt, Artificial Sequence
  Description of Artificial Sequence: Synthetic oligonucleotide
  Sense strand starting at position 2968 of SEQ ID NO: 1888114
gggcuaaauguuugaucaa

SEQ ID NO: 2511807 - RNA, 19 nt, Artificial Sequence
  Description of Artificial Sequence: Synthetic oligonucleotide
  Antisense strand to SEQ ID NO: 2511806
uugaucaaacauuuagccc

SEQ ID NO: 2511808 - RNA, 19 nt, Artificial Sequence
  Description of Artificial Sequence: Synthetic oligonucleotide
  Sense strand starting at position 3062 of SEQ ID NO: 1888114
guugguuacccggauuaaa

SEQ ID NO: 2511809 - RNA, 19 nt, Artificial Sequence
  Description of Artificial Sequence: Synthetic oligonucleotide
  Antisense strand to SEQ ID NO: 2511808
uuuaauccggguaaccaac

SEQ ID NO: 2511810 - RNA, 19 nt, Artificial Sequence
  Description of Artificial Sequence: Synthetic oligonucleotide
  Sense strand starting at position 3094 of SEQ ID NO: 1888114
cucagagugcaugaugauu

SEQ ID NO: 2511811 - RNA, 19 nt, Artificial Sequence
  Description of Artificial Sequence: Synthetic oligonucleotide
  Antisense strand to SEQ ID NO: 2511810
aaucaucaugcacucugag

SEQ ID NO: 2511812 - RNA, 19 nt, Artificial Sequence
  Description of Artificial Sequence: Synthetic oligonucleotide
  Sense strand starting at position 3135 of SEQ ID NO: 1888114
ggaucuauucagugacgag

SEQ ID NO: 2511813 - RNA, 19 nt, Artificial Sequence
  Description of Artificial Sequence: Synthetic oligonucleotide
  Antisense strand to SEQ ID NO: 2511812
cucgucacugaauagaucc

SEQ ID NO: 2511814 - RNA, 19 nt, Artificial Sequence
  Description of Artificial Sequence: Synthetic oligonucleotide
  Sense strand starting at position 3163 of SEQ ID NO: 1888114
ucuggaagccucugaaauu

SEQ ID NO: 2511815 - RNA, 19 nt, Artificial Sequence
  Description of Artificial Sequence: Synthetic oligonucleotide
  Antisense strand to SEQ ID NO: 2511814
aauuucagaggcuuccaga

SEQ ID NO: 2511816 - RNA, 19 nt, Artificial Sequence
  Description of Artificial Sequence: Synthetic oligonucleotide
  Sense strand starting at position 3263 of SEQ ID NO: 1888114
uggcaaguucuggaauggu

SEQ ID NO: 2511817 - RNA, 19 nt, Artificial Sequence
  Description of Artificial Sequence: Synthetic oligonucleotide
  Antisense strand to SEQ ID NO: 2511816
accauuccagaacuugcca

SEQ ID NO: 2511818 - RNA, 19 nt, Artificial Sequence
  Description of Artificial Sequence: Synthetic oligonucleotide
  Sense strand starting at position 3266 of SEQ ID NO: 1888114
caaguucuggaaugguauu

SEQ ID NO: 2511819 - RNA, 19 nt, Artificial Sequence
  Description of Artificial Sequence: Synthetic oligonucleotide
  Antisense strand to SEQ ID NO: 2511818
aauaccauuccagaacuug

SEQ ID NO: 2511820 - RNA, 19 nt, Artificial Sequence
  Description of Artificial Sequence: Synthetic oligonucleotide
  Sense strand starting at position 3276 of SEQ ID NO: 1888114
aaugguauucugcagaguc

SEQ ID NO: 2511821 - RNA, 19 nt, Artificial Sequence
  Description of Artificial Sequence: Synthetic oligonucleotide
  Antisense strand to SEQ ID NO: 2511820
gacucugcagaauaccauu

SEQ ID NO: 2511822 - RNA, 19 nt, Artificial Sequence
  Description of Artificial Sequence: Synthetic oligonucleotide
  Sense strand starting at position 3278 of SEQ ID NO: 1888114
ugguauucugcagagucaa

SEQ ID NO: 2511823 - RNA, 19 nt, Artificial Sequence
  Description of Artificial Sequence: Synthetic oligonucleotide
  Antisense strand to SEQ ID NO: 2511822
uugacucugcagaauacca

SEQ ID NO: 2511824 - RNA, 19 nt, Artificial Sequence
  Description of Artificial Sequence: Synthetic oligonucleotide
  Sense strand starting at position 3347 of SEQ ID NO: 1888114
cacuaacuuggaugugaca

SEQ ID NO: 2511825 - RNA, 19 nt, Artificial Sequence
  Description of Artificial Sequence: Synthetic oligonucleotide
  Antisense strand to SEQ ID NO: 2511824
ugucacauccaaguuagug

SEQ ID NO: 2511826 - RNA, 19 nt, Artificial Sequence
  Description of Artificial Sequence: Synthetic oligonucleotide
  Sense strand starting at position 3513 of SEQ ID NO: 1888114
gcagcucucggagaauaag

SEQ ID NO: 2511827 - RNA, 19 nt, Artificial Sequence
  Description of Artificial Sequence: Synthetic oligonucleotide
  Antisense strand to SEQ ID NO: 2511826
cuuauucuccgagagcugc

SEQ ID NO: 2511828 - RNA, 19 nt, Artificial Sequence
  Description of Artificial Sequence: Synthetic oligonucleotide
  Sense strand starting at position 3638 of SEQ ID NO: 1888114
caugguagugaugggaaau

SEQ ID NO: 2511829 - RNA, 19 nt, Artificial Sequence
  Description of Artificial Sequence: Synthetic oligonucleotide
  Antisense strand to SEQ ID NO: 2511828
auuucccaucacuaccaug

SEQ ID NO: 2511830 - RNA, 19 nt, Artificial Sequence
  Description of Artificial Sequence: Synthetic oligonucleotide
  Sense strand starting at position 3639 of SEQ ID NO: 1888114
augguagugaugggaaaua

SEQ ID NO: 2511831 - RNA, 19 nt, Artificial Sequence
  Description of Artificial Sequence: Synthetic oligonucleotide
  Antisense strand to SEQ ID NO: 2511830
uauuucccaucacuaccau

SEQ ID NO: 2511832 - RNA, 19 nt, Artificial Sequence
  Description of Artificial Sequence: Synthetic oligonucleotide
  Sense strand starting at position 3706 of SEQ ID NO: 1888114
gcacauucuccugaaguga

SEQ ID NO: 2511833 - RNA, 19 nt, Artificial Sequence
  Description of Artificial Sequence: Synthetic oligonucleotide
  Antisense strand to SEQ ID NO: 2511832
ucacuucaggagaaugugc

SEQ ID NO: 2511834 - RNA, 19 nt, Artificial Sequence
  Description of Artificial Sequence: Synthetic oligonucleotide
  Sense strand starting at position 3720 of SEQ ID NO: 1888114
agugauaucuuugcaauaa

SEQ ID NO: 2511835 - RNA, 19 nt, Artificial Sequence
  Description of Artificial Sequence: Synthetic oligonucleotide
  Antisense strand to SEQ ID NO: 2511834
uuauugcaaagauaucacu

SEQ ID NO: 2511836 - RNA, 19 nt, Artificial Sequence
  Description of Artificial Sequence: Synthetic oligonucleotide
  Sense strand starting at position 3774 of SEQ ID NO: 1888114
agacaauaaucagaagaau

SEQ ID NO: 2511837 - RNA, 19 nt, Artificial Sequence
  Description of Artificial Sequence: Synthetic oligonucleotide
  Antisense strand to SEQ ID NO: 2511836
auucuucugauuauugucu

SEQ ID NO: 2511838 - RNA, 19 nt, Artificial Sequence
  Description of Artificial Sequence: Synthetic oligonucleotide
  Sense strand starting at position 3801 of SEQ ID NO: 1888114
agcauucugaaauaugcga

SEQ ID NO: 2511839 - RNA, 19 nt, Artificial Sequence
  Description of Artificial Sequence: Synthetic oligonucleotide
  Antisense strand to SEQ ID NO: 2511838
ucgcauauuucagaaugcu

SEQ ID NO: 2511840 - RNA, 19 nt, Artificial Sequence
  Description of Artificial Sequence: Synthetic oligonucleotide
  Sense strand starting at position 3842 of SEQ ID NO: 1888114
gugagacucccaggugaag

SEQ ID NO: 2511841 - RNA, 19 nt, Artificial Sequence
  Description of Artificial Sequence: Synthetic oligonucleotide
  Antisense strand to SEQ ID NO: 2511840
cuucaccugggagucucac

SEQ ID NO: 2511842 - RNA, 19 nt, Artificial Sequence
  Description of Artificial Sequence: Synthetic oligonucleotide
  Sense strand starting at position 3853 of SEQ ID NO: 1888114
aggugaagucgagggugaa

SEQ ID NO: 2511843 - RNA, 19 nt, Artificial Sequence
  Description of Artificial Sequence: Synthetic oligonucleotide
  Antisense strand to SEQ ID NO: 2511842
uucacccucgacuucaccu

SEQ ID NO: 2511844 - RNA, 19 nt, Artificial Sequence
  Description of Artificial Sequence: Synthetic oligonucleotide
  Sense strand starting at position 73 of SEQ ID NO: 1888115
gggucuucuagggagguca

SEQ ID NO: 2511845 - RNA, 19 nt, Artificial Sequence
  Description of Artificial Sequence: Synthetic oligonucleotide
  Antisense strand to SEQ ID NO: 2511844
ugaccucccuagaagaccc

SEQ ID NO: 2511846 - RNA, 19 nt, Artificial Sequence
  Description of Artificial Sequence: Synthetic oligonucleotide
  Sense strand starting at position 109 of SEQ ID NO: 1888115
uggaaauggcucugccacu

SEQ ID NO: 2511847 - RNA, 19 nt, Artificial Sequence
  Description of Artificial Sequence: Synthetic oligonucleotide
  Antisense strand to SEQ ID NO: 2511846
aguggcagagccauuucca

SEQ ID NO: 2511848 - RNA, 19 nt, Artificial Sequence
  Description of Artificial Sequence: Synthetic oligonucleotide
  Sense strand starting at position 110 of SEQ ID NO: 1888115
ggaaauggcucugccacua

SEQ ID NO: 2511849 - RNA, 19 nt, Artificial Sequence
  Description of Artificial Sequence: Synthetic oligonucleotide
  Antisense strand to SEQ ID NO: 2511848
uaguggcagagccauuucc

SEQ ID NO: 2511850 - RNA, 19 nt, Artificial Sequence
  Description of Artificial Sequence: Synthetic oligonucleotide
  Sense strand starting at position 137 of SEQ ID NO: 1888115
uguguccuugggugaauga

SEQ ID NO: 2511851 - RNA, 19 nt, Artificial Sequence
  Description of Artificial Sequence: Synthetic oligonucleotide
  Antisense strand to SEQ ID NO: 2511850
ucauucacccaaggacaca

SEQ ID NO: 2511852 - RNA, 19 nt, Artificial Sequence
  Description of Artificial Sequence: Synthetic oligonucleotide
  Sense strand starting at position 138 of SEQ ID NO: 1888115
guguccuugggugaaugau

SEQ ID NO: 2511853 - RNA, 19 nt, Artificial Sequence
  Description of Artificial Sequence: Synthetic oligonucleotide
  Antisense strand to SEQ ID NO: 2511852
aucauucacccaaggacac

SEQ ID NO: 2511854 - RNA, 19 nt, Artificial Sequence
  Description of Artificial Sequence: Synthetic oligonucleotide
  Sense strand starting at position 211 of SEQ ID NO: 1888115
gugauuucuuaggauccua

SEQ ID NO: 2511855 - RNA, 19 nt, Artificial Sequence
  Description of Artificial Sequence: Synthetic oligonucleotide
  Antisense strand to SEQ ID NO: 2511854
uaggauccuaagaaaucac

SEQ ID NO: 2511856 - RNA, 19 nt, Artificial Sequence
  Description of Artificial Sequence: Synthetic oligonucleotide
  Sense strand starting at position 242 of SEQ ID NO: 1888115
guuucuuggucucuaaauu

SEQ ID NO: 2511857 - RNA, 19 nt, Artificial Sequence
  Description of Artificial Sequence: Synthetic oligonucleotide
  Antisense strand to SEQ ID NO: 2511856
aauuuagagaccaagaaac

SEQ ID NO: 2511858 - RNA, 19 nt, Artificial Sequence
  Description of Artificial Sequence: Synthetic oligonucleotide
  Sense strand starting at position 269 of SEQ ID NO: 1888115
caggacuuagcuuagguua

SEQ ID NO: 2511859 - RNA, 19 nt, Artificial Sequence
  Description of Artificial Sequence: Synthetic oligonucleotide
  Antisense strand to SEQ ID NO: 2511858
uaaccuaagcuaaguccug

SEQ ID NO: 2511860 - RNA, 19 nt, Artificial Sequence
  Description of Artificial Sequence: Synthetic oligonucleotide
  Sense strand starting at position 358 of SEQ ID NO: 1888115
aucugauagaucuggaguc

SEQ ID NO: 2511861 - RNA, 19 nt, Artificial Sequence
  Description of Artificial Sequence: Synthetic oligonucleotide
  Antisense strand to SEQ ID NO: 2511860
gacuccagaucuaucagau

SEQ ID NO: 2511862 - RNA, 19 nt, Artificial Sequence
  Description of Artificial Sequence: Synthetic oligonucleotide
  Sense strand starting at position 377 of SEQ ID NO: 1888115
cgaugugggcgucagaaau

SEQ ID NO: 2511863 - RNA, 19 nt, Artificial Sequence
  Description of Artificial Sequence: Synthetic oligonucleotide
  Antisense strand to SEQ ID NO: 2511862
auuucugacgcccacaucg

SEQ ID NO: 2511864 - RNA, 19 nt, Artificial Sequence
  Description of Artificial Sequence: Synthetic oligonucleotide
  Sense strand starting at position 798 of SEQ ID NO: 1888115
cagggucucccauguuacu

SEQ ID NO: 2511865 - RNA, 19 nt, Artificial Sequence
  Description of Artificial Sequence: Synthetic oligonucleotide
  Antisense strand to SEQ ID NO: 2511864
aguaacaugggagacccug

SEQ ID NO: 2511866 - RNA, 19 nt, Artificial Sequence
  Description of Artificial Sequence: Synthetic oligonucleotide
  Sense strand starting at position 845 of SEQ ID NO: 1888115
agguuugucacaggacaag

SEQ ID NO: 2511867 - RNA, 19 nt, Artificial Sequence
  Description of Artificial Sequence: Synthetic oligonucleotide
  Antisense strand to SEQ ID NO: 2511866
cuuguccugugacaaaccu

SEQ ID NO: 2511868 - RNA, 19 nt, Artificial Sequence
  Description of Artificial Sequence: Synthetic oligonucleotide
  Sense strand starting at position 1266 of SEQ ID NO: 1888115
gggagaggcuuccuaaguc

SEQ ID NO: 2511869 - RNA, 19 nt, Artificial Sequence
  Description of Artificial Sequence: Synthetic oligonucleotide
  Antisense strand to SEQ ID NO: 2511868
gacuuaggaagccucuccc

SEQ ID NO: 2511870 - RNA, 19 nt, Artificial Sequence
  Description of Artificial Sequence: Synthetic oligonucleotide
  Sense strand starting at position 1295 of SEQ ID NO: 1888115
gggcuuauccgugaccgac

SEQ ID NO: 2511871 - RNA, 19 nt, Artificial Sequence
  Description of Artificial Sequence: Synthetic oligonucleotide
  Antisense strand to SEQ ID NO: 2511870
gucggucacggauaagccc

SEQ ID NO: 2511872 - RNA, 19 nt, Artificial Sequence
  Description of Artificial Sequence: Synthetic oligonucleotide
  Sense strand starting at position 1505 of SEQ ID NO: 1888115
cugggaucuguguacggga

SEQ ID NO: 2511873 - RNA, 19 nt, Artificial Sequence
  Description of Artificial Sequence: Synthetic oligonucleotide
  Antisense strand to SEQ ID NO: 2511872
ucccguacacagaucccag

SEQ ID NO: 2511874 - RNA, 19 nt, Artificial Sequence
  Description of Artificial Sequence: Synthetic oligonucleotide
  Sense strand starting at position 1565 of SEQ ID NO: 1888115
uuauuuccugccugucagu

SEQ ID NO: 2511875 - RNA, 19 nt, Artificial Sequence
  Description of Artificial Sequence: Synthetic oligonucleotide
  Antisense strand to SEQ ID NO: 2511874
acugacaggcaggaaauaa

SEQ ID NO: 2511876 - RNA, 19 nt, Artificial Sequence
  Description of Artificial Sequence: Synthetic oligonucleotide
  Sense strand starting at position 2290 of SEQ ID NO: 1888115
ccucuaucguccuuuagaa

SEQ ID NO: 2511877 - RNA, 19 nt, Artificial Sequence
  Description of Artificial Sequence: Synthetic oligonucleotide
  Antisense strand to SEQ ID NO: 2511876
uucuaaaggacgauagagg

SEQ ID NO: 2511878 - RNA, 19 nt, Artificial Sequence
  Description of Artificial Sequence: Synthetic oligonucleotide
  Sense strand starting at position 2292 of SEQ ID NO: 1888115
ucuaucguccuuuagaaca

SEQ ID NO: 2511879 - RNA, 19 nt, Artificial Sequence
  Description of Artificial Sequence: Synthetic oligonucleotide
  Antisense strand to SEQ ID NO: 2511878
uguucuaaaggacgauaga

SEQ ID NO: 2511880 - RNA, 19 nt, Artificial Sequence
  Description of Artificial Sequence: Synthetic oligonucleotide
  Sense strand starting at position 2555 of SEQ ID NO: 1888115
uguugaauguuguuccaua

SEQ ID NO: 2511881 - RNA, 19 nt, Artificial Sequence
  Description of Artificial Sequence: Synthetic oligonucleotide
  Antisense strand to SEQ ID NO: 2511880
uauggaacaacauucaaca

SEQ ID NO: 2511882 - RNA, 19 nt, Artificial Sequence
  Description of Artificial Sequence: Synthetic oligonucleotide
  Sense strand starting at position 2556 of SEQ ID NO: 1888115
guugaauguuguuccauac

SEQ ID NO: 2511883 - RNA, 19 nt, Artificial Sequence
  Description of Artificial Sequence: Synthetic oligonucleotide
  Antisense strand to SEQ ID NO: 2511882
guauggaacaacauucaac

SEQ ID NO: 2511884 - RNA, 19 nt, Artificial Sequence
  Description of Artificial Sequence: Synthetic oligonucleotide
  Sense strand starting at position 2603 of SEQ ID NO: 1888115
aucauagugccuuagagaa

SEQ ID NO: 2511885 - RNA, 19 nt, Artificial Sequence
  Description of Artificial Sequence: Synthetic oligonucleotide
  Antisense strand to SEQ ID NO: 2511884
uucucuaaggcacuaugau

SEQ ID NO: 2511886 - RNA, 19 nt, Artificial Sequence
  Description of Artificial Sequence: Synthetic oligonucleotide
  Sense strand starting at position 2865 of SEQ ID NO: 1888115
gcgcuaucaauuguuguua

SEQ ID NO: 2511887 - RNA, 19 nt, Artificial Sequence
  Description of Artificial Sequence: Synthetic oligonucleotide
  Antisense strand to SEQ ID NO: 2511886
uaacaacaauugauagcgc

SEQ ID NO: 2511888 - RNA, 19 nt, Artificial Sequence
  Description of Artificial Sequence: Synthetic oligonucleotide
  Sense strand starting at position 2972 of SEQ ID NO: 1888115
gggagcauuugugaaauga

SEQ ID NO: 2511889 - RNA, 19 nt, Artificial Sequence
  Description of Artificial Sequence: Synthetic oligonucleotide
  Antisense strand to SEQ ID NO: 2511888
ucauuucacaaaugcuccc

SEQ ID NO: 2511890 - RNA, 19 nt, Artificial Sequence
  Description of Artificial Sequence: Synthetic oligonucleotide
  Sense strand starting at position 3255 of SEQ ID NO: 1888115
ucaucagauucugccuuga

SEQ ID NO: 2511891 - RNA, 19 nt, Artificial Sequence
  Description of Artificial Sequence: Synthetic oligonucleotide
  Antisense strand to SEQ ID NO: 2511890
ucaaggcagaaucugauga

SEQ ID NO: 2511892 - RNA, 19 nt, Artificial Sequence
  Description of Artificial Sequence: Synthetic oligonucleotide
  Sense strand starting at position 3257 of SEQ ID NO: 1888115
aucagauucugccuugagu

SEQ ID NO: 2511893 - RNA, 19 nt, Artificial Sequence
  Description of Artificial Sequence: Synthetic oligonucleotide
  Antisense strand to SEQ ID NO: 2511892
acucaaggcagaaucugau

SEQ ID NO: 2511894 - RNA, 19 nt, Artificial Sequence
  Description of Artificial Sequence: Synthetic oligonucleotide
  Sense strand starting at position 3259 of SEQ ID NO: 1888115
cagauucugccuugaguuu

SEQ ID NO: 2511895 - RNA, 19 nt, Artificial Sequence
  Description of Artificial Sequence: Synthetic oligonucleotide
  Antisense strand to SEQ ID NO: 2511894
aaacucaaggcagaaucug

SEQ ID NO: 2511896 - RNA, 19 nt, Artificial Sequence
  Description of Artificial Sequence: Synthetic oligonucleotide
  Sense strand starting at position 3462 of SEQ ID NO: 1888115
ugugaauaugcuuaguuua

SEQ ID NO: 2511897 - RNA, 19 nt, Artificial Sequence
  Description of Artificial Sequence: Synthetic oligonucleotide
  Antisense strand to SEQ ID NO: 2511896
uaaacuaagcauauucaca

SEQ ID NO: 2511898 - RNA, 19 nt, Artificial Sequence
  Description of Artificial Sequence: Synthetic oligonucleotide
  Sense strand starting at position 3464 of SEQ ID NO: 1888115
ugaauaugcuuaguuuaga

SEQ ID NO: 2511899 - RNA, 19 nt, Artificial Sequence
  Description of Artificial Sequence: Synthetic oligonucleotide
  Antisense strand to SEQ ID NO: 2511898
ucuaaacuaagcauauuca

SEQ ID NO: 2511900 - RNA, 19 nt, Artificial Sequence
  Description of Artificial Sequence: Synthetic oligonucleotide
  Sense strand starting at position 3467 of SEQ ID NO: 1888115
auaugcuuaguuuagaaag

SEQ ID NO: 2511901 - RNA, 19 nt, Artificial Sequence
  Description of Artificial Sequence: Synthetic oligonucleotide
  Antisense strand to SEQ ID NO: 2511900
cuuucuaaacuaagcauau

SEQ ID NO: 2511902 - RNA, 19 nt, Artificial Sequence
  Description of Artificial Sequence: Synthetic oligonucleotide
  Sense strand starting at position 3602 of SEQ ID NO: 1888115
ucuucuguccuaugguaag

SEQ ID NO: 2511903 - RNA, 19 nt, Artificial Sequence
  Description of Artificial Sequence: Synthetic oligonucleotide
  Antisense strand to SEQ ID NO: 2511902
cuuaccauaggacagaaga

SEQ ID NO: 2511904 - RNA, 19 nt, Artificial Sequence
  Description of Artificial Sequence: Synthetic oligonucleotide
  Sense strand starting at position 3649 of SEQ ID NO: 1888115
aagcauaugcugugagaca

SEQ ID NO: 2511905 - RNA, 19 nt, Artificial Sequence
  Description of Artificial Sequence: Synthetic oligonucleotide
  Antisense strand to SEQ ID NO: 2511904
ugucucacagcauaugcuu

SEQ ID NO: 2511906 - RNA, 19 nt, Artificial Sequence
  Description of Artificial Sequence: Synthetic oligonucleotide
  Sense strand starting at position 3805 of SEQ ID NO: 1888115
gauaaugaugcugaugguu

SEQ ID NO: 2511907 - RNA, 19 nt, Artificial Sequence
  Description of Artificial Sequence: Synthetic oligonucleotide
  Antisense strand to SEQ ID NO: 2511906
aaccaucagcaucauuauc

SEQ ID NO: 2511908 - RNA, 19 nt, Artificial Sequence
  Description of Artificial Sequence: Synthetic oligonucleotide
  Sense strand starting at position 3813 of SEQ ID NO: 1888115
ugcugaugguuauuuagua

SEQ ID NO: 2511909 - RNA, 19 nt, Artificial Sequence
  Description of Artificial Sequence: Synthetic oligonucleotide
  Antisense strand to SEQ ID NO: 2511908
uacuaaauaaccaucagca

SEQ ID NO: 2511910 - RNA, 19 nt, Artificial Sequence
  Description of Artificial Sequence: Synthetic oligonucleotide
  Sense strand starting at position 3872 of SEQ ID NO: 1888115
guuggauucucuccagcaa

SEQ ID NO: 2511911 - RNA, 19 nt, Artificial Sequence
  Description of Artificial Sequence: Synthetic oligonucleotide
  Antisense strand to SEQ ID NO: 2511910
uugcuggagagaauccaac

SEQ ID NO: 2511912 - RNA, 19 nt, Artificial Sequence
  Description of Artificial Sequence: Synthetic oligonucleotide
  Sense strand starting at position 3873 of SEQ ID NO: 1888115
uuggauucucuccagcaaa

SEQ ID NO: 2511913 - RNA, 19 nt, Artificial Sequence
  Description of Artificial Sequence: Synthetic oligonucleotide
  Antisense strand to SEQ ID NO: 2511912
uuugcuggagagaauccaa

SEQ ID NO: 2511914 - RNA, 19 nt, Artificial Sequence
  Description of Artificial Sequence: Synthetic oligonucleotide
  Sense strand starting at position 3891 of SEQ ID NO: 1888115
agaugucaggguggauaga

SEQ ID NO: 2511915 - RNA, 19 nt, Artificial Sequence
  Description of Artificial Sequence: Synthetic oligonucleotide
  Antisense strand to SEQ ID NO: 2511914
ucuauccacccugacaucu

SEQ ID NO: 2511916 - RNA, 19 nt, Artificial Sequence
  Description of Artificial Sequence: Synthetic oligonucleotide
  Sense strand starting at position 3905 of SEQ ID NO: 1888115
auagaaaugucagcgugau

SEQ ID NO: 2511917 - RNA, 19 nt, Artificial Sequence
  Description of Artificial Sequence: Synthetic oligonucleotide
  Antisense strand to SEQ ID NO: 2511916
aucacgcugacauuucuau

SEQ ID NO: 2511918 - RNA, 19 nt, Artificial Sequence
  Description of Artificial Sequence: Synthetic oligonucleotide
  Sense strand starting at position 3909 of SEQ ID NO: 1888115
aaaugucagcgugauccaa

SEQ ID NO: 2511919 - RNA, 19 nt, Artificial Sequence
  Description of Artificial Sequence: Synthetic oligonucleotide
  Antisense strand to SEQ ID NO: 2511918
uuggaucacgcugacauuu

SEQ ID NO: 2511920 - RNA, 19 nt, Artificial Sequence
  Description of Artificial Sequence: Synthetic oligonucleotide
  Sense strand starting at position 3917 of SEQ ID NO: 1888115
gcgugauccaaagaggaca

SEQ ID NO: 2511921 - RNA, 19 nt, Artificial Sequence
  Description of Artificial Sequence: Synthetic oligonucleotide
  Antisense strand to SEQ ID NO: 2511920
uguccucuuuggaucacgc

SEQ ID NO: 2511922 - RNA, 19 nt, Artificial Sequence
  Description of Artificial Sequence: Synthetic oligonucleotide
  Sense strand starting at position 3981 of SEQ ID NO: 1888115
agguuugacgaauguuuag

SEQ ID NO: 2511923 - RNA, 19 nt, Artificial Sequence
  Description of Artificial Sequence: Synthetic oligonucleotide
  Antisense strand to SEQ ID NO: 2511922
cuaaacauucgucaaaccu

SEQ ID NO: 2511924 - RNA, 19 nt, Artificial Sequence
  Description of Artificial Sequence: Synthetic oligonucleotide
  Sense strand starting at position 163 of SEQ ID NO: 1888116
ugaaguuccaaauggugga

SEQ ID NO: 2511925 - RNA, 19 nt, Artificial Sequence
  Description of Artificial Sequence: Synthetic oligonucleotide
  Antisense strand to SEQ ID NO: 2511924
uccaccauuuggaacuuca

SEQ ID NO: 2511926 - RNA, 19 nt, Artificial Sequence
  Description of Artificial Sequence: Synthetic oligonucleotide
  Sense strand starting at position 204 of SEQ ID NO: 1888116
ggauggaugguguaagugu

SEQ ID NO: 2511927 - RNA, 19 nt, Artificial Sequence
  Description of Artificial Sequence: Synthetic oligonucleotide
  Antisense strand to SEQ ID NO: 2511926
acacuuacaccauccaucc

SEQ ID NO: 2511928 - RNA, 19 nt, Artificial Sequence
  Description of Artificial Sequence: Synthetic oligonucleotide
  Sense strand starting at position 524 of SEQ ID NO: 1888116
agaacauuccagugguuga

SEQ ID NO: 2511929 - RNA, 19 nt, Artificial Sequence
  Description of Artificial Sequence: Synthetic oligonucleotide
  Antisense strand to SEQ ID NO: 2511928
ucaaccacuggaauguucu

SEQ ID NO: 2511930 - RNA, 19 nt, Artificial Sequence
  Description of Artificial Sequence: Synthetic oligonucleotide
  Sense strand starting at position 525 of SEQ ID NO: 1888116
gaacauuccagugguugag

SEQ ID NO: 2511931 - RNA, 19 nt, Artificial Sequence
  Description of Artificial Sequence: Synthetic oligonucleotide
  Antisense strand to SEQ ID NO: 2511930
cucaaccacuggaauguuc

SEQ ID NO: 2511932 - RNA, 19 nt, Artificial Sequence
  Description of Artificial Sequence: Synthetic oligonucleotide
  Sense strand starting at position 600 of SEQ ID NO: 1888116
ccaguuucugagggagauu

SEQ ID NO: 2511933 - RNA, 19 nt, Artificial Sequence
  Description of Artificial Sequence: Synthetic oligonucleotide
  Antisense strand to SEQ ID NO: 2511932
aaucucccucagaaacugg

SEQ ID NO: 2511934 - RNA, 19 nt, Artificial Sequence
  Description of Artificial Sequence: Synthetic oligonucleotide
  Sense strand starting at position 603 of SEQ ID NO: 1888116
guuucugagggagauuguu

SEQ ID NO: 2511935 - RNA, 19 nt, Artificial Sequence
  Description of Artificial Sequence: Synthetic oligonucleotide
  Antisense strand to SEQ ID NO: 2511934
aacaaucucccucagaaac

SEQ ID NO: 2511936 - RNA, 19 nt, Artificial Sequence
  Description of Artificial Sequence: Synthetic oligonucleotide
  Sense strand starting at position 613 of SEQ ID NO: 1888116
gagauuguucuggaguaca

SEQ ID NO: 2511937 - RNA, 19 nt, Artificial Sequence
  Description of Artificial Sequence: Synthetic oligonucleotide
  Antisense strand to SEQ ID NO: 2511936
uguacuccagaacaaucuc

SEQ ID NO: 2511938 - RNA, 19 nt, Artificial Sequence
  Description of Artificial Sequence: Synthetic oligonucleotide
  Sense strand starting at position 678 of SEQ ID NO: 1888116
agcagaugucaacaucuaa

SEQ ID NO: 2511939 - RNA, 19 nt, Artificial Sequence
  Description of Artificial Sequence: Synthetic oligonucleotide
  Antisense strand to SEQ ID NO: 2511938
uuagauguugacaucugcu

SEQ ID NO: 2511940 - RNA, 19 nt, Artificial Sequence
  Description of Artificial Sequence: Synthetic oligonucleotide
  Sense strand starting at position 744 of SEQ ID NO: 1888116
auggaauuguuugcaauaa

SEQ ID NO: 2511941 - RNA, 19 nt, Artificial Sequence
  Description of Artificial Sequence: Synthetic oligonucleotide
  Antisense strand to SEQ ID NO: 2511940
uuauugcaaacaauuccau

SEQ ID NO: 2511942 - RNA, 19 nt, Artificial Sequence
  Description of Artificial Sequence: Synthetic oligonucleotide
  Sense strand starting at position 1052 of SEQ ID NO: 1888116
ggaaauucgagauguuacu

SEQ ID NO: 2511943 - RNA, 19 nt, Artificial Sequence
  Description of Artificial Sequence: Synthetic oligonucleotide
  Antisense strand to SEQ ID NO: 2511942
aguaacaucucgaauuucc

SEQ ID NO: 2511944 - RNA, 19 nt, Artificial Sequence
  Description of Artificial Sequence: Synthetic oligonucleotide
  Sense strand starting at position 1208 of SEQ ID NO: 1888116
uauggcuaugagugagaaa

SEQ ID NO: 2511945 - RNA, 19 nt, Artificial Sequence
  Description of Artificial Sequence: Synthetic oligonucleotide
  Antisense strand to SEQ ID NO: 2511944
uuucucacucauagccaua

SEQ ID NO: 2511946 - RNA, 19 nt, Artificial Sequence
  Description of Artificial Sequence: Synthetic oligonucleotide
  Sense strand starting at position 1311 of SEQ ID NO: 1888116
auccuacacucuuuagagu

SEQ ID NO: 2511947 - RNA, 19 nt, Artificial Sequence
  Description of Artificial Sequence: Synthetic oligonucleotide
  Antisense strand to SEQ ID NO: 2511946
acucuaaagaguguaggau

SEQ ID NO: 2511948 - RNA, 19 nt, Artificial Sequence
  Description of Artificial Sequence: Synthetic oligonucleotide
  Sense strand starting at position 1312 of SEQ ID NO: 1888116
uccuacacucuuuagaguu

SEQ ID NO: 2511949 - RNA, 19 nt, Artificial Sequence
  Description of Artificial Sequence: Synthetic oligonucleotide
  Antisense strand to SEQ ID NO: 2511948
aacucuaaagaguguagga

SEQ ID NO: 2511950 - RNA, 19 nt, Artificial Sequence
  Description of Artificial Sequence: Synthetic oligonucleotide
  Sense strand starting at position 1319 of SEQ ID NO: 1888116
cucuuuagaguuugagaag

SEQ ID NO: 2511951 - RNA, 19 nt, Artificial Sequence
  Description of Artificial Sequence: Synthetic oligonucleotide
  Antisense strand to SEQ ID NO: 2511950
cuucucaaacucuaaagag

SEQ ID NO: 2511952 - RNA, 19 nt, Artificial Sequence
  Description of Artificial Sequence: Synthetic oligonucleotide
  Sense strand starting at position 1508 of SEQ ID NO: 1888116
uugugauguguggaaguga

SEQ ID NO: 2511953 - RNA, 19 nt, Artificial Sequence
  Description of Artificial Sequence: Synthetic oligonucleotide
  Antisense strand to SEQ ID NO: 2511952
ucacuuccacacaucacaa

SEQ ID NO: 2511954 - RNA, 19 nt, Artificial Sequence
  Description of Artificial Sequence: Synthetic oligonucleotide
  Sense strand starting at position 1525 of SEQ ID NO: 1888116
gauuuaacuuuccugcguu

SEQ ID NO: 2511955 - RNA, 19 nt, Artificial Sequence
  Description of Artificial Sequence: Synthetic oligonucleotide
  Antisense strand to SEQ ID NO: 2511954
aacgcaggaaaguuaaauc

SEQ ID NO: 2511956 - RNA, 19 nt, Artificial Sequence
  Description of Artificial Sequence: Synthetic oligonucleotide
  Sense strand starting at position 1689 of SEQ ID NO: 1888116
uuaccagugaggugaacuu

SEQ ID NO: 2511957 - RNA, 19 nt, Artificial Sequence
  Description of Artificial Sequence: Synthetic oligonucleotide
  Antisense strand to SEQ ID NO: 2511956
aaguucaccucacugguaa

SEQ ID NO: 2511958 - RNA, 19 nt, Artificial Sequence
  Description of Artificial Sequence: Synthetic oligonucleotide
  Sense strand starting at position 2112 of SEQ ID NO: 1888116
cggagcugugaauaagaca

SEQ ID NO: 2511959 - RNA, 19 nt, Artificial Sequence
  Description of Artificial Sequence: Synthetic oligonucleotide
  Antisense strand to SEQ ID NO: 2511958
ugucuuauucacagcuccg

SEQ ID NO: 2511960 - RNA, 19 nt, Artificial Sequence
  Description of Artificial Sequence: Synthetic oligonucleotide
  Sense strand starting at position 2119 of SEQ ID NO: 1888116
gugaauaagacaugcaaag

SEQ ID NO: 2511961 - RNA, 19 nt, Artificial Sequence
  Description of Artificial Sequence: Synthetic oligonucleotide
  Antisense strand to SEQ ID NO: 2511960
cuuugcaugucuuauucac

SEQ ID NO: 2511962 - RNA, 19 nt, Artificial Sequence
  Description of Artificial Sequence: Synthetic oligonucleotide
  Sense strand starting at position 2155 of SEQ ID NO: 1888116
ucauauucuccuugagaga

SEQ ID NO: 2511963 - RNA, 19 nt, Artificial Sequence
  Description of Artificial Sequence: Synthetic oligonucleotide
  Antisense strand to SEQ ID NO: 2511962
ucucucaaggagaauauga

SEQ ID NO: 2511964 - RNA, 19 nt, Artificial Sequence
  Description of Artificial Sequence: Synthetic oligonucleotide
  Sense strand starting at position 2184 of SEQ ID NO: 1888116
uuguauauccagugggaua

SEQ ID NO: 2511965 - RNA, 19 nt, Artificial Sequence
  Description of Artificial Sequence: Synthetic oligonucleotide
  Antisense strand to SEQ ID NO: 2511964
uaucccacuggauauacaa

SEQ ID NO: 2511966 - RNA, 19 nt, Artificial Sequence
  Description of Artificial Sequence: Synthetic oligonucleotide
  Sense strand starting at position 2185 of SEQ ID NO: 1888116
uguauauccagugggauaa

SEQ ID NO: 2511967 - RNA, 19 nt, Artificial Sequence
  Description of Artificial Sequence: Synthetic oligonucleotide
  Antisense strand to SEQ ID NO: 2511966
uuaucccacuggauauaca

SEQ ID NO: 2511968 - RNA, 19 nt, Artificial Sequence
  Description of Artificial Sequence: Synthetic oligonucleotide
  Sense strand starting at position 2186 of SEQ ID NO: 1888116
guauauccagugggauaag

SEQ ID NO: 2511969 - RNA, 19 nt, Artificial Sequence
  Description of Artificial Sequence: Synthetic oligonucleotide
  Antisense strand to SEQ ID NO: 2511968
cuuaucccacuggauauac

SEQ ID NO: 2511970 - RNA, 19 nt, Artificial Sequence
  Description of Artificial Sequence: Synthetic oligonucleotide
  Sense strand starting at position 2261 of SEQ ID NO: 1888116
aaaugugugaucugggaag

SEQ ID NO: 2511971 - RNA, 19 nt, Artificial Sequence
  Description of Artificial Sequence: Synthetic oligonucleotide
  Antisense strand to SEQ ID NO: 2511970
cuucccagaucacacauuu

SEQ ID NO: 2511972 - RNA, 19 nt, Artificial Sequence
  Description of Artificial Sequence: Synthetic oligonucleotide
  Sense strand starting at position 2377 of SEQ ID NO: 1888116
gguggcauuauggauugaa

SEQ ID NO: 2511973 - RNA, 19 nt, Artificial Sequence
  Description of Artificial Sequence: Synthetic oligonucleotide
  Antisense strand to SEQ ID NO: 2511972
uucaauccauaaugccacc

SEQ ID NO: 2511974 - RNA, 19 nt, Artificial Sequence
  Description of Artificial Sequence: Synthetic oligonucleotide
  Sense strand starting at position 2460 of SEQ ID NO: 1888116
gaaauagagccuuggcaaa

SEQ ID NO: 2511975 - RNA, 19 nt, Artificial Sequence
  Description of Artificial Sequence: Synthetic oligonucleotide
  Antisense strand to SEQ ID NO: 2511974
uuugccaaggcucuauuuc

SEQ ID NO: 2511976 - RNA, 19 nt, Artificial Sequence
  Description of Artificial Sequence: Synthetic oligonucleotide
  Sense strand starting at position 2807 of SEQ ID NO: 1888116
uggaaauaagcuuggcaug

SEQ ID NO: 2511977 - RNA, 19 nt, Artificial Sequence
  Description of Artificial Sequence: Synthetic oligonucleotide
  Antisense strand to SEQ ID NO: 2511976
caugccaagcuuauuucca

SEQ ID NO: 2511978 - RNA, 19 nt, Artificial Sequence
  Description of Artificial Sequence: Synthetic oligonucleotide
  Sense strand starting at position 3069 of SEQ ID NO: 1888116
acaguuuagccuggagaua

SEQ ID NO: 2511979 - RNA, 19 nt, Artificial Sequence
  Description of Artificial Sequence: Synthetic oligonucleotide
  Antisense strand to SEQ ID NO: 2511978
uaucuccaggcuaaacugu

SEQ ID NO: 2511980 - RNA, 19 nt, Artificial Sequence
  Description of Artificial Sequence: Synthetic oligonucleotide
  Sense strand starting at position 3070 of SEQ ID NO: 1888116
caguuuagccuggagauag

SEQ ID NO: 2511981 - RNA, 19 nt, Artificial Sequence
  Description of Artificial Sequence: Synthetic oligonucleotide
  Antisense strand to SEQ ID NO: 2511980
cuaucuccaggcuaaacug

SEQ ID NO: 2511982 - RNA, 19 nt, Artificial Sequence
  Description of Artificial Sequence: Synthetic oligonucleotide
  Sense strand starting at position 3080 of SEQ ID NO: 1888116
uggagauagucauugcuaa

SEQ ID NO: 2511983 - RNA, 19 nt, Artificial Sequence
  Description of Artificial Sequence: Synthetic oligonucleotide
  Antisense strand to SEQ ID NO: 2511982
uuagcaaugacuaucucca

SEQ ID NO: 2511984 - RNA, 19 nt, Artificial Sequence
  Description of Artificial Sequence: Synthetic oligonucleotide
  Sense strand starting at position 3081 of SEQ ID NO: 1888116
ggagauagucauugcuaag

SEQ ID NO: 2511985 - RNA, 19 nt, Artificial Sequence
  Description of Artificial Sequence: Synthetic oligonucleotide
  Antisense strand to SEQ ID NO: 2511984
cuuagcaaugacuaucucc

SEQ ID NO: 2511986 - RNA, 19 nt, Artificial Sequence
  Description of Artificial Sequence: Synthetic oligonucleotide
  Sense strand starting at position 3158 of SEQ ID NO: 1888116
accauugacugaguugagu

SEQ ID NO: 2511987 - RNA, 19 nt, Artificial Sequence
  Description of Artificial Sequence: Synthetic oligonucleotide
  Antisense strand to SEQ ID NO: 2511986
acucaacucagucaauggu

SEQ ID NO: 2511988 - RNA, 19 nt, Artificial Sequence
  Description of Artificial Sequence: Synthetic oligonucleotide
  Sense strand starting at position 3195 of SEQ ID NO: 1888116
ccgggaguugcucaaggaa

SEQ ID NO: 2511989 - RNA, 19 nt, Artificial Sequence
  Description of Artificial Sequence: Synthetic oligonucleotide
  Antisense strand to SEQ ID NO: 2511988
uuccuugagcaacucccgg

SEQ ID NO: 2511990 - RNA, 19 nt, Artificial Sequence
  Description of Artificial Sequence: Synthetic oligonucleotide
  Sense strand starting at position 3198 of SEQ ID NO: 1888116
ggaguugcucaaggaagaa

SEQ ID NO: 2511991 - RNA, 19 nt, Artificial Sequence
  Description of Artificial Sequence: Synthetic oligonucleotide
  Antisense strand to SEQ ID NO: 2511990
uucuuccuugagcaacucc

SEQ ID NO: 2511992 - RNA, 19 nt, Artificial Sequence
  Description of Artificial Sequence: Synthetic oligonucleotide
  Sense strand starting at position 3345 of SEQ ID NO: 1888116
aggauaggugcauacaucu

SEQ ID NO: 2511993 - RNA, 19 nt, Artificial Sequence
  Description of Artificial Sequence: Synthetic oligonucleotide
  Antisense strand to SEQ ID NO: 2511992
agauguaugcaccuauccu

SEQ ID NO: 2511994 - RNA, 19 nt, Artificial Sequence
  Description of Artificial Sequence: Synthetic oligonucleotide
  Sense strand starting at position 3377 of SEQ ID NO: 1888116
ugcacauggcuguaaauga

SEQ ID NO: 2511995 - RNA, 19 nt, Artificial Sequence
  Description of Artificial Sequence: Synthetic oligonucleotide
  Antisense strand to SEQ ID NO: 2511994
ucauuuacagccaugugca

SEQ ID NO: 2511996 - RNA, 19 nt, Artificial Sequence
  Description of Artificial Sequence: Synthetic oligonucleotide
  Sense strand starting at position 3390 of SEQ ID NO: 1888116
aaaugaauggcucauaguu

SEQ ID NO: 2511997 - RNA, 19 nt, Artificial Sequence
  Description of Artificial Sequence: Synthetic oligonucleotide
  Antisense strand to SEQ ID NO: 2511996
aacuaugagccauucauuu

SEQ ID NO: 2511998 - RNA, 19 nt, Artificial Sequence
  Description of Artificial Sequence: Synthetic oligonucleotide
  Sense strand starting at position 3793 of SEQ ID NO: 1888116
uuugaaaugucugucagaa

SEQ ID NO: 2511999 - RNA, 19 nt, Artificial Sequence
  Description of Artificial Sequence: Synthetic oligonucleotide
  Antisense strand to SEQ ID NO: 2511998
uucugacagacauuucaaa

SEQ ID NO: 2512000 - RNA, 19 nt, Artificial Sequence
  Description of Artificial Sequence: Synthetic oligonucleotide
  Sense strand starting at position 3903 of SEQ ID NO: 1888116
gucuaauugcuggaccaug

SEQ ID NO: 2512001 - RNA, 19 nt, Artificial Sequence
  Description of Artificial Sequence: Synthetic oligonucleotide
  Antisense strand to SEQ ID NO: 2512000
caugguccagcaauuagac

SEQ ID NO: 2512002 - RNA, 19 nt, Artificial Sequence
  Description of Artificial Sequence: Synthetic oligonucleotide
  Sense strand starting at position 3921 of SEQ ID NO: 1888116
gggauuagaaccuguuaca

SEQ ID NO: 2512003 - RNA, 19 nt, Artificial Sequence
  Description of Artificial Sequence: Synthetic oligonucleotide
  Antisense strand to SEQ ID NO: 2512002
uguaacagguucuaauccc

SEQ ID NO: 2512004 - RNA, 19 nt, Artificial Sequence
  Description of Artificial Sequence: Synthetic oligonucleotide
  Sense strand starting at position 31 of SEQ ID NO: 1888117
cuaauaagcuaauuaggau

SEQ ID NO: 2512005 - RNA, 19 nt, Artificial Sequence
  Description of Artificial Sequence: Synthetic oligonucleotide
  Antisense strand to SEQ ID NO: 2512004
auccuaauuagcuuauuag

SEQ ID NO: 2512006 - RNA, 19 nt, Artificial Sequence
  Description of Artificial Sequence: Synthetic oligonucleotide
  Sense strand starting at position 66 of SEQ ID NO: 1888117
uuagaaagcccagguauca

SEQ ID NO: 2512007 - RNA, 19 nt, Artificial Sequence
  Description of Artificial Sequence: Synthetic oligonucleotide
  Antisense strand to SEQ ID NO: 2512006
ugauaccugggcuuucuaa

SEQ ID NO: 2512008 - RNA, 19 nt, Artificial Sequence
  Description of Artificial Sequence: Synthetic oligonucleotide
  Sense strand starting at position 82 of SEQ ID NO: 1888117
ucacuucugguaugggaaa

SEQ ID NO: 2512009 - RNA, 19 nt, Artificial Sequence
  Description of Artificial Sequence: Synthetic oligonucleotide
  Antisense strand to SEQ ID NO: 2512008
uuucccauaccagaaguga

SEQ ID NO: 2512010 - RNA, 19 nt, Artificial Sequence
  Description of Artificial Sequence: Synthetic oligonucleotide
  Sense strand starting at position 225 of SEQ ID NO: 1888117
ucucucugugaguagcauu

SEQ ID NO: 2512011 - RNA, 19 nt, Artificial Sequence
  Description of Artificial Sequence: Synthetic oligonucleotide
  Antisense strand to SEQ ID NO: 2512010
aaugcuacucacagagaga

SEQ ID NO: 2512012 - RNA, 19 nt, Artificial Sequence
  Description of Artificial Sequence: Synthetic oligonucleotide
  Sense strand starting at position 244 of SEQ ID NO: 1888117
gcucacuguauugggaaau

SEQ ID NO: 2512013 - RNA, 19 nt, Artificial Sequence
  Description of Artificial Sequence: Synthetic oligonucleotide
  Antisense strand to SEQ ID NO: 2512012
auuucccaauacagugagc

SEQ ID NO: 2512014 - RNA, 19 nt, Artificial Sequence
  Description of Artificial Sequence: Synthetic oligonucleotide
  Sense strand starting at position 258 of SEQ ID NO: 1888117
gaaauaccguucucagagu

SEQ ID NO: 2512015 - RNA, 19 nt, Artificial Sequence
  Description of Artificial Sequence: Synthetic oligonucleotide
  Antisense strand to SEQ ID NO: 2512014
acucugagaacgguauuuc

SEQ ID NO: 2512016 - RNA, 19 nt, Artificial Sequence
  Description of Artificial Sequence: Synthetic oligonucleotide
  Sense strand starting at position 264 of SEQ ID NO: 1888117
ccguucucagagugacaga

SEQ ID NO: 2512017 - RNA, 19 nt, Artificial Sequence
  Description of Artificial Sequence: Synthetic oligonucleotide
  Antisense strand to SEQ ID NO: 2512016
ucugucacucugagaacgg

SEQ ID NO: 2512018 - RNA, 19 nt, Artificial Sequence
  Description of Artificial Sequence: Synthetic oligonucleotide
  Sense strand starting at position 265 of SEQ ID NO: 1888117
cguucucagagugacagau

SEQ ID NO: 2512019 - RNA, 19 nt, Artificial Sequence
  Description of Artificial Sequence: Synthetic oligonucleotide
  Antisense strand to SEQ ID NO: 2512018
aucugucacucugagaacg

SEQ ID NO: 2512020 - RNA, 19 nt, Artificial Sequence
  Description of Artificial Sequence: Synthetic oligonucleotide
  Sense strand starting at position 275 of SEQ ID NO: 1888117
gugacagauguagaagcau

SEQ ID NO: 2512021 - RNA, 19 nt, Artificial Sequence
  Description of Artificial Sequence: Synthetic oligonucleotide
  Antisense strand to SEQ ID NO: 2512020
augcuucuacaucugucac

SEQ ID NO: 2512022 - RNA, 19 nt, Artificial Sequence
  Description of Artificial Sequence: Synthetic oligonucleotide
  Sense strand starting at position 309 of SEQ ID NO: 1888117
ucauuccaagaguggaaau

SEQ ID NO: 2512023 - RNA, 19 nt, Artificial Sequence
  Description of Artificial Sequence: Synthetic oligonucleotide
  Antisense strand to SEQ ID NO: 2512022
auuuccacucuuggaauga

SEQ ID NO: 2512024 - RNA, 19 nt, Artificial Sequence
  Description of Artificial Sequence: Synthetic oligonucleotide
  Sense strand starting at position 519 of SEQ ID NO: 1888117
gagggacaaucuugauuuc

SEQ ID NO: 2512025 - RNA, 19 nt, Artificial Sequence
  Description of Artificial Sequence: Synthetic oligonucleotide
  Antisense strand to SEQ ID NO: 2512024
gaaaucaagauugucccuc

SEQ ID NO: 2512026 - RNA, 19 nt, Artificial Sequence
  Description of Artificial Sequence: Synthetic oligonucleotide
  Sense strand starting at position 608 of SEQ ID NO: 1888117
agaugaucaugccugaaac

SEQ ID NO: 2512027 - RNA, 19 nt, Artificial Sequence
  Description of Artificial Sequence: Synthetic oligonucleotide
  Antisense strand to SEQ ID NO: 2512026
guuucaggcaugaucaucu

SEQ ID NO: 2512028 - RNA, 19 nt, Artificial Sequence
  Description of Artificial Sequence: Synthetic oligonucleotide
  Sense strand starting at position 855 of SEQ ID NO: 1888117
ugucaaauacucgauaguu

SEQ ID NO: 2512029 - RNA, 19 nt, Artificial Sequence
  Description of Artificial Sequence: Synthetic oligonucleotide
  Antisense strand to SEQ ID NO: 2512028
aacuaucgaguauuugaca

SEQ ID NO: 2512030 - RNA, 19 nt, Artificial Sequence
  Description of Artificial Sequence: Synthetic oligonucleotide
  Sense strand starting at position 995 of SEQ ID NO: 1888117
caaacaucucaagggugua

SEQ ID NO: 2512031 - RNA, 19 nt, Artificial Sequence
  Description of Artificial Sequence: Synthetic oligonucleotide
  Antisense strand to SEQ ID NO: 2512030
uacacccuugagauguuug

SEQ ID NO: 2512032 - RNA, 19 nt, Artificial Sequence
  Description of Artificial Sequence: Synthetic oligonucleotide
  Sense strand starting at position 1023 of SEQ ID NO: 1888117
uguaaaucugagggccuua

SEQ ID NO: 2512033 - RNA, 19 nt, Artificial Sequence
  Description of Artificial Sequence: Synthetic oligonucleotide
  Antisense strand to SEQ ID NO: 2512032
uaaggcccucagauuuaca

SEQ ID NO: 2512034 - RNA, 19 nt, Artificial Sequence
  Description of Artificial Sequence: Synthetic oligonucleotide
  Sense strand starting at position 1080 of SEQ ID NO: 1888117
uguggacuuuggccaaaua

SEQ ID NO: 2512035 - RNA, 19 nt, Artificial Sequence
  Description of Artificial Sequence: Synthetic oligonucleotide
  Antisense strand to SEQ ID NO: 2512034
uauuuggccaaaguccaca

SEQ ID NO: 2512036 - RNA, 19 nt, Artificial Sequence
  Description of Artificial Sequence: Synthetic oligonucleotide
  Sense strand starting at position 1120 of SEQ ID NO: 1888117
ugugcuucucuagaaguug

SEQ ID NO: 2512037 - RNA, 19 nt, Artificial Sequence
  Description of Artificial Sequence: Synthetic oligonucleotide
  Antisense strand to SEQ ID NO: 2512036
caacuucuagagaagcaca

SEQ ID NO: 2512038 - RNA, 19 nt, Artificial Sequence
  Description of Artificial Sequence: Synthetic oligonucleotide
  Sense strand starting at position 1290 of SEQ ID NO: 1888117
gcaagauuccuagagcaac

SEQ ID NO: 2512039 - RNA, 19 nt, Artificial Sequence
  Description of Artificial Sequence: Synthetic oligonucleotide
  Antisense strand to SEQ ID NO: 2512038
guugcucuaggaaucuugc

SEQ ID NO: 2512040 - RNA, 19 nt, Artificial Sequence
  Description of Artificial Sequence: Synthetic oligonucleotide
  Sense strand starting at position 1488 of SEQ ID NO: 1888117
acaacaggaucagaacauu

SEQ ID NO: 2512041 - RNA, 19 nt, Artificial Sequence
  Description of Artificial Sequence: Synthetic oligonucleotide
  Antisense strand to SEQ ID NO: 2512040
aauguucugauccuguugu

SEQ ID NO: 2512042 - RNA, 19 nt, Artificial Sequence
  Description of Artificial Sequence: Synthetic oligonucleotide
  Sense strand starting at position 1494 of SEQ ID NO: 1888117
ggaucagaacauugccaca

SEQ ID NO: 2512043 - RNA, 19 nt, Artificial Sequence
  Description of Artificial Sequence: Synthetic oligonucleotide
  Antisense strand to SEQ ID NO: 2512042
uguggcaauguucugaucc

SEQ ID NO: 2512044 - RNA, 19 nt, Artificial Sequence
  Description of Artificial Sequence: Synthetic oligonucleotide
  Sense strand starting at position 1679 of SEQ ID NO: 1888117
uaacuuguuguugggugaa

SEQ ID NO: 2512045 - RNA, 19 nt, Artificial Sequence
  Description of Artificial Sequence: Synthetic oligonucleotide
  Antisense strand to SEQ ID NO: 2512044
uucacccaacaacaaguua

SEQ ID NO: 2512046 - RNA, 19 nt, Artificial Sequence
  Description of Artificial Sequence: Synthetic oligonucleotide
  Sense strand starting at position 1681 of SEQ ID NO: 1888117
acuuguuguugggugaaau

SEQ ID NO: 2512047 - RNA, 19 nt, Artificial Sequence
  Description of Artificial Sequence: Synthetic oligonucleotide
  Antisense strand to SEQ ID NO: 2512046
auuucacccaacaacaagu

SEQ ID NO: 2512048 - RNA, 19 nt, Artificial Sequence
  Description of Artificial Sequence: Synthetic oligonucleotide
  Sense strand starting at position 1682 of SEQ ID NO: 1888117
cuuguuguugggugaaaug

SEQ ID NO: 2512049 - RNA, 19 nt, Artificial Sequence
  Description of Artificial Sequence: Synthetic oligonucleotide
  Antisense strand to SEQ ID NO: 2512048
cauuucacccaacaacaag

SEQ ID NO: 2512050 - RNA, 19 nt, Artificial Sequence
  Description of Artificial Sequence: Synthetic oligonucleotide
  Sense strand starting at position 1784 of SEQ ID NO: 1888117
acuugugcugguuaaauau

SEQ ID NO: 2512051 - RNA, 19 nt, Artificial Sequence
  Description of Artificial Sequence: Synthetic oligonucleotide
  Antisense strand to SEQ ID NO: 2512050
auauuuaaccagcacaagu

SEQ ID NO: 2512052 - RNA, 19 nt, Artificial Sequence
  Description of Artificial Sequence: Synthetic oligonucleotide
  Sense strand starting at position 2037 of SEQ ID NO: 1888117
aggaguuaauuuggcauuu

SEQ ID NO: 2512053 - RNA, 19 nt, Artificial Sequence
  Description of Artificial Sequence: Synthetic oligonucleotide
  Antisense strand to SEQ ID NO: 2512052
aaaugccaaauuaacuccu

SEQ ID NO: 2512054 - RNA, 19 nt, Artificial Sequence
  Description of Artificial Sequence: Synthetic oligonucleotide
  Sense strand starting at position 2039 of SEQ ID NO: 1888117
gaguuaauuuggcauuugu

SEQ ID NO: 2512055 - RNA, 19 nt, Artificial Sequence
  Description of Artificial Sequence: Synthetic oligonucleotide
  Antisense strand to SEQ ID NO: 2512054
acaaaugccaaauuaacuc

SEQ ID NO: 2512056 - RNA, 19 nt, Artificial Sequence
  Description of Artificial Sequence: Synthetic oligonucleotide
  Sense strand starting at position 2168 of SEQ ID NO: 1888117
gagacagaguuaccucuau

SEQ ID NO: 2512057 - RNA, 19 nt, Artificial Sequence
  Description of Artificial Sequence: Synthetic oligonucleotide
  Antisense strand to SEQ ID NO: 2512056
auagagguaacucugucuc

SEQ ID NO: 2512058 - RNA, 19 nt, Artificial Sequence
  Description of Artificial Sequence: Synthetic oligonucleotide
  Sense strand starting at position 2180 of SEQ ID NO: 1888117
ccucuauucugguuauauu

SEQ ID NO: 2512059 - RNA, 19 nt, Artificial Sequence
  Description of Artificial Sequence: Synthetic oligonucleotide
  Antisense strand to SEQ ID NO: 2512058
aauauaaccagaauagagg

SEQ ID NO: 2512060 - RNA, 19 nt, Artificial Sequence
  Description of Artificial Sequence: Synthetic oligonucleotide
  Sense strand starting at position 2181 of SEQ ID NO: 1888117
cucuauucugguuauauuc

SEQ ID NO: 2512061 - RNA, 19 nt, Artificial Sequence
  Description of Artificial Sequence: Synthetic oligonucleotide
  Antisense strand to SEQ ID NO: 2512060
gaauauaaccagaauagag

SEQ ID NO: 2512062 - RNA, 19 nt, Artificial Sequence
  Description of Artificial Sequence: Synthetic oligonucleotide
  Sense strand starting at position 2385 of SEQ ID NO: 1888117
ugcagaauuccaugccaua

SEQ ID NO: 2512063 - RNA, 19 nt, Artificial Sequence
  Description of Artificial Sequence: Synthetic oligonucleotide
  Antisense strand to SEQ ID NO: 2512062
uauggcauggaauucugca

SEQ ID NO: 2512064 - RNA, 19 nt, Artificial Sequence
  Description of Artificial Sequence: Synthetic oligonucleotide
  Sense strand starting at position 3037 of SEQ ID NO: 1888117
uccagcucucugugaauuu

SEQ ID NO: 2512065 - RNA, 19 nt, Artificial Sequence
  Description of Artificial Sequence: Synthetic oligonucleotide
  Antisense strand to SEQ ID NO: 2512064
aaauucacagagagcugga

SEQ ID NO: 2512066 - RNA, 19 nt, Artificial Sequence
  Description of Artificial Sequence: Synthetic oligonucleotide
  Sense strand starting at position 3141 of SEQ ID NO: 1888117
ugaaauuguuuacucagau

SEQ ID NO: 2512067 - RNA, 19 nt, Artificial Sequence
  Description of Artificial Sequence: Synthetic oligonucleotide
  Antisense strand to SEQ ID NO: 2512066
aucugaguaaacaauuuca

SEQ ID NO: 2512068 - RNA, 19 nt, Artificial Sequence
  Description of Artificial Sequence: Synthetic oligonucleotide
  Sense strand starting at position 3142 of SEQ ID NO: 1888117
gaaauuguuuacucagaug

SEQ ID NO: 2512069 - RNA, 19 nt, Artificial Sequence
  Description of Artificial Sequence: Synthetic oligonucleotide
  Antisense strand to SEQ ID NO: 2512068
caucugaguaaacaauuuc

SEQ ID NO: 2512070 - RNA, 19 nt, Artificial Sequence
  Description of Artificial Sequence: Synthetic oligonucleotide
  Sense strand starting at position 3158 of SEQ ID NO: 1888117
augaccuauuaagagaaau

SEQ ID NO: 2512071 - RNA, 19 nt, Artificial Sequence
  Description of Artificial Sequence: Synthetic oligonucleotide
  Antisense strand to SEQ ID NO: 2512070
auuucucuuaauaggucau

SEQ ID NO: 2512072 - RNA, 19 nt, Artificial Sequence
  Description of Artificial Sequence: Synthetic oligonucleotide
  Sense strand starting at position 3450 of SEQ ID NO: 1888117
ugggcuucacugugagauc

SEQ ID NO: 2512073 - RNA, 19 nt, Artificial Sequence
  Description of Artificial Sequence: Synthetic oligonucleotide
  Antisense strand to SEQ ID NO: 2512072
gaucucacagugaagccca

SEQ ID NO: 2512074 - RNA, 19 nt, Artificial Sequence
  Description of Artificial Sequence: Synthetic oligonucleotide
  Sense strand starting at position 3737 of SEQ ID NO: 1888117
gccugugguccauaaacaa

SEQ ID NO: 2512075 - RNA, 19 nt, Artificial Sequence
  Description of Artificial Sequence: Synthetic oligonucleotide
  Antisense strand to SEQ ID NO: 2512074
uuguuuauggaccacaggc

SEQ ID NO: 2512076 - RNA, 19 nt, Artificial Sequence
  Description of Artificial Sequence: Synthetic oligonucleotide
  Sense strand starting at position 3841 of SEQ ID NO: 1888117
ggguuuaaacugugacauc

SEQ ID NO: 2512077 - RNA, 19 nt, Artificial Sequence
  Description of Artificial Sequence: Synthetic oligonucleotide
  Antisense strand to SEQ ID NO: 2512076
gaugucacaguuuaaaccc

SEQ ID NO: 2512078 - RNA, 19 nt, Artificial Sequence
  Description of Artificial Sequence: Synthetic oligonucleotide
  Sense strand starting at position 3857 of SEQ ID NO: 1888117
aucagagugggcugguuua

SEQ ID NO: 2512079 - RNA, 19 nt, Artificial Sequence
  Description of Artificial Sequence: Synthetic oligonucleotide
  Antisense strand to SEQ ID NO: 2512078
uaaaccagcccacucugau

SEQ ID NO: 2512080 - RNA, 19 nt, Artificial Sequence
  Description of Artificial Sequence: Synthetic oligonucleotide
  Sense strand starting at position 3909 of SEQ ID NO: 1888117
gcaugauagggccaacauu

SEQ ID NO: 2512081 - RNA, 19 nt, Artificial Sequence
  Description of Artificial Sequence: Synthetic oligonucleotide
  Antisense strand to SEQ ID NO: 2512080
aauguuggcccuaucaugc

SEQ ID NO: 2512082 - RNA, 19 nt, Artificial Sequence
  Description of Artificial Sequence: Synthetic oligonucleotide
  Sense strand starting at position 3917 of SEQ ID NO: 1888117
gggccaacauugucaucuu

SEQ ID NO: 2512083 - RNA, 19 nt, Artificial Sequence
  Description of Artificial Sequence: Synthetic oligonucleotide
  Antisense strand to SEQ ID NO: 2512082
aagaugacaauguuggccc

SEQ ID NO: 2512084 - RNA, 19 nt, Artificial Sequence
  Description of Artificial Sequence: Synthetic oligonucleotide
  Sense strand starting at position 889 of SEQ ID NO: 1888118
ccuccugcgcgguaaguua

SEQ ID NO: 2512085 - RNA, 19 nt, Artificial Sequence
  Description of Artificial Sequence: Synthetic oligonucleotide
  Antisense strand to SEQ ID NO: 2512084
uaacuuaccgcgcaggagg

SEQ ID NO: 2512086 - RNA, 19 nt, Artificial Sequence
  Description of Artificial Sequence: Synthetic oligonucleotide
  Sense strand starting at position 1258 of SEQ ID NO: 1888118
gccugcuuccuccgguuua

SEQ ID NO: 2512087 - RNA, 19 nt, Artificial Sequence
  Description of Artificial Sequence: Synthetic oligonucleotide
  Antisense strand to SEQ ID NO: 2512086
uaaaccggaggaagcaggc

SEQ ID NO: 2512088 - RNA, 19 nt, Artificial Sequence
  Description of Artificial Sequence: Synthetic oligonucleotide
  Sense strand starting at position 2153 of SEQ ID NO: 1888118
gugggaagggcucauguga

SEQ ID NO: 2512089 - RNA, 19 nt, Artificial Sequence
  Description of Artificial Sequence: Synthetic oligonucleotide
  Antisense strand to SEQ ID NO: 2512088
ucacaugagcccuucccac

SEQ ID NO: 2512090 - RNA, 19 nt, Artificial Sequence
  Description of Artificial Sequence: Synthetic oligonucleotide
  Sense strand starting at position 2337 of SEQ ID NO: 1888118
aagaaacucuucuccgguu

SEQ ID NO: 2512091 - RNA, 19 nt, Artificial Sequence
  Description of Artificial Sequence: Synthetic oligonucleotide
  Antisense strand to SEQ ID NO: 2512090
aaccggagaagaguuucuu

SEQ ID NO: 2512092 - RNA, 19 nt, Artificial Sequence
  Description of Artificial Sequence: Synthetic oligonucleotide
  Sense strand starting at position 2338 of SEQ ID NO: 1888118
agaaacucuucuccgguua

SEQ ID NO: 2512093 - RNA, 19 nt, Artificial Sequence
  Description of Artificial Sequence: Synthetic oligonucleotide
  Antisense strand to SEQ ID NO: 2512092
uaaccggagaagaguuucu

SEQ ID NO: 2512094 - RNA, 19 nt, Artificial Sequence
  Description of Artificial Sequence: Synthetic oligonucleotide
  Sense strand starting at position 2343 of SEQ ID NO: 1888118
cucuucuccgguuacaaca

SEQ ID NO: 2512095 - RNA, 19 nt, Artificial Sequence
  Description of Artificial Sequence: Synthetic oligonucleotide
  Antisense strand to SEQ ID NO: 2512094
uguuguaaccggagaagag

SEQ ID NO: 2512096 - RNA, 19 nt, Artificial Sequence
  Description of Artificial Sequence: Synthetic oligonucleotide
  Sense strand starting at position 2765 of SEQ ID NO: 1888118
cgcugugaccucggagcaa

SEQ ID NO: 2512097 - RNA, 19 nt, Artificial Sequence
  Description of Artificial Sequence: Synthetic oligonucleotide
  Antisense strand to SEQ ID NO: 2512096
uugcuccgaggucacagcg

SEQ ID NO: 2512098 - RNA, 19 nt, Artificial Sequence
  Description of Artificial Sequence: Synthetic oligonucleotide
  Sense strand starting at position 2906 of SEQ ID NO: 1888118
ggagucuugggcgaagucu

SEQ ID NO: 2512099 - RNA, 19 nt, Artificial Sequence
  Description of Artificial Sequence: Synthetic oligonucleotide
  Antisense strand to SEQ ID NO: 2512098
agacuucgcccaagacucc

SEQ ID NO: 2512100 - RNA, 19 nt, Artificial Sequence
  Description of Artificial Sequence: Synthetic oligonucleotide
  Sense strand starting at position 2914 of SEQ ID NO: 1888118
gggcgaagucuguuugucu

SEQ ID NO: 2512101 - RNA, 19 nt, Artificial Sequence
  Description of Artificial Sequence: Synthetic oligonucleotide
  Antisense strand to SEQ ID NO: 2512100
agacaaacagacuucgccc

SEQ ID NO: 2512102 - RNA, 19 nt, Artificial Sequence
  Description of Artificial Sequence: Synthetic oligonucleotide
  Sense strand starting at position 2915 of SEQ ID NO: 1888118
ggcgaagucuguuugucug

SEQ ID NO: 2512103 - RNA, 19 nt, Artificial Sequence
  Description of Artificial Sequence: Synthetic oligonucleotide
  Antisense strand to SEQ ID NO: 2512102
cagacaaacagacuucgcc

SEQ ID NO: 2512104 - RNA, 19 nt, Artificial Sequence
  Description of Artificial Sequence: Synthetic oligonucleotide
  Sense strand starting at position 2917 of SEQ ID NO: 1888118
cgaagucuguuugucugaa

SEQ ID NO: 2512105 - RNA, 19 nt, Artificial Sequence
  Description of Artificial Sequence: Synthetic oligonucleotide
  Antisense strand to SEQ ID NO: 2512104
uucagacaaacagacuucg

SEQ ID NO: 2512106 - RNA, 19 nt, Artificial Sequence
  Description of Artificial Sequence: Synthetic oligonucleotide
  Sense strand starting at position 2918 of SEQ ID NO: 1888118
gaagucuguuugucugaag

SEQ ID NO: 2512107 - RNA, 19 nt, Artificial Sequence
  Description of Artificial Sequence: Synthetic oligonucleotide
  Antisense strand to SEQ ID NO: 2512106
cuucagacaaacagacuuc

SEQ ID NO: 2512108 - RNA, 19 nt, Artificial Sequence
  Description of Artificial Sequence: Synthetic oligonucleotide
  Sense strand starting at position 2919 of SEQ ID NO: 1888118
aagucuguuugucugaaga

SEQ ID NO: 2512109 - RNA, 19 nt, Artificial Sequence
  Description of Artificial Sequence: Synthetic oligonucleotide
  Antisense strand to SEQ ID NO: 2512108
ucuucagacaaacagacuu

SEQ ID NO: 2512110 - RNA, 19 nt, Artificial Sequence
  Description of Artificial Sequence: Synthetic oligonucleotide
  Sense strand starting at position 2921 of SEQ ID NO: 1888118
gucuguuugucugaagaua

SEQ ID NO: 2512111 - RNA, 19 nt, Artificial Sequence
  Description of Artificial Sequence: Synthetic oligonucleotide
  Antisense strand to SEQ ID NO: 2512110
uaucuucagacaaacagac

SEQ ID NO: 2512112 - RNA, 19 nt, Artificial Sequence
  Description of Artificial Sequence: Synthetic oligonucleotide
  Sense strand starting at position 2929 of SEQ ID NO: 1888118
gucugaagauauguucuuu

SEQ ID NO: 2512113 - RNA, 19 nt, Artificial Sequence
  Description of Artificial Sequence: Synthetic oligonucleotide
  Antisense strand to SEQ ID NO: 2512112
aaagaacauaucuucagac

SEQ ID NO: 2512114 - RNA, 19 nt, Artificial Sequence
  Description of Artificial Sequence: Synthetic oligonucleotide
  Sense strand starting at position 2934 of SEQ ID NO: 1888118
aagauauguucuuucuggu

SEQ ID NO: 2512115 - RNA, 19 nt, Artificial Sequence
  Description of Artificial Sequence: Synthetic oligonucleotide
  Antisense strand to SEQ ID NO: 2512114
accagaaagaacauaucuu

SEQ ID NO: 2512116 - RNA, 19 nt, Artificial Sequence
  Description of Artificial Sequence: Synthetic oligonucleotide
  Sense strand starting at position 3105 of SEQ ID NO: 1888118
gguugagaugcuugguuac

SEQ ID NO: 2512117 - RNA, 19 nt, Artificial Sequence
  Description of Artificial Sequence: Synthetic oligonucleotide
  Antisense strand to SEQ ID NO: 2512116
guaaccaagcaucucaacc

SEQ ID NO: 2512118 - RNA, 19 nt, Artificial Sequence
  Description of Artificial Sequence: Synthetic oligonucleotide
  Sense strand starting at position 3107 of SEQ ID NO: 1888118
uugagaugcuugguuaccu

SEQ ID NO: 2512119 - RNA, 19 nt, Artificial Sequence
  Description of Artificial Sequence: Synthetic oligonucleotide
  Antisense strand to SEQ ID NO: 2512118
agguaaccaagcaucucaa

SEQ ID NO: 2512120 - RNA, 19 nt, Artificial Sequence
  Description of Artificial Sequence: Synthetic oligonucleotide
  Sense strand starting at position 3108 of SEQ ID NO: 1888118
ugagaugcuugguuaccua

SEQ ID NO: 2512121 - RNA, 19 nt, Artificial Sequence
  Description of Artificial Sequence: Synthetic oligonucleotide
  Antisense strand to SEQ ID NO: 2512120
uagguaaccaagcaucuca

SEQ ID NO: 2512122 - RNA, 19 nt, Artificial Sequence
  Description of Artificial Sequence: Synthetic oligonucleotide
  Sense strand starting at position 3190 of SEQ ID NO: 1888118
cagagacauuuccacguuu

SEQ ID NO: 2512123 - RNA, 19 nt, Artificial Sequence
  Description of Artificial Sequence: Synthetic oligonucleotide
  Antisense strand to SEQ ID NO: 2512122
aaacguggaaaugucucug

SEQ ID NO: 2512124 - RNA, 19 nt, Artificial Sequence
  Description of Artificial Sequence: Synthetic oligonucleotide
  Sense strand starting at position 3385 of SEQ ID NO: 1888118
gcucgucuuccacacugaa

SEQ ID NO: 2512125 - RNA, 19 nt, Artificial Sequence
  Description of Artificial Sequence: Synthetic oligonucleotide
  Antisense strand to SEQ ID NO: 2512124
uucaguguggaagacgagc

SEQ ID NO: 2512126 - RNA, 19 nt, Artificial Sequence
  Description of Artificial Sequence: Synthetic oligonucleotide
  Sense strand starting at position 3471 of SEQ ID NO: 1888118
gaggcauuuguaugcugua

SEQ ID NO: 2512127 - RNA, 19 nt, Artificial Sequence
  Description of Artificial Sequence: Synthetic oligonucleotide
  Antisense strand to SEQ ID NO: 2512126
uacagcauacaaaugccuc

SEQ ID NO: 2512128 - RNA, 19 nt, Artificial Sequence
  Description of Artificial Sequence: Synthetic oligonucleotide
  Sense strand starting at position 3474 of SEQ ID NO: 1888118
gcauuuguaugcuguagag

SEQ ID NO: 2512129 - RNA, 19 nt, Artificial Sequence
  Description of Artificial Sequence: Synthetic oligonucleotide
  Antisense strand to SEQ ID NO: 2512128
cucuacagcauacaaaugc

SEQ ID NO: 2512130 - RNA, 19 nt, Artificial Sequence
  Description of Artificial Sequence: Synthetic oligonucleotide
  Sense strand starting at position 3550 of SEQ ID NO: 1888118
accggguugcgggagaauu

SEQ ID NO: 2512131 - RNA, 19 nt, Artificial Sequence
  Description of Artificial Sequence: Synthetic oligonucleotide
  Antisense strand to SEQ ID NO: 2512130
aauucucccgcaacccggu

SEQ ID NO: 2512132 - RNA, 19 nt, Artificial Sequence
  Description of Artificial Sequence: Synthetic oligonucleotide
  Sense strand starting at position 1998 of SEQ ID NO: 1888119
augcucugccaggaggaaa

SEQ ID NO: 2512133 - RNA, 19 nt, Artificial Sequence
  Description of Artificial Sequence: Synthetic oligonucleotide
  Antisense strand to SEQ ID NO: 2512132
uuuccuccuggcagagcau

SEQ ID NO: 2512134 - RNA, 19 nt, Artificial Sequence
  Description of Artificial Sequence: Synthetic oligonucleotide
  Sense strand starting at position 2122 of SEQ ID NO: 1888119
acgcuuugaagugauuaac

SEQ ID NO: 2512135 - RNA, 19 nt, Artificial Sequence
  Description of Artificial Sequence: Synthetic oligonucleotide
  Antisense strand to SEQ ID NO: 2512134
guuaaucacuucaaagcgu

SEQ ID NO: 2512136 - RNA, 19 nt, Artificial Sequence
  Description of Artificial Sequence: Synthetic oligonucleotide
  Sense strand starting at position 2206 of SEQ ID NO: 1888119
gaggacuggugauuacgaa

SEQ ID NO: 2512137 - RNA, 19 nt, Artificial Sequence
  Description of Artificial Sequence: Synthetic oligonucleotide
  Antisense strand to SEQ ID NO: 2512136
uucguaaucaccaguccuc

SEQ ID NO: 2512138 - RNA, 19 nt, Artificial Sequence
  Description of Artificial Sequence: Synthetic oligonucleotide
  Sense strand starting at position 2295 of SEQ ID NO: 1888119
gucugauugaaaugcagaa

SEQ ID NO: 2512139 - RNA, 19 nt, Artificial Sequence
  Description of Artificial Sequence: Synthetic oligonucleotide
  Antisense strand to SEQ ID NO: 2512138
uucugcauuucaaucagac

SEQ ID NO: 2512140 - RNA, 19 nt, Artificial Sequence
  Description of Artificial Sequence: Synthetic oligonucleotide
  Sense strand starting at position 2325 of SEQ ID NO: 1888119
ggcugauucuggucuccag

SEQ ID NO: 2512141 - RNA, 19 nt, Artificial Sequence
  Description of Artificial Sequence: Synthetic oligonucleotide
  Antisense strand to SEQ ID NO: 2512140
cuggagaccagaaucagcc

SEQ ID NO: 2512142 - RNA, 19 nt, Artificial Sequence
  Description of Artificial Sequence: Synthetic oligonucleotide
  Sense strand starting at position 2329 of SEQ ID NO: 1888119
gauucuggucuccagucua

SEQ ID NO: 2512143 - RNA, 19 nt, Artificial Sequence
  Description of Artificial Sequence: Synthetic oligonucleotide
  Antisense strand to SEQ ID NO: 2512142
uagacuggagaccagaauc

SEQ ID NO: 2512144 - RNA, 19 nt, Artificial Sequence
  Description of Artificial Sequence: Synthetic oligonucleotide
  Sense strand starting at position 2476 of SEQ ID NO: 1888119
gaggaagagugauugguua

SEQ ID NO: 2512145 - RNA, 19 nt, Artificial Sequence
  Description of Artificial Sequence: Synthetic oligonucleotide
  Antisense strand to SEQ ID NO: 2512144
uaaccaaucacucuuccuc

SEQ ID NO: 2512146 - RNA, 19 nt, Artificial Sequence
  Description of Artificial Sequence: Synthetic oligonucleotide
  Sense strand starting at position 2478 of SEQ ID NO: 1888119
ggaagagugauugguuaaa

SEQ ID NO: 2512147 - RNA, 19 nt, Artificial Sequence
  Description of Artificial Sequence: Synthetic oligonucleotide
  Antisense strand to SEQ ID NO: 2512146
uuuaaccaaucacucuucc

SEQ ID NO: 2512148 - RNA, 19 nt, Artificial Sequence
  Description of Artificial Sequence: Synthetic oligonucleotide
  Sense strand starting at position 2509 of SEQ ID NO: 1888119
acccauuaguuaccauuga

SEQ ID NO: 2512149 - RNA, 19 nt, Artificial Sequence
  Description of Artificial Sequence: Synthetic oligonucleotide
  Antisense strand to SEQ ID NO: 2512148
ucaaugguaacuaaugggu

SEQ ID NO: 2512150 - RNA, 19 nt, Artificial Sequence
  Description of Artificial Sequence: Synthetic oligonucleotide
  Sense strand starting at position 2513 of SEQ ID NO: 1888119
auuaguuaccauugaauag

SEQ ID NO: 2512151 - RNA, 19 nt, Artificial Sequence
  Description of Artificial Sequence: Synthetic oligonucleotide
  Antisense strand to SEQ ID NO: 2512150
cuauucaaugguaacuaau

SEQ ID NO: 2512152 - RNA, 19 nt, Artificial Sequence
  Description of Artificial Sequence: Synthetic oligonucleotide
  Sense strand starting at position 2524 of SEQ ID NO: 1888119
uugaauaggugcuuacuau

SEQ ID NO: 2512153 - RNA, 19 nt, Artificial Sequence
  Description of Artificial Sequence: Synthetic oligonucleotide
  Antisense strand to SEQ ID NO: 2512152
auaguaagcaccuauucaa

SEQ ID NO: 2512154 - RNA, 19 nt, Artificial Sequence
  Description of Artificial Sequence: Synthetic oligonucleotide
  Sense strand starting at position 2525 of SEQ ID NO: 1888119
ugaauaggugcuuacuauu

SEQ ID NO: 2512155 - RNA, 19 nt, Artificial Sequence
  Description of Artificial Sequence: Synthetic oligonucleotide
  Antisense strand to SEQ ID NO: 2512154
aauaguaagcaccuauuca

SEQ ID NO: 2512156 - RNA, 19 nt, Artificial Sequence
  Description of Artificial Sequence: Synthetic oligonucleotide
  Sense strand starting at position 2556 of SEQ ID NO: 1888119
uacuaagagcuuuacguga

SEQ ID NO: 2512157 - RNA, 19 nt, Artificial Sequence
  Description of Artificial Sequence: Synthetic oligonucleotide
  Antisense strand to SEQ ID NO: 2512156
ucacguaaagcucuuagua

SEQ ID NO: 2512158 - RNA, 19 nt, Artificial Sequence
  Description of Artificial Sequence: Synthetic oligonucleotide
  Sense strand starting at position 2561 of SEQ ID NO: 1888119
agagcuuuacgugaauuaa

SEQ ID NO: 2512159 - RNA, 19 nt, Artificial Sequence
  Description of Artificial Sequence: Synthetic oligonucleotide
  Antisense strand to SEQ ID NO: 2512158
uuaauucacguaaagcucu

SEQ ID NO: 2512160 - RNA, 19 nt, Artificial Sequence
  Description of Artificial Sequence: Synthetic oligonucleotide
  Sense strand starting at position 2580 of SEQ ID NO: 1888119
cucauugacuucuucgaua

SEQ ID NO: 2512161 - RNA, 19 nt, Artificial Sequence
  Description of Artificial Sequence: Synthetic oligonucleotide
  Antisense strand to SEQ ID NO: 2512160
uaucgaagaagucaaugag

SEQ ID NO: 2512162 - RNA, 19 nt, Artificial Sequence
  Description of Artificial Sequence: Synthetic oligonucleotide
  Sense strand starting at position 2585 of SEQ ID NO: 1888119
ugacuucuucgauaacuuu

SEQ ID NO: 2512163 - RNA, 19 nt, Artificial Sequence
  Description of Artificial Sequence: Synthetic oligonucleotide
  Antisense strand to SEQ ID NO: 2512162
aaaguuaucgaagaaguca

SEQ ID NO: 2512164 - RNA, 19 nt, Artificial Sequence
  Description of Artificial Sequence: Synthetic oligonucleotide
  Sense strand starting at position 2624 of SEQ ID NO: 1888119
ugguaaacucucugaggca

SEQ ID NO: 2512165 - RNA, 19 nt, Artificial Sequence
  Description of Artificial Sequence: Synthetic oligonucleotide
  Antisense strand to SEQ ID NO: 2512164
ugccucagagaguuuacca

SEQ ID NO: 2512166 - RNA, 19 nt, Artificial Sequence
  Description of Artificial Sequence: Synthetic oligonucleotide
  Sense strand starting at position 2693 of SEQ ID NO: 1888119
ccagguucugcaugcauuu

SEQ ID NO: 2512167 - RNA, 19 nt, Artificial Sequence
  Description of Artificial Sequence: Synthetic oligonucleotide
  Antisense strand to SEQ ID NO: 2512166
aaaugcaugcagaaccugg

SEQ ID NO: 2512168 - RNA, 19 nt, Artificial Sequence
  Description of Artificial Sequence: Synthetic oligonucleotide
  Sense strand starting at position 2782 of SEQ ID NO: 1888119
gagcauaugccuugaccua

SEQ ID NO: 2512169 - RNA, 19 nt, Artificial Sequence
  Description of Artificial Sequence: Synthetic oligonucleotide
  Antisense strand to SEQ ID NO: 2512168
uaggucaaggcauaugcuc

SEQ ID NO: 2512170 - RNA, 19 nt, Artificial Sequence
  Description of Artificial Sequence: Synthetic oligonucleotide
  Sense strand starting at position 2783 of SEQ ID NO: 1888119
agcauaugccuugaccuau

SEQ ID NO: 2512171 - RNA, 19 nt, Artificial Sequence
  Description of Artificial Sequence: Synthetic oligonucleotide
  Antisense strand to SEQ ID NO: 2512170
auaggucaaggcauaugcu

SEQ ID NO: 2512172 - RNA, 19 nt, Artificial Sequence
  Description of Artificial Sequence: Synthetic oligonucleotide
  Sense strand starting at position 2915 of SEQ ID NO: 1888119
gcaggcuugcugucgacau

SEQ ID NO: 2512173 - RNA, 19 nt, Artificial Sequence
  Description of Artificial Sequence: Synthetic oligonucleotide
  Antisense strand to SEQ ID NO: 2512172
augucgacagcaagccugc

SEQ ID NO: 2512174 - RNA, 19 nt, Artificial Sequence
  Description of Artificial Sequence: Synthetic oligonucleotide
  Sense strand starting at position 2990 of SEQ ID NO: 1888119
ggcccuuucccuugaggga

SEQ ID NO: 2512175 - RNA, 19 nt, Artificial Sequence
  Description of Artificial Sequence: Synthetic oligonucleotide
  Antisense strand to SEQ ID NO: 2512174
ucccucaagggaaagggcc

SEQ ID NO: 2512176 - RNA, 19 nt, Artificial Sequence
  Description of Artificial Sequence: Synthetic oligonucleotide
  Sense strand starting at position 3008 of SEQ ID NO: 1888119
aggagacaauucccuguaa

SEQ ID NO: 2512177 - RNA, 19 nt, Artificial Sequence
  Description of Artificial Sequence: Synthetic oligonucleotide
  Antisense strand to SEQ ID NO: 2512176
uuacagggaauugucuccu

SEQ ID NO: 2512178 - RNA, 19 nt, Artificial Sequence
  Description of Artificial Sequence: Synthetic oligonucleotide
  Sense strand starting at position 3009 of SEQ ID NO: 1888119
ggagacaauucccuguaau

SEQ ID NO: 2512179 - RNA, 19 nt, Artificial Sequence
  Description of Artificial Sequence: Synthetic oligonucleotide
  Antisense strand to SEQ ID NO: 2512178
auuacagggaauugucucc

SEQ ID NO: 2512180 - RNA, 19 nt, Artificial Sequence
  Description of Artificial Sequence: Synthetic oligonucleotide
  Sense strand starting at position 3010 of SEQ ID NO: 1888119
gagacaauucccuguaaug

SEQ ID NO: 2512181 - RNA, 19 nt, Artificial Sequence
  Description of Artificial Sequence: Synthetic oligonucleotide
  Antisense strand to SEQ ID NO: 2512180
cauuacagggaauugucuc

SEQ ID NO: 2512182 - RNA, 19 nt, Artificial Sequence
  Description of Artificial Sequence: Synthetic oligonucleotide
  Sense strand starting at position 3012 of SEQ ID NO: 1888119
gacaauucccuguaauggu

SEQ ID NO: 2512183 - RNA, 19 nt, Artificial Sequence
  Description of Artificial Sequence: Synthetic oligonucleotide
  Antisense strand to SEQ ID NO: 2512182
accauuacagggaauuguc

SEQ ID NO: 2512184 - RNA, 19 nt, Artificial Sequence
  Description of Artificial Sequence: Synthetic oligonucleotide
  Sense strand starting at position 3021 of SEQ ID NO: 1888119
cuguaauggugugucauuu

SEQ ID NO: 2512185 - RNA, 19 nt, Artificial Sequence
  Description of Artificial Sequence: Synthetic oligonucleotide
  Antisense strand to SEQ ID NO: 2512184
aaaugacacaccauuacag

SEQ ID NO: 2512186 - RNA, 19 nt, Artificial Sequence
  Description of Artificial Sequence: Synthetic oligonucleotide
  Sense strand starting at position 3025 of SEQ ID NO: 1888119
aauggugugucauuuccua

SEQ ID NO: 2512187 - RNA, 19 nt, Artificial Sequence
  Description of Artificial Sequence: Synthetic oligonucleotide
  Antisense strand to SEQ ID NO: 2512186
uaggaaaugacacaccauu

SEQ ID NO: 2512188 - RNA, 19 nt, Artificial Sequence
  Description of Artificial Sequence: Synthetic oligonucleotide
  Sense strand starting at position 3135 of SEQ ID NO: 1888119
gaggccuagccuugaugga

SEQ ID NO: 2512189 - RNA, 19 nt, Artificial Sequence
  Description of Artificial Sequence: Synthetic oligonucleotide
  Antisense strand to SEQ ID NO: 2512188
uccaucaaggcuaggccuc

SEQ ID NO: 2512190 - RNA, 19 nt, Artificial Sequence
  Description of Artificial Sequence: Synthetic oligonucleotide
  Sense strand starting at position 3209 of SEQ ID NO: 1888119
gaugccacuguuuggaaau

SEQ ID NO: 2512191 - RNA, 19 nt, Artificial Sequence
  Description of Artificial Sequence: Synthetic oligonucleotide
  Antisense strand to SEQ ID NO: 2512190
auuuccaaacaguggcauc

SEQ ID NO: 2512192 - RNA, 19 nt, Artificial Sequence
  Description of Artificial Sequence: Synthetic oligonucleotide
  Sense strand starting at position 3223 of SEQ ID NO: 1888119
gaaauugggaggugaaugu

SEQ ID NO: 2512193 - RNA, 19 nt, Artificial Sequence
  Description of Artificial Sequence: Synthetic oligonucleotide
  Antisense strand to SEQ ID NO: 2512192
acauucaccucccaauuuc

SEQ ID NO: 2512194 - RNA, 19 nt, Artificial Sequence
  Description of Artificial Sequence: Synthetic oligonucleotide
  Sense strand starting at position 3260 of SEQ ID NO: 1888119
uugagagaacggugucauc

SEQ ID NO: 2512195 - RNA, 19 nt, Artificial Sequence
  Description of Artificial Sequence: Synthetic oligonucleotide
  Antisense strand to SEQ ID NO: 2512194
gaugacaccguucucucaa

SEQ ID NO: 2512196 - RNA, 19 nt, Artificial Sequence
  Description of Artificial Sequence: Synthetic oligonucleotide
  Sense strand starting at position 3270 of SEQ ID NO: 1888119
ggugucaucagugaaugac

SEQ ID NO: 2512197 - RNA, 19 nt, Artificial Sequence
  Description of Artificial Sequence: Synthetic oligonucleotide
  Antisense strand to SEQ ID NO: 2512196
gucauucacugaugacacc

SEQ ID NO: 2512198 - RNA, 19 nt, Artificial Sequence
  Description of Artificial Sequence: Synthetic oligonucleotide
  Sense strand starting at position 3313 of SEQ ID NO: 1888119
ccugaaacuguuuguugga

SEQ ID NO: 2512199 - RNA, 19 nt, Artificial Sequence
  Description of Artificial Sequence: Synthetic oligonucleotide
  Antisense strand to SEQ ID NO: 2512198
uccaacaaacaguuucagg

SEQ ID NO: 2512200 - RNA, 19 nt, Artificial Sequence
  Description of Artificial Sequence: Synthetic oligonucleotide
  Sense strand starting at position 3380 of SEQ ID NO: 1888119
aaaugagagugugcucuua

SEQ ID NO: 2512201 - RNA, 19 nt, Artificial Sequence
  Description of Artificial Sequence: Synthetic oligonucleotide
  Antisense strand to SEQ ID NO: 2512200
uaagagcacacucucauuu

SEQ ID NO: 2512202 - RNA, 19 nt, Artificial Sequence
  Description of Artificial Sequence: Synthetic oligonucleotide
  Sense strand starting at position 3382 of SEQ ID NO: 1888119
augagagugugcucuuaaa

SEQ ID NO: 2512203 - RNA, 19 nt, Artificial Sequence
  Description of Artificial Sequence: Synthetic oligonucleotide
  Antisense strand to SEQ ID NO: 2512202
uuuaagagcacacucucau

SEQ ID NO: 2512204 - RNA, 19 nt, Artificial Sequence
  Description of Artificial Sequence: Synthetic oligonucleotide
  Sense strand starting at position 3465 of SEQ ID NO: 1888119
ggccaugugguacagagau

SEQ ID NO: 2512205 - RNA, 19 nt, Artificial Sequence
  Description of Artificial Sequence: Synthetic oligonucleotide
  Antisense strand to SEQ ID NO: 2512204
aucucuguaccacauggcc

SEQ ID NO: 2512206 - RNA, 19 nt, Artificial Sequence
  Description of Artificial Sequence: Synthetic oligonucleotide
  Sense strand starting at position 3504 of SEQ ID NO: 1888119
cccacugccuggguugaaa

SEQ ID NO: 2512207 - RNA, 19 nt, Artificial Sequence
  Description of Artificial Sequence: Synthetic oligonucleotide
  Antisense strand to SEQ ID NO: 2512206
uuucaacccaggcaguggg

SEQ ID NO: 2512208 - RNA, 19 nt, Artificial Sequence
  Description of Artificial Sequence: Synthetic oligonucleotide
  Sense strand starting at position 3517 of SEQ ID NO: 1888119
uugaaaucccaguacugcu

SEQ ID NO: 2512209 - RNA, 19 nt, Artificial Sequence
  Description of Artificial Sequence: Synthetic oligonucleotide
  Antisense strand to SEQ ID NO: 2512208
agcaguacugggauuucaa

SEQ ID NO: 2512210 - RNA, 19 nt, Artificial Sequence
  Description of Artificial Sequence: Synthetic oligonucleotide
  Sense strand starting at position 3639 of SEQ ID NO: 1888119
uuugaacauugccuagaau

SEQ ID NO: 2512211 - RNA, 19 nt, Artificial Sequence
  Description of Artificial Sequence: Synthetic oligonucleotide
  Antisense strand to SEQ ID NO: 2512210
auucuaggcaauguucaaa

SEQ ID NO: 2512212 - RNA, 19 nt, Artificial Sequence
  Description of Artificial Sequence: Synthetic oligonucleotide
  Sense strand starting at position 352 of SEQ ID NO: 1888120
cgugaaagaucuuauuacc

SEQ ID NO: 2512213 - RNA, 19 nt, Artificial Sequence
  Description of Artificial Sequence: Synthetic oligonucleotide
  Antisense strand to SEQ ID NO: 2512212
gguaauaagaucuuucacg

SEQ ID NO: 2512214 - RNA, 19 nt, Artificial Sequence
  Description of Artificial Sequence: Synthetic oligonucleotide
  Sense strand starting at position 468 of SEQ ID NO: 1888120
uccaacaauugaguuguua

SEQ ID NO: 2512215 - RNA, 19 nt, Artificial Sequence
  Description of Artificial Sequence: Synthetic oligonucleotide
  Antisense strand to SEQ ID NO: 2512214
uaacaacucaauuguugga

SEQ ID NO: 2512216 - RNA, 19 nt, Artificial Sequence
  Description of Artificial Sequence: Synthetic oligonucleotide
  Sense strand starting at position 472 of SEQ ID NO: 1888120
acaauugaguuguuaggau

SEQ ID NO: 2512217 - RNA, 19 nt, Artificial Sequence
  Description of Artificial Sequence: Synthetic oligonucleotide
  Antisense strand to SEQ ID NO: 2512216
auccuaacaacucaauugu

SEQ ID NO: 2512218 - RNA, 19 nt, Artificial Sequence
  Description of Artificial Sequence: Synthetic oligonucleotide
  Sense strand starting at position 1407 of SEQ ID NO: 1888120
cuggcuguuucucuguuua

SEQ ID NO: 2512219 - RNA, 19 nt, Artificial Sequence
  Description of Artificial Sequence: Synthetic oligonucleotide
  Antisense strand to SEQ ID NO: 2512218
uaaacagagaaacagccag

SEQ ID NO: 2512220 - RNA, 19 nt, Artificial Sequence
  Description of Artificial Sequence: Synthetic oligonucleotide
  Sense strand starting at position 1447 of SEQ ID NO: 1888120
gcucuaacucccuaaaggu

SEQ ID NO: 2512221 - RNA, 19 nt, Artificial Sequence
  Description of Artificial Sequence: Synthetic oligonucleotide
  Antisense strand to SEQ ID NO: 2512220
accuuuagggaguuagagc

SEQ ID NO: 2512222 - RNA, 19 nt, Artificial Sequence
  Description of Artificial Sequence: Synthetic oligonucleotide
  Sense strand starting at position 2026 of SEQ ID NO: 1888120
gccgaaaucucgcgagacg

SEQ ID NO: 2512223 - RNA, 19 nt, Artificial Sequence
  Description of Artificial Sequence: Synthetic oligonucleotide
  Antisense strand to SEQ ID NO: 2512222
cgucucgcgagauuucggc

SEQ ID NO: 2512224 - RNA, 19 nt, Artificial Sequence
  Description of Artificial Sequence: Synthetic oligonucleotide
  Sense strand starting at position 2027 of SEQ ID NO: 1888120
ccgaaaucucgcgagacgu

SEQ ID NO: 2512225 - RNA, 19 nt, Artificial Sequence
  Description of Artificial Sequence: Synthetic oligonucleotide
  Antisense strand to SEQ ID NO: 2512224
acgucucgcgagauuucgg

SEQ ID NO: 2512226 - RNA, 19 nt, Artificial Sequence
  Description of Artificial Sequence: Synthetic oligonucleotide
  Sense strand starting at position 2028 of SEQ ID NO: 1888120
cgaaaucucgcgagacgug

SEQ ID NO: 2512227 - RNA, 19 nt, Artificial Sequence
  Description of Artificial Sequence: Synthetic oligonucleotide
  Antisense strand to SEQ ID NO: 2512226
cacgucucgcgagauuucg

SEQ ID NO: 2512228 - RNA, 19 nt, Artificial Sequence
  Description of Artificial Sequence: Synthetic oligonucleotide
  Sense strand starting at position 2033 of SEQ ID NO: 1888120
ucucgcgagacgugguauu

SEQ ID NO: 2512229 - RNA, 19 nt, Artificial Sequence
  Description of Artificial Sequence: Synthetic oligonucleotide
  Antisense strand to SEQ ID NO: 2512228
aauaccacgucucgcgaga

SEQ ID NO: 2512230 - RNA, 19 nt, Artificial Sequence
  Description of Artificial Sequence: Synthetic oligonucleotide
  Sense strand starting at position 2295 of SEQ ID NO: 1888120
acaugagguuuacauucuu

SEQ ID NO: 2512231 - RNA, 19 nt, Artificial Sequence
  Description of Artificial Sequence: Synthetic oligonucleotide
  Antisense strand to SEQ ID NO: 2512230
aagaauguaaaccucaugu

SEQ ID NO: 2512232 - RNA, 19 nt, Artificial Sequence
  Description of Artificial Sequence: Synthetic oligonucleotide
  Sense strand starting at position 2304 of SEQ ID NO: 1888120
uuacauucuugucuggaga

SEQ ID NO: 2512233 - RNA, 19 nt, Artificial Sequence
  Description of Artificial Sequence: Synthetic oligonucleotide
  Antisense strand to SEQ ID NO: 2512232
ucuccagacaagaauguaa

SEQ ID NO: 2512234 - RNA, 19 nt, Artificial Sequence
  Description of Artificial Sequence: Synthetic oligonucleotide
  Sense strand starting at position 2305 of SEQ ID NO: 1888120
uacauucuugucuggagaa

SEQ ID NO: 2512235 - RNA, 19 nt, Artificial Sequence
  Description of Artificial Sequence: Synthetic oligonucleotide
  Antisense strand to SEQ ID NO: 2512234
uucuccagacaagaaugua

SEQ ID NO: 2512236 - RNA, 19 nt, Artificial Sequence
  Description of Artificial Sequence: Synthetic oligonucleotide
  Sense strand starting at position 2391 of SEQ ID NO: 1888120
auaucaauaggugguauaa

SEQ ID NO: 2512237 - RNA, 19 nt, Artificial Sequence
  Description of Artificial Sequence: Synthetic oligonucleotide
  Antisense strand to SEQ ID NO: 2512236
uuauaccaccuauugauau

SEQ ID NO: 2512238 - RNA, 19 nt, Artificial Sequence
  Description of Artificial Sequence: Synthetic oligonucleotide
  Sense strand starting at position 2410 of SEQ ID NO: 1888120
gcaguaacuugagggaucu

SEQ ID NO: 2512239 - RNA, 19 nt, Artificial Sequence
  Description of Artificial Sequence: Synthetic oligonucleotide
  Antisense strand to SEQ ID NO: 2512238
agaucccucaaguuacugc

SEQ ID NO: 2512240 - RNA, 19 nt, Artificial Sequence
  Description of Artificial Sequence: Synthetic oligonucleotide
  Sense strand starting at position 2411 of SEQ ID NO: 1888120
caguaacuugagggaucuu

SEQ ID NO: 2512241 - RNA, 19 nt, Artificial Sequence
  Description of Artificial Sequence: Synthetic oligonucleotide
  Antisense strand to SEQ ID NO: 2512240
aagaucccucaaguuacug

SEQ ID NO: 2512242 - RNA, 19 nt, Artificial Sequence
  Description of Artificial Sequence: Synthetic oligonucleotide
  Sense strand starting at position 2421 of SEQ ID NO: 1888120
agggaucuuucccguagca

SEQ ID NO: 2512243 - RNA, 19 nt, Artificial Sequence
  Description of Artificial Sequence: Synthetic oligonucleotide
  Antisense strand to SEQ ID NO: 2512242
ugcuacgggaaagaucccu

SEQ ID NO: 2512244 - RNA, 19 nt, Artificial Sequence
  Description of Artificial Sequence: Synthetic oligonucleotide
  Sense strand starting at position 2423 of SEQ ID NO: 1888120
ggaucuuucccguagcauu

SEQ ID NO: 2512245 - RNA, 19 nt, Artificial Sequence
  Description of Artificial Sequence: Synthetic oligonucleotide
  Antisense strand to SEQ ID NO: 2512244
aaugcuacgggaaagaucc

SEQ ID NO: 2512246 - RNA, 19 nt, Artificial Sequence
  Description of Artificial Sequence: Synthetic oligonucleotide
  Sense strand starting at position 2486 of SEQ ID NO: 1888120
aggagccaucaguguggaa

SEQ ID NO: 2512247 - RNA, 19 nt, Artificial Sequence
  Description of Artificial Sequence: Synthetic oligonucleotide
  Antisense strand to SEQ ID NO: 2512246
uuccacacugauggcuccu

SEQ ID NO: 2512248 - RNA, 19 nt, Artificial Sequence
  Description of Artificial Sequence: Synthetic oligonucleotide
  Sense strand starting at position 2742 of SEQ ID NO: 1888120
aagaauagaugcucuggua

SEQ ID NO: 2512249 - RNA, 19 nt, Artificial Sequence
  Description of Artificial Sequence: Synthetic oligonucleotide
  Antisense strand to SEQ ID NO: 2512248
uaccagagcaucuauucuu

SEQ ID NO: 2512250 - RNA, 19 nt, Artificial Sequence
  Description of Artificial Sequence: Synthetic oligonucleotide
  Sense strand starting at position 2760 of SEQ ID NO: 1888120
acggucagcgucuaaagau

SEQ ID NO: 2512251 - RNA, 19 nt, Artificial Sequence
  Description of Artificial Sequence: Synthetic oligonucleotide
  Antisense strand to SEQ ID NO: 2512250
aucuuuagacgcugaccgu

SEQ ID NO: 2512252 - RNA, 19 nt, Artificial Sequence
  Description of Artificial Sequence: Synthetic oligonucleotide
  Sense strand starting at position 2977 of SEQ ID NO: 1888120
gugaaauaguggcaaugua

SEQ ID NO: 2512253 - RNA, 19 nt, Artificial Sequence
  Description of Artificial Sequence: Synthetic oligonucleotide
  Antisense strand to SEQ ID NO: 2512252
uacauugccacuauuucac

SEQ ID NO: 2512254 - RNA, 19 nt, Artificial Sequence
  Description of Artificial Sequence: Synthetic oligonucleotide
  Sense strand starting at position 2985 of SEQ ID NO: 1888120
guggcaauguauuacauca

SEQ ID NO: 2512255 - RNA, 19 nt, Artificial Sequence
  Description of Artificial Sequence: Synthetic oligonucleotide
  Antisense strand to SEQ ID NO: 2512254
ugauguaauacauugccac

SEQ ID NO: 2512256 - RNA, 19 nt, Artificial Sequence
  Description of Artificial Sequence: Synthetic oligonucleotide
  Sense strand starting at position 2987 of SEQ ID NO: 1888120
ggcaauguauuacaucacu

SEQ ID NO: 2512257 - RNA, 19 nt, Artificial Sequence
  Description of Artificial Sequence: Synthetic oligonucleotide
  Antisense strand to SEQ ID NO: 2512256
agugauguaauacauugcc

SEQ ID NO: 2512258 - RNA, 19 nt, Artificial Sequence
  Description of Artificial Sequence: Synthetic oligonucleotide
  Sense strand starting at position 2992 of SEQ ID NO: 1888120
uguauuacaucacuauuga

SEQ ID NO: 2512259 - RNA, 19 nt, Artificial Sequence
  Description of Artificial Sequence: Synthetic oligonucleotide
  Antisense strand to SEQ ID NO: 2512258
ucaauagugauguaauaca

SEQ ID NO: 2512260 - RNA, 19 nt, Artificial Sequence
  Description of Artificial Sequence: Synthetic oligonucleotide
  Sense strand starting at position 3444 of SEQ ID NO: 1888120
ucauaauugguuugcuuau

SEQ ID NO: 2512261 - RNA, 19 nt, Artificial Sequence
  Description of Artificial Sequence: Synthetic oligonucleotide
  Antisense strand to SEQ ID NO: 2512260
auaagcaaaccaauuauga

SEQ ID NO: 2512262 - RNA, 19 nt, Artificial Sequence
  Description of Artificial Sequence: Synthetic oligonucleotide
  Sense strand starting at position 3497 of SEQ ID NO: 1888120
aguauugcucuauagucca

SEQ ID NO: 2512263 - RNA, 19 nt, Artificial Sequence
  Description of Artificial Sequence: Synthetic oligonucleotide
  Antisense strand to SEQ ID NO: 2512262
uggacuauagagcaauacu

SEQ ID NO: 2512264 - RNA, 19 nt, Artificial Sequence
  Description of Artificial Sequence: Synthetic oligonucleotide
  Sense strand starting at position 3767 of SEQ ID NO: 1888120
cgcagcuugucuuucuuaa

SEQ ID NO: 2512265 - RNA, 19 nt, Artificial Sequence
  Description of Artificial Sequence: Synthetic oligonucleotide
  Antisense strand to SEQ ID NO: 2512264
uuaagaaagacaagcugcg

SEQ ID NO: 2512266 - RNA, 19 nt, Artificial Sequence
  Description of Artificial Sequence: Synthetic oligonucleotide
  Sense strand starting at position 2056 of SEQ ID NO: 1888121
cguaguucccgcuuagcua

SEQ ID NO: 2512267 - RNA, 19 nt, Artificial Sequence
  Description of Artificial Sequence: Synthetic oligonucleotide
  Antisense strand to SEQ ID NO: 2512266
uagcuaagcgggaacuacg

SEQ ID NO: 2512268 - RNA, 19 nt, Artificial Sequence
  Description of Artificial Sequence: Synthetic oligonucleotide
  Sense strand starting at position 2072 of SEQ ID NO: 1888121
cuagguugacaugguacaa

SEQ ID NO: 2512269 - RNA, 19 nt, Artificial Sequence
  Description of Artificial Sequence: Synthetic oligonucleotide
  Antisense strand to SEQ ID NO: 2512268
uuguaccaugucaaccuag

SEQ ID NO: 2512270 - RNA, 19 nt, Artificial Sequence
  Description of Artificial Sequence: Synthetic oligonucleotide
  Sense strand starting at position 2137 of SEQ ID NO: 1888121
ucaugcuaagucuagggaa

SEQ ID NO: 2512271 - RNA, 19 nt, Artificial Sequence
  Description of Artificial Sequence: Synthetic oligonucleotide
  Antisense strand to SEQ ID NO: 2512270
uucccuagacuuagcauga

SEQ ID NO: 2512272 - RNA, 19 nt, Artificial Sequence
  Description of Artificial Sequence: Synthetic oligonucleotide
  Sense strand starting at position 2139 of SEQ ID NO: 1888121
augcuaagucuagggaaua

SEQ ID NO: 2512273 - RNA, 19 nt, Artificial Sequence
  Description of Artificial Sequence: Synthetic oligonucleotide
  Antisense strand to SEQ ID NO: 2512272
uauucccuagacuuagcau

SEQ ID NO: 2512274 - RNA, 19 nt, Artificial Sequence
  Description of Artificial Sequence: Synthetic oligonucleotide
  Sense strand starting at position 2149 of SEQ ID NO: 1888121
uagggaauacagugguuga

SEQ ID NO: 2512275 - RNA, 19 nt, Artificial Sequence
  Description of Artificial Sequence: Synthetic oligonucleotide
  Antisense strand to SEQ ID NO: 2512274
ucaaccacuguauucccua

SEQ ID NO: 2512276 - RNA, 19 nt, Artificial Sequence
  Description of Artificial Sequence: Synthetic oligonucleotide
  Sense strand starting at position 2150 of SEQ ID NO: 1888121
agggaauacagugguugaa

SEQ ID NO: 2512277 - RNA, 19 nt, Artificial Sequence
  Description of Artificial Sequence: Synthetic oligonucleotide
  Antisense strand to SEQ ID NO: 2512276
uucaaccacuguauucccu

SEQ ID NO: 2512278 - RNA, 19 nt, Artificial Sequence
  Description of Artificial Sequence: Synthetic oligonucleotide
  Sense strand starting at position 2152 of SEQ ID NO: 1888121
ggaauacagugguugaaug

SEQ ID NO: 2512279 - RNA, 19 nt, Artificial Sequence
  Description of Artificial Sequence: Synthetic oligonucleotide
  Antisense strand to SEQ ID NO: 2512278
cauucaaccacuguauucc

SEQ ID NO: 2512280 - RNA, 19 nt, Artificial Sequence
  Description of Artificial Sequence: Synthetic oligonucleotide
  Sense strand starting at position 2189 of SEQ ID NO: 1888121
agcuauucuggaggaacau

SEQ ID NO: 2512281 - RNA, 19 nt, Artificial Sequence
  Description of Artificial Sequence: Synthetic oligonucleotide
  Antisense strand to SEQ ID NO: 2512280
auguuccuccagaauagcu

SEQ ID NO: 2512282 - RNA, 19 nt, Artificial Sequence
  Description of Artificial Sequence: Synthetic oligonucleotide
  Sense strand starting at position 2324 of SEQ ID NO: 1888121
ccguauuguggacacacua

SEQ ID NO: 2512283 - RNA, 19 nt, Artificial Sequence
  Description of Artificial Sequence: Synthetic oligonucleotide
  Antisense strand to SEQ ID NO: 2512282
uaguguguccacaauacgg

SEQ ID NO: 2512284 - RNA, 19 nt, Artificial Sequence
  Description of Artificial Sequence: Synthetic oligonucleotide
  Sense strand starting at position 2341 of SEQ ID NO: 1888121
uauugugaggccuacuaag

SEQ ID NO: 2512285 - RNA, 19 nt, Artificial Sequence
  Description of Artificial Sequence: Synthetic oligonucleotide
  Antisense strand to SEQ ID NO: 2512284
cuuaguaggccucacaaua

SEQ ID NO: 2512286 - RNA, 19 nt, Artificial Sequence
  Description of Artificial Sequence: Synthetic oligonucleotide
  Sense strand starting at position 2384 of SEQ ID NO: 1888121
agguaagucaaaugcaguu

SEQ ID NO: 2512287 - RNA, 19 nt, Artificial Sequence
  Description of Artificial Sequence: Synthetic oligonucleotide
  Antisense strand to SEQ ID NO: 2512286
aacugcauuugacuuaccu

SEQ ID NO: 2512288 - RNA, 19 nt, Artificial Sequence
  Description of Artificial Sequence: Synthetic oligonucleotide
  Sense strand starting at position 2455 of SEQ ID NO: 1888121
aagcgcugugcccuugaga

SEQ ID NO: 2512289 - RNA, 19 nt, Artificial Sequence
  Description of Artificial Sequence: Synthetic oligonucleotide
  Antisense strand to SEQ ID NO: 2512288
ucucaagggcacagcgcuu

SEQ ID NO: 2512290 - RNA, 19 nt, Artificial Sequence
  Description of Artificial Sequence: Synthetic oligonucleotide
  Sense strand starting at position 2458 of SEQ ID NO: 1888121
cgcugugcccuugagacaa

SEQ ID NO: 2512291 - RNA, 19 nt, Artificial Sequence
  Description of Artificial Sequence: Synthetic oligonucleotide
  Antisense strand to SEQ ID NO: 2512290
uugucucaagggcacagcg

SEQ ID NO: 2512292 - RNA, 19 nt, Artificial Sequence
  Description of Artificial Sequence: Synthetic oligonucleotide
  Sense strand starting at position 2501 of SEQ ID NO: 1888121
uugaaauguuuaucaaugc

SEQ ID NO: 2512293 - RNA, 19 nt, Artificial Sequence
  Description of Artificial Sequence: Synthetic oligonucleotide
  Antisense strand to SEQ ID NO: 2512292
gcauugauaaacauuucaa

SEQ ID NO: 2512294 - RNA, 19 nt, Artificial Sequence
  Description of Artificial Sequence: Synthetic oligonucleotide
  Sense strand starting at position 2607 of SEQ ID NO: 1888121
aguucaagugguuacugua

SEQ ID NO: 2512295 - RNA, 19 nt, Artificial Sequence
  Description of Artificial Sequence: Synthetic oligonucleotide
  Antisense strand to SEQ ID NO: 2512294
uacaguaaccacuugaacu

SEQ ID NO: 2512296 - RNA, 19 nt, Artificial Sequence
  Description of Artificial Sequence: Synthetic oligonucleotide
  Sense strand starting at position 2662 of SEQ ID NO: 1888121
acauacacaucagagaagu

SEQ ID NO: 2512297 - RNA, 19 nt, Artificial Sequence
  Description of Artificial Sequence: Synthetic oligonucleotide
  Antisense strand to SEQ ID NO: 2512296
acuucucugauguguaugu

SEQ ID NO: 2512298 - RNA, 19 nt, Artificial Sequence
  Description of Artificial Sequence: Synthetic oligonucleotide
  Sense strand starting at position 2692 of SEQ ID NO: 1888121
aaguaaagaucaguuugca

SEQ ID NO: 2512299 - RNA, 19 nt, Artificial Sequence
  Description of Artificial Sequence: Synthetic oligonucleotide
  Antisense strand to SEQ ID NO: 2512298
ugcaaacugaucuuuacuu

SEQ ID NO: 2512300 - RNA, 19 nt, Artificial Sequence
  Description of Artificial Sequence: Synthetic oligonucleotide
  Sense strand starting at position 2695 of SEQ ID NO: 1888121
uaaagaucaguuugcaaag

SEQ ID NO: 2512301 - RNA, 19 nt, Artificial Sequence
  Description of Artificial Sequence: Synthetic oligonucleotide
  Antisense strand to SEQ ID NO: 2512300
cuuugcaaacugaucuuua

SEQ ID NO: 2512302 - RNA, 19 nt, Artificial Sequence
  Description of Artificial Sequence: Synthetic oligonucleotide
  Sense strand starting at position 2696 of SEQ ID NO: 1888121
aaagaucaguuugcaaaga

SEQ ID NO: 2512303 - RNA, 19 nt, Artificial Sequence
  Description of Artificial Sequence: Synthetic oligonucleotide
  Antisense strand to SEQ ID NO: 2512302
ucuuugcaaacugaucuuu

SEQ ID NO: 2512304 - RNA, 19 nt, Artificial Sequence
  Description of Artificial Sequence: Synthetic oligonucleotide
  Sense strand starting at position 2885 of SEQ ID NO: 1888121
agaguucaccuugggaguu

SEQ ID NO: 2512305 - RNA, 19 nt, Artificial Sequence
  Description of Artificial Sequence: Synthetic oligonucleotide
  Antisense strand to SEQ ID NO: 2512304
aacucccaaggugaacucu

SEQ ID NO: 2512306 - RNA, 19 nt, Artificial Sequence
  Description of Artificial Sequence: Synthetic oligonucleotide
  Sense strand starting at position 2946 of SEQ ID NO: 1888121
ggauaaugaguguaugcau

SEQ ID NO: 2512307 - RNA, 19 nt, Artificial Sequence
  Description of Artificial Sequence: Synthetic oligonucleotide
  Antisense strand to SEQ ID NO: 2512306
augcauacacucauuaucc

SEQ ID NO: 2512308 - RNA, 19 nt, Artificial Sequence
  Description of Artificial Sequence: Synthetic oligonucleotide
  Sense strand starting at position 3037 of SEQ ID NO: 1888121
uggauugauggauguauac

SEQ ID NO: 2512309 - RNA, 19 nt, Artificial Sequence
  Description of Artificial Sequence: Synthetic oligonucleotide
  Antisense strand to SEQ ID NO: 2512308
guauacauccaucaaucca

SEQ ID NO: 2512310 - RNA, 19 nt, Artificial Sequence
  Description of Artificial Sequence: Synthetic oligonucleotide
  Sense strand starting at position 3047 of SEQ ID NO: 1888121
gauguauacaagcguaggu

SEQ ID NO: 2512311 - RNA, 19 nt, Artificial Sequence
  Description of Artificial Sequence: Synthetic oligonucleotide
  Antisense strand to SEQ ID NO: 2512310
accuacgcuuguauacauc

SEQ ID NO: 2512312 - RNA, 19 nt, Artificial Sequence
  Description of Artificial Sequence: Synthetic oligonucleotide
  Sense strand starting at position 3090 of SEQ ID NO: 1888121
gcagaauauuaauugcaga

SEQ ID NO: 2512313 - RNA, 19 nt, Artificial Sequence
  Description of Artificial Sequence: Synthetic oligonucleotide
  Antisense strand to SEQ ID NO: 2512312
ucugcaauuaauauucugc

SEQ ID NO: 2512314 - RNA, 19 nt, Artificial Sequence
  Description of Artificial Sequence: Synthetic oligonucleotide
  Sense strand starting at position 3108 of SEQ ID NO: 1888121
aaucuauguggcgaguaua

SEQ ID NO: 2512315 - RNA, 19 nt, Artificial Sequence
  Description of Artificial Sequence: Synthetic oligonucleotide
  Antisense strand to SEQ ID NO: 2512314
uauacucgccacauagauu

SEQ ID NO: 2512316 - RNA, 19 nt, Artificial Sequence
  Description of Artificial Sequence: Synthetic oligonucleotide
  Sense strand starting at position 3136 of SEQ ID NO: 1888121
ccaggucugagucauagac

SEQ ID NO: 2512317 - RNA, 19 nt, Artificial Sequence
  Description of Artificial Sequence: Synthetic oligonucleotide
  Antisense strand to SEQ ID NO: 2512316
gucuaugacucagaccugg

SEQ ID NO: 2512318 - RNA, 19 nt, Artificial Sequence
  Description of Artificial Sequence: Synthetic oligonucleotide
  Sense strand starting at position 3146 of SEQ ID NO: 1888121
gucauagacagauggaugu

SEQ ID NO: 2512319 - RNA, 19 nt, Artificial Sequence
  Description of Artificial Sequence: Synthetic oligonucleotide
  Antisense strand to SEQ ID NO: 2512318
acauccaucugucuaugac

SEQ ID NO: 2512320 - RNA, 19 nt, Artificial Sequence
  Description of Artificial Sequence: Synthetic oligonucleotide
  Sense strand starting at position 3153 of SEQ ID NO: 1888121
acagauggaugucauagau

SEQ ID NO: 2512321 - RNA, 19 nt, Artificial Sequence
  Description of Artificial Sequence: Synthetic oligonucleotide
  Antisense strand to SEQ ID NO: 2512320
aucuaugacauccaucugu

SEQ ID NO: 2512322 - RNA, 19 nt, Artificial Sequence
  Description of Artificial Sequence: Synthetic oligonucleotide
  Sense strand starting at position 3169 of SEQ ID NO: 1888121
gauagauagucauagauag

SEQ ID NO: 2512323 - RNA, 19 nt, Artificial Sequence
  Description of Artificial Sequence: Synthetic oligonucleotide
  Antisense strand to SEQ ID NO: 2512322
cuaucuaugacuaucuauc

SEQ ID NO: 2512324 - RNA, 19 nt, Artificial Sequence
  Description of Artificial Sequence: Synthetic oligonucleotide
  Sense strand starting at position 3180 of SEQ ID NO: 1888121
auagauagauaccgaaaua

SEQ ID NO: 2512325 - RNA, 19 nt, Artificial Sequence
  Description of Artificial Sequence: Synthetic oligonucleotide
  Antisense strand to SEQ ID NO: 2512324
uauuucgguaucuaucuau

SEQ ID NO: 2512326 - RNA, 19 nt, Artificial Sequence
  Description of Artificial Sequence: Synthetic oligonucleotide
  Sense strand starting at position 3589 of SEQ ID NO: 1888121
auaggaagauaucaacaga

SEQ ID NO: 2512327 - RNA, 19 nt, Artificial Sequence
  Description of Artificial Sequence: Synthetic oligonucleotide
  Antisense strand to SEQ ID NO: 2512326
ucuguugauaucuuccuau

SEQ ID NO: 2512328 - RNA, 19 nt, Artificial Sequence
  Description of Artificial Sequence: Synthetic oligonucleotide
  Sense strand starting at position 3712 of SEQ ID NO: 1888121
uugcuaugugacuacccua

SEQ ID NO: 2512329 - RNA, 19 nt, Artificial Sequence
  Description of Artificial Sequence: Synthetic oligonucleotide
  Antisense strand to SEQ ID NO: 2512328
uaggguagucacauagcaa

SEQ ID NO: 2512330 - RNA, 19 nt, Artificial Sequence
  Description of Artificial Sequence: Synthetic oligonucleotide
  Sense strand starting at position 3755 of SEQ ID NO: 1888121
uccacagcacgcuaagaau

SEQ ID NO: 2512331 - RNA, 19 nt, Artificial Sequence
  Description of Artificial Sequence: Synthetic oligonucleotide
  Antisense strand to SEQ ID NO: 2512330
auucuuagcgugcugugga

SEQ ID NO: 2512332 - RNA, 19 nt, Artificial Sequence
  Description of Artificial Sequence: Synthetic oligonucleotide
  Sense strand starting at position 3764 of SEQ ID NO: 1888121
cgcuaagaauccuccucua

SEQ ID NO: 2512333 - RNA, 19 nt, Artificial Sequence
  Description of Artificial Sequence: Synthetic oligonucleotide
  Antisense strand to SEQ ID NO: 2512332
uagaggaggauucuuagcg

SEQ ID NO: 2512334 - RNA, 19 nt, Artificial Sequence
  Description of Artificial Sequence: Synthetic oligonucleotide
  Sense strand starting at position 3800 of SEQ ID NO: 1888121
agcccuauauuuguccauu

SEQ ID NO: 2512335 - RNA, 19 nt, Artificial Sequence
  Description of Artificial Sequence: Synthetic oligonucleotide
  Antisense strand to SEQ ID NO: 2512334
aauggacaaauauagggcu

SEQ ID NO: 2512336 - RNA, 19 nt, Artificial Sequence
  Description of Artificial Sequence: Synthetic oligonucleotide
  Sense strand starting at position 3801 of SEQ ID NO: 1888121
gcccuauauuuguccauua

SEQ ID NO: 2512337 - RNA, 19 nt, Artificial Sequence
  Description of Artificial Sequence: Synthetic oligonucleotide
  Antisense strand to SEQ ID NO: 2512336
uaauggacaaauauagggc

SEQ ID NO: 2512338 - RNA, 19 nt, Artificial Sequence
  Description of Artificial Sequence: Synthetic oligonucleotide
  Sense strand starting at position 3825 of SEQ ID NO: 1888121
uaaugugcugcauaacaga

SEQ ID NO: 2512339 - RNA, 19 nt, Artificial Sequence
  Description of Artificial Sequence: Synthetic oligonucleotide
  Antisense strand to SEQ ID NO: 2512338
ucuguuaugcagcacauua

SEQ ID NO: 2512340 - RNA, 19 nt, Artificial Sequence
  Description of Artificial Sequence: Synthetic oligonucleotide
  Sense strand starting at position 3860 of SEQ ID NO: 1888121
uggugaucugaguggcuca

SEQ ID NO: 2512341 - RNA, 19 nt, Artificial Sequence
  Description of Artificial Sequence: Synthetic oligonucleotide
  Antisense strand to SEQ ID NO: 2512340
ugagccacucagaucacca

SEQ ID NO: 2512342 - RNA, 19 nt, Artificial Sequence
  Description of Artificial Sequence: Synthetic oligonucleotide
  Sense strand starting at position 3865 of SEQ ID NO: 1888121
aucugaguggcucacaaua

SEQ ID NO: 2512343 - RNA, 19 nt, Artificial Sequence
  Description of Artificial Sequence: Synthetic oligonucleotide
  Antisense strand to SEQ ID NO: 2512342
uauugugagccacucagau

SEQ ID NO: 2512344 - RNA, 19 nt, Artificial Sequence
  Description of Artificial Sequence: Synthetic oligonucleotide
  Sense strand starting at position 3870 of SEQ ID NO: 1888121
aguggcucacaauaguaaa

SEQ ID NO: 2512345 - RNA, 19 nt, Artificial Sequence
  Description of Artificial Sequence: Synthetic oligonucleotide
  Antisense strand to SEQ ID NO: 2512344
uuuacuauugugagccacu

SEQ ID NO: 2512346 - RNA, 19 nt, Artificial Sequence
  Description of Artificial Sequence: Synthetic oligonucleotide
  Sense strand starting at position 45 of SEQ ID NO: 1888122
ugaucagacugucccagaa

SEQ ID NO: 2512347 - RNA, 19 nt, Artificial Sequence
  Description of Artificial Sequence: Synthetic oligonucleotide
  Antisense strand to SEQ ID NO: 2512346
uucugggacagucugauca

SEQ ID NO: 2512348 - RNA, 19 nt, Artificial Sequence
  Description of Artificial Sequence: Synthetic oligonucleotide
  Sense strand starting at position 164 of SEQ ID NO: 1888122
ggguucucccaagaaaguc

SEQ ID NO: 2512349 - RNA, 19 nt, Artificial Sequence
  Description of Artificial Sequence: Synthetic oligonucleotide
  Antisense strand to SEQ ID NO: 2512348
gacuuucuugggagaaccc

SEQ ID NO: 2512350 - RNA, 19 nt, Artificial Sequence
  Description of Artificial Sequence: Synthetic oligonucleotide
  Sense strand starting at position 976 of SEQ ID NO: 1888122
ucauguuccaggcaaugga

SEQ ID NO: 2512351 - RNA, 19 nt, Artificial Sequence
  Description of Artificial Sequence: Synthetic oligonucleotide
  Antisense strand to SEQ ID NO: 2512350
uccauugccuggaacauga

SEQ ID NO: 2512352 - RNA, 19 nt, Artificial Sequence
  Description of Artificial Sequence: Synthetic oligonucleotide
  Sense strand starting at position 1002 of SEQ ID NO: 1888122
acacuaagccucuggacuu

SEQ ID NO: 2512353 - RNA, 19 nt, Artificial Sequence
  Description of Artificial Sequence: Synthetic oligonucleotide
  Antisense strand to SEQ ID NO: 2512352
aaguccagaggcuuagugu

SEQ ID NO: 2512354 - RNA, 19 nt, Artificial Sequence
  Description of Artificial Sequence: Synthetic oligonucleotide
  Sense strand starting at position 1544 of SEQ ID NO: 1888122
gcaaucuuggcuuaugaga

SEQ ID NO: 2512355 - RNA, 19 nt, Artificial Sequence
  Description of Artificial Sequence: Synthetic oligonucleotide
  Antisense strand to SEQ ID NO: 2512354
ucucauaagccaagauugc

SEQ ID NO: 2512356 - RNA, 19 nt, Artificial Sequence
  Description of Artificial Sequence: Synthetic oligonucleotide
  Sense strand starting at position 1561 of SEQ ID NO: 1888122
gagcccaaucugugauaga

SEQ ID NO: 2512357 - RNA, 19 nt, Artificial Sequence
  Description of Artificial Sequence: Synthetic oligonucleotide
  Antisense strand to SEQ ID NO: 2512356
ucuaucacagauugggcuc

SEQ ID NO: 2512358 - RNA, 19 nt, Artificial Sequence
  Description of Artificial Sequence: Synthetic oligonucleotide
  Sense strand starting at position 1609 of SEQ ID NO: 1888122
gcaggaugaaguggugaaa

SEQ ID NO: 2512359 - RNA, 19 nt, Artificial Sequence
  Description of Artificial Sequence: Synthetic oligonucleotide
  Antisense strand to SEQ ID NO: 2512358
uuucaccacuucauccugc

SEQ ID NO: 2512360 - RNA, 19 nt, Artificial Sequence
  Description of Artificial Sequence: Synthetic oligonucleotide
  Sense strand starting at position 1621 of SEQ ID NO: 1888122
ggugaaaguuuacugagug

SEQ ID NO: 2512361 - RNA, 19 nt, Artificial Sequence
  Description of Artificial Sequence: Synthetic oligonucleotide
  Antisense strand to SEQ ID NO: 2512360
cacucaguaaacuuucacc

SEQ ID NO: 2512362 - RNA, 19 nt, Artificial Sequence
  Description of Artificial Sequence: Synthetic oligonucleotide
  Sense strand starting at position 1645 of SEQ ID NO: 1888122
uggcuccuugagugaggaa

SEQ ID NO: 2512363 - RNA, 19 nt, Artificial Sequence
  Description of Artificial Sequence: Synthetic oligonucleotide
  Antisense strand to SEQ ID NO: 2512362
uuccucacucaaggagcca

SEQ ID NO: 2512364 - RNA, 19 nt, Artificial Sequence
  Description of Artificial Sequence: Synthetic oligonucleotide
  Sense strand starting at position 1646 of SEQ ID NO: 1888122
ggcuccuugagugaggaaa

SEQ ID NO: 2512365 - RNA, 19 nt, Artificial Sequence
  Description of Artificial Sequence: Synthetic oligonucleotide
  Antisense strand to SEQ ID NO: 2512364
uuuccucacucaaggagcc

SEQ ID NO: 2512366 - RNA, 19 nt, Artificial Sequence
  Description of Artificial Sequence: Synthetic oligonucleotide
  Sense strand starting at position 1721 of SEQ ID NO: 1888122
aagcaacuguugucaugaa

SEQ ID NO: 2512367 - RNA, 19 nt, Artificial Sequence
  Description of Artificial Sequence: Synthetic oligonucleotide
  Antisense strand to SEQ ID NO: 2512366
uucaugacaacaguugcuu

SEQ ID NO: 2512368 - RNA, 19 nt, Artificial Sequence
  Description of Artificial Sequence: Synthetic oligonucleotide
  Sense strand starting at position 2037 of SEQ ID NO: 1888122
cucagaguucuagaaucuu

SEQ ID NO: 2512369 - RNA, 19 nt, Artificial Sequence
  Description of Artificial Sequence: Synthetic oligonucleotide
  Antisense strand to SEQ ID NO: 2512368
aagauucuagaacucugag

SEQ ID NO: 2512370 - RNA, 19 nt, Artificial Sequence
  Description of Artificial Sequence: Synthetic oligonucleotide
  Sense strand starting at position 2102 of SEQ ID NO: 1888122
cgaacaacucuagagucuu

SEQ ID NO: 2512371 - RNA, 19 nt, Artificial Sequence
  Description of Artificial Sequence: Synthetic oligonucleotide
  Antisense strand to SEQ ID NO: 2512370
aagacucuagaguuguucg

SEQ ID NO: 2512372 - RNA, 19 nt, Artificial Sequence
  Description of Artificial Sequence: Synthetic oligonucleotide
  Sense strand starting at position 2128 of SEQ ID NO: 1888122
gggagucucuuguuuaaag

SEQ ID NO: 2512373 - RNA, 19 nt, Artificial Sequence
  Description of Artificial Sequence: Synthetic oligonucleotide
  Antisense strand to SEQ ID NO: 2512372
cuuuaaacaagagacuccc

SEQ ID NO: 2512374 - RNA, 19 nt, Artificial Sequence
  Description of Artificial Sequence: Synthetic oligonucleotide
  Sense strand starting at position 2130 of SEQ ID NO: 1888122
gagucucuuguuuaaagga

SEQ ID NO: 2512375 - RNA, 19 nt, Artificial Sequence
  Description of Artificial Sequence: Synthetic oligonucleotide
  Antisense strand to SEQ ID NO: 2512374
uccuuuaaacaagagacuc

SEQ ID NO: 2512376 - RNA, 19 nt, Artificial Sequence
  Description of Artificial Sequence: Synthetic oligonucleotide
  Sense strand starting at position 2345 of SEQ ID NO: 1888122
gagguuuccugggcagaag

SEQ ID NO: 2512377 - RNA, 19 nt, Artificial Sequence
  Description of Artificial Sequence: Synthetic oligonucleotide
  Antisense strand to SEQ ID NO: 2512376
cuucugcccaggaaaccuc

SEQ ID NO: 2512378 - RNA, 19 nt, Artificial Sequence
  Description of Artificial Sequence: Synthetic oligonucleotide
  Sense strand starting at position 2346 of SEQ ID NO: 1888122
agguuuccugggcagaaga

SEQ ID NO: 2512379 - RNA, 19 nt, Artificial Sequence
  Description of Artificial Sequence: Synthetic oligonucleotide
  Antisense strand to SEQ ID NO: 2512378
ucuucugcccaggaaaccu

SEQ ID NO: 2512380 - RNA, 19 nt, Artificial Sequence
  Description of Artificial Sequence: Synthetic oligonucleotide
  Sense strand starting at position 2379 of SEQ ID NO: 1888122
aggugucacagauggaaag

SEQ ID NO: 2512381 - RNA, 19 nt, Artificial Sequence
  Description of Artificial Sequence: Synthetic oligonucleotide
  Antisense strand to SEQ ID NO: 2512380
cuuuccaucugugacaccu

SEQ ID NO: 2512382 - RNA, 19 nt, Artificial Sequence
  Description of Artificial Sequence: Synthetic oligonucleotide
  Sense strand starting at position 2380 of SEQ ID NO: 1888122
ggugucacagauggaaaga

SEQ ID NO: 2512383 - RNA, 19 nt, Artificial Sequence
  Description of Artificial Sequence: Synthetic oligonucleotide
  Antisense strand to SEQ ID NO: 2512382
ucuuuccaucugugacacc

SEQ ID NO: 2512384 - RNA, 19 nt, Artificial Sequence
  Description of Artificial Sequence: Synthetic oligonucleotide
  Sense strand starting at position 2406 of SEQ ID NO: 1888122
guguguaggaaugggauaa

SEQ ID NO: 2512385 - RNA, 19 nt, Artificial Sequence
  Description of Artificial Sequence: Synthetic oligonucleotide
  Antisense strand to SEQ ID NO: 2512384
uuaucccauuccuacacac

SEQ ID NO: 2512386 - RNA, 19 nt, Artificial Sequence
  Description of Artificial Sequence: Synthetic oligonucleotide
  Sense strand starting at position 2431 of SEQ ID NO: 1888122
guaguuauggugggaggga

SEQ ID NO: 2512387 - RNA, 19 nt, Artificial Sequence
  Description of Artificial Sequence: Synthetic oligonucleotide
  Antisense strand to SEQ ID NO: 2512386
ucccucccaccauaacuac

SEQ ID NO: 2512388 - RNA, 19 nt, Artificial Sequence
  Description of Artificial Sequence: Synthetic oligonucleotide
  Sense strand starting at position 2439 of SEQ ID NO: 1888122
ggugggagggacuguauua

SEQ ID NO: 2512389 - RNA, 19 nt, Artificial Sequence
  Description of Artificial Sequence: Synthetic oligonucleotide
  Antisense strand to SEQ ID NO: 2512388
uaauacagucccucccacc

SEQ ID NO: 2512390 - RNA, 19 nt, Artificial Sequence
  Description of Artificial Sequence: Synthetic oligonucleotide
  Sense strand starting at position 2452 of SEQ ID NO: 1888122
guauuaaaguacguaagag

SEQ ID NO: 2512391 - RNA, 19 nt, Artificial Sequence
  Description of Artificial Sequence: Synthetic oligonucleotide
  Antisense strand to SEQ ID NO: 2512390
cucuuacguacuuuaauac

SEQ ID NO: 2512392 - RNA, 19 nt, Artificial Sequence
  Description of Artificial Sequence: Synthetic oligonucleotide
  Sense strand starting at position 2585 of SEQ ID NO: 1888122
cugcguuacccacauuuau

SEQ ID NO: 2512393 - RNA, 19 nt, Artificial Sequence
  Description of Artificial Sequence: Synthetic oligonucleotide
  Antisense strand to SEQ ID NO: 2512392
auaaauguggguaacgcag

SEQ ID NO: 2512394 - RNA, 19 nt, Artificial Sequence
  Description of Artificial Sequence: Synthetic oligonucleotide
  Sense strand starting at position 2594 of SEQ ID NO: 1888122
ccacauuuauacugaggag

SEQ ID NO: 2512395 - RNA, 19 nt, Artificial Sequence
  Description of Artificial Sequence: Synthetic oligonucleotide
  Antisense strand to SEQ ID NO: 2512394
cuccucaguauaaaugugg

SEQ ID NO: 2512396 - RNA, 19 nt, Artificial Sequence
  Description of Artificial Sequence: Synthetic oligonucleotide
  Sense strand starting at position 2740 of SEQ ID NO: 1888122
auggcugacugauugcaga

SEQ ID NO: 2512397 - RNA, 19 nt, Artificial Sequence
  Description of Artificial Sequence: Synthetic oligonucleotide
  Antisense strand to SEQ ID NO: 2512396
ucugcaaucagucagccau

SEQ ID NO: 2512398 - RNA, 19 nt, Artificial Sequence
  Description of Artificial Sequence: Synthetic oligonucleotide
  Sense strand starting at position 2842 of SEQ ID NO: 1888122
aaaggaauucuaugcaguu

SEQ ID NO: 2512399 - RNA, 19 nt, Artificial Sequence
  Description of Artificial Sequence: Synthetic oligonucleotide
  Antisense strand to SEQ ID NO: 2512398
aacugcauagaauuccuuu

SEQ ID NO: 2512400 - RNA, 19 nt, Artificial Sequence
  Description of Artificial Sequence: Synthetic oligonucleotide
  Sense strand starting at position 2843 of SEQ ID NO: 1888122
aaggaauucuaugcaguuu

SEQ ID NO: 2512401 - RNA, 19 nt, Artificial Sequence
  Description of Artificial Sequence: Synthetic oligonucleotide
  Antisense strand to SEQ ID NO: 2512400
aaacugcauagaauuccuu

SEQ ID NO: 2512402 - RNA, 19 nt, Artificial Sequence
  Description of Artificial Sequence: Synthetic oligonucleotide
  Sense strand starting at position 2864 of SEQ ID NO: 1888122
gugacuguuaaaugaauga

SEQ ID NO: 2512403 - RNA, 19 nt, Artificial Sequence
  Description of Artificial Sequence: Synthetic oligonucleotide
  Antisense strand to SEQ ID NO: 2512402
ucauucauuuaacagucac

SEQ ID NO: 2512404 - RNA, 19 nt, Artificial Sequence
  Description of Artificial Sequence: Synthetic oligonucleotide
  Sense strand starting at position 2868 of SEQ ID NO: 1888122
cuguuaaaugaaugaauug

SEQ ID NO: 2512405 - RNA, 19 nt, Artificial Sequence
  Description of Artificial Sequence: Synthetic oligonucleotide
  Antisense strand to SEQ ID NO: 2512404
caauucauucauuuaacag

SEQ ID NO: 2512406 - RNA, 19 nt, Artificial Sequence
  Description of Artificial Sequence: Synthetic oligonucleotide
  Sense strand starting at position 2884 of SEQ ID NO: 1888122
uugcuaagaucucuggacu

SEQ ID NO: 2512407 - RNA, 19 nt, Artificial Sequence
  Description of Artificial Sequence: Synthetic oligonucleotide
  Antisense strand to SEQ ID NO: 2512406
aguccagagaucuuagcaa

SEQ ID NO: 2512408 - RNA, 19 nt, Artificial Sequence
  Description of Artificial Sequence: Synthetic oligonucleotide
  Sense strand starting at position 2885 of SEQ ID NO: 1888122
ugcuaagaucucuggacuu

SEQ ID NO: 2512409 - RNA, 19 nt, Artificial Sequence
  Description of Artificial Sequence: Synthetic oligonucleotide
  Antisense strand to SEQ ID NO: 2512408
aaguccagagaucuuagca

SEQ ID NO: 2512410 - RNA, 19 nt, Artificial Sequence
  Description of Artificial Sequence: Synthetic oligonucleotide
  Sense strand starting at position 2897 of SEQ ID NO: 1888122
uggacuuucuaguuuauac

SEQ ID NO: 2512411 - RNA, 19 nt, Artificial Sequence
  Description of Artificial Sequence: Synthetic oligonucleotide
  Antisense strand to SEQ ID NO: 2512410
guauaaacuagaaagucca

SEQ ID NO: 2512412 - RNA, 19 nt, Artificial Sequence
  Description of Artificial Sequence: Synthetic oligonucleotide
  Sense strand starting at position 3082 of SEQ ID NO: 1888122
gagagaaauuuccaagagu

SEQ ID NO: 2512413 - RNA, 19 nt, Artificial Sequence
  Description of Artificial Sequence: Synthetic oligonucleotide
  Antisense strand to SEQ ID NO: 2512412
acucuuggaaauuucucuc

SEQ ID NO: 2512414 - RNA, 19 nt, Artificial Sequence
  Description of Artificial Sequence: Synthetic oligonucleotide
  Sense strand starting at position 3334 of SEQ ID NO: 1888122
auuguauagucccugaaac

SEQ ID NO: 2512415 - RNA, 19 nt, Artificial Sequence
  Description of Artificial Sequence: Synthetic oligonucleotide
  Antisense strand to SEQ ID NO: 2512414
guuucagggacuauacaau

SEQ ID NO: 2512416 - RNA, 19 nt, Artificial Sequence
  Description of Artificial Sequence: Synthetic oligonucleotide
  Sense strand starting at position 3335 of SEQ ID NO: 1888122
uuguauagucccugaaacc

SEQ ID NO: 2512417 - RNA, 19 nt, Artificial Sequence
  Description of Artificial Sequence: Synthetic oligonucleotide
  Antisense strand to SEQ ID NO: 2512416
gguuucagggacuauacaa

SEQ ID NO: 2512418 - RNA, 19 nt, Artificial Sequence
  Description of Artificial Sequence: Synthetic oligonucleotide
  Sense strand starting at position 3336 of SEQ ID NO: 1888122
uguauagucccugaaaccu

SEQ ID NO: 2512419 - RNA, 19 nt, Artificial Sequence
  Description of Artificial Sequence: Synthetic oligonucleotide
  Antisense strand to SEQ ID NO: 2512418
agguuucagggacuauaca

SEQ ID NO: 2512420 - RNA, 19 nt, Artificial Sequence
  Description of Artificial Sequence: Synthetic oligonucleotide
  Sense strand starting at position 3391 of SEQ ID NO: 1888122
ggcagaagauguguauauu

SEQ ID NO: 2512421 - RNA, 19 nt, Artificial Sequence
  Description of Artificial Sequence: Synthetic oligonucleotide
  Antisense strand to SEQ ID NO: 2512420
aauauacacaucuucugcc

SEQ ID NO: 2512422 - RNA, 19 nt, Artificial Sequence
  Description of Artificial Sequence: Synthetic oligonucleotide
  Sense strand starting at position 3392 of SEQ ID NO: 1888122
gcagaagauguguauauuc

SEQ ID NO: 2512423 - RNA, 19 nt, Artificial Sequence
  Description of Artificial Sequence: Synthetic oligonucleotide
  Antisense strand to SEQ ID NO: 2512422
gaauauacacaucuucugc

SEQ ID NO: 2512424 - RNA, 19 nt, Artificial Sequence
  Description of Artificial Sequence: Synthetic oligonucleotide
  Sense strand starting at position 3394 of SEQ ID NO: 1888122
agaagauguguauauuccu

SEQ ID NO: 2512425 - RNA, 19 nt, Artificial Sequence
  Description of Artificial Sequence: Synthetic oligonucleotide
  Antisense strand to SEQ ID NO: 2512424
aggaauauacacaucuucu

SEQ ID NO: 2512426 - RNA, 19 nt, Artificial Sequence
  Description of Artificial Sequence: Synthetic oligonucleotide
  Sense strand starting at position 411 of SEQ ID NO: 1888123
aguugccauccagaaacuu

SEQ ID NO: 2512427 - RNA, 19 nt, Artificial Sequence
  Description of Artificial Sequence: Synthetic oligonucleotide
  Antisense strand to SEQ ID NO: 2512426
aaguuucuggauggcaacu

SEQ ID NO: 2512428 - RNA, 19 nt, Artificial Sequence
  Description of Artificial Sequence: Synthetic oligonucleotide
  Sense strand starting at position 449 of SEQ ID NO: 1888123
uuaauagccuuucuagaag

SEQ ID NO: 2512429 - RNA, 19 nt, Artificial Sequence
  Description of Artificial Sequence: Synthetic oligonucleotide
  Antisense strand to SEQ ID NO: 2512428
cuucuagaaaggcuauuaa

SEQ ID NO: 2512430 - RNA, 19 nt, Artificial Sequence
  Description of Artificial Sequence: Synthetic oligonucleotide
  Sense strand starting at position 516 of SEQ ID NO: 1888123
aguguuaagguggagaacu

SEQ ID NO: 2512431 - RNA, 19 nt, Artificial Sequence
  Description of Artificial Sequence: Synthetic oligonucleotide
  Antisense strand to SEQ ID NO: 2512430
aguucuccaccuuaacacu

SEQ ID NO: 2512432 - RNA, 19 nt, Artificial Sequence
  Description of Artificial Sequence: Synthetic oligonucleotide
  Sense strand starting at position 518 of SEQ ID NO: 1888123
uguuaagguggagaacuuu

SEQ ID NO: 2512433 - RNA, 19 nt, Artificial Sequence
  Description of Artificial Sequence: Synthetic oligonucleotide
  Antisense strand to SEQ ID NO: 2512432
aaaguucuccaccuuaaca

SEQ ID NO: 2512434 - RNA, 19 nt, Artificial Sequence
  Description of Artificial Sequence: Synthetic oligonucleotide
  Sense strand starting at position 600 of SEQ ID NO: 1888123
ggaggaaggcgugagaagu

SEQ ID NO: 2512435 - RNA, 19 nt, Artificial Sequence
  Description of Artificial Sequence: Synthetic oligonucleotide
  Antisense strand to SEQ ID NO: 2512434
acuucucacgccuuccucc

SEQ ID NO: 2512436 - RNA, 19 nt, Artificial Sequence
  Description of Artificial Sequence: Synthetic oligonucleotide
  Sense strand starting at position 629 of SEQ ID NO: 1888123
ggcgaaugugugagaguug

SEQ ID NO: 2512437 - RNA, 19 nt, Artificial Sequence
  Description of Artificial Sequence: Synthetic oligonucleotide
  Antisense strand to SEQ ID NO: 2512436
caacucucacacauucgcc

SEQ ID NO: 2512438 - RNA, 19 nt, Artificial Sequence
  Description of Artificial Sequence: Synthetic oligonucleotide
  Sense strand starting at position 1118 of SEQ ID NO: 1888123
ggaaguaagaccuggugaa

SEQ ID NO: 2512439 - RNA, 19 nt, Artificial Sequence
  Description of Artificial Sequence: Synthetic oligonucleotide
  Antisense strand to SEQ ID NO: 2512438
uucaccaggucuuacuucc

SEQ ID NO: 2512440 - RNA, 19 nt, Artificial Sequence
  Description of Artificial Sequence: Synthetic oligonucleotide
  Sense strand starting at position 1243 of SEQ ID NO: 1888123
agcaaauagggcuaaaugu

SEQ ID NO: 2512441 - RNA, 19 nt, Artificial Sequence
  Description of Artificial Sequence: Synthetic oligonucleotide
  Antisense strand to SEQ ID NO: 2512440
acauuuagcccuauuugcu

SEQ ID NO: 2512442 - RNA, 19 nt, Artificial Sequence
  Description of Artificial Sequence: Synthetic oligonucleotide
  Sense strand starting at position 1430 of SEQ ID NO: 1888123
cuggcauacaguggauauu

SEQ ID NO: 2512443 - RNA, 19 nt, Artificial Sequence
  Description of Artificial Sequence: Synthetic oligonucleotide
  Antisense strand to SEQ ID NO: 2512442
aauauccacuguaugccag

SEQ ID NO: 2512444 - RNA, 19 nt, Artificial Sequence
  Description of Artificial Sequence: Synthetic oligonucleotide
  Sense strand starting at position 1553 of SEQ ID NO: 1888123
gaucaaacauucguaagua

SEQ ID NO: 2512445 - RNA, 19 nt, Artificial Sequence
  Description of Artificial Sequence: Synthetic oligonucleotide
  Antisense strand to SEQ ID NO: 2512444
uacuuacgaauguuugauc

SEQ ID NO: 2512446 - RNA, 19 nt, Artificial Sequence
  Description of Artificial Sequence: Synthetic oligonucleotide
  Sense strand starting at position 1632 of SEQ ID NO: 1888123
acaggacagcuaugaagua

SEQ ID NO: 2512447 - RNA, 19 nt, Artificial Sequence
  Description of Artificial Sequence: Synthetic oligonucleotide
  Antisense strand to SEQ ID NO: 2512446
uacuucauagcuguccugu

SEQ ID NO: 2512448 - RNA, 19 nt, Artificial Sequence
  Description of Artificial Sequence: Synthetic oligonucleotide
  Sense strand starting at position 1685 of SEQ ID NO: 1888123
gguauuaaauagucaagua

SEQ ID NO: 2512449 - RNA, 19 nt, Artificial Sequence
  Description of Artificial Sequence: Synthetic oligonucleotide
  Antisense strand to SEQ ID NO: 2512448
uacuugacuauuuaauacc

SEQ ID NO: 2512450 - RNA, 19 nt, Artificial Sequence
  Description of Artificial Sequence: Synthetic oligonucleotide
  Sense strand starting at position 1803 of SEQ ID NO: 1888123
agaaauccaugaggaauuu

SEQ ID NO: 2512451 - RNA, 19 nt, Artificial Sequence
  Description of Artificial Sequence: Synthetic oligonucleotide
  Antisense strand to SEQ ID NO: 2512450
aaauuccucauggauuucu

SEQ ID NO: 2512452 - RNA, 19 nt, Artificial Sequence
  Description of Artificial Sequence: Synthetic oligonucleotide
  Sense strand starting at position 1859 of SEQ ID NO: 1888123
cccugaaagcuggaugcuu

SEQ ID NO: 2512453 - RNA, 19 nt, Artificial Sequence
  Description of Artificial Sequence: Synthetic oligonucleotide
  Antisense strand to SEQ ID NO: 2512452
aagcauccagcuuucaggg

SEQ ID NO: 2512454 - RNA, 19 nt, Artificial Sequence
  Description of Artificial Sequence: Synthetic oligonucleotide
  Sense strand starting at position 1870 of SEQ ID NO: 1888123
ggaugcuuccaggguuaau

SEQ ID NO: 2512455 - RNA, 19 nt, Artificial Sequence
  Description of Artificial Sequence: Synthetic oligonucleotide
  Antisense strand to SEQ ID NO: 2512454
auuaacccuggaagcaucc

SEQ ID NO: 2512456 - RNA, 19 nt, Artificial Sequence
  Description of Artificial Sequence: Synthetic oligonucleotide
  Sense strand starting at position 1973 of SEQ ID NO: 1888123
gggugacuucgcaggugau

SEQ ID NO: 2512457 - RNA, 19 nt, Artificial Sequence
  Description of Artificial Sequence: Synthetic oligonucleotide
  Antisense strand to SEQ ID NO: 2512456
aucaccugcgaagucaccc

SEQ ID NO: 2512458 - RNA, 19 nt, Artificial Sequence
  Description of Artificial Sequence: Synthetic oligonucleotide
  Sense strand starting at position 2120 of SEQ ID NO: 1888123
cauugaagucccgggagaa

SEQ ID NO: 2512459 - RNA, 19 nt, Artificial Sequence
  Description of Artificial Sequence: Synthetic oligonucleotide
  Antisense strand to SEQ ID NO: 2512458
uucucccgggacuucaaug

SEQ ID NO: 2512460 - RNA, 19 nt, Artificial Sequence
  Description of Artificial Sequence: Synthetic oligonucleotide
  Sense strand starting at position 2121 of SEQ ID NO: 1888123
auugaagucccgggagaag

SEQ ID NO: 2512461 - RNA, 19 nt, Artificial Sequence
  Description of Artificial Sequence: Synthetic oligonucleotide
  Antisense strand to SEQ ID NO: 2512460
cuucucccgggacuucaau

SEQ ID NO: 2512462 - RNA, 19 nt, Artificial Sequence
  Description of Artificial Sequence: Synthetic oligonucleotide
  Sense strand starting at position 2132 of SEQ ID NO: 1888123
gggagaaguccugggaguu

SEQ ID NO: 2512463 - RNA, 19 nt, Artificial Sequence
  Description of Artificial Sequence: Synthetic oligonucleotide
  Antisense strand to SEQ ID NO: 2512462
aacucccaggacuucuccc

SEQ ID NO: 2512464 - RNA, 19 nt, Artificial Sequence
  Description of Artificial Sequence: Synthetic oligonucleotide
  Sense strand starting at position 2133 of SEQ ID NO: 1888123
ggagaaguccugggaguug

SEQ ID NO: 2512465 - RNA, 19 nt, Artificial Sequence
  Description of Artificial Sequence: Synthetic oligonucleotide
  Antisense strand to SEQ ID NO: 2512464
caacucccaggacuucucc

SEQ ID NO: 2512466 - RNA, 19 nt, Artificial Sequence
  Description of Artificial Sequence: Synthetic oligonucleotide
  Sense strand starting at position 2249 of SEQ ID NO: 1888123
gagcaauugugauuguaca

SEQ ID NO: 2512467 - RNA, 19 nt, Artificial Sequence
  Description of Artificial Sequence: Synthetic oligonucleotide
  Antisense strand to SEQ ID NO: 2512466
uguacaaucacaauugcuc

SEQ ID NO: 2512468 - RNA, 19 nt, Artificial Sequence
  Description of Artificial Sequence: Synthetic oligonucleotide
  Sense strand starting at position 2257 of SEQ ID NO: 1888123
gugauuguacacugagagu

SEQ ID NO: 2512469 - RNA, 19 nt, Artificial Sequence
  Description of Artificial Sequence: Synthetic oligonucleotide
  Antisense strand to SEQ ID NO: 2512468
acucucaguguacaaucac

SEQ ID NO: 2512470 - RNA, 19 nt, Artificial Sequence
  Description of Artificial Sequence: Synthetic oligonucleotide
  Sense strand starting at position 2362 of SEQ ID NO: 1888123
gcagcauaucggcauuuga

SEQ ID NO: 2512471 - RNA, 19 nt, Artificial Sequence
  Description of Artificial Sequence: Synthetic oligonucleotide
  Antisense strand to SEQ ID NO: 2512470
ucaaaugccgauaugcugc

SEQ ID NO: 2512472 - RNA, 19 nt, Artificial Sequence
  Description of Artificial Sequence: Synthetic oligonucleotide
  Sense strand starting at position 2372 of SEQ ID NO: 1888123
ggcauuugaucauaagaaa

SEQ ID NO: 2512473 - RNA, 19 nt, Artificial Sequence
  Description of Artificial Sequence: Synthetic oligonucleotide
  Antisense strand to SEQ ID NO: 2512472
uuucuuaugaucaaaugcc

SEQ ID NO: 2512474 - RNA, 19 nt, Artificial Sequence
  Description of Artificial Sequence: Synthetic oligonucleotide
  Sense strand starting at position 2399 of SEQ ID NO: 1888123
augcaaaugugauuaugac

SEQ ID NO: 2512475 - RNA, 19 nt, Artificial Sequence
  Description of Artificial Sequence: Synthetic oligonucleotide
  Antisense strand to SEQ ID NO: 2512474
gucauaaucacauuugcau

SEQ ID NO: 2512476 - RNA, 19 nt, Artificial Sequence
  Description of Artificial Sequence: Synthetic oligonucleotide
  Sense strand starting at position 2400 of SEQ ID NO: 1888123
ugcaaaugugauuaugacu

SEQ ID NO: 2512477 - RNA, 19 nt, Artificial Sequence
  Description of Artificial Sequence: Synthetic oligonucleotide
  Antisense strand to SEQ ID NO: 2512476
agucauaaucacauuugca

SEQ ID NO: 2512478 - RNA, 19 nt, Artificial Sequence
  Description of Artificial Sequence: Synthetic oligonucleotide
  Sense strand starting at position 2409 of SEQ ID NO: 1888123
gauuaugacugaucccagu

SEQ ID NO: 2512479 - RNA, 19 nt, Artificial Sequence
  Description of Artificial Sequence: Synthetic oligonucleotide
  Antisense strand to SEQ ID NO: 2512478
acugggaucagucauaauc

SEQ ID NO: 2512480 - RNA, 19 nt, Artificial Sequence
  Description of Artificial Sequence: Synthetic oligonucleotide
  Sense strand starting at position 2516 of SEQ ID NO: 1888123
ggugacaucauugagcuga

SEQ ID NO: 2512481 - RNA, 19 nt, Artificial Sequence
  Description of Artificial Sequence: Synthetic oligonucleotide
  Antisense strand to SEQ ID NO: 2512480
ucagcucaaugaugucacc

SEQ ID NO: 2512482 - RNA, 19 nt, Artificial Sequence
  Description of Artificial Sequence: Synthetic oligonucleotide
  Sense strand starting at position 2728 of SEQ ID NO: 1888123
ucuugauucuauucugaga

SEQ ID NO: 2512483 - RNA, 19 nt, Artificial Sequence
  Description of Artificial Sequence: Synthetic oligonucleotide
  Antisense strand to SEQ ID NO: 2512482
ucucagaauagaaucaaga

SEQ ID NO: 2512484 - RNA, 19 nt, Artificial Sequence
  Description of Artificial Sequence: Synthetic oligonucleotide
  Sense strand starting at position 2820 of SEQ ID NO: 1888123
gguuguuguguggagaaug

SEQ ID NO: 2512485 - RNA, 19 nt, Artificial Sequence
  Description of Artificial Sequence: Synthetic oligonucleotide
  Antisense strand to SEQ ID NO: 2512484
cauucuccacacaacaacc

SEQ ID NO: 2512486 - RNA, 19 nt, Artificial Sequence
  Description of Artificial Sequence: Synthetic oligonucleotide
  Sense strand starting at position 2947 of SEQ ID NO: 1888123
cgagacacauuuggaagau

SEQ ID NO: 2512487 - RNA, 19 nt, Artificial Sequence
  Description of Artificial Sequence: Synthetic oligonucleotide
  Antisense strand to SEQ ID NO: 2512486
aucuuccaaaugugucucg

SEQ ID NO: 2512488 - RNA, 19 nt, Artificial Sequence
  Description of Artificial Sequence: Synthetic oligonucleotide
  Sense strand starting at position 3163 of SEQ ID NO: 1888123
uuuauaaggacuugagugu

SEQ ID NO: 2512489 - RNA, 19 nt, Artificial Sequence
  Description of Artificial Sequence: Synthetic oligonucleotide
  Antisense strand to SEQ ID NO: 2512488
acacucaaguccuuauaaa

SEQ ID NO: 2512490 - RNA, 19 nt, Artificial Sequence
  Description of Artificial Sequence: Synthetic oligonucleotide
  Sense strand starting at position 3167 of SEQ ID NO: 1888123
uaaggacuugaguguaaag

SEQ ID NO: 2512491 - RNA, 19 nt, Artificial Sequence
  Description of Artificial Sequence: Synthetic oligonucleotide
  Antisense strand to SEQ ID NO: 2512490
cuuuacacucaaguccuua

SEQ ID NO: 2512492 - RNA, 19 nt, Artificial Sequence
  Description of Artificial Sequence: Synthetic oligonucleotide
  Sense strand starting at position 3178 of SEQ ID NO: 1888123
guguaaagucaagaaucac

SEQ ID NO: 2512493 - RNA, 19 nt, Artificial Sequence
  Description of Artificial Sequence: Synthetic oligonucleotide
  Antisense strand to SEQ ID NO: 2512492
gugauucuugacuuuacac

SEQ ID NO: 2512494 - RNA, 19 nt, Artificial Sequence
  Description of Artificial Sequence: Synthetic oligonucleotide
  Sense strand starting at position 3287 of SEQ ID NO: 1888123
gggagcugucuccaugaga

SEQ ID NO: 2512495 - RNA, 19 nt, Artificial Sequence
  Description of Artificial Sequence: Synthetic oligonucleotide
  Antisense strand to SEQ ID NO: 2512494
ucucauggagacagcuccc

SEQ ID NO: 2512496 - RNA, 19 nt, Artificial Sequence
  Description of Artificial Sequence: Synthetic oligonucleotide
  Sense strand starting at position 3375 of SEQ ID NO: 1888123
ugggaucugucucccagaa

SEQ ID NO: 2512497 - RNA, 19 nt, Artificial Sequence
  Description of Artificial Sequence: Synthetic oligonucleotide
  Antisense strand to SEQ ID NO: 2512496
uucugggagacagauccca

SEQ ID NO: 2512498 - RNA, 19 nt, Artificial Sequence
  Description of Artificial Sequence: Synthetic oligonucleotide
  Sense strand starting at position 3571 of SEQ ID NO: 1888123
agaagcaucuggucagaug

SEQ ID NO: 2512499 - RNA, 19 nt, Artificial Sequence
  Description of Artificial Sequence: Synthetic oligonucleotide
  Antisense strand to SEQ ID NO: 2512498
caucugaccagaugcuucu

SEQ ID NO: 2512500 - RNA, 19 nt, Artificial Sequence
  Description of Artificial Sequence: Synthetic oligonucleotide
  Sense strand starting at position 3656 of SEQ ID NO: 1888123
auaggaacuuguccucuua

SEQ ID NO: 2512501 - RNA, 19 nt, Artificial Sequence
  Description of Artificial Sequence: Synthetic oligonucleotide
  Antisense strand to SEQ ID NO: 2512500
uaagaggacaaguuccuau

SEQ ID NO: 2512502 - RNA, 19 nt, Artificial Sequence
  Description of Artificial Sequence: Synthetic oligonucleotide
  Sense strand starting at position 3878 of SEQ ID NO: 1888123
acagccuaucagugacuaa

SEQ ID NO: 2512503 - RNA, 19 nt, Artificial Sequence
  Description of Artificial Sequence: Synthetic oligonucleotide
  Antisense strand to SEQ ID NO: 2512502
uuagucacugauaggcugu

SEQ ID NO: 2512504 - RNA, 19 nt, Artificial Sequence
  Description of Artificial Sequence: Synthetic oligonucleotide
  Sense strand starting at position 3881 of SEQ ID NO: 1888123
gccuaucagugacuaaaga

SEQ ID NO: 2512505 - RNA, 19 nt, Artificial Sequence
  Description of Artificial Sequence: Synthetic oligonucleotide
  Antisense strand to SEQ ID NO: 2512504
ucuuuagucacugauaggc

SEQ ID NO: 2512506 - RNA, 19 nt, Artificial Sequence
  Description of Artificial Sequence: Synthetic oligonucleotide
  Sense strand starting at position 481 of SEQ ID NO: 1888124
guggauaacuccuuggaau

SEQ ID NO: 2512507 - RNA, 19 nt, Artificial Sequence
  Description of Artificial Sequence: Synthetic oligonucleotide
  Antisense strand to SEQ ID NO: 2512506
auuccaaggaguuauccac

SEQ ID NO: 2512508 - RNA, 19 nt, Artificial Sequence
  Description of Artificial Sequence: Synthetic oligonucleotide
  Sense strand starting at position 600 of SEQ ID NO: 1888124
uuuaaaucccuguauguac

SEQ ID NO: 2512509 - RNA, 19 nt, Artificial Sequence
  Description of Artificial Sequence: Synthetic oligonucleotide
  Antisense strand to SEQ ID NO: 2512508
guacauacagggauuuaaa

SEQ ID NO: 2512510 - RNA, 19 nt, Artificial Sequence
  Description of Artificial Sequence: Synthetic oligonucleotide
  Sense strand starting at position 644 of SEQ ID NO: 1888124
caagauauguuagugugua

SEQ ID NO: 2512511 - RNA, 19 nt, Artificial Sequence
  Description of Artificial Sequence: Synthetic oligonucleotide
  Antisense strand to SEQ ID NO: 2512510
uacacacuaacauaucuug

SEQ ID NO: 2512512 - RNA, 19 nt, Artificial Sequence
  Description of Artificial Sequence: Synthetic oligonucleotide
  Sense strand starting at position 648 of SEQ ID NO: 1888124
auauguuaguguguaggaa

SEQ ID NO: 2512513 - RNA, 19 nt, Artificial Sequence
  Description of Artificial Sequence: Synthetic oligonucleotide
  Antisense strand to SEQ ID NO: 2512512
uuccuacacacuaacauau

SEQ ID NO: 2512514 - RNA, 19 nt, Artificial Sequence
  Description of Artificial Sequence: Synthetic oligonucleotide
  Sense strand starting at position 660 of SEQ ID NO: 1888124
guaggaagcaaguguaagu

SEQ ID NO: 2512515 - RNA, 19 nt, Artificial Sequence
  Description of Artificial Sequence: Synthetic oligonucleotide
  Antisense strand to SEQ ID NO: 2512514
acuuacacuugcuuccuac

SEQ ID NO: 2512516 - RNA, 19 nt, Artificial Sequence
  Description of Artificial Sequence: Synthetic oligonucleotide
  Sense strand starting at position 665 of SEQ ID NO: 1888124
aagcaaguguaaguuugau

SEQ ID NO: 2512517 - RNA, 19 nt, Artificial Sequence
  Description of Artificial Sequence: Synthetic oligonucleotide
  Antisense strand to SEQ ID NO: 2512516
aucaaacuuacacuugcuu

SEQ ID NO: 2512518 - RNA, 19 nt, Artificial Sequence
  Description of Artificial Sequence: Synthetic oligonucleotide
  Sense strand starting at position 696 of SEQ ID NO: 1888124
agcaguauccaaggagagu

SEQ ID NO: 2512519 - RNA, 19 nt, Artificial Sequence
  Description of Artificial Sequence: Synthetic oligonucleotide
  Antisense strand to SEQ ID NO: 2512518
acucuccuuggauacugcu

SEQ ID NO: 2512520 - RNA, 19 nt, Artificial Sequence
  Description of Artificial Sequence: Synthetic oligonucleotide
  Sense strand starting at position 697 of SEQ ID NO: 1888124
gcaguauccaaggagagua

SEQ ID NO: 2512521 - RNA, 19 nt, Artificial Sequence
  Description of Artificial Sequence: Synthetic oligonucleotide
  Antisense strand to SEQ ID NO: 2512520
uacucuccuuggauacugc

SEQ ID NO: 2512522 - RNA, 19 nt, Artificial Sequence
  Description of Artificial Sequence: Synthetic oligonucleotide
  Sense strand starting at position 1210 of SEQ ID NO: 1888124
gacaaaugauggcuaugcu

SEQ ID NO: 2512523 - RNA, 19 nt, Artificial Sequence
  Description of Artificial Sequence: Synthetic oligonucleotide
  Antisense strand to SEQ ID NO: 2512522
agcauagccaucauuuguc

SEQ ID NO: 2512524 - RNA, 19 nt, Artificial Sequence
  Description of Artificial Sequence: Synthetic oligonucleotide
  Sense strand starting at position 1279 of SEQ ID NO: 1888124
uuccucuagugagucagau

SEQ ID NO: 2512525 - RNA, 19 nt, Artificial Sequence
  Description of Artificial Sequence: Synthetic oligonucleotide
  Antisense strand to SEQ ID NO: 2512524
aucugacucacuagaggaa

SEQ ID NO: 2512526 - RNA, 19 nt, Artificial Sequence
  Description of Artificial Sequence: Synthetic oligonucleotide
  Sense strand starting at position 1996 of SEQ ID NO: 1888124
ugugucucucuggaucaga

SEQ ID NO: 2512527 - RNA, 19 nt, Artificial Sequence
  Description of Artificial Sequence: Synthetic oligonucleotide
  Antisense strand to SEQ ID NO: 2512526
ucugauccagagagacaca

SEQ ID NO: 2512528 - RNA, 19 nt, Artificial Sequence
  Description of Artificial Sequence: Synthetic oligonucleotide
  Sense strand starting at position 2013 of SEQ ID NO: 1888124
gagaccacuugagaagaaa

SEQ ID NO: 2512529 - RNA, 19 nt, Artificial Sequence
  Description of Artificial Sequence: Synthetic oligonucleotide
  Antisense strand to SEQ ID NO: 2512528
uuucuucucaaguggucuc

SEQ ID NO: 2512530 - RNA, 19 nt, Artificial Sequence
  Description of Artificial Sequence: Synthetic oligonucleotide
  Sense strand starting at position 2026 of SEQ ID NO: 1888124
aagaaauuccggugacgga

SEQ ID NO: 2512531 - RNA, 19 nt, Artificial Sequence
  Description of Artificial Sequence: Synthetic oligonucleotide
  Antisense strand to SEQ ID NO: 2512530
uccgucaccggaauuucuu

SEQ ID NO: 2512532 - RNA, 19 nt, Artificial Sequence
  Description of Artificial Sequence: Synthetic oligonucleotide
  Sense strand starting at position 2027 of SEQ ID NO: 1888124
agaaauuccggugacggaa

SEQ ID NO: 2512533 - RNA, 19 nt, Artificial Sequence
  Description of Artificial Sequence: Synthetic oligonucleotide
  Antisense strand to SEQ ID NO: 2512532
uuccgucaccggaauuucu

SEQ ID NO: 2512534 - RNA, 19 nt, Artificial Sequence
  Description of Artificial Sequence: Synthetic oligonucleotide
  Sense strand starting at position 2068 of SEQ ID NO: 1888124
uuaggucacaauggucaga

SEQ ID NO: 2512535 - RNA, 19 nt, Artificial Sequence
  Description of Artificial Sequence: Synthetic oligonucleotide
  Antisense strand to SEQ ID NO: 2512534
ucugaccauugugaccuaa

SEQ ID NO: 2512536 - RNA, 19 nt, Artificial Sequence
  Description of Artificial Sequence: Synthetic oligonucleotide
  Sense strand starting at position 2081 of SEQ ID NO: 1888124
gucagauugugacccacau

SEQ ID NO: 2512537 - RNA, 19 nt, Artificial Sequence
  Description of Artificial Sequence: Synthetic oligonucleotide
  Antisense strand to SEQ ID NO: 2512536
augugggucacaaucugac

SEQ ID NO: 2512538 - RNA, 19 nt, Artificial Sequence
  Description of Artificial Sequence: Synthetic oligonucleotide
  Sense strand starting at position 2148 of SEQ ID NO: 1888124
ccagguuaccagggaguga

SEQ ID NO: 2512539 - RNA, 19 nt, Artificial Sequence
  Description of Artificial Sequence: Synthetic oligonucleotide
  Antisense strand to SEQ ID NO: 2512538
ucacucccugguaaccugg

SEQ ID NO: 2512540 - RNA, 19 nt, Artificial Sequence
  Description of Artificial Sequence: Synthetic oligonucleotide
  Sense strand starting at position 2256 of SEQ ID NO: 1888124
agacuuauuucccaugguc

SEQ ID NO: 2512541 - RNA, 19 nt, Artificial Sequence
  Description of Artificial Sequence: Synthetic oligonucleotide
  Antisense strand to SEQ ID NO: 2512540
gaccaugggaaauaagucu

SEQ ID NO: 2512542 - RNA, 19 nt, Artificial Sequence
  Description of Artificial Sequence: Synthetic oligonucleotide
  Sense strand starting at position 2498 of SEQ ID NO: 1888124
augucccaucgguauggaa

SEQ ID NO: 2512543 - RNA, 19 nt, Artificial Sequence
  Description of Artificial Sequence: Synthetic oligonucleotide
  Antisense strand to SEQ ID NO: 2512542
uuccauaccgaugggacau

SEQ ID NO: 2512544 - RNA, 19 nt, Artificial Sequence
  Description of Artificial Sequence: Synthetic oligonucleotide
  Sense strand starting at position 2521 of SEQ ID NO: 1888124
agaugacagucauugauau

SEQ ID NO: 2512545 - RNA, 19 nt, Artificial Sequence
  Description of Artificial Sequence: Synthetic oligonucleotide
  Antisense strand to SEQ ID NO: 2512544
auaucaaugacugucaucu

SEQ ID NO: 2512546 - RNA, 19 nt, Artificial Sequence
  Description of Artificial Sequence: Synthetic oligonucleotide
  Sense strand starting at position 2522 of SEQ ID NO: 1888124
gaugacagucauugauaug

SEQ ID NO: 2512547 - RNA, 19 nt, Artificial Sequence
  Description of Artificial Sequence: Synthetic oligonucleotide
  Antisense strand to SEQ ID NO: 2512546
cauaucaaugacugucauc

SEQ ID NO: 2512548 - RNA, 19 nt, Artificial Sequence
  Description of Artificial Sequence: Synthetic oligonucleotide
  Sense strand starting at position 2534 of SEQ ID NO: 1888124
ugauaugcugcuugcauuu

SEQ ID NO: 2512549 - RNA, 19 nt, Artificial Sequence
  Description of Artificial Sequence: Synthetic oligonucleotide
  Antisense strand to SEQ ID NO: 2512548
aaaugcaagcagcauauca

SEQ ID NO: 2512550 - RNA, 19 nt, Artificial Sequence
  Description of Artificial Sequence: Synthetic oligonucleotide
  Sense strand starting at position 2573 of SEQ ID NO: 1888124
agaaaugcgcccuaucaga

SEQ ID NO: 2512551 - RNA, 19 nt, Artificial Sequence
  Description of Artificial Sequence: Synthetic oligonucleotide
  Antisense strand to SEQ ID NO: 2512550
ucugauagggcgcauuucu

SEQ ID NO: 2512552 - RNA, 19 nt, Artificial Sequence
  Description of Artificial Sequence: Synthetic oligonucleotide
  Sense strand starting at position 2652 of SEQ ID NO: 1888124
ggaggacauaagugcugua

SEQ ID NO: 2512553 - RNA, 19 nt, Artificial Sequence
  Description of Artificial Sequence: Synthetic oligonucleotide
  Antisense strand to SEQ ID NO: 2512552
uacagcacuuauguccucc

SEQ ID NO: 2512554 - RNA, 19 nt, Artificial Sequence
  Description of Artificial Sequence: Synthetic oligonucleotide
  Sense strand starting at position 2657 of SEQ ID NO: 1888124
acauaagugcuguaggauc

SEQ ID NO: 2512555 - RNA, 19 nt, Artificial Sequence
  Description of Artificial Sequence: Synthetic oligonucleotide
  Antisense strand to SEQ ID NO: 2512554
gauccuacagcacuuaugu

SEQ ID NO: 2512556 - RNA, 19 nt, Artificial Sequence
  Description of Artificial Sequence: Synthetic oligonucleotide
  Sense strand starting at position 2875 of SEQ ID NO: 1888124
ucagaaagugaauguacaa

SEQ ID NO: 2512557 - RNA, 19 nt, Artificial Sequence
  Description of Artificial Sequence: Synthetic oligonucleotide
  Antisense strand to SEQ ID NO: 2512556
uuguacauucacuuucuga

SEQ ID NO: 2512558 - RNA, 19 nt, Artificial Sequence
  Description of Artificial Sequence: Synthetic oligonucleotide
  Sense strand starting at position 2895 of SEQ ID NO: 1888124
uggagaaccuuugaagaca

SEQ ID NO: 2512559 - RNA, 19 nt, Artificial Sequence
  Description of Artificial Sequence: Synthetic oligonucleotide
  Antisense strand to SEQ ID NO: 2512558
ugucuucaaagguucucca

SEQ ID NO: 2512560 - RNA, 19 nt, Artificial Sequence
  Description of Artificial Sequence: Synthetic oligonucleotide
  Sense strand starting at position 2917 of SEQ ID NO: 1888124
gagcccaauguggguaaau

SEQ ID NO: 2512561 - RNA, 19 nt, Artificial Sequence
  Description of Artificial Sequence: Synthetic oligonucleotide
  Antisense strand to SEQ ID NO: 2512560
auuuacccacauugggcuc

SEQ ID NO: 2512562 - RNA, 19 nt, Artificial Sequence
  Description of Artificial Sequence: Synthetic oligonucleotide
  Sense strand starting at position 2919 of SEQ ID NO: 1888124
gcccaauguggguaaauga

SEQ ID NO: 2512563 - RNA, 19 nt, Artificial Sequence
  Description of Artificial Sequence: Synthetic oligonucleotide
  Antisense strand to SEQ ID NO: 2512562
ucauuuacccacauugggc

SEQ ID NO: 2512564 - RNA, 19 nt, Artificial Sequence
  Description of Artificial Sequence: Synthetic oligonucleotide
  Sense strand starting at position 2933 of SEQ ID NO: 1888124
aaugacauugcucguagga

SEQ ID NO: 2512565 - RNA, 19 nt, Artificial Sequence
  Description of Artificial Sequence: Synthetic oligonucleotide
  Antisense strand to SEQ ID NO: 2512564
uccuacgagcaaugucauu

SEQ ID NO: 2512566 - RNA, 19 nt, Artificial Sequence
  Description of Artificial Sequence: Synthetic oligonucleotide
  Sense strand starting at position 3151 of SEQ ID NO: 1888124
aggugauugguggaaggua

SEQ ID NO: 2512567 - RNA, 19 nt, Artificial Sequence
  Description of Artificial Sequence: Synthetic oligonucleotide
  Antisense strand to SEQ ID NO: 2512566
uaccuuccaccaaucaccu

SEQ ID NO: 2512568 - RNA, 19 nt, Artificial Sequence
  Description of Artificial Sequence: Synthetic oligonucleotide
  Sense strand starting at position 3152 of SEQ ID NO: 1888124
ggugauugguggaagguaa

SEQ ID NO: 2512569 - RNA, 19 nt, Artificial Sequence
  Description of Artificial Sequence: Synthetic oligonucleotide
  Antisense strand to SEQ ID NO: 2512568
uuaccuuccaccaaucacc

SEQ ID NO: 2512570 - RNA, 19 nt, Artificial Sequence
  Description of Artificial Sequence: Synthetic oligonucleotide
  Sense strand starting at position 3215 of SEQ ID NO: 1888124
gcuaccuuaugagucauau

SEQ ID NO: 2512571 - RNA, 19 nt, Artificial Sequence
  Description of Artificial Sequence: Synthetic oligonucleotide
  Antisense strand to SEQ ID NO: 2512570
auaugacucauaagguagc

SEQ ID NO: 2512572 - RNA, 19 nt, Artificial Sequence
  Description of Artificial Sequence: Synthetic oligonucleotide
  Sense strand starting at position 3258 of SEQ ID NO: 1888124
ugaaacaagcaguggaaau

SEQ ID NO: 2512573 - RNA, 19 nt, Artificial Sequence
  Description of Artificial Sequence: Synthetic oligonucleotide
  Antisense strand to SEQ ID NO: 2512572
auuuccacugcuuguuuca

SEQ ID NO: 2512574 - RNA, 19 nt, Artificial Sequence
  Description of Artificial Sequence: Synthetic oligonucleotide
  Sense strand starting at position 3436 of SEQ ID NO: 1888124
uuaugaacucuuugggacu

SEQ ID NO: 2512575 - RNA, 19 nt, Artificial Sequence
  Description of Artificial Sequence: Synthetic oligonucleotide
  Antisense strand to SEQ ID NO: 2512574
agucccaaagaguucauaa

SEQ ID NO: 2512576 - RNA, 19 nt, Artificial Sequence
  Description of Artificial Sequence: Synthetic oligonucleotide
  Sense strand starting at position 3500 of SEQ ID NO: 1888124
gaaagaguucugggcacca

SEQ ID NO: 2512577 - RNA, 19 nt, Artificial Sequence
  Description of Artificial Sequence: Synthetic oligonucleotide
  Antisense strand to SEQ ID NO: 2512576
uggugcccagaacucuuuc

SEQ ID NO: 2512578 - RNA, 19 nt, Artificial Sequence
  Description of Artificial Sequence: Synthetic oligonucleotide
  Sense strand starting at position 3770 of SEQ ID NO: 1888124
auaaguucugggcacguaa

SEQ ID NO: 2512579 - RNA, 19 nt, Artificial Sequence
  Description of Artificial Sequence: Synthetic oligonucleotide
  Antisense strand to SEQ ID NO: 2512578
uuacgugcccagaacuuau

SEQ ID NO: 2512580 - RNA, 19 nt, Artificial Sequence
  Description of Artificial Sequence: Synthetic oligonucleotide
  Sense strand starting at position 3832 of SEQ ID NO: 1888124
gaggauaugaaguguuuac

SEQ ID NO: 2512581 - RNA, 19 nt, Artificial Sequence
  Description of Artificial Sequence: Synthetic oligonucleotide
  Antisense strand to SEQ ID NO: 2512580
guaaacacuucauauccuc

SEQ ID NO: 2512582 - RNA, 19 nt, Artificial Sequence
  Description of Artificial Sequence: Synthetic oligonucleotide
  Sense strand starting at position 3842 of SEQ ID NO: 1888124
aguguuuacuaagcagacu

SEQ ID NO: 2512583 - RNA, 19 nt, Artificial Sequence
  Description of Artificial Sequence: Synthetic oligonucleotide
  Antisense strand to SEQ ID NO: 2512582
agucugcuuaguaaacacu

SEQ ID NO: 2512584 - RNA, 19 nt, Artificial Sequence
  Description of Artificial Sequence: Synthetic oligonucleotide
  Sense strand starting at position 3885 of SEQ ID NO: 1888124
agagaaaucuaaggaauuu

SEQ ID NO: 2512585 - RNA, 19 nt, Artificial Sequence
  Description of Artificial Sequence: Synthetic oligonucleotide
  Antisense strand to SEQ ID NO: 2512584
aaauuccuuagauuucucu

SEQ ID NO: 2512586 - RNA, 19 nt, Artificial Sequence
  Description of Artificial Sequence: Synthetic oligonucleotide
  Sense strand starting at position 14 of SEQ ID NO: 1888125
acuugaacuucuguugacu

SEQ ID NO: 2512587 - RNA, 19 nt, Artificial Sequence
  Description of Artificial Sequence: Synthetic oligonucleotide
  Antisense strand to SEQ ID NO: 2512586
agucaacagaaguucaagu

SEQ ID NO: 2512588 - RNA, 19 nt, Artificial Sequence
  Description of Artificial Sequence: Synthetic oligonucleotide
  Sense strand starting at position 70 of SEQ ID NO: 1888125
guguaucucacagguuauu

SEQ ID NO: 2512589 - RNA, 19 nt, Artificial Sequence
  Description of Artificial Sequence: Synthetic oligonucleotide
  Antisense strand to SEQ ID NO: 2512588
aauaaccugugagauacac

SEQ ID NO: 2512590 - RNA, 19 nt, Artificial Sequence
  Description of Artificial Sequence: Synthetic oligonucleotide
  Sense strand starting at position 86 of SEQ ID NO: 1888125
auuggcaugucugcaaaga

SEQ ID NO: 2512591 - RNA, 19 nt, Artificial Sequence
  Description of Artificial Sequence: Synthetic oligonucleotide
  Antisense strand to SEQ ID NO: 2512590
ucuuugcagacaugccaau

SEQ ID NO: 2512592 - RNA, 19 nt, Artificial Sequence
  Description of Artificial Sequence: Synthetic oligonucleotide
  Sense strand starting at position 391 of SEQ ID NO: 1888125
uccgaaagugcggauuaca

SEQ ID NO: 2512593 - RNA, 19 nt, Artificial Sequence
  Description of Artificial Sequence: Synthetic oligonucleotide
  Antisense strand to SEQ ID NO: 2512592
uguaauccgcacuuucgga

SEQ ID NO: 2512594 - RNA, 19 nt, Artificial Sequence
  Description of Artificial Sequence: Synthetic oligonucleotide
  Sense strand starting at position 538 of SEQ ID NO: 1888125
ccuucuuucccuggugauc

SEQ ID NO: 2512595 - RNA, 19 nt, Artificial Sequence
  Description of Artificial Sequence: Synthetic oligonucleotide
  Antisense strand to SEQ ID NO: 2512594
gaucaccagggaaagaagg

SEQ ID NO: 2512596 - RNA, 19 nt, Artificial Sequence
  Description of Artificial Sequence: Synthetic oligonucleotide
  Sense strand starting at position 543 of SEQ ID NO: 1888125
uuucccuggugaucuuuau

SEQ ID NO: 2512597 - RNA, 19 nt, Artificial Sequence
  Description of Artificial Sequence: Synthetic oligonucleotide
  Antisense strand to SEQ ID NO: 2512596
auaaagaucaccagggaaa

SEQ ID NO: 2512598 - RNA, 19 nt, Artificial Sequence
  Description of Artificial Sequence: Synthetic oligonucleotide
  Sense strand starting at position 547 of SEQ ID NO: 1888125
ccuggugaucuuuauuaca

SEQ ID NO: 2512599 - RNA, 19 nt, Artificial Sequence
  Description of Artificial Sequence: Synthetic oligonucleotide
  Antisense strand to SEQ ID NO: 2512598
uguaauaaagaucaccagg

SEQ ID NO: 2512600 - RNA, 19 nt, Artificial Sequence
  Description of Artificial Sequence: Synthetic oligonucleotide
  Sense strand starting at position 549 of SEQ ID NO: 1888125
uggugaucuuuauuacaaa

SEQ ID NO: 2512601 - RNA, 19 nt, Artificial Sequence
  Description of Artificial Sequence: Synthetic oligonucleotide
  Antisense strand to SEQ ID NO: 2512600
uuuguaauaaagaucacca

SEQ ID NO: 2512602 - RNA, 19 nt, Artificial Sequence
  Description of Artificial Sequence: Synthetic oligonucleotide
  Sense strand starting at position 571 of SEQ ID NO: 1888125
ggagaugcauucccaacga

SEQ ID NO: 2512603 - RNA, 19 nt, Artificial Sequence
  Description of Artificial Sequence: Synthetic oligonucleotide
  Antisense strand to SEQ ID NO: 2512602
ucguugggaaugcaucucc

SEQ ID NO: 2512604 - RNA, 19 nt, Artificial Sequence
  Description of Artificial Sequence: Synthetic oligonucleotide
  Sense strand starting at position 575 of SEQ ID NO: 1888125
augcauucccaacgaaauc

SEQ ID NO: 2512605 - RNA, 19 nt, Artificial Sequence
  Description of Artificial Sequence: Synthetic oligonucleotide
  Antisense strand to SEQ ID NO: 2512604
gauuucguugggaaugcau

SEQ ID NO: 2512606 - RNA, 19 nt, Artificial Sequence
  Description of Artificial Sequence: Synthetic oligonucleotide
  Sense strand starting at position 586 of SEQ ID NO: 1888125
acgaaaucaucucccagua

SEQ ID NO: 2512607 - RNA, 19 nt, Artificial Sequence
  Description of Artificial Sequence: Synthetic oligonucleotide
  Antisense strand to SEQ ID NO: 2512606
uacugggagaugauuucgu

SEQ ID NO: 2512608 - RNA, 19 nt, Artificial Sequence
  Description of Artificial Sequence: Synthetic oligonucleotide
  Sense strand starting at position 670 of SEQ ID NO: 1888125
uagugucugccuggaauau

SEQ ID NO: 2512609 - RNA, 19 nt, Artificial Sequence
  Description of Artificial Sequence: Synthetic oligonucleotide
  Antisense strand to SEQ ID NO: 2512608
auauuccaggcagacacua

SEQ ID NO: 2512610 - RNA, 19 nt, Artificial Sequence
  Description of Artificial Sequence: Synthetic oligonucleotide
  Sense strand starting at position 671 of SEQ ID NO: 1888125
agugucugccuggaauauu

SEQ ID NO: 2512611 - RNA, 19 nt, Artificial Sequence
  Description of Artificial Sequence: Synthetic oligonucleotide
  Antisense strand to SEQ ID NO: 2512610
aauauuccaggcagacacu

SEQ ID NO: 2512612 - RNA, 19 nt, Artificial Sequence
  Description of Artificial Sequence: Synthetic oligonucleotide
  Sense strand starting at position 747 of SEQ ID NO: 1888125
gcuguuaggccacauacau

SEQ ID NO: 2512613 - RNA, 19 nt, Artificial Sequence
  Description of Artificial Sequence: Synthetic oligonucleotide
  Antisense strand to SEQ ID NO: 2512612
auguauguggccuaacagc

SEQ ID NO: 2512614 - RNA, 19 nt, Artificial Sequence
  Description of Artificial Sequence: Synthetic oligonucleotide
  Sense strand starting at position 766 of SEQ ID NO: 1888125
aucucauaugcuugagaau

SEQ ID NO: 2512615 - RNA, 19 nt, Artificial Sequence
  Description of Artificial Sequence: Synthetic oligonucleotide
  Antisense strand to SEQ ID NO: 2512614
auucucaagcauaugagau

SEQ ID NO: 2512616 - RNA, 19 nt, Artificial Sequence
  Description of Artificial Sequence: Synthetic oligonucleotide
  Sense strand starting at position 767 of SEQ ID NO: 1888125
ucucauaugcuugagaauc

SEQ ID NO: 2512617 - RNA, 19 nt, Artificial Sequence
  Description of Artificial Sequence: Synthetic oligonucleotide
  Antisense strand to SEQ ID NO: 2512616
gauucucaagcauaugaga

SEQ ID NO: 2512618 - RNA, 19 nt, Artificial Sequence
  Description of Artificial Sequence: Synthetic oligonucleotide
  Sense strand starting at position 893 of SEQ ID NO: 1888125
gucugcuuccaacaggaaa

SEQ ID NO: 2512619 - RNA, 19 nt, Artificial Sequence
  Description of Artificial Sequence: Synthetic oligonucleotide
  Antisense strand to SEQ ID NO: 2512618
uuuccuguuggaagcagac

SEQ ID NO: 2512620 - RNA, 19 nt, Artificial Sequence
  Description of Artificial Sequence: Synthetic oligonucleotide
  Sense strand starting at position 921 of SEQ ID NO: 1888125
ggcuaaagguucuugaaau

SEQ ID NO: 2512621 - RNA, 19 nt, Artificial Sequence
  Description of Artificial Sequence: Synthetic oligonucleotide
  Antisense strand to SEQ ID NO: 2512620
auuucaagaaccuuuagcc

SEQ ID NO: 2512622 - RNA, 19 nt, Artificial Sequence
  Description of Artificial Sequence: Synthetic oligonucleotide
  Sense strand starting at position 963 of SEQ ID NO: 1888125
uaagucuguuccuuuggga

SEQ ID NO: 2512623 - RNA, 19 nt, Artificial Sequence
  Description of Artificial Sequence: Synthetic oligonucleotide
  Antisense strand to SEQ ID NO: 2512622
ucccaaaggaacagacuua

SEQ ID NO: 2512624 - RNA, 19 nt, Artificial Sequence
  Description of Artificial Sequence: Synthetic oligonucleotide
  Sense strand starting at position 970 of SEQ ID NO: 1888125
guuccuuugggaggaaauc

SEQ ID NO: 2512625 - RNA, 19 nt, Artificial Sequence
  Description of Artificial Sequence: Synthetic oligonucleotide
  Antisense strand to SEQ ID NO: 2512624
gauuuccucccaaaggaac

SEQ ID NO: 2512626 - RNA, 19 nt, Artificial Sequence
  Description of Artificial Sequence: Synthetic oligonucleotide
  Sense strand starting at position 998 of SEQ ID NO: 1888125
caugauguagguuaaccau

SEQ ID NO: 2512627 - RNA, 19 nt, Artificial Sequence
  Description of Artificial Sequence: Synthetic oligonucleotide
  Antisense strand to SEQ ID NO: 2512626
augguuaaccuacaucaug

SEQ ID NO: 2512628 - RNA, 19 nt, Artificial Sequence
  Description of Artificial Sequence: Synthetic oligonucleotide
  Sense strand starting at position 1577 of SEQ ID NO: 1888125
auuguuuaccucuggagga

SEQ ID NO: 2512629 - RNA, 19 nt, Artificial Sequence
  Description of Artificial Sequence: Synthetic oligonucleotide
  Antisense strand to SEQ ID NO: 2512628
uccuccagagguaaacaau

SEQ ID NO: 2512630 - RNA, 19 nt, Artificial Sequence
  Description of Artificial Sequence: Synthetic oligonucleotide
  Sense strand starting at position 1985 of SEQ ID NO: 1888125
ccacucagaugccuuugaa

SEQ ID NO: 2512631 - RNA, 19 nt, Artificial Sequence
  Description of Artificial Sequence: Synthetic oligonucleotide
  Antisense strand to SEQ ID NO: 2512630
uucaaaggcaucugagugg

SEQ ID NO: 2512632 - RNA, 19 nt, Artificial Sequence
  Description of Artificial Sequence: Synthetic oligonucleotide
  Sense strand starting at position 1988 of SEQ ID NO: 1888125
cucagaugccuuugaaugu

SEQ ID NO: 2512633 - RNA, 19 nt, Artificial Sequence
  Description of Artificial Sequence: Synthetic oligonucleotide
  Antisense strand to SEQ ID NO: 2512632
acauucaaaggcaucugag

SEQ ID NO: 2512634 - RNA, 19 nt, Artificial Sequence
  Description of Artificial Sequence: Synthetic oligonucleotide
  Sense strand starting at position 2127 of SEQ ID NO: 1888125
ggcucuguccuaugacaug

SEQ ID NO: 2512635 - RNA, 19 nt, Artificial Sequence
  Description of Artificial Sequence: Synthetic oligonucleotide
  Antisense strand to SEQ ID NO: 2512634
caugucauaggacagagcc

SEQ ID NO: 2512636 - RNA, 19 nt, Artificial Sequence
  Description of Artificial Sequence: Synthetic oligonucleotide
  Sense strand starting at position 2141 of SEQ ID NO: 1888125
acaugagcuggcugugauu

SEQ ID NO: 2512637 - RNA, 19 nt, Artificial Sequence
  Description of Artificial Sequence: Synthetic oligonucleotide
  Antisense strand to SEQ ID NO: 2512636
aaucacagccagcucaugu

SEQ ID NO: 2512638 - RNA, 19 nt, Artificial Sequence
  Description of Artificial Sequence: Synthetic oligonucleotide
  Sense strand starting at position 2143 of SEQ ID NO: 1888125
augagcuggcugugauuua

SEQ ID NO: 2512639 - RNA, 19 nt, Artificial Sequence
  Description of Artificial Sequence: Synthetic oligonucleotide
  Antisense strand to SEQ ID NO: 2512638
uaaaucacagccagcucau

SEQ ID NO: 2512640 - RNA, 19 nt, Artificial Sequence
  Description of Artificial Sequence: Synthetic oligonucleotide
  Sense strand starting at position 2241 of SEQ ID NO: 1888125
ugggcuccauccuuagaca

SEQ ID NO: 2512641 - RNA, 19 nt, Artificial Sequence
  Description of Artificial Sequence: Synthetic oligonucleotide
  Antisense strand to SEQ ID NO: 2512640
ugucuaaggauggagccca

SEQ ID NO: 2512642 - RNA, 19 nt, Artificial Sequence
  Description of Artificial Sequence: Synthetic oligonucleotide
  Sense strand starting at position 2955 of SEQ ID NO: 1888125
gccagaucuugccucaaag

SEQ ID NO: 2512643 - RNA, 19 nt, Artificial Sequence
  Description of Artificial Sequence: Synthetic oligonucleotide
  Antisense strand to SEQ ID NO: 2512642
cuuugaggcaagaucuggc

SEQ ID NO: 2512644 - RNA, 19 nt, Artificial Sequence
  Description of Artificial Sequence: Synthetic oligonucleotide
  Sense strand starting at position 2998 of SEQ ID NO: 1888125
uguaccaauccagguuaua

SEQ ID NO: 2512645 - RNA, 19 nt, Artificial Sequence
  Description of Artificial Sequence: Synthetic oligonucleotide
  Antisense strand to SEQ ID NO: 2512644
uauaaccuggauugguaca

SEQ ID NO: 2512646 - RNA, 19 nt, Artificial Sequence
  Description of Artificial Sequence: Synthetic oligonucleotide
  Sense strand starting at position 3062 of SEQ ID NO: 1888125
guauacaugugcuccuuga

SEQ ID NO: 2512647 - RNA, 19 nt, Artificial Sequence
  Description of Artificial Sequence: Synthetic oligonucleotide
  Antisense strand to SEQ ID NO: 2512646
ucaaggagcacauguauac

SEQ ID NO: 2512648 - RNA, 19 nt, Artificial Sequence
  Description of Artificial Sequence: Synthetic oligonucleotide
  Sense strand starting at position 3066 of SEQ ID NO: 1888125
acaugugcuccuugagaaa

SEQ ID NO: 2512649 - RNA, 19 nt, Artificial Sequence
  Description of Artificial Sequence: Synthetic oligonucleotide
  Antisense strand to SEQ ID NO: 2512648
uuucucaaggagcacaugu

SEQ ID NO: 2512650 - RNA, 19 nt, Artificial Sequence
  Description of Artificial Sequence: Synthetic oligonucleotide
  Sense strand starting at position 3089 of SEQ ID NO: 1888125
agugguaauuuguuucugu

SEQ ID NO: 2512651 - RNA, 19 nt, Artificial Sequence
  Description of Artificial Sequence: Synthetic oligonucleotide
  Antisense strand to SEQ ID NO: 2512650
acagaaacaaauuaccacu

SEQ ID NO: 2512652 - RNA, 19 nt, Artificial Sequence
  Description of Artificial Sequence: Synthetic oligonucleotide
  Sense strand starting at position 3090 of SEQ ID NO: 1888125
gugguaauuuguuucugug

SEQ ID NO: 2512653 - RNA, 19 nt, Artificial Sequence
  Description of Artificial Sequence: Synthetic oligonucleotide
  Antisense strand to SEQ ID NO: 2512652
cacagaaacaaauuaccac

SEQ ID NO: 2512654 - RNA, 19 nt, Artificial Sequence
  Description of Artificial Sequence: Synthetic oligonucleotide
  Sense strand starting at position 3092 of SEQ ID NO: 1888125
gguaauuuguuucugugca

SEQ ID NO: 2512655 - RNA, 19 nt, Artificial Sequence
  Description of Artificial Sequence: Synthetic oligonucleotide
  Antisense strand to SEQ ID NO: 2512654
ugcacagaaacaaauuacc

SEQ ID NO: 2512656 - RNA, 19 nt, Artificial Sequence
  Description of Artificial Sequence: Synthetic oligonucleotide
  Sense strand starting at position 3096 of SEQ ID NO: 1888125
auuuguuucugugcacaag

SEQ ID NO: 2512657 - RNA, 19 nt, Artificial Sequence
  Description of Artificial Sequence: Synthetic oligonucleotide
  Antisense strand to SEQ ID NO: 2512656
cuugugcacagaaacaaau

SEQ ID NO: 2512658 - RNA, 19 nt, Artificial Sequence
  Description of Artificial Sequence: Synthetic oligonucleotide
  Sense strand starting at position 3097 of SEQ ID NO: 1888125
uuuguuucugugcacaaga

SEQ ID NO: 2512659 - RNA, 19 nt, Artificial Sequence
  Description of Artificial Sequence: Synthetic oligonucleotide
  Antisense strand to SEQ ID NO: 2512658
ucuugugcacagaaacaaa

SEQ ID NO: 2512660 - RNA, 19 nt, Artificial Sequence
  Description of Artificial Sequence: Synthetic oligonucleotide
  Sense strand starting at position 3099 of SEQ ID NO: 1888125
uguuucugugcacaagaaa

SEQ ID NO: 2512661 - RNA, 19 nt, Artificial Sequence
  Description of Artificial Sequence: Synthetic oligonucleotide
  Antisense strand to SEQ ID NO: 2512660
uuucuugugcacagaaaca

SEQ ID NO: 2512662 - RNA, 19 nt, Artificial Sequence
  Description of Artificial Sequence: Synthetic oligonucleotide
  Sense strand starting at position 3909 of SEQ ID NO: 1888125
gagaacaugugcccaacuu

SEQ ID NO: 2512663 - RNA, 19 nt, Artificial Sequence
  Description of Artificial Sequence: Synthetic oligonucleotide
  Antisense strand to SEQ ID NO: 2512662
aaguugggcacauguucuc

SEQ ID NO: 2512664 - RNA, 19 nt, Artificial Sequence
  Description of Artificial Sequence: Synthetic oligonucleotide
  Sense strand starting at position 3910 of SEQ ID NO: 1888125
agaacaugugcccaacuuu

SEQ ID NO: 2512665 - RNA, 19 nt, Artificial Sequence
  Description of Artificial Sequence: Synthetic oligonucleotide
  Antisense strand to SEQ ID NO: 2512664
aaaguugggcacauguucu

SEQ ID NO: 2512666 - RNA, 19 nt, Artificial Sequence
  Description of Artificial Sequence: Synthetic oligonucleotide
  Sense strand starting at position 19 of SEQ ID NO: 1888126
agauguaugaugggacucu

SEQ ID NO: 2512667 - RNA, 19 nt, Artificial Sequence
  Description of Artificial Sequence: Synthetic oligonucleotide
  Antisense strand to SEQ ID NO: 2512666
agagucccaucauacaucu

SEQ ID NO: 2512668 - RNA, 19 nt, Artificial Sequence
  Description of Artificial Sequence: Synthetic oligonucleotide
  Sense strand starting at position 30 of SEQ ID NO: 1888126
gggacucuaggugguuaua

SEQ ID NO: 2512669 - RNA, 19 nt, Artificial Sequence
  Description of Artificial Sequence: Synthetic oligonucleotide
  Antisense strand to SEQ ID NO: 2512668
uauaaccaccuagaguccc

SEQ ID NO: 2512670 - RNA, 19 nt, Artificial Sequence
  Description of Artificial Sequence: Synthetic oligonucleotide
  Sense strand starting at position 32 of SEQ ID NO: 1888126
gacucuaggugguuauaga

SEQ ID NO: 2512671 - RNA, 19 nt, Artificial Sequence
  Description of Artificial Sequence: Synthetic oligonucleotide
  Antisense strand to SEQ ID NO: 2512670
ucuauaaccaccuagaguc

SEQ ID NO: 2512672 - RNA, 19 nt, Artificial Sequence
  Description of Artificial Sequence: Synthetic oligonucleotide
  Sense strand starting at position 33 of SEQ ID NO: 1888126
acucuaggugguuauagau

SEQ ID NO: 2512673 - RNA, 19 nt, Artificial Sequence
  Description of Artificial Sequence: Synthetic oligonucleotide
  Antisense strand to SEQ ID NO: 2512672
aucuauaaccaccuagagu

SEQ ID NO: 2512674 - RNA, 19 nt, Artificial Sequence
  Description of Artificial Sequence: Synthetic oligonucleotide
  Sense strand starting at position 42 of SEQ ID NO: 1888126
gguuauagaugccuggagu

SEQ ID NO: 2512675 - RNA, 19 nt, Artificial Sequence
  Description of Artificial Sequence: Synthetic oligonucleotide
  Antisense strand to SEQ ID NO: 2512674
acuccaggcaucuauaacc

SEQ ID NO: 2512676 - RNA, 19 nt, Artificial Sequence
  Description of Artificial Sequence: Synthetic oligonucleotide
  Sense strand starting at position 43 of SEQ ID NO: 1888126
guuauagaugccuggagug

SEQ ID NO: 2512677 - RNA, 19 nt, Artificial Sequence
  Description of Artificial Sequence: Synthetic oligonucleotide
  Antisense strand to SEQ ID NO: 2512676
cacuccaggcaucuauaac

SEQ ID NO: 2512678 - RNA, 19 nt, Artificial Sequence
  Description of Artificial Sequence: Synthetic oligonucleotide
  Sense strand starting at position 45 of SEQ ID NO: 1888126
uauagaugccuggagugau

SEQ ID NO: 2512679 - RNA, 19 nt, Artificial Sequence
  Description of Artificial Sequence: Synthetic oligonucleotide
  Antisense strand to SEQ ID NO: 2512678
aucacuccaggcaucuaua

SEQ ID NO: 2512680 - RNA, 19 nt, Artificial Sequence
  Description of Artificial Sequence: Synthetic oligonucleotide
  Sense strand starting at position 48 of SEQ ID NO: 1888126
agaugccuggagugaugau

SEQ ID NO: 2512681 - RNA, 19 nt, Artificial Sequence
  Description of Artificial Sequence: Synthetic oligonucleotide
  Antisense strand to SEQ ID NO: 2512680
aucaucacuccaggcaucu

SEQ ID NO: 2512682 - RNA, 19 nt, Artificial Sequence
  Description of Artificial Sequence: Synthetic oligonucleotide
  Sense strand starting at position 49 of SEQ ID NO: 1888126
gaugccuggagugaugaua

SEQ ID NO: 2512683 - RNA, 19 nt, Artificial Sequence
  Description of Artificial Sequence: Synthetic oligonucleotide
  Antisense strand to SEQ ID NO: 2512682
uaucaucacuccaggcauc

SEQ ID NO: 2512684 - RNA, 19 nt, Artificial Sequence
  Description of Artificial Sequence: Synthetic oligonucleotide
  Sense strand starting at position 106 of SEQ ID NO: 1888126
cccaacugucugugauaga

SEQ ID NO: 2512685 - RNA, 19 nt, Artificial Sequence
  Description of Artificial Sequence: Synthetic oligonucleotide
  Antisense strand to SEQ ID NO: 2512684
ucuaucacagacaguuggg

SEQ ID NO: 2512686 - RNA, 19 nt, Artificial Sequence
  Description of Artificial Sequence: Synthetic oligonucleotide
  Sense strand starting at position 116 of SEQ ID NO: 1888126
ugugauagauggucagaga

SEQ ID NO: 2512687 - RNA, 19 nt, Artificial Sequence
  Description of Artificial Sequence: Synthetic oligonucleotide
  Antisense strand to SEQ ID NO: 2512686
ucucugaccaucuaucaca

SEQ ID NO: 2512688 - RNA, 19 nt, Artificial Sequence
  Description of Artificial Sequence: Synthetic oligonucleotide
  Sense strand starting at position 293 of SEQ ID NO: 1888126
ggcugagugagugauggaa

SEQ ID NO: 2512689 - RNA, 19 nt, Artificial Sequence
  Description of Artificial Sequence: Synthetic oligonucleotide
  Antisense strand to SEQ ID NO: 2512688
uuccaucacucacucagcc

SEQ ID NO: 2512690 - RNA, 19 nt, Artificial Sequence
  Description of Artificial Sequence: Synthetic oligonucleotide
  Sense strand starting at position 436 of SEQ ID NO: 1888126
ugcagagugagaugagauu

SEQ ID NO: 2512691 - RNA, 19 nt, Artificial Sequence
  Description of Artificial Sequence: Synthetic oligonucleotide
  Antisense strand to SEQ ID NO: 2512690
aaucucaucucacucugca

SEQ ID NO: 2512692 - RNA, 19 nt, Artificial Sequence
  Description of Artificial Sequence: Synthetic oligonucleotide
  Sense strand starting at position 448 of SEQ ID NO: 1888126
ugagauugugcuggaggau

SEQ ID NO: 2512693 - RNA, 19 nt, Artificial Sequence
  Description of Artificial Sequence: Synthetic oligonucleotide
  Antisense strand to SEQ ID NO: 2512692
auccuccagcacaaucuca

SEQ ID NO: 2512694 - RNA, 19 nt, Artificial Sequence
  Description of Artificial Sequence: Synthetic oligonucleotide
  Sense strand starting at position 449 of SEQ ID NO: 1888126
gagauugugcuggaggauu

SEQ ID NO: 2512695 - RNA, 19 nt, Artificial Sequence
  Description of Artificial Sequence: Synthetic oligonucleotide
  Antisense strand to SEQ ID NO: 2512694
aauccuccagcacaaucuc

SEQ ID NO: 2512696 - RNA, 19 nt, Artificial Sequence
  Description of Artificial Sequence: Synthetic oligonucleotide
  Sense strand starting at position 460 of SEQ ID NO: 1888126
ggaggauucgaaggucauu

SEQ ID NO: 2512697 - RNA, 19 nt, Artificial Sequence
  Description of Artificial Sequence: Synthetic oligonucleotide
  Antisense strand to SEQ ID NO: 2512696
aaugaccuucgaauccucc

SEQ ID NO: 2512698 - RNA, 19 nt, Artificial Sequence
  Description of Artificial Sequence: Synthetic oligonucleotide
  Sense strand starting at position 809 of SEQ ID NO: 1888126
ggagcuaaugucugaagga

SEQ ID NO: 2512699 - RNA, 19 nt, Artificial Sequence
  Description of Artificial Sequence: Synthetic oligonucleotide
  Antisense strand to SEQ ID NO: 2512698
uccuucagacauuagcucc

SEQ ID NO: 2512700 - RNA, 19 nt, Artificial Sequence
  Description of Artificial Sequence: Synthetic oligonucleotide
  Sense strand starting at position 926 of SEQ ID NO: 1888126
agcugugacccuggaaaug

SEQ ID NO: 2512701 - RNA, 19 nt, Artificial Sequence
  Description of Artificial Sequence: Synthetic oligonucleotide
  Antisense strand to SEQ ID NO: 2512700
cauuuccagggucacagcu

SEQ ID NO: 2512702 - RNA, 19 nt, Artificial Sequence
  Description of Artificial Sequence: Synthetic oligonucleotide
  Sense strand starting at position 1070 of SEQ ID NO: 1888126
uccaauuaagaugguggua

SEQ ID NO: 2512703 - RNA, 19 nt, Artificial Sequence
  Description of Artificial Sequence: Synthetic oligonucleotide
  Antisense strand to SEQ ID NO: 2512702
uaccaccaucuuaauugga

SEQ ID NO: 2512704 - RNA, 19 nt, Artificial Sequence
  Description of Artificial Sequence: Synthetic oligonucleotide
  Sense strand starting at position 1268 of SEQ ID NO: 1888126
acagguucuguuugagaga

SEQ ID NO: 2512705 - RNA, 19 nt, Artificial Sequence
  Description of Artificial Sequence: Synthetic oligonucleotide
  Antisense strand to SEQ ID NO: 2512704
ucucucaaacagaaccugu

SEQ ID NO: 2512706 - RNA, 19 nt, Artificial Sequence
  Description of Artificial Sequence: Synthetic oligonucleotide
  Sense strand starting at position 1304 of SEQ ID NO: 1888126
uggaaauuguaccuggagu

SEQ ID NO: 2512707 - RNA, 19 nt, Artificial Sequence
  Description of Artificial Sequence: Synthetic oligonucleotide
  Antisense strand to SEQ ID NO: 2512706
acuccagguacaauuucca

SEQ ID NO: 2512708 - RNA, 19 nt, Artificial Sequence
  Description of Artificial Sequence: Synthetic oligonucleotide
  Sense strand starting at position 1305 of SEQ ID NO: 1888126
ggaaauuguaccuggaguu

SEQ ID NO: 2512709 - RNA, 19 nt, Artificial Sequence
  Description of Artificial Sequence: Synthetic oligonucleotide
  Antisense strand to SEQ ID NO: 2512708
aacuccagguacaauuucc

SEQ ID NO: 2512710 - RNA, 19 nt, Artificial Sequence
  Description of Artificial Sequence: Synthetic oligonucleotide
  Sense strand starting at position 1306 of SEQ ID NO: 1888126
gaaauuguaccuggaguua

SEQ ID NO: 2512711 - RNA, 19 nt, Artificial Sequence
  Description of Artificial Sequence: Synthetic oligonucleotide
  Antisense strand to SEQ ID NO: 2512710
uaacuccagguacaauuuc

SEQ ID NO: 2512712 - RNA, 19 nt, Artificial Sequence
  Description of Artificial Sequence: Synthetic oligonucleotide
  Sense strand starting at position 1328 of SEQ ID NO: 1888126
agaggugugugguuggaua

SEQ ID NO: 2512713 - RNA, 19 nt, Artificial Sequence
  Description of Artificial Sequence: Synthetic oligonucleotide
  Antisense strand to SEQ ID NO: 2512712
uauccaaccacacaccucu

SEQ ID NO: 2512714 - RNA, 19 nt, Artificial Sequence
  Description of Artificial Sequence: Synthetic oligonucleotide
  Sense strand starting at position 1330 of SEQ ID NO: 1888126
aggugugugguuggauaga

SEQ ID NO: 2512715 - RNA, 19 nt, Artificial Sequence
  Description of Artificial Sequence: Synthetic oligonucleotide
  Antisense strand to SEQ ID NO: 2512714
ucuauccaaccacacaccu

SEQ ID NO: 2512716 - RNA, 19 nt, Artificial Sequence
  Description of Artificial Sequence: Synthetic oligonucleotide
  Sense strand starting at position 1629 of SEQ ID NO: 1888126
gcuaaucgaucaucuacca

SEQ ID NO: 2512717 - RNA, 19 nt, Artificial Sequence
  Description of Artificial Sequence: Synthetic oligonucleotide
  Antisense strand to SEQ ID NO: 2512716
ugguagaugaucgauuagc

SEQ ID NO: 2512718 - RNA, 19 nt, Artificial Sequence
  Description of Artificial Sequence: Synthetic oligonucleotide
  Sense strand starting at position 1652 of SEQ ID NO: 1888126
cuaucaaucuguguaucua

SEQ ID NO: 2512719 - RNA, 19 nt, Artificial Sequence
  Description of Artificial Sequence: Synthetic oligonucleotide
  Antisense strand to SEQ ID NO: 2512718
uagauacacagauugauag

SEQ ID NO: 2512720 - RNA, 19 nt, Artificial Sequence
  Description of Artificial Sequence: Synthetic oligonucleotide
  Sense strand starting at position 1919 of SEQ ID NO: 1888126
ccucacuugccaggagaga

SEQ ID NO: 2512721 - RNA, 19 nt, Artificial Sequence
  Description of Artificial Sequence: Synthetic oligonucleotide
  Antisense strand to SEQ ID NO: 2512720
ucucuccuggcaagugagg

SEQ ID NO: 2512722 - RNA, 19 nt, Artificial Sequence
  Description of Artificial Sequence: Synthetic oligonucleotide
  Sense strand starting at position 2081 of SEQ ID NO: 1888126
aaggguugccauugaggca

SEQ ID NO: 2512723 - RNA, 19 nt, Artificial Sequence
  Description of Artificial Sequence: Synthetic oligonucleotide
  Antisense strand to SEQ ID NO: 2512722
ugccucaauggcaacccuu

SEQ ID NO: 2512724 - RNA, 19 nt, Artificial Sequence
  Description of Artificial Sequence: Synthetic oligonucleotide
  Sense strand starting at position 2725 of SEQ ID NO: 1888126
agcgaauuccaccagguuu

SEQ ID NO: 2512725 - RNA, 19 nt, Artificial Sequence
  Description of Artificial Sequence: Synthetic oligonucleotide
  Antisense strand to SEQ ID NO: 2512724
aaaccugguggaauucgcu

SEQ ID NO: 2512726 - RNA, 19 nt, Artificial Sequence
  Description of Artificial Sequence: Synthetic oligonucleotide
  Sense strand starting at position 2815 of SEQ ID NO: 1888126
ccaggugagacuugacuuu

SEQ ID NO: 2512727 - RNA, 19 nt, Artificial Sequence
  Description of Artificial Sequence: Synthetic oligonucleotide
  Antisense strand to SEQ ID NO: 2512726
aaagucaagucucaccugg

SEQ ID NO: 2512728 - RNA, 19 nt, Artificial Sequence
  Description of Artificial Sequence: Synthetic oligonucleotide
  Sense strand starting at position 3430 of SEQ ID NO: 1888126
gagcuuagugcucaugaaa

SEQ ID NO: 2512729 - RNA, 19 nt, Artificial Sequence
  Description of Artificial Sequence: Synthetic oligonucleotide
  Antisense strand to SEQ ID NO: 2512728
uuucaugagcacuaagcuc

SEQ ID NO: 2512730 - RNA, 19 nt, Artificial Sequence
  Description of Artificial Sequence: Synthetic oligonucleotide
  Sense strand starting at position 3433 of SEQ ID NO: 1888126
cuuagugcucaugaaauaa

SEQ ID NO: 2512731 - RNA, 19 nt, Artificial Sequence
  Description of Artificial Sequence: Synthetic oligonucleotide
  Antisense strand to SEQ ID NO: 2512730
uuauuucaugagcacuaag

SEQ ID NO: 2512732 - RNA, 19 nt, Artificial Sequence
  Description of Artificial Sequence: Synthetic oligonucleotide
  Sense strand starting at position 3505 of SEQ ID NO: 1888126
augagugucgugcuuguca

SEQ ID NO: 2512733 - RNA, 19 nt, Artificial Sequence
  Description of Artificial Sequence: Synthetic oligonucleotide
  Antisense strand to SEQ ID NO: 2512732
ugacaagcacgacacucau

SEQ ID NO: 2512734 - RNA, 19 nt, Artificial Sequence
  Description of Artificial Sequence: Synthetic oligonucleotide
  Sense strand starting at position 3508 of SEQ ID NO: 1888126
agugucgugcuugucaaga

SEQ ID NO: 2512735 - RNA, 19 nt, Artificial Sequence
  Description of Artificial Sequence: Synthetic oligonucleotide
  Antisense strand to SEQ ID NO: 2512734
ucuugacaagcacgacacu

SEQ ID NO: 2512736 - RNA, 19 nt, Artificial Sequence
  Description of Artificial Sequence: Synthetic oligonucleotide
  Sense strand starting at position 3594 of SEQ ID NO: 1888126
ccgugauggcauuaaauga

SEQ ID NO: 2512737 - RNA, 19 nt, Artificial Sequence
  Description of Artificial Sequence: Synthetic oligonucleotide
  Antisense strand to SEQ ID NO: 2512736
ucauuuaaugccaucacgg

SEQ ID NO: 2512738 - RNA, 19 nt, Artificial Sequence
  Description of Artificial Sequence: Synthetic oligonucleotide
  Sense strand starting at position 3694 of SEQ ID NO: 1888126
ugcagaaugcaugaauaua

SEQ ID NO: 2512739 - RNA, 19 nt, Artificial Sequence
  Description of Artificial Sequence: Synthetic oligonucleotide
  Antisense strand to SEQ ID NO: 2512738
uauauucaugcauucugca

SEQ ID NO: 2512740 - RNA, 19 nt, Artificial Sequence
  Description of Artificial Sequence: Synthetic oligonucleotide
  Sense strand starting at position 3769 of SEQ ID NO: 1888126
ccagucaacugauuagugu

SEQ ID NO: 2512741 - RNA, 19 nt, Artificial Sequence
  Description of Artificial Sequence: Synthetic oligonucleotide
  Antisense strand to SEQ ID NO: 2512740
acacuaaucaguugacugg

SEQ ID NO: 2512742 - RNA, 19 nt, Artificial Sequence
  Description of Artificial Sequence: Synthetic oligonucleotide
  Sense strand starting at position 3828 of SEQ ID NO: 1888126
uuaggugguaaaugaacua

SEQ ID NO: 2512743 - RNA, 19 nt, Artificial Sequence
  Description of Artificial Sequence: Synthetic oligonucleotide
  Antisense strand to SEQ ID NO: 2512742
uaguucauuuaccaccuaa

SEQ ID NO: 2512744 - RNA, 19 nt, Artificial Sequence
  Description of Artificial Sequence: Synthetic oligonucleotide
  Sense strand starting at position 3873 of SEQ ID NO: 1888126
agguauaugucuguuuaau

SEQ ID NO: 2512745 - RNA, 19 nt, Artificial Sequence
  Description of Artificial Sequence: Synthetic oligonucleotide
  Antisense strand to SEQ ID NO: 2512744
auuaaacagacauauaccu

SEQ ID NO: 2512746 - RNA, 19 nt, Artificial Sequence
  Description of Artificial Sequence: Synthetic oligonucleotide
  Sense strand starting at position 3 of SEQ ID NO: 1888127
gcugaauggccagaagacu

SEQ ID NO: 2512747 - RNA, 19 nt, Artificial Sequence
  Description of Artificial Sequence: Synthetic oligonucleotide
  Antisense strand to SEQ ID NO: 2512746
agucuucuggccauucagc

SEQ ID NO: 2512748 - RNA, 19 nt, Artificial Sequence
  Description of Artificial Sequence: Synthetic oligonucleotide
  Sense strand starting at position 70 of SEQ ID NO: 1888127
guagguugcaaugauuaaa

SEQ ID NO: 2512749 - RNA, 19 nt, Artificial Sequence
  Description of Artificial Sequence: Synthetic oligonucleotide
  Antisense strand to SEQ ID NO: 2512748
uuuaaucauugcaaccuac

SEQ ID NO: 2512750 - RNA, 19 nt, Artificial Sequence
  Description of Artificial Sequence: Synthetic oligonucleotide
  Sense strand starting at position 204 of SEQ ID NO: 1888127
aucgaaauaauugaguguu

SEQ ID NO: 2512751 - RNA, 19 nt, Artificial Sequence
  Description of Artificial Sequence: Synthetic oligonucleotide
  Antisense strand to SEQ ID NO: 2512750
aacacucaauuauuucgau

SEQ ID NO: 2512752 - RNA, 19 nt, Artificial Sequence
  Description of Artificial Sequence: Synthetic oligonucleotide
  Sense strand starting at position 301 of SEQ ID NO: 1888127
auggucaagcaugauuaau

SEQ ID NO: 2512753 - RNA, 19 nt, Artificial Sequence
  Description of Artificial Sequence: Synthetic oligonucleotide
  Antisense strand to SEQ ID NO: 2512752
auuaaucaugcuugaccau

SEQ ID NO: 2512754 - RNA, 19 nt, Artificial Sequence
  Description of Artificial Sequence: Synthetic oligonucleotide
  Sense strand starting at position 303 of SEQ ID NO: 1888127
ggucaagcaugauuaauuc

SEQ ID NO: 2512755 - RNA, 19 nt, Artificial Sequence
  Description of Artificial Sequence: Synthetic oligonucleotide
  Antisense strand to SEQ ID NO: 2512754
gaauuaaucaugcuugacc

SEQ ID NO: 2512756 - RNA, 19 nt, Artificial Sequence
  Description of Artificial Sequence: Synthetic oligonucleotide
  Sense strand starting at position 323 of SEQ ID NO: 1888127
gcccacugccaagauguua

SEQ ID NO: 2512757 - RNA, 19 nt, Artificial Sequence
  Description of Artificial Sequence: Synthetic oligonucleotide
  Antisense strand to SEQ ID NO: 2512756
uaacaucuuggcagugggc

SEQ ID NO: 2512758 - RNA, 19 nt, Artificial Sequence
  Description of Artificial Sequence: Synthetic oligonucleotide
  Sense strand starting at position 368 of SEQ ID NO: 1888127
gucagaacaaugggucuua

SEQ ID NO: 2512759 - RNA, 19 nt, Artificial Sequence
  Description of Artificial Sequence: Synthetic oligonucleotide
  Antisense strand to SEQ ID NO: 2512758
uaagacccauuguucugac

SEQ ID NO: 2512760 - RNA, 19 nt, Artificial Sequence
  Description of Artificial Sequence: Synthetic oligonucleotide
  Sense strand starting at position 369 of SEQ ID NO: 1888127
ucagaacaaugggucuuaa

SEQ ID NO: 2512761 - RNA, 19 nt, Artificial Sequence
  Description of Artificial Sequence: Synthetic oligonucleotide
  Antisense strand to SEQ ID NO: 2512760
uuaagacccauuguucuga

SEQ ID NO: 2512762 - RNA, 19 nt, Artificial Sequence
  Description of Artificial Sequence: Synthetic oligonucleotide
  Sense strand starting at position 380 of SEQ ID NO: 1888127
ggucuuaaugggcaaccua

SEQ ID NO: 2512763 - RNA, 19 nt, Artificial Sequence
  Description of Artificial Sequence: Synthetic oligonucleotide
  Antisense strand to SEQ ID NO: 2512762
uagguugcccauuaagacc

SEQ ID NO: 2512764 - RNA, 19 nt, Artificial Sequence
  Description of Artificial Sequence: Synthetic oligonucleotide
  Sense strand starting at position 559 of SEQ ID NO: 1888127
cuucccucucagggaguua

SEQ ID NO: 2512765 - RNA, 19 nt, Artificial Sequence
  Description of Artificial Sequence: Synthetic oligonucleotide
  Antisense strand to SEQ ID NO: 2512764
uaacucccugagagggaag

SEQ ID NO: 2512766 - RNA, 19 nt, Artificial Sequence
  Description of Artificial Sequence: Synthetic oligonucleotide
  Sense strand starting at position 639 of SEQ ID NO: 1888127
ggucacuugagggaauugu

SEQ ID NO: 2512767 - RNA, 19 nt, Artificial Sequence
  Description of Artificial Sequence: Synthetic oligonucleotide
  Antisense strand to SEQ ID NO: 2512766
acaauucccucaagugacc

SEQ ID NO: 2512768 - RNA, 19 nt, Artificial Sequence
  Description of Artificial Sequence: Synthetic oligonucleotide
  Sense strand starting at position 753 of SEQ ID NO: 1888127
ggaugcccuaaagaguauu

SEQ ID NO: 2512769 - RNA, 19 nt, Artificial Sequence
  Description of Artificial Sequence: Synthetic oligonucleotide
  Antisense strand to SEQ ID NO: 2512768
aauacucuuuagggcaucc

SEQ ID NO: 2512770 - RNA, 19 nt, Artificial Sequence
  Description of Artificial Sequence: Synthetic oligonucleotide
  Sense strand starting at position 763 of SEQ ID NO: 1888127
aagaguauuuacuuucguu

SEQ ID NO: 2512771 - RNA, 19 nt, Artificial Sequence
  Description of Artificial Sequence: Synthetic oligonucleotide
  Antisense strand to SEQ ID NO: 2512770
aacgaaaguaaauacucuu

SEQ ID NO: 2512772 - RNA, 19 nt, Artificial Sequence
  Description of Artificial Sequence: Synthetic oligonucleotide
  Sense strand starting at position 1278 of SEQ ID NO: 1888127
gcgucugagccaucacucu

SEQ ID NO: 2512773 - RNA, 19 nt, Artificial Sequence
  Description of Artificial Sequence: Synthetic oligonucleotide
  Antisense strand to SEQ ID NO: 2512772
agagugauggcucagacgc

SEQ ID NO: 2512774 - RNA, 19 nt, Artificial Sequence
  Description of Artificial Sequence: Synthetic oligonucleotide
  Sense strand starting at position 1370 of SEQ ID NO: 1888127
gugaacaaucgccaaccaa

SEQ ID NO: 2512775 - RNA, 19 nt, Artificial Sequence
  Description of Artificial Sequence: Synthetic oligonucleotide
  Antisense strand to SEQ ID NO: 2512774
uugguuggcgauuguucac

SEQ ID NO: 2512776 - RNA, 19 nt, Artificial Sequence
  Description of Artificial Sequence: Synthetic oligonucleotide
  Sense strand starting at position 1504 of SEQ ID NO: 1888127
uuaugaauacacugaguau

SEQ ID NO: 2512777 - RNA, 19 nt, Artificial Sequence
  Description of Artificial Sequence: Synthetic oligonucleotide
  Antisense strand to SEQ ID NO: 2512776
auacucaguguauucauaa

SEQ ID NO: 2512778 - RNA, 19 nt, Artificial Sequence
  Description of Artificial Sequence: Synthetic oligonucleotide
  Sense strand starting at position 2004 of SEQ ID NO: 1888127
gggugugagaugcaaaucu

SEQ ID NO: 2512779 - RNA, 19 nt, Artificial Sequence
  Description of Artificial Sequence: Synthetic oligonucleotide
  Antisense strand to SEQ ID NO: 2512778
agauuugcaucucacaccc

SEQ ID NO: 2512780 - RNA, 19 nt, Artificial Sequence
  Description of Artificial Sequence: Synthetic oligonucleotide
  Sense strand starting at position 2021 of SEQ ID NO: 1888127
cugggcucuuaagucauaa

SEQ ID NO: 2512781 - RNA, 19 nt, Artificial Sequence
  Description of Artificial Sequence: Synthetic oligonucleotide
  Antisense strand to SEQ ID NO: 2512780
uuaugacuuaagagcccag

SEQ ID NO: 2512782 - RNA, 19 nt, Artificial Sequence
  Description of Artificial Sequence: Synthetic oligonucleotide
  Sense strand starting at position 2036 of SEQ ID NO: 1888127
auaauccuguuugugacau

SEQ ID NO: 2512783 - RNA, 19 nt, Artificial Sequence
  Description of Artificial Sequence: Synthetic oligonucleotide
  Antisense strand to SEQ ID NO: 2512782
augucacaaacaggauuau

SEQ ID NO: 2512784 - RNA, 19 nt, Artificial Sequence
  Description of Artificial Sequence: Synthetic oligonucleotide
  Sense strand starting at position 2062 of SEQ ID NO: 1888127
gguugcuacagugaugauu

SEQ ID NO: 2512785 - RNA, 19 nt, Artificial Sequence
  Description of Artificial Sequence: Synthetic oligonucleotide
  Antisense strand to SEQ ID NO: 2512784
aaucaucacuguagcaacc

SEQ ID NO: 2512786 - RNA, 19 nt, Artificial Sequence
  Description of Artificial Sequence: Synthetic oligonucleotide
  Sense strand starting at position 2068 of SEQ ID NO: 1888127
uacagugaugauuauguua

SEQ ID NO: 2512787 - RNA, 19 nt, Artificial Sequence
  Description of Artificial Sequence: Synthetic oligonucleotide
  Antisense strand to SEQ ID NO: 2512786
uaacauaaucaucacugua

SEQ ID NO: 2512788 - RNA, 19 nt, Artificial Sequence
  Description of Artificial Sequence: Synthetic oligonucleotide
  Sense strand starting at position 2071 of SEQ ID NO: 1888127
agugaugauuauguuauca

SEQ ID NO: 2512789 - RNA, 19 nt, Artificial Sequence
  Description of Artificial Sequence: Synthetic oligonucleotide
  Antisense strand to SEQ ID NO: 2512788
ugauaacauaaucaucacu

SEQ ID NO: 2512790 - RNA, 19 nt, Artificial Sequence
  Description of Artificial Sequence: Synthetic oligonucleotide
  Sense strand starting at position 2075 of SEQ ID NO: 1888127
augauuauguuaucagagg

SEQ ID NO: 2512791 - RNA, 19 nt, Artificial Sequence
  Description of Artificial Sequence: Synthetic oligonucleotide
  Antisense strand to SEQ ID NO: 2512790
ccucugauaacauaaucau

SEQ ID NO: 2512792 - RNA, 19 nt, Artificial Sequence
  Description of Artificial Sequence: Synthetic oligonucleotide
  Sense strand starting at position 2105 of SEQ ID NO: 1888127
cugugaagaauggguagaa

SEQ ID NO: 2512793 - RNA, 19 nt, Artificial Sequence
  Description of Artificial Sequence: Synthetic oligonucleotide
  Antisense strand to SEQ ID NO: 2512792
uucuacccauucuucacag

SEQ ID NO: 2512794 - RNA, 19 nt, Artificial Sequence
  Description of Artificial Sequence: Synthetic oligonucleotide
  Sense strand starting at position 2212 of SEQ ID NO: 1888127
agcugacaaaugugugaca

SEQ ID NO: 2512795 - RNA, 19 nt, Artificial Sequence
  Description of Artificial Sequence: Synthetic oligonucleotide
  Antisense strand to SEQ ID NO: 2512794
ugucacacauuugucagcu

SEQ ID NO: 2512796 - RNA, 19 nt, Artificial Sequence
  Description of Artificial Sequence: Synthetic oligonucleotide
  Sense strand starting at position 2214 of SEQ ID NO: 1888127
cugacaaaugugugacacu

SEQ ID NO: 2512797 - RNA, 19 nt, Artificial Sequence
  Description of Artificial Sequence: Synthetic oligonucleotide
  Antisense strand to SEQ ID NO: 2512796
agugucacacauuugucag

SEQ ID NO: 2512798 - RNA, 19 nt, Artificial Sequence
  Description of Artificial Sequence: Synthetic oligonucleotide
  Sense strand starting at position 2456 of SEQ ID NO: 1888127
auacaacucguagagcaaa

SEQ ID NO: 2512799 - RNA, 19 nt, Artificial Sequence
  Description of Artificial Sequence: Synthetic oligonucleotide
  Antisense strand to SEQ ID NO: 2512798
uuugcucuacgaguuguau

SEQ ID NO: 2512800 - RNA, 19 nt, Artificial Sequence
  Description of Artificial Sequence: Synthetic oligonucleotide
  Sense strand starting at position 2644 of SEQ ID NO: 1888127
gacagaccagguugucaau

SEQ ID NO: 2512801 - RNA, 19 nt, Artificial Sequence
  Description of Artificial Sequence: Synthetic oligonucleotide
  Antisense strand to SEQ ID NO: 2512800
auugacaaccuggucuguc

SEQ ID NO: 2512802 - RNA, 19 nt, Artificial Sequence
  Description of Artificial Sequence: Synthetic oligonucleotide
  Sense strand starting at position 2685 of SEQ ID NO: 1888127
uuuaguguuagguauaaac

SEQ ID NO: 2512803 - RNA, 19 nt, Artificial Sequence
  Description of Artificial Sequence: Synthetic oligonucleotide
  Antisense strand to SEQ ID NO: 2512802
guuuauaccuaacacuaaa

SEQ ID NO: 2512804 - RNA, 19 nt, Artificial Sequence
  Description of Artificial Sequence: Synthetic oligonucleotide
  Sense strand starting at position 2687 of SEQ ID NO: 1888127
uaguguuagguauaaacaa

SEQ ID NO: 2512805 - RNA, 19 nt, Artificial Sequence
  Description of Artificial Sequence: Synthetic oligonucleotide
  Antisense strand to SEQ ID NO: 2512804
uuguuuauaccuaacacua

SEQ ID NO: 2512806 - RNA, 19 nt, Artificial Sequence
  Description of Artificial Sequence: Synthetic oligonucleotide
  Sense strand starting at position 2733 of SEQ ID NO: 1888127
uuuggagaucuugaugcuu

SEQ ID NO: 2512807 - RNA, 19 nt, Artificial Sequence
  Description of Artificial Sequence: Synthetic oligonucleotide
  Antisense strand to SEQ ID NO: 2512806
aagcaucaagaucuccaaa

SEQ ID NO: 2512808 - RNA, 19 nt, Artificial Sequence
  Description of Artificial Sequence: Synthetic oligonucleotide
  Sense strand starting at position 2738 of SEQ ID NO: 1888127
agaucuugaugcuuccauu

SEQ ID NO: 2512809 - RNA, 19 nt, Artificial Sequence
  Description of Artificial Sequence: Synthetic oligonucleotide
  Antisense strand to SEQ ID NO: 2512808
aauggaagcaucaagaucu

SEQ ID NO: 2512810 - RNA, 19 nt, Artificial Sequence
  Description of Artificial Sequence: Synthetic oligonucleotide
  Sense strand starting at position 2898 of SEQ ID NO: 1888127
agagaauaaucuguuauuc

SEQ ID NO: 2512811 - RNA, 19 nt, Artificial Sequence
  Description of Artificial Sequence: Synthetic oligonucleotide
  Antisense strand to SEQ ID NO: 2512810
gaauaacagauuauucucu

SEQ ID NO: 2512812 - RNA, 19 nt, Artificial Sequence
  Description of Artificial Sequence: Synthetic oligonucleotide
  Sense strand starting at position 2981 of SEQ ID NO: 1888127
uguaauaaugcugaguaac

SEQ ID NO: 2512813 - RNA, 19 nt, Artificial Sequence
  Description of Artificial Sequence: Synthetic oligonucleotide
  Antisense strand to SEQ ID NO: 2512812
guuacucagcauuauuaca

SEQ ID NO: 2512814 - RNA, 19 nt, Artificial Sequence
  Description of Artificial Sequence: Synthetic oligonucleotide
  Sense strand starting at position 3264 of SEQ ID NO: 1888127
cuaggcuuggcucaggauu

SEQ ID NO: 2512815 - RNA, 19 nt, Artificial Sequence
  Description of Artificial Sequence: Synthetic oligonucleotide
  Antisense strand to SEQ ID NO: 2512814
aauccugagccaagccuag

SEQ ID NO: 2512816 - RNA, 19 nt, Artificial Sequence
  Description of Artificial Sequence: Synthetic oligonucleotide
  Sense strand starting at position 3303 of SEQ ID NO: 1888127
guuccauuggccugaacaa

SEQ ID NO: 2512817 - RNA, 19 nt, Artificial Sequence
  Description of Artificial Sequence: Synthetic oligonucleotide
  Antisense strand to SEQ ID NO: 2512816
uuguucaggccaauggaac

SEQ ID NO: 2512818 - RNA, 19 nt, Artificial Sequence
  Description of Artificial Sequence: Synthetic oligonucleotide
  Sense strand starting at position 3356 of SEQ ID NO: 1888127
gcaagacuucagugggaug

SEQ ID NO: 2512819 - RNA, 19 nt, Artificial Sequence
  Description of Artificial Sequence: Synthetic oligonucleotide
  Antisense strand to SEQ ID NO: 2512818
caucccacugaagucuugc

SEQ ID NO: 2512820 - RNA, 19 nt, Artificial Sequence
  Description of Artificial Sequence: Synthetic oligonucleotide
  Sense strand starting at position 3857 of SEQ ID NO: 1888127
gccaucaguguuuauacaa

SEQ ID NO: 2512821 - RNA, 19 nt, Artificial Sequence
  Description of Artificial Sequence: Synthetic oligonucleotide
  Antisense strand to SEQ ID NO: 2512820
uuguauaaacacugauggc

SEQ ID NO: 2512822 - RNA, 19 nt, Artificial Sequence
  Description of Artificial Sequence: Synthetic oligonucleotide
  Sense strand starting at position 3917 of SEQ ID NO: 1888127
gaaagauaugugugcuaau

SEQ ID NO: 2512823 - RNA, 19 nt, Artificial Sequence
  Description of Artificial Sequence: Synthetic oligonucleotide
  Antisense strand to SEQ ID NO: 2512822
auuagcacacauaucuuuc

SEQ ID NO: 2512824 - RNA, 19 nt, Artificial Sequence
  Description of Artificial Sequence: Synthetic oligonucleotide
  Sense strand starting at position 3918 of SEQ ID NO: 1888127
aaagauaugugugcuaaua

SEQ ID NO: 2512825 - RNA, 19 nt, Artificial Sequence
  Description of Artificial Sequence: Synthetic oligonucleotide
  Antisense strand to SEQ ID NO: 2512824
uauuagcacacauaucuuu

SEQ ID NO: 2512826 - RNA, 19 nt, Artificial Sequence
  Description of Artificial Sequence: Synthetic oligonucleotide
  Sense strand starting at position 40 of SEQ ID NO: 1888128
gguggcuuaugccuauaga

SEQ ID NO: 2512827 - RNA, 19 nt, Artificial Sequence
  Description of Artificial Sequence: Synthetic oligonucleotide
  Antisense strand to SEQ ID NO: 2512826
ucuauaggcauaagccacc

SEQ ID NO: 2512828 - RNA, 19 nt, Artificial Sequence
  Description of Artificial Sequence: Synthetic oligonucleotide
  Sense strand starting at position 41 of SEQ ID NO: 1888128
guggcuuaugccuauagac

SEQ ID NO: 2512829 - RNA, 19 nt, Artificial Sequence
  Description of Artificial Sequence: Synthetic oligonucleotide
  Antisense strand to SEQ ID NO: 2512828
gucuauaggcauaagccac

SEQ ID NO: 2512830 - RNA, 19 nt, Artificial Sequence
  Description of Artificial Sequence: Synthetic oligonucleotide
  Sense strand starting at position 369 of SEQ ID NO: 1888128
cuaugauguggcugcauuu

SEQ ID NO: 2512831 - RNA, 19 nt, Artificial Sequence
  Description of Artificial Sequence: Synthetic oligonucleotide
  Antisense strand to SEQ ID NO: 2512830
aaaugcagccacaucauag

SEQ ID NO: 2512832 - RNA, 19 nt, Artificial Sequence
  Description of Artificial Sequence: Synthetic oligonucleotide
  Sense strand starting at position 387 of SEQ ID NO: 1888128
uccaucaugcauuguccua

SEQ ID NO: 2512833 - RNA, 19 nt, Artificial Sequence
  Description of Artificial Sequence: Synthetic oligonucleotide
  Antisense strand to SEQ ID NO: 2512832
uaggacaaugcaugaugga

SEQ ID NO: 2512834 - RNA, 19 nt, Artificial Sequence
  Description of Artificial Sequence: Synthetic oligonucleotide
  Sense strand starting at position 1344 of SEQ ID NO: 1888128
agcaguuucugggaaacag

SEQ ID NO: 2512835 - RNA, 19 nt, Artificial Sequence
  Description of Artificial Sequence: Synthetic oligonucleotide
  Antisense strand to SEQ ID NO: 2512834
cuguuucccagaaacugcu

SEQ ID NO: 2512836 - RNA, 19 nt, Artificial Sequence
  Description of Artificial Sequence: Synthetic oligonucleotide
  Sense strand starting at position 1813 of SEQ ID NO: 1888128
gcaggaguuccuugggaga

SEQ ID NO: 2512837 - RNA, 19 nt, Artificial Sequence
  Description of Artificial Sequence: Synthetic oligonucleotide
  Antisense strand to SEQ ID NO: 2512836
ucucccaaggaacuccugc

SEQ ID NO: 2512838 - RNA, 19 nt, Artificial Sequence
  Description of Artificial Sequence: Synthetic oligonucleotide
  Sense strand starting at position 1907 of SEQ ID NO: 1888128
uggcaagcacuguacaaau

SEQ ID NO: 2512839 - RNA, 19 nt, Artificial Sequence
  Description of Artificial Sequence: Synthetic oligonucleotide
  Antisense strand to SEQ ID NO: 2512838
auuuguacagugcuugcca

SEQ ID NO: 2512840 - RNA, 19 nt, Artificial Sequence
  Description of Artificial Sequence: Synthetic oligonucleotide
  Sense strand starting at position 2239 of SEQ ID NO: 1888128
gacccuuccguguacuuga

SEQ ID NO: 2512841 - RNA, 19 nt, Artificial Sequence
  Description of Artificial Sequence: Synthetic oligonucleotide
  Antisense strand to SEQ ID NO: 2512840
ucaaguacacggaaggguc

SEQ ID NO: 2512842 - RNA, 19 nt, Artificial Sequence
  Description of Artificial Sequence: Synthetic oligonucleotide
  Sense strand starting at position 2606 of SEQ ID NO: 1888128
aagagucugucagggagaa

SEQ ID NO: 2512843 - RNA, 19 nt, Artificial Sequence
  Description of Artificial Sequence: Synthetic oligonucleotide
  Antisense strand to SEQ ID NO: 2512842
uucucccugacagacucuu

SEQ ID NO: 2512844 - RNA, 19 nt, Artificial Sequence
  Description of Artificial Sequence: Synthetic oligonucleotide
  Sense strand starting at position 2691 of SEQ ID NO: 1888128
gugucucagccaugggcaa

SEQ ID NO: 2512845 - RNA, 19 nt, Artificial Sequence
  Description of Artificial Sequence: Synthetic oligonucleotide
  Antisense strand to SEQ ID NO: 2512844
uugcccauggcugagacac

SEQ ID NO: 2512846 - RNA, 19 nt, Artificial Sequence
  Description of Artificial Sequence: Synthetic oligonucleotide
  Sense strand starting at position 2723 of SEQ ID NO: 1888128
guggaaugaaauugcuguu

SEQ ID NO: 2512847 - RNA, 19 nt, Artificial Sequence
  Description of Artificial Sequence: Synthetic oligonucleotide
  Antisense strand to SEQ ID NO: 2512846
aacagcaauuucauuccac

SEQ ID NO: 2512848 - RNA, 19 nt, Artificial Sequence
  Description of Artificial Sequence: Synthetic oligonucleotide
  Sense strand starting at position 2738 of SEQ ID NO: 1888128
uguuuagaucugggacaca

SEQ ID NO: 2512849 - RNA, 19 nt, Artificial Sequence
  Description of Artificial Sequence: Synthetic oligonucleotide
  Antisense strand to SEQ ID NO: 2512848
ugugucccagaucuaaaca

SEQ ID NO: 2512850 - RNA, 19 nt, Artificial Sequence
  Description of Artificial Sequence: Synthetic oligonucleotide
  Sense strand starting at position 2797 of SEQ ID NO: 1888128
ugaacaugauuauaagaac

SEQ ID NO: 2512851 - RNA, 19 nt, Artificial Sequence
  Description of Artificial Sequence: Synthetic oligonucleotide
  Antisense strand to SEQ ID NO: 2512850
guucuuauaaucauguuca

SEQ ID NO: 2512852 - RNA, 19 nt, Artificial Sequence
  Description of Artificial Sequence: Synthetic oligonucleotide
  Sense strand starting at position 2854 of SEQ ID NO: 1888128
gguucugugcucucucagu

SEQ ID NO: 2512853 - RNA, 19 nt, Artificial Sequence
  Description of Artificial Sequence: Synthetic oligonucleotide
  Antisense strand to SEQ ID NO: 2512852
acugagagagcacagaacc

SEQ ID NO: 2512854 - RNA, 19 nt, Artificial Sequence
  Description of Artificial Sequence: Synthetic oligonucleotide
  Sense strand starting at position 2865 of SEQ ID NO: 1888128
cucucaguacuguguucua

SEQ ID NO: 2512855 - RNA, 19 nt, Artificial Sequence
  Description of Artificial Sequence: Synthetic oligonucleotide
  Antisense strand to SEQ ID NO: 2512854
uagaacacaguacugagag

SEQ ID NO: 2512856 - RNA, 19 nt, Artificial Sequence
  Description of Artificial Sequence: Synthetic oligonucleotide
  Sense strand starting at position 2868 of SEQ ID NO: 1888128
ucaguacuguguucuaguu

SEQ ID NO: 2512857 - RNA, 19 nt, Artificial Sequence
  Description of Artificial Sequence: Synthetic oligonucleotide
  Antisense strand to SEQ ID NO: 2512856
aacuagaacacaguacuga

SEQ ID NO: 2512858 - RNA, 19 nt, Artificial Sequence
  Description of Artificial Sequence: Synthetic oligonucleotide
  Sense strand starting at position 2907 of SEQ ID NO: 1888128
cugaacuugguguguaacu

SEQ ID NO: 2512859 - RNA, 19 nt, Artificial Sequence
  Description of Artificial Sequence: Synthetic oligonucleotide
  Antisense strand to SEQ ID NO: 2512858
aguuacacaccaaguucag

SEQ ID NO: 2512860 - RNA, 19 nt, Artificial Sequence
  Description of Artificial Sequence: Synthetic oligonucleotide
  Sense strand starting at position 2908 of SEQ ID NO: 1888128
ugaacuugguguguaacuu

SEQ ID NO: 2512861 - RNA, 19 nt, Artificial Sequence
  Description of Artificial Sequence: Synthetic oligonucleotide
  Antisense strand to SEQ ID NO: 2512860
aaguuacacaccaaguuca

SEQ ID NO: 2512862 - RNA, 19 nt, Artificial Sequence
  Description of Artificial Sequence: Synthetic oligonucleotide
  Sense strand starting at position 2930 of SEQ ID NO: 1888128
uaauuaugucuauguaagg

SEQ ID NO: 2512863 - RNA, 19 nt, Artificial Sequence
  Description of Artificial Sequence: Synthetic oligonucleotide
  Antisense strand to SEQ ID NO: 2512862
ccuuacauagacauaauua

SEQ ID NO: 2512864 - RNA, 19 nt, Artificial Sequence
  Description of Artificial Sequence: Synthetic oligonucleotide
  Sense strand starting at position 2931 of SEQ ID NO: 1888128
aauuaugucuauguaaggu

SEQ ID NO: 2512865 - RNA, 19 nt, Artificial Sequence
  Description of Artificial Sequence: Synthetic oligonucleotide
  Antisense strand to SEQ ID NO: 2512864
accuuacauagacauaauu

SEQ ID NO: 2512866 - RNA, 19 nt, Artificial Sequence
  Description of Artificial Sequence: Synthetic oligonucleotide
  Sense strand starting at position 2939 of SEQ ID NO: 1888128
cuauguaagguaugucuau

SEQ ID NO: 2512867 - RNA, 19 nt, Artificial Sequence
  Description of Artificial Sequence: Synthetic oligonucleotide
  Antisense strand to SEQ ID NO: 2512866
auagacauaccuuacauag

SEQ ID NO: 2512868 - RNA, 19 nt, Artificial Sequence
  Description of Artificial Sequence: Synthetic oligonucleotide
  Sense strand starting at position 2951 of SEQ ID NO: 1888128
ugucuauguaugugagugu

SEQ ID NO: 2512869 - RNA, 19 nt, Artificial Sequence
  Description of Artificial Sequence: Synthetic oligonucleotide
  Antisense strand to SEQ ID NO: 2512868
acacucacauacauagaca

SEQ ID NO: 2512870 - RNA, 19 nt, Artificial Sequence
  Description of Artificial Sequence: Synthetic oligonucleotide
  Sense strand starting at position 2979 of SEQ ID NO: 1888128
cucuaaagucgugauaaag

SEQ ID NO: 2512871 - RNA, 19 nt, Artificial Sequence
  Description of Artificial Sequence: Synthetic oligonucleotide
  Antisense strand to SEQ ID NO: 2512870
cuuuaucacgacuuuagag

SEQ ID NO: 2512872 - RNA, 19 nt, Artificial Sequence
  Description of Artificial Sequence: Synthetic oligonucleotide
  Sense strand starting at position 2988 of SEQ ID NO: 1888128
cgugauaaagcacguucaa

SEQ ID NO: 2512873 - RNA, 19 nt, Artificial Sequence
  Description of Artificial Sequence: Synthetic oligonucleotide
  Antisense strand to SEQ ID NO: 2512872
uugaacgugcuuuaucacg

SEQ ID NO: 2512874 - RNA, 19 nt, Artificial Sequence
  Description of Artificial Sequence: Synthetic oligonucleotide
  Sense strand starting at position 3029 of SEQ ID NO: 1888128
ucuugugugcuccaccaca

SEQ ID NO: 2512875 - RNA, 19 nt, Artificial Sequence
  Description of Artificial Sequence: Synthetic oligonucleotide
  Antisense strand to SEQ ID NO: 2512874
ugugguggagcacacaaga

SEQ ID NO: 2512876 - RNA, 19 nt, Artificial Sequence
  Description of Artificial Sequence: Synthetic oligonucleotide
  Sense strand starting at position 3062 of SEQ ID NO: 1888128
ucagacaguuccguuuaca

SEQ ID NO: 2512877 - RNA, 19 nt, Artificial Sequence
  Description of Artificial Sequence: Synthetic oligonucleotide
  Antisense strand to SEQ ID NO: 2512876
uguaaacggaacugucuga

SEQ ID NO: 2512878 - RNA, 19 nt, Artificial Sequence
  Description of Artificial Sequence: Synthetic oligonucleotide
  Sense strand starting at position 3065 of SEQ ID NO: 1888128
gacaguuccguuuacacac

SEQ ID NO: 2512879 - RNA, 19 nt, Artificial Sequence
  Description of Artificial Sequence: Synthetic oligonucleotide
  Antisense strand to SEQ ID NO: 2512878
guguguaaacggaacuguc

SEQ ID NO: 2512880 - RNA, 19 nt, Artificial Sequence
  Description of Artificial Sequence: Synthetic oligonucleotide
  Sense strand starting at position 3234 of SEQ ID NO: 1888128
accugugaaucugaucaug

SEQ ID NO: 2512881 - RNA, 19 nt, Artificial Sequence
  Description of Artificial Sequence: Synthetic oligonucleotide
  Antisense strand to SEQ ID NO: 2512880
caugaucagauucacaggu

SEQ ID NO: 2512882 - RNA, 19 nt, Artificial Sequence
  Description of Artificial Sequence: Synthetic oligonucleotide
  Sense strand starting at position 3236 of SEQ ID NO: 1888128
cugugaaucugaucaugua

SEQ ID NO: 2512883 - RNA, 19 nt, Artificial Sequence
  Description of Artificial Sequence: Synthetic oligonucleotide
  Antisense strand to SEQ ID NO: 2512882
uacaugaucagauucacag

SEQ ID NO: 2512884 - RNA, 19 nt, Artificial Sequence
  Description of Artificial Sequence: Synthetic oligonucleotide
  Sense strand starting at position 3237 of SEQ ID NO: 1888128
ugugaaucugaucauguag

SEQ ID NO: 2512885 - RNA, 19 nt, Artificial Sequence
  Description of Artificial Sequence: Synthetic oligonucleotide
  Antisense strand to SEQ ID NO: 2512884
cuacaugaucagauucaca

SEQ ID NO: 2512886 - RNA, 19 nt, Artificial Sequence
  Description of Artificial Sequence: Synthetic oligonucleotide
  Sense strand starting at position 3251 of SEQ ID NO: 1888128
uguagaauaugguucuuag

SEQ ID NO: 2512887 - RNA, 19 nt, Artificial Sequence
  Description of Artificial Sequence: Synthetic oligonucleotide
  Antisense strand to SEQ ID NO: 2512886
cuaagaaccauauucuaca

SEQ ID NO: 2512888 - RNA, 19 nt, Artificial Sequence
  Description of Artificial Sequence: Synthetic oligonucleotide
  Sense strand starting at position 3254 of SEQ ID NO: 1888128
agaauaugguucuuagacu

SEQ ID NO: 2512889 - RNA, 19 nt, Artificial Sequence
  Description of Artificial Sequence: Synthetic oligonucleotide
  Antisense strand to SEQ ID NO: 2512888
agucuaagaaccauauucu

SEQ ID NO: 2512890 - RNA, 19 nt, Artificial Sequence
  Description of Artificial Sequence: Synthetic oligonucleotide
  Sense strand starting at position 3255 of SEQ ID NO: 1888128
gaauaugguucuuagacua

SEQ ID NO: 2512891 - RNA, 19 nt, Artificial Sequence
  Description of Artificial Sequence: Synthetic oligonucleotide
  Antisense strand to SEQ ID NO: 2512890
uagucuaagaaccauauuc

SEQ ID NO: 2512892 - RNA, 19 nt, Artificial Sequence
  Description of Artificial Sequence: Synthetic oligonucleotide
  Sense strand starting at position 3556 of SEQ ID NO: 1888128
cuaggugauaggugagaga

SEQ ID NO: 2512893 - RNA, 19 nt, Artificial Sequence
  Description of Artificial Sequence: Synthetic oligonucleotide
  Antisense strand to SEQ ID NO: 2512892
ucucucaccuaucaccuag

SEQ ID NO: 2512894 - RNA, 19 nt, Artificial Sequence
  Description of Artificial Sequence: Synthetic oligonucleotide
  Sense strand starting at position 3755 of SEQ ID NO: 1888128
cugaaacuuuggguuauag

SEQ ID NO: 2512895 - RNA, 19 nt, Artificial Sequence
  Description of Artificial Sequence: Synthetic oligonucleotide
  Antisense strand to SEQ ID NO: 2512894
cuauaacccaaaguuucag

SEQ ID NO: 2512896 - RNA, 19 nt, Artificial Sequence
  Description of Artificial Sequence: Synthetic oligonucleotide
  Sense strand starting at position 3757 of SEQ ID NO: 1888128
gaaacuuuggguuauaguc

SEQ ID NO: 2512897 - RNA, 19 nt, Artificial Sequence
  Description of Artificial Sequence: Synthetic oligonucleotide
  Antisense strand to SEQ ID NO: 2512896
gacuauaacccaaaguuuc

SEQ ID NO: 2512898 - RNA, 19 nt, Artificial Sequence
  Description of Artificial Sequence: Synthetic oligonucleotide
  Sense strand starting at position 3764 of SEQ ID NO: 1888128
uggguuauagucugcuaag

SEQ ID NO: 2512899 - RNA, 19 nt, Artificial Sequence
  Description of Artificial Sequence: Synthetic oligonucleotide
  Antisense strand to SEQ ID NO: 2512898
cuuagcagacuauaaccca

SEQ ID NO: 2512900 - RNA, 19 nt, Artificial Sequence
  Description of Artificial Sequence: Synthetic oligonucleotide
  Sense strand starting at position 3765 of SEQ ID NO: 1888128
ggguuauagucugcuaagg

SEQ ID NO: 2512901 - RNA, 19 nt, Artificial Sequence
  Description of Artificial Sequence: Synthetic oligonucleotide
  Antisense strand to SEQ ID NO: 2512900
ccuuagcagacuauaaccc

SEQ ID NO: 2512902 - RNA, 19 nt, Artificial Sequence
  Description of Artificial Sequence: Synthetic oligonucleotide
  Sense strand starting at position 3862 of SEQ ID NO: 1888128
gcugacguugccuuaaugu

SEQ ID NO: 2512903 - RNA, 19 nt, Artificial Sequence
  Description of Artificial Sequence: Synthetic oligonucleotide
  Antisense strand to SEQ ID NO: 2512902
acauuaaggcaacgucagc

SEQ ID NO: 2512904 - RNA, 19 nt, Artificial Sequence
  Description of Artificial Sequence: Synthetic oligonucleotide
  Sense strand starting at position 3870 of SEQ ID NO: 1888128
ugccuuaaugugcaucauu

SEQ ID NO: 2512905 - RNA, 19 nt, Artificial Sequence
  Description of Artificial Sequence: Synthetic oligonucleotide
  Antisense strand to SEQ ID NO: 2512904
aaugaugcacauuaaggca

SEQ ID NO: 2512906 - RNA, 19 nt, Artificial Sequence
  Description of Artificial Sequence: Synthetic oligonucleotide
  Sense strand starting at position 423 of SEQ ID NO: 1888129
aaaggacguugggaagaau

SEQ ID NO: 2512907 - RNA, 19 nt, Artificial Sequence
  Description of Artificial Sequence: Synthetic oligonucleotide
  Antisense strand to SEQ ID NO: 2512906
auucuucccaacguccuuu

SEQ ID NO: 2512908 - RNA, 19 nt, Artificial Sequence
  Description of Artificial Sequence: Synthetic oligonucleotide
  Sense strand starting at position 526 of SEQ ID NO: 1888129
accuuuacaugagaugaua

SEQ ID NO: 2512909 - RNA, 19 nt, Artificial Sequence
  Description of Artificial Sequence: Synthetic oligonucleotide
  Antisense strand to SEQ ID NO: 2512908
uaucaucucauguaaaggu

SEQ ID NO: 2512910 - RNA, 19 nt, Artificial Sequence
  Description of Artificial Sequence: Synthetic oligonucleotide
  Sense strand starting at position 877 of SEQ ID NO: 1888129
aggcuauuauccuuggcuu

SEQ ID NO: 2512911 - RNA, 19 nt, Artificial Sequence
  Description of Artificial Sequence: Synthetic oligonucleotide
  Antisense strand to SEQ ID NO: 2512910
aagccaaggauaauagccu

SEQ ID NO: 2512912 - RNA, 19 nt, Artificial Sequence
  Description of Artificial Sequence: Synthetic oligonucleotide
  Sense strand starting at position 878 of SEQ ID NO: 1888129
ggcuauuauccuuggcuug

SEQ ID NO: 2512913 - RNA, 19 nt, Artificial Sequence
  Description of Artificial Sequence: Synthetic oligonucleotide
  Antisense strand to SEQ ID NO: 2512912
caagccaaggauaauagcc

SEQ ID NO: 2512914 - RNA, 19 nt, Artificial Sequence
  Description of Artificial Sequence: Synthetic oligonucleotide
  Sense strand starting at position 1651 of SEQ ID NO: 1888129
gagugagauuccgacuauu

SEQ ID NO: 2512915 - RNA, 19 nt, Artificial Sequence
  Description of Artificial Sequence: Synthetic oligonucleotide
  Antisense strand to SEQ ID NO: 2512914
aauagucggaaucucacuc

SEQ ID NO: 2512916 - RNA, 19 nt, Artificial Sequence
  Description of Artificial Sequence: Synthetic oligonucleotide
  Sense strand starting at position 1859 of SEQ ID NO: 1888129
uggucagcccuccgagaau

SEQ ID NO: 2512917 - RNA, 19 nt, Artificial Sequence
  Description of Artificial Sequence: Synthetic oligonucleotide
  Antisense strand to SEQ ID NO: 2512916
auucucggagggcugacca

SEQ ID NO: 2512918 - RNA, 19 nt, Artificial Sequence
  Description of Artificial Sequence: Synthetic oligonucleotide
  Sense strand starting at position 1887 of SEQ ID NO: 1888129
cggagaccauccuguuaaa

SEQ ID NO: 2512919 - RNA, 19 nt, Artificial Sequence
  Description of Artificial Sequence: Synthetic oligonucleotide
  Antisense strand to SEQ ID NO: 2512918
uuuaacaggauggucuccg

SEQ ID NO: 2512920 - RNA, 19 nt, Artificial Sequence
  Description of Artificial Sequence: Synthetic oligonucleotide
  Sense strand starting at position 2255 of SEQ ID NO: 1888129
cggucuucugcuucgguua

SEQ ID NO: 2512921 - RNA, 19 nt, Artificial Sequence
  Description of Artificial Sequence: Synthetic oligonucleotide
  Antisense strand to SEQ ID NO: 2512920
uaaccgaagcagaagaccg

SEQ ID NO: 2512922 - RNA, 19 nt, Artificial Sequence
  Description of Artificial Sequence: Synthetic oligonucleotide
  Sense strand starting at position 2425 of SEQ ID NO: 1888129
ggugaacugucagcugaaa

SEQ ID NO: 2512923 - RNA, 19 nt, Artificial Sequence
  Description of Artificial Sequence: Synthetic oligonucleotide
  Antisense strand to SEQ ID NO: 2512922
uuucagcugacaguucacc

SEQ ID NO: 2512924 - RNA, 19 nt, Artificial Sequence
  Description of Artificial Sequence: Synthetic oligonucleotide
  Sense strand starting at position 2641 of SEQ ID NO: 1888129
gugggucuuugaggccaua

SEQ ID NO: 2512925 - RNA, 19 nt, Artificial Sequence
  Description of Artificial Sequence: Synthetic oligonucleotide
  Antisense strand to SEQ ID NO: 2512924
uauggccucaaagacccac

SEQ ID NO: 2512926 - RNA, 19 nt, Artificial Sequence
  Description of Artificial Sequence: Synthetic oligonucleotide
  Sense strand starting at position 2662 of SEQ ID NO: 1888129
gggugaugcugagacggau

SEQ ID NO: 2512927 - RNA, 19 nt, Artificial Sequence
  Description of Artificial Sequence: Synthetic oligonucleotide
  Antisense strand to SEQ ID NO: 2512926
auccgucucagcaucaccc

SEQ ID NO: 2512928 - RNA, 19 nt, Artificial Sequence
  Description of Artificial Sequence: Synthetic oligonucleotide
  Sense strand starting at position 2678 of SEQ ID NO: 1888129
gauagugacguccagaugu

SEQ ID NO: 2512929 - RNA, 19 nt, Artificial Sequence
  Description of Artificial Sequence: Synthetic oligonucleotide
  Antisense strand to SEQ ID NO: 2512928
acaucuggacgucacuauc

SEQ ID NO: 2512930 - RNA, 19 nt, Artificial Sequence
  Description of Artificial Sequence: Synthetic oligonucleotide
  Sense strand starting at position 2984 of SEQ ID NO: 1888129
cggaauggcccucaggaau

SEQ ID NO: 2512931 - RNA, 19 nt, Artificial Sequence
  Description of Artificial Sequence: Synthetic oligonucleotide
  Antisense strand to SEQ ID NO: 2512930
auuccugagggccauuccg

SEQ ID NO: 2512932 - RNA, 19 nt, Artificial Sequence
  Description of Artificial Sequence: Synthetic oligonucleotide
  Sense strand starting at position 3254 of SEQ ID NO: 1888129
uggacugagaaguguucuu

SEQ ID NO: 2512933 - RNA, 19 nt, Artificial Sequence
  Description of Artificial Sequence: Synthetic oligonucleotide
  Antisense strand to SEQ ID NO: 2512932
aagaacacuucucagucca

SEQ ID NO: 2512934 - RNA, 19 nt, Artificial Sequence
  Description of Artificial Sequence: Synthetic oligonucleotide
  Sense strand starting at position 3259 of SEQ ID NO: 1888129
ugagaaguguucuuuguug

SEQ ID NO: 2512935 - RNA, 19 nt, Artificial Sequence
  Description of Artificial Sequence: Synthetic oligonucleotide
  Antisense strand to SEQ ID NO: 2512934
caacaaagaacacuucuca

SEQ ID NO: 2512936 - RNA, 19 nt, Artificial Sequence
  Description of Artificial Sequence: Synthetic oligonucleotide
  Sense strand starting at position 3261 of SEQ ID NO: 1888129
agaaguguucuuuguugaa

SEQ ID NO: 2512937 - RNA, 19 nt, Artificial Sequence
  Description of Artificial Sequence: Synthetic oligonucleotide
  Antisense strand to SEQ ID NO: 2512936
uucaacaaagaacacuucu

SEQ ID NO: 2512938 - RNA, 19 nt, Artificial Sequence
  Description of Artificial Sequence: Synthetic oligonucleotide
  Sense strand starting at position 3938 of SEQ ID NO: 1888129
cuggauccaggguaaaguu

SEQ ID NO: 2512939 - RNA, 19 nt, Artificial Sequence
  Description of Artificial Sequence: Synthetic oligonucleotide
  Antisense strand to SEQ ID NO: 2512938
aacuuuacccuggauccag

SEQ ID NO: 2512940 - RNA, 19 nt, Artificial Sequence
  Description of Artificial Sequence: Synthetic oligonucleotide
  Sense strand starting at position 220 of SEQ ID NO: 1888130
uccugagaaggcuguaguu

SEQ ID NO: 2512941 - RNA, 19 nt, Artificial Sequence
  Description of Artificial Sequence: Synthetic oligonucleotide
  Antisense strand to SEQ ID NO: 2512940
aacuacagccuucucagga

SEQ ID NO: 2512942 - RNA, 19 nt, Artificial Sequence
  Description of Artificial Sequence: Synthetic oligonucleotide
  Sense strand starting at position 455 of SEQ ID NO: 1888130
uucguaagccauugugaug

SEQ ID NO: 2512943 - RNA, 19 nt, Artificial Sequence
  Description of Artificial Sequence: Synthetic oligonucleotide
  Antisense strand to SEQ ID NO: 2512942
caucacaauggcuuacgaa

SEQ ID NO: 2512944 - RNA, 19 nt, Artificial Sequence
  Description of Artificial Sequence: Synthetic oligonucleotide
  Sense strand starting at position 466 of SEQ ID NO: 1888130
uugugauguuuacucaguu

SEQ ID NO: 2512945 - RNA, 19 nt, Artificial Sequence
  Description of Artificial Sequence: Synthetic oligonucleotide
  Antisense strand to SEQ ID NO: 2512944
aacugaguaaacaucacaa

SEQ ID NO: 2512946 - RNA, 19 nt, Artificial Sequence
  Description of Artificial Sequence: Synthetic oligonucleotide
  Sense strand starting at position 467 of SEQ ID NO: 1888130
ugugauguuuacucaguua

SEQ ID NO: 2512947 - RNA, 19 nt, Artificial Sequence
  Description of Artificial Sequence: Synthetic oligonucleotide
  Antisense strand to SEQ ID NO: 2512946
uaacugaguaaacaucaca

SEQ ID NO: 2512948 - RNA, 19 nt, Artificial Sequence
  Description of Artificial Sequence: Synthetic oligonucleotide
  Sense strand starting at position 478 of SEQ ID NO: 1888130
cucaguuacugaguuagca

SEQ ID NO: 2512949 - RNA, 19 nt, Artificial Sequence
  Description of Artificial Sequence: Synthetic oligonucleotide
  Antisense strand to SEQ ID NO: 2512948
ugcuaacucaguaacugag

SEQ ID NO: 2512950 - RNA, 19 nt, Artificial Sequence
  Description of Artificial Sequence: Synthetic oligonucleotide
  Sense strand starting at position 487 of SEQ ID NO: 1888130
ugaguuagcaacuguaaug

SEQ ID NO: 2512951 - RNA, 19 nt, Artificial Sequence
  Description of Artificial Sequence: Synthetic oligonucleotide
  Antisense strand to SEQ ID NO: 2512950
cauuacaguugcuaacuca

SEQ ID NO: 2512952 - RNA, 19 nt, Artificial Sequence
  Description of Artificial Sequence: Synthetic oligonucleotide
  Sense strand starting at position 1343 of SEQ ID NO: 1888130
gcaguaagccuagaucuug

SEQ ID NO: 2512953 - RNA, 19 nt, Artificial Sequence
  Description of Artificial Sequence: Synthetic oligonucleotide
  Antisense strand to SEQ ID NO: 2512952
caagaucuaggcuuacugc

SEQ ID NO: 2512954 - RNA, 19 nt, Artificial Sequence
  Description of Artificial Sequence: Synthetic oligonucleotide
  Sense strand starting at position 1942 of SEQ ID NO: 1888130
gccuuaguugagcacaguu

SEQ ID NO: 2512955 - RNA, 19 nt, Artificial Sequence
  Description of Artificial Sequence: Synthetic oligonucleotide
  Antisense strand to SEQ ID NO: 2512954
aacugugcucaacuaaggc

SEQ ID NO: 2512956 - RNA, 19 nt, Artificial Sequence
  Description of Artificial Sequence: Synthetic oligonucleotide
  Sense strand starting at position 2221 of SEQ ID NO: 1888130
ugaggagggcugugucaua

SEQ ID NO: 2512957 - RNA, 19 nt, Artificial Sequence
  Description of Artificial Sequence: Synthetic oligonucleotide
  Antisense strand to SEQ ID NO: 2512956
uaugacacagcccuccuca

SEQ ID NO: 2512958 - RNA, 19 nt, Artificial Sequence
  Description of Artificial Sequence: Synthetic oligonucleotide
  Sense strand starting at position 2406 of SEQ ID NO: 1888130
gauuacaugcgcuaugguu

SEQ ID NO: 2512959 - RNA, 19 nt, Artificial Sequence
  Description of Artificial Sequence: Synthetic oligonucleotide
  Antisense strand to SEQ ID NO: 2512958
aaccauagcgcauguaauc

SEQ ID NO: 2512960 - RNA, 19 nt, Artificial Sequence
  Description of Artificial Sequence: Synthetic oligonucleotide
  Sense strand starting at position 2512 of SEQ ID NO: 1888130
acuggaaagcgguaugaga

SEQ ID NO: 2512961 - RNA, 19 nt, Artificial Sequence
  Description of Artificial Sequence: Synthetic oligonucleotide
  Antisense strand to SEQ ID NO: 2512960
ucucauaccgcuuuccagu

SEQ ID NO: 2512962 - RNA, 19 nt, Artificial Sequence
  Description of Artificial Sequence: Synthetic oligonucleotide
  Sense strand starting at position 2519 of SEQ ID NO: 1888130
agcgguaugagagaaguuu

SEQ ID NO: 2512963 - RNA, 19 nt, Artificial Sequence
  Description of Artificial Sequence: Synthetic oligonucleotide
  Antisense strand to SEQ ID NO: 2512962
aaacuucucucauaccgcu

SEQ ID NO: 2512964 - RNA, 19 nt, Artificial Sequence
  Description of Artificial Sequence: Synthetic oligonucleotide
  Sense strand starting at position 2566 of SEQ ID NO: 1888130
gauuaagaugugugucacu

SEQ ID NO: 2512965 - RNA, 19 nt, Artificial Sequence
  Description of Artificial Sequence: Synthetic oligonucleotide
  Antisense strand to SEQ ID NO: 2512964
agugacacacaucuuaauc

SEQ ID NO: 2512966 - RNA, 19 nt, Artificial Sequence
  Description of Artificial Sequence: Synthetic oligonucleotide
  Sense strand starting at position 2573 of SEQ ID NO: 1888130
augugugucacuuggguuu

SEQ ID NO: 2512967 - RNA, 19 nt, Artificial Sequence
  Description of Artificial Sequence: Synthetic oligonucleotide
  Antisense strand to SEQ ID NO: 2512966
aaacccaagugacacacau

SEQ ID NO: 2512968 - RNA, 19 nt, Artificial Sequence
  Description of Artificial Sequence: Synthetic oligonucleotide
  Sense strand starting at position 2576 of SEQ ID NO: 1888130
ugugucacuuggguuuaua

SEQ ID NO: 2512969 - RNA, 19 nt, Artificial Sequence
  Description of Artificial Sequence: Synthetic oligonucleotide
  Antisense strand to SEQ ID NO: 2512968
uauaaacccaagugacaca

SEQ ID NO: 2512970 - RNA, 19 nt, Artificial Sequence
  Description of Artificial Sequence: Synthetic oligonucleotide
  Sense strand starting at position 2584 of SEQ ID NO: 1888130
uuggguuuauaccuugaau

SEQ ID NO: 2512971 - RNA, 19 nt, Artificial Sequence
  Description of Artificial Sequence: Synthetic oligonucleotide
  Antisense strand to SEQ ID NO: 2512970
auucaagguauaaacccaa

SEQ ID NO: 2512972 - RNA, 19 nt, Artificial Sequence
  Description of Artificial Sequence: Synthetic oligonucleotide
  Sense strand starting at position 2586 of SEQ ID NO: 1888130
ggguuuauaccuugaauau

SEQ ID NO: 2512973 - RNA, 19 nt, Artificial Sequence
  Description of Artificial Sequence: Synthetic oligonucleotide
  Antisense strand to SEQ ID NO: 2512972
auauucaagguauaaaccc

SEQ ID NO: 2512974 - RNA, 19 nt, Artificial Sequence
  Description of Artificial Sequence: Synthetic oligonucleotide
  Sense strand starting at position 2595 of SEQ ID NO: 1888130
ccuugaauauguguauauu

SEQ ID NO: 2512975 - RNA, 19 nt, Artificial Sequence
  Description of Artificial Sequence: Synthetic oligonucleotide
  Antisense strand to SEQ ID NO: 2512974
aauauacacauauucaagg

SEQ ID NO: 2512976 - RNA, 19 nt, Artificial Sequence
  Description of Artificial Sequence: Synthetic oligonucleotide
  Sense strand starting at position 2677 of SEQ ID NO: 1888130
auaagaguacuaugucuuu

SEQ ID NO: 2512977 - RNA, 19 nt, Artificial Sequence
  Description of Artificial Sequence: Synthetic oligonucleotide
  Antisense strand to SEQ ID NO: 2512976
aaagacauaguacucuuau

SEQ ID NO: 2512978 - RNA, 19 nt, Artificial Sequence
  Description of Artificial Sequence: Synthetic oligonucleotide
  Sense strand starting at position 2680 of SEQ ID NO: 1888130
agaguacuaugucuuuaug

SEQ ID NO: 2512979 - RNA, 19 nt, Artificial Sequence
  Description of Artificial Sequence: Synthetic oligonucleotide
  Antisense strand to SEQ ID NO: 2512978
cauaaagacauaguacucu

SEQ ID NO: 2512980 - RNA, 19 nt, Artificial Sequence
  Description of Artificial Sequence: Synthetic oligonucleotide
  Sense strand starting at position 2682 of SEQ ID NO: 1888130
aguacuaugucuuuaugcu

SEQ ID NO: 2512981 - RNA, 19 nt, Artificial Sequence
  Description of Artificial Sequence: Synthetic oligonucleotide
  Antisense strand to SEQ ID NO: 2512980
agcauaaagacauaguacu

SEQ ID NO: 2512982 - RNA, 19 nt, Artificial Sequence
  Description of Artificial Sequence: Synthetic oligonucleotide
  Sense strand starting at position 2683 of SEQ ID NO: 1888130
guacuaugucuuuaugcua

SEQ ID NO: 2512983 - RNA, 19 nt, Artificial Sequence
  Description of Artificial Sequence: Synthetic oligonucleotide
  Antisense strand to SEQ ID NO: 2512982
uagcauaaagacauaguac

SEQ ID NO: 2512984 - RNA, 19 nt, Artificial Sequence
  Description of Artificial Sequence: Synthetic oligonucleotide
  Sense strand starting at position 2728 of SEQ ID NO: 1888130
agagaagcccgagagcuuu

SEQ ID NO: 2512985 - RNA, 19 nt, Artificial Sequence
  Description of Artificial Sequence: Synthetic oligonucleotide
  Antisense strand to SEQ ID NO: 2512984
aaagcucucgggcuucucu

SEQ ID NO: 2512986 - RNA, 19 nt, Artificial Sequence
  Description of Artificial Sequence: Synthetic oligonucleotide
  Sense strand starting at position 2734 of SEQ ID NO: 1888130
gcccgagagcuuuacuuug

SEQ ID NO: 2512987 - RNA, 19 nt, Artificial Sequence
  Description of Artificial Sequence: Synthetic oligonucleotide
  Antisense strand to SEQ ID NO: 2512986
caaaguaaagcucucgggc

SEQ ID NO: 2512988 - RNA, 19 nt, Artificial Sequence
  Description of Artificial Sequence: Synthetic oligonucleotide
  Sense strand starting at position 2739 of SEQ ID NO: 1888130
agagcuuuacuuugagcua

SEQ ID NO: 2512989 - RNA, 19 nt, Artificial Sequence
  Description of Artificial Sequence: Synthetic oligonucleotide
  Antisense strand to SEQ ID NO: 2512988
uagcucaaaguaaagcucu

SEQ ID NO: 2512990 - RNA, 19 nt, Artificial Sequence
  Description of Artificial Sequence: Synthetic oligonucleotide
  Sense strand starting at position 2742 of SEQ ID NO: 1888130
gcuuuacuuugagcuauaa

SEQ ID NO: 2512991 - RNA, 19 nt, Artificial Sequence
  Description of Artificial Sequence: Synthetic oligonucleotide
  Antisense strand to SEQ ID NO: 2512990
uuauagcucaaaguaaagc

SEQ ID NO: 2512992 - RNA, 19 nt, Artificial Sequence
  Description of Artificial Sequence: Synthetic oligonucleotide
  Sense strand starting at position 2801 of SEQ ID NO: 1888130
aaaguuguuucucuaggaa

SEQ ID NO: 2512993 - RNA, 19 nt, Artificial Sequence
  Description of Artificial Sequence: Synthetic oligonucleotide
  Antisense strand to SEQ ID NO: 2512992
uuccuagagaaacaacuuu

SEQ ID NO: 2512994 - RNA, 19 nt, Artificial Sequence
  Description of Artificial Sequence: Synthetic oligonucleotide
  Sense strand starting at position 2804 of SEQ ID NO: 1888130
guuguuucucuaggaauua

SEQ ID NO: 2512995 - RNA, 19 nt, Artificial Sequence
  Description of Artificial Sequence: Synthetic oligonucleotide
  Antisense strand to SEQ ID NO: 2512994
uaauuccuagagaaacaac

SEQ ID NO: 2512996 - RNA, 19 nt, Artificial Sequence
  Description of Artificial Sequence: Synthetic oligonucleotide
  Sense strand starting at position 3206 of SEQ ID NO: 1888130
ggcaguauuaguuaucgaa

SEQ ID NO: 2512997 - RNA, 19 nt, Artificial Sequence
  Description of Artificial Sequence: Synthetic oligonucleotide
  Antisense strand to SEQ ID NO: 2512996
uucgauaacuaauacugcc

SEQ ID NO: 2512998 - RNA, 19 nt, Artificial Sequence
  Description of Artificial Sequence: Synthetic oligonucleotide
  Sense strand starting at position 3208 of SEQ ID NO: 1888130
caguauuaguuaucgaaac

SEQ ID NO: 2512999 - RNA, 19 nt, Artificial Sequence
  Description of Artificial Sequence: Synthetic oligonucleotide
  Antisense strand to SEQ ID NO: 2512998
guuucgauaacuaauacug

SEQ ID NO: 2513000 - RNA, 19 nt, Artificial Sequence
  Description of Artificial Sequence: Synthetic oligonucleotide
  Sense strand starting at position 3266 of SEQ ID NO: 1888130
gacagugauccagggcauu

SEQ ID NO: 2513001 - RNA, 19 nt, Artificial Sequence
  Description of Artificial Sequence: Synthetic oligonucleotide
  Antisense strand to SEQ ID NO: 2513000
aaugcccuggaucacuguc

SEQ ID NO: 2513002 - RNA, 19 nt, Artificial Sequence
  Description of Artificial Sequence: Synthetic oligonucleotide
  Sense strand starting at position 3278 of SEQ ID NO: 1888130
gggcauuggugagagauaa

SEQ ID NO: 2513003 - RNA, 19 nt, Artificial Sequence
  Description of Artificial Sequence: Synthetic oligonucleotide
  Antisense strand to SEQ ID NO: 2513002
uuaucucucaccaaugccc

SEQ ID NO: 2513004 - RNA, 19 nt, Artificial Sequence
  Description of Artificial Sequence: Synthetic oligonucleotide
  Sense strand starting at position 3408 of SEQ ID NO: 1888130
uauguaugaugaguccagu

SEQ ID NO: 2513005 - RNA, 19 nt, Artificial Sequence
  Description of Artificial Sequence: Synthetic oligonucleotide
  Antisense strand to SEQ ID NO: 2513004
acuggacucaucauacaua

SEQ ID NO: 2513006 - RNA, 19 nt, Artificial Sequence
  Description of Artificial Sequence: Synthetic oligonucleotide
  Sense strand starting at position 3411 of SEQ ID NO: 1888130
guaugaugaguccagucag

SEQ ID NO: 2513007 - RNA, 19 nt, Artificial Sequence
  Description of Artificial Sequence: Synthetic oligonucleotide
  Antisense strand to SEQ ID NO: 2513006
cugacuggacucaucauac

SEQ ID NO: 2513008 - RNA, 19 nt, Artificial Sequence
  Description of Artificial Sequence: Synthetic oligonucleotide
  Sense strand starting at position 3522 of SEQ ID NO: 1888130
ugguuucuacugugggcaa

SEQ ID NO: 2513009 - RNA, 19 nt, Artificial Sequence
  Description of Artificial Sequence: Synthetic oligonucleotide
  Antisense strand to SEQ ID NO: 2513008
uugcccacaguagaaacca

SEQ ID NO: 2513010 - RNA, 19 nt, Artificial Sequence
  Description of Artificial Sequence: Synthetic oligonucleotide
  Sense strand starting at position 3566 of SEQ ID NO: 1888130
gugaaagacgucgaacaca

SEQ ID NO: 2513011 - RNA, 19 nt, Artificial Sequence
  Description of Artificial Sequence: Synthetic oligonucleotide
  Antisense strand to SEQ ID NO: 2513010
uguguucgacgucuuucac

SEQ ID NO: 2513012 - RNA, 19 nt, Artificial Sequence
  Description of Artificial Sequence: Synthetic oligonucleotide
  Sense strand starting at position 3650 of SEQ ID NO: 1888130
uggacuaaagguuguguua

SEQ ID NO: 2513013 - RNA, 19 nt, Artificial Sequence
  Description of Artificial Sequence: Synthetic oligonucleotide
  Antisense strand to SEQ ID NO: 2513012
uaacacaaccuuuagucca

SEQ ID NO: 2513014 - RNA, 19 nt, Artificial Sequence
  Description of Artificial Sequence: Synthetic oligonucleotide
  Sense strand starting at position 3653 of SEQ ID NO: 1888130
acuaaagguuguguuaaua

SEQ ID NO: 2513015 - RNA, 19 nt, Artificial Sequence
  Description of Artificial Sequence: Synthetic oligonucleotide
  Antisense strand to SEQ ID NO: 2513014
uauuaacacaaccuuuagu

SEQ ID NO: 2513016 - RNA, 19 nt, Artificial Sequence
  Description of Artificial Sequence: Synthetic oligonucleotide
  Sense strand starting at position 3923 of SEQ ID NO: 1888130
ggacuucuaaggugugaua

SEQ ID NO: 2513017 - RNA, 19 nt, Artificial Sequence
  Description of Artificial Sequence: Synthetic oligonucleotide
  Antisense strand to SEQ ID NO: 2513016
uaucacaccuuagaagucc

SEQ ID NO: 2513018 - RNA, 19 nt, Artificial Sequence
  Description of Artificial Sequence: Synthetic oligonucleotide
  Sense strand starting at position 3925 of SEQ ID NO: 1888130
acuucuaaggugugauaac

SEQ ID NO: 2513019 - RNA, 19 nt, Artificial Sequence
  Description of Artificial Sequence: Synthetic oligonucleotide
  Antisense strand to SEQ ID NO: 2513018
guuaucacaccuuagaagu

SEQ ID NO: 2513020 - RNA, 19 nt, Artificial Sequence
  Description of Artificial Sequence: Synthetic oligonucleotide
  Sense strand starting at position 397 of SEQ ID NO: 1888131
acuuguuacguguaggaac

SEQ ID NO: 2513021 - RNA, 19 nt, Artificial Sequence
  Description of Artificial Sequence: Synthetic oligonucleotide
  Antisense strand to SEQ ID NO: 2513020
guuccuacacguaacaagu

SEQ ID NO: 2513022 - RNA, 19 nt, Artificial Sequence
  Description of Artificial Sequence: Synthetic oligonucleotide
  Sense strand starting at position 456 of SEQ ID NO: 1888131
uggcaauuaccaugaggaa

SEQ ID NO: 2513023 - RNA, 19 nt, Artificial Sequence
  Description of Artificial Sequence: Synthetic oligonucleotide
  Antisense strand to SEQ ID NO: 2513022
uuccucaugguaauugcca

SEQ ID NO: 2513024 - RNA, 19 nt, Artificial Sequence
  Description of Artificial Sequence: Synthetic oligonucleotide
  Sense strand starting at position 588 of SEQ ID NO: 1888131
uuagcauggauuugcgaau

SEQ ID NO: 2513025 - RNA, 19 nt, Artificial Sequence
  Description of Artificial Sequence: Synthetic oligonucleotide
  Antisense strand to SEQ ID NO: 2513024
auucgcaaauccaugcuaa

SEQ ID NO: 2513026 - RNA, 19 nt, Artificial Sequence
  Description of Artificial Sequence: Synthetic oligonucleotide
  Sense strand starting at position 599 of SEQ ID NO: 1888131
uugcgaauaguuuaucuaa

SEQ ID NO: 2513027 - RNA, 19 nt, Artificial Sequence
  Description of Artificial Sequence: Synthetic oligonucleotide
  Antisense strand to SEQ ID NO: 2513026
uuagauaaacuauucgcaa

SEQ ID NO: 2513028 - RNA, 19 nt, Artificial Sequence
  Description of Artificial Sequence: Synthetic oligonucleotide
  Sense strand starting at position 602 of SEQ ID NO: 1888131
cgaauaguuuaucuaaguu

SEQ ID NO: 2513029 - RNA, 19 nt, Artificial Sequence
  Description of Artificial Sequence: Synthetic oligonucleotide
  Antisense strand to SEQ ID NO: 2513028
aacuuagauaaacuauucg

SEQ ID NO: 2513030 - RNA, 19 nt, Artificial Sequence
  Description of Artificial Sequence: Synthetic oligonucleotide
  Sense strand starting at position 606 of SEQ ID NO: 1888131
uaguuuaucuaaguuguag

SEQ ID NO: 2513031 - RNA, 19 nt, Artificial Sequence
  Description of Artificial Sequence: Synthetic oligonucleotide
  Antisense strand to SEQ ID NO: 2513030
cuacaacuuagauaaacua

SEQ ID NO: 2513032 - RNA, 19 nt, Artificial Sequence
  Description of Artificial Sequence: Synthetic oligonucleotide
  Sense strand starting at position 612 of SEQ ID NO: 1888131
aucuaaguuguagggaaca

SEQ ID NO: 2513033 - RNA, 19 nt, Artificial Sequence
  Description of Artificial Sequence: Synthetic oligonucleotide
  Antisense strand to SEQ ID NO: 2513032
uguucccuacaacuuagau

SEQ ID NO: 2513034 - RNA, 19 nt, Artificial Sequence
  Description of Artificial Sequence: Synthetic oligonucleotide
  Sense strand starting at position 648 of SEQ ID NO: 1888131
aagugagacugagaagaaa

SEQ ID NO: 2513035 - RNA, 19 nt, Artificial Sequence
  Description of Artificial Sequence: Synthetic oligonucleotide
  Antisense strand to SEQ ID NO: 2513034
uuucuucucagucucacuu

SEQ ID NO: 2513036 - RNA, 19 nt, Artificial Sequence
  Description of Artificial Sequence: Synthetic oligonucleotide
  Sense strand starting at position 1043 of SEQ ID NO: 1888131
ggaagugcuagaggauauc

SEQ ID NO: 2513037 - RNA, 19 nt, Artificial Sequence
  Description of Artificial Sequence: Synthetic oligonucleotide
  Antisense strand to SEQ ID NO: 2513036
gauauccucuagcacuucc

SEQ ID NO: 2513038 - RNA, 19 nt, Artificial Sequence
  Description of Artificial Sequence: Synthetic oligonucleotide
  Sense strand starting at position 1132 of SEQ ID NO: 1888131
aggaaaccuggauguuuau

SEQ ID NO: 2513039 - RNA, 19 nt, Artificial Sequence
  Description of Artificial Sequence: Synthetic oligonucleotide
  Antisense strand to SEQ ID NO: 2513038
auaaacauccagguuuccu

SEQ ID NO: 2513040 - RNA, 19 nt, Artificial Sequence
  Description of Artificial Sequence: Synthetic oligonucleotide
  Sense strand starting at position 1139 of SEQ ID NO: 1888131
cuggauguuuauccaccaa

SEQ ID NO: 2513041 - RNA, 19 nt, Artificial Sequence
  Description of Artificial Sequence: Synthetic oligonucleotide
  Antisense strand to SEQ ID NO: 2513040
uugguggauaaacauccag

SEQ ID NO: 2513042 - RNA, 19 nt, Artificial Sequence
  Description of Artificial Sequence: Synthetic oligonucleotide
  Sense strand starting at position 1321 of SEQ ID NO: 1888131
cugcuuuguguugucacua

SEQ ID NO: 2513043 - RNA, 19 nt, Artificial Sequence
  Description of Artificial Sequence: Synthetic oligonucleotide
  Antisense strand to SEQ ID NO: 2513042
uagugacaacacaaagcag

SEQ ID NO: 2513044 - RNA, 19 nt, Artificial Sequence
  Description of Artificial Sequence: Synthetic oligonucleotide
  Sense strand starting at position 1326 of SEQ ID NO: 1888131
uuguguugucacuauggag

SEQ ID NO: 2513045 - RNA, 19 nt, Artificial Sequence
  Description of Artificial Sequence: Synthetic oligonucleotide
  Antisense strand to SEQ ID NO: 2513044
cuccauagugacaacacaa

SEQ ID NO: 2513046 - RNA, 19 nt, Artificial Sequence
  Description of Artificial Sequence: Synthetic oligonucleotide
  Sense strand starting at position 1374 of SEQ ID NO: 1888131
ugugguugcaaugauuaga

SEQ ID NO: 2513047 - RNA, 19 nt, Artificial Sequence
  Description of Artificial Sequence: Synthetic oligonucleotide
  Antisense strand to SEQ ID NO: 2513046
ucuaaucauugcaaccaca

SEQ ID NO: 2513048 - RNA, 19 nt, Artificial Sequence
  Description of Artificial Sequence: Synthetic oligonucleotide
  Sense strand starting at position 2003 of SEQ ID NO: 1888131
cuucuuacagauugggcua

SEQ ID NO: 2513049 - RNA, 19 nt, Artificial Sequence
  Description of Artificial Sequence: Synthetic oligonucleotide
  Antisense strand to SEQ ID NO: 2513048
uagcccaaucuguaagaag

SEQ ID NO: 2513050 - RNA, 19 nt, Artificial Sequence
  Description of Artificial Sequence: Synthetic oligonucleotide
  Sense strand starting at position 2008 of SEQ ID NO: 1888131
uacagauugggcuaugugu

SEQ ID NO: 2513051 - RNA, 19 nt, Artificial Sequence
  Description of Artificial Sequence: Synthetic oligonucleotide
  Antisense strand to SEQ ID NO: 2513050
acacauagcccaaucugua

SEQ ID NO: 2513052 - RNA, 19 nt, Artificial Sequence
  Description of Artificial Sequence: Synthetic oligonucleotide
  Sense strand starting at position 2104 of SEQ ID NO: 1888131
aucucauaggacugaucau

SEQ ID NO: 2513053 - RNA, 19 nt, Artificial Sequence
  Description of Artificial Sequence: Synthetic oligonucleotide
  Antisense strand to SEQ ID NO: 2513052
augaucaguccuaugagau

SEQ ID NO: 2513054 - RNA, 19 nt, Artificial Sequence
  Description of Artificial Sequence: Synthetic oligonucleotide
  Sense strand starting at position 2142 of SEQ ID NO: 1888131
uaugcuagaggucaugauu

SEQ ID NO: 2513055 - RNA, 19 nt, Artificial Sequence
  Description of Artificial Sequence: Synthetic oligonucleotide
  Antisense strand to SEQ ID NO: 2513054
aaucaugaccucuagcaua

SEQ ID NO: 2513056 - RNA, 19 nt, Artificial Sequence
  Description of Artificial Sequence: Synthetic oligonucleotide
  Sense strand starting at position 2453 of SEQ ID NO: 1888131
augacuaacuguuugacuu

SEQ ID NO: 2513057 - RNA, 19 nt, Artificial Sequence
  Description of Artificial Sequence: Synthetic oligonucleotide
  Antisense strand to SEQ ID NO: 2513056
aagucaaacaguuagucau

SEQ ID NO: 2513058 - RNA, 19 nt, Artificial Sequence
  Description of Artificial Sequence: Synthetic oligonucleotide
  Sense strand starting at position 2467 of SEQ ID NO: 1888131
gacuuuggauggguaucua

SEQ ID NO: 2513059 - RNA, 19 nt, Artificial Sequence
  Description of Artificial Sequence: Synthetic oligonucleotide
  Antisense strand to SEQ ID NO: 2513058
uagauacccauccaaaguc

SEQ ID NO: 2513060 - RNA, 19 nt, Artificial Sequence
  Description of Artificial Sequence: Synthetic oligonucleotide
  Sense strand starting at position 2497 of SEQ ID NO: 1888131
aguugcugugaagacuaaa

SEQ ID NO: 2513061 - RNA, 19 nt, Artificial Sequence
  Description of Artificial Sequence: Synthetic oligonucleotide
  Antisense strand to SEQ ID NO: 2513060
uuuagucuucacagcaacu

SEQ ID NO: 2513062 - RNA, 19 nt, Artificial Sequence
  Description of Artificial Sequence: Synthetic oligonucleotide
  Sense strand starting at position 2545 of SEQ ID NO: 1888131
gucagaggugucugaaagu

SEQ ID NO: 2513063 - RNA, 19 nt, Artificial Sequence
  Description of Artificial Sequence: Synthetic oligonucleotide
  Antisense strand to SEQ ID NO: 2513062
acuuucagacaccucugac

SEQ ID NO: 2513064 - RNA, 19 nt, Artificial Sequence
  Description of Artificial Sequence: Synthetic oligonucleotide
  Sense strand starting at position 2597 of SEQ ID NO: 1888131
uugugauuauucucaucau

SEQ ID NO: 2513065 - RNA, 19 nt, Artificial Sequence
  Description of Artificial Sequence: Synthetic oligonucleotide
  Antisense strand to SEQ ID NO: 2513064
augaugagaauaaucacaa

SEQ ID NO: 2513066 - RNA, 19 nt, Artificial Sequence
  Description of Artificial Sequence: Synthetic oligonucleotide
  Sense strand starting at position 2626 of SEQ ID NO: 1888131
aucacaucccaguguuuga

SEQ ID NO: 2513067 - RNA, 19 nt, Artificial Sequence
  Description of Artificial Sequence: Synthetic oligonucleotide
  Antisense strand to SEQ ID NO: 2513066
ucaaacacugggaugugau

SEQ ID NO: 2513068 - RNA, 19 nt, Artificial Sequence
  Description of Artificial Sequence: Synthetic oligonucleotide
  Sense strand starting at position 2636 of SEQ ID NO: 1888131
aguguuugaaacuguaaug

SEQ ID NO: 2513069 - RNA, 19 nt, Artificial Sequence
  Description of Artificial Sequence: Synthetic oligonucleotide
  Antisense strand to SEQ ID NO: 2513068
cauuacaguuucaaacacu

SEQ ID NO: 2513070 - RNA, 19 nt, Artificial Sequence
  Description of Artificial Sequence: Synthetic oligonucleotide
  Sense strand starting at position 2783 of SEQ ID NO: 1888131
gcugaagucucaucauuga

SEQ ID NO: 2513071 - RNA, 19 nt, Artificial Sequence
  Description of Artificial Sequence: Synthetic oligonucleotide
  Antisense strand to SEQ ID NO: 2513070
ucaaugaugagacuucagc

SEQ ID NO: 2513072 - RNA, 19 nt, Artificial Sequence
  Description of Artificial Sequence: Synthetic oligonucleotide
  Sense strand starting at position 2850 of SEQ ID NO: 1888131
uuggguauuucagagaagu

SEQ ID NO: 2513073 - RNA, 19 nt, Artificial Sequence
  Description of Artificial Sequence: Synthetic oligonucleotide
  Antisense strand to SEQ ID NO: 2513072
acuucucugaaauacccaa

SEQ ID NO: 2513074 - RNA, 19 nt, Artificial Sequence
  Description of Artificial Sequence: Synthetic oligonucleotide
  Sense strand starting at position 2872 of SEQ ID NO: 1888131
cuuuacauaugucuuugau

SEQ ID NO: 2513075 - RNA, 19 nt, Artificial Sequence
  Description of Artificial Sequence: Synthetic oligonucleotide
  Antisense strand to SEQ ID NO: 2513074
aucaaagacauauguaaag

SEQ ID NO: 2513076 - RNA, 19 nt, Artificial Sequence
  Description of Artificial Sequence: Synthetic oligonucleotide
  Sense strand starting at position 2874 of SEQ ID NO: 1888131
uuacauaugucuuugauug

SEQ ID NO: 2513077 - RNA, 19 nt, Artificial Sequence
  Description of Artificial Sequence: Synthetic oligonucleotide
  Antisense strand to SEQ ID NO: 2513076
caaucaaagacauauguaa

SEQ ID NO: 2513078 - RNA, 19 nt, Artificial Sequence
  Description of Artificial Sequence: Synthetic oligonucleotide
  Sense strand starting at position 2936 of SEQ ID NO: 1888131
caauccuuugcuuagaggu

SEQ ID NO: 2513079 - RNA, 19 nt, Artificial Sequence
  Description of Artificial Sequence: Synthetic oligonucleotide
  Antisense strand to SEQ ID NO: 2513078
accucuaagcaaaggauug

SEQ ID NO: 2513080 - RNA, 19 nt, Artificial Sequence
  Description of Artificial Sequence: Synthetic oligonucleotide
  Sense strand starting at position 3388 of SEQ ID NO: 1888131
acaggaaugagucaccguu

SEQ ID NO: 2513081 - RNA, 19 nt, Artificial Sequence
  Description of Artificial Sequence: Synthetic oligonucleotide
  Antisense strand to SEQ ID NO: 2513080
aacggugacucauuccugu

SEQ ID NO: 2513082 - RNA, 19 nt, Artificial Sequence
  Description of Artificial Sequence: Synthetic oligonucleotide
  Sense strand starting at position 3441 of SEQ ID NO: 1888131
acuggaggauuugaugcua

SEQ ID NO: 2513083 - RNA, 19 nt, Artificial Sequence
  Description of Artificial Sequence: Synthetic oligonucleotide
  Antisense strand to SEQ ID NO: 2513082
uagcaucaaauccuccagu

SEQ ID NO: 2513084 - RNA, 19 nt, Artificial Sequence
  Description of Artificial Sequence: Synthetic oligonucleotide
  Sense strand starting at position 3446 of SEQ ID NO: 1888131
aggauuugaugcuauaucu

SEQ ID NO: 2513085 - RNA, 19 nt, Artificial Sequence
  Description of Artificial Sequence: Synthetic oligonucleotide
  Antisense strand to SEQ ID NO: 2513084
agauauagcaucaaauccu

SEQ ID NO: 2513086 - RNA, 19 nt, Artificial Sequence
  Description of Artificial Sequence: Synthetic oligonucleotide
  Sense strand starting at position 3652 of SEQ ID NO: 1888131
caugaagauugaguagagu

SEQ ID NO: 2513087 - RNA, 19 nt, Artificial Sequence
  Description of Artificial Sequence: Synthetic oligonucleotide
  Antisense strand to SEQ ID NO: 2513086
acucuacucaaucuucaug

SEQ ID NO: 2513088 - RNA, 19 nt, Artificial Sequence
  Description of Artificial Sequence: Synthetic oligonucleotide
  Sense strand starting at position 3739 of SEQ ID NO: 1888131
ugauccucaguccauuauu

SEQ ID NO: 2513089 - RNA, 19 nt, Artificial Sequence
  Description of Artificial Sequence: Synthetic oligonucleotide
  Antisense strand to SEQ ID NO: 2513088
aauaauggacugaggauca

SEQ ID NO: 2513090 - RNA, 19 nt, Artificial Sequence
  Description of Artificial Sequence: Synthetic oligonucleotide
  Sense strand starting at position 3742 of SEQ ID NO: 1888131
uccucaguccauuauugua

SEQ ID NO: 2513091 - RNA, 19 nt, Artificial Sequence
  Description of Artificial Sequence: Synthetic oligonucleotide
  Antisense strand to SEQ ID NO: 2513090
uacaauaauggacugagga

SEQ ID NO: 2513092 - RNA, 19 nt, Artificial Sequence
  Description of Artificial Sequence: Synthetic oligonucleotide
  Sense strand starting at position 3776 of SEQ ID NO: 1888131
gcauaaaucguagaaaguu

SEQ ID NO: 2513093 - RNA, 19 nt, Artificial Sequence
  Description of Artificial Sequence: Synthetic oligonucleotide
  Antisense strand to SEQ ID NO: 2513092
aacuuucuacgauuuaugc

SEQ ID NO: 2513094 - RNA, 19 nt, Artificial Sequence
  Description of Artificial Sequence: Synthetic oligonucleotide
  Sense strand starting at position 3840 of SEQ ID NO: 1888131
gaaaguaagucgucaugaa

SEQ ID NO: 2513095 - RNA, 19 nt, Artificial Sequence
  Description of Artificial Sequence: Synthetic oligonucleotide
  Antisense strand to SEQ ID NO: 2513094
uucaugacgacuuacuuuc

SEQ ID NO: 2513096 - RNA, 19 nt, Artificial Sequence
  Description of Artificial Sequence: Synthetic oligonucleotide
  Sense strand starting at position 3841 of SEQ ID NO: 1888131
aaaguaagucgucaugaag

SEQ ID NO: 2513097 - RNA, 19 nt, Artificial Sequence
  Description of Artificial Sequence: Synthetic oligonucleotide
  Antisense strand to SEQ ID NO: 2513096
cuucaugacgacuuacuuu

SEQ ID NO: 2513098 - RNA, 19 nt, Artificial Sequence
  Description of Artificial Sequence: Synthetic oligonucleotide
  Sense strand starting at position 3877 of SEQ ID NO: 1888131
auaggcaugguuuaguuaa

SEQ ID NO: 2513099 - RNA, 19 nt, Artificial Sequence
  Description of Artificial Sequence: Synthetic oligonucleotide
  Antisense strand to SEQ ID NO: 2513098
uuaacuaaaccaugccuau

SEQ ID NO: 2513100 - RNA, 19 nt, Artificial Sequence
  Description of Artificial Sequence: Synthetic oligonucleotide
  Sense strand starting at position 82 of SEQ ID NO: 1888132
cuguauaaagaauguugga

SEQ ID NO: 2513101 - RNA, 19 nt, Artificial Sequence
  Description of Artificial Sequence: Synthetic oligonucleotide
  Antisense strand to SEQ ID NO: 2513100
uccaacauucuuuauacag

SEQ ID NO: 2513102 - RNA, 19 nt, Artificial Sequence
  Description of Artificial Sequence: Synthetic oligonucleotide
  Sense strand starting at position 1375 of SEQ ID NO: 1888132
ugucgaaucccugaccuua

SEQ ID NO: 2513103 - RNA, 19 nt, Artificial Sequence
  Description of Artificial Sequence: Synthetic oligonucleotide
  Antisense strand to SEQ ID NO: 2513102
uaaggucagggauucgaca

SEQ ID NO: 2513104 - RNA, 19 nt, Artificial Sequence
  Description of Artificial Sequence: Synthetic oligonucleotide
  Sense strand starting at position 1499 of SEQ ID NO: 1888132
ugcagagaguuccugaauu

SEQ ID NO: 2513105 - RNA, 19 nt, Artificial Sequence
  Description of Artificial Sequence: Synthetic oligonucleotide
  Antisense strand to SEQ ID NO: 2513104
aauucaggaacucucugca

SEQ ID NO: 2513106 - RNA, 19 nt, Artificial Sequence
  Description of Artificial Sequence: Synthetic oligonucleotide
  Sense strand starting at position 1501 of SEQ ID NO: 1888132
cagagaguuccugaauucg

SEQ ID NO: 2513107 - RNA, 19 nt, Artificial Sequence
  Description of Artificial Sequence: Synthetic oligonucleotide
  Antisense strand to SEQ ID NO: 2513106
cgaauucaggaacucucug

SEQ ID NO: 2513108 - RNA, 19 nt, Artificial Sequence
  Description of Artificial Sequence: Synthetic oligonucleotide
  Sense strand starting at position 1607 of SEQ ID NO: 1888132
acugguauguuacuuuauu

SEQ ID NO: 2513109 - RNA, 19 nt, Artificial Sequence
  Description of Artificial Sequence: Synthetic oligonucleotide
  Antisense strand to SEQ ID NO: 2513108
aauaaaguaacauaccagu

SEQ ID NO: 2513110 - RNA, 19 nt, Artificial Sequence
  Description of Artificial Sequence: Synthetic oligonucleotide
  Sense strand starting at position 1608 of SEQ ID NO: 1888132
cugguauguuacuuuauuu

SEQ ID NO: 2513111 - RNA, 19 nt, Artificial Sequence
  Description of Artificial Sequence: Synthetic oligonucleotide
  Antisense strand to SEQ ID NO: 2513110
aaauaaaguaacauaccag

SEQ ID NO: 2513112 - RNA, 19 nt, Artificial Sequence
  Description of Artificial Sequence: Synthetic oligonucleotide
  Sense strand starting at position 1642 of SEQ ID NO: 1888132
ucccauuaguggugggauu

SEQ ID NO: 2513113 - RNA, 19 nt, Artificial Sequence
  Description of Artificial Sequence: Synthetic oligonucleotide
  Antisense strand to SEQ ID NO: 2513112
aaucccaccacuaauggga

SEQ ID NO: 2513114 - RNA, 19 nt, Artificial Sequence
  Description of Artificial Sequence: Synthetic oligonucleotide
  Sense strand starting at position 1986 of SEQ ID NO: 1888132
guugucacauguuugauua

SEQ ID NO: 2513115 - RNA, 19 nt, Artificial Sequence
  Description of Artificial Sequence: Synthetic oligonucleotide
  Antisense strand to SEQ ID NO: 2513114
uaaucaaacaugugacaac

SEQ ID NO: 2513116 - RNA, 19 nt, Artificial Sequence
  Description of Artificial Sequence: Synthetic oligonucleotide
  Sense strand starting at position 1987 of SEQ ID NO: 1888132
uugucacauguuugauuau

SEQ ID NO: 2513117 - RNA, 19 nt, Artificial Sequence
  Description of Artificial Sequence: Synthetic oligonucleotide
  Antisense strand to SEQ ID NO: 2513116
auaaucaaacaugugacaa

SEQ ID NO: 2513118 - RNA, 19 nt, Artificial Sequence
  Description of Artificial Sequence: Synthetic oligonucleotide
  Sense strand starting at position 1990 of SEQ ID NO: 1888132
ucacauguuugauuaucau

SEQ ID NO: 2513119 - RNA, 19 nt, Artificial Sequence
  Description of Artificial Sequence: Synthetic oligonucleotide
  Antisense strand to SEQ ID NO: 2513118
augauaaucaaacauguga

SEQ ID NO: 2513120 - RNA, 19 nt, Artificial Sequence
  Description of Artificial Sequence: Synthetic oligonucleotide
  Sense strand starting at position 1996 of SEQ ID NO: 1888132
guuugauuaucauaaccug

SEQ ID NO: 2513121 - RNA, 19 nt, Artificial Sequence
  Description of Artificial Sequence: Synthetic oligonucleotide
  Antisense strand to SEQ ID NO: 2513120
cagguuaugauaaucaaac

SEQ ID NO: 2513122 - RNA, 19 nt, Artificial Sequence
  Description of Artificial Sequence: Synthetic oligonucleotide
  Sense strand starting at position 2380 of SEQ ID NO: 1888132
ugagcagucauauaugcag

SEQ ID NO: 2513123 - RNA, 19 nt, Artificial Sequence
  Description of Artificial Sequence: Synthetic oligonucleotide
  Antisense strand to SEQ ID NO: 2513122
cugcauauaugacugcuca

SEQ ID NO: 2513124 - RNA, 19 nt, Artificial Sequence
  Description of Artificial Sequence: Synthetic oligonucleotide
  Sense strand starting at position 2422 of SEQ ID NO: 1888132
caguauuaaugaggaaggu

SEQ ID NO: 2513125 - RNA, 19 nt, Artificial Sequence
  Description of Artificial Sequence: Synthetic oligonucleotide
  Antisense strand to SEQ ID NO: 2513124
accuuccucauuaauacug

SEQ ID NO: 2513126 - RNA, 19 nt, Artificial Sequence
  Description of Artificial Sequence: Synthetic oligonucleotide
  Sense strand starting at position 2431 of SEQ ID NO: 1888132
ugaggaaggucagaugaga

SEQ ID NO: 2513127 - RNA, 19 nt, Artificial Sequence
  Description of Artificial Sequence: Synthetic oligonucleotide
  Antisense strand to SEQ ID NO: 2513126
ucucaucugaccuuccuca

SEQ ID NO: 2513128 - RNA, 19 nt, Artificial Sequence
  Description of Artificial Sequence: Synthetic oligonucleotide
  Sense strand starting at position 2446 of SEQ ID NO: 1888132
gagauccuguacuuaagga

SEQ ID NO: 2513129 - RNA, 19 nt, Artificial Sequence
  Description of Artificial Sequence: Synthetic oligonucleotide
  Antisense strand to SEQ ID NO: 2513128
uccuuaaguacaggaucuc

SEQ ID NO: 2513130 - RNA, 19 nt, Artificial Sequence
  Description of Artificial Sequence: Synthetic oligonucleotide
  Sense strand starting at position 2505 of SEQ ID NO: 1888132
caaugugguccagguugua

SEQ ID NO: 2513131 - RNA, 19 nt, Artificial Sequence
  Description of Artificial Sequence: Synthetic oligonucleotide
  Antisense strand to SEQ ID NO: 2513130
uacaaccuggaccacauug

SEQ ID NO: 2513132 - RNA, 19 nt, Artificial Sequence
  Description of Artificial Sequence: Synthetic oligonucleotide
  Sense strand starting at position 2680 of SEQ ID NO: 1888132
cucugauccugaugcuauc

SEQ ID NO: 2513133 - RNA, 19 nt, Artificial Sequence
  Description of Artificial Sequence: Synthetic oligonucleotide
  Antisense strand to SEQ ID NO: 2513132
gauagcaucaggaucagag

SEQ ID NO: 2513134 - RNA, 19 nt, Artificial Sequence
  Description of Artificial Sequence: Synthetic oligonucleotide
  Sense strand starting at position 2683 of SEQ ID NO: 1888132
ugauccugaugcuaucuua

SEQ ID NO: 2513135 - RNA, 19 nt, Artificial Sequence
  Description of Artificial Sequence: Synthetic oligonucleotide
  Antisense strand to SEQ ID NO: 2513134
uaagauagcaucaggauca

SEQ ID NO: 2513136 - RNA, 19 nt, Artificial Sequence
  Description of Artificial Sequence: Synthetic oligonucleotide
  Sense strand starting at position 2691 of SEQ ID NO: 1888132
augcuaucuuaauugugau

SEQ ID NO: 2513137 - RNA, 19 nt, Artificial Sequence
  Description of Artificial Sequence: Synthetic oligonucleotide
  Antisense strand to SEQ ID NO: 2513136
aucacaauuaagauagcau

SEQ ID NO: 2513138 - RNA, 19 nt, Artificial Sequence
  Description of Artificial Sequence: Synthetic oligonucleotide
  Sense strand starting at position 2703 of SEQ ID NO: 1888132
uugugauaaauguguuguu

SEQ ID NO: 2513139 - RNA, 19 nt, Artificial Sequence
  Description of Artificial Sequence: Synthetic oligonucleotide
  Antisense strand to SEQ ID NO: 2513138
aacaacacauuuaucacaa

SEQ ID NO: 2513140 - RNA, 19 nt, Artificial Sequence
  Description of Artificial Sequence: Synthetic oligonucleotide
  Sense strand starting at position 2704 of SEQ ID NO: 1888132
ugugauaaauguguuguuu

SEQ ID NO: 2513141 - RNA, 19 nt, Artificial Sequence
  Description of Artificial Sequence: Synthetic oligonucleotide
  Antisense strand to SEQ ID NO: 2513140
aaacaacacauuuaucaca

SEQ ID NO: 2513142 - RNA, 19 nt, Artificial Sequence
  Description of Artificial Sequence: Synthetic oligonucleotide
  Sense strand starting at position 2999 of SEQ ID NO: 1888132
gcaugagaucccugucuca

SEQ ID NO: 2513143 - RNA, 19 nt, Artificial Sequence
  Description of Artificial Sequence: Synthetic oligonucleotide
  Antisense strand to SEQ ID NO: 2513142
ugagacagggaucucaugc

SEQ ID NO: 2513144 - RNA, 19 nt, Artificial Sequence
  Description of Artificial Sequence: Synthetic oligonucleotide
  Sense strand starting at position 3002 of SEQ ID NO: 1888132
ugagaucccugucucaaac

SEQ ID NO: 2513145 - RNA, 19 nt, Artificial Sequence
  Description of Artificial Sequence: Synthetic oligonucleotide
  Antisense strand to SEQ ID NO: 2513144
guuugagacagggaucuca

SEQ ID NO: 2513146 - RNA, 19 nt, Artificial Sequence
  Description of Artificial Sequence: Synthetic oligonucleotide
  Sense strand starting at position 3081 of SEQ ID NO: 1888132
cugagccuuugagugguua

SEQ ID NO: 2513147 - RNA, 19 nt, Artificial Sequence
  Description of Artificial Sequence: Synthetic oligonucleotide
  Antisense strand to SEQ ID NO: 2513146
uaaccacucaaaggcucag

SEQ ID NO: 2513148 - RNA, 19 nt, Artificial Sequence
  Description of Artificial Sequence: Synthetic oligonucleotide
  Sense strand starting at position 3082 of SEQ ID NO: 1888132
ugagccuuugagugguuaa

SEQ ID NO: 2513149 - RNA, 19 nt, Artificial Sequence
  Description of Artificial Sequence: Synthetic oligonucleotide
  Antisense strand to SEQ ID NO: 2513148
uuaaccacucaaaggcuca

SEQ ID NO: 2513150 - RNA, 19 nt, Artificial Sequence
  Description of Artificial Sequence: Synthetic oligonucleotide
  Sense strand starting at position 3083 of SEQ ID NO: 1888132
gagccuuugagugguuaag

SEQ ID NO: 2513151 - RNA, 19 nt, Artificial Sequence
  Description of Artificial Sequence: Synthetic oligonucleotide
  Antisense strand to SEQ ID NO: 2513150
cuuaaccacucaaaggcuc

SEQ ID NO: 2513152 - RNA, 19 nt, Artificial Sequence
  Description of Artificial Sequence: Synthetic oligonucleotide
  Sense strand starting at position 3085 of SEQ ID NO: 1888132
gccuuugagugguuaagga

SEQ ID NO: 2513153 - RNA, 19 nt, Artificial Sequence
  Description of Artificial Sequence: Synthetic oligonucleotide
  Antisense strand to SEQ ID NO: 2513152
uccuuaaccacucaaaggc

SEQ ID NO: 2513154 - RNA, 19 nt, Artificial Sequence
  Description of Artificial Sequence: Synthetic oligonucleotide
  Sense strand starting at position 3089 of SEQ ID NO: 1888132
uugagugguuaaggaacau

SEQ ID NO: 2513155 - RNA, 19 nt, Artificial Sequence
  Description of Artificial Sequence: Synthetic oligonucleotide
  Antisense strand to SEQ ID NO: 2513154
auguuccuuaaccacucaa

SEQ ID NO: 2513156 - RNA, 19 nt, Artificial Sequence
  Description of Artificial Sequence: Synthetic oligonucleotide
  Sense strand starting at position 3188 of SEQ ID NO: 1888132
agcagaucaccugagguuu

SEQ ID NO: 2513157 - RNA, 19 nt, Artificial Sequence
  Description of Artificial Sequence: Synthetic oligonucleotide
  Antisense strand to SEQ ID NO: 2513156
aaaccucaggugaucugcu

SEQ ID NO: 2513158 - RNA, 19 nt, Artificial Sequence
  Description of Artificial Sequence: Synthetic oligonucleotide
  Sense strand starting at position 3196 of SEQ ID NO: 1888132
accugagguuucuacuaaa

SEQ ID NO: 2513159 - RNA, 19 nt, Artificial Sequence
  Description of Artificial Sequence: Synthetic oligonucleotide
  Antisense strand to SEQ ID NO: 2513158
uuuaguagaaaccucaggu

SEQ ID NO: 2513160 - RNA, 19 nt, Artificial Sequence
  Description of Artificial Sequence: Synthetic oligonucleotide
  Sense strand starting at position 3317 of SEQ ID NO: 1888132
gagccaagauugcugcauu

SEQ ID NO: 2513161 - RNA, 19 nt, Artificial Sequence
  Description of Artificial Sequence: Synthetic oligonucleotide
  Antisense strand to SEQ ID NO: 2513160
aaugcagcaaucuuggcuc

SEQ ID NO: 2513162 - RNA, 19 nt, Artificial Sequence
  Description of Artificial Sequence: Synthetic oligonucleotide
  Sense strand starting at position 3320 of SEQ ID NO: 1888132
ccaagauugcugcauugca

SEQ ID NO: 2513163 - RNA, 19 nt, Artificial Sequence
  Description of Artificial Sequence: Synthetic oligonucleotide
  Antisense strand to SEQ ID NO: 2513162
ugcaaugcagcaaucuugg

SEQ ID NO: 2513164 - RNA, 19 nt, Artificial Sequence
  Description of Artificial Sequence: Synthetic oligonucleotide
  Sense strand starting at position 3664 of SEQ ID NO: 1888132
cuguuaguacacugacaac

SEQ ID NO: 2513165 - RNA, 19 nt, Artificial Sequence
  Description of Artificial Sequence: Synthetic oligonucleotide
  Antisense strand to SEQ ID NO: 2513164
guugucaguguacuaacag

SEQ ID NO: 2513166 - RNA, 19 nt, Artificial Sequence
  Description of Artificial Sequence: Synthetic oligonucleotide
  Sense strand starting at position 3803 of SEQ ID NO: 1888132
agcuucugucuguauggau

SEQ ID NO: 2513167 - RNA, 19 nt, Artificial Sequence
  Description of Artificial Sequence: Synthetic oligonucleotide
  Antisense strand to SEQ ID NO: 2513166
auccauacagacagaagcu

SEQ ID NO: 2513168 - RNA, 19 nt, Artificial Sequence
  Description of Artificial Sequence: Synthetic oligonucleotide
  Sense strand starting at position 3831 of SEQ ID NO: 1888132
cugggcauuccauaugacu

SEQ ID NO: 2513169 - RNA, 19 nt, Artificial Sequence
  Description of Artificial Sequence: Synthetic oligonucleotide
  Antisense strand to SEQ ID NO: 2513168
agucauauggaaugcccag

SEQ ID NO: 2513170 - RNA, 19 nt, Artificial Sequence
  Description of Artificial Sequence: Synthetic oligonucleotide
  Sense strand starting at position 3837 of SEQ ID NO: 1888132
auuccauaugacuggaauu

SEQ ID NO: 2513171 - RNA, 19 nt, Artificial Sequence
  Description of Artificial Sequence: Synthetic oligonucleotide
  Antisense strand to SEQ ID NO: 2513170
aauuccagucauauggaau

SEQ ID NO: 2513172 - RNA, 19 nt, Artificial Sequence
  Description of Artificial Sequence: Synthetic oligonucleotide
  Sense strand starting at position 3873 of SEQ ID NO: 1888132
gguuucuugcccuuagugu

SEQ ID NO: 2513173 - RNA, 19 nt, Artificial Sequence
  Description of Artificial Sequence: Synthetic oligonucleotide
  Antisense strand to SEQ ID NO: 2513172
acacuaagggcaagaaacc

SEQ ID NO: 2513174 - RNA, 19 nt, Artificial Sequence
  Description of Artificial Sequence: Synthetic oligonucleotide
  Sense strand starting at position 3874 of SEQ ID NO: 1888132
guuucuugcccuuagugua

SEQ ID NO: 2513175 - RNA, 19 nt, Artificial Sequence
  Description of Artificial Sequence: Synthetic oligonucleotide
  Antisense strand to SEQ ID NO: 2513174
uacacuaagggcaagaaac

SEQ ID NO: 2513176 - RNA, 19 nt, Artificial Sequence
  Description of Artificial Sequence: Synthetic oligonucleotide
  Sense strand starting at position 22 of SEQ ID NO: 1888133
uccaccugcugucauuuau

SEQ ID NO: 2513177 - RNA, 19 nt, Artificial Sequence
  Description of Artificial Sequence: Synthetic oligonucleotide
  Antisense strand to SEQ ID NO: 2513176
auaaaugacagcaggugga

SEQ ID NO: 2513178 - RNA, 19 nt, Artificial Sequence
  Description of Artificial Sequence: Synthetic oligonucleotide
  Sense strand starting at position 41 of SEQ ID NO: 1888133
uuacaaagugaaugcuuua

SEQ ID NO: 2513179 - RNA, 19 nt, Artificial Sequence
  Description of Artificial Sequence: Synthetic oligonucleotide
  Antisense strand to SEQ ID NO: 2513178
uaaagcauucacuuuguaa

SEQ ID NO: 2513180 - RNA, 19 nt, Artificial Sequence
  Description of Artificial Sequence: Synthetic oligonucleotide
  Sense strand starting at position 67 of SEQ ID NO: 1888133
aucaguaguuagucauaau

SEQ ID NO: 2513181 - RNA, 19 nt, Artificial Sequence
  Description of Artificial Sequence: Synthetic oligonucleotide
  Antisense strand to SEQ ID NO: 2513180
auuaugacuaacuacugau

SEQ ID NO: 2513182 - RNA, 19 nt, Artificial Sequence
  Description of Artificial Sequence: Synthetic oligonucleotide
  Sense strand starting at position 123 of SEQ ID NO: 1888133
uuugaagaguggccucaua

SEQ ID NO: 2513183 - RNA, 19 nt, Artificial Sequence
  Description of Artificial Sequence: Synthetic oligonucleotide
  Antisense strand to SEQ ID NO: 2513182
uaugaggccacucuucaaa

SEQ ID NO: 2513184 - RNA, 19 nt, Artificial Sequence
  Description of Artificial Sequence: Synthetic oligonucleotide
  Sense strand starting at position 134 of SEQ ID NO: 1888133
gccucauagauugagagcu

SEQ ID NO: 2513185 - RNA, 19 nt, Artificial Sequence
  Description of Artificial Sequence: Synthetic oligonucleotide
  Antisense strand to SEQ ID NO: 2513184
agcucucaaucuaugaggc

SEQ ID NO: 2513186 - RNA, 19 nt, Artificial Sequence
  Description of Artificial Sequence: Synthetic oligonucleotide
  Sense strand starting at position 156 of SEQ ID NO: 1888133
aggaguaaagccugaucuu

SEQ ID NO: 2513187 - RNA, 19 nt, Artificial Sequence
  Description of Artificial Sequence: Synthetic oligonucleotide
  Antisense strand to SEQ ID NO: 2513186
aagaucaggcuuuacuccu

SEQ ID NO: 2513188 - RNA, 19 nt, Artificial Sequence
  Description of Artificial Sequence: Synthetic oligonucleotide
  Sense strand starting at position 157 of SEQ ID NO: 1888133
ggaguaaagccugaucuug

SEQ ID NO: 2513189 - RNA, 19 nt, Artificial Sequence
  Description of Artificial Sequence: Synthetic oligonucleotide
  Antisense strand to SEQ ID NO: 2513188
caagaucaggcuuuacucc

SEQ ID NO: 2513190 - RNA, 19 nt, Artificial Sequence
  Description of Artificial Sequence: Synthetic oligonucleotide
  Sense strand starting at position 167 of SEQ ID NO: 1888133
cugaucuugcguuacccau

SEQ ID NO: 2513191 - RNA, 19 nt, Artificial Sequence
  Description of Artificial Sequence: Synthetic oligonucleotide
  Antisense strand to SEQ ID NO: 2513190
auggguaacgcaagaucag

SEQ ID NO: 2513192 - RNA, 19 nt, Artificial Sequence
  Description of Artificial Sequence: Synthetic oligonucleotide
  Sense strand starting at position 270 of SEQ ID NO: 1888133
aggugugauguuuaucuaa

SEQ ID NO: 2513193 - RNA, 19 nt, Artificial Sequence
  Description of Artificial Sequence: Synthetic oligonucleotide
  Antisense strand to SEQ ID NO: 2513192
uuagauaaacaucacaccu

SEQ ID NO: 2513194 - RNA, 19 nt, Artificial Sequence
  Description of Artificial Sequence: Synthetic oligonucleotide
  Sense strand starting at position 359 of SEQ ID NO: 1888133
uuuguagcuccuggcauaa

SEQ ID NO: 2513195 - RNA, 19 nt, Artificial Sequence
  Description of Artificial Sequence: Synthetic oligonucleotide
  Antisense strand to SEQ ID NO: 2513194
uuaugccaggagcuacaaa

SEQ ID NO: 2513196 - RNA, 19 nt, Artificial Sequence
  Description of Artificial Sequence: Synthetic oligonucleotide
  Sense strand starting at position 370 of SEQ ID NO: 1888133
uggcauaaguaucuagguu

SEQ ID NO: 2513197 - RNA, 19 nt, Artificial Sequence
  Description of Artificial Sequence: Synthetic oligonucleotide
  Antisense strand to SEQ ID NO: 2513196
aaccuagauacuuaugcca

SEQ ID NO: 2513198 - RNA, 19 nt, Artificial Sequence
  Description of Artificial Sequence: Synthetic oligonucleotide
  Sense strand starting at position 374 of SEQ ID NO: 1888133
auaaguaucuagguuguau

SEQ ID NO: 2513199 - RNA, 19 nt, Artificial Sequence
  Description of Artificial Sequence: Synthetic oligonucleotide
  Antisense strand to SEQ ID NO: 2513198
auacaaccuagauacuuau

SEQ ID NO: 2513200 - RNA, 19 nt, Artificial Sequence
  Description of Artificial Sequence: Synthetic oligonucleotide
  Sense strand starting at position 378 of SEQ ID NO: 1888133
guaucuagguuguauuugu

SEQ ID NO: 2513201 - RNA, 19 nt, Artificial Sequence
  Description of Artificial Sequence: Synthetic oligonucleotide
  Antisense strand to SEQ ID NO: 2513200
acaaauacaaccuagauac

SEQ ID NO: 2513202 - RNA, 19 nt, Artificial Sequence
  Description of Artificial Sequence: Synthetic oligonucleotide
  Sense strand starting at position 382 of SEQ ID NO: 1888133
cuagguuguauuuguuacu

SEQ ID NO: 2513203 - RNA, 19 nt, Artificial Sequence
  Description of Artificial Sequence: Synthetic oligonucleotide
  Antisense strand to SEQ ID NO: 2513202
aguaacaaauacaaccuag

SEQ ID NO: 2513204 - RNA, 19 nt, Artificial Sequence
  Description of Artificial Sequence: Synthetic oligonucleotide
  Sense strand starting at position 383 of SEQ ID NO: 1888133
uagguuguauuuguuacua

SEQ ID NO: 2513205 - RNA, 19 nt, Artificial Sequence
  Description of Artificial Sequence: Synthetic oligonucleotide
  Antisense strand to SEQ ID NO: 2513204
uaguaacaaauacaaccua

SEQ ID NO: 2513206 - RNA, 19 nt, Artificial Sequence
  Description of Artificial Sequence: Synthetic oligonucleotide
  Sense strand starting at position 385 of SEQ ID NO: 1888133
gguuguauuuguuacuauu

SEQ ID NO: 2513207 - RNA, 19 nt, Artificial Sequence
  Description of Artificial Sequence: Synthetic oligonucleotide
  Antisense strand to SEQ ID NO: 2513206
aauaguaacaaauacaacc

SEQ ID NO: 2513208 - RNA, 19 nt, Artificial Sequence
  Description of Artificial Sequence: Synthetic oligonucleotide
  Sense strand starting at position 422 of SEQ ID NO: 1888133
gacaauguaucugugcuuu

SEQ ID NO: 2513209 - RNA, 19 nt, Artificial Sequence
  Description of Artificial Sequence: Synthetic oligonucleotide
  Antisense strand to SEQ ID NO: 2513208
aaagcacagauacauuguc

SEQ ID NO: 2513210 - RNA, 19 nt, Artificial Sequence
  Description of Artificial Sequence: Synthetic oligonucleotide
  Sense strand starting at position 428 of SEQ ID NO: 1888133
guaucugugcuuugccaca

SEQ ID NO: 2513211 - RNA, 19 nt, Artificial Sequence
  Description of Artificial Sequence: Synthetic oligonucleotide
  Antisense strand to SEQ ID NO: 2513210
uguggcaaagcacagauac

SEQ ID NO: 2513212 - RNA, 19 nt, Artificial Sequence
  Description of Artificial Sequence: Synthetic oligonucleotide
  Sense strand starting at position 433 of SEQ ID NO: 1888133
ugugcuuugccacaguaga

SEQ ID NO: 2513213 - RNA, 19 nt, Artificial Sequence
  Description of Artificial Sequence: Synthetic oligonucleotide
  Antisense strand to SEQ ID NO: 2513212
ucuacuguggcaaagcaca

SEQ ID NO: 2513214 - RNA, 19 nt, Artificial Sequence
  Description of Artificial Sequence: Synthetic oligonucleotide
  Sense strand starting at position 608 of SEQ ID NO: 1888133
gugucaucaagcgguucua

SEQ ID NO: 2513215 - RNA, 19 nt, Artificial Sequence
  Description of Artificial Sequence: Synthetic oligonucleotide
  Antisense strand to SEQ ID NO: 2513214
uagaaccgcuugaugacac

SEQ ID NO: 2513216 - RNA, 19 nt, Artificial Sequence
  Description of Artificial Sequence: Synthetic oligonucleotide
  Sense strand starting at position 642 of SEQ ID NO: 1888133
gguagugagccucacuauc

SEQ ID NO: 2513217 - RNA, 19 nt, Artificial Sequence
  Description of Artificial Sequence: Synthetic oligonucleotide
  Antisense strand to SEQ ID NO: 2513216
gauagugaggcucacuacc

SEQ ID NO: 2513218 - RNA, 19 nt, Artificial Sequence
  Description of Artificial Sequence: Synthetic oligonucleotide
  Sense strand starting at position 707 of SEQ ID NO: 1888133
ugaguucuccuaugagcac

SEQ ID NO: 2513219 - RNA, 19 nt, Artificial Sequence
  Description of Artificial Sequence: Synthetic oligonucleotide
  Antisense strand to SEQ ID NO: 2513218
gugcucauaggagaacuca

SEQ ID NO: 2513220 - RNA, 19 nt, Artificial Sequence
  Description of Artificial Sequence: Synthetic oligonucleotide
  Sense strand starting at position 728 of SEQ ID NO: 1888133
ucagguguaucugcacaau

SEQ ID NO: 2513221 - RNA, 19 nt, Artificial Sequence
  Description of Artificial Sequence: Synthetic oligonucleotide
  Antisense strand to SEQ ID NO: 2513220
auugugcagauacaccuga

SEQ ID NO: 2513222 - RNA, 19 nt, Artificial Sequence
  Description of Artificial Sequence: Synthetic oligonucleotide
  Sense strand starting at position 784 of SEQ ID NO: 1888133
cuaggauaguuccuuugag

SEQ ID NO: 2513223 - RNA, 19 nt, Artificial Sequence
  Description of Artificial Sequence: Synthetic oligonucleotide
  Antisense strand to SEQ ID NO: 2513222
cucaaaggaacuauccuag

SEQ ID NO: 2513224 - RNA, 19 nt, Artificial Sequence
  Description of Artificial Sequence: Synthetic oligonucleotide
  Sense strand starting at position 847 of SEQ ID NO: 1888133
caugaucaggagugugaca

SEQ ID NO: 2513225 - RNA, 19 nt, Artificial Sequence
  Description of Artificial Sequence: Synthetic oligonucleotide
  Antisense strand to SEQ ID NO: 2513224
ugucacacuccugaucaug

SEQ ID NO: 2513226 - RNA, 19 nt, Artificial Sequence
  Description of Artificial Sequence: Synthetic oligonucleotide
  Sense strand starting at position 849 of SEQ ID NO: 1888133
ugaucaggagugugacaaa

SEQ ID NO: 2513227 - RNA, 19 nt, Artificial Sequence
  Description of Artificial Sequence: Synthetic oligonucleotide
  Antisense strand to SEQ ID NO: 2513226
uuugucacacuccugauca

SEQ ID NO: 2513228 - RNA, 19 nt, Artificial Sequence
  Description of Artificial Sequence: Synthetic oligonucleotide
  Sense strand starting at position 944 of SEQ ID NO: 1888133
cugcgcuuccuguucuuaa

SEQ ID NO: 2513229 - RNA, 19 nt, Artificial Sequence
  Description of Artificial Sequence: Synthetic oligonucleotide
  Antisense strand to SEQ ID NO: 2513228
uuaagaacaggaagcgcag

SEQ ID NO: 2513230 - RNA, 19 nt, Artificial Sequence
  Description of Artificial Sequence: Synthetic oligonucleotide
  Sense strand starting at position 946 of SEQ ID NO: 1888133
gcgcuuccuguucuuaauu

SEQ ID NO: 2513231 - RNA, 19 nt, Artificial Sequence
  Description of Artificial Sequence: Synthetic oligonucleotide
  Antisense strand to SEQ ID NO: 2513230
aauuaagaacaggaagcgc

SEQ ID NO: 2513232 - RNA, 19 nt, Artificial Sequence
  Description of Artificial Sequence: Synthetic oligonucleotide
  Sense strand starting at position 967 of SEQ ID NO: 1888133
aaguguuguuuggugacuu

SEQ ID NO: 2513233 - RNA, 19 nt, Artificial Sequence
  Description of Artificial Sequence: Synthetic oligonucleotide
  Antisense strand to SEQ ID NO: 2513232
aagucaccaaacaacacuu

SEQ ID NO: 2513234 - RNA, 19 nt, Artificial Sequence
  Description of Artificial Sequence: Synthetic oligonucleotide
  Sense strand starting at position 971 of SEQ ID NO: 1888133
guuguuuggugacuuugaa

SEQ ID NO: 2513235 - RNA, 19 nt, Artificial Sequence
  Description of Artificial Sequence: Synthetic oligonucleotide
  Antisense strand to SEQ ID NO: 2513234
uucaaagucaccaaacaac

SEQ ID NO: 2513236 - RNA, 19 nt, Artificial Sequence
  Description of Artificial Sequence: Synthetic oligonucleotide
  Sense strand starting at position 1256 of SEQ ID NO: 1888133
gggacuguuaaauguguuu

SEQ ID NO: 2513237 - RNA, 19 nt, Artificial Sequence
  Description of Artificial Sequence: Synthetic oligonucleotide
  Antisense strand to SEQ ID NO: 2513236
aaacacauuuaacaguccc

SEQ ID NO: 2513238 - RNA, 19 nt, Artificial Sequence
  Description of Artificial Sequence: Synthetic oligonucleotide
  Sense strand starting at position 1259 of SEQ ID NO: 1888133
acuguuaaauguguuucca

SEQ ID NO: 2513239 - RNA, 19 nt, Artificial Sequence
  Description of Artificial Sequence: Synthetic oligonucleotide
  Antisense strand to SEQ ID NO: 2513238
uggaaacacauuuaacagu

SEQ ID NO: 2513240 - RNA, 19 nt, Artificial Sequence
  Description of Artificial Sequence: Synthetic oligonucleotide
  Sense strand starting at position 1261 of SEQ ID NO: 1888133
uguuaaauguguuuccauu

SEQ ID NO: 2513241 - RNA, 19 nt, Artificial Sequence
  Description of Artificial Sequence: Synthetic oligonucleotide
  Antisense strand to SEQ ID NO: 2513240
aauggaaacacauuuaaca

SEQ ID NO: 2513242 - RNA, 19 nt, Artificial Sequence
  Description of Artificial Sequence: Synthetic oligonucleotide
  Sense strand starting at position 1371 of SEQ ID NO: 1888133
guuuguggacuuugcauau

SEQ ID NO: 2513243 - RNA, 19 nt, Artificial Sequence
  Description of Artificial Sequence: Synthetic oligonucleotide
  Antisense strand to SEQ ID NO: 2513242
auaugcaaaguccacaaac

SEQ ID NO: 2513244 - RNA, 19 nt, Artificial Sequence
  Description of Artificial Sequence: Synthetic oligonucleotide
  Sense strand starting at position 1390 of SEQ ID NO: 1888133
cugggcuuuccgggacgua

SEQ ID NO: 2513245 - RNA, 19 nt, Artificial Sequence
  Description of Artificial Sequence: Synthetic oligonucleotide
  Antisense strand to SEQ ID NO: 2513244
uacgucccggaaagcccag

SEQ ID NO: 2513246 - RNA, 19 nt, Artificial Sequence
  Description of Artificial Sequence: Synthetic oligonucleotide
  Sense strand starting at position 1664 of SEQ ID NO: 1888133
gcgggacacuugagaguuu

SEQ ID NO: 2513247 - RNA, 19 nt, Artificial Sequence
  Description of Artificial Sequence: Synthetic oligonucleotide
  Antisense strand to SEQ ID NO: 2513246
aaacucucaagugucccgc

SEQ ID NO: 2513248 - RNA, 19 nt, Artificial Sequence
  Description of Artificial Sequence: Synthetic oligonucleotide
  Sense strand starting at position 1921 of SEQ ID NO: 1888133
ccgggcgucgcaaauaauu

SEQ ID NO: 2513249 - RNA, 19 nt, Artificial Sequence
  Description of Artificial Sequence: Synthetic oligonucleotide
  Antisense strand to SEQ ID NO: 2513248
aauuauuugcgacgcccgg

SEQ ID NO: 2513250 - RNA, 19 nt, Artificial Sequence
  Description of Artificial Sequence: Synthetic oligonucleotide
  Sense strand starting at position 2786 of SEQ ID NO: 1888133
uugacauuucuuggugcuu

SEQ ID NO: 2513251 - RNA, 19 nt, Artificial Sequence
  Description of Artificial Sequence: Synthetic oligonucleotide
  Antisense strand to SEQ ID NO: 2513250
aagcaccaagaaaugucaa

SEQ ID NO: 2513252 - RNA, 19 nt, Artificial Sequence
  Description of Artificial Sequence: Synthetic oligonucleotide
  Sense strand starting at position 3075 of SEQ ID NO: 1888133
ugaagauggccaugaagcu

SEQ ID NO: 2513253 - RNA, 19 nt, Artificial Sequence
  Description of Artificial Sequence: Synthetic oligonucleotide
  Antisense strand to SEQ ID NO: 2513252
agcuucauggccaucuuca

SEQ ID NO: 2513254 - RNA, 19 nt, Artificial Sequence
  Description of Artificial Sequence: Synthetic oligonucleotide
  Sense strand starting at position 3375 of SEQ ID NO: 1888133
uggagaagaugcugaagaa

SEQ ID NO: 2513255 - RNA, 19 nt, Artificial Sequence
  Description of Artificial Sequence: Synthetic oligonucleotide
  Antisense strand to SEQ ID NO: 2513254
uucuucagcaucuucucca

SEQ ID NO: 2513256 - RNA, 19 nt, Artificial Sequence
  Description of Artificial Sequence: Synthetic oligonucleotide
  Sense strand starting at position 78 of SEQ ID NO: 1888134
ugugguaucaaaugaugac

SEQ ID NO: 2513257 - RNA, 19 nt, Artificial Sequence
  Description of Artificial Sequence: Synthetic oligonucleotide
  Antisense strand to SEQ ID NO: 2513256
gucaucauuugauaccaca

SEQ ID NO: 2513258 - RNA, 19 nt, Artificial Sequence
  Description of Artificial Sequence: Synthetic oligonucleotide
  Sense strand starting at position 118 of SEQ ID NO: 1888134
uuagaauccuaguucuaug

SEQ ID NO: 2513259 - RNA, 19 nt, Artificial Sequence
  Description of Artificial Sequence: Synthetic oligonucleotide
  Antisense strand to SEQ ID NO: 2513258
cauagaacuaggauucuaa

SEQ ID NO: 2513260 - RNA, 19 nt, Artificial Sequence
  Description of Artificial Sequence: Synthetic oligonucleotide
  Sense strand starting at position 275 of SEQ ID NO: 1888134
gccauuugacagugccauu

SEQ ID NO: 2513261 - RNA, 19 nt, Artificial Sequence
  Description of Artificial Sequence: Synthetic oligonucleotide
  Antisense strand to SEQ ID NO: 2513260
aauggcacugucaaauggc

SEQ ID NO: 2513262 - RNA, 19 nt, Artificial Sequence
  Description of Artificial Sequence: Synthetic oligonucleotide
  Sense strand starting at position 398 of SEQ ID NO: 1888134
acaugaaagguauguauac

SEQ ID NO: 2513263 - RNA, 19 nt, Artificial Sequence
  Description of Artificial Sequence: Synthetic oligonucleotide
  Antisense strand to SEQ ID NO: 2513262
guauacauaccuuucaugu

SEQ ID NO: 2513264 - RNA, 19 nt, Artificial Sequence
  Description of Artificial Sequence: Synthetic oligonucleotide
  Sense strand starting at position 399 of SEQ ID NO: 1888134
caugaaagguauguauaca

SEQ ID NO: 2513265 - RNA, 19 nt, Artificial Sequence
  Description of Artificial Sequence: Synthetic oligonucleotide
  Antisense strand to SEQ ID NO: 2513264
uguauacauaccuuucaug

SEQ ID NO: 2513266 - RNA, 19 nt, Artificial Sequence
  Description of Artificial Sequence: Synthetic oligonucleotide
  Sense strand starting at position 407 of SEQ ID NO: 1888134
guauguauacaguagggaa

SEQ ID NO: 2513267 - RNA, 19 nt, Artificial Sequence
  Description of Artificial Sequence: Synthetic oligonucleotide
  Antisense strand to SEQ ID NO: 2513266
uucccuacuguauacauac

SEQ ID NO: 2513268 - RNA, 19 nt, Artificial Sequence
  Description of Artificial Sequence: Synthetic oligonucleotide
  Sense strand starting at position 431 of SEQ ID NO: 1888134
gaguucuagagucagaugu

SEQ ID NO: 2513269 - RNA, 19 nt, Artificial Sequence
  Description of Artificial Sequence: Synthetic oligonucleotide
  Antisense strand to SEQ ID NO: 2513268
acaucugacucuagaacuc

SEQ ID NO: 2513270 - RNA, 19 nt, Artificial Sequence
  Description of Artificial Sequence: Synthetic oligonucleotide
  Sense strand starting at position 439 of SEQ ID NO: 1888134
gagucagauguguaaggau

SEQ ID NO: 2513271 - RNA, 19 nt, Artificial Sequence
  Description of Artificial Sequence: Synthetic oligonucleotide
  Antisense strand to SEQ ID NO: 2513270
auccuuacacaucugacuc

SEQ ID NO: 2513272 - RNA, 19 nt, Artificial Sequence
  Description of Artificial Sequence: Synthetic oligonucleotide
  Sense strand starting at position 473 of SEQ ID NO: 1888134
acuacuugcugacugagau

SEQ ID NO: 2513273 - RNA, 19 nt, Artificial Sequence
  Description of Artificial Sequence: Synthetic oligonucleotide
  Antisense strand to SEQ ID NO: 2513272
aucucagucagcaaguagu

SEQ ID NO: 2513274 - RNA, 19 nt, Artificial Sequence
  Description of Artificial Sequence: Synthetic oligonucleotide
  Sense strand starting at position 479 of SEQ ID NO: 1888134
ugcugacugagaugacuua

SEQ ID NO: 2513275 - RNA, 19 nt, Artificial Sequence
  Description of Artificial Sequence: Synthetic oligonucleotide
  Antisense strand to SEQ ID NO: 2513274
uaagucaucucagucagca

SEQ ID NO: 2513276 - RNA, 19 nt, Artificial Sequence
  Description of Artificial Sequence: Synthetic oligonucleotide
  Sense strand starting at position 553 of SEQ ID NO: 1888134
guaguagaauuaccugaga

SEQ ID NO: 2513277 - RNA, 19 nt, Artificial Sequence
  Description of Artificial Sequence: Synthetic oligonucleotide
  Antisense strand to SEQ ID NO: 2513276
ucucagguaauucuacuac

SEQ ID NO: 2513278 - RNA, 19 nt, Artificial Sequence
  Description of Artificial Sequence: Synthetic oligonucleotide
  Sense strand starting at position 690 of SEQ ID NO: 1888134
ucaucaucgaucugggaaa

SEQ ID NO: 2513279 - RNA, 19 nt, Artificial Sequence
  Description of Artificial Sequence: Synthetic oligonucleotide
  Antisense strand to SEQ ID NO: 2513278
uuucccagaucgaugauga

SEQ ID NO: 2513280 - RNA, 19 nt, Artificial Sequence
  Description of Artificial Sequence: Synthetic oligonucleotide
  Sense strand starting at position 692 of SEQ ID NO: 1888134
aucaucgaucugggaaaug

SEQ ID NO: 2513281 - RNA, 19 nt, Artificial Sequence
  Description of Artificial Sequence: Synthetic oligonucleotide
  Antisense strand to SEQ ID NO: 2513280
cauuucccagaucgaugau

SEQ ID NO: 2513282 - RNA, 19 nt, Artificial Sequence
  Description of Artificial Sequence: Synthetic oligonucleotide
  Sense strand starting at position 697 of SEQ ID NO: 1888134
cgaucugggaaauguauaa

SEQ ID NO: 2513283 - RNA, 19 nt, Artificial Sequence
  Description of Artificial Sequence: Synthetic oligonucleotide
  Antisense strand to SEQ ID NO: 2513282
uuauacauuucccagaucg

SEQ ID NO: 2513284 - RNA, 19 nt, Artificial Sequence
  Description of Artificial Sequence: Synthetic oligonucleotide
  Sense strand starting at position 1196 of SEQ ID NO: 1888134
uaaggugguauauauggua

SEQ ID NO: 2513285 - RNA, 19 nt, Artificial Sequence
  Description of Artificial Sequence: Synthetic oligonucleotide
  Antisense strand to SEQ ID NO: 2513284
uaccauauauaccaccuua

SEQ ID NO: 2513286 - RNA, 19 nt, Artificial Sequence
  Description of Artificial Sequence: Synthetic oligonucleotide
  Sense strand starting at position 1550 of SEQ ID NO: 1888134
uacguugcgguguuuaaua

SEQ ID NO: 2513287 - RNA, 19 nt, Artificial Sequence
  Description of Artificial Sequence: Synthetic oligonucleotide
  Antisense strand to SEQ ID NO: 2513286
uauuaaacaccgcaacgua

SEQ ID NO: 2513288 - RNA, 19 nt, Artificial Sequence
  Description of Artificial Sequence: Synthetic oligonucleotide
  Sense strand starting at position 1668 of SEQ ID NO: 1888134
aaaguaacgugaucaauaa

SEQ ID NO: 2513289 - RNA, 19 nt, Artificial Sequence
  Description of Artificial Sequence: Synthetic oligonucleotide
  Antisense strand to SEQ ID NO: 2513288
uuauugaucacguuacuuu

SEQ ID NO: 2513290 - RNA, 19 nt, Artificial Sequence
  Description of Artificial Sequence: Synthetic oligonucleotide
  Sense strand starting at position 1669 of SEQ ID NO: 1888134
aaguaacgugaucaauaau

SEQ ID NO: 2513291 - RNA, 19 nt, Artificial Sequence
  Description of Artificial Sequence: Synthetic oligonucleotide
  Antisense strand to SEQ ID NO: 2513290
auuauugaucacguuacuu

SEQ ID NO: 2513292 - RNA, 19 nt, Artificial Sequence
  Description of Artificial Sequence: Synthetic oligonucleotide
  Sense strand starting at position 1672 of SEQ ID NO: 1888134
uaacgugaucaauaauacg

SEQ ID NO: 2513293 - RNA, 19 nt, Artificial Sequence
  Description of Artificial Sequence: Synthetic oligonucleotide
  Antisense strand to SEQ ID NO: 2513292
cguauuauugaucacguua

SEQ ID NO: 2513294 - RNA, 19 nt, Artificial Sequence
  Description of Artificial Sequence: Synthetic oligonucleotide
  Sense strand starting at position 1677 of SEQ ID NO: 1888134
ugaucaauaauacgugaug

SEQ ID NO: 2513295 - RNA, 19 nt, Artificial Sequence
  Description of Artificial Sequence: Synthetic oligonucleotide
  Antisense strand to SEQ ID NO: 2513294
caucacguauuauugauca

SEQ ID NO: 2513296 - RNA, 19 nt, Artificial Sequence
  Description of Artificial Sequence: Synthetic oligonucleotide
  Sense strand starting at position 1762 of SEQ ID NO: 1888134
gcaggaugcccagaacacu

SEQ ID NO: 2513297 - RNA, 19 nt, Artificial Sequence
  Description of Artificial Sequence: Synthetic oligonucleotide
  Antisense strand to SEQ ID NO: 2513296
aguguucugggcauccugc

SEQ ID NO: 2513298 - RNA, 19 nt, Artificial Sequence
  Description of Artificial Sequence: Synthetic oligonucleotide
  Sense strand starting at position 1873 of SEQ ID NO: 1888134
gacguugauuuccuucuca

SEQ ID NO: 2513299 - RNA, 19 nt, Artificial Sequence
  Description of Artificial Sequence: Synthetic oligonucleotide
  Antisense strand to SEQ ID NO: 2513298
ugagaaggaaaucaacguc

SEQ ID NO: 2513300 - RNA, 19 nt, Artificial Sequence
  Description of Artificial Sequence: Synthetic oligonucleotide
  Sense strand starting at position 1929 of SEQ ID NO: 1888134
uuaugaaucuuaccagagu

SEQ ID NO: 2513301 - RNA, 19 nt, Artificial Sequence
  Description of Artificial Sequence: Synthetic oligonucleotide
  Antisense strand to SEQ ID NO: 2513300
acucugguaagauucauaa

SEQ ID NO: 2513302 - RNA, 19 nt, Artificial Sequence
  Description of Artificial Sequence: Synthetic oligonucleotide
  Sense strand starting at position 2092 of SEQ ID NO: 1888134
ugagucacaauguagaagu

SEQ ID NO: 2513303 - RNA, 19 nt, Artificial Sequence
  Description of Artificial Sequence: Synthetic oligonucleotide
  Antisense strand to SEQ ID NO: 2513302
acuucuacauugugacuca

SEQ ID NO: 2513304 - RNA, 19 nt, Artificial Sequence
  Description of Artificial Sequence: Synthetic oligonucleotide
  Sense strand starting at position 2275 of SEQ ID NO: 1888134
agcugaauuugggcuaugu

SEQ ID NO: 2513305 - RNA, 19 nt, Artificial Sequence
  Description of Artificial Sequence: Synthetic oligonucleotide
  Antisense strand to SEQ ID NO: 2513304
acauagcccaaauucagcu

SEQ ID NO: 2513306 - RNA, 19 nt, Artificial Sequence
  Description of Artificial Sequence: Synthetic oligonucleotide
  Sense strand starting at position 2479 of SEQ ID NO: 1888134
gugaucacaccacgaugaa

SEQ ID NO: 2513307 - RNA, 19 nt, Artificial Sequence
  Description of Artificial Sequence: Synthetic oligonucleotide
  Antisense strand to SEQ ID NO: 2513306
uucaucguggugugaucac

SEQ ID NO: 2513308 - RNA, 19 nt, Artificial Sequence
  Description of Artificial Sequence: Synthetic oligonucleotide
  Sense strand starting at position 2555 of SEQ ID NO: 1888134
acagaaauguguuccuuaa

SEQ ID NO: 2513309 - RNA, 19 nt, Artificial Sequence
  Description of Artificial Sequence: Synthetic oligonucleotide
  Antisense strand to SEQ ID NO: 2513308
uuaaggaacacauuucugu

SEQ ID NO: 2513310 - RNA, 19 nt, Artificial Sequence
  Description of Artificial Sequence: Synthetic oligonucleotide
  Sense strand starting at position 2557 of SEQ ID NO: 1888134
agaaauguguuccuuaaau

SEQ ID NO: 2513311 - RNA, 19 nt, Artificial Sequence
  Description of Artificial Sequence: Synthetic oligonucleotide
  Antisense strand to SEQ ID NO: 2513310
auuuaaggaacacauuucu

SEQ ID NO: 2513312 - RNA, 19 nt, Artificial Sequence
  Description of Artificial Sequence: Synthetic oligonucleotide
  Sense strand starting at position 3020 of SEQ ID NO: 1888134
guauucuacuccuugagga

SEQ ID NO: 2513313 - RNA, 19 nt, Artificial Sequence
  Description of Artificial Sequence: Synthetic oligonucleotide
  Antisense strand to SEQ ID NO: 2513312
uccucaaggaguagaauac

SEQ ID NO: 2513314 - RNA, 19 nt, Artificial Sequence
  Description of Artificial Sequence: Synthetic oligonucleotide
  Sense strand starting at position 3021 of SEQ ID NO: 1888134
uauucuacuccuugaggag

SEQ ID NO: 2513315 - RNA, 19 nt, Artificial Sequence
  Description of Artificial Sequence: Synthetic oligonucleotide
  Antisense strand to SEQ ID NO: 2513314
cuccucaaggaguagaaua

SEQ ID NO: 2513316 - RNA, 19 nt, Artificial Sequence
  Description of Artificial Sequence: Synthetic oligonucleotide
  Sense strand starting at position 3039 of SEQ ID NO: 1888134
gaugcauuugauggguguu

SEQ ID NO: 2513317 - RNA, 19 nt, Artificial Sequence
  Description of Artificial Sequence: Synthetic oligonucleotide
  Antisense strand to SEQ ID NO: 2513316
aacacccaucaaaugcauc

SEQ ID NO: 2513318 - RNA, 19 nt, Artificial Sequence
  Description of Artificial Sequence: Synthetic oligonucleotide
  Sense strand starting at position 3040 of SEQ ID NO: 1888134
augcauuugauggguguuu

SEQ ID NO: 2513319 - RNA, 19 nt, Artificial Sequence
  Description of Artificial Sequence: Synthetic oligonucleotide
  Antisense strand to SEQ ID NO: 2513318
aaacacccaucaaaugcau

SEQ ID NO: 2513320 - RNA, 19 nt, Artificial Sequence
  Description of Artificial Sequence: Synthetic oligonucleotide
  Sense strand starting at position 3135 of SEQ ID NO: 1888134
uucucuaugguagaucuga

SEQ ID NO: 2513321 - RNA, 19 nt, Artificial Sequence
  Description of Artificial Sequence: Synthetic oligonucleotide
  Antisense strand to SEQ ID NO: 2513320
ucagaucuaccauagagaa

SEQ ID NO: 2513322 - RNA, 19 nt, Artificial Sequence
  Description of Artificial Sequence: Synthetic oligonucleotide
  Sense strand starting at position 3209 of SEQ ID NO: 1888134
ugucuuuaugagcaagauc

SEQ ID NO: 2513323 - RNA, 19 nt, Artificial Sequence
  Description of Artificial Sequence: Synthetic oligonucleotide
  Antisense strand to SEQ ID NO: 2513322
gaucuugcucauaaagaca

SEQ ID NO: 2513324 - RNA, 19 nt, Artificial Sequence
  Description of Artificial Sequence: Synthetic oligonucleotide
  Sense strand starting at position 3212 of SEQ ID NO: 1888134
cuuuaugagcaagaucuca

SEQ ID NO: 2513325 - RNA, 19 nt, Artificial Sequence
  Description of Artificial Sequence: Synthetic oligonucleotide
  Antisense strand to SEQ ID NO: 2513324
ugagaucuugcucauaaag

SEQ ID NO: 2513326 - RNA, 19 nt, Artificial Sequence
  Description of Artificial Sequence: Synthetic oligonucleotide
  Sense strand starting at position 3291 of SEQ ID NO: 1888134
uguaguucugcagacagga

SEQ ID NO: 2513327 - RNA, 19 nt, Artificial Sequence
  Description of Artificial Sequence: Synthetic oligonucleotide
  Antisense strand to SEQ ID NO: 2513326
uccugucugcagaacuaca

SEQ ID NO: 2513328 - RNA, 19 nt, Artificial Sequence
  Description of Artificial Sequence: Synthetic oligonucleotide
  Sense strand starting at position 3522 of SEQ ID NO: 1888134
gggaguauuauccaccagu

SEQ ID NO: 2513329 - RNA, 19 nt, Artificial Sequence
  Description of Artificial Sequence: Synthetic oligonucleotide
  Antisense strand to SEQ ID NO: 2513328
acugguggauaauacuccc

SEQ ID NO: 2513330 - RNA, 19 nt, Artificial Sequence
  Description of Artificial Sequence: Synthetic oligonucleotide
  Sense strand starting at position 3554 of SEQ ID NO: 1888134
ggcaucugggcagaaugau

SEQ ID NO: 2513331 - RNA, 19 nt, Artificial Sequence
  Description of Artificial Sequence: Synthetic oligonucleotide
  Antisense strand to SEQ ID NO: 2513330
aucauucugcccagaugcc

SEQ ID NO: 2513332 - RNA, 19 nt, Artificial Sequence
  Description of Artificial Sequence: Synthetic oligonucleotide
  Sense strand starting at position 3601 of SEQ ID NO: 1888134
gcauuugcacccugaguuu

SEQ ID NO: 2513333 - RNA, 19 nt, Artificial Sequence
  Description of Artificial Sequence: Synthetic oligonucleotide
  Antisense strand to SEQ ID NO: 2513332
aaacucagggugcaaaugc

SEQ ID NO: 2513334 - RNA, 19 nt, Artificial Sequence
  Description of Artificial Sequence: Synthetic oligonucleotide
  Sense strand starting at position 3891 of SEQ ID NO: 1888134
gcguuaacucggguccauu

SEQ ID NO: 2513335 - RNA, 19 nt, Artificial Sequence
  Description of Artificial Sequence: Synthetic oligonucleotide
  Antisense strand to SEQ ID NO: 2513334
aauggacccgaguuaacgc

SEQ ID NO: 2513336 - RNA, 19 nt, Artificial Sequence
  Description of Artificial Sequence: Synthetic oligonucleotide
  Sense strand starting at position 16 of SEQ ID NO: 1888135
cuuggacaacuauguggaa

SEQ ID NO: 2513337 - RNA, 19 nt, Artificial Sequence
  Description of Artificial Sequence: Synthetic oligonucleotide
  Antisense strand to SEQ ID NO: 2513336
uuccacauaguuguccaag

SEQ ID NO: 2513338 - RNA, 19 nt, Artificial Sequence
  Description of Artificial Sequence: Synthetic oligonucleotide
  Sense strand starting at position 44 of SEQ ID NO: 1888135
guuaaauguacacacggua

SEQ ID NO: 2513339 - RNA, 19 nt, Artificial Sequence
  Description of Artificial Sequence: Synthetic oligonucleotide
  Antisense strand to SEQ ID NO: 2513338
uaccguguguacauuuaac

SEQ ID NO: 2513340 - RNA, 19 nt, Artificial Sequence
  Description of Artificial Sequence: Synthetic oligonucleotide
  Sense strand starting at position 129 of SEQ ID NO: 1888135
uaggaugauuauguucuau

SEQ ID NO: 2513341 - RNA, 19 nt, Artificial Sequence
  Description of Artificial Sequence: Synthetic oligonucleotide
  Antisense strand to SEQ ID NO: 2513340
auagaacauaaucauccua

SEQ ID NO: 2513342 - RNA, 19 nt, Artificial Sequence
  Description of Artificial Sequence: Synthetic oligonucleotide
  Sense strand starting at position 131 of SEQ ID NO: 1888135
ggaugauuauguucuauau

SEQ ID NO: 2513343 - RNA, 19 nt, Artificial Sequence
  Description of Artificial Sequence: Synthetic oligonucleotide
  Antisense strand to SEQ ID NO: 2513342
auauagaacauaaucaucc

SEQ ID NO: 2513344 - RNA, 19 nt, Artificial Sequence
  Description of Artificial Sequence: Synthetic oligonucleotide
  Sense strand starting at position 166 of SEQ ID NO: 1888135
guuacacaacuguauauau

SEQ ID NO: 2513345 - RNA, 19 nt, Artificial Sequence
  Description of Artificial Sequence: Synthetic oligonucleotide
  Antisense strand to SEQ ID NO: 2513344
auauauacaguuguguaac

SEQ ID NO: 2513346 - RNA, 19 nt, Artificial Sequence
  Description of Artificial Sequence: Synthetic oligonucleotide
  Sense strand starting at position 830 of SEQ ID NO: 1888135
gccagaccuuaucuugaaa

SEQ ID NO: 2513347 - RNA, 19 nt, Artificial Sequence
  Description of Artificial Sequence: Synthetic oligonucleotide
  Antisense strand to SEQ ID NO: 2513346
uuucaagauaaggucuggc

SEQ ID NO: 2513348 - RNA, 19 nt, Artificial Sequence
  Description of Artificial Sequence: Synthetic oligonucleotide
  Sense strand starting at position 1067 of SEQ ID NO: 1888135
cagggaucaccauguuggu

SEQ ID NO: 2513349 - RNA, 19 nt, Artificial Sequence
  Description of Artificial Sequence: Synthetic oligonucleotide
  Antisense strand to SEQ ID NO: 2513348
accaacauggugaucccug

SEQ ID NO: 2513350 - RNA, 19 nt, Artificial Sequence
  Description of Artificial Sequence: Synthetic oligonucleotide
  Sense strand starting at position 1093 of SEQ ID NO: 1888135
gcacgaacuccugacuuua

SEQ ID NO: 2513351 - RNA, 19 nt, Artificial Sequence
  Description of Artificial Sequence: Synthetic oligonucleotide
  Antisense strand to SEQ ID NO: 2513350
uaaagucaggaguucgugc

SEQ ID NO: 2513352 - RNA, 19 nt, Artificial Sequence
  Description of Artificial Sequence: Synthetic oligonucleotide
  Sense strand starting at position 1773 of SEQ ID NO: 1888135
aaucauugugcugggugaa

SEQ ID NO: 2513353 - RNA, 19 nt, Artificial Sequence
  Description of Artificial Sequence: Synthetic oligonucleotide
  Antisense strand to SEQ ID NO: 2513352
uucacccagcacaaugauu

SEQ ID NO: 2513354 - RNA, 19 nt, Artificial Sequence
  Description of Artificial Sequence: Synthetic oligonucleotide
  Sense strand starting at position 1774 of SEQ ID NO: 1888135
aucauugugcugggugaaa

SEQ ID NO: 2513355 - RNA, 19 nt, Artificial Sequence
  Description of Artificial Sequence: Synthetic oligonucleotide
  Antisense strand to SEQ ID NO: 2513354
uuucacccagcacaaugau

SEQ ID NO: 2513356 - RNA, 19 nt, Artificial Sequence
  Description of Artificial Sequence: Synthetic oligonucleotide
  Sense strand starting at position 1776 of SEQ ID NO: 1888135
cauugugcugggugaaaga

SEQ ID NO: 2513357 - RNA, 19 nt, Artificial Sequence
  Description of Artificial Sequence: Synthetic oligonucleotide
  Antisense strand to SEQ ID NO: 2513356
ucuuucacccagcacaaug

SEQ ID NO: 2513358 - RNA, 19 nt, Artificial Sequence
  Description of Artificial Sequence: Synthetic oligonucleotide
  Sense strand starting at position 1805 of SEQ ID NO: 1888135
aagaguacugacuguauaa

SEQ ID NO: 2513359 - RNA, 19 nt, Artificial Sequence
  Description of Artificial Sequence: Synthetic oligonucleotide
  Antisense strand to SEQ ID NO: 2513358
uuauacagucaguacucuu

SEQ ID NO: 2513360 - RNA, 19 nt, Artificial Sequence
  Description of Artificial Sequence: Synthetic oligonucleotide
  Sense strand starting at position 1807 of SEQ ID NO: 1888135
gaguacugacuguauaauu

SEQ ID NO: 2513361 - RNA, 19 nt, Artificial Sequence
  Description of Artificial Sequence: Synthetic oligonucleotide
  Antisense strand to SEQ ID NO: 2513360
aauuauacagucaguacuc

SEQ ID NO: 2513362 - RNA, 19 nt, Artificial Sequence
  Description of Artificial Sequence: Synthetic oligonucleotide
  Sense strand starting at position 1884 of SEQ ID NO: 1888135
aguaguuaccucuggagug

SEQ ID NO: 2513363 - RNA, 19 nt, Artificial Sequence
  Description of Artificial Sequence: Synthetic oligonucleotide
  Antisense strand to SEQ ID NO: 2513362
cacuccagagguaacuacu

SEQ ID NO: 2513364 - RNA, 19 nt, Artificial Sequence
  Description of Artificial Sequence: Synthetic oligonucleotide
  Sense strand starting at position 1991 of SEQ ID NO: 1888135
gaagaucugugcccuugau

SEQ ID NO: 2513365 - RNA, 19 nt, Artificial Sequence
  Description of Artificial Sequence: Synthetic oligonucleotide
  Antisense strand to SEQ ID NO: 2513364
aucaagggcacagaucuuc

SEQ ID NO: 2513366 - RNA, 19 nt, Artificial Sequence
  Description of Artificial Sequence: Synthetic oligonucleotide
  Sense strand starting at position 1995 of SEQ ID NO: 1888135
aucugugcccuugaugaaa

SEQ ID NO: 2513367 - RNA, 19 nt, Artificial Sequence
  Description of Artificial Sequence: Synthetic oligonucleotide
  Antisense strand to SEQ ID NO: 2513366
uuucaucaagggcacagau

SEQ ID NO: 2513368 - RNA, 19 nt, Artificial Sequence
  Description of Artificial Sequence: Synthetic oligonucleotide
  Sense strand starting at position 2070 of SEQ ID NO: 1888135
aaaguuaccgggugaacaa

SEQ ID NO: 2513369 - RNA, 19 nt, Artificial Sequence
  Description of Artificial Sequence: Synthetic oligonucleotide
  Antisense strand to SEQ ID NO: 2513368
uuguucacccgguaacuuu

SEQ ID NO: 2513370 - RNA, 19 nt, Artificial Sequence
  Description of Artificial Sequence: Synthetic oligonucleotide
  Sense strand starting at position 2071 of SEQ ID NO: 1888135
aaguuaccgggugaacaau

SEQ ID NO: 2513371 - RNA, 19 nt, Artificial Sequence
  Description of Artificial Sequence: Synthetic oligonucleotide
  Antisense strand to SEQ ID NO: 2513370
auuguucacccgguaacuu

SEQ ID NO: 2513372 - RNA, 19 nt, Artificial Sequence
  Description of Artificial Sequence: Synthetic oligonucleotide
  Sense strand starting at position 2408 of SEQ ID NO: 1888135
cugaacuuuccagggcaga

SEQ ID NO: 2513373 - RNA, 19 nt, Artificial Sequence
  Description of Artificial Sequence: Synthetic oligonucleotide
  Antisense strand to SEQ ID NO: 2513372
ucugcccuggaaaguucag

SEQ ID NO: 2513374 - RNA, 19 nt, Artificial Sequence
  Description of Artificial Sequence: Synthetic oligonucleotide
  Sense strand starting at position 2496 of SEQ ID NO: 1888135
cugcuuccucagcagagau

SEQ ID NO: 2513375 - RNA, 19 nt, Artificial Sequence
  Description of Artificial Sequence: Synthetic oligonucleotide
  Antisense strand to SEQ ID NO: 2513374
aucucugcugaggaagcag

SEQ ID NO: 2513376 - RNA, 19 nt, Artificial Sequence
  Description of Artificial Sequence: Synthetic oligonucleotide
  Sense strand starting at position 2607 of SEQ ID NO: 1888135
gugggcuuaggagacauua

SEQ ID NO: 2513377 - RNA, 19 nt, Artificial Sequence
  Description of Artificial Sequence: Synthetic oligonucleotide
  Antisense strand to SEQ ID NO: 2513376
uaaugucuccuaagcccac

SEQ ID NO: 2513378 - RNA, 19 nt, Artificial Sequence
  Description of Artificial Sequence: Synthetic oligonucleotide
  Sense strand starting at position 2633 of SEQ ID NO: 1888135
aagugucuagagcauacua

SEQ ID NO: 2513379 - RNA, 19 nt, Artificial Sequence
  Description of Artificial Sequence: Synthetic oligonucleotide
  Antisense strand to SEQ ID NO: 2513378
uaguaugcucuagacacuu

SEQ ID NO: 2513380 - RNA, 19 nt, Artificial Sequence
  Description of Artificial Sequence: Synthetic oligonucleotide
  Sense strand starting at position 2635 of SEQ ID NO: 1888135
gugucuagagcauacuaau

SEQ ID NO: 2513381 - RNA, 19 nt, Artificial Sequence
  Description of Artificial Sequence: Synthetic oligonucleotide
  Antisense strand to SEQ ID NO: 2513380
auuaguaugcucuagacac

SEQ ID NO: 2513382 - RNA, 19 nt, Artificial Sequence
  Description of Artificial Sequence: Synthetic oligonucleotide
  Sense strand starting at position 2667 of SEQ ID NO: 1888135
caacuaagacucugauggu

SEQ ID NO: 2513383 - RNA, 19 nt, Artificial Sequence
  Description of Artificial Sequence: Synthetic oligonucleotide
  Antisense strand to SEQ ID NO: 2513382
accaucagagucuuaguug

SEQ ID NO: 2513384 - RNA, 19 nt, Artificial Sequence
  Description of Artificial Sequence: Synthetic oligonucleotide
  Sense strand starting at position 2676 of SEQ ID NO: 1888135
cucugauggugaguuacaa

SEQ ID NO: 2513385 - RNA, 19 nt, Artificial Sequence
  Description of Artificial Sequence: Synthetic oligonucleotide
  Antisense strand to SEQ ID NO: 2513384
uuguaacucaccaucagag

SEQ ID NO: 2513386 - RNA, 19 nt, Artificial Sequence
  Description of Artificial Sequence: Synthetic oligonucleotide
  Sense strand starting at position 2973 of SEQ ID NO: 1888135
agcugcuuucgucugugaa

SEQ ID NO: 2513387 - RNA, 19 nt, Artificial Sequence
  Description of Artificial Sequence: Synthetic oligonucleotide
  Antisense strand to SEQ ID NO: 2513386
uucacagacgaaagcagcu

SEQ ID NO: 2513388 - RNA, 19 nt, Artificial Sequence
  Description of Artificial Sequence: Synthetic oligonucleotide
  Sense strand starting at position 3314 of SEQ ID NO: 1888135
gaccaagcucuugggcaua

SEQ ID NO: 2513389 - RNA, 19 nt, Artificial Sequence
  Description of Artificial Sequence: Synthetic oligonucleotide
  Antisense strand to SEQ ID NO: 2513388
uaugcccaagagcuugguc

SEQ ID NO: 2513390 - RNA, 19 nt, Artificial Sequence
  Description of Artificial Sequence: Synthetic oligonucleotide
  Sense strand starting at position 3317 of SEQ ID NO: 1888135
caagcucuugggcauaaga

SEQ ID NO: 2513391 - RNA, 19 nt, Artificial Sequence
  Description of Artificial Sequence: Synthetic oligonucleotide
  Antisense strand to SEQ ID NO: 2513390
ucuuaugcccaagagcuug

SEQ ID NO: 2513392 - RNA, 19 nt, Artificial Sequence
  Description of Artificial Sequence: Synthetic oligonucleotide
  Sense strand starting at position 3319 of SEQ ID NO: 1888135
agcucuugggcauaagaaa

SEQ ID NO: 2513393 - RNA, 19 nt, Artificial Sequence
  Description of Artificial Sequence: Synthetic oligonucleotide
  Antisense strand to SEQ ID NO: 2513392
uuucuuaugcccaagagcu

SEQ ID NO: 2513394 - RNA, 19 nt, Artificial Sequence
  Description of Artificial Sequence: Synthetic oligonucleotide
  Sense strand starting at position 3363 of SEQ ID NO: 1888135
acaaguguccuuuagacuc

SEQ ID NO: 2513395 - RNA, 19 nt, Artificial Sequence
  Description of Artificial Sequence: Synthetic oligonucleotide
  Antisense strand to SEQ ID NO: 2513394
gagucuaaaggacacuugu

SEQ ID NO: 2513396 - RNA, 19 nt, Artificial Sequence
  Description of Artificial Sequence: Synthetic oligonucleotide
  Sense strand starting at position 3454 of SEQ ID NO: 1888135
gguggauaaucauugcauc

SEQ ID NO: 2513397 - RNA, 19 nt, Artificial Sequence
  Description of Artificial Sequence: Synthetic oligonucleotide
  Antisense strand to SEQ ID NO: 2513396
gaugcaaugauuauccacc

SEQ ID NO: 2513398 - RNA, 19 nt, Artificial Sequence
  Description of Artificial Sequence: Synthetic oligonucleotide
  Sense strand starting at position 3455 of SEQ ID NO: 1888135
guggauaaucauugcauca

SEQ ID NO: 2513399 - RNA, 19 nt, Artificial Sequence
  Description of Artificial Sequence: Synthetic oligonucleotide
  Antisense strand to SEQ ID NO: 2513398
ugaugcaaugauuauccac

SEQ ID NO: 2513400 - RNA, 19 nt, Artificial Sequence
  Description of Artificial Sequence: Synthetic oligonucleotide
  Sense strand starting at position 3509 of SEQ ID NO: 1888135
ugguaaucaugccugacau

SEQ ID NO: 2513401 - RNA, 19 nt, Artificial Sequence
  Description of Artificial Sequence: Synthetic oligonucleotide
  Antisense strand to SEQ ID NO: 2513400
augucaggcaugauuacca

SEQ ID NO: 2513402 - RNA, 19 nt, Artificial Sequence
  Description of Artificial Sequence: Synthetic oligonucleotide
  Sense strand starting at position 3510 of SEQ ID NO: 1888135
gguaaucaugccugacaug

SEQ ID NO: 2513403 - RNA, 19 nt, Artificial Sequence
  Description of Artificial Sequence: Synthetic oligonucleotide
  Antisense strand to SEQ ID NO: 2513402
caugucaggcaugauuacc

SEQ ID NO: 2513404 - RNA, 19 nt, Artificial Sequence
  Description of Artificial Sequence: Synthetic oligonucleotide
  Sense strand starting at position 3511 of SEQ ID NO: 1888135
guaaucaugccugacaugu

SEQ ID NO: 2513405 - RNA, 19 nt, Artificial Sequence
  Description of Artificial Sequence: Synthetic oligonucleotide
  Antisense strand to SEQ ID NO: 2513404
acaugucaggcaugauuac

SEQ ID NO: 2513406 - RNA, 19 nt, Artificial Sequence
  Description of Artificial Sequence: Synthetic oligonucleotide
  Sense strand starting at position 3542 of SEQ ID NO: 1888135
ugucaaagacagcaucuua

SEQ ID NO: 2513407 - RNA, 19 nt, Artificial Sequence
  Description of Artificial Sequence: Synthetic oligonucleotide
  Antisense strand to SEQ ID NO: 2513406
uaagaugcugucuuugaca

SEQ ID NO: 2513408 - RNA, 19 nt, Artificial Sequence
  Description of Artificial Sequence: Synthetic oligonucleotide
  Sense strand starting at position 3639 of SEQ ID NO: 1888135
agugguauucagggaggau

SEQ ID NO: 2513409 - RNA, 19 nt, Artificial Sequence
  Description of Artificial Sequence: Synthetic oligonucleotide
  Antisense strand to SEQ ID NO: 2513408
auccucccugaauaccacu

SEQ ID NO: 2513410 - RNA, 19 nt, Artificial Sequence
  Description of Artificial Sequence: Synthetic oligonucleotide
  Sense strand starting at position 3653 of SEQ ID NO: 1888135
aggauuuccucagagaucu

SEQ ID NO: 2513411 - RNA, 19 nt, Artificial Sequence
  Description of Artificial Sequence: Synthetic oligonucleotide
  Antisense strand to SEQ ID NO: 2513410
agaucucugaggaaauccu

SEQ ID NO: 2513412 - RNA, 19 nt, Artificial Sequence
  Description of Artificial Sequence: Synthetic oligonucleotide
  Sense strand starting at position 3659 of SEQ ID NO: 1888135
uccucagagaucuggguuu

SEQ ID NO: 2513413 - RNA, 19 nt, Artificial Sequence
  Description of Artificial Sequence: Synthetic oligonucleotide
  Antisense strand to SEQ ID NO: 2513412
aaacccagaucucugagga

SEQ ID NO: 2513414 - RNA, 19 nt, Artificial Sequence
  Description of Artificial Sequence: Synthetic oligonucleotide
  Sense strand starting at position 3705 of SEQ ID NO: 1888135
ccaauuucuugagggaaug

SEQ ID NO: 2513415 - RNA, 19 nt, Artificial Sequence
  Description of Artificial Sequence: Synthetic oligonucleotide
  Antisense strand to SEQ ID NO: 2513414
cauucccucaagaaauugg

SEQ ID NO: 2513416 - RNA, 19 nt, Artificial Sequence
  Description of Artificial Sequence: Synthetic oligonucleotide
  Sense strand starting at position 7 of SEQ ID NO: 1888136
gugcaugaauucuuucuua

SEQ ID NO: 2513417 - RNA, 19 nt, Artificial Sequence
  Description of Artificial Sequence: Synthetic oligonucleotide
  Antisense strand to SEQ ID NO: 2513416
uaagaaagaauucaugcac

SEQ ID NO: 2513418 - RNA, 19 nt, Artificial Sequence
  Description of Artificial Sequence: Synthetic oligonucleotide
  Sense strand starting at position 32 of SEQ ID NO: 1888136
gagccuguuggagauguuu

SEQ ID NO: 2513419 - RNA, 19 nt, Artificial Sequence
  Description of Artificial Sequence: Synthetic oligonucleotide
  Antisense strand to SEQ ID NO: 2513418
aaacaucuccaacaggcuc

SEQ ID NO: 2513420 - RNA, 19 nt, Artificial Sequence
  Description of Artificial Sequence: Synthetic oligonucleotide
  Sense strand starting at position 88 of SEQ ID NO: 1888136
cuuguugacucacagagga

SEQ ID NO: 2513421 - RNA, 19 nt, Artificial Sequence
  Description of Artificial Sequence: Synthetic oligonucleotide
  Antisense strand to SEQ ID NO: 2513420
uccucugugagucaacaag

SEQ ID NO: 2513422 - RNA, 19 nt, Artificial Sequence
  Description of Artificial Sequence: Synthetic oligonucleotide
  Sense strand starting at position 104 of SEQ ID NO: 1888136
ggauacgaaucauauacaa

SEQ ID NO: 2513423 - RNA, 19 nt, Artificial Sequence
  Description of Artificial Sequence: Synthetic oligonucleotide
  Antisense strand to SEQ ID NO: 2513422
uuguauaugauucguaucc

SEQ ID NO: 2513424 - RNA, 19 nt, Artificial Sequence
  Description of Artificial Sequence: Synthetic oligonucleotide
  Sense strand starting at position 291 of SEQ ID NO: 1888136
cgucaugauuuggagaguu

SEQ ID NO: 2513425 - RNA, 19 nt, Artificial Sequence
  Description of Artificial Sequence: Synthetic oligonucleotide
  Antisense strand to SEQ ID NO: 2513424
aacucuccaaaucaugacg

SEQ ID NO: 2513426 - RNA, 19 nt, Artificial Sequence
  Description of Artificial Sequence: Synthetic oligonucleotide
  Sense strand starting at position 381 of SEQ ID NO: 1888136
gggcauuggucucuccaca

SEQ ID NO: 2513427 - RNA, 19 nt, Artificial Sequence
  Description of Artificial Sequence: Synthetic oligonucleotide
  Antisense strand to SEQ ID NO: 2513426
uguggagagaccaaugccc

SEQ ID NO: 2513428 - RNA, 19 nt, Artificial Sequence
  Description of Artificial Sequence: Synthetic oligonucleotide
  Sense strand starting at position 592 of SEQ ID NO: 1888136
gucucauccagugaacugu

SEQ ID NO: 2513429 - RNA, 19 nt, Artificial Sequence
  Description of Artificial Sequence: Synthetic oligonucleotide
  Antisense strand to SEQ ID NO: 2513428
acaguucacuggaugagac

SEQ ID NO: 2513430 - RNA, 19 nt, Artificial Sequence
  Description of Artificial Sequence: Synthetic oligonucleotide
  Sense strand starting at position 1010 of SEQ ID NO: 1888136
ucgagucuugcccuuguuu

SEQ ID NO: 2513431 - RNA, 19 nt, Artificial Sequence
  Description of Artificial Sequence: Synthetic oligonucleotide
  Antisense strand to SEQ ID NO: 2513430
aaacaagggcaagacucga

SEQ ID NO: 2513432 - RNA, 19 nt, Artificial Sequence
  Description of Artificial Sequence: Synthetic oligonucleotide
  Sense strand starting at position 1032 of SEQ ID NO: 1888136
acccgcagugucuauagau

SEQ ID NO: 2513433 - RNA, 19 nt, Artificial Sequence
  Description of Artificial Sequence: Synthetic oligonucleotide
  Antisense strand to SEQ ID NO: 2513432
aucuauagacacugcgggu

SEQ ID NO: 2513434 - RNA, 19 nt, Artificial Sequence
  Description of Artificial Sequence: Synthetic oligonucleotide
  Sense strand starting at position 1075 of SEQ ID NO: 1888136
auuugcaaaugcuugguua

SEQ ID NO: 2513435 - RNA, 19 nt, Artificial Sequence
  Description of Artificial Sequence: Synthetic oligonucleotide
  Antisense strand to SEQ ID NO: 2513434
uaaccaagcauuugcaaau

SEQ ID NO: 2513436 - RNA, 19 nt, Artificial Sequence
  Description of Artificial Sequence: Synthetic oligonucleotide
  Sense strand starting at position 1076 of SEQ ID NO: 1888136
uuugcaaaugcuugguuaa

SEQ ID NO: 2513437 - RNA, 19 nt, Artificial Sequence
  Description of Artificial Sequence: Synthetic oligonucleotide
  Antisense strand to SEQ ID NO: 2513436
uuaaccaagcauuugcaaa

SEQ ID NO: 2513438 - RNA, 19 nt, Artificial Sequence
  Description of Artificial Sequence: Synthetic oligonucleotide
  Sense strand starting at position 1077 of SEQ ID NO: 1888136
uugcaaaugcuugguuaac

SEQ ID NO: 2513439 - RNA, 19 nt, Artificial Sequence
  Description of Artificial Sequence: Synthetic oligonucleotide
  Antisense strand to SEQ ID NO: 2513438
guuaaccaagcauuugcaa

SEQ ID NO: 2513440 - RNA, 19 nt, Artificial Sequence
  Description of Artificial Sequence: Synthetic oligonucleotide
  Sense strand starting at position 1078 of SEQ ID NO: 1888136
ugcaaaugcuugguuaaca

SEQ ID NO: 2513441 - RNA, 19 nt, Artificial Sequence
  Description of Artificial Sequence: Synthetic oligonucleotide
  Antisense strand to SEQ ID NO: 2513440
uguuaaccaagcauuugca

SEQ ID NO: 2513442 - RNA, 19 nt, Artificial Sequence
  Description of Artificial Sequence: Synthetic oligonucleotide
  Sense strand starting at position 1079 of SEQ ID NO: 1888136
gcaaaugcuugguuaacaa

SEQ ID NO: 2513443 - RNA, 19 nt, Artificial Sequence
  Description of Artificial Sequence: Synthetic oligonucleotide
  Antisense strand to SEQ ID NO: 2513442
uuguuaaccaagcauuugc

SEQ ID NO: 2513444 - RNA, 19 nt, Artificial Sequence
  Description of Artificial Sequence: Synthetic oligonucleotide
  Sense strand starting at position 1083 of SEQ ID NO: 1888136
augcuugguuaacaaauga

SEQ ID NO: 2513445 - RNA, 19 nt, Artificial Sequence
  Description of Artificial Sequence: Synthetic oligonucleotide
  Antisense strand to SEQ ID NO: 2513444
ucauuuguuaaccaagcau

SEQ ID NO: 2513446 - RNA, 19 nt, Artificial Sequence
  Description of Artificial Sequence: Synthetic oligonucleotide
  Sense strand starting at position 1142 of SEQ ID NO: 1888136
ugggcauccgaguguacuu

SEQ ID NO: 2513447 - RNA, 19 nt, Artificial Sequence
  Description of Artificial Sequence: Synthetic oligonucleotide
  Antisense strand to SEQ ID NO: 2513446
aaguacacucggaugccca

SEQ ID NO: 2513448 - RNA, 19 nt, Artificial Sequence
  Description of Artificial Sequence: Synthetic oligonucleotide
  Sense strand starting at position 1160 of SEQ ID NO: 1888136
uuugaagaguaguuccuga

SEQ ID NO: 2513449 - RNA, 19 nt, Artificial Sequence
  Description of Artificial Sequence: Synthetic oligonucleotide
  Antisense strand to SEQ ID NO: 2513448
ucaggaacuacucuucaaa

SEQ ID NO: 2513450 - RNA, 19 nt, Artificial Sequence
  Description of Artificial Sequence: Synthetic oligonucleotide
  Sense strand starting at position 1274 of SEQ ID NO: 1888136
cucucugagggcugaaguu

SEQ ID NO: 2513451 - RNA, 19 nt, Artificial Sequence
  Description of Artificial Sequence: Synthetic oligonucleotide
  Antisense strand to SEQ ID NO: 2513450
aacuucagcccucagagag

SEQ ID NO: 2513452 - RNA, 19 nt, Artificial Sequence
  Description of Artificial Sequence: Synthetic oligonucleotide
  Sense strand starting at position 1288 of SEQ ID NO: 1888136
aaguuuccaggucgaaacu

SEQ ID NO: 2513453 - RNA, 19 nt, Artificial Sequence
  Description of Artificial Sequence: Synthetic oligonucleotide
  Antisense strand to SEQ ID NO: 2513452
aguuucgaccuggaaacuu

SEQ ID NO: 2513454 - RNA, 19 nt, Artificial Sequence
  Description of Artificial Sequence: Synthetic oligonucleotide
  Sense strand starting at position 1299 of SEQ ID NO: 1888136
ucgaaacuucugugcucga

SEQ ID NO: 2513455 - RNA, 19 nt, Artificial Sequence
  Description of Artificial Sequence: Synthetic oligonucleotide
  Antisense strand to SEQ ID NO: 2513454
ucgagcacagaaguuucga

SEQ ID NO: 2513456 - RNA, 19 nt, Artificial Sequence
  Description of Artificial Sequence: Synthetic oligonucleotide
  Sense strand starting at position 1310 of SEQ ID NO: 1888136
gugcucgaccuggaaguuu

SEQ ID NO: 2513457 - RNA, 19 nt, Artificial Sequence
  Description of Artificial Sequence: Synthetic oligonucleotide
  Antisense strand to SEQ ID NO: 2513456
aaacuuccaggucgagcac

SEQ ID NO: 2513458 - RNA, 19 nt, Artificial Sequence
  Description of Artificial Sequence: Synthetic oligonucleotide
  Sense strand starting at position 1407 of SEQ ID NO: 1888136
guacaaccucucugcuaga

SEQ ID NO: 2513459 - RNA, 19 nt, Artificial Sequence
  Description of Artificial Sequence: Synthetic oligonucleotide
  Antisense strand to SEQ ID NO: 2513458
ucuagcagagagguuguac

SEQ ID NO: 2513460 - RNA, 19 nt, Artificial Sequence
  Description of Artificial Sequence: Synthetic oligonucleotide
  Sense strand starting at position 1478 of SEQ ID NO: 1888136
ggacauguguugccuaagu

SEQ ID NO: 2513461 - RNA, 19 nt, Artificial Sequence
  Description of Artificial Sequence: Synthetic oligonucleotide
  Antisense strand to SEQ ID NO: 2513460
acuuaggcaacacaugucc

SEQ ID NO: 2513462 - RNA, 19 nt, Artificial Sequence
  Description of Artificial Sequence: Synthetic oligonucleotide
  Sense strand starting at position 1562 of SEQ ID NO: 1888136
ugcauuauggcccaggaau

SEQ ID NO: 2513463 - RNA, 19 nt, Artificial Sequence
  Description of Artificial Sequence: Synthetic oligonucleotide
  Antisense strand to SEQ ID NO: 2513462
auuccugggccauaaugca

SEQ ID NO: 2513464 - RNA, 19 nt, Artificial Sequence
  Description of Artificial Sequence: Synthetic oligonucleotide
  Sense strand starting at position 1724 of SEQ ID NO: 1888136
gcaggaggguggucaacua

SEQ ID NO: 2513465 - RNA, 19 nt, Artificial Sequence
  Description of Artificial Sequence: Synthetic oligonucleotide
  Antisense strand to SEQ ID NO: 2513464
uaguugaccacccuccugc

SEQ ID NO: 2513466 - RNA, 19 nt, Artificial Sequence
  Description of Artificial Sequence: Synthetic oligonucleotide
  Sense strand starting at position 1828 of SEQ ID NO: 1888136
agagguuuccuuugcacca

SEQ ID NO: 2513467 - RNA, 19 nt, Artificial Sequence
  Description of Artificial Sequence: Synthetic oligonucleotide
  Antisense strand to SEQ ID NO: 2513466
uggugcaaaggaaaccucu

SEQ ID NO: 2513468 - RNA, 19 nt, Artificial Sequence
  Description of Artificial Sequence: Synthetic oligonucleotide
  Sense strand starting at position 1829 of SEQ ID NO: 1888136
gagguuuccuuugcaccaa

SEQ ID NO: 2513469 - RNA, 19 nt, Artificial Sequence
  Description of Artificial Sequence: Synthetic oligonucleotide
  Antisense strand to SEQ ID NO: 2513468
uuggugcaaaggaaaccuc

SEQ ID NO: 2513470 - RNA, 19 nt, Artificial Sequence
  Description of Artificial Sequence: Synthetic oligonucleotide
  Sense strand starting at position 1985 of SEQ ID NO: 1888136
gggaguccuugucagagaa

SEQ ID NO: 2513471 - RNA, 19 nt, Artificial Sequence
  Description of Artificial Sequence: Synthetic oligonucleotide
  Antisense strand to SEQ ID NO: 2513470
uucucugacaaggacuccc

SEQ ID NO: 2513472 - RNA, 19 nt, Artificial Sequence
  Description of Artificial Sequence: Synthetic oligonucleotide
  Sense strand starting at position 1987 of SEQ ID NO: 1888136
gaguccuugucagagaagg

SEQ ID NO: 2513473 - RNA, 19 nt, Artificial Sequence
  Description of Artificial Sequence: Synthetic oligonucleotide
  Antisense strand to SEQ ID NO: 2513472
ccuucucugacaaggacuc

SEQ ID NO: 2513474 - RNA, 19 nt, Artificial Sequence
  Description of Artificial Sequence: Synthetic oligonucleotide
  Sense strand starting at position 1989 of SEQ ID NO: 1888136
guccuugucagagaaggau

SEQ ID NO: 2513475 - RNA, 19 nt, Artificial Sequence
  Description of Artificial Sequence: Synthetic oligonucleotide
  Antisense strand to SEQ ID NO: 2513474
auccuucucugacaaggac

SEQ ID NO: 2513476 - RNA, 19 nt, Artificial Sequence
  Description of Artificial Sequence: Synthetic oligonucleotide
  Sense strand starting at position 2183 of SEQ ID NO: 1888136
ggacucuugugacaucacu

SEQ ID NO: 2513477 - RNA, 19 nt, Artificial Sequence
  Description of Artificial Sequence: Synthetic oligonucleotide
  Antisense strand to SEQ ID NO: 2513476
agugaugucacaagagucc

SEQ ID NO: 2513478 - RNA, 19 nt, Artificial Sequence
  Description of Artificial Sequence: Synthetic oligonucleotide
  Sense strand starting at position 2717 of SEQ ID NO: 1888136
agucuaauguugccaucaa

SEQ ID NO: 2513479 - RNA, 19 nt, Artificial Sequence
  Description of Artificial Sequence: Synthetic oligonucleotide
  Antisense strand to SEQ ID NO: 2513478
uugauggcaacauuagacu

SEQ ID NO: 2513480 - RNA, 19 nt, Artificial Sequence
  Description of Artificial Sequence: Synthetic oligonucleotide
  Sense strand starting at position 2730 of SEQ ID NO: 1888136
caucaagauugguagucca

SEQ ID NO: 2513481 - RNA, 19 nt, Artificial Sequence
  Description of Artificial Sequence: Synthetic oligonucleotide
  Antisense strand to SEQ ID NO: 2513480
uggacuaccaaucuugaug

SEQ ID NO: 2513482 - RNA, 19 nt, Artificial Sequence
  Description of Artificial Sequence: Synthetic oligonucleotide
  Sense strand starting at position 3348 of SEQ ID NO: 1888136
uggaguguguuauccagcu

SEQ ID NO: 2513483 - RNA, 19 nt, Artificial Sequence
  Description of Artificial Sequence: Synthetic oligonucleotide
  Antisense strand to SEQ ID NO: 2513482
agcuggauaacacacucca

SEQ ID NO: 2513484 - RNA, 19 nt, Artificial Sequence
  Description of Artificial Sequence: Synthetic oligonucleotide
  Sense strand starting at position 3352 of SEQ ID NO: 1888136
guguguuauccagcucuuc

SEQ ID NO: 2513485 - RNA, 19 nt, Artificial Sequence
  Description of Artificial Sequence: Synthetic oligonucleotide
  Antisense strand to SEQ ID NO: 2513484
gaagagcuggauaacacac

SEQ ID NO: 2513486 - RNA, 19 nt, Artificial Sequence
  Description of Artificial Sequence: Synthetic oligonucleotide
  Sense strand starting at position 3418 of SEQ ID NO: 1888136
gagauauaccuuugugaaa

SEQ ID NO: 2513487 - RNA, 19 nt, Artificial Sequence
  Description of Artificial Sequence: Synthetic oligonucleotide
  Antisense strand to SEQ ID NO: 2513486
uuucacaaagguauaucuc

SEQ ID NO: 2513488 - RNA, 19 nt, Artificial Sequence
  Description of Artificial Sequence: Synthetic oligonucleotide
  Sense strand starting at position 3532 of SEQ ID NO: 1888136
ggaccacaguucugaggaa

SEQ ID NO: 2513489 - RNA, 19 nt, Artificial Sequence
  Description of Artificial Sequence: Synthetic oligonucleotide
  Antisense strand to SEQ ID NO: 2513488
uuccucagaacuguggucc

SEQ ID NO: 2513490 - RNA, 19 nt, Artificial Sequence
  Description of Artificial Sequence: Synthetic oligonucleotide
  Sense strand starting at position 3533 of SEQ ID NO: 1888136
gaccacaguucugaggaaa

SEQ ID NO: 2513491 - RNA, 19 nt, Artificial Sequence
  Description of Artificial Sequence: Synthetic oligonucleotide
  Antisense strand to SEQ ID NO: 2513490
uuuccucagaacugugguc

SEQ ID NO: 2513492 - RNA, 19 nt, Artificial Sequence
  Description of Artificial Sequence: Synthetic oligonucleotide
  Sense strand starting at position 3633 of SEQ ID NO: 1888136
cacacucggucaucagaga

SEQ ID NO: 2513493 - RNA, 19 nt, Artificial Sequence
  Description of Artificial Sequence: Synthetic oligonucleotide
  Antisense strand to SEQ ID NO: 2513492
ucucugaugaccgagugug

SEQ ID NO: 2513494 - RNA, 19 nt, Artificial Sequence
  Description of Artificial Sequence: Synthetic oligonucleotide
  Sense strand starting at position 3944 of SEQ ID NO: 1888136
cagagauugggugguguca

SEQ ID NO: 2513495 - RNA, 19 nt, Artificial Sequence
  Description of Artificial Sequence: Synthetic oligonucleotide
  Antisense strand to SEQ ID NO: 2513494
ugacaccacccaaucucug

SEQ ID NO: 2513496 - RNA, 19 nt, Artificial Sequence
  Description of Artificial Sequence: Synthetic oligonucleotide
  Sense strand starting at position 139 of SEQ ID NO: 1888137
ucucauuaguuggccaaga

SEQ ID NO: 2513497 - RNA, 19 nt, Artificial Sequence
  Description of Artificial Sequence: Synthetic oligonucleotide
  Antisense strand to SEQ ID NO: 2513496
ucuuggccaacuaaugaga

SEQ ID NO: 2513498 - RNA, 19 nt, Artificial Sequence
  Description of Artificial Sequence: Synthetic oligonucleotide
  Sense strand starting at position 140 of SEQ ID NO: 1888137
cucauuaguuggccaagaa

SEQ ID NO: 2513499 - RNA, 19 nt, Artificial Sequence
  Description of Artificial Sequence: Synthetic oligonucleotide
  Antisense strand to SEQ ID NO: 2513498
uucuuggccaacuaaugag

SEQ ID NO: 2513500 - RNA, 19 nt, Artificial Sequence
  Description of Artificial Sequence: Synthetic oligonucleotide
  Sense strand starting at position 141 of SEQ ID NO: 1888137
ucauuaguuggccaagaaa

SEQ ID NO: 2513501 - RNA, 19 nt, Artificial Sequence
  Description of Artificial Sequence: Synthetic oligonucleotide
  Antisense strand to SEQ ID NO: 2513500
uuucuuggccaacuaauga

SEQ ID NO: 2513502 - RNA, 19 nt, Artificial Sequence
  Description of Artificial Sequence: Synthetic oligonucleotide
  Sense strand starting at position 144 of SEQ ID NO: 1888137
uuaguuggccaagaaaugu

SEQ ID NO: 2513503 - RNA, 19 nt, Artificial Sequence
  Description of Artificial Sequence: Synthetic oligonucleotide
  Antisense strand to SEQ ID NO: 2513502
acauuucuuggccaacuaa

SEQ ID NO: 2513504 - RNA, 19 nt, Artificial Sequence
  Description of Artificial Sequence: Synthetic oligonucleotide
  Sense strand starting at position 157 of SEQ ID NO: 1888137
aaauguuauuucgcaaggu

SEQ ID NO: 2513505 - RNA, 19 nt, Artificial Sequence
  Description of Artificial Sequence: Synthetic oligonucleotide
  Antisense strand to SEQ ID NO: 2513504
accuugcgaaauaacauuu

SEQ ID NO: 2513506 - RNA, 19 nt, Artificial Sequence
  Description of Artificial Sequence: Synthetic oligonucleotide
  Sense strand starting at position 269 of SEQ ID NO: 1888137
augaauuagugucucuauc

SEQ ID NO: 2513507 - RNA, 19 nt, Artificial Sequence
  Description of Artificial Sequence: Synthetic oligonucleotide
  Antisense strand to SEQ ID NO: 2513506
gauagagacacuaauucau

SEQ ID NO: 2513508 - RNA, 19 nt, Artificial Sequence
  Description of Artificial Sequence: Synthetic oligonucleotide
  Sense strand starting at position 334 of SEQ ID NO: 1888137
gauaucaccguuuggauau

SEQ ID NO: 2513509 - RNA, 19 nt, Artificial Sequence
  Description of Artificial Sequence: Synthetic oligonucleotide
  Antisense strand to SEQ ID NO: 2513508
auauccaaacggugauauc

SEQ ID NO: 2513510 - RNA, 19 nt, Artificial Sequence
  Description of Artificial Sequence: Synthetic oligonucleotide
  Sense strand starting at position 416 of SEQ ID NO: 1888137
ugacucuacccucaguguu

SEQ ID NO: 2513511 - RNA, 19 nt, Artificial Sequence
  Description of Artificial Sequence: Synthetic oligonucleotide
  Antisense strand to SEQ ID NO: 2513510
aacacugaggguagaguca

SEQ ID NO: 2513512 - RNA, 19 nt, Artificial Sequence
  Description of Artificial Sequence: Synthetic oligonucleotide
  Sense strand starting at position 434 of SEQ ID NO: 1888137
uuucuauugcagggaauga

SEQ ID NO: 2513513 - RNA, 19 nt, Artificial Sequence
  Description of Artificial Sequence: Synthetic oligonucleotide
  Antisense strand to SEQ ID NO: 2513512
ucauucccugcaauagaaa

SEQ ID NO: 2513514 - RNA, 19 nt, Artificial Sequence
  Description of Artificial Sequence: Synthetic oligonucleotide
  Sense strand starting at position 489 of SEQ ID NO: 1888137
ggaguuauccuuuauaacc

SEQ ID NO: 2513515 - RNA, 19 nt, Artificial Sequence
  Description of Artificial Sequence: Synthetic oligonucleotide
  Antisense strand to SEQ ID NO: 2513514
gguuauaaaggauaacucc

SEQ ID NO: 2513516 - RNA, 19 nt, Artificial Sequence
  Description of Artificial Sequence: Synthetic oligonucleotide
  Sense strand starting at position 526 of SEQ ID NO: 1888137
gcugcaugcccuguggauu

SEQ ID NO: 2513517 - RNA, 19 nt, Artificial Sequence
  Description of Artificial Sequence: Synthetic oligonucleotide
  Antisense strand to SEQ ID NO: 2513516
aauccacagggcaugcagc

SEQ ID NO: 2513518 - RNA, 19 nt, Artificial Sequence
  Description of Artificial Sequence: Synthetic oligonucleotide
  Sense strand starting at position 630 of SEQ ID NO: 1888137
aguuuacugccuuacagua

SEQ ID NO: 2513519 - RNA, 19 nt, Artificial Sequence
  Description of Artificial Sequence: Synthetic oligonucleotide
  Antisense strand to SEQ ID NO: 2513518
uacuguaaggcaguaaacu

SEQ ID NO: 2513520 - RNA, 19 nt, Artificial Sequence
  Description of Artificial Sequence: Synthetic oligonucleotide
  Sense strand starting at position 799 of SEQ ID NO: 1888137
uaugaugaccugcaugauu

SEQ ID NO: 2513521 - RNA, 19 nt, Artificial Sequence
  Description of Artificial Sequence: Synthetic oligonucleotide
  Antisense strand to SEQ ID NO: 2513520
aaucaugcaggucaucaua

SEQ ID NO: 2513522 - RNA, 19 nt, Artificial Sequence
  Description of Artificial Sequence: Synthetic oligonucleotide
  Sense strand starting at position 1218 of SEQ ID NO: 1888137
ccuggaucauuccuacaga

SEQ ID NO: 2513523 - RNA, 19 nt, Artificial Sequence
  Description of Artificial Sequence: Synthetic oligonucleotide
  Antisense strand to SEQ ID NO: 2513522
ucuguaggaaugauccagg

SEQ ID NO: 2513524 - RNA, 19 nt, Artificial Sequence
  Description of Artificial Sequence: Synthetic oligonucleotide
  Sense strand starting at position 1317 of SEQ ID NO: 1888137
uguaucuaucuugaucacu

SEQ ID NO: 2513525 - RNA, 19 nt, Artificial Sequence
  Description of Artificial Sequence: Synthetic oligonucleotide
  Antisense strand to SEQ ID NO: 2513524
agugaucaagauagauaca

SEQ ID NO: 2513526 - RNA, 19 nt, Artificial Sequence
  Description of Artificial Sequence: Synthetic oligonucleotide
  Sense strand starting at position 1534 of SEQ ID NO: 1888137
uucgguuuauaauuaccaa

SEQ ID NO: 2513527 - RNA, 19 nt, Artificial Sequence
  Description of Artificial Sequence: Synthetic oligonucleotide
  Antisense strand to SEQ ID NO: 2513526
uugguaauuauaaaccgaa

SEQ ID NO: 2513528 - RNA, 19 nt, Artificial Sequence
  Description of Artificial Sequence: Synthetic oligonucleotide
  Sense strand starting at position 1571 of SEQ ID NO: 1888137
aggagugaaaucugccuga

SEQ ID NO: 2513529 - RNA, 19 nt, Artificial Sequence
  Description of Artificial Sequence: Synthetic oligonucleotide
  Antisense strand to SEQ ID NO: 2513528
ucaggcagauuucacuccu

SEQ ID NO: 2513530 - RNA, 19 nt, Artificial Sequence
  Description of Artificial Sequence: Synthetic oligonucleotide
  Sense strand starting at position 1574 of SEQ ID NO: 1888137
agugaaaucugccugaccu

SEQ ID NO: 2513531 - RNA, 19 nt, Artificial Sequence
  Description of Artificial Sequence: Synthetic oligonucleotide
  Antisense strand to SEQ ID NO: 2513530
aggucaggcagauuucacu

SEQ ID NO: 2513532 - RNA, 19 nt, Artificial Sequence
  Description of Artificial Sequence: Synthetic oligonucleotide
  Sense strand starting at position 1575 of SEQ ID NO: 1888137
gugaaaucugccugaccua

SEQ ID NO: 2513533 - RNA, 19 nt, Artificial Sequence
  Description of Artificial Sequence: Synthetic oligonucleotide
  Antisense strand to SEQ ID NO: 2513532
uaggucaggcagauuucac

SEQ ID NO: 2513534 - RNA, 19 nt, Artificial Sequence
  Description of Artificial Sequence: Synthetic oligonucleotide
  Sense strand starting at position 1576 of SEQ ID NO: 1888137
ugaaaucugccugaccuau

SEQ ID NO: 2513535 - RNA, 19 nt, Artificial Sequence
  Description of Artificial Sequence: Synthetic oligonucleotide
  Antisense strand to SEQ ID NO: 2513534
auaggucaggcagauuuca

SEQ ID NO: 2513536 - RNA, 19 nt, Artificial Sequence
  Description of Artificial Sequence: Synthetic oligonucleotide
  Sense strand starting at position 1639 of SEQ ID NO: 1888137
agaguauagauguauguuu

SEQ ID NO: 2513537 - RNA, 19 nt, Artificial Sequence
  Description of Artificial Sequence: Synthetic oligonucleotide
  Antisense strand to SEQ ID NO: 2513536
aaacauacaucuauacucu

SEQ ID NO: 2513538 - RNA, 19 nt, Artificial Sequence
  Description of Artificial Sequence: Synthetic oligonucleotide
  Sense strand starting at position 1712 of SEQ ID NO: 1888137
cugaacuggccucauaaau

SEQ ID NO: 2513539 - RNA, 19 nt, Artificial Sequence
  Description of Artificial Sequence: Synthetic oligonucleotide
  Antisense strand to SEQ ID NO: 2513538
auuuaugaggccaguucag

SEQ ID NO: 2513540 - RNA, 19 nt, Artificial Sequence
  Description of Artificial Sequence: Synthetic oligonucleotide
  Sense strand starting at position 2039 of SEQ ID NO: 1888137
ucgagaaaucccgacaagu

SEQ ID NO: 2513541 - RNA, 19 nt, Artificial Sequence
  Description of Artificial Sequence: Synthetic oligonucleotide
  Antisense strand to SEQ ID NO: 2513540
acuugucgggauuucucga

SEQ ID NO: 2513542 - RNA, 19 nt, Artificial Sequence
  Description of Artificial Sequence: Synthetic oligonucleotide
  Sense strand starting at position 2100 of SEQ ID NO: 1888137
uucucuacagagugaugau

SEQ ID NO: 2513543 - RNA, 19 nt, Artificial Sequence
  Description of Artificial Sequence: Synthetic oligonucleotide
  Antisense strand to SEQ ID NO: 2513542
aucaucacucuguagagaa

SEQ ID NO: 2513544 - RNA, 19 nt, Artificial Sequence
  Description of Artificial Sequence: Synthetic oligonucleotide
  Sense strand starting at position 2110 of SEQ ID NO: 1888137
agugaugauuuccaauuaa

SEQ ID NO: 2513545 - RNA, 19 nt, Artificial Sequence
  Description of Artificial Sequence: Synthetic oligonucleotide
  Antisense strand to SEQ ID NO: 2513544
uuaauuggaaaucaucacu

SEQ ID NO: 2513546 - RNA, 19 nt, Artificial Sequence
  Description of Artificial Sequence: Synthetic oligonucleotide
  Sense strand starting at position 2164 of SEQ ID NO: 1888137
auauauacuuuggugggaa

SEQ ID NO: 2513547 - RNA, 19 nt, Artificial Sequence
  Description of Artificial Sequence: Synthetic oligonucleotide
  Antisense strand to SEQ ID NO: 2513546
uucccaccaaaguauauau

SEQ ID NO: 2513548 - RNA, 19 nt, Artificial Sequence
  Description of Artificial Sequence: Synthetic oligonucleotide
  Sense strand starting at position 2167 of SEQ ID NO: 1888137
uauacuuuggugggaauga

SEQ ID NO: 2513549 - RNA, 19 nt, Artificial Sequence
  Description of Artificial Sequence: Synthetic oligonucleotide
  Antisense strand to SEQ ID NO: 2513548
ucauucccaccaaaguaua

SEQ ID NO: 2513550 - RNA, 19 nt, Artificial Sequence
  Description of Artificial Sequence: Synthetic oligonucleotide
  Sense strand starting at position 2220 of SEQ ID NO: 1888137
aagucagagcucugagaag

SEQ ID NO: 2513551 - RNA, 19 nt, Artificial Sequence
  Description of Artificial Sequence: Synthetic oligonucleotide
  Antisense strand to SEQ ID NO: 2513550
cuucucagagcucugacuu

SEQ ID NO: 2513552 - RNA, 19 nt, Artificial Sequence
  Description of Artificial Sequence: Synthetic oligonucleotide
  Sense strand starting at position 2324 of SEQ ID NO: 1888137
ccaggcuuggcucaaucaa

SEQ ID NO: 2513553 - RNA, 19 nt, Artificial Sequence
  Description of Artificial Sequence: Synthetic oligonucleotide
  Antisense strand to SEQ ID NO: 2513552
uugauugagccaagccugg

SEQ ID NO: 2513554 - RNA, 19 nt, Artificial Sequence
  Description of Artificial Sequence: Synthetic oligonucleotide
  Sense strand starting at position 2391 of SEQ ID NO: 1888137
uguauucccuaguuuauaa

SEQ ID NO: 2513555 - RNA, 19 nt, Artificial Sequence
  Description of Artificial Sequence: Synthetic oligonucleotide
  Antisense strand to SEQ ID NO: 2513554
uuauaaacuagggaauaca

SEQ ID NO: 2513556 - RNA, 19 nt, Artificial Sequence
  Description of Artificial Sequence: Synthetic oligonucleotide
  Sense strand starting at position 2656 of SEQ ID NO: 1888137
uuggcuucuguccaacaga

SEQ ID NO: 2513557 - RNA, 19 nt, Artificial Sequence
  Description of Artificial Sequence: Synthetic oligonucleotide
  Antisense strand to SEQ ID NO: 2513556
ucuguuggacagaagccaa

SEQ ID NO: 2513558 - RNA, 19 nt, Artificial Sequence
  Description of Artificial Sequence: Synthetic oligonucleotide
  Sense strand starting at position 2824 of SEQ ID NO: 1888137
gccuaaggugccuagacaa

SEQ ID NO: 2513559 - RNA, 19 nt, Artificial Sequence
  Description of Artificial Sequence: Synthetic oligonucleotide
  Antisense strand to SEQ ID NO: 2513558
uugucuaggcaccuuaggc

SEQ ID NO: 2513560 - RNA, 19 nt, Artificial Sequence
  Description of Artificial Sequence: Synthetic oligonucleotide
  Sense strand starting at position 2876 of SEQ ID NO: 1888137
gcccuuccuguggaacaua

SEQ ID NO: 2513561 - RNA, 19 nt, Artificial Sequence
  Description of Artificial Sequence: Synthetic oligonucleotide
  Antisense strand to SEQ ID NO: 2513560
uauguuccacaggaagggc

SEQ ID NO: 2513562 - RNA, 19 nt, Artificial Sequence
  Description of Artificial Sequence: Synthetic oligonucleotide
  Sense strand starting at position 2962 of SEQ ID NO: 1888137
agagaaaucuggccuucua

SEQ ID NO: 2513563 - RNA, 19 nt, Artificial Sequence
  Description of Artificial Sequence: Synthetic oligonucleotide
  Antisense strand to SEQ ID NO: 2513562
uagaaggccagauuucucu

SEQ ID NO: 2513564 - RNA, 19 nt, Artificial Sequence
  Description of Artificial Sequence: Synthetic oligonucleotide
  Sense strand starting at position 3380 of SEQ ID NO: 1888137
caauguauaguaugaugau

SEQ ID NO: 2513565 - RNA, 19 nt, Artificial Sequence
  Description of Artificial Sequence: Synthetic oligonucleotide
  Antisense strand to SEQ ID NO: 2513564
aucaucauacuauacauug

SEQ ID NO: 2513566 - RNA, 19 nt, Artificial Sequence
  Description of Artificial Sequence: Synthetic oligonucleotide
  Sense strand starting at position 3429 of SEQ ID NO: 1888137
ccauguguggugcaagaau

SEQ ID NO: 2513567 - RNA, 19 nt, Artificial Sequence
  Description of Artificial Sequence: Synthetic oligonucleotide
  Antisense strand to SEQ ID NO: 2513566
auucuugcaccacacaugg

SEQ ID NO: 2513568 - RNA, 19 nt, Artificial Sequence
  Description of Artificial Sequence: Synthetic oligonucleotide
  Sense strand starting at position 3615 of SEQ ID NO: 1888137
ugcuucugagaauguauau

SEQ ID NO: 2513569 - RNA, 19 nt, Artificial Sequence
  Description of Artificial Sequence: Synthetic oligonucleotide
  Antisense strand to SEQ ID NO: 2513568
auauacauucucagaagca

SEQ ID NO: 2513570 - RNA, 19 nt, Artificial Sequence
  Description of Artificial Sequence: Synthetic oligonucleotide
  Sense strand starting at position 3678 of SEQ ID NO: 1888137
accaauaguucuccagaga

SEQ ID NO: 2513571 - RNA, 19 nt, Artificial Sequence
  Description of Artificial Sequence: Synthetic oligonucleotide
  Antisense strand to SEQ ID NO: 2513570
ucucuggagaacuauuggu

SEQ ID NO: 2513572 - RNA, 19 nt, Artificial Sequence
  Description of Artificial Sequence: Synthetic oligonucleotide
  Sense strand starting at position 3937 of SEQ ID NO: 1888137
gccacaacucuaugaaggu

SEQ ID NO: 2513573 - RNA, 19 nt, Artificial Sequence
  Description of Artificial Sequence: Synthetic oligonucleotide
  Antisense strand to SEQ ID NO: 2513572
accuucauagaguuguggc

SEQ ID NO: 2513574 - RNA, 19 nt, Artificial Sequence
  Description of Artificial Sequence: Synthetic oligonucleotide
  Sense strand starting at position 3946 of SEQ ID NO: 1888137
cuaugaagguucucucauu

SEQ ID NO: 2513575 - RNA, 19 nt, Artificial Sequence
  Description of Artificial Sequence: Synthetic oligonucleotide
  Antisense strand to SEQ ID NO: 2513574
aaugagagaaccuucauag

SEQ ID NO: 2513576 - RNA, 19 nt, Artificial Sequence
  Description of Artificial Sequence: Synthetic oligonucleotide
  Sense strand starting at position 327 of SEQ ID NO: 1888138
acauauguuguggagugaa

SEQ ID NO: 2513577 - RNA, 19 nt, Artificial Sequence
  Description of Artificial Sequence: Synthetic oligonucleotide
  Antisense strand to SEQ ID NO: 2513576
uucacuccacaacauaugu

SEQ ID NO: 2513578 - RNA, 19 nt, Artificial Sequence
  Description of Artificial Sequence: Synthetic oligonucleotide
  Sense strand starting at position 398 of SEQ ID NO: 1888138
ugauauuugcaugguaguc

SEQ ID NO: 2513579 - RNA, 19 nt, Artificial Sequence
  Description of Artificial Sequence: Synthetic oligonucleotide
  Antisense strand to SEQ ID NO: 2513578
gacuaccaugcaaauauca

SEQ ID NO: 2513580 - RNA, 19 nt, Artificial Sequence
  Description of Artificial Sequence: Synthetic oligonucleotide
  Sense strand starting at position 479 of SEQ ID NO: 1888138
gcagguaaucagcaauuaa

SEQ ID NO: 2513581 - RNA, 19 nt, Artificial Sequence
  Description of Artificial Sequence: Synthetic oligonucleotide
  Antisense strand to SEQ ID NO: 2513580
uuaauugcugauuaccugc

SEQ ID NO: 2513582 - RNA, 19 nt, Artificial Sequence
  Description of Artificial Sequence: Synthetic oligonucleotide
  Sense strand starting at position 830 of SEQ ID NO: 1888138
gguauucuuccguugugca

SEQ ID NO: 2513583 - RNA, 19 nt, Artificial Sequence
  Description of Artificial Sequence: Synthetic oligonucleotide
  Antisense strand to SEQ ID NO: 2513582
ugcacaacggaagaauacc

SEQ ID NO: 2513584 - RNA, 19 nt, Artificial Sequence
  Description of Artificial Sequence: Synthetic oligonucleotide
  Sense strand starting at position 887 of SEQ ID NO: 1888138
gugcauaaaccuggaaaug

SEQ ID NO: 2513585 - RNA, 19 nt, Artificial Sequence
  Description of Artificial Sequence: Synthetic oligonucleotide
  Antisense strand to SEQ ID NO: 2513584
cauuuccagguuuaugcac

SEQ ID NO: 2513586 - RNA, 19 nt, Artificial Sequence
  Description of Artificial Sequence: Synthetic oligonucleotide
  Sense strand starting at position 1006 of SEQ ID NO: 1888138
aguggcaugacugaucuau

SEQ ID NO: 2513587 - RNA, 19 nt, Artificial Sequence
  Description of Artificial Sequence: Synthetic oligonucleotide
  Antisense strand to SEQ ID NO: 2513586
auagaucagucaugccacu

SEQ ID NO: 2513588 - RNA, 19 nt, Artificial Sequence
  Description of Artificial Sequence: Synthetic oligonucleotide
  Sense strand starting at position 1086 of SEQ ID NO: 1888138
ggaggcuaagccuauuauu

SEQ ID NO: 2513589 - RNA, 19 nt, Artificial Sequence
  Description of Artificial Sequence: Synthetic oligonucleotide
  Antisense strand to SEQ ID NO: 2513588
aauaauaggcuuagccucc

SEQ ID NO: 2513590 - RNA, 19 nt, Artificial Sequence
  Description of Artificial Sequence: Synthetic oligonucleotide
  Sense strand starting at position 1106 of SEQ ID NO: 1888138
uuccuuuauugaguaugau

SEQ ID NO: 2513591 - RNA, 19 nt, Artificial Sequence
  Description of Artificial Sequence: Synthetic oligonucleotide
  Antisense strand to SEQ ID NO: 2513590
aucauacucaauaaaggaa

SEQ ID NO: 2513592 - RNA, 19 nt, Artificial Sequence
  Description of Artificial Sequence: Synthetic oligonucleotide
  Sense strand starting at position 1107 of SEQ ID NO: 1888138
uccuuuauugaguaugauu

SEQ ID NO: 2513593 - RNA, 19 nt, Artificial Sequence
  Description of Artificial Sequence: Synthetic oligonucleotide
  Antisense strand to SEQ ID NO: 2513592
aaucauacucaauaaagga

SEQ ID NO: 2513594 - RNA, 19 nt, Artificial Sequence
  Description of Artificial Sequence: Synthetic oligonucleotide
  Sense strand starting at position 1226 of SEQ ID NO: 1888138
gucagaagucuacaaggca

SEQ ID NO: 2513595 - RNA, 19 nt, Artificial Sequence
  Description of Artificial Sequence: Synthetic oligonucleotide
  Antisense strand to SEQ ID NO: 2513594
ugccuuguagacuucugac

SEQ ID NO: 2513596 - RNA, 19 nt, Artificial Sequence
  Description of Artificial Sequence: Synthetic oligonucleotide
  Sense strand starting at position 1480 of SEQ ID NO: 1888138
ggaugaucaaagcaugcau

SEQ ID NO: 2513597 - RNA, 19 nt, Artificial Sequence
  Description of Artificial Sequence: Synthetic oligonucleotide
  Antisense strand to SEQ ID NO: 2513596
augcaugcuuugaucaucc

SEQ ID NO: 2513598 - RNA, 19 nt, Artificial Sequence
  Description of Artificial Sequence: Synthetic oligonucleotide
  Sense strand starting at position 1710 of SEQ ID NO: 1888138
acuagaaggcagugauuaa

SEQ ID NO: 2513599 - RNA, 19 nt, Artificial Sequence
  Description of Artificial Sequence: Synthetic oligonucleotide
  Antisense strand to SEQ ID NO: 2513598
uuaaucacugccuucuagu

SEQ ID NO: 2513600 - RNA, 19 nt, Artificial Sequence
  Description of Artificial Sequence: Synthetic oligonucleotide
  Sense strand starting at position 1787 of SEQ ID NO: 1888138
aauggaggucaauguccaa

SEQ ID NO: 2513601 - RNA, 19 nt, Artificial Sequence
  Description of Artificial Sequence: Synthetic oligonucleotide
  Antisense strand to SEQ ID NO: 2513600
uuggacauugaccuccauu

SEQ ID NO: 2513602 - RNA, 19 nt, Artificial Sequence
  Description of Artificial Sequence: Synthetic oligonucleotide
  Sense strand starting at position 1790 of SEQ ID NO: 1888138
ggaggucaauguccaauau

SEQ ID NO: 2513603 - RNA, 19 nt, Artificial Sequence
  Description of Artificial Sequence: Synthetic oligonucleotide
  Antisense strand to SEQ ID NO: 2513602
auauuggacauugaccucc

SEQ ID NO: 2513604 - RNA, 19 nt, Artificial Sequence
  Description of Artificial Sequence: Synthetic oligonucleotide
  Sense strand starting at position 2120 of SEQ ID NO: 1888138
aguggcagccauuaaauaa

SEQ ID NO: 2513605 - RNA, 19 nt, Artificial Sequence
  Description of Artificial Sequence: Synthetic oligonucleotide
  Antisense strand to SEQ ID NO: 2513604
uuauuuaauggcugccacu

SEQ ID NO: 2513606 - RNA, 19 nt, Artificial Sequence
  Description of Artificial Sequence: Synthetic oligonucleotide
  Sense strand starting at position 2164 of SEQ ID NO: 1888138
gcgugagauccacaaugaa

SEQ ID NO: 2513607 - RNA, 19 nt, Artificial Sequence
  Description of Artificial Sequence: Synthetic oligonucleotide
  Antisense strand to SEQ ID NO: 2513606
uucauuguggaucucacgc

SEQ ID NO: 2513608 - RNA, 19 nt, Artificial Sequence
  Description of Artificial Sequence: Synthetic oligonucleotide
  Sense strand starting at position 2195 of SEQ ID NO: 1888138
ugccaacauguuugcauuu

SEQ ID NO: 2513609 - RNA, 19 nt, Artificial Sequence
  Description of Artificial Sequence: Synthetic oligonucleotide
  Antisense strand to SEQ ID NO: 2513608
aaaugcaaacauguuggca

SEQ ID NO: 2513610 - RNA, 19 nt, Artificial Sequence
  Description of Artificial Sequence: Synthetic oligonucleotide
  Sense strand starting at position 2347 of SEQ ID NO: 1888138
caggaaggcugguuuaaug

SEQ ID NO: 2513611 - RNA, 19 nt, Artificial Sequence
  Description of Artificial Sequence: Synthetic oligonucleotide
  Antisense strand to SEQ ID NO: 2513610
cauuaaaccagccuuccug

SEQ ID NO: 2513612 - RNA, 19 nt, Artificial Sequence
  Description of Artificial Sequence: Synthetic oligonucleotide
  Sense strand starting at position 2403 of SEQ ID NO: 1888138
aaagguaaaguguggaaua

SEQ ID NO: 2513613 - RNA, 19 nt, Artificial Sequence
  Description of Artificial Sequence: Synthetic oligonucleotide
  Antisense strand to SEQ ID NO: 2513612
uauuccacacuuuaccuuu

SEQ ID NO: 2513614 - RNA, 19 nt, Artificial Sequence
  Description of Artificial Sequence: Synthetic oligonucleotide
  Sense strand starting at position 2405 of SEQ ID NO: 1888138
agguaaaguguggaauauu

SEQ ID NO: 2513615 - RNA, 19 nt, Artificial Sequence
  Description of Artificial Sequence: Synthetic oligonucleotide
  Antisense strand to SEQ ID NO: 2513614
aauauuccacacuuuaccu

SEQ ID NO: 2513616 - RNA, 19 nt, Artificial Sequence
  Description of Artificial Sequence: Synthetic oligonucleotide
  Sense strand starting at position 2476 of SEQ ID NO: 1888138
acaacuguguaauuacuga

SEQ ID NO: 2513617 - RNA, 19 nt, Artificial Sequence
  Description of Artificial Sequence: Synthetic oligonucleotide
  Antisense strand to SEQ ID NO: 2513616
ucaguaauuacacaguugu

SEQ ID NO: 2513618 - RNA, 19 nt, Artificial Sequence
  Description of Artificial Sequence: Synthetic oligonucleotide
  Sense strand starting at position 2569 of SEQ ID NO: 1888138
aucugauguuucuuagaaa

SEQ ID NO: 2513619 - RNA, 19 nt, Artificial Sequence
  Description of Artificial Sequence: Synthetic oligonucleotide
  Antisense strand to SEQ ID NO: 2513618
uuucuaagaaacaucagau

SEQ ID NO: 2513620 - RNA, 19 nt, Artificial Sequence
  Description of Artificial Sequence: Synthetic oligonucleotide
  Sense strand starting at position 2731 of SEQ ID NO: 1888138
gggaaagacuuggcaugua

SEQ ID NO: 2513621 - RNA, 19 nt, Artificial Sequence
  Description of Artificial Sequence: Synthetic oligonucleotide
  Antisense strand to SEQ ID NO: 2513620
uacaugccaagucuuuccc

SEQ ID NO: 2513622 - RNA, 19 nt, Artificial Sequence
  Description of Artificial Sequence: Synthetic oligonucleotide
  Sense strand starting at position 2734 of SEQ ID NO: 1888138
aaagacuuggcauguaaga

SEQ ID NO: 2513623 - RNA, 19 nt, Artificial Sequence
  Description of Artificial Sequence: Synthetic oligonucleotide
  Antisense strand to SEQ ID NO: 2513622
ucuuacaugccaagucuuu

SEQ ID NO: 2513624 - RNA, 19 nt, Artificial Sequence
  Description of Artificial Sequence: Synthetic oligonucleotide
  Sense strand starting at position 2845 of SEQ ID NO: 1888138
ggaacuuagugagcuacca

SEQ ID NO: 2513625 - RNA, 19 nt, Artificial Sequence
  Description of Artificial Sequence: Synthetic oligonucleotide
  Antisense strand to SEQ ID NO: 2513624
ugguagcucacuaaguucc

SEQ ID NO: 2513626 - RNA, 19 nt, Artificial Sequence
  Description of Artificial Sequence: Synthetic oligonucleotide
  Sense strand starting at position 2947 of SEQ ID NO: 1888138
guauacaucuuaguuaaca

SEQ ID NO: 2513627 - RNA, 19 nt, Artificial Sequence
  Description of Artificial Sequence: Synthetic oligonucleotide
  Antisense strand to SEQ ID NO: 2513626
uguuaacuaagauguauac

SEQ ID NO: 2513628 - RNA, 19 nt, Artificial Sequence
  Description of Artificial Sequence: Synthetic oligonucleotide
  Sense strand starting at position 2955 of SEQ ID NO: 1888138
cuuaguuaacaagguaaau

SEQ ID NO: 2513629 - RNA, 19 nt, Artificial Sequence
  Description of Artificial Sequence: Synthetic oligonucleotide
  Antisense strand to SEQ ID NO: 2513628
auuuaccuuguuaacuaag

SEQ ID NO: 2513630 - RNA, 19 nt, Artificial Sequence
  Description of Artificial Sequence: Synthetic oligonucleotide
  Sense strand starting at position 3019 of SEQ ID NO: 1888138
gagccaugauccucauaug

SEQ ID NO: 2513631 - RNA, 19 nt, Artificial Sequence
  Description of Artificial Sequence: Synthetic oligonucleotide
  Antisense strand to SEQ ID NO: 2513630
cauaugaggaucauggcuc

SEQ ID NO: 2513632 - RNA, 19 nt, Artificial Sequence
  Description of Artificial Sequence: Synthetic oligonucleotide
  Sense strand starting at position 3020 of SEQ ID NO: 1888138
agccaugauccucauauga

SEQ ID NO: 2513633 - RNA, 19 nt, Artificial Sequence
  Description of Artificial Sequence: Synthetic oligonucleotide
  Antisense strand to SEQ ID NO: 2513632
ucauaugaggaucauggcu

SEQ ID NO: 2513634 - RNA, 19 nt, Artificial Sequence
  Description of Artificial Sequence: Synthetic oligonucleotide
  Sense strand starting at position 3149 of SEQ ID NO: 1888138
gggagauuguacuuccaaa

SEQ ID NO: 2513635 - RNA, 19 nt, Artificial Sequence
  Description of Artificial Sequence: Synthetic oligonucleotide
  Antisense strand to SEQ ID NO: 2513634
uuuggaaguacaaucuccc

SEQ ID NO: 2513636 - RNA, 19 nt, Artificial Sequence
  Description of Artificial Sequence: Synthetic oligonucleotide
  Sense strand starting at position 3175 of SEQ ID NO: 1888138
auuacacugcuugauugua

SEQ ID NO: 2513637 - RNA, 19 nt, Artificial Sequence
  Description of Artificial Sequence: Synthetic oligonucleotide
  Antisense strand to SEQ ID NO: 2513636
uacaaucaagcaguguaau

SEQ ID NO: 2513638 - RNA, 19 nt, Artificial Sequence
  Description of Artificial Sequence: Synthetic oligonucleotide
  Sense strand starting at position 3391 of SEQ ID NO: 1888138
gagggaauauuaguuucca

SEQ ID NO: 2513639 - RNA, 19 nt, Artificial Sequence
  Description of Artificial Sequence: Synthetic oligonucleotide
  Antisense strand to SEQ ID NO: 2513638
uggaaacuaauauucccuc

SEQ ID NO: 2513640 - RNA, 19 nt, Artificial Sequence
  Description of Artificial Sequence: Synthetic oligonucleotide
  Sense strand starting at position 3460 of SEQ ID NO: 1888138
aaagaagaguagguauagu

SEQ ID NO: 2513641 - RNA, 19 nt, Artificial Sequence
  Description of Artificial Sequence: Synthetic oligonucleotide
  Antisense strand to SEQ ID NO: 2513640
acuauaccuacucuucuuu

SEQ ID NO: 2513642 - RNA, 19 nt, Artificial Sequence
  Description of Artificial Sequence: Synthetic oligonucleotide
  Sense strand starting at position 3529 of SEQ ID NO: 1888138
ugagauuuguaagauagaa

SEQ ID NO: 2513643 - RNA, 19 nt, Artificial Sequence
  Description of Artificial Sequence: Synthetic oligonucleotide
  Antisense strand to SEQ ID NO: 2513642
uucuaucuuacaaaucuca

SEQ ID NO: 2513644 - RNA, 19 nt, Artificial Sequence
  Description of Artificial Sequence: Synthetic oligonucleotide
  Sense strand starting at position 3548 of SEQ ID NO: 1888138
uggguagcacaagauguua

SEQ ID NO: 2513645 - RNA, 19 nt, Artificial Sequence
  Description of Artificial Sequence: Synthetic oligonucleotide
  Antisense strand to SEQ ID NO: 2513644
uaacaucuugugcuaccca

SEQ ID NO: 2513646 - RNA, 19 nt, Artificial Sequence
  Description of Artificial Sequence: Synthetic oligonucleotide
  Sense strand starting at position 3550 of SEQ ID NO: 1888138
gguagcacaagauguuaaa

SEQ ID NO: 2513647 - RNA, 19 nt, Artificial Sequence
  Description of Artificial Sequence: Synthetic oligonucleotide
  Antisense strand to SEQ ID NO: 2513646
uuuaacaucuugugcuacc

SEQ ID NO: 2513648 - RNA, 19 nt, Artificial Sequence
  Description of Artificial Sequence: Synthetic oligonucleotide
  Sense strand starting at position 3790 of SEQ ID NO: 1888138
uaauguugacuauauguga

SEQ ID NO: 2513649 - RNA, 19 nt, Artificial Sequence
  Description of Artificial Sequence: Synthetic oligonucleotide
  Antisense strand to SEQ ID NO: 2513648
ucacauauagucaacauua

SEQ ID NO: 2513650 - RNA, 19 nt, Artificial Sequence
  Description of Artificial Sequence: Synthetic oligonucleotide
  Sense strand starting at position 3793 of SEQ ID NO: 1888138
uguugacuauaugugaaau

SEQ ID NO: 2513651 - RNA, 19 nt, Artificial Sequence
  Description of Artificial Sequence: Synthetic oligonucleotide
  Antisense strand to SEQ ID NO: 2513650
auuucacauauagucaaca

SEQ ID NO: 2513652 - RNA, 19 nt, Artificial Sequence
  Description of Artificial Sequence: Synthetic oligonucleotide
  Sense strand starting at position 3892 of SEQ ID NO: 1888138
guggcuacuagacagauua

SEQ ID NO: 2513653 - RNA, 19 nt, Artificial Sequence
  Description of Artificial Sequence: Synthetic oligonucleotide
  Antisense strand to SEQ ID NO: 2513652
uaaucugucuaguagccac

SEQ ID NO: 2513654 - RNA, 19 nt, Artificial Sequence
  Description of Artificial Sequence: Synthetic oligonucleotide
  Sense strand starting at position 3939 of SEQ ID NO: 1888138
acagcagugguuuagaauu

SEQ ID NO: 2513655 - RNA, 19 nt, Artificial Sequence
  Description of Artificial Sequence: Synthetic oligonucleotide
  Antisense strand to SEQ ID NO: 2513654
aauucuaaaccacugcugu

SEQ ID NO: 2513656 - RNA, 19 nt, Artificial Sequence
  Description of Artificial Sequence: Synthetic oligonucleotide
  Sense strand starting at position 33 of SEQ ID NO: 1888139
cgccaacuucuugaaacau

SEQ ID NO: 2513657 - RNA, 19 nt, Artificial Sequence
  Description of Artificial Sequence: Synthetic oligonucleotide
  Antisense strand to SEQ ID NO: 2513656
auguuucaagaaguuggcg

SEQ ID NO: 2513658 - RNA, 19 nt, Artificial Sequence
  Description of Artificial Sequence: Synthetic oligonucleotide
  Sense strand starting at position 60 of SEQ ID NO: 1888139
ugccgcaaucaccaauaaa

SEQ ID NO: 2513659 - RNA, 19 nt, Artificial Sequence
  Description of Artificial Sequence: Synthetic oligonucleotide
  Antisense strand to SEQ ID NO: 2513658
uuuauuggugauugcggca

SEQ ID NO: 2513660 - RNA, 19 nt, Artificial Sequence
  Description of Artificial Sequence: Synthetic oligonucleotide
  Sense strand starting at position 392 of SEQ ID NO: 1888139
gcacucugaucuucuuaag

SEQ ID NO: 2513661 - RNA, 19 nt, Artificial Sequence
  Description of Artificial Sequence: Synthetic oligonucleotide
  Antisense strand to SEQ ID NO: 2513660
cuuaagaagaucagagugc

SEQ ID NO: 2513662 - RNA, 19 nt, Artificial Sequence
  Description of Artificial Sequence: Synthetic oligonucleotide
  Sense strand starting at position 411 of SEQ ID NO: 1888139
cauuguauaugccugaaug

SEQ ID NO: 2513663 - RNA, 19 nt, Artificial Sequence
  Description of Artificial Sequence: Synthetic oligonucleotide
  Antisense strand to SEQ ID NO: 2513662
cauucaggcauauacaaug

SEQ ID NO: 2513664 - RNA, 19 nt, Artificial Sequence
  Description of Artificial Sequence: Synthetic oligonucleotide
  Sense strand starting at position 412 of SEQ ID NO: 1888139
auuguauaugccugaauga

SEQ ID NO: 2513665 - RNA, 19 nt, Artificial Sequence
  Description of Artificial Sequence: Synthetic oligonucleotide
  Antisense strand to SEQ ID NO: 2513664
ucauucaggcauauacaau

SEQ ID NO: 2513666 - RNA, 19 nt, Artificial Sequence
  Description of Artificial Sequence: Synthetic oligonucleotide
  Sense strand starting at position 413 of SEQ ID NO: 1888139
uuguauaugccugaaugag

SEQ ID NO: 2513667 - RNA, 19 nt, Artificial Sequence
  Description of Artificial Sequence: Synthetic oligonucleotide
  Antisense strand to SEQ ID NO: 2513666
cucauucaggcauauacaa

SEQ ID NO: 2513668 - RNA, 19 nt, Artificial Sequence
  Description of Artificial Sequence: Synthetic oligonucleotide
  Sense strand starting at position 423 of SEQ ID NO: 1888139
cugaaugagggcuguggaa

SEQ ID NO: 2513669 - RNA, 19 nt, Artificial Sequence
  Description of Artificial Sequence: Synthetic oligonucleotide
  Antisense strand to SEQ ID NO: 2513668
uuccacagcccucauucag

SEQ ID NO: 2513670 - RNA, 19 nt, Artificial Sequence
  Description of Artificial Sequence: Synthetic oligonucleotide
  Sense strand starting at position 425 of SEQ ID NO: 1888139
gaaugagggcuguggaacu

SEQ ID NO: 2513671 - RNA, 19 nt, Artificial Sequence
  Description of Artificial Sequence: Synthetic oligonucleotide
  Antisense strand to SEQ ID NO: 2513670
aguuccacagcccucauuc

SEQ ID NO: 2513672 - RNA, 19 nt, Artificial Sequence
  Description of Artificial Sequence: Synthetic oligonucleotide
  Sense strand starting at position 723 of SEQ ID NO: 1888139
ucucgaagggcugaaaguu

SEQ ID NO: 2513673 - RNA, 19 nt, Artificial Sequence
  Description of Artificial Sequence: Synthetic oligonucleotide
  Antisense strand to SEQ ID NO: 2513672
aacuuucagcccuucgaga

SEQ ID NO: 2513674 - RNA, 19 nt, Artificial Sequence
  Description of Artificial Sequence: Synthetic oligonucleotide
  Sense strand starting at position 761 of SEQ ID NO: 1888139
agcacauucguugcaguca

SEQ ID NO: 2513675 - RNA, 19 nt, Artificial Sequence
  Description of Artificial Sequence: Synthetic oligonucleotide
  Antisense strand to SEQ ID NO: 2513674
ugacugcaacgaaugugcu

SEQ ID NO: 2513676 - RNA, 19 nt, Artificial Sequence
  Description of Artificial Sequence: Synthetic oligonucleotide
  Sense strand starting at position 799 of SEQ ID NO: 1888139
agaccuuugcuuggaacau

SEQ ID NO: 2513677 - RNA, 19 nt, Artificial Sequence
  Description of Artificial Sequence: Synthetic oligonucleotide
  Antisense strand to SEQ ID NO: 2513676
auguuccaagcaaaggucu

SEQ ID NO: 2513678 - RNA, 19 nt, Artificial Sequence
  Description of Artificial Sequence: Synthetic oligonucleotide
  Sense strand starting at position 808 of SEQ ID NO: 1888139
cuuggaacauuguucugua

SEQ ID NO: 2513679 - RNA, 19 nt, Artificial Sequence
  Description of Artificial Sequence: Synthetic oligonucleotide
  Antisense strand to SEQ ID NO: 2513678
uacagaacaauguuccaag

SEQ ID NO: 2513680 - RNA, 19 nt, Artificial Sequence
  Description of Artificial Sequence: Synthetic oligonucleotide
  Sense strand starting at position 883 of SEQ ID NO: 1888139
gcaugugaucuacacaaua

SEQ ID NO: 2513681 - RNA, 19 nt, Artificial Sequence
  Description of Artificial Sequence: Synthetic oligonucleotide
  Antisense strand to SEQ ID NO: 2513680
uauuguguagaucacaugc

SEQ ID NO: 2513682 - RNA, 19 nt, Artificial Sequence
  Description of Artificial Sequence: Synthetic oligonucleotide
  Sense strand starting at position 905 of SEQ ID NO: 1888139
uagagucugaugcaugguu

SEQ ID NO: 2513683 - RNA, 19 nt, Artificial Sequence
  Description of Artificial Sequence: Synthetic oligonucleotide
  Antisense strand to SEQ ID NO: 2513682
aaccaugcaucagacucua

SEQ ID NO: 2513684 - RNA, 19 nt, Artificial Sequence
  Description of Artificial Sequence: Synthetic oligonucleotide
  Sense strand starting at position 913 of SEQ ID NO: 1888139
gaugcaugguuuccaugga

SEQ ID NO: 2513685 - RNA, 19 nt, Artificial Sequence
  Description of Artificial Sequence: Synthetic oligonucleotide
  Antisense strand to SEQ ID NO: 2513684
uccauggaaaccaugcauc

SEQ ID NO: 2513686 - RNA, 19 nt, Artificial Sequence
  Description of Artificial Sequence: Synthetic oligonucleotide
  Sense strand starting at position 1060 of SEQ ID NO: 1888139
cuuugaguuugauuucugu

SEQ ID NO: 2513687 - RNA, 19 nt, Artificial Sequence
  Description of Artificial Sequence: Synthetic oligonucleotide
  Antisense strand to SEQ ID NO: 2513686
acagaaaucaaacucaaag

SEQ ID NO: 2513688 - RNA, 19 nt, Artificial Sequence
  Description of Artificial Sequence: Synthetic oligonucleotide
  Sense strand starting at position 1986 of SEQ ID NO: 1888139
aaagcauguugagcauaaa

SEQ ID NO: 2513689 - RNA, 19 nt, Artificial Sequence
  Description of Artificial Sequence: Synthetic oligonucleotide
  Antisense strand to SEQ ID NO: 2513688
uuuaugcucaacaugcuuu

SEQ ID NO: 2513690 - RNA, 19 nt, Artificial Sequence
  Description of Artificial Sequence: Synthetic oligonucleotide
  Sense strand starting at position 2077 of SEQ ID NO: 1888139
gcuugcgugagcuuuagaa

SEQ ID NO: 2513691 - RNA, 19 nt, Artificial Sequence
  Description of Artificial Sequence: Synthetic oligonucleotide
  Antisense strand to SEQ ID NO: 2513690
uucuaaagcucacgcaagc

SEQ ID NO: 2513692 - RNA, 19 nt, Artificial Sequence
  Description of Artificial Sequence: Synthetic oligonucleotide
  Sense strand starting at position 2159 of SEQ ID NO: 1888139
ucuguauaccuguaagcua

SEQ ID NO: 2513693 - RNA, 19 nt, Artificial Sequence
  Description of Artificial Sequence: Synthetic oligonucleotide
  Antisense strand to SEQ ID NO: 2513692
uagcuuacagguauacaga

SEQ ID NO: 2513694 - RNA, 19 nt, Artificial Sequence
  Description of Artificial Sequence: Synthetic oligonucleotide
  Sense strand starting at position 2432 of SEQ ID NO: 1888139
caauucuugcgauaggacu

SEQ ID NO: 2513695 - RNA, 19 nt, Artificial Sequence
  Description of Artificial Sequence: Synthetic oligonucleotide
  Antisense strand to SEQ ID NO: 2513694
aguccuaucgcaagaauug

SEQ ID NO: 2513696 - RNA, 19 nt, Artificial Sequence
  Description of Artificial Sequence: Synthetic oligonucleotide
  Sense strand starting at position 2555 of SEQ ID NO: 1888139
agauaucuacaaugaugcu

SEQ ID NO: 2513697 - RNA, 19 nt, Artificial Sequence
  Description of Artificial Sequence: Synthetic oligonucleotide
  Antisense strand to SEQ ID NO: 2513696
agcaucauuguagauaucu

SEQ ID NO: 2513698 - RNA, 19 nt, Artificial Sequence
  Description of Artificial Sequence: Synthetic oligonucleotide
  Sense strand starting at position 2568 of SEQ ID NO: 1888139
gaugcuuggcaccacauau

SEQ ID NO: 2513699 - RNA, 19 nt, Artificial Sequence
  Description of Artificial Sequence: Synthetic oligonucleotide
  Antisense strand to SEQ ID NO: 2513698
auauguggugccaagcauc

SEQ ID NO: 2513700 - RNA, 19 nt, Artificial Sequence
  Description of Artificial Sequence: Synthetic oligonucleotide
  Sense strand starting at position 2693 of SEQ ID NO: 1888139
acaucauaucuugguugca

SEQ ID NO: 2513701 - RNA, 19 nt, Artificial Sequence
  Description of Artificial Sequence: Synthetic oligonucleotide
  Antisense strand to SEQ ID NO: 2513700
ugcaaccaagauaugaugu

SEQ ID NO: 2513702 - RNA, 19 nt, Artificial Sequence
  Description of Artificial Sequence: Synthetic oligonucleotide
  Sense strand starting at position 2695 of SEQ ID NO: 1888139
aucauaucuugguugcaag

SEQ ID NO: 2513703 - RNA, 19 nt, Artificial Sequence
  Description of Artificial Sequence: Synthetic oligonucleotide
  Antisense strand to SEQ ID NO: 2513702
cuugcaaccaagauaugau

SEQ ID NO: 2513704 - RNA, 19 nt, Artificial Sequence
  Description of Artificial Sequence: Synthetic oligonucleotide
  Sense strand starting at position 2730 of SEQ ID NO: 1888139
cugggucugcuuuaguaau

SEQ ID NO: 2513705 - RNA, 19 nt, Artificial Sequence
  Description of Artificial Sequence: Synthetic oligonucleotide
  Antisense strand to SEQ ID NO: 2513704
auuacuaaagcagacccag

SEQ ID NO: 2513706 - RNA, 19 nt, Artificial Sequence
  Description of Artificial Sequence: Synthetic oligonucleotide
  Sense strand starting at position 2841 of SEQ ID NO: 1888139
uaguauacuccugggaaac

SEQ ID NO: 2513707 - RNA, 19 nt, Artificial Sequence
  Description of Artificial Sequence: Synthetic oligonucleotide
  Antisense strand to SEQ ID NO: 2513706
guuucccaggaguauacua

SEQ ID NO: 2513708 - RNA, 19 nt, Artificial Sequence
  Description of Artificial Sequence: Synthetic oligonucleotide
  Sense strand starting at position 2842 of SEQ ID NO: 1888139
aguauacuccugggaaacu

SEQ ID NO: 2513709 - RNA, 19 nt, Artificial Sequence
  Description of Artificial Sequence: Synthetic oligonucleotide
  Antisense strand to SEQ ID NO: 2513708
aguuucccaggaguauacu

SEQ ID NO: 2513710 - RNA, 19 nt, Artificial Sequence
  Description of Artificial Sequence: Synthetic oligonucleotide
  Sense strand starting at position 3159 of SEQ ID NO: 1888139
auuucuaccucagaaggaa

SEQ ID NO: 2513711 - RNA, 19 nt, Artificial Sequence
  Description of Artificial Sequence: Synthetic oligonucleotide
  Antisense strand to SEQ ID NO: 2513710
uuccuucugagguagaaau

SEQ ID NO: 2513712 - RNA, 19 nt, Artificial Sequence
  Description of Artificial Sequence: Synthetic oligonucleotide
  Sense strand starting at position 3174 of SEQ ID NO: 1888139
ggaaaccacuauguuuaga

SEQ ID NO: 2513713 - RNA, 19 nt, Artificial Sequence
  Description of Artificial Sequence: Synthetic oligonucleotide
  Antisense strand to SEQ ID NO: 2513712
ucuaaacauagugguuucc

SEQ ID NO: 2513714 - RNA, 19 nt, Artificial Sequence
  Description of Artificial Sequence: Synthetic oligonucleotide
  Sense strand starting at position 3237 of SEQ ID NO: 1888139
cggcguguuccuguggaau

SEQ ID NO: 2513715 - RNA, 19 nt, Artificial Sequence
  Description of Artificial Sequence: Synthetic oligonucleotide
  Antisense strand to SEQ ID NO: 2513714
auuccacaggaacacgccg

SEQ ID NO: 2513716 - RNA, 19 nt, Artificial Sequence
  Description of Artificial Sequence: Synthetic oligonucleotide
  Sense strand starting at position 3240 of SEQ ID NO: 1888139
cguguuccuguggaaugaa

SEQ ID NO: 2513717 - RNA, 19 nt, Artificial Sequence
  Description of Artificial Sequence: Synthetic oligonucleotide
  Antisense strand to SEQ ID NO: 2513716
uucauuccacaggaacacg

SEQ ID NO: 2513718 - RNA, 19 nt, Artificial Sequence
  Description of Artificial Sequence: Synthetic oligonucleotide
  Sense strand starting at position 3243 of SEQ ID NO: 1888139
guuccuguggaaugaacuu

SEQ ID NO: 2513719 - RNA, 19 nt, Artificial Sequence
  Description of Artificial Sequence: Synthetic oligonucleotide
  Antisense strand to SEQ ID NO: 2513718
aaguucauuccacaggaac

SEQ ID NO: 2513720 - RNA, 19 nt, Artificial Sequence
  Description of Artificial Sequence: Synthetic oligonucleotide
  Sense strand starting at position 3341 of SEQ ID NO: 1888139
caccuuaucuggguaacga

SEQ ID NO: 2513721 - RNA, 19 nt, Artificial Sequence
  Description of Artificial Sequence: Synthetic oligonucleotide
  Antisense strand to SEQ ID NO: 2513720
ucguuacccagauaaggug

SEQ ID NO: 2513722 - RNA, 19 nt, Artificial Sequence
  Description of Artificial Sequence: Synthetic oligonucleotide
  Sense strand starting at position 3342 of SEQ ID NO: 1888139
accuuaucuggguaacgau

SEQ ID NO: 2513723 - RNA, 19 nt, Artificial Sequence
  Description of Artificial Sequence: Synthetic oligonucleotide
  Antisense strand to SEQ ID NO: 2513722
aucguuacccagauaaggu

SEQ ID NO: 2513724 - RNA, 19 nt, Artificial Sequence
  Description of Artificial Sequence: Synthetic oligonucleotide
  Sense strand starting at position 3349 of SEQ ID NO: 1888139
cuggguaacgauggaaaua

SEQ ID NO: 2513725 - RNA, 19 nt, Artificial Sequence
  Description of Artificial Sequence: Synthetic oligonucleotide
  Antisense strand to SEQ ID NO: 2513724
uauuuccaucguuacccag

SEQ ID NO: 2513726 - RNA, 19 nt, Artificial Sequence
  Description of Artificial Sequence: Synthetic oligonucleotide
  Sense strand starting at position 3416 of SEQ ID NO: 1888139
augagcuuaugagcaauga

SEQ ID NO: 2513727 - RNA, 19 nt, Artificial Sequence
  Description of Artificial Sequence: Synthetic oligonucleotide
  Antisense strand to SEQ ID NO: 2513726
ucauugcucauaagcucau

SEQ ID NO: 2513728 - RNA, 19 nt, Artificial Sequence
  Description of Artificial Sequence: Synthetic oligonucleotide
  Sense strand starting at position 3420 of SEQ ID NO: 1888139
gcuuaugagcaaugacuag

SEQ ID NO: 2513729 - RNA, 19 nt, Artificial Sequence
  Description of Artificial Sequence: Synthetic oligonucleotide
  Antisense strand to SEQ ID NO: 2513728
cuagucauugcucauaagc

SEQ ID NO: 2513730 - RNA, 19 nt, Artificial Sequence
  Description of Artificial Sequence: Synthetic oligonucleotide
  Sense strand starting at position 3630 of SEQ ID NO: 1888139
aaauaaugaugggaaagua

SEQ ID NO: 2513731 - RNA, 19 nt, Artificial Sequence
  Description of Artificial Sequence: Synthetic oligonucleotide
  Antisense strand to SEQ ID NO: 2513730
uacuuucccaucauuauuu

SEQ ID NO: 2513732 - RNA, 19 nt, Artificial Sequence
  Description of Artificial Sequence: Synthetic oligonucleotide
  Sense strand starting at position 3901 of SEQ ID NO: 1888139
ccugacuaguacccaagaa

SEQ ID NO: 2513733 - RNA, 19 nt, Artificial Sequence
  Description of Artificial Sequence: Synthetic oligonucleotide
  Antisense strand to SEQ ID NO: 2513732
uucuuggguacuagucagg

SEQ ID NO: 2513734 - RNA, 19 nt, Artificial Sequence
  Description of Artificial Sequence: Synthetic oligonucleotide
  Sense strand starting at position 3957 of SEQ ID NO: 1888139
uuaguauccugacuucuau

SEQ ID NO: 2513735 - RNA, 19 nt, Artificial Sequence
  Description of Artificial Sequence: Synthetic oligonucleotide
  Antisense strand to SEQ ID NO: 2513734
auagaagucaggauacuaa

SEQ ID NO: 2513736 - RNA, 19 nt, Artificial Sequence
  Description of Artificial Sequence: Synthetic oligonucleotide
  Sense strand starting at position 133 of SEQ ID NO: 1888140
ucaagaagucagcaguuga

SEQ ID NO: 2513737 - RNA, 19 nt, Artificial Sequence
  Description of Artificial Sequence: Synthetic oligonucleotide
  Antisense strand to SEQ ID NO: 2513736
ucaacugcugacuucuuga

SEQ ID NO: 2513738 - RNA, 19 nt, Artificial Sequence
  Description of Artificial Sequence: Synthetic oligonucleotide
  Sense strand starting at position 164 of SEQ ID NO: 1888140
ccugcaauuguugacaaca

SEQ ID NO: 2513739 - RNA, 19 nt, Artificial Sequence
  Description of Artificial Sequence: Synthetic oligonucleotide
  Antisense strand to SEQ ID NO: 2513738
uguugucaacaauugcagg

SEQ ID NO: 2513740 - RNA, 19 nt, Artificial Sequence
  Description of Artificial Sequence: Synthetic oligonucleotide
  Sense strand starting at position 257 of SEQ ID NO: 1888140
guguacaauuuccauuuga

SEQ ID NO: 2513741 - RNA, 19 nt, Artificial Sequence
  Description of Artificial Sequence: Synthetic oligonucleotide
  Antisense strand to SEQ ID NO: 2513740
ucaaauggaaauuguacac

SEQ ID NO: 2513742 - RNA, 19 nt, Artificial Sequence
  Description of Artificial Sequence: Synthetic oligonucleotide
  Sense strand starting at position 386 of SEQ ID NO: 1888140
uugagaaggucugugauuc

SEQ ID NO: 2513743 - RNA, 19 nt, Artificial Sequence
  Description of Artificial Sequence: Synthetic oligonucleotide
  Antisense strand to SEQ ID NO: 2513742
gaaucacagaccuucucaa

SEQ ID NO: 2513744 - RNA, 19 nt, Artificial Sequence
  Description of Artificial Sequence: Synthetic oligonucleotide
  Sense strand starting at position 387 of SEQ ID NO: 1888140
ugagaaggucugugauucu

SEQ ID NO: 2513745 - RNA, 19 nt, Artificial Sequence
  Description of Artificial Sequence: Synthetic oligonucleotide
  Antisense strand to SEQ ID NO: 2513744
agaaucacagaccuucuca

SEQ ID NO: 2513746 - RNA, 19 nt, Artificial Sequence
  Description of Artificial Sequence: Synthetic oligonucleotide
  Sense strand starting at position 407 of SEQ ID NO: 1888140
uuacauuuauguuuagcga

SEQ ID NO: 2513747 - RNA, 19 nt, Artificial Sequence
  Description of Artificial Sequence: Synthetic oligonucleotide
  Antisense strand to SEQ ID NO: 2513746
ucgcuaaacauaaauguaa

SEQ ID NO: 2513748 - RNA, 19 nt, Artificial Sequence
  Description of Artificial Sequence: Synthetic oligonucleotide
  Sense strand starting at position 937 of SEQ ID NO: 1888140
gagcuugguagguaucaca

SEQ ID NO: 2513749 - RNA, 19 nt, Artificial Sequence
  Description of Artificial Sequence: Synthetic oligonucleotide
  Antisense strand to SEQ ID NO: 2513748
ugugauaccuaccaagcuc

SEQ ID NO: 2513750 - RNA, 19 nt, Artificial Sequence
  Description of Artificial Sequence: Synthetic oligonucleotide
  Sense strand starting at position 1075 of SEQ ID NO: 1888140
gaagacauauuaccagguu

SEQ ID NO: 2513751 - RNA, 19 nt, Artificial Sequence
  Description of Artificial Sequence: Synthetic oligonucleotide
  Antisense strand to SEQ ID NO: 2513750
aaccugguaauaugucuuc

SEQ ID NO: 2513752 - RNA, 19 nt, Artificial Sequence
  Description of Artificial Sequence: Synthetic oligonucleotide
  Sense strand starting at position 1078 of SEQ ID NO: 1888140
gacauauuaccagguuggu

SEQ ID NO: 2513753 - RNA, 19 nt, Artificial Sequence
  Description of Artificial Sequence: Synthetic oligonucleotide
  Antisense strand to SEQ ID NO: 2513752
accaaccugguaauauguc

SEQ ID NO: 2513754 - RNA, 19 nt, Artificial Sequence
  Description of Artificial Sequence: Synthetic oligonucleotide
  Sense strand starting at position 1088 of SEQ ID NO: 1888140
cagguugguagguaucaca

SEQ ID NO: 2513755 - RNA, 19 nt, Artificial Sequence
  Description of Artificial Sequence: Synthetic oligonucleotide
  Antisense strand to SEQ ID NO: 2513754
ugugauaccuaccaaccug

SEQ ID NO: 2513756 - RNA, 19 nt, Artificial Sequence
  Description of Artificial Sequence: Synthetic oligonucleotide
  Sense strand starting at position 1106 of SEQ ID NO: 1888140
agccaaugucaagggauau

SEQ ID NO: 2513757 - RNA, 19 nt, Artificial Sequence
  Description of Artificial Sequence: Synthetic oligonucleotide
  Antisense strand to SEQ ID NO: 2513756
auaucccuugacauuggcu

SEQ ID NO: 2513758 - RNA, 19 nt, Artificial Sequence
  Description of Artificial Sequence: Synthetic oligonucleotide
  Sense strand starting at position 1107 of SEQ ID NO: 1888140
gccaaugucaagggauauu

SEQ ID NO: 2513759 - RNA, 19 nt, Artificial Sequence
  Description of Artificial Sequence: Synthetic oligonucleotide
  Antisense strand to SEQ ID NO: 2513758
aauaucccuugacauuggc

SEQ ID NO: 2513760 - RNA, 19 nt, Artificial Sequence
  Description of Artificial Sequence: Synthetic oligonucleotide
  Sense strand starting at position 1380 of SEQ ID NO: 1888140
ggauauauucuauguugau

SEQ ID NO: 2513761 - RNA, 19 nt, Artificial Sequence
  Description of Artificial Sequence: Synthetic oligonucleotide
  Antisense strand to SEQ ID NO: 2513760
aucaacauagaauauaucc

SEQ ID NO: 2513762 - RNA, 19 nt, Artificial Sequence
  Description of Artificial Sequence: Synthetic oligonucleotide
  Sense strand starting at position 1650 of SEQ ID NO: 1888140
uuuaaaucagguugaugga

SEQ ID NO: 2513763 - RNA, 19 nt, Artificial Sequence
  Description of Artificial Sequence: Synthetic oligonucleotide
  Antisense strand to SEQ ID NO: 2513762
uccaucaaccugauuuaaa

SEQ ID NO: 2513764 - RNA, 19 nt, Artificial Sequence
  Description of Artificial Sequence: Synthetic oligonucleotide
  Sense strand starting at position 1657 of SEQ ID NO: 1888140
cagguugauggauguaaag

SEQ ID NO: 2513765 - RNA, 19 nt, Artificial Sequence
  Description of Artificial Sequence: Synthetic oligonucleotide
  Antisense strand to SEQ ID NO: 2513764
cuuuacauccaucaaccug

SEQ ID NO: 2513766 - RNA, 19 nt, Artificial Sequence
  Description of Artificial Sequence: Synthetic oligonucleotide
  Sense strand starting at position 1659 of SEQ ID NO: 1888140
gguugauggauguaaagug

SEQ ID NO: 2513767 - RNA, 19 nt, Artificial Sequence
  Description of Artificial Sequence: Synthetic oligonucleotide
  Antisense strand to SEQ ID NO: 2513766
cacuuuacauccaucaacc

SEQ ID NO: 2513768 - RNA, 19 nt, Artificial Sequence
  Description of Artificial Sequence: Synthetic oligonucleotide
  Sense strand starting at position 1702 of SEQ ID NO: 1888140
gaaacagugcuaggugaua

SEQ ID NO: 2513769 - RNA, 19 nt, Artificial Sequence
  Description of Artificial Sequence: Synthetic oligonucleotide
  Antisense strand to SEQ ID NO: 2513768
uaucaccuagcacuguuuc

SEQ ID NO: 2513770 - RNA, 19 nt, Artificial Sequence
  Description of Artificial Sequence: Synthetic oligonucleotide
  Sense strand starting at position 1756 of SEQ ID NO: 1888140
ucagcaucucuugaaauag

SEQ ID NO: 2513771 - RNA, 19 nt, Artificial Sequence
  Description of Artificial Sequence: Synthetic oligonucleotide
  Antisense strand to SEQ ID NO: 2513770
cuauuucaagagaugcuga

SEQ ID NO: 2513772 - RNA, 19 nt, Artificial Sequence
  Description of Artificial Sequence: Synthetic oligonucleotide
  Sense strand starting at position 1764 of SEQ ID NO: 1888140
ucuugaaauagguggcaau

SEQ ID NO: 2513773 - RNA, 19 nt, Artificial Sequence
  Description of Artificial Sequence: Synthetic oligonucleotide
  Antisense strand to SEQ ID NO: 2513772
auugccaccuauuucaaga

SEQ ID NO: 2513774 - RNA, 19 nt, Artificial Sequence
  Description of Artificial Sequence: Synthetic oligonucleotide
  Sense strand starting at position 2035 of SEQ ID NO: 1888140
guguuaagccacuaugaug

SEQ ID NO: 2513775 - RNA, 19 nt, Artificial Sequence
  Description of Artificial Sequence: Synthetic oligonucleotide
  Antisense strand to SEQ ID NO: 2513774
caucauaguggcuuaacac

SEQ ID NO: 2513776 - RNA, 19 nt, Artificial Sequence
  Description of Artificial Sequence: Synthetic oligonucleotide
  Sense strand starting at position 2063 of SEQ ID NO: 1888140
uuguuacaacugcaaagau

SEQ ID NO: 2513777 - RNA, 19 nt, Artificial Sequence
  Description of Artificial Sequence: Synthetic oligonucleotide
  Antisense strand to SEQ ID NO: 2513776
aucuuugcaguuguaacaa

SEQ ID NO: 2513778 - RNA, 19 nt, Artificial Sequence
  Description of Artificial Sequence: Synthetic oligonucleotide
  Sense strand starting at position 2091 of SEQ ID NO: 1888140
ugauuaaugcaccaugcaa

SEQ ID NO: 2513779 - RNA, 19 nt, Artificial Sequence
  Description of Artificial Sequence: Synthetic oligonucleotide
  Antisense strand to SEQ ID NO: 2513778
uugcauggugcauuaauca

SEQ ID NO: 2513780 - RNA, 19 nt, Artificial Sequence
  Description of Artificial Sequence: Synthetic oligonucleotide
  Sense strand starting at position 2161 of SEQ ID NO: 1888140
cuuauaugaguuggugaca

SEQ ID NO: 2513781 - RNA, 19 nt, Artificial Sequence
  Description of Artificial Sequence: Synthetic oligonucleotide
  Antisense strand to SEQ ID NO: 2513780
ugucaccaacucauauaag

SEQ ID NO: 2513782 - RNA, 19 nt, Artificial Sequence
  Description of Artificial Sequence: Synthetic oligonucleotide
  Sense strand starting at position 2164 of SEQ ID NO: 1888140
auaugaguuggugacacuu

SEQ ID NO: 2513783 - RNA, 19 nt, Artificial Sequence
  Description of Artificial Sequence: Synthetic oligonucleotide
  Antisense strand to SEQ ID NO: 2513782
aagugucaccaacucauau

SEQ ID NO: 2513784 - RNA, 19 nt, Artificial Sequence
  Description of Artificial Sequence: Synthetic oligonucleotide
  Sense strand starting at position 2174 of SEQ ID NO: 1888140
gugacacuuugguugaaac

SEQ ID NO: 2513785 - RNA, 19 nt, Artificial Sequence
  Description of Artificial Sequence: Synthetic oligonucleotide
  Antisense strand to SEQ ID NO: 2513784
guuucaaccaaagugucac

SEQ ID NO: 2513786 - RNA, 19 nt, Artificial Sequence
  Description of Artificial Sequence: Synthetic oligonucleotide
  Sense strand starting at position 2175 of SEQ ID NO: 1888140
ugacacuuugguugaaaca

SEQ ID NO: 2513787 - RNA, 19 nt, Artificial Sequence
  Description of Artificial Sequence: Synthetic oligonucleotide
  Antisense strand to SEQ ID NO: 2513786
uguuucaaccaaaguguca

SEQ ID NO: 2513788 - RNA, 19 nt, Artificial Sequence
  Description of Artificial Sequence: Synthetic oligonucleotide
  Sense strand starting at position 2364 of SEQ ID NO: 1888140
auauaaugaucuguaaagc

SEQ ID NO: 2513789 - RNA, 19 nt, Artificial Sequence
  Description of Artificial Sequence: Synthetic oligonucleotide
  Antisense strand to SEQ ID NO: 2513788
gcuuuacagaucauuauau

SEQ ID NO: 2513790 - RNA, 19 nt, Artificial Sequence
  Description of Artificial Sequence: Synthetic oligonucleotide
  Sense strand starting at position 2451 of SEQ ID NO: 1888140
agguaaaugcuuuauuaac

SEQ ID NO: 2513791 - RNA, 19 nt, Artificial Sequence
  Description of Artificial Sequence: Synthetic oligonucleotide
  Antisense strand to SEQ ID NO: 2513790
guuaauaaagcauuuaccu

SEQ ID NO: 2513792 - RNA, 19 nt, Artificial Sequence
  Description of Artificial Sequence: Synthetic oligonucleotide
  Sense strand starting at position 2550 of SEQ ID NO: 1888140
ggagcuuggagucaaagca

SEQ ID NO: 2513793 - RNA, 19 nt, Artificial Sequence
  Description of Artificial Sequence: Synthetic oligonucleotide
  Antisense strand to SEQ ID NO: 2513792
ugcuuugacuccaagcucc

SEQ ID NO: 2513794 - RNA, 19 nt, Artificial Sequence
  Description of Artificial Sequence: Synthetic oligonucleotide
  Sense strand starting at position 2669 of SEQ ID NO: 1888140
ugauaauuaucagugauga

SEQ ID NO: 2513795 - RNA, 19 nt, Artificial Sequence
  Description of Artificial Sequence: Synthetic oligonucleotide
  Antisense strand to SEQ ID NO: 2513794
ucaucacugauaauuauca

SEQ ID NO: 2513796 - RNA, 19 nt, Artificial Sequence
  Description of Artificial Sequence: Synthetic oligonucleotide
  Sense strand starting at position 2670 of SEQ ID NO: 1888140
gauaauuaucagugaugau

SEQ ID NO: 2513797 - RNA, 19 nt, Artificial Sequence
  Description of Artificial Sequence: Synthetic oligonucleotide
  Antisense strand to SEQ ID NO: 2513796
aucaucacugauaauuauc

SEQ ID NO: 2513798 - RNA, 19 nt, Artificial Sequence
  Description of Artificial Sequence: Synthetic oligonucleotide
  Sense strand starting at position 2677 of SEQ ID NO: 1888140
aucagugaugauugacauu

SEQ ID NO: 2513799 - RNA, 19 nt, Artificial Sequence
  Description of Artificial Sequence: Synthetic oligonucleotide
  Antisense strand to SEQ ID NO: 2513798
aaugucaaucaucacugau

SEQ ID NO: 2513800 - RNA, 19 nt, Artificial Sequence
  Description of Artificial Sequence: Synthetic oligonucleotide
  Sense strand starting at position 2732 of SEQ ID NO: 1888140
cuguaugugagauagcuua

SEQ ID NO: 2513801 - RNA, 19 nt, Artificial Sequence
  Description of Artificial Sequence: Synthetic oligonucleotide
  Antisense strand to SEQ ID NO: 2513800
uaagcuaucucacauacag

SEQ ID NO: 2513802 - RNA, 19 nt, Artificial Sequence
  Description of Artificial Sequence: Synthetic oligonucleotide
  Sense strand starting at position 3034 of SEQ ID NO: 1888140
ugacuucucuagguuaaag

SEQ ID NO: 2513803 - RNA, 19 nt, Artificial Sequence
  Description of Artificial Sequence: Synthetic oligonucleotide
  Antisense strand to SEQ ID NO: 2513802
cuuuaaccuagagaaguca

SEQ ID NO: 2513804 - RNA, 19 nt, Artificial Sequence
  Description of Artificial Sequence: Synthetic oligonucleotide
  Sense strand starting at position 3100 of SEQ ID NO: 1888140
gagaguucccauugagagu

SEQ ID NO: 2513805 - RNA, 19 nt, Artificial Sequence
  Description of Artificial Sequence: Synthetic oligonucleotide
  Antisense strand to SEQ ID NO: 2513804
acucucaaugggaacucuc

SEQ ID NO: 2513806 - RNA, 19 nt, Artificial Sequence
  Description of Artificial Sequence: Synthetic oligonucleotide
  Sense strand starting at position 3101 of SEQ ID NO: 1888140
agaguucccauugagaguu

SEQ ID NO: 2513807 - RNA, 19 nt, Artificial Sequence
  Description of Artificial Sequence: Synthetic oligonucleotide
  Antisense strand to SEQ ID NO: 2513806
aacucucaaugggaacucu

SEQ ID NO: 2513808 - RNA, 19 nt, Artificial Sequence
  Description of Artificial Sequence: Synthetic oligonucleotide
  Sense strand starting at position 3474 of SEQ ID NO: 1888140
uugauuguccaggaaagcu

SEQ ID NO: 2513809 - RNA, 19 nt, Artificial Sequence
  Description of Artificial Sequence: Synthetic oligonucleotide
  Antisense strand to SEQ ID NO: 2513808
agcuuuccuggacaaucaa

SEQ ID NO: 2513810 - RNA, 19 nt, Artificial Sequence
  Description of Artificial Sequence: Synthetic oligonucleotide
  Sense strand starting at position 3537 of SEQ ID NO: 1888140
uggaaacguuauguuaaac

SEQ ID NO: 2513811 - RNA, 19 nt, Artificial Sequence
  Description of Artificial Sequence: Synthetic oligonucleotide
  Antisense strand to SEQ ID NO: 2513810
guuuaacauaacguuucca

SEQ ID NO: 2513812 - RNA, 19 nt, Artificial Sequence
  Description of Artificial Sequence: Synthetic oligonucleotide
  Sense strand starting at position 3835 of SEQ ID NO: 1888140
aaggguagugguugagaua

SEQ ID NO: 2513813 - RNA, 19 nt, Artificial Sequence
  Description of Artificial Sequence: Synthetic oligonucleotide
  Antisense strand to SEQ ID NO: 2513812
uaucucaaccacuacccuu

SEQ ID NO: 2513814 - RNA, 19 nt, Artificial Sequence
  Description of Artificial Sequence: Synthetic oligonucleotide
  Sense strand starting at position 3836 of SEQ ID NO: 1888140
aggguagugguugagauau

SEQ ID NO: 2513815 - RNA, 19 nt, Artificial Sequence
  Description of Artificial Sequence: Synthetic oligonucleotide
  Antisense strand to SEQ ID NO: 2513814
auaucucaaccacuacccu

SEQ ID NO: 2513816 - RNA, 19 nt, Artificial Sequence
  Description of Artificial Sequence: Synthetic oligonucleotide
  Sense strand starting at position 252 of SEQ ID NO: 1888141
guggcuuggcuuuagggaa

SEQ ID NO: 2513817 - RNA, 19 nt, Artificial Sequence
  Description of Artificial Sequence: Synthetic oligonucleotide
  Antisense strand to SEQ ID NO: 2513816
uucccuaaagccaagccac

SEQ ID NO: 2513818 - RNA, 19 nt, Artificial Sequence
  Description of Artificial Sequence: Synthetic oligonucleotide
  Sense strand starting at position 298 of SEQ ID NO: 1888141
ggaagaggcucugaaauuu

SEQ ID NO: 2513819 - RNA, 19 nt, Artificial Sequence
  Description of Artificial Sequence: Synthetic oligonucleotide
  Antisense strand to SEQ ID NO: 2513818
aaauuucagagccucuucc

SEQ ID NO: 2513820 - RNA, 19 nt, Artificial Sequence
  Description of Artificial Sequence: Synthetic oligonucleotide
  Sense strand starting at position 342 of SEQ ID NO: 1888141
agcaguucuuucuuuauag

SEQ ID NO: 2513821 - RNA, 19 nt, Artificial Sequence
  Description of Artificial Sequence: Synthetic oligonucleotide
  Antisense strand to SEQ ID NO: 2513820
cuauaaagaaagaacugcu

SEQ ID NO: 2513822 - RNA, 19 nt, Artificial Sequence
  Description of Artificial Sequence: Synthetic oligonucleotide
  Sense strand starting at position 408 of SEQ ID NO: 1888141
gaaagagccuuauaggaaa

SEQ ID NO: 2513823 - RNA, 19 nt, Artificial Sequence
  Description of Artificial Sequence: Synthetic oligonucleotide
  Antisense strand to SEQ ID NO: 2513822
uuuccuauaaggcucuuuc

SEQ ID NO: 2513824 - RNA, 19 nt, Artificial Sequence
  Description of Artificial Sequence: Synthetic oligonucleotide
  Sense strand starting at position 475 of SEQ ID NO: 1888141
agguuucuaugcccaguua

SEQ ID NO: 2513825 - RNA, 19 nt, Artificial Sequence
  Description of Artificial Sequence: Synthetic oligonucleotide
  Antisense strand to SEQ ID NO: 2513824
uaacugggcauagaaaccu

SEQ ID NO: 2513826 - RNA, 19 nt, Artificial Sequence
  Description of Artificial Sequence: Synthetic oligonucleotide
  Sense strand starting at position 785 of SEQ ID NO: 1888141
uuugcauguccauaaauug

SEQ ID NO: 2513827 - RNA, 19 nt, Artificial Sequence
  Description of Artificial Sequence: Synthetic oligonucleotide
  Antisense strand to SEQ ID NO: 2513826
caauuuauggacaugcaaa

SEQ ID NO: 2513828 - RNA, 19 nt, Artificial Sequence
  Description of Artificial Sequence: Synthetic oligonucleotide
  Sense strand starting at position 801 of SEQ ID NO: 1888141
uuguaaauauggcuuuaca

SEQ ID NO: 2513829 - RNA, 19 nt, Artificial Sequence
  Description of Artificial Sequence: Synthetic oligonucleotide
  Antisense strand to SEQ ID NO: 2513828
uguaaagccauauuuacaa

SEQ ID NO: 2513830 - RNA, 19 nt, Artificial Sequence
  Description of Artificial Sequence: Synthetic oligonucleotide
  Sense strand starting at position 809 of SEQ ID NO: 1888141
auggcuuuacaguauauua

SEQ ID NO: 2513831 - RNA, 19 nt, Artificial Sequence
  Description of Artificial Sequence: Synthetic oligonucleotide
  Antisense strand to SEQ ID NO: 2513830
uaauauacuguaaagccau

SEQ ID NO: 2513832 - RNA, 19 nt, Artificial Sequence
  Description of Artificial Sequence: Synthetic oligonucleotide
  Sense strand starting at position 811 of SEQ ID NO: 1888141
ggcuuuacaguauauuauu

SEQ ID NO: 2513833 - RNA, 19 nt, Artificial Sequence
  Description of Artificial Sequence: Synthetic oligonucleotide
  Antisense strand to SEQ ID NO: 2513832
aauaauauacuguaaagcc

SEQ ID NO: 2513834 - RNA, 19 nt, Artificial Sequence
  Description of Artificial Sequence: Synthetic oligonucleotide
  Sense strand starting at position 823 of SEQ ID NO: 1888141
uauuauucuccgggucuuu

SEQ ID NO: 2513835 - RNA, 19 nt, Artificial Sequence
  Description of Artificial Sequence: Synthetic oligonucleotide
  Antisense strand to SEQ ID NO: 2513834
aaagacccggagaauaaua

SEQ ID NO: 2513836 - RNA, 19 nt, Artificial Sequence
  Description of Artificial Sequence: Synthetic oligonucleotide
  Sense strand starting at position 878 of SEQ ID NO: 1888141
uccugaaugucugucauuc

SEQ ID NO: 2513837 - RNA, 19 nt, Artificial Sequence
  Description of Artificial Sequence: Synthetic oligonucleotide
  Antisense strand to SEQ ID NO: 2513836
gaaugacagacauucagga

SEQ ID NO: 2513838 - RNA, 19 nt, Artificial Sequence
  Description of Artificial Sequence: Synthetic oligonucleotide
  Sense strand starting at position 888 of SEQ ID NO: 1888141
cugucauucucaccuaugu

SEQ ID NO: 2513839 - RNA, 19 nt, Artificial Sequence
  Description of Artificial Sequence: Synthetic oligonucleotide
  Antisense strand to SEQ ID NO: 2513838
acauaggugagaaugacag

SEQ ID NO: 2513840 - RNA, 19 nt, Artificial Sequence
  Description of Artificial Sequence: Synthetic oligonucleotide
  Sense strand starting at position 1103 of SEQ ID NO: 1888141
augguacucuccuuggaua

SEQ ID NO: 2513841 - RNA, 19 nt, Artificial Sequence
  Description of Artificial Sequence: Synthetic oligonucleotide
  Antisense strand to SEQ ID NO: 2513840
uauccaaggagaguaccau

SEQ ID NO: 2513842 - RNA, 19 nt, Artificial Sequence
  Description of Artificial Sequence: Synthetic oligonucleotide
  Sense strand starting at position 1105 of SEQ ID NO: 1888141
gguacucuccuuggauacu

SEQ ID NO: 2513843 - RNA, 19 nt, Artificial Sequence
  Description of Artificial Sequence: Synthetic oligonucleotide
  Antisense strand to SEQ ID NO: 2513842
aguauccaaggagaguacc

SEQ ID NO: 2513844 - RNA, 19 nt, Artificial Sequence
  Description of Artificial Sequence: Synthetic oligonucleotide
  Sense strand starting at position 1114 of SEQ ID NO: 1888141
cuuggauacugcuucuuau

SEQ ID NO: 2513845 - RNA, 19 nt, Artificial Sequence
  Description of Artificial Sequence: Synthetic oligonucleotide
  Antisense strand to SEQ ID NO: 2513844
auaagaagcaguauccaag

SEQ ID NO: 2513846 - RNA, 19 nt, Artificial Sequence
  Description of Artificial Sequence: Synthetic oligonucleotide
  Sense strand starting at position 1121 of SEQ ID NO: 1888141
acugcuucuuaugugaaca

SEQ ID NO: 2513847 - RNA, 19 nt, Artificial Sequence
  Description of Artificial Sequence: Synthetic oligonucleotide
  Antisense strand to SEQ ID NO: 2513846
uguucacauaagaagcagu

SEQ ID NO: 2513848 - RNA, 19 nt, Artificial Sequence
  Description of Artificial Sequence: Synthetic oligonucleotide
  Sense strand starting at position 1174 of SEQ ID NO: 1888141
ucuuguauauuuggaguaa

SEQ ID NO: 2513849 - RNA, 19 nt, Artificial Sequence
  Description of Artificial Sequence: Synthetic oligonucleotide
  Antisense strand to SEQ ID NO: 2513848
uuacuccaaauauacaaga

SEQ ID NO: 2513850 - RNA, 19 nt, Artificial Sequence
  Description of Artificial Sequence: Synthetic oligonucleotide
  Sense strand starting at position 1175 of SEQ ID NO: 1888141
cuuguauauuuggaguaaa

SEQ ID NO: 2513851 - RNA, 19 nt, Artificial Sequence
  Description of Artificial Sequence: Synthetic oligonucleotide
  Antisense strand to SEQ ID NO: 2513850
uuuacuccaaauauacaag

SEQ ID NO: 2513852 - RNA, 19 nt, Artificial Sequence
  Description of Artificial Sequence: Synthetic oligonucleotide
  Sense strand starting at position 1302 of SEQ ID NO: 1888141
guaagauaggaggguuaua

SEQ ID NO: 2513853 - RNA, 19 nt, Artificial Sequence
  Description of Artificial Sequence: Synthetic oligonucleotide
  Antisense strand to SEQ ID NO: 2513852
uauaacccuccuaucuuac

SEQ ID NO: 2513854 - RNA, 19 nt, Artificial Sequence
  Description of Artificial Sequence: Synthetic oligonucleotide
  Sense strand starting at position 1307 of SEQ ID NO: 1888141
auaggaggguuauaucauu

SEQ ID NO: 2513855 - RNA, 19 nt, Artificial Sequence
  Description of Artificial Sequence: Synthetic oligonucleotide
  Antisense strand to SEQ ID NO: 2513854
aaugauauaacccuccuau

SEQ ID NO: 2513856 - RNA, 19 nt, Artificial Sequence
  Description of Artificial Sequence: Synthetic oligonucleotide
  Sense strand starting at position 1312 of SEQ ID NO: 1888141
aggguuauaucauuccaag

SEQ ID NO: 2513857 - RNA, 19 nt, Artificial Sequence
  Description of Artificial Sequence: Synthetic oligonucleotide
  Antisense strand to SEQ ID NO: 2513856
cuuggaaugauauaacccu

SEQ ID NO: 2513858 - RNA, 19 nt, Artificial Sequence
  Description of Artificial Sequence: Synthetic oligonucleotide
  Sense strand starting at position 1318 of SEQ ID NO: 1888141
auaucauuccaaggaguua

SEQ ID NO: 2513859 - RNA, 19 nt, Artificial Sequence
  Description of Artificial Sequence: Synthetic oligonucleotide
  Antisense strand to SEQ ID NO: 2513858
uaacuccuuggaaugauau

SEQ ID NO: 2513860 - RNA, 19 nt, Artificial Sequence
  Description of Artificial Sequence: Synthetic oligonucleotide
  Sense strand starting at position 1467 of SEQ ID NO: 1888141
ucugucuucuugguuaauu

SEQ ID NO: 2513861 - RNA, 19 nt, Artificial Sequence
  Description of Artificial Sequence: Synthetic oligonucleotide
  Antisense strand to SEQ ID NO: 2513860
aauuaaccaagaagacaga

SEQ ID NO: 2513862 - RNA, 19 nt, Artificial Sequence
  Description of Artificial Sequence: Synthetic oligonucleotide
  Sense strand starting at position 1468 of SEQ ID NO: 1888141
cugucuucuugguuaauuu

SEQ ID NO: 2513863 - RNA, 19 nt, Artificial Sequence
  Description of Artificial Sequence: Synthetic oligonucleotide
  Antisense strand to SEQ ID NO: 2513862
aaauuaaccaagaagacag

SEQ ID NO: 2513864 - RNA, 19 nt, Artificial Sequence
  Description of Artificial Sequence: Synthetic oligonucleotide
  Sense strand starting at position 1688 of SEQ ID NO: 1888141
aacuuagguuguccguuua

SEQ ID NO: 2513865 - RNA, 19 nt, Artificial Sequence
  Description of Artificial Sequence: Synthetic oligonucleotide
  Antisense strand to SEQ ID NO: 2513864
uaaacggacaaccuaaguu

SEQ ID NO: 2513866 - RNA, 19 nt, Artificial Sequence
  Description of Artificial Sequence: Synthetic oligonucleotide
  Sense strand starting at position 1796 of SEQ ID NO: 1888141
uugugucacuauuugcauu

SEQ ID NO: 2513867 - RNA, 19 nt, Artificial Sequence
  Description of Artificial Sequence: Synthetic oligonucleotide
  Antisense strand to SEQ ID NO: 2513866
aaugcaaauagugacacaa

SEQ ID NO: 2513868 - RNA, 19 nt, Artificial Sequence
  Description of Artificial Sequence: Synthetic oligonucleotide
  Sense strand starting at position 1918 of SEQ ID NO: 1888141
uuccuuucggaguggauuu

SEQ ID NO: 2513869 - RNA, 19 nt, Artificial Sequence
  Description of Artificial Sequence: Synthetic oligonucleotide
  Antisense strand to SEQ ID NO: 2513868
aaauccacuccgaaaggaa

SEQ ID NO: 2513870 - RNA, 19 nt, Artificial Sequence
  Description of Artificial Sequence: Synthetic oligonucleotide
  Sense strand starting at position 1925 of SEQ ID NO: 1888141
cggaguggauuuccaguuu

SEQ ID NO: 2513871 - RNA, 19 nt, Artificial Sequence
  Description of Artificial Sequence: Synthetic oligonucleotide
  Antisense strand to SEQ ID NO: 2513870
aaacuggaaauccacuccg

SEQ ID NO: 2513872 - RNA, 19 nt, Artificial Sequence
  Description of Artificial Sequence: Synthetic oligonucleotide
  Sense strand starting at position 1958 of SEQ ID NO: 1888141
cugauagaguacuuuauau

SEQ ID NO: 2513873 - RNA, 19 nt, Artificial Sequence
  Description of Artificial Sequence: Synthetic oligonucleotide
  Antisense strand to SEQ ID NO: 2513872
auauaaaguacucuaucag

SEQ ID NO: 2513874 - RNA, 19 nt, Artificial Sequence
  Description of Artificial Sequence: Synthetic oligonucleotide
  Sense strand starting at position 2024 of SEQ ID NO: 1888141
uaaggucuaucuuagagaa

SEQ ID NO: 2513875 - RNA, 19 nt, Artificial Sequence
  Description of Artificial Sequence: Synthetic oligonucleotide
  Antisense strand to SEQ ID NO: 2513874
uucucuaagauagaccuua

SEQ ID NO: 2513876 - RNA, 19 nt, Artificial Sequence
  Description of Artificial Sequence: Synthetic oligonucleotide
  Sense strand starting at position 2026 of SEQ ID NO: 1888141
aggucuaucuuagagaaag

SEQ ID NO: 2513877 - RNA, 19 nt, Artificial Sequence
  Description of Artificial Sequence: Synthetic oligonucleotide
  Antisense strand to SEQ ID NO: 2513876
cuuucucuaagauagaccu

SEQ ID NO: 2513878 - RNA, 19 nt, Artificial Sequence
  Description of Artificial Sequence: Synthetic oligonucleotide
  Sense strand starting at position 2044 of SEQ ID NO: 1888141
guuccauaugcugaugauu

SEQ ID NO: 2513879 - RNA, 19 nt, Artificial Sequence
  Description of Artificial Sequence: Synthetic oligonucleotide
  Antisense strand to SEQ ID NO: 2513878
aaucaucagcauauggaac

SEQ ID NO: 2513880 - RNA, 19 nt, Artificial Sequence
  Description of Artificial Sequence: Synthetic oligonucleotide
  Sense strand starting at position 2047 of SEQ ID NO: 1888141
ccauaugcugaugauuaua

SEQ ID NO: 2513881 - RNA, 19 nt, Artificial Sequence
  Description of Artificial Sequence: Synthetic oligonucleotide
  Antisense strand to SEQ ID NO: 2513880
uauaaucaucagcauaugg

SEQ ID NO: 2513882 - RNA, 19 nt, Artificial Sequence
  Description of Artificial Sequence: Synthetic oligonucleotide
  Sense strand starting at position 2186 of SEQ ID NO: 1888141
gugucgucaguggaguauu

SEQ ID NO: 2513883 - RNA, 19 nt, Artificial Sequence
  Description of Artificial Sequence: Synthetic oligonucleotide
  Antisense strand to SEQ ID NO: 2513882
aauacuccacugacgacac

SEQ ID NO: 2513884 - RNA, 19 nt, Artificial Sequence
  Description of Artificial Sequence: Synthetic oligonucleotide
  Sense strand starting at position 2189 of SEQ ID NO: 1888141
ucgucaguggaguauugaa

SEQ ID NO: 2513885 - RNA, 19 nt, Artificial Sequence
  Description of Artificial Sequence: Synthetic oligonucleotide
  Antisense strand to SEQ ID NO: 2513884
uucaauacuccacugacga

SEQ ID NO: 2513886 - RNA, 19 nt, Artificial Sequence
  Description of Artificial Sequence: Synthetic oligonucleotide
  Sense strand starting at position 2484 of SEQ ID NO: 1888141
uaaugugaguccuuaagug

SEQ ID NO: 2513887 - RNA, 19 nt, Artificial Sequence
  Description of Artificial Sequence: Synthetic oligonucleotide
  Antisense strand to SEQ ID NO: 2513886
cacuuaaggacucacauua

SEQ ID NO: 2513888 - RNA, 19 nt, Artificial Sequence
  Description of Artificial Sequence: Synthetic oligonucleotide
  Sense strand starting at position 3307 of SEQ ID NO: 1888141
gcagcaaauagcuggugaa

SEQ ID NO: 2513889 - RNA, 19 nt, Artificial Sequence
  Description of Artificial Sequence: Synthetic oligonucleotide
  Antisense strand to SEQ ID NO: 2513888
uucaccagcuauuugcugc

SEQ ID NO: 2513890 - RNA, 19 nt, Artificial Sequence
  Description of Artificial Sequence: Synthetic oligonucleotide
  Sense strand starting at position 3308 of SEQ ID NO: 1888141
cagcaaauagcuggugaau

SEQ ID NO: 2513891 - RNA, 19 nt, Artificial Sequence
  Description of Artificial Sequence: Synthetic oligonucleotide
  Antisense strand to SEQ ID NO: 2513890
auucaccagcuauuugcug

SEQ ID NO: 2513892 - RNA, 19 nt, Artificial Sequence
  Description of Artificial Sequence: Synthetic oligonucleotide
  Sense strand starting at position 3402 of SEQ ID NO: 1888141
gugagauacuguuccauuc

SEQ ID NO: 2513893 - RNA, 19 nt, Artificial Sequence
  Description of Artificial Sequence: Synthetic oligonucleotide
  Antisense strand to SEQ ID NO: 2513892
gaauggaacaguaucucac

SEQ ID NO: 2513894 - RNA, 19 nt, Artificial Sequence
  Description of Artificial Sequence: Synthetic oligonucleotide
  Sense strand starting at position 3427 of SEQ ID NO: 1888141
cuauuuguuguacguauau

SEQ ID NO: 2513895 - RNA, 19 nt, Artificial Sequence
  Description of Artificial Sequence: Synthetic oligonucleotide
  Antisense strand to SEQ ID NO: 2513894
auauacguacaacaaauag

SEQ ID NO: 2513896 - RNA, 19 nt, Artificial Sequence
  Description of Artificial Sequence: Synthetic oligonucleotide
  Sense strand starting at position 201 of SEQ ID NO: 1888142
uguacucaagauuggguaa

SEQ ID NO: 2513897 - RNA, 19 nt, Artificial Sequence
  Description of Artificial Sequence: Synthetic oligonucleotide
  Antisense strand to SEQ ID NO: 2513896
uuacccaaucuugaguaca

SEQ ID NO: 2513898 - RNA, 19 nt, Artificial Sequence
  Description of Artificial Sequence: Synthetic oligonucleotide
  Sense strand starting at position 202 of SEQ ID NO: 1888142
guacucaagauuggguaaa

SEQ ID NO: 2513899 - RNA, 19 nt, Artificial Sequence
  Description of Artificial Sequence: Synthetic oligonucleotide
  Antisense strand to SEQ ID NO: 2513898
uuuacccaaucuugaguac

SEQ ID NO: 2513900 - RNA, 19 nt, Artificial Sequence
  Description of Artificial Sequence: Synthetic oligonucleotide
  Sense strand starting at position 204 of SEQ ID NO: 1888142
acucaagauuggguaaauc

SEQ ID NO: 2513901 - RNA, 19 nt, Artificial Sequence
  Description of Artificial Sequence: Synthetic oligonucleotide
  Antisense strand to SEQ ID NO: 2513900
gauuuacccaaucuugagu

SEQ ID NO: 2513902 - RNA, 19 nt, Artificial Sequence
  Description of Artificial Sequence: Synthetic oligonucleotide
  Sense strand starting at position 662 of SEQ ID NO: 1888142
uguaauugucaugaacuuu

SEQ ID NO: 2513903 - RNA, 19 nt, Artificial Sequence
  Description of Artificial Sequence: Synthetic oligonucleotide
  Antisense strand to SEQ ID NO: 2513902
aaaguucaugacaauuaca

SEQ ID NO: 2513904 - RNA, 19 nt, Artificial Sequence
  Description of Artificial Sequence: Synthetic oligonucleotide
  Sense strand starting at position 704 of SEQ ID NO: 1888142
cagugagggugacuaaauu

SEQ ID NO: 2513905 - RNA, 19 nt, Artificial Sequence
  Description of Artificial Sequence: Synthetic oligonucleotide
  Antisense strand to SEQ ID NO: 2513904
aauuuagucacccucacug

SEQ ID NO: 2513906 - RNA, 19 nt, Artificial Sequence
  Description of Artificial Sequence: Synthetic oligonucleotide
  Sense strand starting at position 724 of SEQ ID NO: 1888142
uauauagugguagaguauu

SEQ ID NO: 2513907 - RNA, 19 nt, Artificial Sequence
  Description of Artificial Sequence: Synthetic oligonucleotide
  Antisense strand to SEQ ID NO: 2513906
aauacucuaccacuauaua

SEQ ID NO: 2513908 - RNA, 19 nt, Artificial Sequence
  Description of Artificial Sequence: Synthetic oligonucleotide
  Sense strand starting at position 732 of SEQ ID NO: 1888142
gguagaguauuccuuaaac

SEQ ID NO: 2513909 - RNA, 19 nt, Artificial Sequence
  Description of Artificial Sequence: Synthetic oligonucleotide
  Antisense strand to SEQ ID NO: 2513908
guuuaaggaauacucuacc

SEQ ID NO: 2513910 - RNA, 19 nt, Artificial Sequence
  Description of Artificial Sequence: Synthetic oligonucleotide
  Sense strand starting at position 1296 of SEQ ID NO: 1888142
auaaguaguaugcaaguga

SEQ ID NO: 2513911 - RNA, 19 nt, Artificial Sequence
  Description of Artificial Sequence: Synthetic oligonucleotide
  Antisense strand to SEQ ID NO: 2513910
ucacuugcauacuacuuau

SEQ ID NO: 2513912 - RNA, 19 nt, Artificial Sequence
  Description of Artificial Sequence: Synthetic oligonucleotide
  Sense strand starting at position 1445 of SEQ ID NO: 1888142
cuaggaucugcugauguau

SEQ ID NO: 2513913 - RNA, 19 nt, Artificial Sequence
  Description of Artificial Sequence: Synthetic oligonucleotide
  Antisense strand to SEQ ID NO: 2513912
auacaucagcagauccuag

SEQ ID NO: 2513914 - RNA, 19 nt, Artificial Sequence
  Description of Artificial Sequence: Synthetic oligonucleotide
  Sense strand starting at position 1548 of SEQ ID NO: 1888142
acauguacacugggcaaua

SEQ ID NO: 2513915 - RNA, 19 nt, Artificial Sequence
  Description of Artificial Sequence: Synthetic oligonucleotide
  Antisense strand to SEQ ID NO: 2513914
uauugcccaguguacaugu

SEQ ID NO: 2513916 - RNA, 19 nt, Artificial Sequence
  Description of Artificial Sequence: Synthetic oligonucleotide
  Sense strand starting at position 1792 of SEQ ID NO: 1888142
gugggaaaccauugacugu

SEQ ID NO: 2513917 - RNA, 19 nt, Artificial Sequence
  Description of Artificial Sequence: Synthetic oligonucleotide
  Antisense strand to SEQ ID NO: 2513916
acagucaaugguuucccac

SEQ ID NO: 2513918 - RNA, 19 nt, Artificial Sequence
  Description of Artificial Sequence: Synthetic oligonucleotide
  Sense strand starting at position 1806 of SEQ ID NO: 1888142
acuguuuccgagcagagga

SEQ ID NO: 2513919 - RNA, 19 nt, Artificial Sequence
  Description of Artificial Sequence: Synthetic oligonucleotide
  Antisense strand to SEQ ID NO: 2513918
uccucugcucggaaacagu

SEQ ID NO: 2513920 - RNA, 19 nt, Artificial Sequence
  Description of Artificial Sequence: Synthetic oligonucleotide
  Sense strand starting at position 1834 of SEQ ID NO: 1888142
uggugagaacuguacuuug

SEQ ID NO: 2513921 - RNA, 19 nt, Artificial Sequence
  Description of Artificial Sequence: Synthetic oligonucleotide
  Antisense strand to SEQ ID NO: 2513920
caaaguacaguucucacca

SEQ ID NO: 2513922 - RNA, 19 nt, Artificial Sequence
  Description of Artificial Sequence: Synthetic oligonucleotide
  Sense strand starting at position 1837 of SEQ ID NO: 1888142
ugagaacuguacuuuguag

SEQ ID NO: 2513923 - RNA, 19 nt, Artificial Sequence
  Description of Artificial Sequence: Synthetic oligonucleotide
  Antisense strand to SEQ ID NO: 2513922
cuacaaaguacaguucuca

SEQ ID NO: 2513924 - RNA, 19 nt, Artificial Sequence
  Description of Artificial Sequence: Synthetic oligonucleotide
  Sense strand starting at position 1839 of SEQ ID NO: 1888142
agaacuguacuuuguagaa

SEQ ID NO: 2513925 - RNA, 19 nt, Artificial Sequence
  Description of Artificial Sequence: Synthetic oligonucleotide
  Antisense strand to SEQ ID NO: 2513924
uucuacaaaguacaguucu

SEQ ID NO: 2513926 - RNA, 19 nt, Artificial Sequence
  Description of Artificial Sequence: Synthetic oligonucleotide
  Sense strand starting at position 1843 of SEQ ID NO: 1888142
cuguacuuuguagaaugaa

SEQ ID NO: 2513927 - RNA, 19 nt, Artificial Sequence
  Description of Artificial Sequence: Synthetic oligonucleotide
  Antisense strand to SEQ ID NO: 2513926
uucauucuacaaaguacag

SEQ ID NO: 2513928 - RNA, 19 nt, Artificial Sequence
  Description of Artificial Sequence: Synthetic oligonucleotide
  Sense strand starting at position 1879 of SEQ ID NO: 1888142
ggaugcuugauguggaaac

SEQ ID NO: 2513929 - RNA, 19 nt, Artificial Sequence
  Description of Artificial Sequence: Synthetic oligonucleotide
  Antisense strand to SEQ ID NO: 2513928
guuuccacaucaagcaucc

SEQ ID NO: 2513930 - RNA, 19 nt, Artificial Sequence
  Description of Artificial Sequence: Synthetic oligonucleotide
  Sense strand starting at position 1907 of SEQ ID NO: 1888142
ugaggagcuggucauccau

SEQ ID NO: 2513931 - RNA, 19 nt, Artificial Sequence
  Description of Artificial Sequence: Synthetic oligonucleotide
  Antisense strand to SEQ ID NO: 2513930
auggaugaccagcuccuca

SEQ ID NO: 2513932 - RNA, 19 nt, Artificial Sequence
  Description of Artificial Sequence: Synthetic oligonucleotide
  Sense strand starting at position 2012 of SEQ ID NO: 1888142
uuaugaauaguuggugacu

SEQ ID NO: 2513933 - RNA, 19 nt, Artificial Sequence
  Description of Artificial Sequence: Synthetic oligonucleotide
  Antisense strand to SEQ ID NO: 2513932
agucaccaacuauucauaa

SEQ ID NO: 2513934 - RNA, 19 nt, Artificial Sequence
  Description of Artificial Sequence: Synthetic oligonucleotide
  Sense strand starting at position 2408 of SEQ ID NO: 1888142
gaaggcuauuaggucaaga

SEQ ID NO: 2513935 - RNA, 19 nt, Artificial Sequence
  Description of Artificial Sequence: Synthetic oligonucleotide
  Antisense strand to SEQ ID NO: 2513934
ucuugaccuaauagccuuc

SEQ ID NO: 2513936 - RNA, 19 nt, Artificial Sequence
  Description of Artificial Sequence: Synthetic oligonucleotide
  Sense strand starting at position 2809 of SEQ ID NO: 1888142
gucagaucucccgcguuga

SEQ ID NO: 2513937 - RNA, 19 nt, Artificial Sequence
  Description of Artificial Sequence: Synthetic oligonucleotide
  Antisense strand to SEQ ID NO: 2513936
ucaacgcgggagaucugac

SEQ ID NO: 2513938 - RNA, 19 nt, Artificial Sequence
  Description of Artificial Sequence: Synthetic oligonucleotide
  Sense strand starting at position 2819 of SEQ ID NO: 1888142
ccgcguugaggcaagucau

SEQ ID NO: 2513939 - RNA, 19 nt, Artificial Sequence
  Description of Artificial Sequence: Synthetic oligonucleotide
  Antisense strand to SEQ ID NO: 2513938
augacuugccucaacgcgg

SEQ ID NO: 2513940 - RNA, 19 nt, Artificial Sequence
  Description of Artificial Sequence: Synthetic oligonucleotide
  Sense strand starting at position 2846 of SEQ ID NO: 1888142
gguggucaucagggaggau

SEQ ID NO: 2513941 - RNA, 19 nt, Artificial Sequence
  Description of Artificial Sequence: Synthetic oligonucleotide
  Antisense strand to SEQ ID NO: 2513940
auccucccugaugaccacc

SEQ ID NO: 2513942 - RNA, 19 nt, Artificial Sequence
  Description of Artificial Sequence: Synthetic oligonucleotide
  Sense strand starting at position 2912 of SEQ ID NO: 1888142
ggaaguaccucaguuugga

SEQ ID NO: 2513943 - RNA, 19 nt, Artificial Sequence
  Description of Artificial Sequence: Synthetic oligonucleotide
  Antisense strand to SEQ ID NO: 2513942
uccaaacugagguacuucc

SEQ ID NO: 2513944 - RNA, 19 nt, Artificial Sequence
  Description of Artificial Sequence: Synthetic oligonucleotide
  Sense strand starting at position 3033 of SEQ ID NO: 1888142
cacagucaagagugaucau

SEQ ID NO: 2513945 - RNA, 19 nt, Artificial Sequence
  Description of Artificial Sequence: Synthetic oligonucleotide
  Antisense strand to SEQ ID NO: 2513944
augaucacucuugacugug

SEQ ID NO: 2513946 - RNA, 19 nt, Artificial Sequence
  Description of Artificial Sequence: Synthetic oligonucleotide
  Sense strand starting at position 3036 of SEQ ID NO: 1888142
agucaagagugaucaugug

SEQ ID NO: 2513947 - RNA, 19 nt, Artificial Sequence
  Description of Artificial Sequence: Synthetic oligonucleotide
  Antisense strand to SEQ ID NO: 2513946
cacaugaucacucuugacu

SEQ ID NO: 2513948 - RNA, 19 nt, Artificial Sequence
  Description of Artificial Sequence: Synthetic oligonucleotide
  Sense strand starting at position 3145 of SEQ ID NO: 1888142
ccagaagaguucucauauu

SEQ ID NO: 2513949 - RNA, 19 nt, Artificial Sequence
  Description of Artificial Sequence: Synthetic oligonucleotide
  Antisense strand to SEQ ID NO: 2513948
aauaugagaacucuucugg

SEQ ID NO: 2513950 - RNA, 19 nt, Artificial Sequence
  Description of Artificial Sequence: Synthetic oligonucleotide
  Sense strand starting at position 3209 of SEQ ID NO: 1888142
aucuguaguagugaucaaa

SEQ ID NO: 2513951 - RNA, 19 nt, Artificial Sequence
  Description of Artificial Sequence: Synthetic oligonucleotide
  Antisense strand to SEQ ID NO: 2513950
uuugaucacuacuacagau

SEQ ID NO: 2513952 - RNA, 19 nt, Artificial Sequence
  Description of Artificial Sequence: Synthetic oligonucleotide
  Sense strand starting at position 3368 of SEQ ID NO: 1888142
ucuuacgaucuugauacuu

SEQ ID NO: 2513953 - RNA, 19 nt, Artificial Sequence
  Description of Artificial Sequence: Synthetic oligonucleotide
  Antisense strand to SEQ ID NO: 2513952
aaguaucaagaucguaaga

SEQ ID NO: 2513954 - RNA, 19 nt, Artificial Sequence
  Description of Artificial Sequence: Synthetic oligonucleotide
  Sense strand starting at position 3373 of SEQ ID NO: 1888142
cgaucuugauacuucugaa

SEQ ID NO: 2513955 - RNA, 19 nt, Artificial Sequence
  Description of Artificial Sequence: Synthetic oligonucleotide
  Antisense strand to SEQ ID NO: 2513954
uucagaaguaucaagaucg

SEQ ID NO: 2513956 - RNA, 19 nt, Artificial Sequence
  Description of Artificial Sequence: Synthetic oligonucleotide
  Sense strand starting at position 3478 of SEQ ID NO: 1888142
gugucucaugacuacugau

SEQ ID NO: 2513957 - RNA, 19 nt, Artificial Sequence
  Description of Artificial Sequence: Synthetic oligonucleotide
  Antisense strand to SEQ ID NO: 2513956
aucaguagucaugagacac

SEQ ID NO: 2513958 - RNA, 19 nt, Artificial Sequence
  Description of Artificial Sequence: Synthetic oligonucleotide
  Sense strand starting at position 3508 of SEQ ID NO: 1888142
ucacucacuuggucaagau

SEQ ID NO: 2513959 - RNA, 19 nt, Artificial Sequence
  Description of Artificial Sequence: Synthetic oligonucleotide
  Antisense strand to SEQ ID NO: 2513958
aucuugaccaagugaguga

SEQ ID NO: 2513960 - RNA, 19 nt, Artificial Sequence
  Description of Artificial Sequence: Synthetic oligonucleotide
  Sense strand starting at position 3512 of SEQ ID NO: 1888142
ucacuuggucaagauggua

SEQ ID NO: 2513961 - RNA, 19 nt, Artificial Sequence
  Description of Artificial Sequence: Synthetic oligonucleotide
  Antisense strand to SEQ ID NO: 2513960
uaccaucuugaccaaguga

SEQ ID NO: 2513962 - RNA, 19 nt, Artificial Sequence
  Description of Artificial Sequence: Synthetic oligonucleotide
  Sense strand starting at position 3524 of SEQ ID NO: 1888142
gaugguaucagucagguuu

SEQ ID NO: 2513963 - RNA, 19 nt, Artificial Sequence
  Description of Artificial Sequence: Synthetic oligonucleotide
  Antisense strand to SEQ ID NO: 2513962
aaaccugacugauaccauc

SEQ ID NO: 2513964 - RNA, 19 nt, Artificial Sequence
  Description of Artificial Sequence: Synthetic oligonucleotide
  Sense strand starting at position 3558 of SEQ ID NO: 1888142
acuauuuguuuguuucuca

SEQ ID NO: 2513965 - RNA, 19 nt, Artificial Sequence
  Description of Artificial Sequence: Synthetic oligonucleotide
  Antisense strand to SEQ ID NO: 2513964
ugagaaacaaacaaauagu

SEQ ID NO: 2513966 - RNA, 19 nt, Artificial Sequence
  Description of Artificial Sequence: Synthetic oligonucleotide
  Sense strand starting at position 3559 of SEQ ID NO: 1888142
cuauuuguuuguuucucaa

SEQ ID NO: 2513967 - RNA, 19 nt, Artificial Sequence
  Description of Artificial Sequence: Synthetic oligonucleotide
  Antisense strand to SEQ ID NO: 2513966
uugagaaacaaacaaauag

SEQ ID NO: 2513968 - RNA, 19 nt, Artificial Sequence
  Description of Artificial Sequence: Synthetic oligonucleotide
  Sense strand starting at position 3680 of SEQ ID NO: 1888142
gaacauccacuugguuaga

SEQ ID NO: 2513969 - RNA, 19 nt, Artificial Sequence
  Description of Artificial Sequence: Synthetic oligonucleotide
  Antisense strand to SEQ ID NO: 2513968
ucuaaccaaguggauguuc

SEQ ID NO: 2513970 - RNA, 19 nt, Artificial Sequence
  Description of Artificial Sequence: Synthetic oligonucleotide
  Sense strand starting at position 3682 of SEQ ID NO: 1888142
acauccacuugguuagaaa

SEQ ID NO: 2513971 - RNA, 19 nt, Artificial Sequence
  Description of Artificial Sequence: Synthetic oligonucleotide
  Antisense strand to SEQ ID NO: 2513970
uuucuaaccaaguggaugu

SEQ ID NO: 2513972 - RNA, 19 nt, Artificial Sequence
  Description of Artificial Sequence: Synthetic oligonucleotide
  Sense strand starting at position 3770 of SEQ ID NO: 1888142
gcaaauaguggugaccuuu

SEQ ID NO: 2513973 - RNA, 19 nt, Artificial Sequence
  Description of Artificial Sequence: Synthetic oligonucleotide
  Antisense strand to SEQ ID NO: 2513972
aaaggucaccacuauuugc

SEQ ID NO: 2513974 - RNA, 19 nt, Artificial Sequence
  Description of Artificial Sequence: Synthetic oligonucleotide
  Sense strand starting at position 3829 of SEQ ID NO: 1888142
uugggauacaagugggauu

SEQ ID NO: 2513975 - RNA, 19 nt, Artificial Sequence
  Description of Artificial Sequence: Synthetic oligonucleotide
  Antisense strand to SEQ ID NO: 2513974
aaucccacuuguaucccaa

SEQ ID NO: 2513976 - RNA, 19 nt, Artificial Sequence
  Description of Artificial Sequence: Synthetic oligonucleotide
  Sense strand starting at position 141 of SEQ ID NO: 1888143
cggaguuucguuguguugu

SEQ ID NO: 2513977 - RNA, 19 nt, Artificial Sequence
  Description of Artificial Sequence: Synthetic oligonucleotide
  Antisense strand to SEQ ID NO: 2513976
acaacacaacgaaacuccg

SEQ ID NO: 2513978 - RNA, 19 nt, Artificial Sequence
  Description of Artificial Sequence: Synthetic oligonucleotide
  Sense strand starting at position 306 of SEQ ID NO: 1888143
guaugauguggcggaucuu

SEQ ID NO: 2513979 - RNA, 19 nt, Artificial Sequence
  Description of Artificial Sequence: Synthetic oligonucleotide
  Antisense strand to SEQ ID NO: 2513978
aagauccgccacaucauac

SEQ ID NO: 2513980 - RNA, 19 nt, Artificial Sequence
  Description of Artificial Sequence: Synthetic oligonucleotide
  Sense strand starting at position 363 of SEQ ID NO: 1888143
guacuauaaccugaugcau

SEQ ID NO: 2513981 - RNA, 19 nt, Artificial Sequence
  Description of Artificial Sequence: Synthetic oligonucleotide
  Antisense strand to SEQ ID NO: 2513980
augcaucagguuauaguac

SEQ ID NO: 2513982 - RNA, 19 nt, Artificial Sequence
  Description of Artificial Sequence: Synthetic oligonucleotide
  Sense strand starting at position 489 of SEQ ID NO: 1888143
auggcucagugcucuuaaa

SEQ ID NO: 2513983 - RNA, 19 nt, Artificial Sequence
  Description of Artificial Sequence: Synthetic oligonucleotide
  Antisense strand to SEQ ID NO: 2513982
uuuaagagcacugagccau

SEQ ID NO: 2513984 - RNA, 19 nt, Artificial Sequence
  Description of Artificial Sequence: Synthetic oligonucleotide
  Sense strand starting at position 577 of SEQ ID NO: 1888143
cuauuaaggccugaggcua

SEQ ID NO: 2513985 - RNA, 19 nt, Artificial Sequence
  Description of Artificial Sequence: Synthetic oligonucleotide
  Antisense strand to SEQ ID NO: 2513984
uagccucaggccuuaauag

SEQ ID NO: 2513986 - RNA, 19 nt, Artificial Sequence
  Description of Artificial Sequence: Synthetic oligonucleotide
  Sense strand starting at position 701 of SEQ ID NO: 1888143
gggagugccaccuguguuu

SEQ ID NO: 2513987 - RNA, 19 nt, Artificial Sequence
  Description of Artificial Sequence: Synthetic oligonucleotide
  Antisense strand to SEQ ID NO: 2513986
aaacacagguggcacuccc

SEQ ID NO: 2513988 - RNA, 19 nt, Artificial Sequence
  Description of Artificial Sequence: Synthetic oligonucleotide
  Sense strand starting at position 729 of SEQ ID NO: 1888143
uguuacuucccgcaagaac

SEQ ID NO: 2513989 - RNA, 19 nt, Artificial Sequence
  Description of Artificial Sequence: Synthetic oligonucleotide
  Antisense strand to SEQ ID NO: 2513988
guucuugcgggaaguaaca

SEQ ID NO: 2513990 - RNA, 19 nt, Artificial Sequence
  Description of Artificial Sequence: Synthetic oligonucleotide
  Sense strand starting at position 747 of SEQ ID NO: 1888143
ccgaaaugcgcaccuguau

SEQ ID NO: 2513991 - RNA, 19 nt, Artificial Sequence
  Description of Artificial Sequence: Synthetic oligonucleotide
  Antisense strand to SEQ ID NO: 2513990
auacaggugcgcauuucgg

SEQ ID NO: 2513992 - RNA, 19 nt, Artificial Sequence
  Description of Artificial Sequence: Synthetic oligonucleotide
  Sense strand starting at position 960 of SEQ ID NO: 1888143
gguguuuagcagugugaag

SEQ ID NO: 2513993 - RNA, 19 nt, Artificial Sequence
  Description of Artificial Sequence: Synthetic oligonucleotide
  Antisense strand to SEQ ID NO: 2513992
cuucacacugcuaaacacc

SEQ ID NO: 2513994 - RNA, 19 nt, Artificial Sequence
  Description of Artificial Sequence: Synthetic oligonucleotide
  Sense strand starting at position 961 of SEQ ID NO: 1888143
guguuuagcagugugaagu

SEQ ID NO: 2513995 - RNA, 19 nt, Artificial Sequence
  Description of Artificial Sequence: Synthetic oligonucleotide
  Antisense strand to SEQ ID NO: 2513994
acuucacacugcuaaacac

SEQ ID NO: 2513996 - RNA, 19 nt, Artificial Sequence
  Description of Artificial Sequence: Synthetic oligonucleotide
  Sense strand starting at position 974 of SEQ ID NO: 1888143
ugaaguuucggguguugag

SEQ ID NO: 2513997 - RNA, 19 nt, Artificial Sequence
  Description of Artificial Sequence: Synthetic oligonucleotide
  Antisense strand to SEQ ID NO: 2513996
cucaacacccgaaacuuca

SEQ ID NO: 2513998 - RNA, 19 nt, Artificial Sequence
  Description of Artificial Sequence: Synthetic oligonucleotide
  Sense strand starting at position 1019 of SEQ ID NO: 1888143
gggaguucucaucaguaac

SEQ ID NO: 2513999 - RNA, 19 nt, Artificial Sequence
  Description of Artificial Sequence: Synthetic oligonucleotide
  Antisense strand to SEQ ID NO: 2513998
guuacugaugagaacuccc

SEQ ID NO: 2514000 - RNA, 19 nt, Artificial Sequence
  Description of Artificial Sequence: Synthetic oligonucleotide
  Sense strand starting at position 1105 of SEQ ID NO: 1888143
gcuuucggcaaagaguuua

SEQ ID NO: 2514001 - RNA, 19 nt, Artificial Sequence
  Description of Artificial Sequence: Synthetic oligonucleotide
  Antisense strand to SEQ ID NO: 2514000
uaaacucuuugccgaaagc

SEQ ID NO: 2514002 - RNA, 19 nt, Artificial Sequence
  Description of Artificial Sequence: Synthetic oligonucleotide
  Sense strand starting at position 1312 of SEQ ID NO: 1888143
uccagaggacgcugaaaua

SEQ ID NO: 2514003 - RNA, 19 nt, Artificial Sequence
  Description of Artificial Sequence: Synthetic oligonucleotide
  Antisense strand to SEQ ID NO: 2514002
uauuucagcguccucugga

SEQ ID NO: 2514004 - RNA, 19 nt, Artificial Sequence
  Description of Artificial Sequence: Synthetic oligonucleotide
  Sense strand starting at position 1322 of SEQ ID NO: 1888143
gcugaaauacggugccaaa

SEQ ID NO: 2514005 - RNA, 19 nt, Artificial Sequence
  Description of Artificial Sequence: Synthetic oligonucleotide
  Antisense strand to SEQ ID NO: 2514004
uuuggcaccguauuucagc

SEQ ID NO: 2514006 - RNA, 19 nt, Artificial Sequence
  Description of Artificial Sequence: Synthetic oligonucleotide
  Sense strand starting at position 1558 of SEQ ID NO: 1888143
ggcgacaaacuguaagguu

SEQ ID NO: 2514007 - RNA, 19 nt, Artificial Sequence
  Description of Artificial Sequence: Synthetic oligonucleotide
  Antisense strand to SEQ ID NO: 2514006
aaccuuacaguuugucgcc

SEQ ID NO: 2514008 - RNA, 19 nt, Artificial Sequence
  Description of Artificial Sequence: Synthetic oligonucleotide
  Sense strand starting at position 1902 of SEQ ID NO: 1888143
ggcuuuauuuccucgucuu

SEQ ID NO: 2514009 - RNA, 19 nt, Artificial Sequence
  Description of Artificial Sequence: Synthetic oligonucleotide
  Antisense strand to SEQ ID NO: 2514008
aagacgaggaaauaaagcc

SEQ ID NO: 2514010 - RNA, 19 nt, Artificial Sequence
  Description of Artificial Sequence: Synthetic oligonucleotide
  Sense strand starting at position 1903 of SEQ ID NO: 1888143
gcuuuauuuccucgucuuu

SEQ ID NO: 2514011 - RNA, 19 nt, Artificial Sequence
  Description of Artificial Sequence: Synthetic oligonucleotide
  Antisense strand to SEQ ID NO: 2514010
aaagacgaggaaauaaagc

SEQ ID NO: 2514012 - RNA, 19 nt, Artificial Sequence
  Description of Artificial Sequence: Synthetic oligonucleotide
  Sense strand starting at position 1905 of SEQ ID NO: 1888143
uuuauuuccucgucuuuag

SEQ ID NO: 2514013 - RNA, 19 nt, Artificial Sequence
  Description of Artificial Sequence: Synthetic oligonucleotide
  Antisense strand to SEQ ID NO: 2514012
cuaaagacgaggaaauaaa

SEQ ID NO: 2514014 - RNA, 19 nt, Artificial Sequence
  Description of Artificial Sequence: Synthetic oligonucleotide
  Sense strand starting at position 1908 of SEQ ID NO: 1888143
auuuccucgucuuuagagu

SEQ ID NO: 2514015 - RNA, 19 nt, Artificial Sequence
  Description of Artificial Sequence: Synthetic oligonucleotide
  Antisense strand to SEQ ID NO: 2514014
acucuaaagacgaggaaau

SEQ ID NO: 2514016 - RNA, 19 nt, Artificial Sequence
  Description of Artificial Sequence: Synthetic oligonucleotide
  Sense strand starting at position 1930 of SEQ ID NO: 1888143
ccuguugacuccucaccua

SEQ ID NO: 2514017 - RNA, 19 nt, Artificial Sequence
  Description of Artificial Sequence: Synthetic oligonucleotide
  Antisense strand to SEQ ID NO: 2514016
uaggugaggagucaacagg

SEQ ID NO: 2514018 - RNA, 19 nt, Artificial Sequence
  Description of Artificial Sequence: Synthetic oligonucleotide
  Sense strand starting at position 1988 of SEQ ID NO: 1888143
cgaguauccacuggacuga

SEQ ID NO: 2514019 - RNA, 19 nt, Artificial Sequence
  Description of Artificial Sequence: Synthetic oligonucleotide
  Antisense strand to SEQ ID NO: 2514018
ucaguccaguggauacucg

SEQ ID NO: 2514020 - RNA, 19 nt, Artificial Sequence
  Description of Artificial Sequence: Synthetic oligonucleotide
  Sense strand starting at position 2018 of SEQ ID NO: 1888143
ggcguuccuuuaucucaga

SEQ ID NO: 2514021 - RNA, 19 nt, Artificial Sequence
  Description of Artificial Sequence: Synthetic oligonucleotide
  Antisense strand to SEQ ID NO: 2514020
ucugagauaaaggaacgcc

SEQ ID NO: 2514022 - RNA, 19 nt, Artificial Sequence
  Description of Artificial Sequence: Synthetic oligonucleotide
  Sense strand starting at position 2037 of SEQ ID NO: 1888143
gacuccaaggucuggaaau

SEQ ID NO: 2514023 - RNA, 19 nt, Artificial Sequence
  Description of Artificial Sequence: Synthetic oligonucleotide
  Antisense strand to SEQ ID NO: 2514022
auuuccagaccuuggaguc

SEQ ID NO: 2514024 - RNA, 19 nt, Artificial Sequence
  Description of Artificial Sequence: Synthetic oligonucleotide
  Sense strand starting at position 2457 of SEQ ID NO: 1888143
gaguaauucuugucugugg

SEQ ID NO: 2514025 - RNA, 19 nt, Artificial Sequence
  Description of Artificial Sequence: Synthetic oligonucleotide
  Antisense strand to SEQ ID NO: 2514024
ccacagacaagaauuacuc

SEQ ID NO: 2514026 - RNA, 19 nt, Artificial Sequence
  Description of Artificial Sequence: Synthetic oligonucleotide
  Sense strand starting at position 2506 of SEQ ID NO: 1888143
ggaauuaugagccagucac

SEQ ID NO: 2514027 - RNA, 19 nt, Artificial Sequence
  Description of Artificial Sequence: Synthetic oligonucleotide
  Antisense strand to SEQ ID NO: 2514026
gugacuggcucauaauucc

SEQ ID NO: 2514028 - RNA, 19 nt, Artificial Sequence
  Description of Artificial Sequence: Synthetic oligonucleotide
  Sense strand starting at position 2517 of SEQ ID NO: 1888143
ccagucacuccugacagau

SEQ ID NO: 2514029 - RNA, 19 nt, Artificial Sequence
  Description of Artificial Sequence: Synthetic oligonucleotide
  Antisense strand to SEQ ID NO: 2514028
aucugucaggagugacugg

SEQ ID NO: 2514030 - RNA, 19 nt, Artificial Sequence
  Description of Artificial Sequence: Synthetic oligonucleotide
  Sense strand starting at position 3094 of SEQ ID NO: 1888143
accauucugugguuuaaca

SEQ ID NO: 2514031 - RNA, 19 nt, Artificial Sequence
  Description of Artificial Sequence: Synthetic oligonucleotide
  Antisense strand to SEQ ID NO: 2514030
uguuaaaccacagaauggu

SEQ ID NO: 2514032 - RNA, 19 nt, Artificial Sequence
  Description of Artificial Sequence: Synthetic oligonucleotide
  Sense strand starting at position 3101 of SEQ ID NO: 1888143
ugugguuuaacagagacuu

SEQ ID NO: 2514033 - RNA, 19 nt, Artificial Sequence
  Description of Artificial Sequence: Synthetic oligonucleotide
  Antisense strand to SEQ ID NO: 2514032
aagucucuguuaaaccaca

SEQ ID NO: 2514034 - RNA, 19 nt, Artificial Sequence
  Description of Artificial Sequence: Synthetic oligonucleotide
  Sense strand starting at position 3166 of SEQ ID NO: 1888143
gauagaguggugcgagauu

SEQ ID NO: 2514035 - RNA, 19 nt, Artificial Sequence
  Description of Artificial Sequence: Synthetic oligonucleotide
  Antisense strand to SEQ ID NO: 2514034
aaucucgcaccacucuauc

SEQ ID NO: 2514036 - RNA, 19 nt, Artificial Sequence
  Description of Artificial Sequence: Synthetic oligonucleotide
  Sense strand starting at position 3331 of SEQ ID NO: 1888143
uucugucacugcuuggaga

SEQ ID NO: 2514037 - RNA, 19 nt, Artificial Sequence
  Description of Artificial Sequence: Synthetic oligonucleotide
  Antisense strand to SEQ ID NO: 2514036
ucuccaagcagugacagaa

SEQ ID NO: 2514038 - RNA, 19 nt, Artificial Sequence
  Description of Artificial Sequence: Synthetic oligonucleotide
  Sense strand starting at position 3429 of SEQ ID NO: 1888143
ccacuauuccaagaguggu

SEQ ID NO: 2514039 - RNA, 19 nt, Artificial Sequence
  Description of Artificial Sequence: Synthetic oligonucleotide
  Antisense strand to SEQ ID NO: 2514038
accacucuuggaauagugg

SEQ ID NO: 2514040 - RNA, 19 nt, Artificial Sequence
  Description of Artificial Sequence: Synthetic oligonucleotide
  Sense strand starting at position 3435 of SEQ ID NO: 1888143
uuccaagagugguuggcua

SEQ ID NO: 2514041 - RNA, 19 nt, Artificial Sequence
  Description of Artificial Sequence: Synthetic oligonucleotide
  Antisense strand to SEQ ID NO: 2514040
uagccaaccacucuuggaa

SEQ ID NO: 2514042 - RNA, 19 nt, Artificial Sequence
  Description of Artificial Sequence: Synthetic oligonucleotide
  Sense strand starting at position 3437 of SEQ ID NO: 1888143
ccaagagugguuggcuauu

SEQ ID NO: 2514043 - RNA, 19 nt, Artificial Sequence
  Description of Artificial Sequence: Synthetic oligonucleotide
  Antisense strand to SEQ ID NO: 2514042
aauagccaaccacucuugg

SEQ ID NO: 2514044 - RNA, 19 nt, Artificial Sequence
  Description of Artificial Sequence: Synthetic oligonucleotide
  Sense strand starting at position 3439 of SEQ ID NO: 1888143
aagagugguuggcuauuaa

SEQ ID NO: 2514045 - RNA, 19 nt, Artificial Sequence
  Description of Artificial Sequence: Synthetic oligonucleotide
  Antisense strand to SEQ ID NO: 2514044
uuaauagccaaccacucuu

SEQ ID NO: 2514046 - RNA, 19 nt, Artificial Sequence
  Description of Artificial Sequence: Synthetic oligonucleotide
  Sense strand starting at position 3449 of SEQ ID NO: 1888143
ggcuauuaaacgugaagau

SEQ ID NO: 2514047 - RNA, 19 nt, Artificial Sequence
  Description of Artificial Sequence: Synthetic oligonucleotide
  Antisense strand to SEQ ID NO: 2514046
aucuucacguuuaauagcc

SEQ ID NO: 2514048 - RNA, 19 nt, Artificial Sequence
  Description of Artificial Sequence: Synthetic oligonucleotide
  Sense strand starting at position 3450 of SEQ ID NO: 1888143
gcuauuaaacgugaagauu

SEQ ID NO: 2514049 - RNA, 19 nt, Artificial Sequence
  Description of Artificial Sequence: Synthetic oligonucleotide
  Antisense strand to SEQ ID NO: 2514048
aaucuucacguuuaauagc

SEQ ID NO: 2514050 - RNA, 19 nt, Artificial Sequence
  Description of Artificial Sequence: Synthetic oligonucleotide
  Sense strand starting at position 3520 of SEQ ID NO: 1888143
uugugucuuccugacagga

SEQ ID NO: 2514051 - RNA, 19 nt, Artificial Sequence
  Description of Artificial Sequence: Synthetic oligonucleotide
  Antisense strand to SEQ ID NO: 2514050
uccugucaggaagacacaa

SEQ ID NO: 2514052 - RNA, 19 nt, Artificial Sequence
  Description of Artificial Sequence: Synthetic oligonucleotide
  Sense strand starting at position 3691 of SEQ ID NO: 1888143
auuaaugguggcggaaaua

SEQ ID NO: 2514053 - RNA, 19 nt, Artificial Sequence
  Description of Artificial Sequence: Synthetic oligonucleotide
  Antisense strand to SEQ ID NO: 2514052
uauuuccgccaccauuaau

SEQ ID NO: 2514054 - RNA, 19 nt, Artificial Sequence
  Description of Artificial Sequence: Synthetic oligonucleotide
  Sense strand starting at position 3750 of SEQ ID NO: 1888143
acuaaucaauuugagauga

SEQ ID NO: 2514055 - RNA, 19 nt, Artificial Sequence
  Description of Artificial Sequence: Synthetic oligonucleotide
  Antisense strand to SEQ ID NO: 2514054
ucaucucaaauugauuagu

SEQ ID NO: 2514056 - RNA, 19 nt, Artificial Sequence
  Description of Artificial Sequence: Synthetic oligonucleotide
  Sense strand starting at position 294 of SEQ ID NO: 1888144
ucugacacguaaucauaga

SEQ ID NO: 2514057 - RNA, 19 nt, Artificial Sequence
  Description of Artificial Sequence: Synthetic oligonucleotide
  Antisense strand to SEQ ID NO: 2514056
ucuaugauuacgugucaga

SEQ ID NO: 2514058 - RNA, 19 nt, Artificial Sequence
  Description of Artificial Sequence: Synthetic oligonucleotide
  Sense strand starting at position 302 of SEQ ID NO: 1888144
guaaucauagagcauuauc

SEQ ID NO: 2514059 - RNA, 19 nt, Artificial Sequence
  Description of Artificial Sequence: Synthetic oligonucleotide
  Antisense strand to SEQ ID NO: 2514058
gauaaugcucuaugauuac

SEQ ID NO: 2514060 - RNA, 19 nt, Artificial Sequence
  Description of Artificial Sequence: Synthetic oligonucleotide
  Sense strand starting at position 328 of SEQ ID NO: 1888144
uuaguaugagcggaauaug

SEQ ID NO: 2514061 - RNA, 19 nt, Artificial Sequence
  Description of Artificial Sequence: Synthetic oligonucleotide
  Antisense strand to SEQ ID NO: 2514060
cauauuccgcucauacuaa

SEQ ID NO: 2514062 - RNA, 19 nt, Artificial Sequence
  Description of Artificial Sequence: Synthetic oligonucleotide
  Sense strand starting at position 572 of SEQ ID NO: 1888144
uuaccuaucgaauaugugu

SEQ ID NO: 2514063 - RNA, 19 nt, Artificial Sequence
  Description of Artificial Sequence: Synthetic oligonucleotide
  Antisense strand to SEQ ID NO: 2514062
acacauauucgauagguaa

SEQ ID NO: 2514064 - RNA, 19 nt, Artificial Sequence
  Description of Artificial Sequence: Synthetic oligonucleotide
  Sense strand starting at position 692 of SEQ ID NO: 1888144
ugaugcauguaaguagauu

SEQ ID NO: 2514065 - RNA, 19 nt, Artificial Sequence
  Description of Artificial Sequence: Synthetic oligonucleotide
  Antisense strand to SEQ ID NO: 2514064
aaucuacuuacaugcauca

SEQ ID NO: 2514066 - RNA, 19 nt, Artificial Sequence
  Description of Artificial Sequence: Synthetic oligonucleotide
  Sense strand starting at position 812 of SEQ ID NO: 1888144
guugccguugccucaaaua

SEQ ID NO: 2514067 - RNA, 19 nt, Artificial Sequence
  Description of Artificial Sequence: Synthetic oligonucleotide
  Antisense strand to SEQ ID NO: 2514066
uauuugaggcaacggcaac

SEQ ID NO: 2514068 - RNA, 19 nt, Artificial Sequence
  Description of Artificial Sequence: Synthetic oligonucleotide
  Sense strand starting at position 860 of SEQ ID NO: 1888144
ucggcuacacauugaacua

SEQ ID NO: 2514069 - RNA, 19 nt, Artificial Sequence
  Description of Artificial Sequence: Synthetic oligonucleotide
  Antisense strand to SEQ ID NO: 2514068
uaguucaauguguagccga

SEQ ID NO: 2514070 - RNA, 19 nt, Artificial Sequence
  Description of Artificial Sequence: Synthetic oligonucleotide
  Sense strand starting at position 992 of SEQ ID NO: 1888144
ugcagagauccaugagcuu

SEQ ID NO: 2514071 - RNA, 19 nt, Artificial Sequence
  Description of Artificial Sequence: Synthetic oligonucleotide
  Antisense strand to SEQ ID NO: 2514070
aagcucauggaucucugca

SEQ ID NO: 2514072 - RNA, 19 nt, Artificial Sequence
  Description of Artificial Sequence: Synthetic oligonucleotide
  Sense strand starting at position 1041 of SEQ ID NO: 1888144
cugggaugcagucaggaua

SEQ ID NO: 2514073 - RNA, 19 nt, Artificial Sequence
  Description of Artificial Sequence: Synthetic oligonucleotide
  Antisense strand to SEQ ID NO: 2514072
uauccugacugcaucccag

SEQ ID NO: 2514074 - RNA, 19 nt, Artificial Sequence
  Description of Artificial Sequence: Synthetic oligonucleotide
  Sense strand starting at position 1175 of SEQ ID NO: 1888144
agguaugacgugcagaaca

SEQ ID NO: 2514075 - RNA, 19 nt, Artificial Sequence
  Description of Artificial Sequence: Synthetic oligonucleotide
  Antisense strand to SEQ ID NO: 2514074
uguucugcacgucauaccu

SEQ ID NO: 2514076 - RNA, 19 nt, Artificial Sequence
  Description of Artificial Sequence: Synthetic oligonucleotide
  Sense strand starting at position 1259 of SEQ ID NO: 1888144
aauccagaucuugggaagu

SEQ ID NO: 2514077 - RNA, 19 nt, Artificial Sequence
  Description of Artificial Sequence: Synthetic oligonucleotide
  Antisense strand to SEQ ID NO: 2514076
acuucccaagaucuggauu

SEQ ID NO: 2514078 - RNA, 19 nt, Artificial Sequence
  Description of Artificial Sequence: Synthetic oligonucleotide
  Sense strand starting at position 1616 of SEQ ID NO: 1888144
gacaguaacugcuccagau

SEQ ID NO: 2514079 - RNA, 19 nt, Artificial Sequence
  Description of Artificial Sequence: Synthetic oligonucleotide
  Antisense strand to SEQ ID NO: 2514078
aucuggagcaguuacuguc

SEQ ID NO: 2514080 - RNA, 19 nt, Artificial Sequence
  Description of Artificial Sequence: Synthetic oligonucleotide
  Sense strand starting at position 1620 of SEQ ID NO: 1888144
guaacugcuccagaucugu

SEQ ID NO: 2514081 - RNA, 19 nt, Artificial Sequence
  Description of Artificial Sequence: Synthetic oligonucleotide
  Antisense strand to SEQ ID NO: 2514080
acagaucuggagcaguuac

SEQ ID NO: 2514082 - RNA, 19 nt, Artificial Sequence
  Description of Artificial Sequence: Synthetic oligonucleotide
  Sense strand starting at position 1756 of SEQ ID NO: 1888144
gccugaauuuguuuaacuu

SEQ ID NO: 2514083 - RNA, 19 nt, Artificial Sequence
  Description of Artificial Sequence: Synthetic oligonucleotide
  Antisense strand to SEQ ID NO: 2514082
aaguuaaacaaauucaggc

SEQ ID NO: 2514084 - RNA, 19 nt, Artificial Sequence
  Description of Artificial Sequence: Synthetic oligonucleotide
  Sense strand starting at position 1764 of SEQ ID NO: 1888144
uuguuuaacuuaccagaga

SEQ ID NO: 2514085 - RNA, 19 nt, Artificial Sequence
  Description of Artificial Sequence: Synthetic oligonucleotide
  Antisense strand to SEQ ID NO: 2514084
ucucugguaaguuaaacaa

SEQ ID NO: 2514086 - RNA, 19 nt, Artificial Sequence
  Description of Artificial Sequence: Synthetic oligonucleotide
  Sense strand starting at position 2288 of SEQ ID NO: 1888144
cucucacugccugggauua

SEQ ID NO: 2514087 - RNA, 19 nt, Artificial Sequence
  Description of Artificial Sequence: Synthetic oligonucleotide
  Antisense strand to SEQ ID NO: 2514086
uaaucccaggcagugagag

SEQ ID NO: 2514088 - RNA, 19 nt, Artificial Sequence
  Description of Artificial Sequence: Synthetic oligonucleotide
  Sense strand starting at position 2298 of SEQ ID NO: 1888144
cugggauuagccuacauug

SEQ ID NO: 2514089 - RNA, 19 nt, Artificial Sequence
  Description of Artificial Sequence: Synthetic oligonucleotide
  Antisense strand to SEQ ID NO: 2514088
caauguaggcuaaucccag

SEQ ID NO: 2514090 - RNA, 19 nt, Artificial Sequence
  Description of Artificial Sequence: Synthetic oligonucleotide
  Sense strand starting at position 2318 of SEQ ID NO: 1888144
gaucaaugauuagcaggua

SEQ ID NO: 2514091 - RNA, 19 nt, Artificial Sequence
  Description of Artificial Sequence: Synthetic oligonucleotide
  Antisense strand to SEQ ID NO: 2514090
uaccugcuaaucauugauc

SEQ ID NO: 2514092 - RNA, 19 nt, Artificial Sequence
  Description of Artificial Sequence: Synthetic oligonucleotide
  Sense strand starting at position 2321 of SEQ ID NO: 1888144
caaugauuagcagguaacu

SEQ ID NO: 2514093 - RNA, 19 nt, Artificial Sequence
  Description of Artificial Sequence: Synthetic oligonucleotide
  Antisense strand to SEQ ID NO: 2514092
aguuaccugcuaaucauug

SEQ ID NO: 2514094 - RNA, 19 nt, Artificial Sequence
  Description of Artificial Sequence: Synthetic oligonucleotide
  Sense strand starting at position 2494 of SEQ ID NO: 1888144
cagugaauugcauauagua

SEQ ID NO: 2514095 - RNA, 19 nt, Artificial Sequence
  Description of Artificial Sequence: Synthetic oligonucleotide
  Antisense strand to SEQ ID NO: 2514094
uacuauaugcaauucacug

SEQ ID NO: 2514096 - RNA, 19 nt, Artificial Sequence
  Description of Artificial Sequence: Synthetic oligonucleotide
  Sense strand starting at position 2506 of SEQ ID NO: 1888144
uauaguaggcacuggauua

SEQ ID NO: 2514097 - RNA, 19 nt, Artificial Sequence
  Description of Artificial Sequence: Synthetic oligonucleotide
  Antisense strand to SEQ ID NO: 2514096
uaauccagugccuacuaua

SEQ ID NO: 2514098 - RNA, 19 nt, Artificial Sequence
  Description of Artificial Sequence: Synthetic oligonucleotide
  Sense strand starting at position 2507 of SEQ ID NO: 1888144
auaguaggcacuggauuau

SEQ ID NO: 2514099 - RNA, 19 nt, Artificial Sequence
  Description of Artificial Sequence: Synthetic oligonucleotide
  Antisense strand to SEQ ID NO: 2514098
auaauccagugccuacuau

SEQ ID NO: 2514100 - RNA, 19 nt, Artificial Sequence
  Description of Artificial Sequence: Synthetic oligonucleotide
  Sense strand starting at position 2527 of SEQ ID NO: 1888144
uguuaaaguguugaauuag

SEQ ID NO: 2514101 - RNA, 19 nt, Artificial Sequence
  Description of Artificial Sequence: Synthetic oligonucleotide
  Antisense strand to SEQ ID NO: 2514100
cuaauucaacacuuuaaca

SEQ ID NO: 2514102 - RNA, 19 nt, Artificial Sequence
  Description of Artificial Sequence: Synthetic oligonucleotide
  Sense strand starting at position 2867 of SEQ ID NO: 1888144
augugaauacacuauaugu

SEQ ID NO: 2514103 - RNA, 19 nt, Artificial Sequence
  Description of Artificial Sequence: Synthetic oligonucleotide
  Antisense strand to SEQ ID NO: 2514102
acauauaguguauucacau

SEQ ID NO: 2514104 - RNA, 19 nt, Artificial Sequence
  Description of Artificial Sequence: Synthetic oligonucleotide
  Sense strand starting at position 2869 of SEQ ID NO: 1888144
gugaauacacuauauguau

SEQ ID NO: 2514105 - RNA, 19 nt, Artificial Sequence
  Description of Artificial Sequence: Synthetic oligonucleotide
  Antisense strand to SEQ ID NO: 2514104
auacauauaguguauucac

SEQ ID NO: 2514106 - RNA, 19 nt, Artificial Sequence
  Description of Artificial Sequence: Synthetic oligonucleotide
  Sense strand starting at position 2894 of SEQ ID NO: 1888144
augugcaucuaucuauaua

SEQ ID NO: 2514107 - RNA, 19 nt, Artificial Sequence
  Description of Artificial Sequence: Synthetic oligonucleotide
  Antisense strand to SEQ ID NO: 2514106
uauauagauagaugcacau

SEQ ID NO: 2514108 - RNA, 19 nt, Artificial Sequence
  Description of Artificial Sequence: Synthetic oligonucleotide
  Sense strand starting at position 3084 of SEQ ID NO: 1888144
uagguauuauuccugaggu

SEQ ID NO: 2514109 - RNA, 19 nt, Artificial Sequence
  Description of Artificial Sequence: Synthetic oligonucleotide
  Antisense strand to SEQ ID NO: 2514108
accucaggaauaauaccua

SEQ ID NO: 2514110 - RNA, 19 nt, Artificial Sequence
  Description of Artificial Sequence: Synthetic oligonucleotide
  Sense strand starting at position 3086 of SEQ ID NO: 1888144
gguauuauuccugaggucu

SEQ ID NO: 2514111 - RNA, 19 nt, Artificial Sequence
  Description of Artificial Sequence: Synthetic oligonucleotide
  Antisense strand to SEQ ID NO: 2514110
agaccucaggaauaauacc

SEQ ID NO: 2514112 - RNA, 19 nt, Artificial Sequence
  Description of Artificial Sequence: Synthetic oligonucleotide
  Sense strand starting at position 3116 of SEQ ID NO: 1888144
cugagaaauguguagcaga

SEQ ID NO: 2514113 - RNA, 19 nt, Artificial Sequence
  Description of Artificial Sequence: Synthetic oligonucleotide
  Antisense strand to SEQ ID NO: 2514112
ucugcuacacauuucucag

SEQ ID NO: 2514114 - RNA, 19 nt, Artificial Sequence
  Description of Artificial Sequence: Synthetic oligonucleotide
  Sense strand starting at position 3121 of SEQ ID NO: 1888144
aaauguguagcagagaauc

SEQ ID NO: 2514115 - RNA, 19 nt, Artificial Sequence
  Description of Artificial Sequence: Synthetic oligonucleotide
  Antisense strand to SEQ ID NO: 2514114
gauucucugcuacacauuu

SEQ ID NO: 2514116 - RNA, 19 nt, Artificial Sequence
  Description of Artificial Sequence: Synthetic oligonucleotide
  Sense strand starting at position 3123 of SEQ ID NO: 1888144
auguguagcagagaaucaa

SEQ ID NO: 2514117 - RNA, 19 nt, Artificial Sequence
  Description of Artificial Sequence: Synthetic oligonucleotide
  Antisense strand to SEQ ID NO: 2514116
uugauucucugcuacacau

SEQ ID NO: 2514118 - RNA, 19 nt, Artificial Sequence
  Description of Artificial Sequence: Synthetic oligonucleotide
  Sense strand starting at position 3188 of SEQ ID NO: 1888144
ugcaaagauuuccagaagu

SEQ ID NO: 2514119 - RNA, 19 nt, Artificial Sequence
  Description of Artificial Sequence: Synthetic oligonucleotide
  Antisense strand to SEQ ID NO: 2514118
acuucuggaaaucuuugca

SEQ ID NO: 2514120 - RNA, 19 nt, Artificial Sequence
  Description of Artificial Sequence: Synthetic oligonucleotide
  Sense strand starting at position 3264 of SEQ ID NO: 1888144
gagagaaauuaccuggugu

SEQ ID NO: 2514121 - RNA, 19 nt, Artificial Sequence
  Description of Artificial Sequence: Synthetic oligonucleotide
  Antisense strand to SEQ ID NO: 2514120
acaccagguaauuucucuc

SEQ ID NO: 2514122 - RNA, 19 nt, Artificial Sequence
  Description of Artificial Sequence: Synthetic oligonucleotide
  Sense strand starting at position 3265 of SEQ ID NO: 1888144
agagaaauuaccuggugua

SEQ ID NO: 2514123 - RNA, 19 nt, Artificial Sequence
  Description of Artificial Sequence: Synthetic oligonucleotide
  Antisense strand to SEQ ID NO: 2514122
uacaccagguaauuucucu

SEQ ID NO: 2514124 - RNA, 19 nt, Artificial Sequence
  Description of Artificial Sequence: Synthetic oligonucleotide
  Sense strand starting at position 3266 of SEQ ID NO: 1888144
gagaaauuaccugguguag

SEQ ID NO: 2514125 - RNA, 19 nt, Artificial Sequence
  Description of Artificial Sequence: Synthetic oligonucleotide
  Antisense strand to SEQ ID NO: 2514124
cuacaccagguaauuucuc

SEQ ID NO: 2514126 - RNA, 19 nt, Artificial Sequence
  Description of Artificial Sequence: Synthetic oligonucleotide
  Sense strand starting at position 3368 of SEQ ID NO: 1888144
cugguaaacuuccugcaga

SEQ ID NO: 2514127 - RNA, 19 nt, Artificial Sequence
  Description of Artificial Sequence: Synthetic oligonucleotide
  Antisense strand to SEQ ID NO: 2514126
ucugcaggaaguuuaccag

SEQ ID NO: 2514128 - RNA, 19 nt, Artificial Sequence
  Description of Artificial Sequence: Synthetic oligonucleotide
  Sense strand starting at position 3462 of SEQ ID NO: 1888144
ggcccuugucaagaaauac

SEQ ID NO: 2514129 - RNA, 19 nt, Artificial Sequence
  Description of Artificial Sequence: Synthetic oligonucleotide
  Antisense strand to SEQ ID NO: 2514128
guauuucuugacaagggcc

SEQ ID NO: 2514130 - RNA, 19 nt, Artificial Sequence
  Description of Artificial Sequence: Synthetic oligonucleotide
  Sense strand starting at position 3578 of SEQ ID NO: 1888144
gcucaauauuaagcucuga

SEQ ID NO: 2514131 - RNA, 19 nt, Artificial Sequence
  Description of Artificial Sequence: Synthetic oligonucleotide
  Antisense strand to SEQ ID NO: 2514130
ucagagcuuaauauugagc

SEQ ID NO: 2514132 - RNA, 19 nt, Artificial Sequence
  Description of Artificial Sequence: Synthetic oligonucleotide
  Sense strand starting at position 3593 of SEQ ID NO: 1888144
cugauugcucccuagcaga

SEQ ID NO: 2514133 - RNA, 19 nt, Artificial Sequence
  Description of Artificial Sequence: Synthetic oligonucleotide
  Antisense strand to SEQ ID NO: 2514132
ucugcuagggagcaaucag

SEQ ID NO: 2514134 - RNA, 19 nt, Artificial Sequence
  Description of Artificial Sequence: Synthetic oligonucleotide
  Sense strand starting at position 3733 of SEQ ID NO: 1888144
augguucugcgggaacaaa

SEQ ID NO: 2514135 - RNA, 19 nt, Artificial Sequence
  Description of Artificial Sequence: Synthetic oligonucleotide
  Antisense strand to SEQ ID NO: 2514134
uuuguucccgcagaaccau

SEQ ID NO: 2514136 - RNA, 19 nt, Artificial Sequence
  Description of Artificial Sequence: Synthetic oligonucleotide
  Sense strand starting at position 288 of SEQ ID NO: 1888145
auagaacacuggcauuuaa

SEQ ID NO: 2514137 - RNA, 19 nt, Artificial Sequence
  Description of Artificial Sequence: Synthetic oligonucleotide
  Antisense strand to SEQ ID NO: 2514136
uuaaaugccaguguucuau

SEQ ID NO: 2514138 - RNA, 19 nt, Artificial Sequence
  Description of Artificial Sequence: Synthetic oligonucleotide
  Sense strand starting at position 338 of SEQ ID NO: 1888145
ccacaucucugggccagau

SEQ ID NO: 2514139 - RNA, 19 nt, Artificial Sequence
  Description of Artificial Sequence: Synthetic oligonucleotide
  Antisense strand to SEQ ID NO: 2514138
aucuggcccagagaugugg

SEQ ID NO: 2514140 - RNA, 19 nt, Artificial Sequence
  Description of Artificial Sequence: Synthetic oligonucleotide
  Sense strand starting at position 419 of SEQ ID NO: 1888145
uuccacgggcucuguuaaa

SEQ ID NO: 2514141 - RNA, 19 nt, Artificial Sequence
  Description of Artificial Sequence: Synthetic oligonucleotide
  Antisense strand to SEQ ID NO: 2514140
uuuaacagagcccguggaa

SEQ ID NO: 2514142 - RNA, 19 nt, Artificial Sequence
  Description of Artificial Sequence: Synthetic oligonucleotide
  Sense strand starting at position 487 of SEQ ID NO: 1888145
uuuguucuuucugccagaa

SEQ ID NO: 2514143 - RNA, 19 nt, Artificial Sequence
  Description of Artificial Sequence: Synthetic oligonucleotide
  Antisense strand to SEQ ID NO: 2514142
uucuggcagaaagaacaaa

SEQ ID NO: 2514144 - RNA, 19 nt, Artificial Sequence
  Description of Artificial Sequence: Synthetic oligonucleotide
  Sense strand starting at position 520 of SEQ ID NO: 1888145
uccacuggucucugggauu

SEQ ID NO: 2514145 - RNA, 19 nt, Artificial Sequence
  Description of Artificial Sequence: Synthetic oligonucleotide
  Antisense strand to SEQ ID NO: 2514144
aaucccagagaccagugga

SEQ ID NO: 2514146 - RNA, 19 nt, Artificial Sequence
  Description of Artificial Sequence: Synthetic oligonucleotide
  Sense strand starting at position 526 of SEQ ID NO: 1888145
ggucucugggauuauugau

SEQ ID NO: 2514147 - RNA, 19 nt, Artificial Sequence
  Description of Artificial Sequence: Synthetic oligonucleotide
  Antisense strand to SEQ ID NO: 2514146
aucaauaaucccagagacc

SEQ ID NO: 2514148 - RNA, 19 nt, Artificial Sequence
  Description of Artificial Sequence: Synthetic oligonucleotide
  Sense strand starting at position 776 of SEQ ID NO: 1888145
aagaauguguuucucguga

SEQ ID NO: 2514149 - RNA, 19 nt, Artificial Sequence
  Description of Artificial Sequence: Synthetic oligonucleotide
  Antisense strand to SEQ ID NO: 2514148
ucacgagaaacacauucuu

SEQ ID NO: 2514150 - RNA, 19 nt, Artificial Sequence
  Description of Artificial Sequence: Synthetic oligonucleotide
  Sense strand starting at position 782 of SEQ ID NO: 1888145
guguuucucgugagagggu

SEQ ID NO: 2514151 - RNA, 19 nt, Artificial Sequence
  Description of Artificial Sequence: Synthetic oligonucleotide
  Antisense strand to SEQ ID NO: 2514150
acccucucacgagaaacac

SEQ ID NO: 2514152 - RNA, 19 nt, Artificial Sequence
  Description of Artificial Sequence: Synthetic oligonucleotide
  Sense strand starting at position 820 of SEQ ID NO: 1888145
gcaggucuucagggagaaa

SEQ ID NO: 2514153 - RNA, 19 nt, Artificial Sequence
  Description of Artificial Sequence: Synthetic oligonucleotide
  Antisense strand to SEQ ID NO: 2514152
uuucucccugaagaccugc

SEQ ID NO: 2514154 - RNA, 19 nt, Artificial Sequence
  Description of Artificial Sequence: Synthetic oligonucleotide
  Sense strand starting at position 1037 of SEQ ID NO: 1888145
gggauaguccuuggagggu

SEQ ID NO: 2514155 - RNA, 19 nt, Artificial Sequence
  Description of Artificial Sequence: Synthetic oligonucleotide
  Antisense strand to SEQ ID NO: 2514154
acccuccaaggacuauccc

SEQ ID NO: 2514156 - RNA, 19 nt, Artificial Sequence
  Description of Artificial Sequence: Synthetic oligonucleotide
  Sense strand starting at position 1276 of SEQ ID NO: 1888145
gguaaucacuucuugccuu

SEQ ID NO: 2514157 - RNA, 19 nt, Artificial Sequence
  Description of Artificial Sequence: Synthetic oligonucleotide
  Antisense strand to SEQ ID NO: 2514156
aaggcaagaagugauuacc

SEQ ID NO: 2514158 - RNA, 19 nt, Artificial Sequence
  Description of Artificial Sequence: Synthetic oligonucleotide
  Sense strand starting at position 2005 of SEQ ID NO: 1888145
cuuucuuuccuguagccau

SEQ ID NO: 2514159 - RNA, 19 nt, Artificial Sequence
  Description of Artificial Sequence: Synthetic oligonucleotide
  Antisense strand to SEQ ID NO: 2514158
auggcuacaggaaagaaag

SEQ ID NO: 2514160 - RNA, 19 nt, Artificial Sequence
  Description of Artificial Sequence: Synthetic oligonucleotide
  Sense strand starting at position 2038 of SEQ ID NO: 1888145
gcaccuggcuucguaaaca

SEQ ID NO: 2514161 - RNA, 19 nt, Artificial Sequence
  Description of Artificial Sequence: Synthetic oligonucleotide
  Antisense strand to SEQ ID NO: 2514160
uguuuacgaagccaggugc

SEQ ID NO: 2514162 - RNA, 19 nt, Artificial Sequence
  Description of Artificial Sequence: Synthetic oligonucleotide
  Sense strand starting at position 2046 of SEQ ID NO: 1888145
cuucguaaacacuguuauc

SEQ ID NO: 2514163 - RNA, 19 nt, Artificial Sequence
  Description of Artificial Sequence: Synthetic oligonucleotide
  Antisense strand to SEQ ID NO: 2514162
gauaacaguguuuacgaag

SEQ ID NO: 2514164 - RNA, 19 nt, Artificial Sequence
  Description of Artificial Sequence: Synthetic oligonucleotide
  Sense strand starting at position 2070 of SEQ ID NO: 1888145
gcucaucugugcccaugaa

SEQ ID NO: 2514165 - RNA, 19 nt, Artificial Sequence
  Description of Artificial Sequence: Synthetic oligonucleotide
  Antisense strand to SEQ ID NO: 2514164
uucaugggcacagaugagc

SEQ ID NO: 2514166 - RNA, 19 nt, Artificial Sequence
  Description of Artificial Sequence: Synthetic oligonucleotide
  Sense strand starting at position 2074 of SEQ ID NO: 1888145
aucugugcccaugaagaau

SEQ ID NO: 2514167 - RNA, 19 nt, Artificial Sequence
  Description of Artificial Sequence: Synthetic oligonucleotide
  Antisense strand to SEQ ID NO: 2514166
auucuucaugggcacagau

SEQ ID NO: 2514168 - RNA, 19 nt, Artificial Sequence
  Description of Artificial Sequence: Synthetic oligonucleotide
  Sense strand starting at position 2189 of SEQ ID NO: 1888145
ggucagugucgugcaaguu

SEQ ID NO: 2514169 - RNA, 19 nt, Artificial Sequence
  Description of Artificial Sequence: Synthetic oligonucleotide
  Antisense strand to SEQ ID NO: 2514168
aacuugcacgacacugacc

SEQ ID NO: 2514170 - RNA, 19 nt, Artificial Sequence
  Description of Artificial Sequence: Synthetic oligonucleotide
  Sense strand starting at position 2207 of SEQ ID NO: 1888145
ugcgaucucucacuaacaa

SEQ ID NO: 2514171 - RNA, 19 nt, Artificial Sequence
  Description of Artificial Sequence: Synthetic oligonucleotide
  Antisense strand to SEQ ID NO: 2514170
uuguuagugagagaucgca

SEQ ID NO: 2514172 - RNA, 19 nt, Artificial Sequence
  Description of Artificial Sequence: Synthetic oligonucleotide
  Sense strand starting at position 2208 of SEQ ID NO: 1888145
gcgaucucucacuaacaaa

SEQ ID NO: 2514173 - RNA, 19 nt, Artificial Sequence
  Description of Artificial Sequence: Synthetic oligonucleotide
  Antisense strand to SEQ ID NO: 2514172
uuuguuagugagagaucgc

SEQ ID NO: 2514174 - RNA, 19 nt, Artificial Sequence
  Description of Artificial Sequence: Synthetic oligonucleotide
  Sense strand starting at position 2230 of SEQ ID NO: 1888145
gauauuugaucugguuaaa

SEQ ID NO: 2514175 - RNA, 19 nt, Artificial Sequence
  Description of Artificial Sequence: Synthetic oligonucleotide
  Antisense strand to SEQ ID NO: 2514174
uuuaaccagaucaaauauc

SEQ ID NO: 2514176 - RNA, 19 nt, Artificial Sequence
  Description of Artificial Sequence: Synthetic oligonucleotide
  Sense strand starting at position 2289 of SEQ ID NO: 1888145
gaguuaagacuauggguua

SEQ ID NO: 2514177 - RNA, 19 nt, Artificial Sequence
  Description of Artificial Sequence: Synthetic oligonucleotide
  Antisense strand to SEQ ID NO: 2514176
uaacccauagucuuaacuc

SEQ ID NO: 2514178 - RNA, 19 nt, Artificial Sequence
  Description of Artificial Sequence: Synthetic oligonucleotide
  Sense strand starting at position 2307 of SEQ ID NO: 1888145
aggugcuuuaacgaggauu

SEQ ID NO: 2514179 - RNA, 19 nt, Artificial Sequence
  Description of Artificial Sequence: Synthetic oligonucleotide
  Antisense strand to SEQ ID NO: 2514178
aauccucguuaaagcaccu

SEQ ID NO: 2514180 - RNA, 19 nt, Artificial Sequence
  Description of Artificial Sequence: Synthetic oligonucleotide
  Sense strand starting at position 2309 of SEQ ID NO: 1888145
gugcuuuaacgaggauuca

SEQ ID NO: 2514181 - RNA, 19 nt, Artificial Sequence
  Description of Artificial Sequence: Synthetic oligonucleotide
  Antisense strand to SEQ ID NO: 2514180
ugaauccucguuaaagcac

SEQ ID NO: 2514182 - RNA, 19 nt, Artificial Sequence
  Description of Artificial Sequence: Synthetic oligonucleotide
  Sense strand starting at position 2777 of SEQ ID NO: 1888145
cacagcaggcagugauaaa

SEQ ID NO: 2514183 - RNA, 19 nt, Artificial Sequence
  Description of Artificial Sequence: Synthetic oligonucleotide
  Antisense strand to SEQ ID NO: 2514182
uuuaucacugccugcugug

SEQ ID NO: 2514184 - RNA, 19 nt, Artificial Sequence
  Description of Artificial Sequence: Synthetic oligonucleotide
  Sense strand starting at position 3062 of SEQ ID NO: 1888145
aguucuguugccgaagcaa

SEQ ID NO: 2514185 - RNA, 19 nt, Artificial Sequence
  Description of Artificial Sequence: Synthetic oligonucleotide
  Antisense strand to SEQ ID NO: 2514184
uugcuucggcaacagaacu

SEQ ID NO: 2514186 - RNA, 19 nt, Artificial Sequence
  Description of Artificial Sequence: Synthetic oligonucleotide
  Sense strand starting at position 3092 of SEQ ID NO: 1888145
cacaguguugugugcauaa

SEQ ID NO: 2514187 - RNA, 19 nt, Artificial Sequence
  Description of Artificial Sequence: Synthetic oligonucleotide
  Antisense strand to SEQ ID NO: 2514186
uuaugcacacaacacugug

SEQ ID NO: 2514188 - RNA, 19 nt, Artificial Sequence
  Description of Artificial Sequence: Synthetic oligonucleotide
  Sense strand starting at position 3105 of SEQ ID NO: 1888145
gcauaagcaccugaugagu

SEQ ID NO: 2514189 - RNA, 19 nt, Artificial Sequence
  Description of Artificial Sequence: Synthetic oligonucleotide
  Antisense strand to SEQ ID NO: 2514188
acucaucaggugcuuaugc

SEQ ID NO: 2514190 - RNA, 19 nt, Artificial Sequence
  Description of Artificial Sequence: Synthetic oligonucleotide
  Sense strand starting at position 3138 of SEQ ID NO: 1888145
cgaaguucaugaccugaga

SEQ ID NO: 2514191 - RNA, 19 nt, Artificial Sequence
  Description of Artificial Sequence: Synthetic oligonucleotide
  Antisense strand to SEQ ID NO: 2514190
ucucaggucaugaacuucg

SEQ ID NO: 2514192 - RNA, 19 nt, Artificial Sequence
  Description of Artificial Sequence: Synthetic oligonucleotide
  Sense strand starting at position 3159 of SEQ ID NO: 1888145
caggaauugcccuggugag

SEQ ID NO: 2514193 - RNA, 19 nt, Artificial Sequence
  Description of Artificial Sequence: Synthetic oligonucleotide
  Antisense strand to SEQ ID NO: 2514192
cucaccagggcaauuccug

SEQ ID NO: 2514194 - RNA, 19 nt, Artificial Sequence
  Description of Artificial Sequence: Synthetic oligonucleotide
  Sense strand starting at position 3214 of SEQ ID NO: 1888145
gggcauuugucuccagggu

SEQ ID NO: 2514195 - RNA, 19 nt, Artificial Sequence
  Description of Artificial Sequence: Synthetic oligonucleotide
  Antisense strand to SEQ ID NO: 2514194
acccuggagacaaaugccc

SEQ ID NO: 2514196 - RNA, 19 nt, Artificial Sequence
  Description of Artificial Sequence: Synthetic oligonucleotide
  Sense strand starting at position 3294 of SEQ ID NO: 1888145
ggaugugacuuccucagcu

SEQ ID NO: 2514197 - RNA, 19 nt, Artificial Sequence
  Description of Artificial Sequence: Synthetic oligonucleotide
  Antisense strand to SEQ ID NO: 2514196
agcugaggaagucacaucc

SEQ ID NO: 2514198 - RNA, 19 nt, Artificial Sequence
  Description of Artificial Sequence: Synthetic oligonucleotide
  Sense strand starting at position 3347 of SEQ ID NO: 1888145
uagccagcuucuucugagu

SEQ ID NO: 2514199 - RNA, 19 nt, Artificial Sequence
  Description of Artificial Sequence: Synthetic oligonucleotide
  Antisense strand to SEQ ID NO: 2514198
acucagaagaagcuggcua

SEQ ID NO: 2514200 - RNA, 19 nt, Artificial Sequence
  Description of Artificial Sequence: Synthetic oligonucleotide
  Sense strand starting at position 3557 of SEQ ID NO: 1888145
ucacauggcucaccagauu

SEQ ID NO: 2514201 - RNA, 19 nt, Artificial Sequence
  Description of Artificial Sequence: Synthetic oligonucleotide
  Antisense strand to SEQ ID NO: 2514200
aaucuggugagccauguga

SEQ ID NO: 2514202 - RNA, 19 nt, Artificial Sequence
  Description of Artificial Sequence: Synthetic oligonucleotide
  Sense strand starting at position 3670 of SEQ ID NO: 1888145
gcuuauuuccugugcagca

SEQ ID NO: 2514203 - RNA, 19 nt, Artificial Sequence
  Description of Artificial Sequence: Synthetic oligonucleotide
  Antisense strand to SEQ ID NO: 2514202
ugcugcacaggaaauaagc

SEQ ID NO: 2514204 - RNA, 19 nt, Artificial Sequence
  Description of Artificial Sequence: Synthetic oligonucleotide
  Sense strand starting at position 3671 of SEQ ID NO: 1888145
cuuauuuccugugcagcaa

SEQ ID NO: 2514205 - RNA, 19 nt, Artificial Sequence
  Description of Artificial Sequence: Synthetic oligonucleotide
  Antisense strand to SEQ ID NO: 2514204
uugcugcacaggaaauaag

SEQ ID NO: 2514206 - RNA, 19 nt, Artificial Sequence
  Description of Artificial Sequence: Synthetic oligonucleotide
  Sense strand starting at position 3756 of SEQ ID NO: 1888145
ugucaaauccgauguccca

SEQ ID NO: 2514207 - RNA, 19 nt, Artificial Sequence
  Description of Artificial Sequence: Synthetic oligonucleotide
  Antisense strand to SEQ ID NO: 2514206
ugggacaucggauuugaca

SEQ ID NO: 2514208 - RNA, 19 nt, Artificial Sequence
  Description of Artificial Sequence: Synthetic oligonucleotide
  Sense strand starting at position 3774 of SEQ ID NO: 1888145
aagacaaggcuuugagagu

SEQ ID NO: 2514209 - RNA, 19 nt, Artificial Sequence
  Description of Artificial Sequence: Synthetic oligonucleotide
  Antisense strand to SEQ ID NO: 2514208
acucucaaagccuugucuu

SEQ ID NO: 2514210 - RNA, 19 nt, Artificial Sequence
  Description of Artificial Sequence: Synthetic oligonucleotide
  Sense strand starting at position 3829 of SEQ ID NO: 1888145
agaggacaucuguaguguu

SEQ ID NO: 2514211 - RNA, 19 nt, Artificial Sequence
  Description of Artificial Sequence: Synthetic oligonucleotide
  Antisense strand to SEQ ID NO: 2514210
aacacuacagauguccucu

SEQ ID NO: 2514212 - RNA, 19 nt, Artificial Sequence
  Description of Artificial Sequence: Synthetic oligonucleotide
  Sense strand starting at position 3836 of SEQ ID NO: 1888145
aucuguaguguuugcaaau

SEQ ID NO: 2514213 - RNA, 19 nt, Artificial Sequence
  Description of Artificial Sequence: Synthetic oligonucleotide
  Antisense strand to SEQ ID NO: 2514212
auuugcaaacacuacagau

SEQ ID NO: 2514214 - RNA, 19 nt, Artificial Sequence
  Description of Artificial Sequence: Synthetic oligonucleotide
  Sense strand starting at position 3837 of SEQ ID NO: 1888145
ucuguaguguuugcaaauu

SEQ ID NO: 2514215 - RNA, 19 nt, Artificial Sequence
  Description of Artificial Sequence: Synthetic oligonucleotide
  Antisense strand to SEQ ID NO: 2514214
aauuugcaaacacuacaga

SEQ ID NO: 2514216 - RNA, 19 nt, Artificial Sequence
  Description of Artificial Sequence: Synthetic oligonucleotide
  Sense strand starting at position 130 of SEQ ID NO: 1888146
ucuucuagugguuaagagu

SEQ ID NO: 2514217 - RNA, 19 nt, Artificial Sequence
  Description of Artificial Sequence: Synthetic oligonucleotide
  Antisense strand to SEQ ID NO: 2514216
acucuuaaccacuagaaga

SEQ ID NO: 2514218 - RNA, 19 nt, Artificial Sequence
  Description of Artificial Sequence: Synthetic oligonucleotide
  Sense strand starting at position 168 of SEQ ID NO: 1888146
caugaaggcuguuuguaca

SEQ ID NO: 2514219 - RNA, 19 nt, Artificial Sequence
  Description of Artificial Sequence: Synthetic oligonucleotide
  Antisense strand to SEQ ID NO: 2514218
uguacaaacagccuucaug

SEQ ID NO: 2514220 - RNA, 19 nt, Artificial Sequence
  Description of Artificial Sequence: Synthetic oligonucleotide
  Sense strand starting at position 201 of SEQ ID NO: 1888146
agagcaaacucugccaaga

SEQ ID NO: 2514221 - RNA, 19 nt, Artificial Sequence
  Description of Artificial Sequence: Synthetic oligonucleotide
  Antisense strand to SEQ ID NO: 2514220
ucuuggcagaguuugcucu

SEQ ID NO: 2514222 - RNA, 19 nt, Artificial Sequence
  Description of Artificial Sequence: Synthetic oligonucleotide
  Sense strand starting at position 259 of SEQ ID NO: 1888146
cugcaaccucucugcaaga

SEQ ID NO: 2514223 - RNA, 19 nt, Artificial Sequence
  Description of Artificial Sequence: Synthetic oligonucleotide
  Antisense strand to SEQ ID NO: 2514222
ucuugcagagagguugcag

SEQ ID NO: 2514224 - RNA, 19 nt, Artificial Sequence
  Description of Artificial Sequence: Synthetic oligonucleotide
  Sense strand starting at position 260 of SEQ ID NO: 1888146
ugcaaccucucugcaagaa

SEQ ID NO: 2514225 - RNA, 19 nt, Artificial Sequence
  Description of Artificial Sequence: Synthetic oligonucleotide
  Antisense strand to SEQ ID NO: 2514224
uucuugcagagagguugca

SEQ ID NO: 2514226 - RNA, 19 nt, Artificial Sequence
  Description of Artificial Sequence: Synthetic oligonucleotide
  Sense strand starting at position 261 of SEQ ID NO: 1888146
gcaaccucucugcaagaau

SEQ ID NO: 2514227 - RNA, 19 nt, Artificial Sequence
  Description of Artificial Sequence: Synthetic oligonucleotide
  Antisense strand to SEQ ID NO: 2514226
auucuugcagagagguugc

SEQ ID NO: 2514228 - RNA, 19 nt, Artificial Sequence
  Description of Artificial Sequence: Synthetic oligonucleotide
  Sense strand starting at position 333 of SEQ ID NO: 1888146
auaucuuccucagugucaa

SEQ ID NO: 2514229 - RNA, 19 nt, Artificial Sequence
  Description of Artificial Sequence: Synthetic oligonucleotide
  Antisense strand to SEQ ID NO: 2514228
uugacacugaggaagauau

SEQ ID NO: 2514230 - RNA, 19 nt, Artificial Sequence
  Description of Artificial Sequence: Synthetic oligonucleotide
  Sense strand starting at position 359 of SEQ ID NO: 1888146
acaaccuuucugugaagcu

SEQ ID NO: 2514231 - RNA, 19 nt, Artificial Sequence
  Description of Artificial Sequence: Synthetic oligonucleotide
  Antisense strand to SEQ ID NO: 2514230
agcuucacagaaagguugu

SEQ ID NO: 2514232 - RNA, 19 nt, Artificial Sequence
  Description of Artificial Sequence: Synthetic oligonucleotide
  Sense strand starting at position 368 of SEQ ID NO: 1888146
cugugaagcuuuguuagau

SEQ ID NO: 2514233 - RNA, 19 nt, Artificial Sequence
  Description of Artificial Sequence: Synthetic oligonucleotide
  Antisense strand to SEQ ID NO: 2514232
aucuaacaaagcuucacag

SEQ ID NO: 2514234 - RNA, 19 nt, Artificial Sequence
  Description of Artificial Sequence: Synthetic oligonucleotide
  Sense strand starting at position 369 of SEQ ID NO: 1888146
ugugaagcuuuguuagauc

SEQ ID NO: 2514235 - RNA, 19 nt, Artificial Sequence
  Description of Artificial Sequence: Synthetic oligonucleotide
  Antisense strand to SEQ ID NO: 2514234
gaucuaacaaagcuucaca

SEQ ID NO: 2514236 - RNA, 19 nt, Artificial Sequence
  Description of Artificial Sequence: Synthetic oligonucleotide
  Sense strand starting at position 384 of SEQ ID NO: 1888146
gaucuaauaggaugcaugu

SEQ ID NO: 2514237 - RNA, 19 nt, Artificial Sequence
  Description of Artificial Sequence: Synthetic oligonucleotide
  Antisense strand to SEQ ID NO: 2514236
acaugcauccuauuagauc

SEQ ID NO: 2514238 - RNA, 19 nt, Artificial Sequence
  Description of Artificial Sequence: Synthetic oligonucleotide
  Sense strand starting at position 395 of SEQ ID NO: 1888146
augcaugucucaucgacaa

SEQ ID NO: 2514239 - RNA, 19 nt, Artificial Sequence
  Description of Artificial Sequence: Synthetic oligonucleotide
  Antisense strand to SEQ ID NO: 2514238
uugucgaugagacaugcau

SEQ ID NO: 2514240 - RNA, 19 nt, Artificial Sequence
  Description of Artificial Sequence: Synthetic oligonucleotide
  Sense strand starting at position 397 of SEQ ID NO: 1888146
gcaugucucaucgacaaag

SEQ ID NO: 2514241 - RNA, 19 nt, Artificial Sequence
  Description of Artificial Sequence: Synthetic oligonucleotide
  Antisense strand to SEQ ID NO: 2514240
cuuugucgaugagacaugc

SEQ ID NO: 2514242 - RNA, 19 nt, Artificial Sequence
  Description of Artificial Sequence: Synthetic oligonucleotide
  Sense strand starting at position 445 of SEQ ID NO: 1888146
aucacaguccuauggacuu

SEQ ID NO: 2514243 - RNA, 19 nt, Artificial Sequence
  Description of Artificial Sequence: Synthetic oligonucleotide
  Antisense strand to SEQ ID NO: 2514242
aaguccauaggacugugau

SEQ ID NO: 2514244 - RNA, 19 nt, Artificial Sequence
  Description of Artificial Sequence: Synthetic oligonucleotide
  Sense strand starting at position 503 of SEQ ID NO: 1888146
gccaaaguucuggguagag

SEQ ID NO: 2514245 - RNA, 19 nt, Artificial Sequence
  Description of Artificial Sequence: Synthetic oligonucleotide
  Antisense strand to SEQ ID NO: 2514244
cucuacccagaacuuuggc

SEQ ID NO: 2514246 - RNA, 19 nt, Artificial Sequence
  Description of Artificial Sequence: Synthetic oligonucleotide
  Sense strand starting at position 616 of SEQ ID NO: 1888146
agggaagauguaggccaua

SEQ ID NO: 2514247 - RNA, 19 nt, Artificial Sequence
  Description of Artificial Sequence: Synthetic oligonucleotide
  Antisense strand to SEQ ID NO: 2514246
uauggccuacaucuucccu

SEQ ID NO: 2514248 - RNA, 19 nt, Artificial Sequence
  Description of Artificial Sequence: Synthetic oligonucleotide
  Sense strand starting at position 685 of SEQ ID NO: 1888146
agaggguguccuugggaga

SEQ ID NO: 2514249 - RNA, 19 nt, Artificial Sequence
  Description of Artificial Sequence: Synthetic oligonucleotide
  Antisense strand to SEQ ID NO: 2514248
ucucccaaggacacccucu

SEQ ID NO: 2514250 - RNA, 19 nt, Artificial Sequence
  Description of Artificial Sequence: Synthetic oligonucleotide
  Sense strand starting at position 744 of SEQ ID NO: 1888146
ggagcugaagccuaauuga

SEQ ID NO: 2514251 - RNA, 19 nt, Artificial Sequence
  Description of Artificial Sequence: Synthetic oligonucleotide
  Antisense strand to SEQ ID NO: 2514250
ucaauuaggcuucagcucc

SEQ ID NO: 2514252 - RNA, 19 nt, Artificial Sequence
  Description of Artificial Sequence: Synthetic oligonucleotide
  Sense strand starting at position 747 of SEQ ID NO: 1888146
gcugaagccuaauugacau

SEQ ID NO: 2514253 - RNA, 19 nt, Artificial Sequence
  Description of Artificial Sequence: Synthetic oligonucleotide
  Antisense strand to SEQ ID NO: 2514252
augucaauuaggcuucagc

SEQ ID NO: 2514254 - RNA, 19 nt, Artificial Sequence
  Description of Artificial Sequence: Synthetic oligonucleotide
  Sense strand starting at position 1398 of SEQ ID NO: 1888146
gcggcgaggcuuggauuua

SEQ ID NO: 2514255 - RNA, 19 nt, Artificial Sequence
  Description of Artificial Sequence: Synthetic oligonucleotide
  Antisense strand to SEQ ID NO: 2514254
uaaauccaagccucgccgc

SEQ ID NO: 2514256 - RNA, 19 nt, Artificial Sequence
  Description of Artificial Sequence: Synthetic oligonucleotide
  Sense strand starting at position 1449 of SEQ ID NO: 1888146
ggaagaggcucugagauuu

SEQ ID NO: 2514257 - RNA, 19 nt, Artificial Sequence
  Description of Artificial Sequence: Synthetic oligonucleotide
  Antisense strand to SEQ ID NO: 2514256
aaaucucagagccucuucc

SEQ ID NO: 2514258 - RNA, 19 nt, Artificial Sequence
  Description of Artificial Sequence: Synthetic oligonucleotide
  Sense strand starting at position 1732 of SEQ ID NO: 1888146
ggccauuacucaucuuaag

SEQ ID NO: 2514259 - RNA, 19 nt, Artificial Sequence
  Description of Artificial Sequence: Synthetic oligonucleotide
  Antisense strand to SEQ ID NO: 2514258
cuuaagaugaguaauggcc

SEQ ID NO: 2514260 - RNA, 19 nt, Artificial Sequence
  Description of Artificial Sequence: Synthetic oligonucleotide
  Sense strand starting at position 1821 of SEQ ID NO: 1888146
gguagccacucuccugaau

SEQ ID NO: 2514261 - RNA, 19 nt, Artificial Sequence
  Description of Artificial Sequence: Synthetic oligonucleotide
  Antisense strand to SEQ ID NO: 2514260
auucaggagaguggcuacc

SEQ ID NO: 2514262 - RNA, 19 nt, Artificial Sequence
  Description of Artificial Sequence: Synthetic oligonucleotide
  Sense strand starting at position 2117 of SEQ ID NO: 1888146
aaauguugugcugaugaca

SEQ ID NO: 2514263 - RNA, 19 nt, Artificial Sequence
  Description of Artificial Sequence: Synthetic oligonucleotide
  Antisense strand to SEQ ID NO: 2514262
ugucaucagcacaacauuu

SEQ ID NO: 2514264 - RNA, 19 nt, Artificial Sequence
  Description of Artificial Sequence: Synthetic oligonucleotide
  Sense strand starting at position 2120 of SEQ ID NO: 1888146
uguugugcugaugacauau

SEQ ID NO: 2514265 - RNA, 19 nt, Artificial Sequence
  Description of Artificial Sequence: Synthetic oligonucleotide
  Antisense strand to SEQ ID NO: 2514264
auaugucaucagcacaaca

SEQ ID NO: 2514266 - RNA, 19 nt, Artificial Sequence
  Description of Artificial Sequence: Synthetic oligonucleotide
  Sense strand starting at position 2240 of SEQ ID NO: 1888146
ggauaccacuucuuaugua

SEQ ID NO: 2514267 - RNA, 19 nt, Artificial Sequence
  Description of Artificial Sequence: Synthetic oligonucleotide
  Antisense strand to SEQ ID NO: 2514266
uacauaagaagugguaucc

SEQ ID NO: 2514268 - RNA, 19 nt, Artificial Sequence
  Description of Artificial Sequence: Synthetic oligonucleotide
  Sense strand starting at position 2286 of SEQ ID NO: 1888146
acacuaauguauccuguau

SEQ ID NO: 2514269 - RNA, 19 nt, Artificial Sequence
  Description of Artificial Sequence: Synthetic oligonucleotide
  Antisense strand to SEQ ID NO: 2514268
auacaggauacauuagugu

SEQ ID NO: 2514270 - RNA, 19 nt, Artificial Sequence
  Description of Artificial Sequence: Synthetic oligonucleotide
  Sense strand starting at position 2495 of SEQ ID NO: 1888146
guguuacccucccucauaa

SEQ ID NO: 2514271 - RNA, 19 nt, Artificial Sequence
  Description of Artificial Sequence: Synthetic oligonucleotide
  Antisense strand to SEQ ID NO: 2514270
uuaugagggaggguaacac

SEQ ID NO: 2514272 - RNA, 19 nt, Artificial Sequence
  Description of Artificial Sequence: Synthetic oligonucleotide
  Sense strand starting at position 2656 of SEQ ID NO: 1888146
ucaagaguuaugcaaguag

SEQ ID NO: 2514273 - RNA, 19 nt, Artificial Sequence
  Description of Artificial Sequence: Synthetic oligonucleotide
  Antisense strand to SEQ ID NO: 2514272
cuacuugcauaacucuuga

SEQ ID NO: 2514274 - RNA, 19 nt, Artificial Sequence
  Description of Artificial Sequence: Synthetic oligonucleotide
  Sense strand starting at position 2660 of SEQ ID NO: 1888146
gaguuaugcaaguagugag

SEQ ID NO: 2514275 - RNA, 19 nt, Artificial Sequence
  Description of Artificial Sequence: Synthetic oligonucleotide
  Antisense strand to SEQ ID NO: 2514274
cucacuacuugcauaacuc

SEQ ID NO: 2514276 - RNA, 19 nt, Artificial Sequence
  Description of Artificial Sequence: Synthetic oligonucleotide
  Sense strand starting at position 2738 of SEQ ID NO: 1888146
uuaucaugaucuguuguuu

SEQ ID NO: 2514277 - RNA, 19 nt, Artificial Sequence
  Description of Artificial Sequence: Synthetic oligonucleotide
  Antisense strand to SEQ ID NO: 2514276
aaacaacagaucaugauaa

SEQ ID NO: 2514278 - RNA, 19 nt, Artificial Sequence
  Description of Artificial Sequence: Synthetic oligonucleotide
  Sense strand starting at position 2760 of SEQ ID NO: 1888146
cguguuauuuaggccaaug

SEQ ID NO: 2514279 - RNA, 19 nt, Artificial Sequence
  Description of Artificial Sequence: Synthetic oligonucleotide
  Antisense strand to SEQ ID NO: 2514278
cauuggccuaaauaacacg

SEQ ID NO: 2514280 - RNA, 19 nt, Artificial Sequence
  Description of Artificial Sequence: Synthetic oligonucleotide
  Sense strand starting at position 2986 of SEQ ID NO: 1888146
ugguguuuguugauagugu

SEQ ID NO: 2514281 - RNA, 19 nt, Artificial Sequence
  Description of Artificial Sequence: Synthetic oligonucleotide
  Antisense strand to SEQ ID NO: 2514280
acacuaucaacaaacacca

SEQ ID NO: 2514282 - RNA, 19 nt, Artificial Sequence
  Description of Artificial Sequence: Synthetic oligonucleotide
  Sense strand starting at position 3190 of SEQ ID NO: 1888146
gacacugucuaccuggaaa

SEQ ID NO: 2514283 - RNA, 19 nt, Artificial Sequence
  Description of Artificial Sequence: Synthetic oligonucleotide
  Antisense strand to SEQ ID NO: 2514282
uuuccagguagacaguguc

SEQ ID NO: 2514284 - RNA, 19 nt, Artificial Sequence
  Description of Artificial Sequence: Synthetic oligonucleotide
  Sense strand starting at position 3192 of SEQ ID NO: 1888146
cacugucuaccuggaaaug

SEQ ID NO: 2514285 - RNA, 19 nt, Artificial Sequence
  Description of Artificial Sequence: Synthetic oligonucleotide
  Antisense strand to SEQ ID NO: 2514284
cauuuccagguagacagug

SEQ ID NO: 2514286 - RNA, 19 nt, Artificial Sequence
  Description of Artificial Sequence: Synthetic oligonucleotide
  Sense strand starting at position 3323 of SEQ ID NO: 1888146
uccacaguccucuguuuga

SEQ ID NO: 2514287 - RNA, 19 nt, Artificial Sequence
  Description of Artificial Sequence: Synthetic oligonucleotide
  Antisense strand to SEQ ID NO: 2514286
ucaaacagaggacugugga

SEQ ID NO: 2514288 - RNA, 19 nt, Artificial Sequence
  Description of Artificial Sequence: Synthetic oligonucleotide
  Sense strand starting at position 3330 of SEQ ID NO: 1888146
uccucuguuugaguuugau

SEQ ID NO: 2514289 - RNA, 19 nt, Artificial Sequence
  Description of Artificial Sequence: Synthetic oligonucleotide
  Antisense strand to SEQ ID NO: 2514288
aucaaacucaaacagagga

SEQ ID NO: 2514290 - RNA, 19 nt, Artificial Sequence
  Description of Artificial Sequence: Synthetic oligonucleotide
  Sense strand starting at position 3333 of SEQ ID NO: 1888146
ucuguuugaguuugauuaa

SEQ ID NO: 2514291 - RNA, 19 nt, Artificial Sequence
  Description of Artificial Sequence: Synthetic oligonucleotide
  Antisense strand to SEQ ID NO: 2514290
uuaaucaaacucaaacaga

SEQ ID NO: 2514292 - RNA, 19 nt, Artificial Sequence
  Description of Artificial Sequence: Synthetic oligonucleotide
  Sense strand starting at position 3345 of SEQ ID NO: 1888146
ugauuaauuugcuagagaa

SEQ ID NO: 2514293 - RNA, 19 nt, Artificial Sequence
  Description of Artificial Sequence: Synthetic oligonucleotide
  Antisense strand to SEQ ID NO: 2514292
uucucuagcaaauuaauca

SEQ ID NO: 2514294 - RNA, 19 nt, Artificial Sequence
  Description of Artificial Sequence: Synthetic oligonucleotide
  Sense strand starting at position 3817 of SEQ ID NO: 1888146
uagugugaggccuggaaga

SEQ ID NO: 2514295 - RNA, 19 nt, Artificial Sequence
  Description of Artificial Sequence: Synthetic oligonucleotide
  Antisense strand to SEQ ID NO: 2514294
ucuuccaggccucacacua

SEQ ID NO: 2514296 - RNA, 19 nt, Artificial Sequence
  Description of Artificial Sequence: Synthetic oligonucleotide
  Sense strand starting at position 2 of SEQ ID NO: 1888147
gccuucuuucuggaccuua

SEQ ID NO: 2514297 - RNA, 19 nt, Artificial Sequence
  Description of Artificial Sequence: Synthetic oligonucleotide
  Antisense strand to SEQ ID NO: 2514296
uaagguccagaaagaaggc

SEQ ID NO: 2514298 - RNA, 19 nt, Artificial Sequence
  Description of Artificial Sequence: Synthetic oligonucleotide
  Sense strand starting at position 28 of SEQ ID NO: 1888147
gggccuuucugguucauag

SEQ ID NO: 2514299 - RNA, 19 nt, Artificial Sequence
  Description of Artificial Sequence: Synthetic oligonucleotide
  Antisense strand to SEQ ID NO: 2514298
cuaugaaccagaaaggccc

SEQ ID NO: 2514300 - RNA, 19 nt, Artificial Sequence
  Description of Artificial Sequence: Synthetic oligonucleotide
  Sense strand starting at position 484 of SEQ ID NO: 1888147
guguguauauaugccuaua

SEQ ID NO: 2514301 - RNA, 19 nt, Artificial Sequence
  Description of Artificial Sequence: Synthetic oligonucleotide
  Antisense strand to SEQ ID NO: 2514300
uauaggcauauauacacac

SEQ ID NO: 2514302 - RNA, 19 nt, Artificial Sequence
  Description of Artificial Sequence: Synthetic oligonucleotide
  Sense strand starting at position 486 of SEQ ID NO: 1888147
guguauauaugccuauaca

SEQ ID NO: 2514303 - RNA, 19 nt, Artificial Sequence
  Description of Artificial Sequence: Synthetic oligonucleotide
  Antisense strand to SEQ ID NO: 2514302
uguauaggcauauauacac

SEQ ID NO: 2514304 - RNA, 19 nt, Artificial Sequence
  Description of Artificial Sequence: Synthetic oligonucleotide
  Sense strand starting at position 487 of SEQ ID NO: 1888147
uguauauaugccuauacau

SEQ ID NO: 2514305 - RNA, 19 nt, Artificial Sequence
  Description of Artificial Sequence: Synthetic oligonucleotide
  Antisense strand to SEQ ID NO: 2514304
auguauaggcauauauaca

SEQ ID NO: 2514306 - RNA, 19 nt, Artificial Sequence
  Description of Artificial Sequence: Synthetic oligonucleotide
  Sense strand starting at position 502 of SEQ ID NO: 1888147
acauauuagugccuauaua

SEQ ID NO: 2514307 - RNA, 19 nt, Artificial Sequence
  Description of Artificial Sequence: Synthetic oligonucleotide
  Antisense strand to SEQ ID NO: 2514306
uauauaggcacuaauaugu

SEQ ID NO: 2514308 - RNA, 19 nt, Artificial Sequence
  Description of Artificial Sequence: Synthetic oligonucleotide
  Sense strand starting at position 698 of SEQ ID NO: 1888147
gaggauuaggucuggacau

SEQ ID NO: 2514309 - RNA, 19 nt, Artificial Sequence
  Description of Artificial Sequence: Synthetic oligonucleotide
  Antisense strand to SEQ ID NO: 2514308
auguccagaccuaauccuc

SEQ ID NO: 2514310 - RNA, 19 nt, Artificial Sequence
  Description of Artificial Sequence: Synthetic oligonucleotide
  Sense strand starting at position 813 of SEQ ID NO: 1888147
ggccaaggucauuaucuga

SEQ ID NO: 2514311 - RNA, 19 nt, Artificial Sequence
  Description of Artificial Sequence: Synthetic oligonucleotide
  Antisense strand to SEQ ID NO: 2514310
ucagauaaugaccuuggcc

SEQ ID NO: 2514312 - RNA, 19 nt, Artificial Sequence
  Description of Artificial Sequence: Synthetic oligonucleotide
  Sense strand starting at position 876 of SEQ ID NO: 1888147
cuugaauuaggccgucaug

SEQ ID NO: 2514313 - RNA, 19 nt, Artificial Sequence
  Description of Artificial Sequence: Synthetic oligonucleotide
  Antisense strand to SEQ ID NO: 2514312
caugacggccuaauucaag

SEQ ID NO: 2514314 - RNA, 19 nt, Artificial Sequence
  Description of Artificial Sequence: Synthetic oligonucleotide
  Sense strand starting at position 879 of SEQ ID NO: 1888147
gaauuaggccgucaugaug

SEQ ID NO: 2514315 - RNA, 19 nt, Artificial Sequence
  Description of Artificial Sequence: Synthetic oligonucleotide
  Antisense strand to SEQ ID NO: 2514314
caucaugacggccuaauuc

SEQ ID NO: 2514316 - RNA, 19 nt, Artificial Sequence
  Description of Artificial Sequence: Synthetic oligonucleotide
  Sense strand starting at position 898 of SEQ ID NO: 1888147
gggcauaaugugggagaau

SEQ ID NO: 2514317 - RNA, 19 nt, Artificial Sequence
  Description of Artificial Sequence: Synthetic oligonucleotide
  Antisense strand to SEQ ID NO: 2514316
auucucccacauuaugccc

SEQ ID NO: 2514318 - RNA, 19 nt, Artificial Sequence
  Description of Artificial Sequence: Synthetic oligonucleotide
  Sense strand starting at position 1059 of SEQ ID NO: 1888147
gucugugacucccugggaa

SEQ ID NO: 2514319 - RNA, 19 nt, Artificial Sequence
  Description of Artificial Sequence: Synthetic oligonucleotide
  Antisense strand to SEQ ID NO: 2514318
uucccagggagucacagac

SEQ ID NO: 2514320 - RNA, 19 nt, Artificial Sequence
  Description of Artificial Sequence: Synthetic oligonucleotide
  Sense strand starting at position 1061 of SEQ ID NO: 1888147
cugugacucccugggaagu

SEQ ID NO: 2514321 - RNA, 19 nt, Artificial Sequence
  Description of Artificial Sequence: Synthetic oligonucleotide
  Antisense strand to SEQ ID NO: 2514320
acuucccagggagucacag

SEQ ID NO: 2514322 - RNA, 19 nt, Artificial Sequence
  Description of Artificial Sequence: Synthetic oligonucleotide
  Sense strand starting at position 2012 of SEQ ID NO: 1888147
uuuggaacugacugugaua

SEQ ID NO: 2514323 - RNA, 19 nt, Artificial Sequence
  Description of Artificial Sequence: Synthetic oligonucleotide
  Antisense strand to SEQ ID NO: 2514322
uaucacagucaguuccaaa

SEQ ID NO: 2514324 - RNA, 19 nt, Artificial Sequence
  Description of Artificial Sequence: Synthetic oligonucleotide
  Sense strand starting at position 2199 of SEQ ID NO: 1888147
uauggaaagucagauauac

SEQ ID NO: 2514325 - RNA, 19 nt, Artificial Sequence
  Description of Artificial Sequence: Synthetic oligonucleotide
  Antisense strand to SEQ ID NO: 2514324
guauaucugacuuuccaua

SEQ ID NO: 2514326 - RNA, 19 nt, Artificial Sequence
  Description of Artificial Sequence: Synthetic oligonucleotide
  Sense strand starting at position 2231 of SEQ ID NO: 1888147
gggugcuuccaugggaauu

SEQ ID NO: 2514327 - RNA, 19 nt, Artificial Sequence
  Description of Artificial Sequence: Synthetic oligonucleotide
  Antisense strand to SEQ ID NO: 2514326
aauucccauggaagcaccc

SEQ ID NO: 2514328 - RNA, 19 nt, Artificial Sequence
  Description of Artificial Sequence: Synthetic oligonucleotide
  Sense strand starting at position 2232 of SEQ ID NO: 1888147
ggugcuuccaugggaauug

SEQ ID NO: 2514329 - RNA, 19 nt, Artificial Sequence
  Description of Artificial Sequence: Synthetic oligonucleotide
  Antisense strand to SEQ ID NO: 2514328
caauucccauggaagcacc

SEQ ID NO: 2514330 - RNA, 19 nt, Artificial Sequence
  Description of Artificial Sequence: Synthetic oligonucleotide
  Sense strand starting at position 2305 of SEQ ID NO: 1888147
gagacauucugggagaaug

SEQ ID NO: 2514331 - RNA, 19 nt, Artificial Sequence
  Description of Artificial Sequence: Synthetic oligonucleotide
  Antisense strand to SEQ ID NO: 2514330
cauucucccagaaugucuc

SEQ ID NO: 2514332 - RNA, 19 nt, Artificial Sequence
  Description of Artificial Sequence: Synthetic oligonucleotide
  Sense strand starting at position 2520 of SEQ ID NO: 1888147
aggcuuuaacccugugacu

SEQ ID NO: 2514333 - RNA, 19 nt, Artificial Sequence
  Description of Artificial Sequence: Synthetic oligonucleotide
  Antisense strand to SEQ ID NO: 2514332
agucacaggguuaaagccu

SEQ ID NO: 2514334 - RNA, 19 nt, Artificial Sequence
  Description of Artificial Sequence: Synthetic oligonucleotide
  Sense strand starting at position 2522 of SEQ ID NO: 1888147
gcuuuaacccugugacugu

SEQ ID NO: 2514335 - RNA, 19 nt, Artificial Sequence
  Description of Artificial Sequence: Synthetic oligonucleotide
  Antisense strand to SEQ ID NO: 2514334
acagucacaggguuaaagc

SEQ ID NO: 2514336 - RNA, 19 nt, Artificial Sequence
  Description of Artificial Sequence: Synthetic oligonucleotide
  Sense strand starting at position 2550 of SEQ ID NO: 1888147
uguugaauuuguguggguu

SEQ ID NO: 2514337 - RNA, 19 nt, Artificial Sequence
  Description of Artificial Sequence: Synthetic oligonucleotide
  Antisense strand to SEQ ID NO: 2514336
aacccacacaaauucaaca

SEQ ID NO: 2514338 - RNA, 19 nt, Artificial Sequence
  Description of Artificial Sequence: Synthetic oligonucleotide
  Sense strand starting at position 2551 of SEQ ID NO: 1888147
guugaauuuguguggguuu

SEQ ID NO: 2514339 - RNA, 19 nt, Artificial Sequence
  Description of Artificial Sequence: Synthetic oligonucleotide
  Antisense strand to SEQ ID NO: 2514338
aaacccacacaaauucaac

SEQ ID NO: 2514340 - RNA, 19 nt, Artificial Sequence
  Description of Artificial Sequence: Synthetic oligonucleotide
  Sense strand starting at position 2928 of SEQ ID NO: 1888147
ggcucuuggagcuguuuga

SEQ ID NO: 2514341 - RNA, 19 nt, Artificial Sequence
  Description of Artificial Sequence: Synthetic oligonucleotide
  Antisense strand to SEQ ID NO: 2514340
ucaaacagcuccaagagcc

SEQ ID NO: 2514342 - RNA, 19 nt, Artificial Sequence
  Description of Artificial Sequence: Synthetic oligonucleotide
  Sense strand starting at position 2954 of SEQ ID NO: 1888147
cucauaagccagugguuau

SEQ ID NO: 2514343 - RNA, 19 nt, Artificial Sequence
  Description of Artificial Sequence: Synthetic oligonucleotide
  Antisense strand to SEQ ID NO: 2514342
auaaccacuggcuuaugag

SEQ ID NO: 2514344 - RNA, 19 nt, Artificial Sequence
  Description of Artificial Sequence: Synthetic oligonucleotide
  Sense strand starting at position 2995 of SEQ ID NO: 1888147
cccugugcuaggugauuua

SEQ ID NO: 2514345 - RNA, 19 nt, Artificial Sequence
  Description of Artificial Sequence: Synthetic oligonucleotide
  Antisense strand to SEQ ID NO: 2514344
uaaaucaccuagcacaggg

SEQ ID NO: 2514346 - RNA, 19 nt, Artificial Sequence
  Description of Artificial Sequence: Synthetic oligonucleotide
  Sense strand starting at position 3046 of SEQ ID NO: 1888147
agauuagaccugcggcuau

SEQ ID NO: 2514347 - RNA, 19 nt, Artificial Sequence
  Description of Artificial Sequence: Synthetic oligonucleotide
  Antisense strand to SEQ ID NO: 2514346
auagccgcaggucuaaucu

SEQ ID NO: 2514348 - RNA, 19 nt, Artificial Sequence
  Description of Artificial Sequence: Synthetic oligonucleotide
  Sense strand starting at position 3056 of SEQ ID NO: 1888147
ugcggcuaucuccaacaga

SEQ ID NO: 2514349 - RNA, 19 nt, Artificial Sequence
  Description of Artificial Sequence: Synthetic oligonucleotide
  Antisense strand to SEQ ID NO: 2514348
ucuguuggagauagccgca

SEQ ID NO: 2514350 - RNA, 19 nt, Artificial Sequence
  Description of Artificial Sequence: Synthetic oligonucleotide
  Sense strand starting at position 3148 of SEQ ID NO: 1888147
ucugaauucugagccugca

SEQ ID NO: 2514351 - RNA, 19 nt, Artificial Sequence
  Description of Artificial Sequence: Synthetic oligonucleotide
  Antisense strand to SEQ ID NO: 2514350
ugcaggcucagaauucaga

SEQ ID NO: 2514352 - RNA, 19 nt, Artificial Sequence
  Description of Artificial Sequence: Synthetic oligonucleotide
  Sense strand starting at position 3270 of SEQ ID NO: 1888147
cccagauccucagaucaag

SEQ ID NO: 2514353 - RNA, 19 nt, Artificial Sequence
  Description of Artificial Sequence: Synthetic oligonucleotide
  Antisense strand to SEQ ID NO: 2514352
cuugaucugaggaucuggg

SEQ ID NO: 2514354 - RNA, 19 nt, Artificial Sequence
  Description of Artificial Sequence: Synthetic oligonucleotide
  Sense strand starting at position 3320 of SEQ ID NO: 1888147
gugagcaacucuuuccaga

SEQ ID NO: 2514355 - RNA, 19 nt, Artificial Sequence
  Description of Artificial Sequence: Synthetic oligonucleotide
  Antisense strand to SEQ ID NO: 2514354
ucuggaaagaguugcucac

SEQ ID NO: 2514356 - RNA, 19 nt, Artificial Sequence
  Description of Artificial Sequence: Synthetic oligonucleotide
  Sense strand starting at position 3331 of SEQ ID NO: 1888147
uuuccagauugggaacaau

SEQ ID NO: 2514357 - RNA, 19 nt, Artificial Sequence
  Description of Artificial Sequence: Synthetic oligonucleotide
  Antisense strand to SEQ ID NO: 2514356
auuguucccaaucuggaaa

SEQ ID NO: 2514358 - RNA, 19 nt, Artificial Sequence
  Description of Artificial Sequence: Synthetic oligonucleotide
  Sense strand starting at position 3340 of SEQ ID NO: 1888147
ugggaacaaugugcagauu

SEQ ID NO: 2514359 - RNA, 19 nt, Artificial Sequence
  Description of Artificial Sequence: Synthetic oligonucleotide
  Antisense strand to SEQ ID NO: 2514358
aaucugcacauuguuccca

SEQ ID NO: 2514360 - RNA, 19 nt, Artificial Sequence
  Description of Artificial Sequence: Synthetic oligonucleotide
  Sense strand starting at position 3581 of SEQ ID NO: 1888147
aggaaagccuucccugauu

SEQ ID NO: 2514361 - RNA, 19 nt, Artificial Sequence
  Description of Artificial Sequence: Synthetic oligonucleotide
  Antisense strand to SEQ ID NO: 2514360
aaucagggaaggcuuuccu

SEQ ID NO: 2514362 - RNA, 19 nt, Artificial Sequence
  Description of Artificial Sequence: Synthetic oligonucleotide
  Sense strand starting at position 3621 of SEQ ID NO: 1888147
ugucauguaucuuuccuuu

SEQ ID NO: 2514363 - RNA, 19 nt, Artificial Sequence
  Description of Artificial Sequence: Synthetic oligonucleotide
  Antisense strand to SEQ ID NO: 2514362
aaaggaaagauacaugaca

SEQ ID NO: 2514364 - RNA, 19 nt, Artificial Sequence
  Description of Artificial Sequence: Synthetic oligonucleotide
  Sense strand starting at position 3625 of SEQ ID NO: 1888147
auguaucuuuccuuuauga

SEQ ID NO: 2514365 - RNA, 19 nt, Artificial Sequence
  Description of Artificial Sequence: Synthetic oligonucleotide
  Antisense strand to SEQ ID NO: 2514364
ucauaaaggaaagauacau

SEQ ID NO: 2514366 - RNA, 19 nt, Artificial Sequence
  Description of Artificial Sequence: Synthetic oligonucleotide
  Sense strand starting at position 3627 of SEQ ID NO: 1888147
guaucuuuccuuuaugaua

SEQ ID NO: 2514367 - RNA, 19 nt, Artificial Sequence
  Description of Artificial Sequence: Synthetic oligonucleotide
  Antisense strand to SEQ ID NO: 2514366
uaucauaaaggaaagauac

SEQ ID NO: 2514368 - RNA, 19 nt, Artificial Sequence
  Description of Artificial Sequence: Synthetic oligonucleotide
  Sense strand starting at position 3755 of SEQ ID NO: 1888147
gucccaugguucccaaaug

SEQ ID NO: 2514369 - RNA, 19 nt, Artificial Sequence
  Description of Artificial Sequence: Synthetic oligonucleotide
  Antisense strand to SEQ ID NO: 2514368
cauuugggaaccaugggac

SEQ ID NO: 2514370 - RNA, 19 nt, Artificial Sequence
  Description of Artificial Sequence: Synthetic oligonucleotide
  Sense strand starting at position 3760 of SEQ ID NO: 1888147
augguucccaaauguuagu

SEQ ID NO: 2514371 - RNA, 19 nt, Artificial Sequence
  Description of Artificial Sequence: Synthetic oligonucleotide
  Antisense strand to SEQ ID NO: 2514370
acuaacauuugggaaccau

SEQ ID NO: 2514372 - RNA, 19 nt, Artificial Sequence
  Description of Artificial Sequence: Synthetic oligonucleotide
  Sense strand starting at position 3771 of SEQ ID NO: 1888147
auguuaguaucacugaaac

SEQ ID NO: 2514373 - RNA, 19 nt, Artificial Sequence
  Description of Artificial Sequence: Synthetic oligonucleotide
  Antisense strand to SEQ ID NO: 2514372
guuucagugauacuaacau

SEQ ID NO: 2514374 - RNA, 19 nt, Artificial Sequence
  Description of Artificial Sequence: Synthetic oligonucleotide
  Sense strand starting at position 3942 of SEQ ID NO: 1888147
aucaguauccauugucaua

SEQ ID NO: 2514375 - RNA, 19 nt, Artificial Sequence
  Description of Artificial Sequence: Synthetic oligonucleotide
  Antisense strand to SEQ ID NO: 2514374
uaugacaauggauacugau

SEQ ID NO: 2514376 - RNA, 19 nt, Artificial Sequence
  Description of Artificial Sequence: Synthetic oligonucleotide
  Sense strand starting at position 126 of SEQ ID NO: 1888148
agggucagagcucagugaa

SEQ ID NO: 2514377 - RNA, 19 nt, Artificial Sequence
  Description of Artificial Sequence: Synthetic oligonucleotide
  Antisense strand to SEQ ID NO: 2514376
uucacugagcucugacccu

SEQ ID NO: 2514378 - RNA, 19 nt, Artificial Sequence
  Description of Artificial Sequence: Synthetic oligonucleotide
  Sense strand starting at position 147 of SEQ ID NO: 1888148
gcaggugaucugggccaaa

SEQ ID NO: 2514379 - RNA, 19 nt, Artificial Sequence
  Description of Artificial Sequence: Synthetic oligonucleotide
  Antisense strand to SEQ ID NO: 2514378
uuuggcccagaucaccugc

SEQ ID NO: 2514380 - RNA, 19 nt, Artificial Sequence
  Description of Artificial Sequence: Synthetic oligonucleotide
  Sense strand starting at position 150 of SEQ ID NO: 1888148
ggugaucugggccaaauca

SEQ ID NO: 2514381 - RNA, 19 nt, Artificial Sequence
  Description of Artificial Sequence: Synthetic oligonucleotide
  Antisense strand to SEQ ID NO: 2514380
ugauuuggcccagaucacc

SEQ ID NO: 2514382 - RNA, 19 nt, Artificial Sequence
  Description of Artificial Sequence: Synthetic oligonucleotide
  Sense strand starting at position 218 of SEQ ID NO: 1888148
uccugugggacucaguuua

SEQ ID NO: 2514383 - RNA, 19 nt, Artificial Sequence
  Description of Artificial Sequence: Synthetic oligonucleotide
  Antisense strand to SEQ ID NO: 2514382
uaaacugagucccacagga

SEQ ID NO: 2514384 - RNA, 19 nt, Artificial Sequence
  Description of Artificial Sequence: Synthetic oligonucleotide
  Sense strand starting at position 259 of SEQ ID NO: 1888148
uggacuguauacucugaga

SEQ ID NO: 2514385 - RNA, 19 nt, Artificial Sequence
  Description of Artificial Sequence: Synthetic oligonucleotide
  Antisense strand to SEQ ID NO: 2514384
ucucagaguauacagucca

SEQ ID NO: 2514386 - RNA, 19 nt, Artificial Sequence
  Description of Artificial Sequence: Synthetic oligonucleotide
  Sense strand starting at position 261 of SEQ ID NO: 1888148
gacuguauacucugagaac

SEQ ID NO: 2514387 - RNA, 19 nt, Artificial Sequence
  Description of Artificial Sequence: Synthetic oligonucleotide
  Antisense strand to SEQ ID NO: 2514386
guucucagaguauacaguc

SEQ ID NO: 2514388 - RNA, 19 nt, Artificial Sequence
  Description of Artificial Sequence: Synthetic oligonucleotide
  Sense strand starting at position 497 of SEQ ID NO: 1888148
aggagugauuacguuacua

SEQ ID NO: 2514389 - RNA, 19 nt, Artificial Sequence
  Description of Artificial Sequence: Synthetic oligonucleotide
  Antisense strand to SEQ ID NO: 2514388
uaguaacguaaucacuccu

SEQ ID NO: 2514390 - RNA, 19 nt, Artificial Sequence
  Description of Artificial Sequence: Synthetic oligonucleotide
  Sense strand starting at position 499 of SEQ ID NO: 1888148
gagugauuacguuacuauc

SEQ ID NO: 2514391 - RNA, 19 nt, Artificial Sequence
  Description of Artificial Sequence: Synthetic oligonucleotide
  Antisense strand to SEQ ID NO: 2514390
gauaguaacguaaucacuc

SEQ ID NO: 2514392 - RNA, 19 nt, Artificial Sequence
  Description of Artificial Sequence: Synthetic oligonucleotide
  Sense strand starting at position 915 of SEQ ID NO: 1888148
agaggaucuccuggccuuu

SEQ ID NO: 2514393 - RNA, 19 nt, Artificial Sequence
  Description of Artificial Sequence: Synthetic oligonucleotide
  Antisense strand to SEQ ID NO: 2514392
aaaggccaggagauccucu

SEQ ID NO: 2514394 - RNA, 19 nt, Artificial Sequence
  Description of Artificial Sequence: Synthetic oligonucleotide
  Sense strand starting at position 963 of SEQ ID NO: 1888148
ggcaggugucuggaaugga

SEQ ID NO: 2514395 - RNA, 19 nt, Artificial Sequence
  Description of Artificial Sequence: Synthetic oligonucleotide
  Antisense strand to SEQ ID NO: 2514394
uccauuccagacaccugcc

SEQ ID NO: 2514396 - RNA, 19 nt, Artificial Sequence
  Description of Artificial Sequence: Synthetic oligonucleotide
  Sense strand starting at position 964 of SEQ ID NO: 1888148
gcaggugucuggaauggaa

SEQ ID NO: 2514397 - RNA, 19 nt, Artificial Sequence
  Description of Artificial Sequence: Synthetic oligonucleotide
  Antisense strand to SEQ ID NO: 2514396
uuccauuccagacaccugc

SEQ ID NO: 2514398 - RNA, 19 nt, Artificial Sequence
  Description of Artificial Sequence: Synthetic oligonucleotide
  Sense strand starting at position 966 of SEQ ID NO: 1888148
aggugucuggaauggaaau

SEQ ID NO: 2514399 - RNA, 19 nt, Artificial Sequence
  Description of Artificial Sequence: Synthetic oligonucleotide
  Antisense strand to SEQ ID NO: 2514398
auuuccauuccagacaccu

SEQ ID NO: 2514400 - RNA, 19 nt, Artificial Sequence
  Description of Artificial Sequence: Synthetic oligonucleotide
  Sense strand starting at position 1118 of SEQ ID NO: 1888148
cagggucuguuucugcaaa

SEQ ID NO: 2514401 - RNA, 19 nt, Artificial Sequence
  Description of Artificial Sequence: Synthetic oligonucleotide
  Antisense strand to SEQ ID NO: 2514400
uuugcagaaacagacccug

SEQ ID NO: 2514402 - RNA, 19 nt, Artificial Sequence
  Description of Artificial Sequence: Synthetic oligonucleotide
  Sense strand starting at position 1560 of SEQ ID NO: 1888148
uggcaccugucauuuaagu

SEQ ID NO: 2514403 - RNA, 19 nt, Artificial Sequence
  Description of Artificial Sequence: Synthetic oligonucleotide
  Antisense strand to SEQ ID NO: 2514402
acuuaaaugacaggugcca

SEQ ID NO: 2514404 - RNA, 19 nt, Artificial Sequence
  Description of Artificial Sequence: Synthetic oligonucleotide
  Sense strand starting at position 1573 of SEQ ID NO: 1888148
uuaagucacugcucagaug

SEQ ID NO: 2514405 - RNA, 19 nt, Artificial Sequence
  Description of Artificial Sequence: Synthetic oligonucleotide
  Antisense strand to SEQ ID NO: 2514404
caucugagcagugacuuaa

SEQ ID NO: 2514406 - RNA, 19 nt, Artificial Sequence
  Description of Artificial Sequence: Synthetic oligonucleotide
  Sense strand starting at position 1696 of SEQ ID NO: 1888148
ggcuguugugaucaauagc

SEQ ID NO: 2514407 - RNA, 19 nt, Artificial Sequence
  Description of Artificial Sequence: Synthetic oligonucleotide
  Antisense strand to SEQ ID NO: 2514406
gcuauugaucacaacagcc

SEQ ID NO: 2514408 - RNA, 19 nt, Artificial Sequence
  Description of Artificial Sequence: Synthetic oligonucleotide
  Sense strand starting at position 1988 of SEQ ID NO: 1888148
ccgcuauacagaugaugaa

SEQ ID NO: 2514409 - RNA, 19 nt, Artificial Sequence
  Description of Artificial Sequence: Synthetic oligonucleotide
  Antisense strand to SEQ ID NO: 2514408
uucaucaucuguauagcgg

SEQ ID NO: 2514410 - RNA, 19 nt, Artificial Sequence
  Description of Artificial Sequence: Synthetic oligonucleotide
  Sense strand starting at position 2047 of SEQ ID NO: 1888148
guggaaugauggcuucauu

SEQ ID NO: 2514411 - RNA, 19 nt, Artificial Sequence
  Description of Artificial Sequence: Synthetic oligonucleotide
  Antisense strand to SEQ ID NO: 2514410
aaugaagccaucauuccac

SEQ ID NO: 2514412 - RNA, 19 nt, Artificial Sequence
  Description of Artificial Sequence: Synthetic oligonucleotide
  Sense strand starting at position 2100 of SEQ ID NO: 1888148
ugaagaaugccacgccaaa

SEQ ID NO: 2514413 - RNA, 19 nt, Artificial Sequence
  Description of Artificial Sequence: Synthetic oligonucleotide
  Antisense strand to SEQ ID NO: 2514412
uuuggcguggcauucuuca

SEQ ID NO: 2514414 - RNA, 19 nt, Artificial Sequence
  Description of Artificial Sequence: Synthetic oligonucleotide
  Sense strand starting at position 2113 of SEQ ID NO: 1888148
gccaaauaaucaucaggau

SEQ ID NO: 2514415 - RNA, 19 nt, Artificial Sequence
  Description of Artificial Sequence: Synthetic oligonucleotide
  Antisense strand to SEQ ID NO: 2514414
auccugaugauuauuuggc

SEQ ID NO: 2514416 - RNA, 19 nt, Artificial Sequence
  Description of Artificial Sequence: Synthetic oligonucleotide
  Sense strand starting at position 2279 of SEQ ID NO: 1888148
cggcuuagugguuauugaa

SEQ ID NO: 2514417 - RNA, 19 nt, Artificial Sequence
  Description of Artificial Sequence: Synthetic oligonucleotide
  Antisense strand to SEQ ID NO: 2514416
uucaauaaccacuaagccg

SEQ ID NO: 2514418 - RNA, 19 nt, Artificial Sequence
  Description of Artificial Sequence: Synthetic oligonucleotide
  Sense strand starting at position 2359 of SEQ ID NO: 1888148
agggcauauuugccacagu

SEQ ID NO: 2514419 - RNA, 19 nt, Artificial Sequence
  Description of Artificial Sequence: Synthetic oligonucleotide
  Antisense strand to SEQ ID NO: 2514418
acuguggcaaauaugcccu

SEQ ID NO: 2514420 - RNA, 19 nt, Artificial Sequence
  Description of Artificial Sequence: Synthetic oligonucleotide
  Sense strand starting at position 2383 of SEQ ID NO: 1888148
uuaccauugccaggcuaga

SEQ ID NO: 2514421 - RNA, 19 nt, Artificial Sequence
  Description of Artificial Sequence: Synthetic oligonucleotide
  Antisense strand to SEQ ID NO: 2514420
ucuagccuggcaaugguaa

SEQ ID NO: 2514422 - RNA, 19 nt, Artificial Sequence
  Description of Artificial Sequence: Synthetic oligonucleotide
  Sense strand starting at position 2406 of SEQ ID NO: 1888148
cucugcucucaggaagagu

SEQ ID NO: 2514423 - RNA, 19 nt, Artificial Sequence
  Description of Artificial Sequence: Synthetic oligonucleotide
  Antisense strand to SEQ ID NO: 2514422
acucuuccugagagcagag

SEQ ID NO: 2514424 - RNA, 19 nt, Artificial Sequence
  Description of Artificial Sequence: Synthetic oligonucleotide
  Sense strand starting at position 2419 of SEQ ID NO: 1888148
aagagugugcuggaaggau

SEQ ID NO: 2514425 - RNA, 19 nt, Artificial Sequence
  Description of Artificial Sequence: Synthetic oligonucleotide
  Antisense strand to SEQ ID NO: 2514424
auccuuccagcacacucuu

SEQ ID NO: 2514426 - RNA, 19 nt, Artificial Sequence
  Description of Artificial Sequence: Synthetic oligonucleotide
  Sense strand starting at position 2472 of SEQ ID NO: 1888148
ugagcuucuuaaucacaga

SEQ ID NO: 2514427 - RNA, 19 nt, Artificial Sequence
  Description of Artificial Sequence: Synthetic oligonucleotide
  Antisense strand to SEQ ID NO: 2514426
ucugugauuaagaagcuca

SEQ ID NO: 2514428 - RNA, 19 nt, Artificial Sequence
  Description of Artificial Sequence: Synthetic oligonucleotide
  Sense strand starting at position 2628 of SEQ ID NO: 1888148
guuguugguguauauaaag

SEQ ID NO: 2514429 - RNA, 19 nt, Artificial Sequence
  Description of Artificial Sequence: Synthetic oligonucleotide
  Antisense strand to SEQ ID NO: 2514428
cuuuauauacaccaacaac

SEQ ID NO: 2514430 - RNA, 19 nt, Artificial Sequence
  Description of Artificial Sequence: Synthetic oligonucleotide
  Sense strand starting at position 2798 of SEQ ID NO: 1888148
cagauauggcccugagcau

SEQ ID NO: 2514431 - RNA, 19 nt, Artificial Sequence
  Description of Artificial Sequence: Synthetic oligonucleotide
  Antisense strand to SEQ ID NO: 2514430
augcucagggccauaucug

SEQ ID NO: 2514432 - RNA, 19 nt, Artificial Sequence
  Description of Artificial Sequence: Synthetic oligonucleotide
  Sense strand starting at position 2839 of SEQ ID NO: 1888148
ggaagugagccagguauac

SEQ ID NO: 2514433 - RNA, 19 nt, Artificial Sequence
  Description of Artificial Sequence: Synthetic oligonucleotide
  Antisense strand to SEQ ID NO: 2514432
guauaccuggcucacuucc

SEQ ID NO: 2514434 - RNA, 19 nt, Artificial Sequence
  Description of Artificial Sequence: Synthetic oligonucleotide
  Sense strand starting at position 3081 of SEQ ID NO: 1888148
gggacuuugggaugggagu

SEQ ID NO: 2514435 - RNA, 19 nt, Artificial Sequence
  Description of Artificial Sequence: Synthetic oligonucleotide
  Antisense strand to SEQ ID NO: 2514434
acucccaucccaaaguccc

SEQ ID NO: 2514436 - RNA, 19 nt, Artificial Sequence
  Description of Artificial Sequence: Synthetic oligonucleotide
  Sense strand starting at position 3104 of SEQ ID NO: 1888148
aguaguuccuacgcaggaa

SEQ ID NO: 2514437 - RNA, 19 nt, Artificial Sequence
  Description of Artificial Sequence: Synthetic oligonucleotide
  Antisense strand to SEQ ID NO: 2514436
uuccugcguaggaacuacu

SEQ ID NO: 2514438 - RNA, 19 nt, Artificial Sequence
  Description of Artificial Sequence: Synthetic oligonucleotide
  Sense strand starting at position 3105 of SEQ ID NO: 1888148
guaguuccuacgcaggaaa

SEQ ID NO: 2514439 - RNA, 19 nt, Artificial Sequence
  Description of Artificial Sequence: Synthetic oligonucleotide
  Antisense strand to SEQ ID NO: 2514438
uuuccugcguaggaacuac

SEQ ID NO: 2514440 - RNA, 19 nt, Artificial Sequence
  Description of Artificial Sequence: Synthetic oligonucleotide
  Sense strand starting at position 3166 of SEQ ID NO: 1888148
gugacuugccugcaggagu

SEQ ID NO: 2514441 - RNA, 19 nt, Artificial Sequence
  Description of Artificial Sequence: Synthetic oligonucleotide
  Antisense strand to SEQ ID NO: 2514440
acuccugcaggcaagucac

SEQ ID NO: 2514442 - RNA, 19 nt, Artificial Sequence
  Description of Artificial Sequence: Synthetic oligonucleotide
  Sense strand starting at position 3302 of SEQ ID NO: 1888148
gccuuuauuuauguuggua

SEQ ID NO: 2514443 - RNA, 19 nt, Artificial Sequence
  Description of Artificial Sequence: Synthetic oligonucleotide
  Antisense strand to SEQ ID NO: 2514442
uaccaacauaaauaaaggc

SEQ ID NO: 2514444 - RNA, 19 nt, Artificial Sequence
  Description of Artificial Sequence: Synthetic oligonucleotide
  Sense strand starting at position 3398 of SEQ ID NO: 1888148
accugaguuuacucagcaa

SEQ ID NO: 2514445 - RNA, 19 nt, Artificial Sequence
  Description of Artificial Sequence: Synthetic oligonucleotide
  Antisense strand to SEQ ID NO: 2514444
uugcugaguaaacucaggu

SEQ ID NO: 2514446 - RNA, 19 nt, Artificial Sequence
  Description of Artificial Sequence: Synthetic oligonucleotide
  Sense strand starting at position 3401 of SEQ ID NO: 1888148
ugaguuuacucagcaagag

SEQ ID NO: 2514447 - RNA, 19 nt, Artificial Sequence
  Description of Artificial Sequence: Synthetic oligonucleotide
  Antisense strand to SEQ ID NO: 2514446
cucuugcugaguaaacuca

SEQ ID NO: 2514448 - RNA, 19 nt, Artificial Sequence
  Description of Artificial Sequence: Synthetic oligonucleotide
  Sense strand starting at position 3457 of SEQ ID NO: 1888148
ucaggaugaguuuguggau

SEQ ID NO: 2514449 - RNA, 19 nt, Artificial Sequence
  Description of Artificial Sequence: Synthetic oligonucleotide
  Antisense strand to SEQ ID NO: 2514448
auccacaaacucauccuga

SEQ ID NO: 2514450 - RNA, 19 nt, Artificial Sequence
  Description of Artificial Sequence: Synthetic oligonucleotide
  Sense strand starting at position 3466 of SEQ ID NO: 1888148
guuuguggauguguugaga

SEQ ID NO: 2514451 - RNA, 19 nt, Artificial Sequence
  Description of Artificial Sequence: Synthetic oligonucleotide
  Antisense strand to SEQ ID NO: 2514450
ucucaacacauccacaaac

SEQ ID NO: 2514452 - RNA, 19 nt, Artificial Sequence
  Description of Artificial Sequence: Synthetic oligonucleotide
  Sense strand starting at position 3469 of SEQ ID NO: 1888148
uguggauguguugagaguu

SEQ ID NO: 2514453 - RNA, 19 nt, Artificial Sequence
  Description of Artificial Sequence: Synthetic oligonucleotide
  Antisense strand to SEQ ID NO: 2514452
aacucucaacacauccaca

SEQ ID NO: 2514454 - RNA, 19 nt, Artificial Sequence
  Description of Artificial Sequence: Synthetic oligonucleotide
  Sense strand starting at position 3599 of SEQ ID NO: 1888148
gggaauucagggugaggca

SEQ ID NO: 2514455 - RNA, 19 nt, Artificial Sequence
  Description of Artificial Sequence: Synthetic oligonucleotide
  Antisense strand to SEQ ID NO: 2514454
ugccucacccugaauuccc

SEQ ID NO: 2514456 - RNA, 19 nt, Artificial Sequence
  Description of Artificial Sequence: Synthetic oligonucleotide
  Sense strand starting at position 84 of SEQ ID NO: 1888149
agacaaaggucucugcaga

SEQ ID NO: 2514457 - RNA, 19 nt, Artificial Sequence
  Description of Artificial Sequence: Synthetic oligonucleotide
  Antisense strand to SEQ ID NO: 2514456
ucugcagagaccuuugucu

SEQ ID NO: 2514458 - RNA, 19 nt, Artificial Sequence
  Description of Artificial Sequence: Synthetic oligonucleotide
  Sense strand starting at position 85 of SEQ ID NO: 1888149
gacaaaggucucugcagaa

SEQ ID NO: 2514459 - RNA, 19 nt, Artificial Sequence
  Description of Artificial Sequence: Synthetic oligonucleotide
  Antisense strand to SEQ ID NO: 2514458
uucugcagagaccuuuguc

SEQ ID NO: 2514460 - RNA, 19 nt, Artificial Sequence
  Description of Artificial Sequence: Synthetic oligonucleotide
  Sense strand starting at position 89 of SEQ ID NO: 1888149
aaggucucugcagaaauuc

SEQ ID NO: 2514461 - RNA, 19 nt, Artificial Sequence
  Description of Artificial Sequence: Synthetic oligonucleotide
  Antisense strand to SEQ ID NO: 2514460
gaauuucugcagagaccuu

SEQ ID NO: 2514462 - RNA, 19 nt, Artificial Sequence
  Description of Artificial Sequence: Synthetic oligonucleotide
  Sense strand starting at position 268 of SEQ ID NO: 1888149
ccagguaaucaaggucaau

SEQ ID NO: 2514463 - RNA, 19 nt, Artificial Sequence
  Description of Artificial Sequence: Synthetic oligonucleotide
  Antisense strand to SEQ ID NO: 2514462
auugaccuugauuaccugg

SEQ ID NO: 2514464 - RNA, 19 nt, Artificial Sequence
  Description of Artificial Sequence: Synthetic oligonucleotide
  Sense strand starting at position 280 of SEQ ID NO: 1888149
ggucaaugccaauagucau

SEQ ID NO: 2514465 - RNA, 19 nt, Artificial Sequence
  Description of Artificial Sequence: Synthetic oligonucleotide
  Antisense strand to SEQ ID NO: 2514464
augacuauuggcauugacc

SEQ ID NO: 2514466 - RNA, 19 nt, Artificial Sequence
  Description of Artificial Sequence: Synthetic oligonucleotide
  Sense strand starting at position 287 of SEQ ID NO: 1888149
gccaauagucaugagucau

SEQ ID NO: 2514467 - RNA, 19 nt, Artificial Sequence
  Description of Artificial Sequence: Synthetic oligonucleotide
  Antisense strand to SEQ ID NO: 2514466
augacucaugacuauuggc

SEQ ID NO: 2514468 - RNA, 19 nt, Artificial Sequence
  Description of Artificial Sequence: Synthetic oligonucleotide
  Sense strand starting at position 297 of SEQ ID NO: 1888149
augagucaugcugauacaa

SEQ ID NO: 2514469 - RNA, 19 nt, Artificial Sequence
  Description of Artificial Sequence: Synthetic oligonucleotide
  Antisense strand to SEQ ID NO: 2514468
uuguaucagcaugacucau

SEQ ID NO: 2514470 - RNA, 19 nt, Artificial Sequence
  Description of Artificial Sequence: Synthetic oligonucleotide
  Sense strand starting at position 403 of SEQ ID NO: 1888149
ccucauguggcagauugaa

SEQ ID NO: 2514471 - RNA, 19 nt, Artificial Sequence
  Description of Artificial Sequence: Synthetic oligonucleotide
  Antisense strand to SEQ ID NO: 2514470
uucaaucugccacaugagg

SEQ ID NO: 2514472 - RNA, 19 nt, Artificial Sequence
  Description of Artificial Sequence: Synthetic oligonucleotide
  Sense strand starting at position 482 of SEQ ID NO: 1888149
accuuuaaacuauggguau

SEQ ID NO: 2514473 - RNA, 19 nt, Artificial Sequence
  Description of Artificial Sequence: Synthetic oligonucleotide
  Antisense strand to SEQ ID NO: 2514472
auacccauaguuuaaaggu

SEQ ID NO: 2514474 - RNA, 19 nt, Artificial Sequence
  Description of Artificial Sequence: Synthetic oligonucleotide
  Sense strand starting at position 495 of SEQ ID NO: 1888149
ggguauauaguguauauga

SEQ ID NO: 2514475 - RNA, 19 nt, Artificial Sequence
  Description of Artificial Sequence: Synthetic oligonucleotide
  Antisense strand to SEQ ID NO: 2514474
ucauauacacuauauaccc

SEQ ID NO: 2514476 - RNA, 19 nt, Artificial Sequence
  Description of Artificial Sequence: Synthetic oligonucleotide
  Sense strand starting at position 662 of SEQ ID NO: 1888149
uuugauaugauguguaaga

SEQ ID NO: 2514477 - RNA, 19 nt, Artificial Sequence
  Description of Artificial Sequence: Synthetic oligonucleotide
  Antisense strand to SEQ ID NO: 2514476
ucuuacacaucauaucaaa

SEQ ID NO: 2514478 - RNA, 19 nt, Artificial Sequence
  Description of Artificial Sequence: Synthetic oligonucleotide
  Sense strand starting at position 663 of SEQ ID NO: 1888149
uugauaugauguguaagaa

SEQ ID NO: 2514479 - RNA, 19 nt, Artificial Sequence
  Description of Artificial Sequence: Synthetic oligonucleotide
  Antisense strand to SEQ ID NO: 2514478
uucuuacacaucauaucaa

SEQ ID NO: 2514480 - RNA, 19 nt, Artificial Sequence
  Description of Artificial Sequence: Synthetic oligonucleotide
  Sense strand starting at position 717 of SEQ ID NO: 1888149
ccaucagcucaggauaauu

SEQ ID NO: 2514481 - RNA, 19 nt, Artificial Sequence
  Description of Artificial Sequence: Synthetic oligonucleotide
  Antisense strand to SEQ ID NO: 2514480
aauuauccugagcugaugg

SEQ ID NO: 2514482 - RNA, 19 nt, Artificial Sequence
  Description of Artificial Sequence: Synthetic oligonucleotide
  Sense strand starting at position 805 of SEQ ID NO: 1888149
cuaucaacgucaucagaaa

SEQ ID NO: 2514483 - RNA, 19 nt, Artificial Sequence
  Description of Artificial Sequence: Synthetic oligonucleotide
  Antisense strand to SEQ ID NO: 2514482
uuucugaugacguugauag

SEQ ID NO: 2514484 - RNA, 19 nt, Artificial Sequence
  Description of Artificial Sequence: Synthetic oligonucleotide
  Sense strand starting at position 1001 of SEQ ID NO: 1888149
uugugauaaguguaccaca

SEQ ID NO: 2514485 - RNA, 19 nt, Artificial Sequence
  Description of Artificial Sequence: Synthetic oligonucleotide
  Antisense strand to SEQ ID NO: 2514484
ugugguacacuuaucacaa

SEQ ID NO: 2514486 - RNA, 19 nt, Artificial Sequence
  Description of Artificial Sequence: Synthetic oligonucleotide
  Sense strand starting at position 1014 of SEQ ID NO: 1888149
accacauuacgauguuaau

SEQ ID NO: 2514487 - RNA, 19 nt, Artificial Sequence
  Description of Artificial Sequence: Synthetic oligonucleotide
  Antisense strand to SEQ ID NO: 2514486
auuaacaucguaauguggu

SEQ ID NO: 2514488 - RNA, 19 nt, Artificial Sequence
  Description of Artificial Sequence: Synthetic oligonucleotide
  Sense strand starting at position 1278 of SEQ ID NO: 1888149
cuuauuaaacaauguugga

SEQ ID NO: 2514489 - RNA, 19 nt, Artificial Sequence
  Description of Artificial Sequence: Synthetic oligonucleotide
  Antisense strand to SEQ ID NO: 2514488
uccaacauuguuuaauaag

SEQ ID NO: 2514490 - RNA, 19 nt, Artificial Sequence
  Description of Artificial Sequence: Synthetic oligonucleotide
  Sense strand starting at position 1392 of SEQ ID NO: 1888149
guaucuuucuuaucuagau

SEQ ID NO: 2514491 - RNA, 19 nt, Artificial Sequence
  Description of Artificial Sequence: Synthetic oligonucleotide
  Antisense strand to SEQ ID NO: 2514490
aucuagauaagaaagauac

SEQ ID NO: 2514492 - RNA, 19 nt, Artificial Sequence
  Description of Artificial Sequence: Synthetic oligonucleotide
  Sense strand starting at position 1445 of SEQ ID NO: 1888149
aauugagaauuguuagggu

SEQ ID NO: 2514493 - RNA, 19 nt, Artificial Sequence
  Description of Artificial Sequence: Synthetic oligonucleotide
  Antisense strand to SEQ ID NO: 2514492
acccuaacaauucucaauu

SEQ ID NO: 2514494 - RNA, 19 nt, Artificial Sequence
  Description of Artificial Sequence: Synthetic oligonucleotide
  Sense strand starting at position 1656 of SEQ ID NO: 1888149
guugacagucaauaguaau

SEQ ID NO: 2514495 - RNA, 19 nt, Artificial Sequence
  Description of Artificial Sequence: Synthetic oligonucleotide
  Antisense strand to SEQ ID NO: 2514494
auuacuauugacugucaac

SEQ ID NO: 2514496 - RNA, 19 nt, Artificial Sequence
  Description of Artificial Sequence: Synthetic oligonucleotide
  Sense strand starting at position 1710 of SEQ ID NO: 1888149
aagaguaucuugguaucuu

SEQ ID NO: 2514497 - RNA, 19 nt, Artificial Sequence
  Description of Artificial Sequence: Synthetic oligonucleotide
  Antisense strand to SEQ ID NO: 2514496
aagauaccaagauacucuu

SEQ ID NO: 2514498 - RNA, 19 nt, Artificial Sequence
  Description of Artificial Sequence: Synthetic oligonucleotide
  Sense strand starting at position 1736 of SEQ ID NO: 1888149
gcgcaaucucaugucagcu

SEQ ID NO: 2514499 - RNA, 19 nt, Artificial Sequence
  Description of Artificial Sequence: Synthetic oligonucleotide
  Antisense strand to SEQ ID NO: 2514498
agcugacaugagauugcgc

SEQ ID NO: 2514500 - RNA, 19 nt, Artificial Sequence
  Description of Artificial Sequence: Synthetic oligonucleotide
  Sense strand starting at position 1754 of SEQ ID NO: 1888149
uuaagagccaguugaagaa

SEQ ID NO: 2514501 - RNA, 19 nt, Artificial Sequence
  Description of Artificial Sequence: Synthetic oligonucleotide
  Antisense strand to SEQ ID NO: 2514500
uucuucaacuggcucuuaa

SEQ ID NO: 2514502 - RNA, 19 nt, Artificial Sequence
  Description of Artificial Sequence: Synthetic oligonucleotide
  Sense strand starting at position 1791 of SEQ ID NO: 1888149
ggcggugugguuucuaauc

SEQ ID NO: 2514503 - RNA, 19 nt, Artificial Sequence
  Description of Artificial Sequence: Synthetic oligonucleotide
  Antisense strand to SEQ ID NO: 2514502
gauuagaaaccacaccgcc

SEQ ID NO: 2514504 - RNA, 19 nt, Artificial Sequence
  Description of Artificial Sequence: Synthetic oligonucleotide
  Sense strand starting at position 1834 of SEQ ID NO: 1888149
cugugagugauuuggugca

SEQ ID NO: 2514505 - RNA, 19 nt, Artificial Sequence
  Description of Artificial Sequence: Synthetic oligonucleotide
  Antisense strand to SEQ ID NO: 2514504
ugcaccaaaucacucacag

SEQ ID NO: 2514506 - RNA, 19 nt, Artificial Sequence
  Description of Artificial Sequence: Synthetic oligonucleotide
  Sense strand starting at position 1840 of SEQ ID NO: 1888149
gugauuuggugcaggagag

SEQ ID NO: 2514507 - RNA, 19 nt, Artificial Sequence
  Description of Artificial Sequence: Synthetic oligonucleotide
  Antisense strand to SEQ ID NO: 2514506
cucuccugcaccaaaucac

SEQ ID NO: 2514508 - RNA, 19 nt, Artificial Sequence
  Description of Artificial Sequence: Synthetic oligonucleotide
  Sense strand starting at position 2059 of SEQ ID NO: 1888149
gguguuuacccugaccaca

SEQ ID NO: 2514509 - RNA, 19 nt, Artificial Sequence
  Description of Artificial Sequence: Synthetic oligonucleotide
  Antisense strand to SEQ ID NO: 2514508
uguggucaggguaaacacc

SEQ ID NO: 2514510 - RNA, 19 nt, Artificial Sequence
  Description of Artificial Sequence: Synthetic oligonucleotide
  Sense strand starting at position 2428 of SEQ ID NO: 1888149
ggccuuucuccagagacau

SEQ ID NO: 2514511 - RNA, 19 nt, Artificial Sequence
  Description of Artificial Sequence: Synthetic oligonucleotide
  Antisense strand to SEQ ID NO: 2514510
augucucuggagaaaggcc

SEQ ID NO: 2514512 - RNA, 19 nt, Artificial Sequence
  Description of Artificial Sequence: Synthetic oligonucleotide
  Sense strand starting at position 2509 of SEQ ID NO: 1888149
ggugaaagucaugguaucu

SEQ ID NO: 2514513 - RNA, 19 nt, Artificial Sequence
  Description of Artificial Sequence: Synthetic oligonucleotide
  Antisense strand to SEQ ID NO: 2514512
agauaccaugacuuucacc

SEQ ID NO: 2514514 - RNA, 19 nt, Artificial Sequence
  Description of Artificial Sequence: Synthetic oligonucleotide
  Sense strand starting at position 2775 of SEQ ID NO: 1888149
gcucuaagaguccaucuuu

SEQ ID NO: 2514515 - RNA, 19 nt, Artificial Sequence
  Description of Artificial Sequence: Synthetic oligonucleotide
  Antisense strand to SEQ ID NO: 2514514
aaagauggacucuuagagc

SEQ ID NO: 2514516 - RNA, 19 nt, Artificial Sequence
  Description of Artificial Sequence: Synthetic oligonucleotide
  Sense strand starting at position 2992 of SEQ ID NO: 1888149
gaugguauauggccaaaug

SEQ ID NO: 2514517 - RNA, 19 nt, Artificial Sequence
  Description of Artificial Sequence: Synthetic oligonucleotide
  Antisense strand to SEQ ID NO: 2514516
cauuuggccauauaccauc

SEQ ID NO: 2514518 - RNA, 19 nt, Artificial Sequence
  Description of Artificial Sequence: Synthetic oligonucleotide
  Sense strand starting at position 2993 of SEQ ID NO: 1888149
augguauauggccaaaugu

SEQ ID NO: 2514519 - RNA, 19 nt, Artificial Sequence
  Description of Artificial Sequence: Synthetic oligonucleotide
  Antisense strand to SEQ ID NO: 2514518
acauuuggccauauaccau

SEQ ID NO: 2514520 - RNA, 19 nt, Artificial Sequence
  Description of Artificial Sequence: Synthetic oligonucleotide
  Sense strand starting at position 3003 of SEQ ID NO: 1888149
gccaaaugugaacauaauu

SEQ ID NO: 2514521 - RNA, 19 nt, Artificial Sequence
  Description of Artificial Sequence: Synthetic oligonucleotide
  Antisense strand to SEQ ID NO: 2514520
aauuauguucacauuuggc

SEQ ID NO: 2514522 - RNA, 19 nt, Artificial Sequence
  Description of Artificial Sequence: Synthetic oligonucleotide
  Sense strand starting at position 3351 of SEQ ID NO: 1888149
aggcucagccaauggaaau

SEQ ID NO: 2514523 - RNA, 19 nt, Artificial Sequence
  Description of Artificial Sequence: Synthetic oligonucleotide
  Antisense strand to SEQ ID NO: 2514522
auuuccauuggcugagccu

SEQ ID NO: 2514524 - RNA, 19 nt, Artificial Sequence
  Description of Artificial Sequence: Synthetic oligonucleotide
  Sense strand starting at position 3694 of SEQ ID NO: 1888149
guaguacaaggucauuaau

SEQ ID NO: 2514525 - RNA, 19 nt, Artificial Sequence
  Description of Artificial Sequence: Synthetic oligonucleotide
  Antisense strand to SEQ ID NO: 2514524
auuaaugaccuuguacuac

SEQ ID NO: 2514526 - RNA, 19 nt, Artificial Sequence
  Description of Artificial Sequence: Synthetic oligonucleotide
  Sense strand starting at position 3725 of SEQ ID NO: 1888149
auucuagaucauuagguuu

SEQ ID NO: 2514527 - RNA, 19 nt, Artificial Sequence
  Description of Artificial Sequence: Synthetic oligonucleotide
  Antisense strand to SEQ ID NO: 2514526
aaaccuaaugaucuagaau

SEQ ID NO: 2514528 - RNA, 19 nt, Artificial Sequence
  Description of Artificial Sequence: Synthetic oligonucleotide
  Sense strand starting at position 3728 of SEQ ID NO: 1888149
cuagaucauuagguuuaaa

SEQ ID NO: 2514529 - RNA, 19 nt, Artificial Sequence
  Description of Artificial Sequence: Synthetic oligonucleotide
  Antisense strand to SEQ ID NO: 2514528
uuuaaaccuaaugaucuag

SEQ ID NO: 2514530 - RNA, 19 nt, Artificial Sequence
  Description of Artificial Sequence: Synthetic oligonucleotide
  Sense strand starting at position 3808 of SEQ ID NO: 1888149
ucucuagaaauguguugag

SEQ ID NO: 2514531 - RNA, 19 nt, Artificial Sequence
  Description of Artificial Sequence: Synthetic oligonucleotide
  Antisense strand to SEQ ID NO: 2514530
cucaacacauuucuagaga

SEQ ID NO: 2514532 - RNA, 19 nt, Artificial Sequence
  Description of Artificial Sequence: Synthetic oligonucleotide
  Sense strand starting at position 3877 of SEQ ID NO: 1888149
accaguuugccaugagaag

SEQ ID NO: 2514533 - RNA, 19 nt, Artificial Sequence
  Description of Artificial Sequence: Synthetic oligonucleotide
  Antisense strand to SEQ ID NO: 2514532
cuucucauggcaaacuggu

SEQ ID NO: 2514534 - RNA, 19 nt, Artificial Sequence
  Description of Artificial Sequence: Synthetic oligonucleotide
  Sense strand starting at position 3884 of SEQ ID NO: 1888149
ugccaugagaagcaaugua

SEQ ID NO: 2514535 - RNA, 19 nt, Artificial Sequence
  Description of Artificial Sequence: Synthetic oligonucleotide
  Antisense strand to SEQ ID NO: 2514534
uacauugcuucucauggca

SEQ ID NO: 2514536 - RNA, 19 nt, Artificial Sequence
  Description of Artificial Sequence: Synthetic oligonucleotide
  Sense strand starting at position 16 of SEQ ID NO: 1888152
gggagugugucugagaaug

SEQ ID NO: 2514537 - RNA, 19 nt, Artificial Sequence
  Description of Artificial Sequence: Synthetic oligonucleotide
  Antisense strand to SEQ ID NO: 2514536
cauucucagacacacuccc

SEQ ID NO: 2514538 - RNA, 19 nt, Artificial Sequence
  Description of Artificial Sequence: Synthetic oligonucleotide
  Sense strand starting at position 305 of SEQ ID NO: 1888152
ggcauacucugcccaggaa

SEQ ID NO: 2514539 - RNA, 19 nt, Artificial Sequence
  Description of Artificial Sequence: Synthetic oligonucleotide
  Antisense strand to SEQ ID NO: 2514538
uuccugggcagaguaugcc

SEQ ID NO: 2514540 - RNA, 19 nt, Artificial Sequence
  Description of Artificial Sequence: Synthetic oligonucleotide
  Sense strand starting at position 393 of SEQ ID NO: 1888152
cuuagugcuaguggaucaa

SEQ ID NO: 2514541 - RNA, 19 nt, Artificial Sequence
  Description of Artificial Sequence: Synthetic oligonucleotide
  Antisense strand to SEQ ID NO: 2514540
uugauccacuagcacuaag

SEQ ID NO: 2514542 - RNA, 19 nt, Artificial Sequence
  Description of Artificial Sequence: Synthetic oligonucleotide
  Sense strand starting at position 510 of SEQ ID NO: 1888152
aguggaaaccugugucaau

SEQ ID NO: 2514543 - RNA, 19 nt, Artificial Sequence
  Description of Artificial Sequence: Synthetic oligonucleotide
  Antisense strand to SEQ ID NO: 2514542
auugacacagguuuccacu

SEQ ID NO: 2514544 - RNA, 19 nt, Artificial Sequence
  Description of Artificial Sequence: Synthetic oligonucleotide
  Sense strand starting at position 511 of SEQ ID NO: 1888152
guggaaaccugugucaaug

SEQ ID NO: 2514545 - RNA, 19 nt, Artificial Sequence
  Description of Artificial Sequence: Synthetic oligonucleotide
  Antisense strand to SEQ ID NO: 2514544
cauugacacagguuuccac

SEQ ID NO: 2514546 - RNA, 19 nt, Artificial Sequence
  Description of Artificial Sequence: Synthetic oligonucleotide
  Sense strand starting at position 624 of SEQ ID NO: 1888152
gggacugcuuugcagagaa

SEQ ID NO: 2514547 - RNA, 19 nt, Artificial Sequence
  Description of Artificial Sequence: Synthetic oligonucleotide
  Antisense strand to SEQ ID NO: 2514546
uucucugcaaagcaguccc

SEQ ID NO: 2514548 - RNA, 19 nt, Artificial Sequence
  Description of Artificial Sequence: Synthetic oligonucleotide
  Sense strand starting at position 626 of SEQ ID NO: 1888152
gacugcuuugcagagaauc

SEQ ID NO: 2514549 - RNA, 19 nt, Artificial Sequence
  Description of Artificial Sequence: Synthetic oligonucleotide
  Antisense strand to SEQ ID NO: 2514548
gauucucugcaaagcaguc

SEQ ID NO: 2514550 - RNA, 19 nt, Artificial Sequence
  Description of Artificial Sequence: Synthetic oligonucleotide
  Sense strand starting at position 716 of SEQ ID NO: 1888152
ugcuaauacccucaguugu

SEQ ID NO: 2514551 - RNA, 19 nt, Artificial Sequence
  Description of Artificial Sequence: Synthetic oligonucleotide
  Antisense strand to SEQ ID NO: 2514550
acaacugaggguauuagca

SEQ ID NO: 2514552 - RNA, 19 nt, Artificial Sequence
  Description of Artificial Sequence: Synthetic oligonucleotide
  Sense strand starting at position 735 of SEQ ID NO: 1888152
ugggaauguuggguuacuu

SEQ ID NO: 2514553 - RNA, 19 nt, Artificial Sequence
  Description of Artificial Sequence: Synthetic oligonucleotide
  Antisense strand to SEQ ID NO: 2514552
aaguaacccaacauuccca

SEQ ID NO: 2514554 - RNA, 19 nt, Artificial Sequence
  Description of Artificial Sequence: Synthetic oligonucleotide
  Sense strand starting at position 745 of SEQ ID NO: 1888152
ggguuacuuguggguucca

SEQ ID NO: 2514555 - RNA, 19 nt, Artificial Sequence
  Description of Artificial Sequence: Synthetic oligonucleotide
  Antisense strand to SEQ ID NO: 2514554
uggaacccacaaguaaccc

SEQ ID NO: 2514556 - RNA, 19 nt, Artificial Sequence
  Description of Artificial Sequence: Synthetic oligonucleotide
  Sense strand starting at position 746 of SEQ ID NO: 1888152
gguuacuuguggguuccau

SEQ ID NO: 2514557 - RNA, 19 nt, Artificial Sequence
  Description of Artificial Sequence: Synthetic oligonucleotide
  Antisense strand to SEQ ID NO: 2514556
auggaacccacaaguaacc

SEQ ID NO: 2514558 - RNA, 19 nt, Artificial Sequence
  Description of Artificial Sequence: Synthetic oligonucleotide
  Sense strand starting at position 1354 of SEQ ID NO: 1888152
gguggugggucauuugguu

SEQ ID NO: 2514559 - RNA, 19 nt, Artificial Sequence
  Description of Artificial Sequence: Synthetic oligonucleotide
  Antisense strand to SEQ ID NO: 2514558
aaccaaaugacccaccacc

SEQ ID NO: 2514560 - RNA, 19 nt, Artificial Sequence
  Description of Artificial Sequence: Synthetic oligonucleotide
  Sense strand starting at position 1378 of SEQ ID NO: 1888152
ucgcgugaccucagugagu

SEQ ID NO: 2514561 - RNA, 19 nt, Artificial Sequence
  Description of Artificial Sequence: Synthetic oligonucleotide
  Antisense strand to SEQ ID NO: 2514560
acucacugaggucacgcga

SEQ ID NO: 2514562 - RNA, 19 nt, Artificial Sequence
  Description of Artificial Sequence: Synthetic oligonucleotide
  Sense strand starting at position 1380 of SEQ ID NO: 1888152
gcgugaccucagugagugu

SEQ ID NO: 2514563 - RNA, 19 nt, Artificial Sequence
  Description of Artificial Sequence: Synthetic oligonucleotide
  Antisense strand to SEQ ID NO: 2514562
acacucacugaggucacgc

SEQ ID NO: 2514564 - RNA, 19 nt, Artificial Sequence
  Description of Artificial Sequence: Synthetic oligonucleotide
  Sense strand starting at position 1822 of SEQ ID NO: 1888152
gcgucuuccggcuccagua

SEQ ID NO: 2514565 - RNA, 19 nt, Artificial Sequence
  Description of Artificial Sequence: Synthetic oligonucleotide
  Antisense strand to SEQ ID NO: 2514564
uacuggagccggaagacgc

SEQ ID NO: 2514566 - RNA, 19 nt, Artificial Sequence
  Description of Artificial Sequence: Synthetic oligonucleotide
  Sense strand starting at position 1832 of SEQ ID NO: 1888152
gcuccaguauccucgggaa

SEQ ID NO: 2514567 - RNA, 19 nt, Artificial Sequence
  Description of Artificial Sequence: Synthetic oligonucleotide
  Antisense strand to SEQ ID NO: 2514566
uucccgaggauacuggagc

SEQ ID NO: 2514568 - RNA, 19 nt, Artificial Sequence
  Description of Artificial Sequence: Synthetic oligonucleotide
  Sense strand starting at position 1925 of SEQ ID NO: 1888152
gccuuuguuuggcucucaa

SEQ ID NO: 2514569 - RNA, 19 nt, Artificial Sequence
  Description of Artificial Sequence: Synthetic oligonucleotide
  Antisense strand to SEQ ID NO: 2514568
uugagagccaaacaaaggc

SEQ ID NO: 2514570 - RNA, 19 nt, Artificial Sequence
  Description of Artificial Sequence: Synthetic oligonucleotide
  Sense strand starting at position 2091 of SEQ ID NO: 1888152
ugccguuagagucgguaga

SEQ ID NO: 2514571 - RNA, 19 nt, Artificial Sequence
  Description of Artificial Sequence: Synthetic oligonucleotide
  Antisense strand to SEQ ID NO: 2514570
ucuaccgacucuaacggca

SEQ ID NO: 2514572 - RNA, 19 nt, Artificial Sequence
  Description of Artificial Sequence: Synthetic oligonucleotide
  Sense strand starting at position 2092 of SEQ ID NO: 1888152
gccguuagagucgguagau

SEQ ID NO: 2514573 - RNA, 19 nt, Artificial Sequence
  Description of Artificial Sequence: Synthetic oligonucleotide
  Antisense strand to SEQ ID NO: 2514572
aucuaccgacucuaacggc

SEQ ID NO: 2514574 - RNA, 19 nt, Artificial Sequence
  Description of Artificial Sequence: Synthetic oligonucleotide
  Sense strand starting at position 2093 of SEQ ID NO: 1888152
ccguuagagucgguagauu

SEQ ID NO: 2514575 - RNA, 19 nt, Artificial Sequence
  Description of Artificial Sequence: Synthetic oligonucleotide
  Antisense strand to SEQ ID NO: 2514574
aaucuaccgacucuaacgg

SEQ ID NO: 2514576 - RNA, 19 nt, Artificial Sequence
  Description of Artificial Sequence: Synthetic oligonucleotide
  Sense strand starting at position 2104 of SEQ ID NO: 1888152
gguagauuacagcgaagcu

SEQ ID NO: 2514577 - RNA, 19 nt, Artificial Sequence
  Description of Artificial Sequence: Synthetic oligonucleotide
  Antisense strand to SEQ ID NO: 2514576
agcuucgcuguaaucuacc

SEQ ID NO: 2514578 - RNA, 19 nt, Artificial Sequence
  Description of Artificial Sequence: Synthetic oligonucleotide
  Sense strand starting at position 2375 of SEQ ID NO: 1888152
aaauguggauaaugacaga

SEQ ID NO: 2514579 - RNA, 19 nt, Artificial Sequence
  Description of Artificial Sequence: Synthetic oligonucleotide
  Antisense strand to SEQ ID NO: 2514578
ucugucauuauccacauuu

SEQ ID NO: 2514580 - RNA, 19 nt, Artificial Sequence
  Description of Artificial Sequence: Synthetic oligonucleotide
  Sense strand starting at position 2983 of SEQ ID NO: 1888152
aggcuugagugguuccuga

SEQ ID NO: 2514581 - RNA, 19 nt, Artificial Sequence
  Description of Artificial Sequence: Synthetic oligonucleotide
  Antisense strand to SEQ ID NO: 2514580
ucaggaaccacucaagccu

SEQ ID NO: 2514582 - RNA, 19 nt, Artificial Sequence
  Description of Artificial Sequence: Synthetic oligonucleotide
  Sense strand starting at position 3079 of SEQ ID NO: 1888152
cuaauuaaauugucugguu

SEQ ID NO: 2514583 - RNA, 19 nt, Artificial Sequence
  Description of Artificial Sequence: Synthetic oligonucleotide
  Antisense strand to SEQ ID NO: 2514582
aaccagacaauuuaauuag

SEQ ID NO: 2514584 - RNA, 19 nt, Artificial Sequence
  Description of Artificial Sequence: Synthetic oligonucleotide
  Sense strand starting at position 3095 of SEQ ID NO: 1888152
guuuaauccucuccuugag

SEQ ID NO: 2514585 - RNA, 19 nt, Artificial Sequence
  Description of Artificial Sequence: Synthetic oligonucleotide
  Antisense strand to SEQ ID NO: 2514584
cucaaggagaggauuaaac

SEQ ID NO: 2514586 - RNA, 19 nt, Artificial Sequence
  Description of Artificial Sequence: Synthetic oligonucleotide
  Sense strand starting at position 3295 of SEQ ID NO: 1888152
guuggaaugucuucuaagc

SEQ ID NO: 2514587 - RNA, 19 nt, Artificial Sequence
  Description of Artificial Sequence: Synthetic oligonucleotide
  Antisense strand to SEQ ID NO: 2514586
gcuuagaagacauuccaac

SEQ ID NO: 2514588 - RNA, 19 nt, Artificial Sequence
  Description of Artificial Sequence: Synthetic oligonucleotide
  Sense strand starting at position 3326 of SEQ ID NO: 1888152
ugcucaagugugcaacuau

SEQ ID NO: 2514589 - RNA, 19 nt, Artificial Sequence
  Description of Artificial Sequence: Synthetic oligonucleotide
  Antisense strand to SEQ ID NO: 2514588
auaguugcacacuugagca

SEQ ID NO: 2514590 - RNA, 19 nt, Artificial Sequence
  Description of Artificial Sequence: Synthetic oligonucleotide
  Sense strand starting at position 3576 of SEQ ID NO: 1888152
ccuuaaaugggcuguguga

SEQ ID NO: 2514591 - RNA, 19 nt, Artificial Sequence
  Description of Artificial Sequence: Synthetic oligonucleotide
  Antisense strand to SEQ ID NO: 2514590
ucacacagcccauuuaagg

SEQ ID NO: 2514592 - RNA, 19 nt, Artificial Sequence
  Description of Artificial Sequence: Synthetic oligonucleotide
  Sense strand starting at position 3583 of SEQ ID NO: 1888152
ugggcugugugacuaaauu

SEQ ID NO: 2514593 - RNA, 19 nt, Artificial Sequence
  Description of Artificial Sequence: Synthetic oligonucleotide
  Antisense strand to SEQ ID NO: 2514592
aauuuagucacacagccca

SEQ ID NO: 2514594 - RNA, 19 nt, Artificial Sequence
  Description of Artificial Sequence: Synthetic oligonucleotide
  Sense strand starting at position 3629 of SEQ ID NO: 1888152
cgcuaauugccuuggcuua

SEQ ID NO: 2514595 - RNA, 19 nt, Artificial Sequence
  Description of Artificial Sequence: Synthetic oligonucleotide
  Antisense strand to SEQ ID NO: 2514594
uaagccaaggcaauuagcg

SEQ ID NO: 2514596 - RNA, 19 nt, Artificial Sequence
  Description of Artificial Sequence: Synthetic oligonucleotide
  Sense strand starting at position 3630 of SEQ ID NO: 1888152
gcuaauugccuuggcuuau

SEQ ID NO: 2514597 - RNA, 19 nt, Artificial Sequence
  Description of Artificial Sequence: Synthetic oligonucleotide
  Antisense strand to SEQ ID NO: 2514596
auaagccaaggcaauuagc

SEQ ID NO: 2514598 - RNA, 19 nt, Artificial Sequence
  Description of Artificial Sequence: Synthetic oligonucleotide
  Sense strand starting at position 3642 of SEQ ID NO: 1888152
ggcuuaugguucuuacccu

SEQ ID NO: 2514599 - RNA, 19 nt, Artificial Sequence
  Description of Artificial Sequence: Synthetic oligonucleotide
  Antisense strand to SEQ ID NO: 2514598
aggguaagaaccauaagcc

SEQ ID NO: 2514600 - RNA, 19 nt, Artificial Sequence
  Description of Artificial Sequence: Synthetic oligonucleotide
  Sense strand starting at position 3650 of SEQ ID NO: 1888152
guucuuacccuccacgaga

SEQ ID NO: 2514601 - RNA, 19 nt, Artificial Sequence
  Description of Artificial Sequence: Synthetic oligonucleotide
  Antisense strand to SEQ ID NO: 2514600
ucucguggaggguaagaac

SEQ ID NO: 2514602 - RNA, 19 nt, Artificial Sequence
  Description of Artificial Sequence: Synthetic oligonucleotide
  Sense strand starting at position 3664 of SEQ ID NO: 1888152
cgagacagauuggcucauu

SEQ ID NO: 2514603 - RNA, 19 nt, Artificial Sequence
  Description of Artificial Sequence: Synthetic oligonucleotide
  Antisense strand to SEQ ID NO: 2514602
aaugagccaaucugucucg

SEQ ID NO: 2514604 - RNA, 19 nt, Artificial Sequence
  Description of Artificial Sequence: Synthetic oligonucleotide
  Sense strand starting at position 3748 of SEQ ID NO: 1888152
cugcuuggugaaugcuaaa

SEQ ID NO: 2514605 - RNA, 19 nt, Artificial Sequence
  Description of Artificial Sequence: Synthetic oligonucleotide
  Antisense strand to SEQ ID NO: 2514604
uuuagcauucaccaagcag

SEQ ID NO: 2514606 - RNA, 19 nt, Artificial Sequence
  Description of Artificial Sequence: Synthetic oligonucleotide
  Sense strand starting at position 3759 of SEQ ID NO: 1888152
augcuaaagcuuugucauu

SEQ ID NO: 2514607 - RNA, 19 nt, Artificial Sequence
  Description of Artificial Sequence: Synthetic oligonucleotide
  Antisense strand to SEQ ID NO: 2514606
aaugacaaagcuuuagcau

SEQ ID NO: 2514608 - RNA, 19 nt, Artificial Sequence
  Description of Artificial Sequence: Synthetic oligonucleotide
  Sense strand starting at position 3760 of SEQ ID NO: 1888152
ugcuaaagcuuugucauuu

SEQ ID NO: 2514609 - RNA, 19 nt, Artificial Sequence
  Description of Artificial Sequence: Synthetic oligonucleotide
  Antisense strand to SEQ ID NO: 2514608
aaaugacaaagcuuuagca

SEQ ID NO: 2514610 - RNA, 19 nt, Artificial Sequence
  Description of Artificial Sequence: Synthetic oligonucleotide
  Sense strand starting at position 3761 of SEQ ID NO: 1888152
gcuaaagcuuugucauuug

SEQ ID NO: 2514611 - RNA, 19 nt, Artificial Sequence
  Description of Artificial Sequence: Synthetic oligonucleotide
  Antisense strand to SEQ ID NO: 2514610
caaaugacaaagcuuuagc

SEQ ID NO: 2514612 - RNA, 19 nt, Artificial Sequence
  Description of Artificial Sequence: Synthetic oligonucleotide
  Sense strand starting at position 3981 of SEQ ID NO: 1888152
aucuccaaaguuuguauaa

SEQ ID NO: 2514613 - RNA, 19 nt, Artificial Sequence
  Description of Artificial Sequence: Synthetic oligonucleotide
  Antisense strand to SEQ ID NO: 2514612
uuauacaaacuuuggagau

SEQ ID NO: 2514614 - RNA, 19 nt, Artificial Sequence
  Description of Artificial Sequence: Synthetic oligonucleotide
  Sense strand starting at position 3982 of SEQ ID NO: 1888152
ucuccaaaguuuguauaaa

SEQ ID NO: 2514615 - RNA, 19 nt, Artificial Sequence
  Description of Artificial Sequence: Synthetic oligonucleotide
  Antisense strand to SEQ ID NO: 2514614
uuuauacaaacuuuggaga

SEQ ID NO: 2514616 - RNA, 19 nt, Artificial Sequence
  Description of Artificial Sequence: Synthetic oligonucleotide
  Sense strand starting at position 81 of SEQ ID NO: 1888151
gggagugugucugagaaug

SEQ ID NO: 2514617 - RNA, 19 nt, Artificial Sequence
  Description of Artificial Sequence: Synthetic oligonucleotide
  Antisense strand to SEQ ID NO: 2514616
cauucucagacacacuccc

SEQ ID NO: 2514618 - RNA, 19 nt, Artificial Sequence
  Description of Artificial Sequence: Synthetic oligonucleotide
  Sense strand starting at position 251 of SEQ ID NO: 1888151
gggcaaagcucucagaauc

SEQ ID NO: 2514619 - RNA, 19 nt, Artificial Sequence
  Description of Artificial Sequence: Synthetic oligonucleotide
  Antisense strand to SEQ ID NO: 2514618
gauucugagagcuuugccc

SEQ ID NO: 2514620 - RNA, 19 nt, Artificial Sequence
  Description of Artificial Sequence: Synthetic oligonucleotide
  Sense strand starting at position 370 of SEQ ID NO: 1888151
ggcauacucugcccaggaa

SEQ ID NO: 2514621 - RNA, 19 nt, Artificial Sequence
  Description of Artificial Sequence: Synthetic oligonucleotide
  Antisense strand to SEQ ID NO: 2514620
uuccugggcagaguaugcc

SEQ ID NO: 2514622 - RNA, 19 nt, Artificial Sequence
  Description of Artificial Sequence: Synthetic oligonucleotide
  Sense strand starting at position 458 of SEQ ID NO: 1888151
cuuagugcuaguggaucaa

SEQ ID NO: 2514623 - RNA, 19 nt, Artificial Sequence
  Description of Artificial Sequence: Synthetic oligonucleotide
  Antisense strand to SEQ ID NO: 2514622
uugauccacuagcacuaag

SEQ ID NO: 2514624 - RNA, 19 nt, Artificial Sequence
  Description of Artificial Sequence: Synthetic oligonucleotide
  Sense strand starting at position 575 of SEQ ID NO: 1888151
aguggaaaccugugucaau

SEQ ID NO: 2514625 - RNA, 19 nt, Artificial Sequence
  Description of Artificial Sequence: Synthetic oligonucleotide
  Antisense strand to SEQ ID NO: 2514624
auugacacagguuuccacu

SEQ ID NO: 2514626 - RNA, 19 nt, Artificial Sequence
  Description of Artificial Sequence: Synthetic oligonucleotide
  Sense strand starting at position 576 of SEQ ID NO: 1888151
guggaaaccugugucaaug

SEQ ID NO: 2514627 - RNA, 19 nt, Artificial Sequence
  Description of Artificial Sequence: Synthetic oligonucleotide
  Antisense strand to SEQ ID NO: 2514626
cauugacacagguuuccac

SEQ ID NO: 2514628 - RNA, 19 nt, Artificial Sequence
  Description of Artificial Sequence: Synthetic oligonucleotide
  Sense strand starting at position 689 of SEQ ID NO: 1888151
gggacugcuuugcagagaa

SEQ ID NO: 2514629 - RNA, 19 nt, Artificial Sequence
  Description of Artificial Sequence: Synthetic oligonucleotide
  Antisense strand to SEQ ID NO: 2514628
uucucugcaaagcaguccc

SEQ ID NO: 2514630 - RNA, 19 nt, Artificial Sequence
  Description of Artificial Sequence: Synthetic oligonucleotide
  Sense strand starting at position 691 of SEQ ID NO: 1888151
gacugcuuugcagagaauc

SEQ ID NO: 2514631 - RNA, 19 nt, Artificial Sequence
  Description of Artificial Sequence: Synthetic oligonucleotide
  Antisense strand to SEQ ID NO: 2514630
gauucucugcaaagcaguc

SEQ ID NO: 2514632 - RNA, 19 nt, Artificial Sequence
  Description of Artificial Sequence: Synthetic oligonucleotide
  Sense strand starting at position 781 of SEQ ID NO: 1888151
ugcuaauacccucaguugu

SEQ ID NO: 2514633 - RNA, 19 nt, Artificial Sequence
  Description of Artificial Sequence: Synthetic oligonucleotide
  Antisense strand to SEQ ID NO: 2514632
acaacugaggguauuagca

SEQ ID NO: 2514634 - RNA, 19 nt, Artificial Sequence
  Description of Artificial Sequence: Synthetic oligonucleotide
  Sense strand starting at position 800 of SEQ ID NO: 1888151
ugggaauguuggguuacuu

SEQ ID NO: 2514635 - RNA, 19 nt, Artificial Sequence
  Description of Artificial Sequence: Synthetic oligonucleotide
  Antisense strand to SEQ ID NO: 2514634
aaguaacccaacauuccca

SEQ ID NO: 2514636 - RNA, 19 nt, Artificial Sequence
  Description of Artificial Sequence: Synthetic oligonucleotide
  Sense strand starting at position 810 of SEQ ID NO: 1888151
ggguuacuuguggguucca

SEQ ID NO: 2514637 - RNA, 19 nt, Artificial Sequence
  Description of Artificial Sequence: Synthetic oligonucleotide
  Antisense strand to SEQ ID NO: 2514636
uggaacccacaaguaaccc

SEQ ID NO: 2514638 - RNA, 19 nt, Artificial Sequence
  Description of Artificial Sequence: Synthetic oligonucleotide
  Sense strand starting at position 811 of SEQ ID NO: 1888151
gguuacuuguggguuccau

SEQ ID NO: 2514639 - RNA, 19 nt, Artificial Sequence
  Description of Artificial Sequence: Synthetic oligonucleotide
  Antisense strand to SEQ ID NO: 2514638
auggaacccacaaguaacc

SEQ ID NO: 2514640 - RNA, 19 nt, Artificial Sequence
  Description of Artificial Sequence: Synthetic oligonucleotide
  Sense strand starting at position 1419 of SEQ ID NO: 1888151
gguggugggucauuugguu

SEQ ID NO: 2514641 - RNA, 19 nt, Artificial Sequence
  Description of Artificial Sequence: Synthetic oligonucleotide
  Antisense strand to SEQ ID NO: 2514640
aaccaaaugacccaccacc

SEQ ID NO: 2514642 - RNA, 19 nt, Artificial Sequence
  Description of Artificial Sequence: Synthetic oligonucleotide
  Sense strand starting at position 1443 of SEQ ID NO: 1888151
ucgcgugaccucagugagu

SEQ ID NO: 2514643 - RNA, 19 nt, Artificial Sequence
  Description of Artificial Sequence: Synthetic oligonucleotide
  Antisense strand to SEQ ID NO: 2514642
acucacugaggucacgcga

SEQ ID NO: 2514644 - RNA, 19 nt, Artificial Sequence
  Description of Artificial Sequence: Synthetic oligonucleotide
  Sense strand starting at position 1445 of SEQ ID NO: 1888151
gcgugaccucagugagugu

SEQ ID NO: 2514645 - RNA, 19 nt, Artificial Sequence
  Description of Artificial Sequence: Synthetic oligonucleotide
  Antisense strand to SEQ ID NO: 2514644
acacucacugaggucacgc

SEQ ID NO: 2514646 - RNA, 19 nt, Artificial Sequence
  Description of Artificial Sequence: Synthetic oligonucleotide
  Sense strand starting at position 1887 of SEQ ID NO: 1888151
gcgucuuccggcuccagua

SEQ ID NO: 2514647 - RNA, 19 nt, Artificial Sequence
  Description of Artificial Sequence: Synthetic oligonucleotide
  Antisense strand to SEQ ID NO: 2514646
uacuggagccggaagacgc

SEQ ID NO: 2514648 - RNA, 19 nt, Artificial Sequence
  Description of Artificial Sequence: Synthetic oligonucleotide
  Sense strand starting at position 1897 of SEQ ID NO: 1888151
gcuccaguauccucgggaa

SEQ ID NO: 2514649 - RNA, 19 nt, Artificial Sequence
  Description of Artificial Sequence: Synthetic oligonucleotide
  Antisense strand to SEQ ID NO: 2514648
uucccgaggauacuggagc

SEQ ID NO: 2514650 - RNA, 19 nt, Artificial Sequence
  Description of Artificial Sequence: Synthetic oligonucleotide
  Sense strand starting at position 1990 of SEQ ID NO: 1888151
gccuuuguuuggcucucaa

SEQ ID NO: 2514651 - RNA, 19 nt, Artificial Sequence
  Description of Artificial Sequence: Synthetic oligonucleotide
  Antisense strand to SEQ ID NO: 2514650
uugagagccaaacaaaggc

SEQ ID NO: 2514652 - RNA, 19 nt, Artificial Sequence
  Description of Artificial Sequence: Synthetic oligonucleotide
  Sense strand starting at position 2156 of SEQ ID NO: 1888151
ugccguuagagucgguaga

SEQ ID NO: 2514653 - RNA, 19 nt, Artificial Sequence
  Description of Artificial Sequence: Synthetic oligonucleotide
  Antisense strand to SEQ ID NO: 2514652
ucuaccgacucuaacggca

SEQ ID NO: 2514654 - RNA, 19 nt, Artificial Sequence
  Description of Artificial Sequence: Synthetic oligonucleotide
  Sense strand starting at position 2157 of SEQ ID NO: 1888151
gccguuagagucgguagau

SEQ ID NO: 2514655 - RNA, 19 nt, Artificial Sequence
  Description of Artificial Sequence: Synthetic oligonucleotide
  Antisense strand to SEQ ID NO: 2514654
aucuaccgacucuaacggc

SEQ ID NO: 2514656 - RNA, 19 nt, Artificial Sequence
  Description of Artificial Sequence: Synthetic oligonucleotide
  Sense strand starting at position 2158 of SEQ ID NO: 1888151
ccguuagagucgguagauu

SEQ ID NO: 2514657 - RNA, 19 nt, Artificial Sequence
  Description of Artificial Sequence: Synthetic oligonucleotide
  Antisense strand to SEQ ID NO: 2514656
aaucuaccgacucuaacgg

SEQ ID NO: 2514658 - RNA, 19 nt, Artificial Sequence
  Description of Artificial Sequence: Synthetic oligonucleotide
  Sense strand starting at position 2169 of SEQ ID NO: 1888151
gguagauuacagcgaagcu

SEQ ID NO: 2514659 - RNA, 19 nt, Artificial Sequence
  Description of Artificial Sequence: Synthetic oligonucleotide
  Antisense strand to SEQ ID NO: 2514658
agcuucgcuguaaucuacc

SEQ ID NO: 2514660 - RNA, 19 nt, Artificial Sequence
  Description of Artificial Sequence: Synthetic oligonucleotide
  Sense strand starting at position 2440 of SEQ ID NO: 1888151
aaauguggauaaugacaga

SEQ ID NO: 2514661 - RNA, 19 nt, Artificial Sequence
  Description of Artificial Sequence: Synthetic oligonucleotide
  Antisense strand to SEQ ID NO: 2514660
ucugucauuauccacauuu

SEQ ID NO: 2514662 - RNA, 19 nt, Artificial Sequence
  Description of Artificial Sequence: Synthetic oligonucleotide
  Sense strand starting at position 3048 of SEQ ID NO: 1888151
aggcuugagugguuccuga

SEQ ID NO: 2514663 - RNA, 19 nt, Artificial Sequence
  Description of Artificial Sequence: Synthetic oligonucleotide
  Antisense strand to SEQ ID NO: 2514662
ucaggaaccacucaagccu

SEQ ID NO: 2514664 - RNA, 19 nt, Artificial Sequence
  Description of Artificial Sequence: Synthetic oligonucleotide
  Sense strand starting at position 3144 of SEQ ID NO: 1888151
cuaauuaaauugucugguu

SEQ ID NO: 2514665 - RNA, 19 nt, Artificial Sequence
  Description of Artificial Sequence: Synthetic oligonucleotide
  Antisense strand to SEQ ID NO: 2514664
aaccagacaauuuaauuag

SEQ ID NO: 2514666 - RNA, 19 nt, Artificial Sequence
  Description of Artificial Sequence: Synthetic oligonucleotide
  Sense strand starting at position 3160 of SEQ ID NO: 1888151
guuuaauccucuccuugag

SEQ ID NO: 2514667 - RNA, 19 nt, Artificial Sequence
  Description of Artificial Sequence: Synthetic oligonucleotide
  Antisense strand to SEQ ID NO: 2514666
cucaaggagaggauuaaac

SEQ ID NO: 2514668 - RNA, 19 nt, Artificial Sequence
  Description of Artificial Sequence: Synthetic oligonucleotide
  Sense strand starting at position 3360 of SEQ ID NO: 1888151
guuggaaugucuucuaagc

SEQ ID NO: 2514669 - RNA, 19 nt, Artificial Sequence
  Description of Artificial Sequence: Synthetic oligonucleotide
  Antisense strand to SEQ ID NO: 2514668
gcuuagaagacauuccaac

SEQ ID NO: 2514670 - RNA, 19 nt, Artificial Sequence
  Description of Artificial Sequence: Synthetic oligonucleotide
  Sense strand starting at position 3362 of SEQ ID NO: 1888151
uggaaugucuucuaagcag

SEQ ID NO: 2514671 - RNA, 19 nt, Artificial Sequence
  Description of Artificial Sequence: Synthetic oligonucleotide
  Antisense strand to SEQ ID NO: 2514670
cugcuuagaagacauucca

SEQ ID NO: 2514672 - RNA, 19 nt, Artificial Sequence
  Description of Artificial Sequence: Synthetic oligonucleotide
  Sense strand starting at position 3391 of SEQ ID NO: 1888151
ugcucaagugugcaacuau

SEQ ID NO: 2514673 - RNA, 19 nt, Artificial Sequence
  Description of Artificial Sequence: Synthetic oligonucleotide
  Antisense strand to SEQ ID NO: 2514672
auaguugcacacuugagca

SEQ ID NO: 2514674 - RNA, 19 nt, Artificial Sequence
  Description of Artificial Sequence: Synthetic oligonucleotide
  Sense strand starting at position 3641 of SEQ ID NO: 1888151
ccuuaaaugggcuguguga

SEQ ID NO: 2514675 - RNA, 19 nt, Artificial Sequence
  Description of Artificial Sequence: Synthetic oligonucleotide
  Antisense strand to SEQ ID NO: 2514674
ucacacagcccauuuaagg

SEQ ID NO: 2514676 - RNA, 19 nt, Artificial Sequence
  Description of Artificial Sequence: Synthetic oligonucleotide
  Sense strand starting at position 3648 of SEQ ID NO: 1888151
ugggcugugugacuaaauu

SEQ ID NO: 2514677 - RNA, 19 nt, Artificial Sequence
  Description of Artificial Sequence: Synthetic oligonucleotide
  Antisense strand to SEQ ID NO: 2514676
aauuuagucacacagccca

SEQ ID NO: 2514678 - RNA, 19 nt, Artificial Sequence
  Description of Artificial Sequence: Synthetic oligonucleotide
  Sense strand starting at position 3694 of SEQ ID NO: 1888151
cgcuaauugccuuggcuua

SEQ ID NO: 2514679 - RNA, 19 nt, Artificial Sequence
  Description of Artificial Sequence: Synthetic oligonucleotide
  Antisense strand to SEQ ID NO: 2514678
uaagccaaggcaauuagcg

SEQ ID NO: 2514680 - RNA, 19 nt, Artificial Sequence
  Description of Artificial Sequence: Synthetic oligonucleotide
  Sense strand starting at position 3695 of SEQ ID NO: 1888151
gcuaauugccuuggcuuau

SEQ ID NO: 2514681 - RNA, 19 nt, Artificial Sequence
  Description of Artificial Sequence: Synthetic oligonucleotide
  Antisense strand to SEQ ID NO: 2514680
auaagccaaggcaauuagc

SEQ ID NO: 2514682 - RNA, 19 nt, Artificial Sequence
  Description of Artificial Sequence: Synthetic oligonucleotide
  Sense strand starting at position 3707 of SEQ ID NO: 1888151
ggcuuaugguucuuacccu

SEQ ID NO: 2514683 - RNA, 19 nt, Artificial Sequence
  Description of Artificial Sequence: Synthetic oligonucleotide
  Antisense strand to SEQ ID NO: 2514682
aggguaagaaccauaagcc

SEQ ID NO: 2514684 - RNA, 19 nt, Artificial Sequence
  Description of Artificial Sequence: Synthetic oligonucleotide
  Sense strand starting at position 3715 of SEQ ID NO: 1888151
guucuuacccuccacgaga

SEQ ID NO: 2514685 - RNA, 19 nt, Artificial Sequence
  Description of Artificial Sequence: Synthetic oligonucleotide
  Antisense strand to SEQ ID NO: 2514684
ucucguggaggguaagaac

SEQ ID NO: 2514686 - RNA, 19 nt, Artificial Sequence
  Description of Artificial Sequence: Synthetic oligonucleotide
  Sense strand starting at position 3729 of SEQ ID NO: 1888151
cgagacagauuggcucauu

SEQ ID NO: 2514687 - RNA, 19 nt, Artificial Sequence
  Description of Artificial Sequence: Synthetic oligonucleotide
  Antisense strand to SEQ ID NO: 2514686
aaugagccaaucugucucg

SEQ ID NO: 2514688 - RNA, 19 nt, Artificial Sequence
  Description of Artificial Sequence: Synthetic oligonucleotide
  Sense strand starting at position 3813 of SEQ ID NO: 1888151
cugcuuggugaaugcuaaa

SEQ ID NO: 2514689 - RNA, 19 nt, Artificial Sequence
  Description of Artificial Sequence: Synthetic oligonucleotide
  Antisense strand to SEQ ID NO: 2514688
uuuagcauucaccaagcag

SEQ ID NO: 2514690 - RNA, 19 nt, Artificial Sequence
  Description of Artificial Sequence: Synthetic oligonucleotide
  Sense strand starting at position 3824 of SEQ ID NO: 1888151
augcuaaagcuuugucauu

SEQ ID NO: 2514691 - RNA, 19 nt, Artificial Sequence
  Description of Artificial Sequence: Synthetic oligonucleotide
  Antisense strand to SEQ ID NO: 2514690
aaugacaaagcuuuagcau

SEQ ID NO: 2514692 - RNA, 19 nt, Artificial Sequence
  Description of Artificial Sequence: Synthetic oligonucleotide
  Sense strand starting at position 3825 of SEQ ID NO: 1888151
ugcuaaagcuuugucauuu

SEQ ID NO: 2514693 - RNA, 19 nt, Artificial Sequence
  Description of Artificial Sequence: Synthetic oligonucleotide
  Antisense strand to SEQ ID NO: 2514692
aaaugacaaagcuuuagca

SEQ ID NO: 2514694 - RNA, 19 nt, Artificial Sequence
  Description of Artificial Sequence: Synthetic oligonucleotide
  Sense strand starting at position 3826 of SEQ ID NO: 1888151
gcuaaagcuuugucauuug

SEQ ID NO: 2514695 - RNA, 19 nt, Artificial Sequence
  Description of Artificial Sequence: Synthetic oligonucleotide
  Antisense strand to SEQ ID NO: 2514694
caaaugacaaagcuuuagc

SEQ ID NO: 2514696 - RNA, 19 nt, Artificial Sequence
  Description of Artificial Sequence: Synthetic oligonucleotide
  Sense strand starting at position 4 of SEQ ID NO: 1888150
ggaucaaugucacauagcu

SEQ ID NO: 2514697 - RNA, 19 nt, Artificial Sequence
  Description of Artificial Sequence: Synthetic oligonucleotide
  Antisense strand to SEQ ID NO: 2514696
agcuaugugacauugaucc

SEQ ID NO: 2514698 - RNA, 19 nt, Artificial Sequence
  Description of Artificial Sequence: Synthetic oligonucleotide
  Sense strand starting at position 12 of SEQ ID NO: 1888150
gucacauagcuauauaagu

SEQ ID NO: 2514699 - RNA, 19 nt, Artificial Sequence
  Description of Artificial Sequence: Synthetic oligonucleotide
  Antisense strand to SEQ ID NO: 2514698
acuuauauagcuaugugac

SEQ ID NO: 2514700 - RNA, 19 nt, Artificial Sequence
  Description of Artificial Sequence: Synthetic oligonucleotide
  Sense strand starting at position 25 of SEQ ID NO: 1888150
auaaguugcuaacauuuga

SEQ ID NO: 2514701 - RNA, 19 nt, Artificial Sequence
  Description of Artificial Sequence: Synthetic oligonucleotide
  Antisense strand to SEQ ID NO: 2514700
ucaaauguuagcaacuuau

SEQ ID NO: 2514702 - RNA, 19 nt, Artificial Sequence
  Description of Artificial Sequence: Synthetic oligonucleotide
  Sense strand starting at position 30 of SEQ ID NO: 1888150
uugcuaacauuugaggaaa

SEQ ID NO: 2514703 - RNA, 19 nt, Artificial Sequence
  Description of Artificial Sequence: Synthetic oligonucleotide
  Antisense strand to SEQ ID NO: 2514702
uuuccucaaauguuagcaa

SEQ ID NO: 2514704 - RNA, 19 nt, Artificial Sequence
  Description of Artificial Sequence: Synthetic oligonucleotide
  Sense strand starting at position 32 of SEQ ID NO: 1888150
gcuaacauuugaggaaacu

SEQ ID NO: 2514705 - RNA, 19 nt, Artificial Sequence
  Description of Artificial Sequence: Synthetic oligonucleotide
  Antisense strand to SEQ ID NO: 2514704
aguuuccucaaauguuagc

SEQ ID NO: 2514706 - RNA, 19 nt, Artificial Sequence
  Description of Artificial Sequence: Synthetic oligonucleotide
  Sense strand starting at position 56 of SEQ ID NO: 1888150
aaggguauuugggaacuuu

SEQ ID NO: 2514707 - RNA, 19 nt, Artificial Sequence
  Description of Artificial Sequence: Synthetic oligonucleotide
  Antisense strand to SEQ ID NO: 2514706
aaaguucccaaauacccuu

SEQ ID NO: 2514708 - RNA, 19 nt, Artificial Sequence
  Description of Artificial Sequence: Synthetic oligonucleotide
  Sense strand starting at position 73 of SEQ ID NO: 1888150
uuguacuaugccugcaacu

SEQ ID NO: 2514709 - RNA, 19 nt, Artificial Sequence
  Description of Artificial Sequence: Synthetic oligonucleotide
  Antisense strand to SEQ ID NO: 2514708
aguugcaggcauaguacaa

SEQ ID NO: 2514710 - RNA, 19 nt, Artificial Sequence
  Description of Artificial Sequence: Synthetic oligonucleotide
  Sense strand starting at position 75 of SEQ ID NO: 1888150
guacuaugccugcaacuca

SEQ ID NO: 2514711 - RNA, 19 nt, Artificial Sequence
  Description of Artificial Sequence: Synthetic oligonucleotide
  Antisense strand to SEQ ID NO: 2514710
ugaguugcaggcauaguac

SEQ ID NO: 2514712 - RNA, 19 nt, Artificial Sequence
  Description of Artificial Sequence: Synthetic oligonucleotide
  Sense strand starting at position 184 of SEQ ID NO: 1888150
ggcugaaucuguuuccuuu

SEQ ID NO: 2514713 - RNA, 19 nt, Artificial Sequence
  Description of Artificial Sequence: Synthetic oligonucleotide
  Antisense strand to SEQ ID NO: 2514712
aaaggaaacagauucagcc

SEQ ID NO: 2514714 - RNA, 19 nt, Artificial Sequence
  Description of Artificial Sequence: Synthetic oligonucleotide
  Sense strand starting at position 209 of SEQ ID NO: 1888150
uuucgaugguacuuagaac

SEQ ID NO: 2514715 - RNA, 19 nt, Artificial Sequence
  Description of Artificial Sequence: Synthetic oligonucleotide
  Antisense strand to SEQ ID NO: 2514714
guucuaaguaccaucgaaa

SEQ ID NO: 2514716 - RNA, 19 nt, Artificial Sequence
  Description of Artificial Sequence: Synthetic oligonucleotide
  Sense strand starting at position 210 of SEQ ID NO: 1888150
uucgaugguacuuagaaca

SEQ ID NO: 2514717 - RNA, 19 nt, Artificial Sequence
  Description of Artificial Sequence: Synthetic oligonucleotide
  Antisense strand to SEQ ID NO: 2514716
uguucuaaguaccaucgaa

SEQ ID NO: 2514718 - RNA, 19 nt, Artificial Sequence
  Description of Artificial Sequence: Synthetic oligonucleotide
  Sense strand starting at position 438 of SEQ ID NO: 1888150
gccacuguccucgacaguu

SEQ ID NO: 2514719 - RNA, 19 nt, Artificial Sequence
  Description of Artificial Sequence: Synthetic oligonucleotide
  Antisense strand to SEQ ID NO: 2514718
aacugucgaggacaguggc

SEQ ID NO: 2514720 - RNA, 19 nt, Artificial Sequence
  Description of Artificial Sequence: Synthetic oligonucleotide
  Sense strand starting at position 813 of SEQ ID NO: 1888150
gggagugugucugagaaug

SEQ ID NO: 2514721 - RNA, 19 nt, Artificial Sequence
  Description of Artificial Sequence: Synthetic oligonucleotide
  Antisense strand to SEQ ID NO: 2514720
cauucucagacacacuccc

SEQ ID NO: 2514722 - RNA, 19 nt, Artificial Sequence
  Description of Artificial Sequence: Synthetic oligonucleotide
  Sense strand starting at position 983 of SEQ ID NO: 1888150
gggcaaagcucucagaauc

SEQ ID NO: 2514723 - RNA, 19 nt, Artificial Sequence
  Description of Artificial Sequence: Synthetic oligonucleotide
  Antisense strand to SEQ ID NO: 2514722
gauucugagagcuuugccc

SEQ ID NO: 2514724 - RNA, 19 nt, Artificial Sequence
  Description of Artificial Sequence: Synthetic oligonucleotide
  Sense strand starting at position 1102 of SEQ ID NO: 1888150
ggcauacucugcccaggaa

SEQ ID NO: 2514725 - RNA, 19 nt, Artificial Sequence
  Description of Artificial Sequence: Synthetic oligonucleotide
  Antisense strand to SEQ ID NO: 2514724
uuccugggcagaguaugcc

SEQ ID NO: 2514726 - RNA, 19 nt, Artificial Sequence
  Description of Artificial Sequence: Synthetic oligonucleotide
  Sense strand starting at position 1190 of SEQ ID NO: 1888150
cuuagugcuaguggaucaa

SEQ ID NO: 2514727 - RNA, 19 nt, Artificial Sequence
  Description of Artificial Sequence: Synthetic oligonucleotide
  Antisense strand to SEQ ID NO: 2514726
uugauccacuagcacuaag

SEQ ID NO: 2514728 - RNA, 19 nt, Artificial Sequence
  Description of Artificial Sequence: Synthetic oligonucleotide
  Sense strand starting at position 1307 of SEQ ID NO: 1888150
aguggaaaccugugucaau

SEQ ID NO: 2514729 - RNA, 19 nt, Artificial Sequence
  Description of Artificial Sequence: Synthetic oligonucleotide
  Antisense strand to SEQ ID NO: 2514728
auugacacagguuuccacu

SEQ ID NO: 2514730 - RNA, 19 nt, Artificial Sequence
  Description of Artificial Sequence: Synthetic oligonucleotide
  Sense strand starting at position 1308 of SEQ ID NO: 1888150
guggaaaccugugucaaug

SEQ ID NO: 2514731 - RNA, 19 nt, Artificial Sequence
  Description of Artificial Sequence: Synthetic oligonucleotide
  Antisense strand to SEQ ID NO: 2514730
cauugacacagguuuccac

SEQ ID NO: 2514732 - RNA, 19 nt, Artificial Sequence
  Description of Artificial Sequence: Synthetic oligonucleotide
  Sense strand starting at position 1421 of SEQ ID NO: 1888150
gggacugcuuugcagagaa

SEQ ID NO: 2514733 - RNA, 19 nt, Artificial Sequence
  Description of Artificial Sequence: Synthetic oligonucleotide
  Antisense strand to SEQ ID NO: 2514732
uucucugcaaagcaguccc

SEQ ID NO: 2514734 - RNA, 19 nt, Artificial Sequence
  Description of Artificial Sequence: Synthetic oligonucleotide
  Sense strand starting at position 1423 of SEQ ID NO: 1888150
gacugcuuugcagagaauc

SEQ ID NO: 2514735 - RNA, 19 nt, Artificial Sequence
  Description of Artificial Sequence: Synthetic oligonucleotide
  Antisense strand to SEQ ID NO: 2514734
gauucucugcaaagcaguc

SEQ ID NO: 2514736 - RNA, 19 nt, Artificial Sequence
  Description of Artificial Sequence: Synthetic oligonucleotide
  Sense strand starting at position 1513 of SEQ ID NO: 1888150
ugcuaauacccucaguugu

SEQ ID NO: 2514737 - RNA, 19 nt, Artificial Sequence
  Description of Artificial Sequence: Synthetic oligonucleotide
  Antisense strand to SEQ ID NO: 2514736
acaacugaggguauuagca

SEQ ID NO: 2514738 - RNA, 19 nt, Artificial Sequence
  Description of Artificial Sequence: Synthetic oligonucleotide
  Sense strand starting at position 1532 of SEQ ID NO: 1888150
ugggaauguuggguuacuu

SEQ ID NO: 2514739 - RNA, 19 nt, Artificial Sequence
  Description of Artificial Sequence: Synthetic oligonucleotide
  Antisense strand to SEQ ID NO: 2514738
aaguaacccaacauuccca

SEQ ID NO: 2514740 - RNA, 19 nt, Artificial Sequence
  Description of Artificial Sequence: Synthetic oligonucleotide
  Sense strand starting at position 1542 of SEQ ID NO: 1888150
ggguuacuuguggguucca

SEQ ID NO: 2514741 - RNA, 19 nt, Artificial Sequence
  Description of Artificial Sequence: Synthetic oligonucleotide
  Antisense strand to SEQ ID NO: 2514740
uggaacccacaaguaaccc

SEQ ID NO: 2514742 - RNA, 19 nt, Artificial Sequence
  Description of Artificial Sequence: Synthetic oligonucleotide
  Sense strand starting at position 1543 of SEQ ID NO: 1888150
gguuacuuguggguuccau

SEQ ID NO: 2514743 - RNA, 19 nt, Artificial Sequence
  Description of Artificial Sequence: Synthetic oligonucleotide
  Antisense strand to SEQ ID NO: 2514742
auggaacccacaaguaacc

SEQ ID NO: 2514744 - RNA, 19 nt, Artificial Sequence
  Description of Artificial Sequence: Synthetic oligonucleotide
  Sense strand starting at position 2151 of SEQ ID NO: 1888150
gguggugggucauuugguu

SEQ ID NO: 2514745 - RNA, 19 nt, Artificial Sequence
  Description of Artificial Sequence: Synthetic oligonucleotide
  Antisense strand to SEQ ID NO: 2514744
aaccaaaugacccaccacc

SEQ ID NO: 2514746 - RNA, 19 nt, Artificial Sequence
  Description of Artificial Sequence: Synthetic oligonucleotide
  Sense strand starting at position 2175 of SEQ ID NO: 1888150
ucgcgugaccucagugagu

SEQ ID NO: 2514747 - RNA, 19 nt, Artificial Sequence
  Description of Artificial Sequence: Synthetic oligonucleotide
  Antisense strand to SEQ ID NO: 2514746
acucacugaggucacgcga

SEQ ID NO: 2514748 - RNA, 19 nt, Artificial Sequence
  Description of Artificial Sequence: Synthetic oligonucleotide
  Sense strand starting at position 2177 of SEQ ID NO: 1888150
gcgugaccucagugagugu

SEQ ID NO: 2514749 - RNA, 19 nt, Artificial Sequence
  Description of Artificial Sequence: Synthetic oligonucleotide
  Antisense strand to SEQ ID NO: 2514748
acacucacugaggucacgc

SEQ ID NO: 2514750 - RNA, 19 nt, Artificial Sequence
  Description of Artificial Sequence: Synthetic oligonucleotide
  Sense strand starting at position 2619 of SEQ ID NO: 1888150
gcgucuuccggcuccagua

SEQ ID NO: 2514751 - RNA, 19 nt, Artificial Sequence
  Description of Artificial Sequence: Synthetic oligonucleotide
  Antisense strand to SEQ ID NO: 2514750
uacuggagccggaagacgc

SEQ ID NO: 2514752 - RNA, 19 nt, Artificial Sequence
  Description of Artificial Sequence: Synthetic oligonucleotide
  Sense strand starting at position 2629 of SEQ ID NO: 1888150
gcuccaguauccucgggaa

SEQ ID NO: 2514753 - RNA, 19 nt, Artificial Sequence
  Description of Artificial Sequence: Synthetic oligonucleotide
  Antisense strand to SEQ ID NO: 2514752
uucccgaggauacuggagc

SEQ ID NO: 2514754 - RNA, 19 nt, Artificial Sequence
  Description of Artificial Sequence: Synthetic oligonucleotide
  Sense strand starting at position 2722 of SEQ ID NO: 1888150
gccuuuguuuggcucucaa

SEQ ID NO: 2514755 - RNA, 19 nt, Artificial Sequence
  Description of Artificial Sequence: Synthetic oligonucleotide
  Antisense strand to SEQ ID NO: 2514754
uugagagccaaacaaaggc

SEQ ID NO: 2514756 - RNA, 19 nt, Artificial Sequence
  Description of Artificial Sequence: Synthetic oligonucleotide
  Sense strand starting at position 2888 of SEQ ID NO: 1888150
ugccguuagagucgguaga

SEQ ID NO: 2514757 - RNA, 19 nt, Artificial Sequence
  Description of Artificial Sequence: Synthetic oligonucleotide
  Antisense strand to SEQ ID NO: 2514756
ucuaccgacucuaacggca

SEQ ID NO: 2514758 - RNA, 19 nt, Artificial Sequence
  Description of Artificial Sequence: Synthetic oligonucleotide
  Sense strand starting at position 2889 of SEQ ID NO: 1888150
gccguuagagucgguagau

SEQ ID NO: 2514759 - RNA, 19 nt, Artificial Sequence
  Description of Artificial Sequence: Synthetic oligonucleotide
  Antisense strand to SEQ ID NO: 2514758
aucuaccgacucuaacggc

SEQ ID NO: 2514760 - RNA, 19 nt, Artificial Sequence
  Description of Artificial Sequence: Synthetic oligonucleotide
  Sense strand starting at position 2890 of SEQ ID NO: 1888150
ccguuagagucgguagauu

SEQ ID NO: 2514761 - RNA, 19 nt, Artificial Sequence
  Description of Artificial Sequence: Synthetic oligonucleotide
  Antisense strand to SEQ ID NO: 2514760
aaucuaccgacucuaacgg

SEQ ID NO: 2514762 - RNA, 19 nt, Artificial Sequence
  Description of Artificial Sequence: Synthetic oligonucleotide
  Sense strand starting at position 2901 of SEQ ID NO: 1888150
gguagauuacagcgaagcu

SEQ ID NO: 2514763 - RNA, 19 nt, Artificial Sequence
  Description of Artificial Sequence: Synthetic oligonucleotide
  Antisense strand to SEQ ID NO: 2514762
agcuucgcuguaaucuacc

SEQ ID NO: 2514764 - RNA, 19 nt, Artificial Sequence
  Description of Artificial Sequence: Synthetic oligonucleotide
  Sense strand starting at position 3108 of SEQ ID NO: 1888150
cucgaaucgcugugucagu

SEQ ID NO: 2514765 - RNA, 19 nt, Artificial Sequence
  Description of Artificial Sequence: Synthetic oligonucleotide
  Antisense strand to SEQ ID NO: 2514764
acugacacagcgauucgag

SEQ ID NO: 2514766 - RNA, 19 nt, Artificial Sequence
  Description of Artificial Sequence: Synthetic oligonucleotide
  Sense strand starting at position 3172 of SEQ ID NO: 1888150
aaauguggauaaugacaga

SEQ ID NO: 2514767 - RNA, 19 nt, Artificial Sequence
  Description of Artificial Sequence: Synthetic oligonucleotide
  Antisense strand to SEQ ID NO: 2514766
ucugucauuauccacauuu

SEQ ID NO: 2514768 - RNA, 19 nt, Artificial Sequence
  Description of Artificial Sequence: Synthetic oligonucleotide
  Sense strand starting at position 3400 of SEQ ID NO: 1888150
agcaacaguuguuaaauca

SEQ ID NO: 2514769 - RNA, 19 nt, Artificial Sequence
  Description of Artificial Sequence: Synthetic oligonucleotide
  Antisense strand to SEQ ID NO: 2514768
ugauuuaacaacuguugcu

SEQ ID NO: 2514770 - RNA, 19 nt, Artificial Sequence
  Description of Artificial Sequence: Synthetic oligonucleotide
  Sense strand starting at position 3780 of SEQ ID NO: 1888150
aggcuugagugguuccuga

SEQ ID NO: 2514771 - RNA, 19 nt, Artificial Sequence
  Description of Artificial Sequence: Synthetic oligonucleotide
  Antisense strand to SEQ ID NO: 2514770
ucaggaaccacucaagccu

SEQ ID NO: 2514772 - RNA, 19 nt, Artificial Sequence
  Description of Artificial Sequence: Synthetic oligonucleotide
  Sense strand starting at position 3876 of SEQ ID NO: 1888150
cuaauuaaauugucugguu

SEQ ID NO: 2514773 - RNA, 19 nt, Artificial Sequence
  Description of Artificial Sequence: Synthetic oligonucleotide
  Antisense strand to SEQ ID NO: 2514772
aaccagacaauuuaauuag

SEQ ID NO: 2514774 - RNA, 19 nt, Artificial Sequence
  Description of Artificial Sequence: Synthetic oligonucleotide
  Sense strand starting at position 3892 of SEQ ID NO: 1888150
guuuaauccucuccuugag

SEQ ID NO: 2514775 - RNA, 19 nt, Artificial Sequence
  Description of Artificial Sequence: Synthetic oligonucleotide
  Antisense strand to SEQ ID NO: 2514774
cucaaggagaggauuaaac

SEQ ID NO: 2514776 - RNA, 19 nt, Artificial Sequence
  Description of Artificial Sequence: Synthetic oligonucleotide
  Sense strand starting at position 98 of SEQ ID NO: 1888153
ucaauaauggcauguagau

SEQ ID NO: 2514777 - RNA, 19 nt, Artificial Sequence
  Description of Artificial Sequence: Synthetic oligonucleotide
  Antisense strand to SEQ ID NO: 2514776
aucuacaugccauuauuga

SEQ ID NO: 2514778 - RNA, 19 nt, Artificial Sequence
  Description of Artificial Sequence: Synthetic oligonucleotide
  Sense strand starting at position 178 of SEQ ID NO: 1888153
uucucucugaggcagagau

SEQ ID NO: 2514779 - RNA, 19 nt, Artificial Sequence
  Description of Artificial Sequence: Synthetic oligonucleotide
  Antisense strand to SEQ ID NO: 2514778
aucucugccucagagagaa

SEQ ID NO: 2514780 - RNA, 19 nt, Artificial Sequence
  Description of Artificial Sequence: Synthetic oligonucleotide
  Sense strand starting at position 229 of SEQ ID NO: 1888153
ggauaacucuuuguuguag

SEQ ID NO: 2514781 - RNA, 19 nt, Artificial Sequence
  Description of Artificial Sequence: Synthetic oligonucleotide
  Antisense strand to SEQ ID NO: 2514780
cuacaacaaagaguuaucc

SEQ ID NO: 2514782 - RNA, 19 nt, Artificial Sequence
  Description of Artificial Sequence: Synthetic oligonucleotide
  Sense strand starting at position 230 of SEQ ID NO: 1888153
gauaacucuuuguuguaga

SEQ ID NO: 2514783 - RNA, 19 nt, Artificial Sequence
  Description of Artificial Sequence: Synthetic oligonucleotide
  Antisense strand to SEQ ID NO: 2514782
ucuacaacaaagaguuauc

SEQ ID NO: 2514784 - RNA, 19 nt, Artificial Sequence
  Description of Artificial Sequence: Synthetic oligonucleotide
  Sense strand starting at position 290 of SEQ ID NO: 1888153
gucuuuacccacuagauuc

SEQ ID NO: 2514785 - RNA, 19 nt, Artificial Sequence
  Description of Artificial Sequence: Synthetic oligonucleotide
  Antisense strand to SEQ ID NO: 2514784
gaaucuaguggguaaagac

SEQ ID NO: 2514786 - RNA, 19 nt, Artificial Sequence
  Description of Artificial Sequence: Synthetic oligonucleotide
  Sense strand starting at position 300 of SEQ ID NO: 1888153
acuagauuccaguaacagc

SEQ ID NO: 2514787 - RNA, 19 nt, Artificial Sequence
  Description of Artificial Sequence: Synthetic oligonucleotide
  Antisense strand to SEQ ID NO: 2514786
gcuguuacuggaaucuagu

SEQ ID NO: 2514788 - RNA, 19 nt, Artificial Sequence
  Description of Artificial Sequence: Synthetic oligonucleotide
  Sense strand starting at position 399 of SEQ ID NO: 1888153
cugcucugaguguagagaa

SEQ ID NO: 2514789 - RNA, 19 nt, Artificial Sequence
  Description of Artificial Sequence: Synthetic oligonucleotide
  Antisense strand to SEQ ID NO: 2514788
uucucuacacucagagcag

SEQ ID NO: 2514790 - RNA, 19 nt, Artificial Sequence
  Description of Artificial Sequence: Synthetic oligonucleotide
  Sense strand starting at position 422 of SEQ ID NO: 1888153
augaacauuuccuggaaau

SEQ ID NO: 2514791 - RNA, 19 nt, Artificial Sequence
  Description of Artificial Sequence: Synthetic oligonucleotide
  Antisense strand to SEQ ID NO: 2514790
auuuccaggaaauguucau

SEQ ID NO: 2514792 - RNA, 19 nt, Artificial Sequence
  Description of Artificial Sequence: Synthetic oligonucleotide
  Sense strand starting at position 585 of SEQ ID NO: 1888153
aaucucaguggcuauguaa

SEQ ID NO: 2514793 - RNA, 19 nt, Artificial Sequence
  Description of Artificial Sequence: Synthetic oligonucleotide
  Antisense strand to SEQ ID NO: 2514792
uuacauagccacugagauu

SEQ ID NO: 2514794 - RNA, 19 nt, Artificial Sequence
  Description of Artificial Sequence: Synthetic oligonucleotide
  Sense strand starting at position 725 of SEQ ID NO: 1888153
ccaggaguuaguugguaga

SEQ ID NO: 2514795 - RNA, 19 nt, Artificial Sequence
  Description of Artificial Sequence: Synthetic oligonucleotide
  Antisense strand to SEQ ID NO: 2514794
ucuaccaacuaacuccugg

SEQ ID NO: 2514796 - RNA, 19 nt, Artificial Sequence
  Description of Artificial Sequence: Synthetic oligonucleotide
  Sense strand starting at position 727 of SEQ ID NO: 1888153
aggaguuaguugguagaac

SEQ ID NO: 2514797 - RNA, 19 nt, Artificial Sequence
  Description of Artificial Sequence: Synthetic oligonucleotide
  Antisense strand to SEQ ID NO: 2514796
guucuaccaacuaacuccu

SEQ ID NO: 2514798 - RNA, 19 nt, Artificial Sequence
  Description of Artificial Sequence: Synthetic oligonucleotide
  Sense strand starting at position 751 of SEQ ID NO: 1888153
uccuuuguagucuacagau

SEQ ID NO: 2514799 - RNA, 19 nt, Artificial Sequence
  Description of Artificial Sequence: Synthetic oligonucleotide
  Antisense strand to SEQ ID NO: 2514798
aucuguagacuacaaagga

SEQ ID NO: 2514800 - RNA, 19 nt, Artificial Sequence
  Description of Artificial Sequence: Synthetic oligonucleotide
  Sense strand starting at position 753 of SEQ ID NO: 1888153
cuuuguagucuacagauau

SEQ ID NO: 2514801 - RNA, 19 nt, Artificial Sequence
  Description of Artificial Sequence: Synthetic oligonucleotide
  Antisense strand to SEQ ID NO: 2514800
auaucuguagacuacaaag

SEQ ID NO: 2514802 - RNA, 19 nt, Artificial Sequence
  Description of Artificial Sequence: Synthetic oligonucleotide
  Sense strand starting at position 1070 of SEQ ID NO: 1888153
aucugcaaucuguaaagau

SEQ ID NO: 2514803 - RNA, 19 nt, Artificial Sequence
  Description of Artificial Sequence: Synthetic oligonucleotide
  Antisense strand to SEQ ID NO: 2514802
aucuuuacagauugcagau

SEQ ID NO: 2514804 - RNA, 19 nt, Artificial Sequence
  Description of Artificial Sequence: Synthetic oligonucleotide
  Sense strand starting at position 1116 of SEQ ID NO: 1888153
agcagucaguuagucauuu

SEQ ID NO: 2514805 - RNA, 19 nt, Artificial Sequence
  Description of Artificial Sequence: Synthetic oligonucleotide
  Antisense strand to SEQ ID NO: 2514804
aaaugacuaacugacugcu

SEQ ID NO: 2514806 - RNA, 19 nt, Artificial Sequence
  Description of Artificial Sequence: Synthetic oligonucleotide
  Sense strand starting at position 1117 of SEQ ID NO: 1888153
gcagucaguuagucauuua

SEQ ID NO: 2514807 - RNA, 19 nt, Artificial Sequence
  Description of Artificial Sequence: Synthetic oligonucleotide
  Antisense strand to SEQ ID NO: 2514806
uaaaugacuaacugacugc

SEQ ID NO: 2514808 - RNA, 19 nt, Artificial Sequence
  Description of Artificial Sequence: Synthetic oligonucleotide
  Sense strand starting at position 1120 of SEQ ID NO: 1888153
gucaguuagucauuuacuu

SEQ ID NO: 2514809 - RNA, 19 nt, Artificial Sequence
  Description of Artificial Sequence: Synthetic oligonucleotide
  Antisense strand to SEQ ID NO: 2514808
aaguaaaugacuaacugac

SEQ ID NO: 2514810 - RNA, 19 nt, Artificial Sequence
  Description of Artificial Sequence: Synthetic oligonucleotide
  Sense strand starting at position 1127 of SEQ ID NO: 1888153
agucauuuacuuggagugu

SEQ ID NO: 2514811 - RNA, 19 nt, Artificial Sequence
  Description of Artificial Sequence: Synthetic oligonucleotide
  Antisense strand to SEQ ID NO: 2514810
acacuccaaguaaaugacu

SEQ ID NO: 2514812 - RNA, 19 nt, Artificial Sequence
  Description of Artificial Sequence: Synthetic oligonucleotide
  Sense strand starting at position 1153 of SEQ ID NO: 1888153
augacagucacuugguuga

SEQ ID NO: 2514813 - RNA, 19 nt, Artificial Sequence
  Description of Artificial Sequence: Synthetic oligonucleotide
  Antisense strand to SEQ ID NO: 2514812
ucaaccaagugacugucau

SEQ ID NO: 2514814 - RNA, 19 nt, Artificial Sequence
  Description of Artificial Sequence: Synthetic oligonucleotide
  Sense strand starting at position 1344 of SEQ ID NO: 1888153
uuucuaaaccuggaugcau

SEQ ID NO: 2514815 - RNA, 19 nt, Artificial Sequence
  Description of Artificial Sequence: Synthetic oligonucleotide
  Antisense strand to SEQ ID NO: 2514814
augcauccagguuuagaaa

SEQ ID NO: 2514816 - RNA, 19 nt, Artificial Sequence
  Description of Artificial Sequence: Synthetic oligonucleotide
  Sense strand starting at position 1352 of SEQ ID NO: 1888153
ccuggaugcauaggcuaaa

SEQ ID NO: 2514817 - RNA, 19 nt, Artificial Sequence
  Description of Artificial Sequence: Synthetic oligonucleotide
  Antisense strand to SEQ ID NO: 2514816
uuuagccuaugcauccagg

SEQ ID NO: 2514818 - RNA, 19 nt, Artificial Sequence
  Description of Artificial Sequence: Synthetic oligonucleotide
  Sense strand starting at position 1394 of SEQ ID NO: 1888153
ugcccaguuauugaggcaa

SEQ ID NO: 2514819 - RNA, 19 nt, Artificial Sequence
  Description of Artificial Sequence: Synthetic oligonucleotide
  Antisense strand to SEQ ID NO: 2514818
uugccucaauaacugggca

SEQ ID NO: 2514820 - RNA, 19 nt, Artificial Sequence
  Description of Artificial Sequence: Synthetic oligonucleotide
  Sense strand starting at position 1454 of SEQ ID NO: 1888153
acagucuucccugaaagug

SEQ ID NO: 2514821 - RNA, 19 nt, Artificial Sequence
  Description of Artificial Sequence: Synthetic oligonucleotide
  Antisense strand to SEQ ID NO: 2514820
cacuuucagggaagacugu

SEQ ID NO: 2514822 - RNA, 19 nt, Artificial Sequence
  Description of Artificial Sequence: Synthetic oligonucleotide
  Sense strand starting at position 1665 of SEQ ID NO: 1888153
cuuguaucccaggaacuca

SEQ ID NO: 2514823 - RNA, 19 nt, Artificial Sequence
  Description of Artificial Sequence: Synthetic oligonucleotide
  Antisense strand to SEQ ID NO: 2514822
ugaguuccugggauacaag

SEQ ID NO: 2514824 - RNA, 19 nt, Artificial Sequence
  Description of Artificial Sequence: Synthetic oligonucleotide
  Sense strand starting at position 1715 of SEQ ID NO: 1888153
gaacauggcugguuuacua

SEQ ID NO: 2514825 - RNA, 19 nt, Artificial Sequence
  Description of Artificial Sequence: Synthetic oligonucleotide
  Antisense strand to SEQ ID NO: 2514824
uaguaaaccagccauguuc

SEQ ID NO: 2514826 - RNA, 19 nt, Artificial Sequence
  Description of Artificial Sequence: Synthetic oligonucleotide
  Sense strand starting at position 1722 of SEQ ID NO: 1888153
gcugguuuacuagacaguu

SEQ ID NO: 2514827 - RNA, 19 nt, Artificial Sequence
  Description of Artificial Sequence: Synthetic oligonucleotide
  Antisense strand to SEQ ID NO: 2514826
aacugucuaguaaaccagc

SEQ ID NO: 2514828 - RNA, 19 nt, Artificial Sequence
  Description of Artificial Sequence: Synthetic oligonucleotide
  Sense strand starting at position 1759 of SEQ ID NO: 1888153
gacucuguacgccauuaaa

SEQ ID NO: 2514829 - RNA, 19 nt, Artificial Sequence
  Description of Artificial Sequence: Synthetic oligonucleotide
  Antisense strand to SEQ ID NO: 2514828
uuuaauggcguacagaguc

SEQ ID NO: 2514830 - RNA, 19 nt, Artificial Sequence
  Description of Artificial Sequence: Synthetic oligonucleotide
  Sense strand starting at position 1923 of SEQ ID NO: 1888153
gagucuucugggcacugau

SEQ ID NO: 2514831 - RNA, 19 nt, Artificial Sequence
  Description of Artificial Sequence: Synthetic oligonucleotide
  Antisense strand to SEQ ID NO: 2514830
aucagugcccagaagacuc

SEQ ID NO: 2514832 - RNA, 19 nt, Artificial Sequence
  Description of Artificial Sequence: Synthetic oligonucleotide
  Sense strand starting at position 2232 of SEQ ID NO: 1888153
uguaguacacacugaauaa

SEQ ID NO: 2514833 - RNA, 19 nt, Artificial Sequence
  Description of Artificial Sequence: Synthetic oligonucleotide
  Antisense strand to SEQ ID NO: 2514832
uuauucaguguguacuaca

SEQ ID NO: 2514834 - RNA, 19 nt, Artificial Sequence
  Description of Artificial Sequence: Synthetic oligonucleotide
  Sense strand starting at position 2515 of SEQ ID NO: 1888153
aucacaacguuauuaggua

SEQ ID NO: 2514835 - RNA, 19 nt, Artificial Sequence
  Description of Artificial Sequence: Synthetic oligonucleotide
  Antisense strand to SEQ ID NO: 2514834
uaccuaauaacguugugau

SEQ ID NO: 2514836 - RNA, 19 nt, Artificial Sequence
  Description of Artificial Sequence: Synthetic oligonucleotide
  Sense strand starting at position 2581 of SEQ ID NO: 1888153
uaauuagcugaggguuuaa

SEQ ID NO: 2514837 - RNA, 19 nt, Artificial Sequence
  Description of Artificial Sequence: Synthetic oligonucleotide
  Antisense strand to SEQ ID NO: 2514836
uuaaacccucagcuaauua

SEQ ID NO: 2514838 - RNA, 19 nt, Artificial Sequence
  Description of Artificial Sequence: Synthetic oligonucleotide
  Sense strand starting at position 2690 of SEQ ID NO: 1888153
cccuguggucuguaagaag

SEQ ID NO: 2514839 - RNA, 19 nt, Artificial Sequence
  Description of Artificial Sequence: Synthetic oligonucleotide
  Antisense strand to SEQ ID NO: 2514838
cuucuuacagaccacaggg

SEQ ID NO: 2514840 - RNA, 19 nt, Artificial Sequence
  Description of Artificial Sequence: Synthetic oligonucleotide
  Sense strand starting at position 2816 of SEQ ID NO: 1888153
gagauucuugagggucagu

SEQ ID NO: 2514841 - RNA, 19 nt, Artificial Sequence
  Description of Artificial Sequence: Synthetic oligonucleotide
  Antisense strand to SEQ ID NO: 2514840
acugacccucaagaaucuc

SEQ ID NO: 2514842 - RNA, 19 nt, Artificial Sequence
  Description of Artificial Sequence: Synthetic oligonucleotide
  Sense strand starting at position 2852 of SEQ ID NO: 1888153
cagggucagggucauuauu

SEQ ID NO: 2514843 - RNA, 19 nt, Artificial Sequence
  Description of Artificial Sequence: Synthetic oligonucleotide
  Antisense strand to SEQ ID NO: 2514842
aauaaugacccugacccug

SEQ ID NO: 2514844 - RNA, 19 nt, Artificial Sequence
  Description of Artificial Sequence: Synthetic oligonucleotide
  Sense strand starting at position 2854 of SEQ ID NO: 1888153
gggucagggucauuauuga

SEQ ID NO: 2514845 - RNA, 19 nt, Artificial Sequence
  Description of Artificial Sequence: Synthetic oligonucleotide
  Antisense strand to SEQ ID NO: 2514844
ucaauaaugacccugaccc

SEQ ID NO: 2514846 - RNA, 19 nt, Artificial Sequence
  Description of Artificial Sequence: Synthetic oligonucleotide
  Sense strand starting at position 3466 of SEQ ID NO: 1888153
accuguuaugcagaaguag

SEQ ID NO: 2514847 - RNA, 19 nt, Artificial Sequence
  Description of Artificial Sequence: Synthetic oligonucleotide
  Antisense strand to SEQ ID NO: 2514846
cuacuucugcauaacaggu

SEQ ID NO: 2514848 - RNA, 19 nt, Artificial Sequence
  Description of Artificial Sequence: Synthetic oligonucleotide
  Sense strand starting at position 3616 of SEQ ID NO: 1888153
gaaggaguuuaugcucuag

SEQ ID NO: 2514849 - RNA, 19 nt, Artificial Sequence
  Description of Artificial Sequence: Synthetic oligonucleotide
  Antisense strand to SEQ ID NO: 2514848
cuagagcauaaacuccuuc

SEQ ID NO: 2514850 - RNA, 19 nt, Artificial Sequence
  Description of Artificial Sequence: Synthetic oligonucleotide
  Sense strand starting at position 3652 of SEQ ID NO: 1888153
uacagaguuggucagccau

SEQ ID NO: 2514851 - RNA, 19 nt, Artificial Sequence
  Description of Artificial Sequence: Synthetic oligonucleotide
  Antisense strand to SEQ ID NO: 2514850
auggcugaccaacucugua

SEQ ID NO: 2514852 - RNA, 19 nt, Artificial Sequence
  Description of Artificial Sequence: Synthetic oligonucleotide
  Sense strand starting at position 3737 of SEQ ID NO: 1888153
gucuuuagaggccaaguga

SEQ ID NO: 2514853 - RNA, 19 nt, Artificial Sequence
  Description of Artificial Sequence: Synthetic oligonucleotide
  Antisense strand to SEQ ID NO: 2514852
ucacuuggccucuaaagac

SEQ ID NO: 2514854 - RNA, 19 nt, Artificial Sequence
  Description of Artificial Sequence: Synthetic oligonucleotide
  Sense strand starting at position 3862 of SEQ ID NO: 1888153
accacugggugucuauaau

SEQ ID NO: 2514855 - RNA, 19 nt, Artificial Sequence
  Description of Artificial Sequence: Synthetic oligonucleotide
  Antisense strand to SEQ ID NO: 2514854
auuauagacacccaguggu

SEQ ID NO: 2514856 - RNA, 19 nt, Artificial Sequence
  Description of Artificial Sequence: Synthetic oligonucleotide
  Sense strand starting at position 238 of SEQ ID NO: 1888154
ccagaugcugcuuagggaa

SEQ ID NO: 2514857 - RNA, 19 nt, Artificial Sequence
  Description of Artificial Sequence: Synthetic oligonucleotide
  Antisense strand to SEQ ID NO: 2514856
uucccuaagcagcaucugg

SEQ ID NO: 2514858 - RNA, 19 nt, Artificial Sequence
  Description of Artificial Sequence: Synthetic oligonucleotide
  Sense strand starting at position 375 of SEQ ID NO: 1888154
ccucguuaaugauuauuaa

SEQ ID NO: 2514859 - RNA, 19 nt, Artificial Sequence
  Description of Artificial Sequence: Synthetic oligonucleotide
  Antisense strand to SEQ ID NO: 2514858
uuaauaaucauuaacgagg

SEQ ID NO: 2514860 - RNA, 19 nt, Artificial Sequence
  Description of Artificial Sequence: Synthetic oligonucleotide
  Sense strand starting at position 532 of SEQ ID NO: 1888154
ggguguguauuucuuucca

SEQ ID NO: 2514861 - RNA, 19 nt, Artificial Sequence
  Description of Artificial Sequence: Synthetic oligonucleotide
  Antisense strand to SEQ ID NO: 2514860
uggaaagaaauacacaccc

SEQ ID NO: 2514862 - RNA, 19 nt, Artificial Sequence
  Description of Artificial Sequence: Synthetic oligonucleotide
  Sense strand starting at position 534 of SEQ ID NO: 1888154
guguguauuucuuuccacu

SEQ ID NO: 2514863 - RNA, 19 nt, Artificial Sequence
  Description of Artificial Sequence: Synthetic oligonucleotide
  Antisense strand to SEQ ID NO: 2514862
aguggaaagaaauacacac

SEQ ID NO: 2514864 - RNA, 19 nt, Artificial Sequence
  Description of Artificial Sequence: Synthetic oligonucleotide
  Sense strand starting at position 540 of SEQ ID NO: 1888154
auuucuuuccacugcuagu

SEQ ID NO: 2514865 - RNA, 19 nt, Artificial Sequence
  Description of Artificial Sequence: Synthetic oligonucleotide
  Antisense strand to SEQ ID NO: 2514864
acuagcaguggaaagaaau

SEQ ID NO: 2514866 - RNA, 19 nt, Artificial Sequence
  Description of Artificial Sequence: Synthetic oligonucleotide
  Sense strand starting at position 773 of SEQ ID NO: 1888154
agcugauccgguuauuaug

SEQ ID NO: 2514867 - RNA, 19 nt, Artificial Sequence
  Description of Artificial Sequence: Synthetic oligonucleotide
  Antisense strand to SEQ ID NO: 2514866
cauaauaaccggaucagcu

SEQ ID NO: 2514868 - RNA, 19 nt, Artificial Sequence
  Description of Artificial Sequence: Synthetic oligonucleotide
  Sense strand starting at position 923 of SEQ ID NO: 1888154
ccuuguggugcucacagaa

SEQ ID NO: 2514869 - RNA, 19 nt, Artificial Sequence
  Description of Artificial Sequence: Synthetic oligonucleotide
  Antisense strand to SEQ ID NO: 2514868
uucugugagcaccacaagg

SEQ ID NO: 2514870 - RNA, 19 nt, Artificial Sequence
  Description of Artificial Sequence: Synthetic oligonucleotide
  Sense strand starting at position 1001 of SEQ ID NO: 1888154
gcugucaucagcgcaauua

SEQ ID NO: 2514871 - RNA, 19 nt, Artificial Sequence
  Description of Artificial Sequence: Synthetic oligonucleotide
  Antisense strand to SEQ ID NO: 2514870
uaauugcgcugaugacagc

SEQ ID NO: 2514872 - RNA, 19 nt, Artificial Sequence
  Description of Artificial Sequence: Synthetic oligonucleotide
  Sense strand starting at position 1176 of SEQ ID NO: 1888154
aaauuugaucugcgugggu

SEQ ID NO: 2514873 - RNA, 19 nt, Artificial Sequence
  Description of Artificial Sequence: Synthetic oligonucleotide
  Antisense strand to SEQ ID NO: 2514872
acccacgcagaucaaauuu

SEQ ID NO: 2514874 - RNA, 19 nt, Artificial Sequence
  Description of Artificial Sequence: Synthetic oligonucleotide
  Sense strand starting at position 1189 of SEQ ID NO: 1888154
gugggucugauuuguuuac

SEQ ID NO: 2514875 - RNA, 19 nt, Artificial Sequence
  Description of Artificial Sequence: Synthetic oligonucleotide
  Antisense strand to SEQ ID NO: 2514874
guaaacaaaucagacccac

SEQ ID NO: 2514876 - RNA, 19 nt, Artificial Sequence
  Description of Artificial Sequence: Synthetic oligonucleotide
  Sense strand starting at position 1271 of SEQ ID NO: 1888154
gggcuauacuucucagaaa

SEQ ID NO: 2514877 - RNA, 19 nt, Artificial Sequence
  Description of Artificial Sequence: Synthetic oligonucleotide
  Antisense strand to SEQ ID NO: 2514876
uuucugagaaguauagccc

SEQ ID NO: 2514878 - RNA, 19 nt, Artificial Sequence
  Description of Artificial Sequence: Synthetic oligonucleotide
  Sense strand starting at position 1298 of SEQ ID NO: 1888154
cauguugggcccuaaauga

SEQ ID NO: 2514879 - RNA, 19 nt, Artificial Sequence
  Description of Artificial Sequence: Synthetic oligonucleotide
  Antisense strand to SEQ ID NO: 2514878
ucauuuagggcccaacaug

SEQ ID NO: 2514880 - RNA, 19 nt, Artificial Sequence
  Description of Artificial Sequence: Synthetic oligonucleotide
  Sense strand starting at position 1331 of SEQ ID NO: 1888154
cugagacuuguccaggcuu

SEQ ID NO: 2514881 - RNA, 19 nt, Artificial Sequence
  Description of Artificial Sequence: Synthetic oligonucleotide
  Antisense strand to SEQ ID NO: 2514880
aagccuggacaagucucag

SEQ ID NO: 2514882 - RNA, 19 nt, Artificial Sequence
  Description of Artificial Sequence: Synthetic oligonucleotide
  Sense strand starting at position 1410 of SEQ ID NO: 1888154
agguuucugcuauacuaaa

SEQ ID NO: 2514883 - RNA, 19 nt, Artificial Sequence
  Description of Artificial Sequence: Synthetic oligonucleotide
  Antisense strand to SEQ ID NO: 2514882
uuuaguauagcagaaaccu

SEQ ID NO: 2514884 - RNA, 19 nt, Artificial Sequence
  Description of Artificial Sequence: Synthetic oligonucleotide
  Sense strand starting at position 1956 of SEQ ID NO: 1888154
agacccacuuguccaagau

SEQ ID NO: 2514885 - RNA, 19 nt, Artificial Sequence
  Description of Artificial Sequence: Synthetic oligonucleotide
  Antisense strand to SEQ ID NO: 2514884
aucuuggacaagugggucu

SEQ ID NO: 2514886 - RNA, 19 nt, Artificial Sequence
  Description of Artificial Sequence: Synthetic oligonucleotide
  Sense strand starting at position 2066 of SEQ ID NO: 1888154
caugguaucugggugaaua

SEQ ID NO: 2514887 - RNA, 19 nt, Artificial Sequence
  Description of Artificial Sequence: Synthetic oligonucleotide
  Antisense strand to SEQ ID NO: 2514886
uauucacccagauaccaug

SEQ ID NO: 2514888 - RNA, 19 nt, Artificial Sequence
  Description of Artificial Sequence: Synthetic oligonucleotide
  Sense strand starting at position 2067 of SEQ ID NO: 1888154
augguaucugggugaauaa

SEQ ID NO: 2514889 - RNA, 19 nt, Artificial Sequence
  Description of Artificial Sequence: Synthetic oligonucleotide
  Antisense strand to SEQ ID NO: 2514888
uuauucacccagauaccau

SEQ ID NO: 2514890 - RNA, 19 nt, Artificial Sequence
  Description of Artificial Sequence: Synthetic oligonucleotide
  Sense strand starting at position 2195 of SEQ ID NO: 1888154
ucucuagaacacuguagua

SEQ ID NO: 2514891 - RNA, 19 nt, Artificial Sequence
  Description of Artificial Sequence: Synthetic oligonucleotide
  Antisense strand to SEQ ID NO: 2514890
uacuacaguguucuagaga

SEQ ID NO: 2514892 - RNA, 19 nt, Artificial Sequence
  Description of Artificial Sequence: Synthetic oligonucleotide
  Sense strand starting at position 2278 of SEQ ID NO: 1888154
ggauaaggguccucuuccu

SEQ ID NO: 2514893 - RNA, 19 nt, Artificial Sequence
  Description of Artificial Sequence: Synthetic oligonucleotide
  Antisense strand to SEQ ID NO: 2514892
aggaagaggacccuuaucc

SEQ ID NO: 2514894 - RNA, 19 nt, Artificial Sequence
  Description of Artificial Sequence: Synthetic oligonucleotide
  Sense strand starting at position 2345 of SEQ ID NO: 1888154
uugcaagaacauuggagau

SEQ ID NO: 2514895 - RNA, 19 nt, Artificial Sequence
  Description of Artificial Sequence: Synthetic oligonucleotide
  Antisense strand to SEQ ID NO: 2514894
aucuccaauguucuugcaa

SEQ ID NO: 2514896 - RNA, 19 nt, Artificial Sequence
  Description of Artificial Sequence: Synthetic oligonucleotide
  Sense strand starting at position 2407 of SEQ ID NO: 1888154
gcuugaagcagauauguaa

SEQ ID NO: 2514897 - RNA, 19 nt, Artificial Sequence
  Description of Artificial Sequence: Synthetic oligonucleotide
  Antisense strand to SEQ ID NO: 2514896
uuacauaucugcuucaagc

SEQ ID NO: 2514898 - RNA, 19 nt, Artificial Sequence
  Description of Artificial Sequence: Synthetic oligonucleotide
  Sense strand starting at position 2514 of SEQ ID NO: 1888154
ccuugaauuagagguagca

SEQ ID NO: 2514899 - RNA, 19 nt, Artificial Sequence
  Description of Artificial Sequence: Synthetic oligonucleotide
  Antisense strand to SEQ ID NO: 2514898
ugcuaccucuaauucaagg

SEQ ID NO: 2514900 - RNA, 19 nt, Artificial Sequence
  Description of Artificial Sequence: Synthetic oligonucleotide
  Sense strand starting at position 2700 of SEQ ID NO: 1888154
uagggaggauuagccuaau

SEQ ID NO: 2514901 - RNA, 19 nt, Artificial Sequence
  Description of Artificial Sequence: Synthetic oligonucleotide
  Antisense strand to SEQ ID NO: 2514900
auuaggcuaauccucccua

SEQ ID NO: 2514902 - RNA, 19 nt, Artificial Sequence
  Description of Artificial Sequence: Synthetic oligonucleotide
  Sense strand starting at position 2706 of SEQ ID NO: 1888154
ggauuagccuaauuaaaug

SEQ ID NO: 2514903 - RNA, 19 nt, Artificial Sequence
  Description of Artificial Sequence: Synthetic oligonucleotide
  Antisense strand to SEQ ID NO: 2514902
cauuuaauuaggcuaaucc

SEQ ID NO: 2514904 - RNA, 19 nt, Artificial Sequence
  Description of Artificial Sequence: Synthetic oligonucleotide
  Sense strand starting at position 2820 of SEQ ID NO: 1888154
gcaaucagggcucagauua

SEQ ID NO: 2514905 - RNA, 19 nt, Artificial Sequence
  Description of Artificial Sequence: Synthetic oligonucleotide
  Antisense strand to SEQ ID NO: 2514904
uaaucugagcccugauugc

SEQ ID NO: 2514906 - RNA, 19 nt, Artificial Sequence
  Description of Artificial Sequence: Synthetic oligonucleotide
  Sense strand starting at position 2949 of SEQ ID NO: 1888154
aguaccuaucauuacugua

SEQ ID NO: 2514907 - RNA, 19 nt, Artificial Sequence
  Description of Artificial Sequence: Synthetic oligonucleotide
  Antisense strand to SEQ ID NO: 2514906
uacaguaaugauagguacu

SEQ ID NO: 2514908 - RNA, 19 nt, Artificial Sequence
  Description of Artificial Sequence: Synthetic oligonucleotide
  Sense strand starting at position 2954 of SEQ ID NO: 1888154
cuaucauuacuguagauuc

SEQ ID NO: 2514909 - RNA, 19 nt, Artificial Sequence
  Description of Artificial Sequence: Synthetic oligonucleotide
  Antisense strand to SEQ ID NO: 2514908
gaaucuacaguaaugauag

SEQ ID NO: 2514910 - RNA, 19 nt, Artificial Sequence
  Description of Artificial Sequence: Synthetic oligonucleotide
  Sense strand starting at position 3013 of SEQ ID NO: 1888154
guuucuacaccagauaugu

SEQ ID NO: 2514911 - RNA, 19 nt, Artificial Sequence
  Description of Artificial Sequence: Synthetic oligonucleotide
  Antisense strand to SEQ ID NO: 2514910
acauaucugguguagaaac

SEQ ID NO: 2514912 - RNA, 19 nt, Artificial Sequence
  Description of Artificial Sequence: Synthetic oligonucleotide
  Sense strand starting at position 3046 of SEQ ID NO: 1888154
caagaaguaucaguaaggu

SEQ ID NO: 2514913 - RNA, 19 nt, Artificial Sequence
  Description of Artificial Sequence: Synthetic oligonucleotide
  Antisense strand to SEQ ID NO: 2514912
accuuacugauacuucuug

SEQ ID NO: 2514914 - RNA, 19 nt, Artificial Sequence
  Description of Artificial Sequence: Synthetic oligonucleotide
  Sense strand starting at position 3054 of SEQ ID NO: 1888154
aucaguaagguuuggcaaa

SEQ ID NO: 2514915 - RNA, 19 nt, Artificial Sequence
  Description of Artificial Sequence: Synthetic oligonucleotide
  Antisense strand to SEQ ID NO: 2514914
uuugccaaaccuuacugau

SEQ ID NO: 2514916 - RNA, 19 nt, Artificial Sequence
  Description of Artificial Sequence: Synthetic oligonucleotide
  Sense strand starting at position 3056 of SEQ ID NO: 1888154
caguaagguuuggcaaaca

SEQ ID NO: 2514917 - RNA, 19 nt, Artificial Sequence
  Description of Artificial Sequence: Synthetic oligonucleotide
  Antisense strand to SEQ ID NO: 2514916
uguuugccaaaccuuacug

SEQ ID NO: 2514918 - RNA, 19 nt, Artificial Sequence
  Description of Artificial Sequence: Synthetic oligonucleotide
  Sense strand starting at position 3350 of SEQ ID NO: 1888154
acuuuagauuaauuggagu

SEQ ID NO: 2514919 - RNA, 19 nt, Artificial Sequence
  Description of Artificial Sequence: Synthetic oligonucleotide
  Antisense strand to SEQ ID NO: 2514918
acuccaauuaaucuaaagu

SEQ ID NO: 2514920 - RNA, 19 nt, Artificial Sequence
  Description of Artificial Sequence: Synthetic oligonucleotide
  Sense strand starting at position 3352 of SEQ ID NO: 1888154
uuuagauuaauuggaguag

SEQ ID NO: 2514921 - RNA, 19 nt, Artificial Sequence
  Description of Artificial Sequence: Synthetic oligonucleotide
  Antisense strand to SEQ ID NO: 2514920
cuacuccaauuaaucuaaa

SEQ ID NO: 2514922 - RNA, 19 nt, Artificial Sequence
  Description of Artificial Sequence: Synthetic oligonucleotide
  Sense strand starting at position 3670 of SEQ ID NO: 1888154
ggccuuggagucggaauuu

SEQ ID NO: 2514923 - RNA, 19 nt, Artificial Sequence
  Description of Artificial Sequence: Synthetic oligonucleotide
  Antisense strand to SEQ ID NO: 2514922
aaauuccgacuccaaggcc

SEQ ID NO: 2514924 - RNA, 19 nt, Artificial Sequence
  Description of Artificial Sequence: Synthetic oligonucleotide
  Sense strand starting at position 3788 of SEQ ID NO: 1888154
ggguuuaaacuuuguaaag

SEQ ID NO: 2514925 - RNA, 19 nt, Artificial Sequence
  Description of Artificial Sequence: Synthetic oligonucleotide
  Antisense strand to SEQ ID NO: 2514924
cuuuacaaaguuuaaaccc

SEQ ID NO: 2514926 - RNA, 19 nt, Artificial Sequence
  Description of Artificial Sequence: Synthetic oligonucleotide
  Sense strand starting at position 3789 of SEQ ID NO: 1888154
gguuuaaacuuuguaaagg

SEQ ID NO: 2514927 - RNA, 19 nt, Artificial Sequence
  Description of Artificial Sequence: Synthetic oligonucleotide
  Antisense strand to SEQ ID NO: 2514926
ccuuuacaaaguuuaaacc

SEQ ID NO: 2514928 - RNA, 19 nt, Artificial Sequence
  Description of Artificial Sequence: Synthetic oligonucleotide
  Sense strand starting at position 3799 of SEQ ID NO: 1888154
uuguaaagguauccacagu

SEQ ID NO: 2514929 - RNA, 19 nt, Artificial Sequence
  Description of Artificial Sequence: Synthetic oligonucleotide
  Antisense strand to SEQ ID NO: 2514928
acuguggauaccuuuacaa

SEQ ID NO: 2514930 - RNA, 19 nt, Artificial Sequence
  Description of Artificial Sequence: Synthetic oligonucleotide
  Sense strand starting at position 3800 of SEQ ID NO: 1888154
uguaaagguauccacaguu

SEQ ID NO: 2514931 - RNA, 19 nt, Artificial Sequence
  Description of Artificial Sequence: Synthetic oligonucleotide
  Antisense strand to SEQ ID NO: 2514930
aacuguggauaccuuuaca

SEQ ID NO: 2514932 - RNA, 19 nt, Artificial Sequence
  Description of Artificial Sequence: Synthetic oligonucleotide
  Sense strand starting at position 3824 of SEQ ID NO: 1888154
ggacucggacuguaaguaa

SEQ ID NO: 2514933 - RNA, 19 nt, Artificial Sequence
  Description of Artificial Sequence: Synthetic oligonucleotide
  Antisense strand to SEQ ID NO: 2514932
uuacuuacaguccgagucc

SEQ ID NO: 2514934 - RNA, 19 nt, Artificial Sequence
  Description of Artificial Sequence: Synthetic oligonucleotide
  Sense strand starting at position 3835 of SEQ ID NO: 1888154
guaaguaaaccaugaacca

SEQ ID NO: 2514935 - RNA, 19 nt, Artificial Sequence
  Description of Artificial Sequence: Synthetic oligonucleotide
  Antisense strand to SEQ ID NO: 2514934
ugguucaugguuuacuuac

SEQ ID NO: 2514936 - RNA, 19 nt, Artificial Sequence
  Description of Artificial Sequence: Synthetic oligonucleotide
  Sense strand starting at position 37 of SEQ ID NO: 1888155
gccauucgaacccguaaua

SEQ ID NO: 2514937 - RNA, 19 nt, Artificial Sequence
  Description of Artificial Sequence: Synthetic oligonucleotide
  Antisense strand to SEQ ID NO: 2514936
uauuacggguucgaauggc

SEQ ID NO: 2514938 - RNA, 19 nt, Artificial Sequence
  Description of Artificial Sequence: Synthetic oligonucleotide
  Sense strand starting at position 90 of SEQ ID NO: 1888155
ugucucuuggcauaguuua

SEQ ID NO: 2514939 - RNA, 19 nt, Artificial Sequence
  Description of Artificial Sequence: Synthetic oligonucleotide
  Antisense strand to SEQ ID NO: 2514938
uaaacuaugccaagagaca

SEQ ID NO: 2514940 - RNA, 19 nt, Artificial Sequence
  Description of Artificial Sequence: Synthetic oligonucleotide
  Sense strand starting at position 205 of SEQ ID NO: 1888155
gaagauguguuucggguaa

SEQ ID NO: 2514941 - RNA, 19 nt, Artificial Sequence
  Description of Artificial Sequence: Synthetic oligonucleotide
  Antisense strand to SEQ ID NO: 2514940
uuacccgaaacacaucuuc

SEQ ID NO: 2514942 - RNA, 19 nt, Artificial Sequence
  Description of Artificial Sequence: Synthetic oligonucleotide
  Sense strand starting at position 207 of SEQ ID NO: 1888155
agauguguuucggguaacu

SEQ ID NO: 2514943 - RNA, 19 nt, Artificial Sequence
  Description of Artificial Sequence: Synthetic oligonucleotide
  Antisense strand to SEQ ID NO: 2514942
aguuacccgaaacacaucu

SEQ ID NO: 2514944 - RNA, 19 nt, Artificial Sequence
  Description of Artificial Sequence: Synthetic oligonucleotide
  Sense strand starting at position 209 of SEQ ID NO: 1888155
auguguuucggguaacugu

SEQ ID NO: 2514945 - RNA, 19 nt, Artificial Sequence
  Description of Artificial Sequence: Synthetic oligonucleotide
  Antisense strand to SEQ ID NO: 2514944
acaguuacccgaaacacau

SEQ ID NO: 2514946 - RNA, 19 nt, Artificial Sequence
  Description of Artificial Sequence: Synthetic oligonucleotide
  Sense strand starting at position 217 of SEQ ID NO: 1888155
cggguaacugucgcuguga

SEQ ID NO: 2514947 - RNA, 19 nt, Artificial Sequence
  Description of Artificial Sequence: Synthetic oligonucleotide
  Antisense strand to SEQ ID NO: 2514946
ucacagcgacaguuacccg

SEQ ID NO: 2514948 - RNA, 19 nt, Artificial Sequence
  Description of Artificial Sequence: Synthetic oligonucleotide
  Sense strand starting at position 218 of SEQ ID NO: 1888155
ggguaacugucgcugugaa

SEQ ID NO: 2514949 - RNA, 19 nt, Artificial Sequence
  Description of Artificial Sequence: Synthetic oligonucleotide
  Antisense strand to SEQ ID NO: 2514948
uucacagcgacaguuaccc

SEQ ID NO: 2514950 - RNA, 19 nt, Artificial Sequence
  Description of Artificial Sequence: Synthetic oligonucleotide
  Sense strand starting at position 219 of SEQ ID NO: 1888155
gguaacugucgcugugaaa

SEQ ID NO: 2514951 - RNA, 19 nt, Artificial Sequence
  Description of Artificial Sequence: Synthetic oligonucleotide
  Antisense strand to SEQ ID NO: 2514950
uuucacagcgacaguuacc

SEQ ID NO: 2514952 - RNA, 19 nt, Artificial Sequence
  Description of Artificial Sequence: Synthetic oligonucleotide
  Sense strand starting at position 231 of SEQ ID NO: 1888155
ugugaaaggugagccauua

SEQ ID NO: 2514953 - RNA, 19 nt, Artificial Sequence
  Description of Artificial Sequence: Synthetic oligonucleotide
  Antisense strand to SEQ ID NO: 2514952
uaauggcucaccuuucaca

SEQ ID NO: 2514954 - RNA, 19 nt, Artificial Sequence
  Description of Artificial Sequence: Synthetic oligonucleotide
  Sense strand starting at position 241 of SEQ ID NO: 1888155
gagccauuaucgcucugua

SEQ ID NO: 2514955 - RNA, 19 nt, Artificial Sequence
  Description of Artificial Sequence: Synthetic oligonucleotide
  Antisense strand to SEQ ID NO: 2514954
uacagagcgauaauggcuc

SEQ ID NO: 2514956 - RNA, 19 nt, Artificial Sequence
  Description of Artificial Sequence: Synthetic oligonucleotide
  Sense strand starting at position 244 of SEQ ID NO: 1888155
ccauuaucgcucuguaagc

SEQ ID NO: 2514957 - RNA, 19 nt, Artificial Sequence
  Description of Artificial Sequence: Synthetic oligonucleotide
  Antisense strand to SEQ ID NO: 2514956
gcuuacagagcgauaaugg

SEQ ID NO: 2514958 - RNA, 19 nt, Artificial Sequence
  Description of Artificial Sequence: Synthetic oligonucleotide
  Sense strand starting at position 271 of SEQ ID NO: 1888155
agcccaacucuaggaauua

SEQ ID NO: 2514959 - RNA, 19 nt, Artificial Sequence
  Description of Artificial Sequence: Synthetic oligonucleotide
  Antisense strand to SEQ ID NO: 2514958
uaauuccuagaguugggcu

SEQ ID NO: 2514960 - RNA, 19 nt, Artificial Sequence
  Description of Artificial Sequence: Synthetic oligonucleotide
  Sense strand starting at position 272 of SEQ ID NO: 1888155
gcccaacucuaggaauuau

SEQ ID NO: 2514961 - RNA, 19 nt, Artificial Sequence
  Description of Artificial Sequence: Synthetic oligonucleotide
  Antisense strand to SEQ ID NO: 2514960
auaauuccuagaguugggc

SEQ ID NO: 2514962 - RNA, 19 nt, Artificial Sequence
  Description of Artificial Sequence: Synthetic oligonucleotide
  Sense strand starting at position 655 of SEQ ID NO: 1888155
aguaaauguuugcaagaau

SEQ ID NO: 2514963 - RNA, 19 nt, Artificial Sequence
  Description of Artificial Sequence: Synthetic oligonucleotide
  Antisense strand to SEQ ID NO: 2514962
auucuugcaaacauuuacu

SEQ ID NO: 2514964 - RNA, 19 nt, Artificial Sequence
  Description of Artificial Sequence: Synthetic oligonucleotide
  Sense strand starting at position 658 of SEQ ID NO: 1888155
aaauguuugcaagaauacg

SEQ ID NO: 2514965 - RNA, 19 nt, Artificial Sequence
  Description of Artificial Sequence: Synthetic oligonucleotide
  Antisense strand to SEQ ID NO: 2514964
cguauucuugcaaacauuu

SEQ ID NO: 2514966 - RNA, 19 nt, Artificial Sequence
  Description of Artificial Sequence: Synthetic oligonucleotide
  Sense strand starting at position 826 of SEQ ID NO: 1888155
gggccaaacgcuggaaaua

SEQ ID NO: 2514967 - RNA, 19 nt, Artificial Sequence
  Description of Artificial Sequence: Synthetic oligonucleotide
  Antisense strand to SEQ ID NO: 2514966
uauuuccagcguuuggccc

SEQ ID NO: 2514968 - RNA, 19 nt, Artificial Sequence
  Description of Artificial Sequence: Synthetic oligonucleotide
  Sense strand starting at position 827 of SEQ ID NO: 1888155
ggccaaacgcuggaaauaa

SEQ ID NO: 2514969 - RNA, 19 nt, Artificial Sequence
  Description of Artificial Sequence: Synthetic oligonucleotide
  Antisense strand to SEQ ID NO: 2514968
uuauuuccagcguuuggcc

SEQ ID NO: 2514970 - RNA, 19 nt, Artificial Sequence
  Description of Artificial Sequence: Synthetic oligonucleotide
  Sense strand starting at position 878 of SEQ ID NO: 1888155
gaggucauuuccugaggua

SEQ ID NO: 2514971 - RNA, 19 nt, Artificial Sequence
  Description of Artificial Sequence: Synthetic oligonucleotide
  Antisense strand to SEQ ID NO: 2514970
uaccucaggaaaugaccuc

SEQ ID NO: 2514972 - RNA, 19 nt, Artificial Sequence
  Description of Artificial Sequence: Synthetic oligonucleotide
  Sense strand starting at position 881 of SEQ ID NO: 1888155
gucauuuccugagguacuu

SEQ ID NO: 2514973 - RNA, 19 nt, Artificial Sequence
  Description of Artificial Sequence: Synthetic oligonucleotide
  Antisense strand to SEQ ID NO: 2514972
aaguaccucaggaaaugac

SEQ ID NO: 2514974 - RNA, 19 nt, Artificial Sequence
  Description of Artificial Sequence: Synthetic oligonucleotide
  Sense strand starting at position 1001 of SEQ ID NO: 1888155
auacaaacauucuggaguu

SEQ ID NO: 2514975 - RNA, 19 nt, Artificial Sequence
  Description of Artificial Sequence: Synthetic oligonucleotide
  Antisense strand to SEQ ID NO: 2514974
aacuccagaauguuuguau

SEQ ID NO: 2514976 - RNA, 19 nt, Artificial Sequence
  Description of Artificial Sequence: Synthetic oligonucleotide
  Sense strand starting at position 1177 of SEQ ID NO: 1888155
gggcguugucccuagaagc

SEQ ID NO: 2514977 - RNA, 19 nt, Artificial Sequence
  Description of Artificial Sequence: Synthetic oligonucleotide
  Antisense strand to SEQ ID NO: 2514976
gcuucuagggacaacgccc

SEQ ID NO: 2514978 - RNA, 19 nt, Artificial Sequence
  Description of Artificial Sequence: Synthetic oligonucleotide
  Sense strand starting at position 1274 of SEQ ID NO: 1888155
gacccuacguccuguggaa

SEQ ID NO: 2514979 - RNA, 19 nt, Artificial Sequence
  Description of Artificial Sequence: Synthetic oligonucleotide
  Antisense strand to SEQ ID NO: 2514978
uuccacaggacguaggguc

SEQ ID NO: 2514980 - RNA, 19 nt, Artificial Sequence
  Description of Artificial Sequence: Synthetic oligonucleotide
  Sense strand starting at position 1664 of SEQ ID NO: 1888155
acaagugaguccgcaguua

SEQ ID NO: 2514981 - RNA, 19 nt, Artificial Sequence
  Description of Artificial Sequence: Synthetic oligonucleotide
  Antisense strand to SEQ ID NO: 2514980
uaacugcggacucacuugu

SEQ ID NO: 2514982 - RNA, 19 nt, Artificial Sequence
  Description of Artificial Sequence: Synthetic oligonucleotide
  Sense strand starting at position 2306 of SEQ ID NO: 1888155
gucgaucgauucuacugaa

SEQ ID NO: 2514983 - RNA, 19 nt, Artificial Sequence
  Description of Artificial Sequence: Synthetic oligonucleotide
  Antisense strand to SEQ ID NO: 2514982
uucaguagaaucgaucgac

SEQ ID NO: 2514984 - RNA, 19 nt, Artificial Sequence
  Description of Artificial Sequence: Synthetic oligonucleotide
  Sense strand starting at position 2309 of SEQ ID NO: 1888155
gaucgauucuacugaagau

SEQ ID NO: 2514985 - RNA, 19 nt, Artificial Sequence
  Description of Artificial Sequence: Synthetic oligonucleotide
  Antisense strand to SEQ ID NO: 2514984
aucuucaguagaaucgauc

SEQ ID NO: 2514986 - RNA, 19 nt, Artificial Sequence
  Description of Artificial Sequence: Synthetic oligonucleotide
  Sense strand starting at position 2426 of SEQ ID NO: 1888155
cagcgucucuggcuuuaau

SEQ ID NO: 2514987 - RNA, 19 nt, Artificial Sequence
  Description of Artificial Sequence: Synthetic oligonucleotide
  Antisense strand to SEQ ID NO: 2514986
auuaaagccagagacgcug

SEQ ID NO: 2514988 - RNA, 19 nt, Artificial Sequence
  Description of Artificial Sequence: Synthetic oligonucleotide
  Sense strand starting at position 2486 of SEQ ID NO: 1888155
ccacacccgugaugucaau

SEQ ID NO: 2514989 - RNA, 19 nt, Artificial Sequence
  Description of Artificial Sequence: Synthetic oligonucleotide
  Antisense strand to SEQ ID NO: 2514988
auugacaucacgggugugg

SEQ ID NO: 2514990 - RNA, 19 nt, Artificial Sequence
  Description of Artificial Sequence: Synthetic oligonucleotide
  Sense strand starting at position 2585 of SEQ ID NO: 1888155
agcuuucccuccuggucaa

SEQ ID NO: 2514991 - RNA, 19 nt, Artificial Sequence
  Description of Artificial Sequence: Synthetic oligonucleotide
  Antisense strand to SEQ ID NO: 2514990
uugaccaggagggaaagcu

SEQ ID NO: 2514992 - RNA, 19 nt, Artificial Sequence
  Description of Artificial Sequence: Synthetic oligonucleotide
  Sense strand starting at position 2752 of SEQ ID NO: 1888155
cggcgccuuucuucccaua

SEQ ID NO: 2514993 - RNA, 19 nt, Artificial Sequence
  Description of Artificial Sequence: Synthetic oligonucleotide
  Antisense strand to SEQ ID NO: 2514992
uaugggaagaaaggcgccg

SEQ ID NO: 2514994 - RNA, 19 nt, Artificial Sequence
  Description of Artificial Sequence: Synthetic oligonucleotide
  Sense strand starting at position 2754 of SEQ ID NO: 1888155
gcgccuuucuucccauaaa

SEQ ID NO: 2514995 - RNA, 19 nt, Artificial Sequence
  Description of Artificial Sequence: Synthetic oligonucleotide
  Antisense strand to SEQ ID NO: 2514994
uuuaugggaagaaaggcgc

SEQ ID NO: 2514996 - RNA, 19 nt, Artificial Sequence
  Description of Artificial Sequence: Synthetic oligonucleotide
  Sense strand starting at position 2755 of SEQ ID NO: 1888155
cgccuuucuucccauaaag

SEQ ID NO: 2514997 - RNA, 19 nt, Artificial Sequence
  Description of Artificial Sequence: Synthetic oligonucleotide
  Antisense strand to SEQ ID NO: 2514996
cuuuaugggaagaaaggcg

SEQ ID NO: 2514998 - RNA, 19 nt, Artificial Sequence
  Description of Artificial Sequence: Synthetic oligonucleotide
  Sense strand starting at position 3180 of SEQ ID NO: 1888155
aggacaaaggccugaguuu

SEQ ID NO: 2514999 - RNA, 19 nt, Artificial Sequence
  Description of Artificial Sequence: Synthetic oligonucleotide
  Antisense strand to SEQ ID NO: 2514998
aaacucaggccuuuguccu

SEQ ID NO: 2515000 - RNA, 19 nt, Artificial Sequence
  Description of Artificial Sequence: Synthetic oligonucleotide
  Sense strand starting at position 3191 of SEQ ID NO: 1888155
cugaguuucccacggagac

SEQ ID NO: 2515001 - RNA, 19 nt, Artificial Sequence
  Description of Artificial Sequence: Synthetic oligonucleotide
  Antisense strand to SEQ ID NO: 2515000
gucuccgugggaaacucag

SEQ ID NO: 2515002 - RNA, 19 nt, Artificial Sequence
  Description of Artificial Sequence: Synthetic oligonucleotide
  Sense strand starting at position 3192 of SEQ ID NO: 1888155
ugaguuucccacggagacu

SEQ ID NO: 2515003 - RNA, 19 nt, Artificial Sequence
  Description of Artificial Sequence: Synthetic oligonucleotide
  Antisense strand to SEQ ID NO: 2515002
agucuccgugggaaacuca

SEQ ID NO: 2515004 - RNA, 19 nt, Artificial Sequence
  Description of Artificial Sequence: Synthetic oligonucleotide
  Sense strand starting at position 3203 of SEQ ID NO: 1888155
cggagacuuauccaugcau

SEQ ID NO: 2515005 - RNA, 19 nt, Artificial Sequence
  Description of Artificial Sequence: Synthetic oligonucleotide
  Antisense strand to SEQ ID NO: 2515004
augcauggauaagucuccg

SEQ ID NO: 2515006 - RNA, 19 nt, Artificial Sequence
  Description of Artificial Sequence: Synthetic oligonucleotide
  Sense strand starting at position 3711 of SEQ ID NO: 1888155
acgcguuucgcugauagau

SEQ ID NO: 2515007 - RNA, 19 nt, Artificial Sequence
  Description of Artificial Sequence: Synthetic oligonucleotide
  Antisense strand to SEQ ID NO: 2515006
aucuaucagcgaaacgcgu

SEQ ID NO: 2515008 - RNA, 19 nt, Artificial Sequence
  Description of Artificial Sequence: Synthetic oligonucleotide
  Sense strand starting at position 3720 of SEQ ID NO: 1888155
gcugauagaugcccaggaa

SEQ ID NO: 2515009 - RNA, 19 nt, Artificial Sequence
  Description of Artificial Sequence: Synthetic oligonucleotide
  Antisense strand to SEQ ID NO: 2515008
uuccugggcaucuaucagc

SEQ ID NO: 2515010 - RNA, 19 nt, Artificial Sequence
  Description of Artificial Sequence: Synthetic oligonucleotide
  Sense strand starting at position 56 of SEQ ID NO: 1888156
gcuuguauccuuguguguu

SEQ ID NO: 2515011 - RNA, 19 nt, Artificial Sequence
  Description of Artificial Sequence: Synthetic oligonucleotide
  Antisense strand to SEQ ID NO: 2515010
aacacacaaggauacaagc

SEQ ID NO: 2515012 - RNA, 19 nt, Artificial Sequence
  Description of Artificial Sequence: Synthetic oligonucleotide
  Sense strand starting at position 61 of SEQ ID NO: 1888156
uauccuuguguguugugua

SEQ ID NO: 2515013 - RNA, 19 nt, Artificial Sequence
  Description of Artificial Sequence: Synthetic oligonucleotide
  Antisense strand to SEQ ID NO: 2515012
uacacaacacacaaggaua

SEQ ID NO: 2515014 - RNA, 19 nt, Artificial Sequence
  Description of Artificial Sequence: Synthetic oligonucleotide
  Sense strand starting at position 95 of SEQ ID NO: 1888156
gaguccuguggccaagaau

SEQ ID NO: 2515015 - RNA, 19 nt, Artificial Sequence
  Description of Artificial Sequence: Synthetic oligonucleotide
  Antisense strand to SEQ ID NO: 2515014
auucuuggccacaggacuc

SEQ ID NO: 2515016 - RNA, 19 nt, Artificial Sequence
  Description of Artificial Sequence: Synthetic oligonucleotide
  Sense strand starting at position 98 of SEQ ID NO: 1888156
uccuguggccaagaaugau

SEQ ID NO: 2515017 - RNA, 19 nt, Artificial Sequence
  Description of Artificial Sequence: Synthetic oligonucleotide
  Antisense strand to SEQ ID NO: 2515016
aucauucuuggccacagga

SEQ ID NO: 2515018 - RNA, 19 nt, Artificial Sequence
  Description of Artificial Sequence: Synthetic oligonucleotide
  Sense strand starting at position 217 of SEQ ID NO: 1888156
uuaguauucguucuuugcu

SEQ ID NO: 2515019 - RNA, 19 nt, Artificial Sequence
  Description of Artificial Sequence: Synthetic oligonucleotide
  Antisense strand to SEQ ID NO: 2515018
agcaaagaacgaauacuaa

SEQ ID NO: 2515020 - RNA, 19 nt, Artificial Sequence
  Description of Artificial Sequence: Synthetic oligonucleotide
  Sense strand starting at position 1205 of SEQ ID NO: 1888156
uucuuaacuccuugaugga

SEQ ID NO: 2515021 - RNA, 19 nt, Artificial Sequence
  Description of Artificial Sequence: Synthetic oligonucleotide
  Antisense strand to SEQ ID NO: 2515020
uccaucaaggaguuaagaa

SEQ ID NO: 2515022 - RNA, 19 nt, Artificial Sequence
  Description of Artificial Sequence: Synthetic oligonucleotide
  Sense strand starting at position 1218 of SEQ ID NO: 1888156
gauggaguuccuggaguug

SEQ ID NO: 2515023 - RNA, 19 nt, Artificial Sequence
  Description of Artificial Sequence: Synthetic oligonucleotide
  Antisense strand to SEQ ID NO: 2515022
caacuccaggaacuccauc

SEQ ID NO: 2515024 - RNA, 19 nt, Artificial Sequence
  Description of Artificial Sequence: Synthetic oligonucleotide
  Sense strand starting at position 1318 of SEQ ID NO: 1888156
cuauguuacgugucugucu

SEQ ID NO: 2515025 - RNA, 19 nt, Artificial Sequence
  Description of Artificial Sequence: Synthetic oligonucleotide
  Antisense strand to SEQ ID NO: 2515024
agacagacacguaacauag

SEQ ID NO: 2515026 - RNA, 19 nt, Artificial Sequence
  Description of Artificial Sequence: Synthetic oligonucleotide
  Sense strand starting at position 1330 of SEQ ID NO: 1888156
ucugucucuggucacuuaa

SEQ ID NO: 2515027 - RNA, 19 nt, Artificial Sequence
  Description of Artificial Sequence: Synthetic oligonucleotide
  Antisense strand to SEQ ID NO: 2515026
uuaagugaccagagacaga

SEQ ID NO: 2515028 - RNA, 19 nt, Artificial Sequence
  Description of Artificial Sequence: Synthetic oligonucleotide
  Sense strand starting at position 1996 of SEQ ID NO: 1888156
cgagauucuaauuggcuga

SEQ ID NO: 2515029 - RNA, 19 nt, Artificial Sequence
  Description of Artificial Sequence: Synthetic oligonucleotide
  Antisense strand to SEQ ID NO: 2515028
ucagccaauuagaaucucg

SEQ ID NO: 2515030 - RNA, 19 nt, Artificial Sequence
  Description of Artificial Sequence: Synthetic oligonucleotide
  Sense strand starting at position 2213 of SEQ ID NO: 1888156
ucagaucugucucuggaag

SEQ ID NO: 2515031 - RNA, 19 nt, Artificial Sequence
  Description of Artificial Sequence: Synthetic oligonucleotide
  Antisense strand to SEQ ID NO: 2515030
cuuccagagacagaucuga

SEQ ID NO: 2515032 - RNA, 19 nt, Artificial Sequence
  Description of Artificial Sequence: Synthetic oligonucleotide
  Sense strand starting at position 2300 of SEQ ID NO: 1888156
ucuguaaggagaggucaua

SEQ ID NO: 2515033 - RNA, 19 nt, Artificial Sequence
  Description of Artificial Sequence: Synthetic oligonucleotide
  Antisense strand to SEQ ID NO: 2515032
uaugaccucuccuuacaga

SEQ ID NO: 2515034 - RNA, 19 nt, Artificial Sequence
  Description of Artificial Sequence: Synthetic oligonucleotide
  Sense strand starting at position 2311 of SEQ ID NO: 1888156
aggucauaguacuuaccua

SEQ ID NO: 2515035 - RNA, 19 nt, Artificial Sequence
  Description of Artificial Sequence: Synthetic oligonucleotide
  Antisense strand to SEQ ID NO: 2515034
uagguaaguacuaugaccu

SEQ ID NO: 2515036 - RNA, 19 nt, Artificial Sequence
  Description of Artificial Sequence: Synthetic oligonucleotide
  Sense strand starting at position 2368 of SEQ ID NO: 1888156
ggagucacuucuccacgga

SEQ ID NO: 2515037 - RNA, 19 nt, Artificial Sequence
  Description of Artificial Sequence: Synthetic oligonucleotide
  Antisense strand to SEQ ID NO: 2515036
uccguggagaagugacucc

SEQ ID NO: 2515038 - RNA, 19 nt, Artificial Sequence
  Description of Artificial Sequence: Synthetic oligonucleotide
  Sense strand starting at position 2451 of SEQ ID NO: 1888156
cuagaaguccaagguauca

SEQ ID NO: 2515039 - RNA, 19 nt, Artificial Sequence
  Description of Artificial Sequence: Synthetic oligonucleotide
  Antisense strand to SEQ ID NO: 2515038
ugauaccuuggacuucuag

SEQ ID NO: 2515040 - RNA, 19 nt, Artificial Sequence
  Description of Artificial Sequence: Synthetic oligonucleotide
  Sense strand starting at position 2645 of SEQ ID NO: 1888156
cuuuacuucuggucuagga

SEQ ID NO: 2515041 - RNA, 19 nt, Artificial Sequence
  Description of Artificial Sequence: Synthetic oligonucleotide
  Antisense strand to SEQ ID NO: 2515040
uccuagaccagaaguaaag

SEQ ID NO: 2515042 - RNA, 19 nt, Artificial Sequence
  Description of Artificial Sequence: Synthetic oligonucleotide
  Sense strand starting at position 2647 of SEQ ID NO: 1888156
uuacuucuggucuaggaca

SEQ ID NO: 2515043 - RNA, 19 nt, Artificial Sequence
  Description of Artificial Sequence: Synthetic oligonucleotide
  Antisense strand to SEQ ID NO: 2515042
uguccuagaccagaaguaa

SEQ ID NO: 2515044 - RNA, 19 nt, Artificial Sequence
  Description of Artificial Sequence: Synthetic oligonucleotide
  Sense strand starting at position 2771 of SEQ ID NO: 1888156
gaguguauacagggacauu

SEQ ID NO: 2515045 - RNA, 19 nt, Artificial Sequence
  Description of Artificial Sequence: Synthetic oligonucleotide
  Antisense strand to SEQ ID NO: 2515044
aaugucccuguauacacuc

SEQ ID NO: 2515046 - RNA, 19 nt, Artificial Sequence
  Description of Artificial Sequence: Synthetic oligonucleotide
  Sense strand starting at position 2856 of SEQ ID NO: 1888156
uguguugaucauugagaac

SEQ ID NO: 2515047 - RNA, 19 nt, Artificial Sequence
  Description of Artificial Sequence: Synthetic oligonucleotide
  Antisense strand to SEQ ID NO: 2515046
guucucaaugaucaacaca

SEQ ID NO: 2515048 - RNA, 19 nt, Artificial Sequence
  Description of Artificial Sequence: Synthetic oligonucleotide
  Sense strand starting at position 2876 of SEQ ID NO: 1888156
cguggugucugcacacgaa

SEQ ID NO: 2515049 - RNA, 19 nt, Artificial Sequence
  Description of Artificial Sequence: Synthetic oligonucleotide
  Antisense strand to SEQ ID NO: 2515048
uucgugugcagacaccacg

SEQ ID NO: 2515050 - RNA, 19 nt, Artificial Sequence
  Description of Artificial Sequence: Synthetic oligonucleotide
  Sense strand starting at position 2959 of SEQ ID NO: 1888156
gcugacugugaucauuaau

SEQ ID NO: 2515051 - RNA, 19 nt, Artificial Sequence
  Description of Artificial Sequence: Synthetic oligonucleotide
  Antisense strand to SEQ ID NO: 2515050
auuaaugaucacagucagc

SEQ ID NO: 2515052 - RNA, 19 nt, Artificial Sequence
  Description of Artificial Sequence: Synthetic oligonucleotide
  Sense strand starting at position 2962 of SEQ ID NO: 1888156
gacugugaucauuaaugug

SEQ ID NO: 2515053 - RNA, 19 nt, Artificial Sequence
  Description of Artificial Sequence: Synthetic oligonucleotide
  Antisense strand to SEQ ID NO: 2515052
cacauuaaugaucacaguc

SEQ ID NO: 2515054 - RNA, 19 nt, Artificial Sequence
  Description of Artificial Sequence: Synthetic oligonucleotide
  Sense strand starting at position 2968 of SEQ ID NO: 1888156
gaucauuaaugugccagga

SEQ ID NO: 2515055 - RNA, 19 nt, Artificial Sequence
  Description of Artificial Sequence: Synthetic oligonucleotide
  Antisense strand to SEQ ID NO: 2515054
uccuggcacauuaaugauc

SEQ ID NO: 2515056 - RNA, 19 nt, Artificial Sequence
  Description of Artificial Sequence: Synthetic oligonucleotide
  Sense strand starting at position 2996 of SEQ ID NO: 1888156
gcaggaugauccguaacaa

SEQ ID NO: 2515057 - RNA, 19 nt, Artificial Sequence
  Description of Artificial Sequence: Synthetic oligonucleotide
  Antisense strand to SEQ ID NO: 2515056
uuguuacggaucauccugc

SEQ ID NO: 2515058 - RNA, 19 nt, Artificial Sequence
  Description of Artificial Sequence: Synthetic oligonucleotide
  Sense strand starting at position 3011 of SEQ ID NO: 1888156
acaacuagguccucugaaa

SEQ ID NO: 2515059 - RNA, 19 nt, Artificial Sequence
  Description of Artificial Sequence: Synthetic oligonucleotide
  Antisense strand to SEQ ID NO: 2515058
uuucagaggaccuaguugu

SEQ ID NO: 2515060 - RNA, 19 nt, Artificial Sequence
  Description of Artificial Sequence: Synthetic oligonucleotide
  Sense strand starting at position 3030 of SEQ ID NO: 1888156
acacucagcccuggagaau

SEQ ID NO: 2515061 - RNA, 19 nt, Artificial Sequence
  Description of Artificial Sequence: Synthetic oligonucleotide
  Antisense strand to SEQ ID NO: 2515060
auucuccagggcugagugu

SEQ ID NO: 2515062 - RNA, 19 nt, Artificial Sequence
  Description of Artificial Sequence: Synthetic oligonucleotide
  Sense strand starting at position 3041 of SEQ ID NO: 1888156
uggagaaucucaccaggua

SEQ ID NO: 2515063 - RNA, 19 nt, Artificial Sequence
  Description of Artificial Sequence: Synthetic oligonucleotide
  Antisense strand to SEQ ID NO: 2515062
uaccuggugagauucucca

SEQ ID NO: 2515064 - RNA, 19 nt, Artificial Sequence
  Description of Artificial Sequence: Synthetic oligonucleotide
  Sense strand starting at position 3290 of SEQ ID NO: 1888156
gccacuguugcuguucuua

SEQ ID NO: 2515065 - RNA, 19 nt, Artificial Sequence
  Description of Artificial Sequence: Synthetic oligonucleotide
  Antisense strand to SEQ ID NO: 2515064
uaagaacagcaacaguggc

SEQ ID NO: 2515066 - RNA, 19 nt, Artificial Sequence
  Description of Artificial Sequence: Synthetic oligonucleotide
  Sense strand starting at position 3330 of SEQ ID NO: 1888156
gcacaugagacucauuggu

SEQ ID NO: 2515067 - RNA, 19 nt, Artificial Sequence
  Description of Artificial Sequence: Synthetic oligonucleotide
  Antisense strand to SEQ ID NO: 2515066
accaaugagucucaugugc

SEQ ID NO: 2515068 - RNA, 19 nt, Artificial Sequence
  Description of Artificial Sequence: Synthetic oligonucleotide
  Sense strand starting at position 3332 of SEQ ID NO: 1888156
acaugagacucauugguag

SEQ ID NO: 2515069 - RNA, 19 nt, Artificial Sequence
  Description of Artificial Sequence: Synthetic oligonucleotide
  Antisense strand to SEQ ID NO: 2515068
cuaccaaugagucucaugu

SEQ ID NO: 2515070 - RNA, 19 nt, Artificial Sequence
  Description of Artificial Sequence: Synthetic oligonucleotide
  Sense strand starting at position 3334 of SEQ ID NO: 1888156
augagacucauugguaguu

SEQ ID NO: 2515071 - RNA, 19 nt, Artificial Sequence
  Description of Artificial Sequence: Synthetic oligonucleotide
  Antisense strand to SEQ ID NO: 2515070
aacuaccaaugagucucau

SEQ ID NO: 2515072 - RNA, 19 nt, Artificial Sequence
  Description of Artificial Sequence: Synthetic oligonucleotide
  Sense strand starting at position 3335 of SEQ ID NO: 1888156
ugagacucauugguaguuu

SEQ ID NO: 2515073 - RNA, 19 nt, Artificial Sequence
  Description of Artificial Sequence: Synthetic oligonucleotide
  Antisense strand to SEQ ID NO: 2515072
aaacuaccaaugagucuca

SEQ ID NO: 2515074 - RNA, 19 nt, Artificial Sequence
  Description of Artificial Sequence: Synthetic oligonucleotide
  Sense strand starting at position 3603 of SEQ ID NO: 1888156
agcucaguucugggaaauc

SEQ ID NO: 2515075 - RNA, 19 nt, Artificial Sequence
  Description of Artificial Sequence: Synthetic oligonucleotide
  Antisense strand to SEQ ID NO: 2515074
gauuucccagaacugagcu

SEQ ID NO: 2515076 - RNA, 19 nt, Artificial Sequence
  Description of Artificial Sequence: Synthetic oligonucleotide
  Sense strand starting at position 3837 of SEQ ID NO: 1888156
ggcagcugugcugccuaaa

SEQ ID NO: 2515077 - RNA, 19 nt, Artificial Sequence
  Description of Artificial Sequence: Synthetic oligonucleotide
  Antisense strand to SEQ ID NO: 2515076
uuuaggcagcacagcugcc

SEQ ID NO: 2515078 - RNA, 19 nt, Artificial Sequence
  Description of Artificial Sequence: Synthetic oligonucleotide
  Sense strand starting at position 3838 of SEQ ID NO: 1888156
gcagcugugcugccuaaau

SEQ ID NO: 2515079 - RNA, 19 nt, Artificial Sequence
  Description of Artificial Sequence: Synthetic oligonucleotide
  Antisense strand to SEQ ID NO: 2515078
auuuaggcagcacagcugc

SEQ ID NO: 2515080 - RNA, 19 nt, Artificial Sequence
  Description of Artificial Sequence: Synthetic oligonucleotide
  Sense strand starting at position 3855 of SEQ ID NO: 1888156
auagcucuccaguaguuga

SEQ ID NO: 2515081 - RNA, 19 nt, Artificial Sequence
  Description of Artificial Sequence: Synthetic oligonucleotide
  Antisense strand to SEQ ID NO: 2515080
ucaacuacuggagagcuau

SEQ ID NO: 2515082 - RNA, 19 nt, Artificial Sequence
  Description of Artificial Sequence: Synthetic oligonucleotide
  Sense strand starting at position 3866 of SEQ ID NO: 1888156
guaguugaagugcaauaaa

SEQ ID NO: 2515083 - RNA, 19 nt, Artificial Sequence
  Description of Artificial Sequence: Synthetic oligonucleotide
  Antisense strand to SEQ ID NO: 2515082
uuuauugcacuucaacuac

SEQ ID NO: 2515084 - RNA, 19 nt, Artificial Sequence
  Description of Artificial Sequence: Synthetic oligonucleotide
  Sense strand starting at position 3920 of SEQ ID NO: 1888156
uaguguuauggaggagguu

SEQ ID NO: 2515085 - RNA, 19 nt, Artificial Sequence
  Description of Artificial Sequence: Synthetic oligonucleotide
  Antisense strand to SEQ ID NO: 2515084
aaccuccuccauaacacua

SEQ ID NO: 2515086 - RNA, 19 nt, Artificial Sequence
  Description of Artificial Sequence: Synthetic oligonucleotide
  Sense strand starting at position 3921 of SEQ ID NO: 1888156
aguguuauggaggagguuu

SEQ ID NO: 2515087 - RNA, 19 nt, Artificial Sequence
  Description of Artificial Sequence: Synthetic oligonucleotide
  Antisense strand to SEQ ID NO: 2515086
aaaccuccuccauaacacu

SEQ ID NO: 2515088 - RNA, 19 nt, Artificial Sequence
  Description of Artificial Sequence: Synthetic oligonucleotide
  Sense strand starting at position 3980 of SEQ ID NO: 1888156
gguugauuccuggagugau

SEQ ID NO: 2515089 - RNA, 19 nt, Artificial Sequence
  Description of Artificial Sequence: Synthetic oligonucleotide
  Antisense strand to SEQ ID NO: 2515088
aucacuccaggaaucaacc

SEQ ID NO: 2515090 - RNA, 19 nt, Artificial Sequence
  Description of Artificial Sequence: Synthetic oligonucleotide
  Sense strand starting at position 89 of SEQ ID NO: 1888157
aaggaaguggauugcucaa

SEQ ID NO: 2515091 - RNA, 19 nt, Artificial Sequence
  Description of Artificial Sequence: Synthetic oligonucleotide
  Antisense strand to SEQ ID NO: 2515090
uugagcaauccacuuccuu

SEQ ID NO: 2515092 - RNA, 19 nt, Artificial Sequence
  Description of Artificial Sequence: Synthetic oligonucleotide
  Sense strand starting at position 96 of SEQ ID NO: 1888157
uggauugcucaaggucagu

SEQ ID NO: 2515093 - RNA, 19 nt, Artificial Sequence
  Description of Artificial Sequence: Synthetic oligonucleotide
  Antisense strand to SEQ ID NO: 2515092
acugaccuugagcaaucca

SEQ ID NO: 2515094 - RNA, 19 nt, Artificial Sequence
  Description of Artificial Sequence: Synthetic oligonucleotide
  Sense strand starting at position 101 of SEQ ID NO: 1888157
ugcucaaggucaguuaaca

SEQ ID NO: 2515095 - RNA, 19 nt, Artificial Sequence
  Description of Artificial Sequence: Synthetic oligonucleotide
  Antisense strand to SEQ ID NO: 2515094
uguuaacugaccuugagca

SEQ ID NO: 2515096 - RNA, 19 nt, Artificial Sequence
  Description of Artificial Sequence: Synthetic oligonucleotide
  Sense strand starting at position 117 of SEQ ID NO: 1888157
acaaauuaacgcgagaugu

SEQ ID NO: 2515097 - RNA, 19 nt, Artificial Sequence
  Description of Artificial Sequence: Synthetic oligonucleotide
  Antisense strand to SEQ ID NO: 2515096
acaucucgcguuaauuugu

SEQ ID NO: 2515098 - RNA, 19 nt, Artificial Sequence
  Description of Artificial Sequence: Synthetic oligonucleotide
  Sense strand starting at position 200 of SEQ ID NO: 1888157
ugacuccuacugugaggaa

SEQ ID NO: 2515099 - RNA, 19 nt, Artificial Sequence
  Description of Artificial Sequence: Synthetic oligonucleotide
  Antisense strand to SEQ ID NO: 2515098
uuccucacaguaggaguca

SEQ ID NO: 2515100 - RNA, 19 nt, Artificial Sequence
  Description of Artificial Sequence: Synthetic oligonucleotide
  Sense strand starting at position 218 of SEQ ID NO: 1888157
agugaacaauaucuguuaa

SEQ ID NO: 2515101 - RNA, 19 nt, Artificial Sequence
  Description of Artificial Sequence: Synthetic oligonucleotide
  Antisense strand to SEQ ID NO: 2515100
uuaacagauauuguucacu

SEQ ID NO: 2515102 - RNA, 19 nt, Artificial Sequence
  Description of Artificial Sequence: Synthetic oligonucleotide
  Sense strand starting at position 616 of SEQ ID NO: 1888157
ggaaguuauuugcuugcau

SEQ ID NO: 2515103 - RNA, 19 nt, Artificial Sequence
  Description of Artificial Sequence: Synthetic oligonucleotide
  Antisense strand to SEQ ID NO: 2515102
augcaagcaaauaacuucc

SEQ ID NO: 2515104 - RNA, 19 nt, Artificial Sequence
  Description of Artificial Sequence: Synthetic oligonucleotide
  Sense strand starting at position 617 of SEQ ID NO: 1888157
gaaguuauuugcuugcaua

SEQ ID NO: 2515105 - RNA, 19 nt, Artificial Sequence
  Description of Artificial Sequence: Synthetic oligonucleotide
  Antisense strand to SEQ ID NO: 2515104
uaugcaagcaaauaacuuc

SEQ ID NO: 2515106 - RNA, 19 nt, Artificial Sequence
  Description of Artificial Sequence: Synthetic oligonucleotide
  Sense strand starting at position 620 of SEQ ID NO: 1888157
guuauuugcuugcauauca

SEQ ID NO: 2515107 - RNA, 19 nt, Artificial Sequence
  Description of Artificial Sequence: Synthetic oligonucleotide
  Antisense strand to SEQ ID NO: 2515106
ugauaugcaagcaaauaac

SEQ ID NO: 2515108 - RNA, 19 nt, Artificial Sequence
  Description of Artificial Sequence: Synthetic oligonucleotide
  Sense strand starting at position 627 of SEQ ID NO: 1888157
gcuugcauaucagcaaagu

SEQ ID NO: 2515109 - RNA, 19 nt, Artificial Sequence
  Description of Artificial Sequence: Synthetic oligonucleotide
  Antisense strand to SEQ ID NO: 2515108
acuuugcugauaugcaagc

SEQ ID NO: 2515110 - RNA, 19 nt, Artificial Sequence
  Description of Artificial Sequence: Synthetic oligonucleotide
  Sense strand starting at position 628 of SEQ ID NO: 1888157
cuugcauaucagcaaaguu

SEQ ID NO: 2515111 - RNA, 19 nt, Artificial Sequence
  Description of Artificial Sequence: Synthetic oligonucleotide
  Antisense strand to SEQ ID NO: 2515110
aacuuugcugauaugcaag

SEQ ID NO: 2515112 - RNA, 19 nt, Artificial Sequence
  Description of Artificial Sequence: Synthetic oligonucleotide
  Sense strand starting at position 806 of SEQ ID NO: 1888157
agucccauugcucaugauu

SEQ ID NO: 2515113 - RNA, 19 nt, Artificial Sequence
  Description of Artificial Sequence: Synthetic oligonucleotide
  Antisense strand to SEQ ID NO: 2515112
aaucaugagcaaugggacu

SEQ ID NO: 2515114 - RNA, 19 nt, Artificial Sequence
  Description of Artificial Sequence: Synthetic oligonucleotide
  Sense strand starting at position 851 of SEQ ID NO: 1888157
cugaaucaguggcugcaaa

SEQ ID NO: 2515115 - RNA, 19 nt, Artificial Sequence
  Description of Artificial Sequence: Synthetic oligonucleotide
  Antisense strand to SEQ ID NO: 2515114
uuugcagccacugauucag

SEQ ID NO: 2515116 - RNA, 19 nt, Artificial Sequence
  Description of Artificial Sequence: Synthetic oligonucleotide
  Sense strand starting at position 1111 of SEQ ID NO: 1888157
gggugacauugccaggaca

SEQ ID NO: 2515117 - RNA, 19 nt, Artificial Sequence
  Description of Artificial Sequence: Synthetic oligonucleotide
  Antisense strand to SEQ ID NO: 2515116
uguccuggcaaugucaccc

SEQ ID NO: 2515118 - RNA, 19 nt, Artificial Sequence
  Description of Artificial Sequence: Synthetic oligonucleotide
  Sense strand starting at position 1113 of SEQ ID NO: 1888157
gugacauugccaggacaca

SEQ ID NO: 2515119 - RNA, 19 nt, Artificial Sequence
  Description of Artificial Sequence: Synthetic oligonucleotide
  Antisense strand to SEQ ID NO: 2515118
uguguccuggcaaugucac

SEQ ID NO: 2515120 - RNA, 19 nt, Artificial Sequence
  Description of Artificial Sequence: Synthetic oligonucleotide
  Sense strand starting at position 1623 of SEQ ID NO: 1888157
cugucccugucccaagaaa

SEQ ID NO: 2515121 - RNA, 19 nt, Artificial Sequence
  Description of Artificial Sequence: Synthetic oligonucleotide
  Antisense strand to SEQ ID NO: 2515120
uuucuugggacagggacag

SEQ ID NO: 2515122 - RNA, 19 nt, Artificial Sequence
  Description of Artificial Sequence: Synthetic oligonucleotide
  Sense strand starting at position 1678 of SEQ ID NO: 1888157
gccucauaccuggguuugu

SEQ ID NO: 2515123 - RNA, 19 nt, Artificial Sequence
  Description of Artificial Sequence: Synthetic oligonucleotide
  Antisense strand to SEQ ID NO: 2515122
acaaacccagguaugaggc

SEQ ID NO: 2515124 - RNA, 19 nt, Artificial Sequence
  Description of Artificial Sequence: Synthetic oligonucleotide
  Sense strand starting at position 2349 of SEQ ID NO: 1888157
gggccauucucaucugaac

SEQ ID NO: 2515125 - RNA, 19 nt, Artificial Sequence
  Description of Artificial Sequence: Synthetic oligonucleotide
  Antisense strand to SEQ ID NO: 2515124
guucagaugagaauggccc

SEQ ID NO: 2515126 - RNA, 19 nt, Artificial Sequence
  Description of Artificial Sequence: Synthetic oligonucleotide
  Sense strand starting at position 2683 of SEQ ID NO: 1888157
auauaaguugcauguucua

SEQ ID NO: 2515127 - RNA, 19 nt, Artificial Sequence
  Description of Artificial Sequence: Synthetic oligonucleotide
  Antisense strand to SEQ ID NO: 2515126
uagaacaugcaacuuauau

SEQ ID NO: 2515128 - RNA, 19 nt, Artificial Sequence
  Description of Artificial Sequence: Synthetic oligonucleotide
  Sense strand starting at position 2735 of SEQ ID NO: 1888157
cgcugcuauuaauuauuga

SEQ ID NO: 2515129 - RNA, 19 nt, Artificial Sequence
  Description of Artificial Sequence: Synthetic oligonucleotide
  Antisense strand to SEQ ID NO: 2515128
ucaauaauuaauagcagcg

SEQ ID NO: 2515130 - RNA, 19 nt, Artificial Sequence
  Description of Artificial Sequence: Synthetic oligonucleotide
  Sense strand starting at position 2834 of SEQ ID NO: 1888157
cugcaaacucccugaggau

SEQ ID NO: 2515131 - RNA, 19 nt, Artificial Sequence
  Description of Artificial Sequence: Synthetic oligonucleotide
  Antisense strand to SEQ ID NO: 2515130
auccucagggaguuugcag

SEQ ID NO: 2515132 - RNA, 19 nt, Artificial Sequence
  Description of Artificial Sequence: Synthetic oligonucleotide
  Sense strand starting at position 2847 of SEQ ID NO: 1888157
gaggauggguccucuuuga

SEQ ID NO: 2515133 - RNA, 19 nt, Artificial Sequence
  Description of Artificial Sequence: Synthetic oligonucleotide
  Antisense strand to SEQ ID NO: 2515132
ucaaagaggacccauccuc

SEQ ID NO: 2515134 - RNA, 19 nt, Artificial Sequence
  Description of Artificial Sequence: Synthetic oligonucleotide
  Sense strand starting at position 2851 of SEQ ID NO: 1888157
auggguccucuuugagcaa

SEQ ID NO: 2515135 - RNA, 19 nt, Artificial Sequence
  Description of Artificial Sequence: Synthetic oligonucleotide
  Antisense strand to SEQ ID NO: 2515134
uugcucaaagaggacccau

SEQ ID NO: 2515136 - RNA, 19 nt, Artificial Sequence
  Description of Artificial Sequence: Synthetic oligonucleotide
  Sense strand starting at position 2852 of SEQ ID NO: 1888157
uggguccucuuugagcaaa

SEQ ID NO: 2515137 - RNA, 19 nt, Artificial Sequence
  Description of Artificial Sequence: Synthetic oligonucleotide
  Antisense strand to SEQ ID NO: 2515136
uuugcucaaagaggaccca

SEQ ID NO: 2515138 - RNA, 19 nt, Artificial Sequence
  Description of Artificial Sequence: Synthetic oligonucleotide
  Sense strand starting at position 2958 of SEQ ID NO: 1888157
acacguuaagcacaaugau

SEQ ID NO: 2515139 - RNA, 19 nt, Artificial Sequence
  Description of Artificial Sequence: Synthetic oligonucleotide
  Antisense strand to SEQ ID NO: 2515138
aucauugugcuuaacgugu

SEQ ID NO: 2515140 - RNA, 19 nt, Artificial Sequence
  Description of Artificial Sequence: Synthetic oligonucleotide
  Sense strand starting at position 2967 of SEQ ID NO: 1888157
gcacaaugaugguaaugga

SEQ ID NO: 2515141 - RNA, 19 nt, Artificial Sequence
  Description of Artificial Sequence: Synthetic oligonucleotide
  Antisense strand to SEQ ID NO: 2515140
uccauuaccaucauugugc

SEQ ID NO: 2515142 - RNA, 19 nt, Artificial Sequence
  Description of Artificial Sequence: Synthetic oligonucleotide
  Sense strand starting at position 3079 of SEQ ID NO: 1888157
ggugguaacuacucccuca

SEQ ID NO: 2515143 - RNA, 19 nt, Artificial Sequence
  Description of Artificial Sequence: Synthetic oligonucleotide
  Antisense strand to SEQ ID NO: 2515142
ugagggaguaguuaccacc

SEQ ID NO: 2515144 - RNA, 19 nt, Artificial Sequence
  Description of Artificial Sequence: Synthetic oligonucleotide
  Sense strand starting at position 3082 of SEQ ID NO: 1888157
gguaacuacucccucagaa

SEQ ID NO: 2515145 - RNA, 19 nt, Artificial Sequence
  Description of Artificial Sequence: Synthetic oligonucleotide
  Antisense strand to SEQ ID NO: 2515144
uucugagggaguaguuacc

SEQ ID NO: 2515146 - RNA, 19 nt, Artificial Sequence
  Description of Artificial Sequence: Synthetic oligonucleotide
  Sense strand starting at position 3086 of SEQ ID NO: 1888157
acuacucccucagaagguu

SEQ ID NO: 2515147 - RNA, 19 nt, Artificial Sequence
  Description of Artificial Sequence: Synthetic oligonucleotide
  Antisense strand to SEQ ID NO: 2515146
aaccuucugagggaguagu

SEQ ID NO: 2515148 - RNA, 19 nt, Artificial Sequence
  Description of Artificial Sequence: Synthetic oligonucleotide
  Sense strand starting at position 3104 of SEQ ID NO: 1888157
ugaagacuguggucagauc

SEQ ID NO: 2515149 - RNA, 19 nt, Artificial Sequence
  Description of Artificial Sequence: Synthetic oligonucleotide
  Antisense strand to SEQ ID NO: 2515148
gaucugaccacagucuuca

SEQ ID NO: 2515150 - RNA, 19 nt, Artificial Sequence
  Description of Artificial Sequence: Synthetic oligonucleotide
  Sense strand starting at position 3115 of SEQ ID NO: 1888157
gucagaucccaagacgcaa

SEQ ID NO: 2515151 - RNA, 19 nt, Artificial Sequence
  Description of Artificial Sequence: Synthetic oligonucleotide
  Antisense strand to SEQ ID NO: 2515150
uugcgucuugggaucugac

SEQ ID NO: 2515152 - RNA, 19 nt, Artificial Sequence
  Description of Artificial Sequence: Synthetic oligonucleotide
  Sense strand starting at position 3312 of SEQ ID NO: 1888157
aggcucauccugcagcaau

SEQ ID NO: 2515153 - RNA, 19 nt, Artificial Sequence
  Description of Artificial Sequence: Synthetic oligonucleotide
  Antisense strand to SEQ ID NO: 2515152
auugcugcaggaugagccu

SEQ ID NO: 2515154 - RNA, 19 nt, Artificial Sequence
  Description of Artificial Sequence: Synthetic oligonucleotide
  Sense strand starting at position 3397 of SEQ ID NO: 1888157
auccaagagcugcauaaga

SEQ ID NO: 2515155 - RNA, 19 nt, Artificial Sequence
  Description of Artificial Sequence: Synthetic oligonucleotide
  Antisense strand to SEQ ID NO: 2515154
ucuuaugcagcucuuggau

SEQ ID NO: 2515156 - RNA, 19 nt, Artificial Sequence
  Description of Artificial Sequence: Synthetic oligonucleotide
  Sense strand starting at position 3406 of SEQ ID NO: 1888157
cugcauaagaccgauaugu

SEQ ID NO: 2515157 - RNA, 19 nt, Artificial Sequence
  Description of Artificial Sequence: Synthetic oligonucleotide
  Antisense strand to SEQ ID NO: 2515156
acauaucggucuuaugcag

SEQ ID NO: 2515158 - RNA, 19 nt, Artificial Sequence
  Description of Artificial Sequence: Synthetic oligonucleotide
  Sense strand starting at position 3408 of SEQ ID NO: 1888157
gcauaagaccgauauguuc

SEQ ID NO: 2515159 - RNA, 19 nt, Artificial Sequence
  Description of Artificial Sequence: Synthetic oligonucleotide
  Antisense strand to SEQ ID NO: 2515158
gaacauaucggucuuaugc

SEQ ID NO: 2515160 - RNA, 19 nt, Artificial Sequence
  Description of Artificial Sequence: Synthetic oligonucleotide
  Sense strand starting at position 3417 of SEQ ID NO: 1888157
cgauauguuccugagcccu

SEQ ID NO: 2515161 - RNA, 19 nt, Artificial Sequence
  Description of Artificial Sequence: Synthetic oligonucleotide
  Antisense strand to SEQ ID NO: 2515160
agggcucaggaacauaucg

SEQ ID NO: 2515162 - RNA, 19 nt, Artificial Sequence
  Description of Artificial Sequence: Synthetic oligonucleotide
  Sense strand starting at position 3485 of SEQ ID NO: 1888157
ucacaacauuaggaagaaa

SEQ ID NO: 2515163 - RNA, 19 nt, Artificial Sequence
  Description of Artificial Sequence: Synthetic oligonucleotide
  Antisense strand to SEQ ID NO: 2515162
uuucuuccuaauguuguga

SEQ ID NO: 2515164 - RNA, 19 nt, Artificial Sequence
  Description of Artificial Sequence: Synthetic oligonucleotide
  Sense strand starting at position 3829 of SEQ ID NO: 1888157
gggaaauagugccuaacug

SEQ ID NO: 2515165 - RNA, 19 nt, Artificial Sequence
  Description of Artificial Sequence: Synthetic oligonucleotide
  Antisense strand to SEQ ID NO: 2515164
caguuaggcacuauuuccc

SEQ ID NO: 2515166 - RNA, 19 nt, Artificial Sequence
  Description of Artificial Sequence: Synthetic oligonucleotide
  Sense strand starting at position 3899 of SEQ ID NO: 1888157
uccuguccucagcaagaga

SEQ ID NO: 2515167 - RNA, 19 nt, Artificial Sequence
  Description of Artificial Sequence: Synthetic oligonucleotide
  Antisense strand to SEQ ID NO: 2515166
ucucuugcugaggacagga

SEQ ID NO: 2515168 - RNA, 19 nt, Artificial Sequence
  Description of Artificial Sequence: Synthetic oligonucleotide
  Sense strand starting at position 3928 of SEQ ID NO: 1888157
ugccauggugucugccaau

SEQ ID NO: 2515169 - RNA, 19 nt, Artificial Sequence
  Description of Artificial Sequence: Synthetic oligonucleotide
  Antisense strand to SEQ ID NO: 2515168
auuggcagacaccauggca

SEQ ID NO: 2515170 - RNA, 19 nt, Artificial Sequence
  Description of Artificial Sequence: Synthetic oligonucleotide
  Sense strand starting at position 101 of SEQ ID NO: 1888158
ccgugaggacuucggguuu

SEQ ID NO: 2515171 - RNA, 19 nt, Artificial Sequence
  Description of Artificial Sequence: Synthetic oligonucleotide
  Antisense strand to SEQ ID NO: 2515170
aaacccgaaguccucacgg

SEQ ID NO: 2515172 - RNA, 19 nt, Artificial Sequence
  Description of Artificial Sequence: Synthetic oligonucleotide
  Sense strand starting at position 119 of SEQ ID NO: 1888158
uguugaguguagucaggua

SEQ ID NO: 2515173 - RNA, 19 nt, Artificial Sequence
  Description of Artificial Sequence: Synthetic oligonucleotide
  Antisense strand to SEQ ID NO: 2515172
uaccugacuacacucaaca

SEQ ID NO: 2515174 - RNA, 19 nt, Artificial Sequence
  Description of Artificial Sequence: Synthetic oligonucleotide
  Sense strand starting at position 181 of SEQ ID NO: 1888158
cccucuucgucucugaaau

SEQ ID NO: 2515175 - RNA, 19 nt, Artificial Sequence
  Description of Artificial Sequence: Synthetic oligonucleotide
  Antisense strand to SEQ ID NO: 2515174
auuucagagacgaagaggg

SEQ ID NO: 2515176 - RNA, 19 nt, Artificial Sequence
  Description of Artificial Sequence: Synthetic oligonucleotide
  Sense strand starting at position 182 of SEQ ID NO: 1888158
ccucuucgucucugaaaug

SEQ ID NO: 2515177 - RNA, 19 nt, Artificial Sequence
  Description of Artificial Sequence: Synthetic oligonucleotide
  Antisense strand to SEQ ID NO: 2515176
cauuucagagacgaagagg

SEQ ID NO: 2515178 - RNA, 19 nt, Artificial Sequence
  Description of Artificial Sequence: Synthetic oligonucleotide
  Sense strand starting at position 367 of SEQ ID NO: 1888158
gauggucaccugugcuuga

SEQ ID NO: 2515179 - RNA, 19 nt, Artificial Sequence
  Description of Artificial Sequence: Synthetic oligonucleotide
  Antisense strand to SEQ ID NO: 2515178
ucaagcacaggugaccauc

SEQ ID NO: 2515180 - RNA, 19 nt, Artificial Sequence
  Description of Artificial Sequence: Synthetic oligonucleotide
  Sense strand starting at position 1988 of SEQ ID NO: 1888158
cuugacuuccuguacacuu

SEQ ID NO: 2515181 - RNA, 19 nt, Artificial Sequence
  Description of Artificial Sequence: Synthetic oligonucleotide
  Antisense strand to SEQ ID NO: 2515180
aaguguacaggaagucaag

SEQ ID NO: 2515182 - RNA, 19 nt, Artificial Sequence
  Description of Artificial Sequence: Synthetic oligonucleotide
  Sense strand starting at position 2079 of SEQ ID NO: 1888158
ugacgucucagucagagaa

SEQ ID NO: 2515183 - RNA, 19 nt, Artificial Sequence
  Description of Artificial Sequence: Synthetic oligonucleotide
  Antisense strand to SEQ ID NO: 2515182
uucucugacugagacguca

SEQ ID NO: 2515184 - RNA, 19 nt, Artificial Sequence
  Description of Artificial Sequence: Synthetic oligonucleotide
  Sense strand starting at position 2293 of SEQ ID NO: 1888158
agaagagacguuugucaaa

SEQ ID NO: 2515185 - RNA, 19 nt, Artificial Sequence
  Description of Artificial Sequence: Synthetic oligonucleotide
  Antisense strand to SEQ ID NO: 2515184
uuugacaaacgucucuucu

SEQ ID NO: 2515186 - RNA, 19 nt, Artificial Sequence
  Description of Artificial Sequence: Synthetic oligonucleotide
  Sense strand starting at position 2295 of SEQ ID NO: 1888158
aagagacguuugucaaaug

SEQ ID NO: 2515187 - RNA, 19 nt, Artificial Sequence
  Description of Artificial Sequence: Synthetic oligonucleotide
  Antisense strand to SEQ ID NO: 2515186
cauuugacaaacgucucuu

SEQ ID NO: 2515188 - RNA, 19 nt, Artificial Sequence
  Description of Artificial Sequence: Synthetic oligonucleotide
  Sense strand starting at position 2541 of SEQ ID NO: 1888158
gugacuucguguucccaaa

SEQ ID NO: 2515189 - RNA, 19 nt, Artificial Sequence
  Description of Artificial Sequence: Synthetic oligonucleotide
  Antisense strand to SEQ ID NO: 2515188
uuugggaacacgaagucac

SEQ ID NO: 2515190 - RNA, 19 nt, Artificial Sequence
  Description of Artificial Sequence: Synthetic oligonucleotide
  Sense strand starting at position 2543 of SEQ ID NO: 1888158
gacuucguguucccaaauu

SEQ ID NO: 2515191 - RNA, 19 nt, Artificial Sequence
  Description of Artificial Sequence: Synthetic oligonucleotide
  Antisense strand to SEQ ID NO: 2515190
aauuugggaacacgaaguc

SEQ ID NO: 2515192 - RNA, 19 nt, Artificial Sequence
  Description of Artificial Sequence: Synthetic oligonucleotide
  Sense strand starting at position 2574 of SEQ ID NO: 1888158
gacuucugugugcggaaca

SEQ ID NO: 2515193 - RNA, 19 nt, Artificial Sequence
  Description of Artificial Sequence: Synthetic oligonucleotide
  Antisense strand to SEQ ID NO: 2515192
uguuccgcacacagaaguc

SEQ ID NO: 2515194 - RNA, 19 nt, Artificial Sequence
  Description of Artificial Sequence: Synthetic oligonucleotide
  Sense strand starting at position 2675 of SEQ ID NO: 1888158
cugcgaaaugacugcugaa

SEQ ID NO: 2515195 - RNA, 19 nt, Artificial Sequence
  Description of Artificial Sequence: Synthetic oligonucleotide
  Antisense strand to SEQ ID NO: 2515194
uucagcagucauuucgcag

SEQ ID NO: 2515196 - RNA, 19 nt, Artificial Sequence
  Description of Artificial Sequence: Synthetic oligonucleotide
  Sense strand starting at position 2687 of SEQ ID NO: 1888158
ugcugaauacacuaucgau

SEQ ID NO: 2515197 - RNA, 19 nt, Artificial Sequence
  Description of Artificial Sequence: Synthetic oligonucleotide
  Antisense strand to SEQ ID NO: 2515196
aucgauaguguauucagca

SEQ ID NO: 2515198 - RNA, 19 nt, Artificial Sequence
  Description of Artificial Sequence: Synthetic oligonucleotide
  Sense strand starting at position 2735 of SEQ ID NO: 1888158
uguauaugccacuggguua

SEQ ID NO: 2515199 - RNA, 19 nt, Artificial Sequence
  Description of Artificial Sequence: Synthetic oligonucleotide
  Antisense strand to SEQ ID NO: 2515198
uaacccaguggcauauaca

SEQ ID NO: 2515200 - RNA, 19 nt, Artificial Sequence
  Description of Artificial Sequence: Synthetic oligonucleotide
  Sense strand starting at position 2736 of SEQ ID NO: 1888158
guauaugccacuggguuaa

SEQ ID NO: 2515201 - RNA, 19 nt, Artificial Sequence
  Description of Artificial Sequence: Synthetic oligonucleotide
  Antisense strand to SEQ ID NO: 2515200
uuaacccaguggcauauac

SEQ ID NO: 2515202 - RNA, 19 nt, Artificial Sequence
  Description of Artificial Sequence: Synthetic oligonucleotide
  Sense strand starting at position 2895 of SEQ ID NO: 1888158
cagaaugcugguugacaga

SEQ ID NO: 2515203 - RNA, 19 nt, Artificial Sequence
  Description of Artificial Sequence: Synthetic oligonucleotide
  Antisense strand to SEQ ID NO: 2515202
ucugucaaccagcauucug

SEQ ID NO: 2515204 - RNA, 19 nt, Artificial Sequence
  Description of Artificial Sequence: Synthetic oligonucleotide
  Sense strand starting at position 2922 of SEQ ID NO: 1888158
ggcugcuccuccuugggaa

SEQ ID NO: 2515205 - RNA, 19 nt, Artificial Sequence
  Description of Artificial Sequence: Synthetic oligonucleotide
  Antisense strand to SEQ ID NO: 2515204
uucccaaggaggagcagcc

SEQ ID NO: 2515206 - RNA, 19 nt, Artificial Sequence
  Description of Artificial Sequence: Synthetic oligonucleotide
  Sense strand starting at position 2939 of SEQ ID NO: 1888158
aagggcuuucugugauaug

SEQ ID NO: 2515207 - RNA, 19 nt, Artificial Sequence
  Description of Artificial Sequence: Synthetic oligonucleotide
  Antisense strand to SEQ ID NO: 2515206
cauaucacagaaagcccuu

SEQ ID NO: 2515208 - RNA, 19 nt, Artificial Sequence
  Description of Artificial Sequence: Synthetic oligonucleotide
  Sense strand starting at position 2992 of SEQ ID NO: 1888158
ccagaugugccacagggau

SEQ ID NO: 2515209 - RNA, 19 nt, Artificial Sequence
  Description of Artificial Sequence: Synthetic oligonucleotide
  Antisense strand to SEQ ID NO: 2515208
aucccuguggcacaucugg

SEQ ID NO: 2515210 - RNA, 19 nt, Artificial Sequence
  Description of Artificial Sequence: Synthetic oligonucleotide
  Sense strand starting at position 3011 of SEQ ID NO: 1888158
ccuggugaucaauggugua

SEQ ID NO: 2515211 - RNA, 19 nt, Artificial Sequence
  Description of Artificial Sequence: Synthetic oligonucleotide
  Antisense strand to SEQ ID NO: 2515210
uacaccauugaucaccagg

SEQ ID NO: 2515212 - RNA, 19 nt, Artificial Sequence
  Description of Artificial Sequence: Synthetic oligonucleotide
  Sense strand starting at position 3064 of SEQ ID NO: 1888158
cuauucugcuauucugagu

SEQ ID NO: 2515213 - RNA, 19 nt, Artificial Sequence
  Description of Artificial Sequence: Synthetic oligonucleotide
  Antisense strand to SEQ ID NO: 2515212
acucagaauagcagaauag

SEQ ID NO: 2515214 - RNA, 19 nt, Artificial Sequence
  Description of Artificial Sequence: Synthetic oligonucleotide
  Sense strand starting at position 3069 of SEQ ID NO: 1888158
cugcuauucugaguauuag

SEQ ID NO: 2515215 - RNA, 19 nt, Artificial Sequence
  Description of Artificial Sequence: Synthetic oligonucleotide
  Antisense strand to SEQ ID NO: 2515214
cuaauacucagaauagcag

SEQ ID NO: 2515216 - RNA, 19 nt, Artificial Sequence
  Description of Artificial Sequence: Synthetic oligonucleotide
  Sense strand starting at position 3070 of SEQ ID NO: 1888158
ugcuauucugaguauuaga

SEQ ID NO: 2515217 - RNA, 19 nt, Artificial Sequence
  Description of Artificial Sequence: Synthetic oligonucleotide
  Antisense strand to SEQ ID NO: 2515216
ucuaauacucagaauagca

SEQ ID NO: 2515218 - RNA, 19 nt, Artificial Sequence
  Description of Artificial Sequence: Synthetic oligonucleotide
  Sense strand starting at position 3088 of SEQ ID NO: 1888158
agaccuuuaggaggucauu

SEQ ID NO: 2515219 - RNA, 19 nt, Artificial Sequence
  Description of Artificial Sequence: Synthetic oligonucleotide
  Antisense strand to SEQ ID NO: 2515218
aaugaccuccuaaaggucu

SEQ ID NO: 2515220 - RNA, 19 nt, Artificial Sequence
  Description of Artificial Sequence: Synthetic oligonucleotide
  Sense strand starting at position 3178 of SEQ ID NO: 1888158
gaggcaaagucacagauga

SEQ ID NO: 2515221 - RNA, 19 nt, Artificial Sequence
  Description of Artificial Sequence: Synthetic oligonucleotide
  Antisense strand to SEQ ID NO: 2515220
ucaucugugacuuugccuc

SEQ ID NO: 2515222 - RNA, 19 nt, Artificial Sequence
  Description of Artificial Sequence: Synthetic oligonucleotide
  Sense strand starting at position 3202 of SEQ ID NO: 1888158
gccaguugagaccaugaca

SEQ ID NO: 2515223 - RNA, 19 nt, Artificial Sequence
  Description of Artificial Sequence: Synthetic oligonucleotide
  Antisense strand to SEQ ID NO: 2515222
ugucauggucucaacuggc

SEQ ID NO: 2515224 - RNA, 19 nt, Artificial Sequence
  Description of Artificial Sequence: Synthetic oligonucleotide
  Sense strand starting at position 3291 of SEQ ID NO: 1888158
ggugaugugccauugcguu

SEQ ID NO: 2515225 - RNA, 19 nt, Artificial Sequence
  Description of Artificial Sequence: Synthetic oligonucleotide
  Antisense strand to SEQ ID NO: 2515224
aacgcaauggcacaucacc

SEQ ID NO: 2515226 - RNA, 19 nt, Artificial Sequence
  Description of Artificial Sequence: Synthetic oligonucleotide
  Sense strand starting at position 3572 of SEQ ID NO: 1888158
guaagucucuguccuggua

SEQ ID NO: 2515227 - RNA, 19 nt, Artificial Sequence
  Description of Artificial Sequence: Synthetic oligonucleotide
  Antisense strand to SEQ ID NO: 2515226
uaccaggacagagacuuac

SEQ ID NO: 2515228 - RNA, 19 nt, Artificial Sequence
  Description of Artificial Sequence: Synthetic oligonucleotide
  Sense strand starting at position 3608 of SEQ ID NO: 1888158
auaugugucucuucuacua

SEQ ID NO: 2515229 - RNA, 19 nt, Artificial Sequence
  Description of Artificial Sequence: Synthetic oligonucleotide
  Antisense strand to SEQ ID NO: 2515228
uaguagaagagacacauau

SEQ ID NO: 2515230 - RNA, 19 nt, Artificial Sequence
  Description of Artificial Sequence: Synthetic oligonucleotide
  Sense strand starting at position 3660 of SEQ ID NO: 1888158
gggccuaauaucuaguguu

SEQ ID NO: 2515231 - RNA, 19 nt, Artificial Sequence
  Description of Artificial Sequence: Synthetic oligonucleotide
  Antisense strand to SEQ ID NO: 2515230
aacacuagauauuaggccc

SEQ ID NO: 2515232 - RNA, 19 nt, Artificial Sequence
  Description of Artificial Sequence: Synthetic oligonucleotide
  Sense strand starting at position 3670 of SEQ ID NO: 1888158
ucuaguguuaggcguauuu

SEQ ID NO: 2515233 - RNA, 19 nt, Artificial Sequence
  Description of Artificial Sequence: Synthetic oligonucleotide
  Antisense strand to SEQ ID NO: 2515232
aaauacgccuaacacuaga

SEQ ID NO: 2515234 - RNA, 19 nt, Artificial Sequence
  Description of Artificial Sequence: Synthetic oligonucleotide
  Sense strand starting at position 3672 of SEQ ID NO: 1888158
uaguguuaggcguauuuag

SEQ ID NO: 2515235 - RNA, 19 nt, Artificial Sequence
  Description of Artificial Sequence: Synthetic oligonucleotide
  Antisense strand to SEQ ID NO: 2515234
cuaaauacgccuaacacua

SEQ ID NO: 2515236 - RNA, 19 nt, Artificial Sequence
  Description of Artificial Sequence: Synthetic oligonucleotide
  Sense strand starting at position 3738 of SEQ ID NO: 1888158
aguggucuccacgggaagu

SEQ ID NO: 2515237 - RNA, 19 nt, Artificial Sequence
  Description of Artificial Sequence: Synthetic oligonucleotide
  Antisense strand to SEQ ID NO: 2515236
acuucccguggagaccacu

SEQ ID NO: 2515238 - RNA, 19 nt, Artificial Sequence
  Description of Artificial Sequence: Synthetic oligonucleotide
  Sense strand starting at position 3739 of SEQ ID NO: 1888158
guggucuccacgggaagua

SEQ ID NO: 2515239 - RNA, 19 nt, Artificial Sequence
  Description of Artificial Sequence: Synthetic oligonucleotide
  Antisense strand to SEQ ID NO: 2515238
uacuucccguggagaccac

SEQ ID NO: 2515240 - RNA, 19 nt, Artificial Sequence
  Description of Artificial Sequence: Synthetic oligonucleotide
  Sense strand starting at position 3773 of SEQ ID NO: 1888158
gggcucucaggucacuaua

SEQ ID NO: 2515241 - RNA, 19 nt, Artificial Sequence
  Description of Artificial Sequence: Synthetic oligonucleotide
  Antisense strand to SEQ ID NO: 2515240
uauagugaccugagagccc

SEQ ID NO: 2515242 - RNA, 19 nt, Artificial Sequence
  Description of Artificial Sequence: Synthetic oligonucleotide
  Sense strand starting at position 3775 of SEQ ID NO: 1888158
gcucucaggucacuauaga

SEQ ID NO: 2515243 - RNA, 19 nt, Artificial Sequence
  Description of Artificial Sequence: Synthetic oligonucleotide
  Antisense strand to SEQ ID NO: 2515242
ucuauagugaccugagagc

SEQ ID NO: 2515244 - RNA, 19 nt, Artificial Sequence
  Description of Artificial Sequence: Synthetic oligonucleotide
  Sense strand starting at position 3839 of SEQ ID NO: 1888158
ucugaaguugcccauaacu

SEQ ID NO: 2515245 - RNA, 19 nt, Artificial Sequence
  Description of Artificial Sequence: Synthetic oligonucleotide
  Antisense strand to SEQ ID NO: 2515244
aguuaugggcaacuucaga

SEQ ID NO: 2515246 - RNA, 19 nt, Artificial Sequence
  Description of Artificial Sequence: Synthetic oligonucleotide
  Sense strand starting at position 3841 of SEQ ID NO: 1888158
ugaaguugcccauaacucu

SEQ ID NO: 2515247 - RNA, 19 nt, Artificial Sequence
  Description of Artificial Sequence: Synthetic oligonucleotide
  Antisense strand to SEQ ID NO: 2515246
agaguuaugggcaacuuca

SEQ ID NO: 2515248 - RNA, 19 nt, Artificial Sequence
  Description of Artificial Sequence: Synthetic oligonucleotide
  Sense strand starting at position 3961 of SEQ ID NO: 1888158
cuccgcuuucccuagguaa

SEQ ID NO: 2515249 - RNA, 19 nt, Artificial Sequence
  Description of Artificial Sequence: Synthetic oligonucleotide
  Antisense strand to SEQ ID NO: 2515248
uuaccuagggaaagcggag

SEQ ID NO: 2515250 - RNA, 19 nt, Artificial Sequence
  Description of Artificial Sequence: Synthetic oligonucleotide
  Sense strand starting at position 495 of SEQ ID NO: 1888159
ccagcuguccuagguuaag

SEQ ID NO: 2515251 - RNA, 19 nt, Artificial Sequence
  Description of Artificial Sequence: Synthetic oligonucleotide
  Antisense strand to SEQ ID NO: 2515250
cuuaaccuaggacagcugg

SEQ ID NO: 2515252 - RNA, 19 nt, Artificial Sequence
  Description of Artificial Sequence: Synthetic oligonucleotide
  Sense strand starting at position 572 of SEQ ID NO: 1888159
cagauuaucugggugcuga

SEQ ID NO: 2515253 - RNA, 19 nt, Artificial Sequence
  Description of Artificial Sequence: Synthetic oligonucleotide
  Antisense strand to SEQ ID NO: 2515252
ucagcacccagauaaucug

SEQ ID NO: 2515254 - RNA, 19 nt, Artificial Sequence
  Description of Artificial Sequence: Synthetic oligonucleotide
  Sense strand starting at position 573 of SEQ ID NO: 1888159
agauuaucugggugcugau

SEQ ID NO: 2515255 - RNA, 19 nt, Artificial Sequence
  Description of Artificial Sequence: Synthetic oligonucleotide
  Antisense strand to SEQ ID NO: 2515254
aucagcacccagauaaucu

SEQ ID NO: 2515256 - RNA, 19 nt, Artificial Sequence
  Description of Artificial Sequence: Synthetic oligonucleotide
  Sense strand starting at position 604 of SEQ ID NO: 1888159
auuugcuagcugugaccau

SEQ ID NO: 2515257 - RNA, 19 nt, Artificial Sequence
  Description of Artificial Sequence: Synthetic oligonucleotide
  Antisense strand to SEQ ID NO: 2515256
auggucacagcuagcaaau

SEQ ID NO: 2515258 - RNA, 19 nt, Artificial Sequence
  Description of Artificial Sequence: Synthetic oligonucleotide
  Sense strand starting at position 686 of SEQ ID NO: 1888159
acgugugaguaacuaauga

SEQ ID NO: 2515259 - RNA, 19 nt, Artificial Sequence
  Description of Artificial Sequence: Synthetic oligonucleotide
  Antisense strand to SEQ ID NO: 2515258
ucauuaguuacucacacgu

SEQ ID NO: 2515260 - RNA, 19 nt, Artificial Sequence
  Description of Artificial Sequence: Synthetic oligonucleotide
  Sense strand starting at position 697 of SEQ ID NO: 1888159
acuaaugacuuuguguaaa

SEQ ID NO: 2515261 - RNA, 19 nt, Artificial Sequence
  Description of Artificial Sequence: Synthetic oligonucleotide
  Antisense strand to SEQ ID NO: 2515260
uuuacacaaagucauuagu

SEQ ID NO: 2515262 - RNA, 19 nt, Artificial Sequence
  Description of Artificial Sequence: Synthetic oligonucleotide
  Sense strand starting at position 708 of SEQ ID NO: 1888159
uguguaaagcccuggaaug

SEQ ID NO: 2515263 - RNA, 19 nt, Artificial Sequence
  Description of Artificial Sequence: Synthetic oligonucleotide
  Antisense strand to SEQ ID NO: 2515262
cauuccagggcuuuacaca

SEQ ID NO: 2515264 - RNA, 19 nt, Artificial Sequence
  Description of Artificial Sequence: Synthetic oligonucleotide
  Sense strand starting at position 806 of SEQ ID NO: 1888159
caggucauacucugaugaa

SEQ ID NO: 2515265 - RNA, 19 nt, Artificial Sequence
  Description of Artificial Sequence: Synthetic oligonucleotide
  Antisense strand to SEQ ID NO: 2515264
uucaucagaguaugaccug

SEQ ID NO: 2515266 - RNA, 19 nt, Artificial Sequence
  Description of Artificial Sequence: Synthetic oligonucleotide
  Sense strand starting at position 807 of SEQ ID NO: 1888159
aggucauacucugaugaac

SEQ ID NO: 2515267 - RNA, 19 nt, Artificial Sequence
  Description of Artificial Sequence: Synthetic oligonucleotide
  Antisense strand to SEQ ID NO: 2515266
guucaucagaguaugaccu

SEQ ID NO: 2515268 - RNA, 19 nt, Artificial Sequence
  Description of Artificial Sequence: Synthetic oligonucleotide
  Sense strand starting at position 1353 of SEQ ID NO: 1888159
ccagguuuggguggaugaa

SEQ ID NO: 2515269 - RNA, 19 nt, Artificial Sequence
  Description of Artificial Sequence: Synthetic oligonucleotide
  Antisense strand to SEQ ID NO: 2515268
uucauccacccaaaccugg

SEQ ID NO: 2515270 - RNA, 19 nt, Artificial Sequence
  Description of Artificial Sequence: Synthetic oligonucleotide
  Sense strand starting at position 1952 of SEQ ID NO: 1888159
gcuuccggguccucuaaga

SEQ ID NO: 2515271 - RNA, 19 nt, Artificial Sequence
  Description of Artificial Sequence: Synthetic oligonucleotide
  Antisense strand to SEQ ID NO: 2515270
ucuuagaggacccggaagc

SEQ ID NO: 2515272 - RNA, 19 nt, Artificial Sequence
  Description of Artificial Sequence: Synthetic oligonucleotide
  Sense strand starting at position 2040 of SEQ ID NO: 1888159
gcuccacucccuggaaaga

SEQ ID NO: 2515273 - RNA, 19 nt, Artificial Sequence
  Description of Artificial Sequence: Synthetic oligonucleotide
  Antisense strand to SEQ ID NO: 2515272
ucuuuccagggaguggagc

SEQ ID NO: 2515274 - RNA, 19 nt, Artificial Sequence
  Description of Artificial Sequence: Synthetic oligonucleotide
  Sense strand starting at position 2239 of SEQ ID NO: 1888159
cagcuugcugugugaucuu

SEQ ID NO: 2515275 - RNA, 19 nt, Artificial Sequence
  Description of Artificial Sequence: Synthetic oligonucleotide
  Antisense strand to SEQ ID NO: 2515274
aagaucacacagcaagcug

SEQ ID NO: 2515276 - RNA, 19 nt, Artificial Sequence
  Description of Artificial Sequence: Synthetic oligonucleotide
  Sense strand starting at position 2434 of SEQ ID NO: 1888159
ucgcgucaucuguucgcau

SEQ ID NO: 2515277 - RNA, 19 nt, Artificial Sequence
  Description of Artificial Sequence: Synthetic oligonucleotide
  Antisense strand to SEQ ID NO: 2515276
augcgaacagaugacgcga

SEQ ID NO: 2515278 - RNA, 19 nt, Artificial Sequence
  Description of Artificial Sequence: Synthetic oligonucleotide
  Sense strand starting at position 2484 of SEQ ID NO: 1888159
augacuacuugauuaaugu

SEQ ID NO: 2515279 - RNA, 19 nt, Artificial Sequence
  Description of Artificial Sequence: Synthetic oligonucleotide
  Antisense strand to SEQ ID NO: 2515278
acauuaaucaaguagucau

SEQ ID NO: 2515280 - RNA, 19 nt, Artificial Sequence
  Description of Artificial Sequence: Synthetic oligonucleotide
  Sense strand starting at position 2569 of SEQ ID NO: 1888159
caguaccucgccugacaaa

SEQ ID NO: 2515281 - RNA, 19 nt, Artificial Sequence
  Description of Artificial Sequence: Synthetic oligonucleotide
  Antisense strand to SEQ ID NO: 2515280
uuugucaggcgagguacug

SEQ ID NO: 2515282 - RNA, 19 nt, Artificial Sequence
  Description of Artificial Sequence: Synthetic oligonucleotide
  Sense strand starting at position 2854 of SEQ ID NO: 1888159
cgcggcuuuccuggaccaa

SEQ ID NO: 2515283 - RNA, 19 nt, Artificial Sequence
  Description of Artificial Sequence: Synthetic oligonucleotide
  Antisense strand to SEQ ID NO: 2515282
uugguccaggaaagccgcg

SEQ ID NO: 2515284 - RNA, 19 nt, Artificial Sequence
  Description of Artificial Sequence: Synthetic oligonucleotide
  Sense strand starting at position 2855 of SEQ ID NO: 1888159
gcggcuuuccuggaccaaa

SEQ ID NO: 2515285 - RNA, 19 nt, Artificial Sequence
  Description of Artificial Sequence: Synthetic oligonucleotide
  Antisense strand to SEQ ID NO: 2515284
uuugguccaggaaagccgc

SEQ ID NO: 2515286 - RNA, 19 nt, Artificial Sequence
  Description of Artificial Sequence: Synthetic oligonucleotide
  Sense strand starting at position 2914 of SEQ ID NO: 1888159
cugagaagggccuggagau

SEQ ID NO: 2515287 - RNA, 19 nt, Artificial Sequence
  Description of Artificial Sequence: Synthetic oligonucleotide
  Antisense strand to SEQ ID NO: 2515286
aucuccaggcccuucucag

SEQ ID NO: 2515288 - RNA, 19 nt, Artificial Sequence
  Description of Artificial Sequence: Synthetic oligonucleotide
  Sense strand starting at position 3029 of SEQ ID NO: 1888159
aggagagguagcugccauu

SEQ ID NO: 2515289 - RNA, 19 nt, Artificial Sequence
  Description of Artificial Sequence: Synthetic oligonucleotide
  Antisense strand to SEQ ID NO: 2515288
aauggcagcuaccucuccu

SEQ ID NO: 2515290 - RNA, 19 nt, Artificial Sequence
  Description of Artificial Sequence: Synthetic oligonucleotide
  Sense strand starting at position 3087 of SEQ ID NO: 1888159
ggccucaguuguccucauu

SEQ ID NO: 2515291 - RNA, 19 nt, Artificial Sequence
  Description of Artificial Sequence: Synthetic oligonucleotide
  Antisense strand to SEQ ID NO: 2515290
aaugaggacaacugaggcc

SEQ ID NO: 2515292 - RNA, 19 nt, Artificial Sequence
  Description of Artificial Sequence: Synthetic oligonucleotide
  Sense strand starting at position 3112 of SEQ ID NO: 1888159
gaagucauuuaguaucagu

SEQ ID NO: 2515293 - RNA, 19 nt, Artificial Sequence
  Description of Artificial Sequence: Synthetic oligonucleotide
  Antisense strand to SEQ ID NO: 2515292
acugauacuaaaugacuuc

SEQ ID NO: 2515294 - RNA, 19 nt, Artificial Sequence
  Description of Artificial Sequence: Synthetic oligonucleotide
  Sense strand starting at position 3178 of SEQ ID NO: 1888159
ggagcagagcuaugucaag

SEQ ID NO: 2515295 - RNA, 19 nt, Artificial Sequence
  Description of Artificial Sequence: Synthetic oligonucleotide
  Antisense strand to SEQ ID NO: 2515294
cuugacauagcucugcucc

SEQ ID NO: 2515296 - RNA, 19 nt, Artificial Sequence
  Description of Artificial Sequence: Synthetic oligonucleotide
  Sense strand starting at position 3295 of SEQ ID NO: 1888159
gcuacagaugccgaaauca

SEQ ID NO: 2515297 - RNA, 19 nt, Artificial Sequence
  Description of Artificial Sequence: Synthetic oligonucleotide
  Antisense strand to SEQ ID NO: 2515296
ugauuucggcaucuguagc

SEQ ID NO: 2515298 - RNA, 19 nt, Artificial Sequence
  Description of Artificial Sequence: Synthetic oligonucleotide
  Sense strand starting at position 3371 of SEQ ID NO: 1888159
aggauucuauugugaggau

SEQ ID NO: 2515299 - RNA, 19 nt, Artificial Sequence
  Description of Artificial Sequence: Synthetic oligonucleotide
  Antisense strand to SEQ ID NO: 2515298
auccucacaauagaauccu

SEQ ID NO: 2515300 - RNA, 19 nt, Artificial Sequence
  Description of Artificial Sequence: Synthetic oligonucleotide
  Sense strand starting at position 3372 of SEQ ID NO: 1888159
ggauucuauugugaggauu

SEQ ID NO: 2515301 - RNA, 19 nt, Artificial Sequence
  Description of Artificial Sequence: Synthetic oligonucleotide
  Antisense strand to SEQ ID NO: 2515300
aauccucacaauagaaucc

SEQ ID NO: 2515302 - RNA, 19 nt, Artificial Sequence
  Description of Artificial Sequence: Synthetic oligonucleotide
  Sense strand starting at position 3402 of SEQ ID NO: 1888159
uuaaauaagugguucucaa

SEQ ID NO: 2515303 - RNA, 19 nt, Artificial Sequence
  Description of Artificial Sequence: Synthetic oligonucleotide
  Antisense strand to SEQ ID NO: 2515302
uugagaaccacuuauuuaa

SEQ ID NO: 2515304 - RNA, 19 nt, Artificial Sequence
  Description of Artificial Sequence: Synthetic oligonucleotide
  Sense strand starting at position 3418 of SEQ ID NO: 1888159
caaccuugacuguguguua

SEQ ID NO: 2515305 - RNA, 19 nt, Artificial Sequence
  Description of Artificial Sequence: Synthetic oligonucleotide
  Antisense strand to SEQ ID NO: 2515304
uaacacacagucaagguug

SEQ ID NO: 2515306 - RNA, 19 nt, Artificial Sequence
  Description of Artificial Sequence: Synthetic oligonucleotide
  Sense strand starting at position 3421 of SEQ ID NO: 1888159
ccuugacuguguguuagaa

SEQ ID NO: 2515307 - RNA, 19 nt, Artificial Sequence
  Description of Artificial Sequence: Synthetic oligonucleotide
  Antisense strand to SEQ ID NO: 2515306
uucuaacacacagucaagg

SEQ ID NO: 2515308 - RNA, 19 nt, Artificial Sequence
  Description of Artificial Sequence: Synthetic oligonucleotide
  Sense strand starting at position 3434 of SEQ ID NO: 1888159
uuagaaucacugugcccua

SEQ ID NO: 2515309 - RNA, 19 nt, Artificial Sequence
  Description of Artificial Sequence: Synthetic oligonucleotide
  Antisense strand to SEQ ID NO: 2515308
uagggcacagugauucuaa

SEQ ID NO: 2515310 - RNA, 19 nt, Artificial Sequence
  Description of Artificial Sequence: Synthetic oligonucleotide
  Sense strand starting at position 3441 of SEQ ID NO: 1888159
cacugugcccuagacgaau

SEQ ID NO: 2515311 - RNA, 19 nt, Artificial Sequence
  Description of Artificial Sequence: Synthetic oligonucleotide
  Antisense strand to SEQ ID NO: 2515310
auucgucuagggcacagug

SEQ ID NO: 2515312 - RNA, 19 nt, Artificial Sequence
  Description of Artificial Sequence: Synthetic oligonucleotide
  Sense strand starting at position 3447 of SEQ ID NO: 1888159
gcccuagacgaauacugau

SEQ ID NO: 2515313 - RNA, 19 nt, Artificial Sequence
  Description of Artificial Sequence: Synthetic oligonucleotide
  Antisense strand to SEQ ID NO: 2515312
aucaguauucgucuagggc

SEQ ID NO: 2515314 - RNA, 19 nt, Artificial Sequence
  Description of Artificial Sequence: Synthetic oligonucleotide
  Sense strand starting at position 3492 of SEQ ID NO: 1888159
cucuccaguugguuguaau

SEQ ID NO: 2515315 - RNA, 19 nt, Artificial Sequence
  Description of Artificial Sequence: Synthetic oligonucleotide
  Antisense strand to SEQ ID NO: 2515314
auuacaaccaacuggagag

SEQ ID NO: 2515316 - RNA, 19 nt, Artificial Sequence
  Description of Artificial Sequence: Synthetic oligonucleotide
  Sense strand starting at position 3493 of SEQ ID NO: 1888159
ucuccaguugguuguaaug

SEQ ID NO: 2515317 - RNA, 19 nt, Artificial Sequence
  Description of Artificial Sequence: Synthetic oligonucleotide
  Antisense strand to SEQ ID NO: 2515316
cauuacaaccaacuggaga

SEQ ID NO: 2515318 - RNA, 19 nt, Artificial Sequence
  Description of Artificial Sequence: Synthetic oligonucleotide
  Sense strand starting at position 3502 of SEQ ID NO: 1888159
gguuguaauguacaaacaa

SEQ ID NO: 2515319 - RNA, 19 nt, Artificial Sequence
  Description of Artificial Sequence: Synthetic oligonucleotide
  Antisense strand to SEQ ID NO: 2515318
uuguuuguacauuacaacc

SEQ ID NO: 2515320 - RNA, 19 nt, Artificial Sequence
  Description of Artificial Sequence: Synthetic oligonucleotide
  Sense strand starting at position 3584 of SEQ ID NO: 1888159
aggaauguuuaucacauau

SEQ ID NO: 2515321 - RNA, 19 nt, Artificial Sequence
  Description of Artificial Sequence: Synthetic oligonucleotide
  Antisense strand to SEQ ID NO: 2515320
auaugugauaaacauuccu

SEQ ID NO: 2515322 - RNA, 19 nt, Artificial Sequence
  Description of Artificial Sequence: Synthetic oligonucleotide
  Sense strand starting at position 3689 of SEQ ID NO: 1888159
aguugauauaaagguuguu

SEQ ID NO: 2515323 - RNA, 19 nt, Artificial Sequence
  Description of Artificial Sequence: Synthetic oligonucleotide
  Antisense strand to SEQ ID NO: 2515322
aacaaccuuuauaucaacu

SEQ ID NO: 2515324 - RNA, 19 nt, Artificial Sequence
  Description of Artificial Sequence: Synthetic oligonucleotide
  Sense strand starting at position 3692 of SEQ ID NO: 1888159
ugauauaaagguuguugca

SEQ ID NO: 2515325 - RNA, 19 nt, Artificial Sequence
  Description of Artificial Sequence: Synthetic oligonucleotide
  Antisense strand to SEQ ID NO: 2515324
ugcaacaaccuuuauauca

SEQ ID NO: 2515326 - RNA, 19 nt, Artificial Sequence
  Description of Artificial Sequence: Synthetic oligonucleotide
  Sense strand starting at position 3694 of SEQ ID NO: 1888159
auauaaagguuguugcaga

SEQ ID NO: 2515327 - RNA, 19 nt, Artificial Sequence
  Description of Artificial Sequence: Synthetic oligonucleotide
  Antisense strand to SEQ ID NO: 2515326
ucugcaacaaccuuuauau

SEQ ID NO: 2515328 - RNA, 19 nt, Artificial Sequence
  Description of Artificial Sequence: Synthetic oligonucleotide
  Sense strand starting at position 3699 of SEQ ID NO: 1888159
aagguuguugcagaaauug

SEQ ID NO: 2515329 - RNA, 19 nt, Artificial Sequence
  Description of Artificial Sequence: Synthetic oligonucleotide
  Antisense strand to SEQ ID NO: 2515328
caauuucugcaacaaccuu

SEQ ID NO: 2515330 - RNA, 19 nt, Artificial Sequence
  Description of Artificial Sequence: Synthetic oligonucleotide
  Sense strand starting at position 13 of SEQ ID NO: 1888160
gcagcuaauaguuuguguu

SEQ ID NO: 2515331 - RNA, 19 nt, Artificial Sequence
  Description of Artificial Sequence: Synthetic oligonucleotide
  Antisense strand to SEQ ID NO: 2515330
aacacaaacuauuagcugc

SEQ ID NO: 2515332 - RNA, 19 nt, Artificial Sequence
  Description of Artificial Sequence: Synthetic oligonucleotide
  Sense strand starting at position 179 of SEQ ID NO: 1888160
ggaauagaugcugguugaa

SEQ ID NO: 2515333 - RNA, 19 nt, Artificial Sequence
  Description of Artificial Sequence: Synthetic oligonucleotide
  Antisense strand to SEQ ID NO: 2515332
uucaaccagcaucuauucc

SEQ ID NO: 2515334 - RNA, 19 nt, Artificial Sequence
  Description of Artificial Sequence: Synthetic oligonucleotide
  Sense strand starting at position 181 of SEQ ID NO: 1888160
aauagaugcugguugaacu

SEQ ID NO: 2515335 - RNA, 19 nt, Artificial Sequence
  Description of Artificial Sequence: Synthetic oligonucleotide
  Antisense strand to SEQ ID NO: 2515334
aguucaaccagcaucuauu

SEQ ID NO: 2515336 - RNA, 19 nt, Artificial Sequence
  Description of Artificial Sequence: Synthetic oligonucleotide
  Sense strand starting at position 208 of SEQ ID NO: 1888160
guaucugcuccugauggaa

SEQ ID NO: 2515337 - RNA, 19 nt, Artificial Sequence
  Description of Artificial Sequence: Synthetic oligonucleotide
  Antisense strand to SEQ ID NO: 2515336
uuccaucaggagcagauac

SEQ ID NO: 2515338 - RNA, 19 nt, Artificial Sequence
  Description of Artificial Sequence: Synthetic oligonucleotide
  Sense strand starting at position 452 of SEQ ID NO: 1888160
auggcugaguccucagaga

SEQ ID NO: 2515339 - RNA, 19 nt, Artificial Sequence
  Description of Artificial Sequence: Synthetic oligonucleotide
  Antisense strand to SEQ ID NO: 2515338
ucucugaggacucagccau

SEQ ID NO: 2515340 - RNA, 19 nt, Artificial Sequence
  Description of Artificial Sequence: Synthetic oligonucleotide
  Sense strand starting at position 710 of SEQ ID NO: 1888160
aaugucaguguagaauuau

SEQ ID NO: 2515341 - RNA, 19 nt, Artificial Sequence
  Description of Artificial Sequence: Synthetic oligonucleotide
  Antisense strand to SEQ ID NO: 2515340
auaauucuacacugacauu
